United States Patent Application Publication US 2014/0004565 A1 - sequence listing, part 42

SEQ ID NO: 965866 - RNA, 19 nt, Artificial Sequence
  Description of Artificial Sequence: Synthetic oligonucleotide
acuuccgaccuguccaggu

SEQ ID NO: 965867 - RNA, 19 nt, Artificial Sequence
  Description of Artificial Sequence: Synthetic oligonucleotide
gguggcuuucacugaaagc

SEQ ID NO: 965868 - RNA, 19 nt, Artificial Sequence
  Description of Artificial Sequence: Synthetic oligonucleotide
uggucacaucaguuggucu

SEQ ID NO: 965869 - RNA, 19 nt, Artificial Sequence
  Description of Artificial Sequence: Synthetic oligonucleotide
cagacaucuacugccucag

SEQ ID NO: 965870 - RNA, 19 nt, Artificial Sequence
  Description of Artificial Sequence: Synthetic oligonucleotide
guccacugcuuuaagcgcc

SEQ ID NO: 965871 - RNA, 19 nt, Artificial Sequence
  Description of Artificial Sequence: Synthetic oligonucleotide
uagucucggcucauaugga

SEQ ID NO: 965872 - RNA, 19 nt, Artificial Sequence
  Description of Artificial Sequence: Synthetic oligonucleotide
acacguugcggagcgcggc

SEQ ID NO: 965873 - RNA, 19 nt, Artificial Sequence
  Description of Artificial Sequence: Synthetic oligonucleotide
aacuuccgaccuguccagg

SEQ ID NO: 965874 - RNA, 19 nt, Artificial Sequence
  Description of Artificial Sequence: Synthetic oligonucleotide
cguacugagcgccagacac

SEQ ID NO: 965875 - RNA, 19 nt, Artificial Sequence
  Description of Artificial Sequence: Synthetic oligonucleotide
ugguacugucuggaaugcg

SEQ ID NO: 965876 - RNA, 19 nt, Artificial Sequence
  Description of Artificial Sequence: Synthetic oligonucleotide
ugcccauggaacuguccca

SEQ ID NO: 965877 - RNA, 19 nt, Artificial Sequence
  Description of Artificial Sequence: Synthetic oligonucleotide
cccacgaccagucaaccag

SEQ ID NO: 965878 - RNA, 19 nt, Artificial Sequence
  Description of Artificial Sequence: Synthetic oligonucleotide
guacugagcgccagacacg

SEQ ID NO: 965879 - RNA, 19 nt, Artificial Sequence
  Description of Artificial Sequence: Synthetic oligonucleotide
gcaauaggggccgucaggc

SEQ ID NO: 965880 - RNA, 19 nt, Artificial Sequence
  Description of Artificial Sequence: Synthetic oligonucleotide
gaucguggccgcugaaguc

SEQ ID NO: 965881 - RNA, 19 nt, Artificial Sequence
  Description of Artificial Sequence: Synthetic oligonucleotide
cucgaggauacagucagca

SEQ ID NO: 965882 - RNA, 19 nt, Artificial Sequence
  Description of Artificial Sequence: Synthetic oligonucleotide
caagaugcauucagcccuc

SEQ ID NO: 965883 - RNA, 19 nt, Artificial Sequence
  Description of Artificial Sequence: Synthetic oligonucleotide
gcuuuaagcgccaccgcgg

SEQ ID NO: 965884 - RNA, 19 nt, Artificial Sequence
  Description of Artificial Sequence: Synthetic oligonucleotide
ugcagguacucgcccacuc

SEQ ID NO: 965885 - RNA, 19 nt, Artificial Sequence
  Description of Artificial Sequence: Synthetic oligonucleotide
cucucaaaccaugaaugca

SEQ ID NO: 965886 - RNA, 19 nt, Artificial Sequence
  Description of Artificial Sequence: Synthetic oligonucleotide
uucagcccucaacagucuc

SEQ ID NO: 965887 - RNA, 19 nt, Artificial Sequence
  Description of Artificial Sequence: Synthetic oligonucleotide
cagaccuaagcuggcaaac

SEQ ID NO: 965888 - RNA, 19 nt, Artificial Sequence
  Description of Artificial Sequence: Synthetic oligonucleotide
cuauggggcaggagguaug

SEQ ID NO: 965889 - RNA, 19 nt, Artificial Sequence
  Description of Artificial Sequence: Synthetic oligonucleotide
cuaggugauggaggaggcg

SEQ ID NO: 965890 - RNA, 19 nt, Artificial Sequence
  Description of Artificial Sequence: Synthetic oligonucleotide
aguguagccugagcccacg

SEQ ID NO: 965891 - RNA, 19 nt, Artificial Sequence
  Description of Artificial Sequence: Synthetic oligonucleotide
cuucgcgccccgaacucgc

SEQ ID NO: 965892 - RNA, 19 nt, Artificial Sequence
  Description of Artificial Sequence: Synthetic oligonucleotide
ucggcucauauggaugugu

SEQ ID NO: 965893 - RNA, 19 nt, Artificial Sequence
  Description of Artificial Sequence: Synthetic oligonucleotide
guagcaauaggggccguca

SEQ ID NO: 965894 - RNA, 19 nt, Artificial Sequence
  Description of Artificial Sequence: Synthetic oligonucleotide
agcccacgaccagucaacc

SEQ ID NO: 965895 - RNA, 19 nt, Artificial Sequence
  Description of Artificial Sequence: Synthetic oligonucleotide
cuuccgaccuguccaggug

SEQ ID NO: 965896 - RNA, 19 nt, Artificial Sequence
  Description of Artificial Sequence: Synthetic oligonucleotide
gagcccacguacugagcgc

SEQ ID NO: 965897 - RNA, 19 nt, Artificial Sequence
  Description of Artificial Sequence: Synthetic oligonucleotide
agagcucucaagaugcauu

SEQ ID NO: 965898 - RNA, 19 nt, Artificial Sequence
  Description of Artificial Sequence: Synthetic oligonucleotide
ggaagucaagcagagugac

SEQ ID NO: 965899 - RNA, 19 nt, Artificial Sequence
  Description of Artificial Sequence: Synthetic oligonucleotide
gacacguugcggagcgcgg

SEQ ID NO: 965900 - RNA, 19 nt, Artificial Sequence
  Description of Artificial Sequence: Synthetic oligonucleotide
cacugcuuuaagcgccacc

SEQ ID NO: 965901 - RNA, 19 nt, Artificial Sequence
  Description of Artificial Sequence: Synthetic oligonucleotide
agaccuaagcuggcaaacu

SEQ ID NO: 965902 - RNA, 19 nt, Artificial Sequence
  Description of Artificial Sequence: Synthetic oligonucleotide
ccaguuaagacuagccuga

SEQ ID NO: 965903 - RNA, 19 nt, Artificial Sequence
  Description of Artificial Sequence: Synthetic oligonucleotide
ccagacacguugcggagcg

SEQ ID NO: 965904 - RNA, 19 nt, Artificial Sequence
  Description of Artificial Sequence: Synthetic oligonucleotide
uuggaccauccaucgcagc

SEQ ID NO: 965905 - RNA, 19 nt, Artificial Sequence
  Description of Artificial Sequence: Synthetic oligonucleotide
aacugccgagggcggaagu

SEQ ID NO: 965906 - RNA, 19 nt, Artificial Sequence
  Description of Artificial Sequence: Synthetic oligonucleotide
cugcuuuaagcgccaccgc

SEQ ID NO: 965907 - RNA, 19 nt, Artificial Sequence
  Description of Artificial Sequence: Synthetic oligonucleotide
acuauggggcaggagguau

SEQ ID NO: 965908 - RNA, 19 nt, Artificial Sequence
  Description of Artificial Sequence: Synthetic oligonucleotide
gucucggcucauauggaug

SEQ ID NO: 965909 - RNA, 19 nt, Artificial Sequence
  Description of Artificial Sequence: Synthetic oligonucleotide
agggcggaagucaagcaga

SEQ ID NO: 965910 - RNA, 19 nt, Artificial Sequence
  Description of Artificial Sequence: Synthetic oligonucleotide
ggcucauauggaugugugc

SEQ ID NO: 965911 - RNA, 19 nt, Artificial Sequence
  Description of Artificial Sequence: Synthetic oligonucleotide
cacuagcacaaacugccga

SEQ ID NO: 965912 - RNA, 19 nt, Artificial Sequence
  Description of Artificial Sequence: Synthetic oligonucleotide
cacguugcggagcgcggcg

SEQ ID NO: 965913 - RNA, 19 nt, Artificial Sequence
  Description of Artificial Sequence: Synthetic oligonucleotide
cagaucguggccgcugaag

SEQ ID NO: 965914 - RNA, 19 nt, Artificial Sequence
  Description of Artificial Sequence: Synthetic oligonucleotide
cacguacugagcgccagac

SEQ ID NO: 965915 - RNA, 19 nt, Artificial Sequence
  Description of Artificial Sequence: Synthetic oligonucleotide
cuggaaugcguugguacuc

SEQ ID NO: 965916 - RNA, 19 nt, Artificial Sequence
  Description of Artificial Sequence: Synthetic oligonucleotide
ggcacgacacugagcaugg

SEQ ID NO: 965917 - RNA, 19 nt, Artificial Sequence
  Description of Artificial Sequence: Synthetic oligonucleotide
acucgaggauacagucagc

SEQ ID NO: 965918 - RNA, 19 nt, Artificial Sequence
  Description of Artificial Sequence: Synthetic oligonucleotide
gcucaaaugcaaucugcuc

SEQ ID NO: 965919 - RNA, 19 nt, Artificial Sequence
  Description of Artificial Sequence: Synthetic oligonucleotide
cuggccuaggagcaaccuc

SEQ ID NO: 965920 - RNA, 19 nt, Artificial Sequence
  Description of Artificial Sequence: Synthetic oligonucleotide
uccgaccuguccagguggu

SEQ ID NO: 965921 - RNA, 19 nt, Artificial Sequence
  Description of Artificial Sequence: Synthetic oligonucleotide
uugcacguuuguccugguc

SEQ ID NO: 965922 - RNA, 19 nt, Artificial Sequence
  Description of Artificial Sequence: Synthetic oligonucleotide
ggcagauucggaaucgguc

SEQ ID NO: 965923 - RNA, 19 nt, Artificial Sequence
  Description of Artificial Sequence: Synthetic oligonucleotide
cuaagcuggcaaacucaca

SEQ ID NO: 965924 - RNA, 19 nt, Artificial Sequence
  Description of Artificial Sequence: Synthetic oligonucleotide
gcggccaaggcugaggcag

SEQ ID NO: 965925 - RNA, 19 nt, Artificial Sequence
  Description of Artificial Sequence: Synthetic oligonucleotide
gcagcaguguucuggcuac

SEQ ID NO: 965926 - RNA, 19 nt, Artificial Sequence
  Description of Artificial Sequence: Synthetic oligonucleotide
gguugaacacagacaggag

SEQ ID NO: 965927 - RNA, 19 nt, Artificial Sequence
  Description of Artificial Sequence: Synthetic oligonucleotide
acguuuguccuggucacau

SEQ ID NO: 965928 - RNA, 19 nt, Artificial Sequence
  Description of Artificial Sequence: Synthetic oligonucleotide
gcaacugauuguccccaag

SEQ ID NO: 965929 - RNA, 19 nt, Artificial Sequence
  Description of Artificial Sequence: Synthetic oligonucleotide
caacagucucagaccuaag

SEQ ID NO: 965930 - RNA, 19 nt, Artificial Sequence
  Description of Artificial Sequence: Synthetic oligonucleotide
ccuguaggcguuguagagg

SEQ ID NO: 965931 - RNA, 19 nt, Artificial Sequence
  Description of Artificial Sequence: Synthetic oligonucleotide
ucuugccggcauuggggac

SEQ ID NO: 965932 - RNA, 19 nt, Artificial Sequence
  Description of Artificial Sequence: Synthetic oligonucleotide
caacacuagcacauggcgu

SEQ ID NO: 965933 - RNA, 19 nt, Artificial Sequence
  Description of Artificial Sequence: Synthetic oligonucleotide
cacucccgaagcaggcaag

SEQ ID NO: 965934 - RNA, 19 nt, Artificial Sequence
  Description of Artificial Sequence: Synthetic oligonucleotide
acguacugagcgccagaca

SEQ ID NO: 965935 - RNA, 19 nt, Artificial Sequence
  Description of Artificial Sequence: Synthetic oligonucleotide
ucccggguaccguuucacu

SEQ ID NO: 965936 - RNA, 19 nt, Artificial Sequence
  Description of Artificial Sequence: Synthetic oligonucleotide
caguuaagacuagccugag

SEQ ID NO: 965937 - RNA, 19 nt, Artificial Sequence
  Description of Artificial Sequence: Synthetic oligonucleotide
cugagagaacauucugcaa

SEQ ID NO: 965938 - RNA, 19 nt, Artificial Sequence
  Description of Artificial Sequence: Synthetic oligonucleotide
gggaaggaggggcacuaug

SEQ ID NO: 965939 - RNA, 19 nt, Artificial Sequence
  Description of Artificial Sequence: Synthetic oligonucleotide
guggggagugggcuaggug

SEQ ID NO: 965940 - RNA, 19 nt, Artificial Sequence
  Description of Artificial Sequence: Synthetic oligonucleotide
aaggcacgacacugagcau

SEQ ID NO: 965941 - RNA, 19 nt, Artificial Sequence
  Description of Artificial Sequence: Synthetic oligonucleotide
acguugcggagcgcggcgc

SEQ ID NO: 965942 - RNA, 19 nt, Artificial Sequence
  Description of Artificial Sequence: Synthetic oligonucleotide
aggcgauagcagccccuuc

SEQ ID NO: 965943 - RNA, 19 nt, Artificial Sequence
  Description of Artificial Sequence: Synthetic oligonucleotide
uucccggguaccguuucac

SEQ ID NO: 965944 - RNA, 19 nt, Artificial Sequence
  Description of Artificial Sequence: Synthetic oligonucleotide
ccgguacacagccuuagug

SEQ ID NO: 965945 - RNA, 19 nt, Artificial Sequence
  Description of Artificial Sequence: Synthetic oligonucleotide
ggguucccaggugauaugc

SEQ ID NO: 965946 - RNA, 19 nt, Artificial Sequence
  Description of Artificial Sequence: Synthetic oligonucleotide
acccgguacacagccuuag

SEQ ID NO: 965947 - RNA, 19 nt, Artificial Sequence
  Description of Artificial Sequence: Synthetic oligonucleotide
aagaugcauucagcccuca

SEQ ID NO: 965948 - RNA, 19 nt, Artificial Sequence
  Description of Artificial Sequence: Synthetic oligonucleotide
uucuggcuacacucucaaa

SEQ ID NO: 965949 - RNA, 19 nt, Artificial Sequence
  Description of Artificial Sequence: Synthetic oligonucleotide
acucgcccacuccggaaca

SEQ ID NO: 965950 - RNA, 19 nt, Artificial Sequence
  Description of Artificial Sequence: Synthetic oligonucleotide
ggaaugcguugguacucag

SEQ ID NO: 965951 - RNA, 19 nt, Artificial Sequence
  Description of Artificial Sequence: Synthetic oligonucleotide
cguuucacucaacaucuug

SEQ ID NO: 965952 - RNA, 19 nt, Artificial Sequence
  Description of Artificial Sequence: Synthetic oligonucleotide
ccuagucucggcucauaug

SEQ ID NO: 965953 - RNA, 19 nt, Artificial Sequence
  Description of Artificial Sequence: Synthetic oligonucleotide
ccacgaccagucaaccagg

SEQ ID NO: 965954 - RNA, 19 nt, Artificial Sequence
  Description of Artificial Sequence: Synthetic oligonucleotide
ccacuagcacaaacugccg

SEQ ID NO: 965955 - RNA, 19 nt, Artificial Sequence
  Description of Artificial Sequence: Synthetic oligonucleotide
cucccgaagcaggcaagcc

SEQ ID NO: 965956 - RNA, 19 nt, Artificial Sequence
  Description of Artificial Sequence: Synthetic oligonucleotide
caaccaggggccuucacau

SEQ ID NO: 965957 - RNA, 19 nt, Artificial Sequence
  Description of Artificial Sequence: Synthetic oligonucleotide
ccgucaggcgauagcagcc

SEQ ID NO: 965958 - RNA, 19 nt, Artificial Sequence
  Description of Artificial Sequence: Synthetic oligonucleotide
ucgcgccccgaacucgcgc

SEQ ID NO: 965959 - RNA, 19 nt, Artificial Sequence
  Description of Artificial Sequence: Synthetic oligonucleotide
gugaugguacugucuggaa

SEQ ID NO: 965960 - RNA, 19 nt, Artificial Sequence
  Description of Artificial Sequence: Synthetic oligonucleotide
gcgauagcagccccuucgc

SEQ ID NO: 965961 - RNA, 19 nt, Artificial Sequence
  Description of Artificial Sequence: Synthetic oligonucleotide
cagguccgugaccuucagc

SEQ ID NO: 965962 - RNA, 19 nt, Artificial Sequence
  Description of Artificial Sequence: Synthetic oligonucleotide
agcgauggggcugcccaug

SEQ ID NO: 965963 - RNA, 19 nt, Artificial Sequence
  Description of Artificial Sequence: Synthetic oligonucleotide
gguacugucuggaaugcgu

SEQ ID NO: 965964 - RNA, 19 nt, Artificial Sequence
  Description of Artificial Sequence: Synthetic oligonucleotide
cgccauggugguaggaugg

SEQ ID NO: 965965 - RNA, 19 nt, Artificial Sequence
  Description of Artificial Sequence: Synthetic oligonucleotide
aggcagauucggaaucggu

SEQ ID NO: 965966 - RNA, 19 nt, Artificial Sequence
  Description of Artificial Sequence: Synthetic oligonucleotide
cacgacacugagcauggcu

SEQ ID NO: 965967 - RNA, 19 nt, Artificial Sequence
  Description of Artificial Sequence: Synthetic oligonucleotide
aggugauaugcaagucacu

SEQ ID NO: 965968 - RNA, 19 nt, Artificial Sequence
  Description of Artificial Sequence: Synthetic oligonucleotide
acucgcgcacgcagcugcc

SEQ ID NO: 965969 - RNA, 19 nt, Artificial Sequence
  Description of Artificial Sequence: Synthetic oligonucleotide
gaacucgcgcacgcagcug

SEQ ID NO: 965970 - RNA, 19 nt, Artificial Sequence
  Description of Artificial Sequence: Synthetic oligonucleotide
gcccauggaacugucccag

SEQ ID NO: 965971 - RNA, 19 nt, Artificial Sequence
  Description of Artificial Sequence: Synthetic oligonucleotide
agcuuugucugcagggguu

SEQ ID NO: 965972 - RNA, 19 nt, Artificial Sequence
  Description of Artificial Sequence: Synthetic oligonucleotide
ggagcaaccucuggggaga

SEQ ID NO: 965973 - RNA, 19 nt, Artificial Sequence
  Description of Artificial Sequence: Synthetic oligonucleotide
auucagcccucaacagucu

SEQ ID NO: 965974 - RNA, 19 nt, Artificial Sequence
  Description of Artificial Sequence: Synthetic oligonucleotide
ggaaacucgaggauacagu

SEQ ID NO: 965975 - RNA, 19 nt, Artificial Sequence
  Description of Artificial Sequence: Synthetic oligonucleotide
gcgauggggcugcccaugg

SEQ ID NO: 965976 - RNA, 19 nt, Artificial Sequence
  Description of Artificial Sequence: Synthetic oligonucleotide
gcgccagacacguugcgga

SEQ ID NO: 965977 - RNA, 19 nt, Artificial Sequence
  Description of Artificial Sequence: Synthetic oligonucleotide
gagcaaccucuggggagag

SEQ ID NO: 965978 - RNA, 19 nt, Artificial Sequence
  Description of Artificial Sequence: Synthetic oligonucleotide
ugcagcgauggggcugccc

SEQ ID NO: 965979 - RNA, 19 nt, Artificial Sequence
  Description of Artificial Sequence: Synthetic oligonucleotide
auaggggccgucaggcgau

SEQ ID NO: 965980 - RNA, 19 nt, Artificial Sequence
  Description of Artificial Sequence: Synthetic oligonucleotide
gccuuaguguagccugagc

SEQ ID NO: 965981 - RNA, 19 nt, Artificial Sequence
  Description of Artificial Sequence: Synthetic oligonucleotide
cccggguaccguuucacuc

SEQ ID NO: 965982 - RNA, 19 nt, Artificial Sequence
  Description of Artificial Sequence: Synthetic oligonucleotide
cacuagcacauggcguuuc

SEQ ID NO: 965983 - RNA, 19 nt, Artificial Sequence
  Description of Artificial Sequence: Synthetic oligonucleotide
ucgcccacuccggaacaga

SEQ ID NO: 965984 - RNA, 19 nt, Artificial Sequence
  Description of Artificial Sequence: Synthetic oligonucleotide
agcauggcucucacagaca

SEQ ID NO: 965985 - RNA, 19 nt, Artificial Sequence
  Description of Artificial Sequence: Synthetic oligonucleotide
uuguggaguucugcaggua

SEQ ID NO: 965986 - RNA, 19 nt, Artificial Sequence
  Description of Artificial Sequence: Synthetic oligonucleotide
caucucuagcugggccagg

SEQ ID NO: 965987 - RNA, 19 nt, Artificial Sequence
  Description of Artificial Sequence: Synthetic oligonucleotide
cccauccacuagcacaaac

SEQ ID NO: 965988 - RNA, 19 nt, Artificial Sequence
  Description of Artificial Sequence: Synthetic oligonucleotide
gcauucagcccucaacagu

SEQ ID NO: 965989 - RNA, 19 nt, Artificial Sequence
  Description of Artificial Sequence: Synthetic oligonucleotide
gcacauggcguuuccucca

SEQ ID NO: 965990 - RNA, 19 nt, Artificial Sequence
  Description of Artificial Sequence: Synthetic oligonucleotide
gaggggcacuauggggcag

SEQ ID NO: 965991 - RNA, 19 nt, Artificial Sequence
  Description of Artificial Sequence: Synthetic oligonucleotide
ggccgcugaaguccacugc

SEQ ID NO: 965992 - RNA, 19 nt, Artificial Sequence
  Description of Artificial Sequence: Synthetic oligonucleotide
ccgagggcggaagucaagc

SEQ ID NO: 965993 - RNA, 19 nt, Artificial Sequence
  Description of Artificial Sequence: Synthetic oligonucleotide
cccaugaccccugggcugg

SEQ ID NO: 965994 - RNA, 19 nt, Artificial Sequence
  Description of Artificial Sequence: Synthetic oligonucleotide
gguauccagcagaggccgg

SEQ ID NO: 965995 - RNA, 19 nt, Artificial Sequence
  Description of Artificial Sequence: Synthetic oligonucleotide
cuucagcuccccauccacu

SEQ ID NO: 965996 - RNA, 19 nt, Artificial Sequence
  Description of Artificial Sequence: Synthetic oligonucleotide
guaggauggccagcagcga

SEQ ID NO: 965997 - RNA, 19 nt, Artificial Sequence
  Description of Artificial Sequence: Synthetic oligonucleotide
cagauucggaaucgguccu

SEQ ID NO: 965998 - RNA, 19 nt, Artificial Sequence
  Description of Artificial Sequence: Synthetic oligonucleotide
gggcggaagucaagcagag

SEQ ID NO: 965999 - RNA, 19 nt, Artificial Sequence
  Description of Artificial Sequence: Synthetic oligonucleotide
ggcucaaaugcaaucugcu

SEQ ID NO: 966000 - RNA, 19 nt, Artificial Sequence
  Description of Artificial Sequence: Synthetic oligonucleotide
gguccuggcucaaaugcaa

SEQ ID NO: 966001 - RNA, 19 nt, Artificial Sequence
  Description of Artificial Sequence: Synthetic oligonucleotide
ccggguaccguuucacuca

SEQ ID NO: 966002 - RNA, 19 nt, Artificial Sequence
  Description of Artificial Sequence: Synthetic oligonucleotide
cucggcucauauggaugug

SEQ ID NO: 966003 - RNA, 19 nt, Artificial Sequence
  Description of Artificial Sequence: Synthetic oligonucleotide
cucgcccacuccggaacag

SEQ ID NO: 966004 - RNA, 19 nt, Artificial Sequence
  Description of Artificial Sequence: Synthetic oligonucleotide
cugcagggguucccaggug

SEQ ID NO: 966005 - RNA, 19 nt, Artificial Sequence
  Description of Artificial Sequence: Synthetic oligonucleotide
gguccgugaccuucagcuc

SEQ ID NO: 966006 - RNA, 19 nt, Artificial Sequence
  Description of Artificial Sequence: Synthetic oligonucleotide
ggggccgucaggcgauagc

SEQ ID NO: 966007 - RNA, 19 nt, Artificial Sequence
  Description of Artificial Sequence: Synthetic oligonucleotide
gggccgucaggcgauagca

SEQ ID NO: 966008 - RNA, 19 nt, Artificial Sequence
  Description of Artificial Sequence: Synthetic oligonucleotide
ucgguccucccaggaaguc

SEQ ID NO: 966009 - RNA, 19 nt, Artificial Sequence
  Description of Artificial Sequence: Synthetic oligonucleotide
ccucaacagucucagaccu

SEQ ID NO: 966010 - RNA, 19 nt, Artificial Sequence
  Description of Artificial Sequence: Synthetic oligonucleotide
gccgcugaaguccacugcu

SEQ ID NO: 966011 - RNA, 19 nt, Artificial Sequence
  Description of Artificial Sequence: Synthetic oligonucleotide
gguagcaauaggggccguc

SEQ ID NO: 966012 - RNA, 19 nt, Artificial Sequence
  Description of Artificial Sequence: Synthetic oligonucleotide
cuucccggguaccguuuca

SEQ ID NO: 966013 - RNA, 19 nt, Artificial Sequence
  Description of Artificial Sequence: Synthetic oligonucleotide
gcguugguacucagcacug

SEQ ID NO: 966014 - RNA, 19 nt, Artificial Sequence
  Description of Artificial Sequence: Synthetic oligonucleotide
cagaugcagcaccaucucu

SEQ ID NO: 966015 - RNA, 19 nt, Artificial Sequence
  Description of Artificial Sequence: Synthetic oligonucleotide
acacuagcacauggcguuu

SEQ ID NO: 966016 - RNA, 19 nt, Artificial Sequence
  Description of Artificial Sequence: Synthetic oligonucleotide
cuggaaacucgaggauaca

SEQ ID NO: 966017 - RNA, 19 nt, Artificial Sequence
  Description of Artificial Sequence: Synthetic oligonucleotide
ccccaggugagcucuccug

SEQ ID NO: 966018 - RNA, 19 nt, Artificial Sequence
  Description of Artificial Sequence: Synthetic oligonucleotide
gccagacacguugcggagc

SEQ ID NO: 966019 - RNA, 19 nt, Artificial Sequence
  Description of Artificial Sequence: Synthetic oligonucleotide
gcugagcccacgaccaguc

SEQ ID NO: 966020 - RNA, 19 nt, Artificial Sequence
  Description of Artificial Sequence: Synthetic oligonucleotide
ccuucgcgccccgaacucg

SEQ ID NO: 966021 - RNA, 19 nt, Artificial Sequence
  Description of Artificial Sequence: Synthetic oligonucleotide
gccccgaacucgcgcacgc

SEQ ID NO: 966022 - RNA, 19 nt, Artificial Sequence
  Description of Artificial Sequence: Synthetic oligonucleotide
ggccgucaggcgauagcag

SEQ ID NO: 966023 - RNA, 19 nt, Artificial Sequence
  Description of Artificial Sequence: Synthetic oligonucleotide
ugguagcaauaggggccgu

SEQ ID NO: 966024 - RNA, 19 nt, Artificial Sequence
  Description of Artificial Sequence: Synthetic oligonucleotide
cacguuuguccuggucaca

SEQ ID NO: 966025 - RNA, 19 nt, Artificial Sequence
  Description of Artificial Sequence: Synthetic oligonucleotide
ggacccgguacacagccuu

SEQ ID NO: 966026 - RNA, 19 nt, Artificial Sequence
  Description of Artificial Sequence: Synthetic oligonucleotide
gcacuauggggcaggaggu

SEQ ID NO: 966027 - RNA, 19 nt, Artificial Sequence
  Description of Artificial Sequence: Synthetic oligonucleotide
gcccacgaccagucaacca

SEQ ID NO: 966028 - RNA, 19 nt, Artificial Sequence
  Description of Artificial Sequence: Synthetic oligonucleotide
cgucaggcgauagcagccc

SEQ ID NO: 966029 - RNA, 19 nt, Artificial Sequence
  Description of Artificial Sequence: Synthetic oligonucleotide
cacuauggggcaggaggua

SEQ ID NO: 966030 - RNA, 19 nt, Artificial Sequence
  Description of Artificial Sequence: Synthetic oligonucleotide
gcccacuccggaacagaug

SEQ ID NO: 966031 - RNA, 19 nt, Artificial Sequence
  Description of Artificial Sequence: Synthetic oligonucleotide
gcguuuccuccacccgggc

SEQ ID NO: 966032 - RNA, 19 nt, Artificial Sequence
  Description of Artificial Sequence: Synthetic oligonucleotide
cccacguacugagcgccag

SEQ ID NO: 966033 - RNA, 19 nt, Artificial Sequence
  Description of Artificial Sequence: Synthetic oligonucleotide
gcguuguagagguuccuuu

SEQ ID NO: 966034 - RNA, 19 nt, Artificial Sequence
  Description of Artificial Sequence: Synthetic oligonucleotide
ccacccuagucucggcuca

SEQ ID NO: 966035 - RNA, 19 nt, Artificial Sequence
  Description of Artificial Sequence: Synthetic oligonucleotide
ccuccacccuagucucggc

SEQ ID NO: 966036 - RNA, 19 nt, Artificial Sequence
  Description of Artificial Sequence: Synthetic oligonucleotide
ccagguccgugaccuucag

SEQ ID NO: 966037 - RNA, 19 nt, Artificial Sequence
  Description of Artificial Sequence: Synthetic oligonucleotide
agccgccauggugguagga

SEQ ID NO: 966038 - RNA, 19 nt, Artificial Sequence
  Description of Artificial Sequence: Synthetic oligonucleotide
caggcggacccgguacaca

SEQ ID NO: 966039 - RNA, 19 nt, Artificial Sequence
  Description of Artificial Sequence: Synthetic oligonucleotide
ggcggacccgguacacagc

SEQ ID NO: 966040 - RNA, 19 nt, Artificial Sequence
  Description of Artificial Sequence: Synthetic oligonucleotide
gccccuucgcgccccgaac

SEQ ID NO: 966041 - RNA, 19 nt, Artificial Sequence
  Description of Artificial Sequence: Synthetic oligonucleotide
gggcacuauggggcaggag

SEQ ID NO: 966042 - RNA, 19 nt, Artificial Sequence
  Description of Artificial Sequence: Synthetic oligonucleotide
gccgagggcggaagucaag

SEQ ID NO: 966043 - RNA, 19 nt, Artificial Sequence
  Description of Artificial Sequence: Synthetic oligonucleotide
caucgcagcugcucccuuu

SEQ ID NO: 966044 - RNA, 19 nt, Artificial Sequence
  Description of Artificial Sequence: Synthetic oligonucleotide
cccuucgcgccccgaacuc

SEQ ID NO: 966045 - RNA, 19 nt, Artificial Sequence
  Description of Artificial Sequence: Synthetic oligonucleotide
gcaggcggacccgguacac

SEQ ID NO: 966046 - RNA, 19 nt, Artificial Sequence
  Description of Artificial Sequence: Synthetic oligonucleotide
cccagaucguggccgcuga

SEQ ID NO: 966047 - RNA, 19 nt, Artificial Sequence
  Description of Artificial Sequence: Synthetic oligonucleotide
gauggccagcagcgauaau

SEQ ID NO: 966048 - RNA, 19 nt, Artificial Sequence
  Description of Artificial Sequence: Synthetic oligonucleotide
ggccagcagcgauaauccu

SEQ ID NO: 966049 - RNA, 19 nt, Artificial Sequence
  Description of Artificial Sequence: Synthetic oligonucleotide
ccacuccggaacagaugca

SEQ ID NO: 966050 - RNA, 19 nt, Artificial Sequence
  Description of Artificial Sequence: Synthetic oligonucleotide
acugagcgccagacacguu

SEQ ID NO: 966051 - RNA, 19 nt, Artificial Sequence
  Description of Artificial Sequence: Synthetic oligonucleotide
gcacgacacugagcauggc

SEQ ID NO: 966052 - RNA, 19 nt, Artificial Sequence
  Description of Artificial Sequence: Synthetic oligonucleotide
caggcgauagcagccccuu

SEQ ID NO: 966053 - RNA, 19 nt, Artificial Sequence
  Description of Artificial Sequence: Synthetic oligonucleotide
gcuggccuaggagcaaccu

SEQ ID NO: 966054 - RNA, 19 nt, Artificial Sequence
  Description of Artificial Sequence: Synthetic oligonucleotide
ccacugcuuuaagcgccac

SEQ ID NO: 966055 - RNA, 19 nt, Artificial Sequence
  Description of Artificial Sequence: Synthetic oligonucleotide
cugcagguacucgcccacu

SEQ ID NO: 966056 - RNA, 19 nt, Artificial Sequence
  Description of Artificial Sequence: Synthetic oligonucleotide
cccuagucucggcucauau

SEQ ID NO: 966057 - RNA, 19 nt, Artificial Sequence
  Description of Artificial Sequence: Synthetic oligonucleotide
cagcgauggggcugcccau

SEQ ID NO: 966058 - RNA, 19 nt, Artificial Sequence
  Description of Artificial Sequence: Synthetic oligonucleotide
cgcgccccgaacucgcgca

SEQ ID NO: 966059 - RNA, 19 nt, Artificial Sequence
  Description of Artificial Sequence: Synthetic oligonucleotide
ggcggaagucaagcagagu

SEQ ID NO: 966060 - RNA, 19 nt, Artificial Sequence
  Description of Artificial Sequence: Synthetic oligonucleotide
cgaccuguccagguggucu

SEQ ID NO: 966061 - RNA, 19 nt, Artificial Sequence
  Description of Artificial Sequence: Synthetic oligonucleotide
gcccacguacugagcgcca

SEQ ID NO: 966062 - RNA, 19 nt, Artificial Sequence
  Description of Artificial Sequence: Synthetic oligonucleotide
ccccuucgcgccccgaacu

SEQ ID NO: 966063 - RNA, 19 nt, Artificial Sequence
  Description of Artificial Sequence: Synthetic oligonucleotide
cggguaccguuucacucaa

SEQ ID NO: 966064 - RNA, 19 nt, Artificial Sequence
  Description of Artificial Sequence: Synthetic oligonucleotide
cguugcggagcgcggcgca

SEQ ID NO: 966065 - RNA, 19 nt, Artificial Sequence
  Description of Artificial Sequence: Synthetic oligonucleotide
cccgguacacagccuuagu

SEQ ID NO: 966066 - RNA, 19 nt, Artificial Sequence
  Description of Artificial Sequence: Synthetic oligonucleotide
cgcugaaguccacugcuuu

SEQ ID NO: 966067 - RNA, 19 nt, Artificial Sequence
  Description of Artificial Sequence: Synthetic oligonucleotide
cacccuagucucggcucau

SEQ ID NO: 966068 - RNA, 19 nt, Artificial Sequence
  Description of Artificial Sequence: Synthetic oligonucleotide
cagcagcgauaauccucuu

SEQ ID NO: 966069 - RNA, 19 nt, Artificial Sequence
  Description of Artificial Sequence: Synthetic oligonucleotide
cuacugccucagccagguu

SEQ ID NO: 966070 - RNA, 19 nt, Artificial Sequence
  Description of Artificial Sequence: Synthetic oligonucleotide
ccgcugaaguccacugcuu

SEQ ID NO: 966071 - RNA, 19 nt, Artificial Sequence
  Description of Artificial Sequence: Synthetic oligonucleotide
ccguuucacucaacaucuu

SEQ ID NO: 966072 - RNA, 19 nt, Artificial Sequence
  Description of Artificial Sequence: Synthetic oligonucleotide
ccccgaacucgcgcacgca

SEQ ID NO: 966073 - RNA, 19 nt, Artificial Sequence
  Description of Artificial Sequence: Synthetic oligonucleotide
cgguccucccaggaagucu

SEQ ID NO: 966074 - RNA, 19 nt, Artificial Sequence
  Description of Artificial Sequence: Synthetic oligonucleotide
ggcagccgccaugguggua

SEQ ID NO: 966075 - RNA, 19 nt, Artificial Sequence
  Description of Artificial Sequence: Synthetic oligonucleotide
ccagucaaccaggggccuu

SEQ ID NO: 966076 - RNA, 19 nt, Artificial Sequence
  Description of Artificial Sequence: Synthetic oligonucleotide
uuagaaauugugcagacgg

SEQ ID NO: 966077 - RNA, 19 nt, Artificial Sequence
  Description of Artificial Sequence: Synthetic oligonucleotide
uguaaaacgaaacugaguc

SEQ ID NO: 966078 - RNA, 19 nt, Artificial Sequence
  Description of Artificial Sequence: Synthetic oligonucleotide
agaucugaaagacacaugg

SEQ ID NO: 966079 - RNA, 19 nt, Artificial Sequence
  Description of Artificial Sequence: Synthetic oligonucleotide
aacuacaacacacugucuc

SEQ ID NO: 966080 - RNA, 19 nt, Artificial Sequence
  Description of Artificial Sequence: Synthetic oligonucleotide
auaaucaguggaucgaugc

SEQ ID NO: 966081 - RNA, 19 nt, Artificial Sequence
  Description of Artificial Sequence: Synthetic oligonucleotide
aagagugguuuauaaauac

SEQ ID NO: 966082 - RNA, 19 nt, Artificial Sequence
  Description of Artificial Sequence: Synthetic oligonucleotide
gaagcaauaaaguuugaag

SEQ ID NO: 966083 - RNA, 19 nt, Artificial Sequence
  Description of Artificial Sequence: Synthetic oligonucleotide
aaugauacuggcucgagca

SEQ ID NO: 966084 - RNA, 19 nt, Artificial Sequence
  Description of Artificial Sequence: Synthetic oligonucleotide
agugcuuucccucaguagc

SEQ ID NO: 966085 - RNA, 19 nt, Artificial Sequence
  Description of Artificial Sequence: Synthetic oligonucleotide
uuaaggucgauuagggucg

SEQ ID NO: 966086 - RNA, 19 nt, Artificial Sequence
  Description of Artificial Sequence: Synthetic oligonucleotide
aauacuucuaaugguuugc

SEQ ID NO: 966087 - RNA, 19 nt, Artificial Sequence
  Description of Artificial Sequence: Synthetic oligonucleotide
auaaacgcaaacuccacac

SEQ ID NO: 966088 - RNA, 19 nt, Artificial Sequence
  Description of Artificial Sequence: Synthetic oligonucleotide
aaguagaauuuccauggcg

SEQ ID NO: 966089 - RNA, 19 nt, Artificial Sequence
  Description of Artificial Sequence: Synthetic oligonucleotide
ugaucacugaaguugaugc

SEQ ID NO: 966090 - RNA, 19 nt, Artificial Sequence
  Description of Artificial Sequence: Synthetic oligonucleotide
uguucaaacauaaacgcaa

SEQ ID NO: 966091 - RNA, 19 nt, Artificial Sequence
  Description of Artificial Sequence: Synthetic oligonucleotide
aaucaguggaucgaugccc

SEQ ID NO: 966092 - RNA, 19 nt, Artificial Sequence
  Description of Artificial Sequence: Synthetic oligonucleotide
cagacuuccuccuugaucc

SEQ ID NO: 966093 - RNA, 19 nt, Artificial Sequence
  Description of Artificial Sequence: Synthetic oligonucleotide
uguaugaacguaugcaugc

SEQ ID NO: 966094 - RNA, 19 nt, Artificial Sequence
  Description of Artificial Sequence: Synthetic oligonucleotide
auacaguuaucuuuguggg

SEQ ID NO: 966095 - RNA, 19 nt, Artificial Sequence
  Description of Artificial Sequence: Synthetic oligonucleotide
aaugauuaaaguguugagu

SEQ ID NO: 966096 - RNA, 19 nt, Artificial Sequence
  Description of Artificial Sequence: Synthetic oligonucleotide
uuagggucgauucugcaag

SEQ ID NO: 966097 - RNA, 19 nt, Artificial Sequence
  Description of Artificial Sequence: Synthetic oligonucleotide
guaucuaugaguacuaaag

SEQ ID NO: 966098 - RNA, 19 nt, Artificial Sequence
  Description of Artificial Sequence: Synthetic oligonucleotide
uuaguaauacagcagucac

SEQ ID NO: 966099 - RNA, 19 nt, Artificial Sequence
  Description of Artificial Sequence: Synthetic oligonucleotide
uaucuaugaguacuaaagc

SEQ ID NO: 966100 - RNA, 19 nt, Artificial Sequence
  Description of Artificial Sequence: Synthetic oligonucleotide
caaguuaaggcacuucugg

SEQ ID NO: 966101 - RNA, 19 nt, Artificial Sequence
  Description of Artificial Sequence: Synthetic oligonucleotide
aacugagucaaaaugucuc

SEQ ID NO: 966102 - RNA, 19 nt, Artificial Sequence
  Description of Artificial Sequence: Synthetic oligonucleotide
guuaaggucgauuaggguc

SEQ ID NO: 966103 - RNA, 19 nt, Artificial Sequence
  Description of Artificial Sequence: Synthetic oligonucleotide
acuguuuacaccauugcac

SEQ ID NO: 966104 - RNA, 19 nt, Artificial Sequence
  Description of Artificial Sequence: Synthetic oligonucleotide
agacgguuaagguugacag

SEQ ID NO: 966105 - RNA, 19 nt, Artificial Sequence
  Description of Artificial Sequence: Synthetic oligonucleotide
ucaaguaucuaugaguacu

SEQ ID NO: 966106 - RNA, 19 nt, Artificial Sequence
  Description of Artificial Sequence: Synthetic oligonucleotide
aucuaugaguacuaaagcu

SEQ ID NO: 966107 - RNA, 19 nt, Artificial Sequence
  Description of Artificial Sequence: Synthetic oligonucleotide
cacgcaacaaugauuaaag

SEQ ID NO: 966108 - RNA, 19 nt, Artificial Sequence
  Description of Artificial Sequence: Synthetic oligonucleotide
auaacucucaacuauuaaa

SEQ ID NO: 966109 - RNA, 19 nt, Artificial Sequence
  Description of Artificial Sequence: Synthetic oligonucleotide
cucaacuauuaaaauauac

SEQ ID NO: 966110 - RNA, 19 nt, Artificial Sequence
  Description of Artificial Sequence: Synthetic oligonucleotide
aacauaaacgcaaacucca

SEQ ID NO: 966111 - RNA, 19 nt, Artificial Sequence
  Description of Artificial Sequence: Synthetic oligonucleotide
aaaggaguccuggaaacuc

SEQ ID NO: 966112 - RNA, 19 nt, Artificial Sequence
  Description of Artificial Sequence: Synthetic oligonucleotide
aguguugauccauagccag

SEQ ID NO: 966113 - RNA, 19 nt, Artificial Sequence
  Description of Artificial Sequence: Synthetic oligonucleotide
agagaggaugugcucauac

SEQ ID NO: 966114 - RNA, 19 nt, Artificial Sequence
  Description of Artificial Sequence: Synthetic oligonucleotide
cuugaucaaggccauauac

SEQ ID NO: 966115 - RNA, 19 nt, Artificial Sequence
  Description of Artificial Sequence: Synthetic oligonucleotide
ugaacguaugcaugcaugc

SEQ ID NO: 966116 - RNA, 19 nt, Artificial Sequence
  Description of Artificial Sequence: Synthetic oligonucleotide
uugaucaaggccauauacu

SEQ ID NO: 966117 - RNA, 19 nt, Artificial Sequence
  Description of Artificial Sequence: Synthetic oligonucleotide
gacagcuuaauacaugauc

SEQ ID NO: 966118 - RNA, 19 nt, Artificial Sequence
  Description of Artificial Sequence: Synthetic oligonucleotide
guuagugcauaaucagugg

SEQ ID NO: 966119 - RNA, 19 nt, Artificial Sequence
  Description of Artificial Sequence: Synthetic oligonucleotide
acaaugauuaaaguguuga

SEQ ID NO: 966120 - RNA, 19 nt, Artificial Sequence
  Description of Artificial Sequence: Synthetic oligonucleotide
aaacgggguuccaaaagcc

SEQ ID NO: 966121 - RNA, 19 nt, Artificial Sequence
  Description of Artificial Sequence: Synthetic oligonucleotide
uuggucgacugacugaugc

SEQ ID NO: 966122 - RNA, 19 nt, Artificial Sequence
  Description of Artificial Sequence: Synthetic oligonucleotide
acugaugcgagcuuugagu

SEQ ID NO: 966123 - RNA, 19 nt, Artificial Sequence
  Description of Artificial Sequence: Synthetic oligonucleotide
gaaguugaugcggugaaag

SEQ ID NO: 966124 - RNA, 19 nt, Artificial Sequence
  Description of Artificial Sequence: Synthetic oligonucleotide
uaaugcgcacgcaacaaug

SEQ ID NO: 966125 - RNA, 19 nt, Artificial Sequence
  Description of Artificial Sequence: Synthetic oligonucleotide
ucccuuuguguuuaaugcg

SEQ ID NO: 966126 - RNA, 19 nt, Artificial Sequence
  Description of Artificial Sequence: Synthetic oligonucleotide
uguuuaaugcgcacgcaac

SEQ ID NO: 966127 - RNA, 19 nt, Artificial Sequence
  Description of Artificial Sequence: Synthetic oligonucleotide
aaugacuccgaaaugacuu

SEQ ID NO: 966128 - RNA, 19 nt, Artificial Sequence
  Description of Artificial Sequence: Synthetic oligonucleotide
caguuaaggucgauuaggg

SEQ ID NO: 966129 - RNA, 19 nt, Artificial Sequence
  Description of Artificial Sequence: Synthetic oligonucleotide
uaaucaguggaucgaugcc

SEQ ID NO: 966130 - RNA, 19 nt, Artificial Sequence
  Description of Artificial Sequence: Synthetic oligonucleotide
gaugcgagcuuugagucgg

SEQ ID NO: 966131 - RNA, 19 nt, Artificial Sequence
  Description of Artificial Sequence: Synthetic oligonucleotide
uauggggugaagguuuugg

SEQ ID NO: 966132 - RNA, 19 nt, Artificial Sequence
  Description of Artificial Sequence: Synthetic oligonucleotide
aggaaaucgggcugggagg

SEQ ID NO: 966133 - RNA, 19 nt, Artificial Sequence
  Description of Artificial Sequence: Synthetic oligonucleotide
ucuuguacguguuggccag

SEQ ID NO: 966134 - RNA, 19 nt, Artificial Sequence
  Description of Artificial Sequence: Synthetic oligonucleotide
aaggaguccuggaaacucc

SEQ ID NO: 966135 - RNA, 19 nt, Artificial Sequence
  Description of Artificial Sequence: Synthetic oligonucleotide
uugauccauagccaggcca

SEQ ID NO: 966136 - RNA, 19 nt, Artificial Sequence
  Description of Artificial Sequence: Synthetic oligonucleotide
acaguuaucuuugugggcu

SEQ ID NO: 966137 - RNA, 19 nt, Artificial Sequence
  Description of Artificial Sequence: Synthetic oligonucleotide
aaauugugcagacgguuaa

SEQ ID NO: 966138 - RNA, 19 nt, Artificial Sequence
  Description of Artificial Sequence: Synthetic oligonucleotide
aaaguguugaguguaugaa

SEQ ID NO: 966139 - RNA, 19 nt, Artificial Sequence
  Description of Artificial Sequence: Synthetic oligonucleotide
ugaguacuaaagcuuuaga

SEQ ID NO: 966140 - RNA, 19 nt, Artificial Sequence
  Description of Artificial Sequence: Synthetic oligonucleotide
caaacgggguuccaaaagc

SEQ ID NO: 966141 - RNA, 19 nt, Artificial Sequence
  Description of Artificial Sequence: Synthetic oligonucleotide
ugauuaaaguguugagugu

SEQ ID NO: 966142 - RNA, 19 nt, Artificial Sequence
  Description of Artificial Sequence: Synthetic oligonucleotide
aguagaauuuccauggcga

SEQ ID NO: 966143 - RNA, 19 nt, Artificial Sequence
  Description of Artificial Sequence: Synthetic oligonucleotide
auacuucuaaugguuugcc

SEQ ID NO: 966144 - RNA, 19 nt, Artificial Sequence
  Description of Artificial Sequence: Synthetic oligonucleotide
gaugacugcuucaugggcc

SEQ ID NO: 966145 - RNA, 19 nt, Artificial Sequence
  Description of Artificial Sequence: Synthetic oligonucleotide
uaguaauacagcagucaca

SEQ ID NO: 966146 - RNA, 19 nt, Artificial Sequence
  Description of Artificial Sequence: Synthetic oligonucleotide
gaggaugugcucauacugg

SEQ ID NO: 966147 - RNA, 19 nt, Artificial Sequence
  Description of Artificial Sequence: Synthetic oligonucleotide
cacgcuuguagacugacac

SEQ ID NO: 966148 - RNA, 19 nt, Artificial Sequence
  Description of Artificial Sequence: Synthetic oligonucleotide
acgucaaagaguguugauc

SEQ ID NO: 966149 - RNA, 19 nt, Artificial Sequence
  Description of Artificial Sequence: Synthetic oligonucleotide
cuuaauacaugaucacuga

SEQ ID NO: 966150 - RNA, 19 nt, Artificial Sequence
  Description of Artificial Sequence: Synthetic oligonucleotide
uccgaaaugacuucauauu

SEQ ID NO: 966151 - RNA, 19 nt, Artificial Sequence
  Description of Artificial Sequence: Synthetic oligonucleotide
acgguuaagguugacagcu

SEQ ID NO: 966152 - RNA, 19 nt, Artificial Sequence
  Description of Artificial Sequence: Synthetic oligonucleotide
ugggcaagcacagacaaaa

SEQ ID NO: 966153 - RNA, 19 nt, Artificial Sequence
  Description of Artificial Sequence: Synthetic oligonucleotide
ugagucggguguaauugcc

SEQ ID NO: 966154 - RNA, 19 nt, Artificial Sequence
  Description of Artificial Sequence: Synthetic oligonucleotide
acugagucaaaaugucucu

SEQ ID NO: 966155 - RNA, 19 nt, Artificial Sequence
  Description of Artificial Sequence: Synthetic oligonucleotide
guugaugcggugaaaggag

SEQ ID NO: 966156 - RNA, 19 nt, Artificial Sequence
  Description of Artificial Sequence: Synthetic oligonucleotide
ugugcagacgguuaagguu

SEQ ID NO: 966157 - RNA, 19 nt, Artificial Sequence
  Description of Artificial Sequence: Synthetic oligonucleotide
gacuguuuacaccauugca

SEQ ID NO: 966158 - RNA, 19 nt, Artificial Sequence
  Description of Artificial Sequence: Synthetic oligonucleotide
gaguguaugaacguaugca

SEQ ID NO: 966159 - RNA, 19 nt, Artificial Sequence
  Description of Artificial Sequence: Synthetic oligonucleotide
ugaugcgagcuuugagucg

SEQ ID NO: 966160 - RNA, 19 nt, Artificial Sequence
  Description of Artificial Sequence: Synthetic oligonucleotide
ucgauuagggucgauucug

SEQ ID NO: 966161 - RNA, 19 nt, Artificial Sequence
  Description of Artificial Sequence: Synthetic oligonucleotide
aguaucuaugaguacuaaa

SEQ ID NO: 966162 - RNA, 19 nt, Artificial Sequence
  Description of Artificial Sequence: Synthetic oligonucleotide
auucugcaaguuaaggcac

SEQ ID NO: 966163 - RNA, 19 nt, Artificial Sequence
  Description of Artificial Sequence: Synthetic oligonucleotide
guuaguaauacagcaguca

SEQ ID NO: 966164 - RNA, 19 nt, Artificial Sequence
  Description of Artificial Sequence: Synthetic oligonucleotide
uacaguuaucuuugugggc

SEQ ID NO: 966165 - RNA, 19 nt, Artificial Sequence
  Description of Artificial Sequence: Synthetic oligonucleotide
cuuguagacugacacagca

SEQ ID NO: 966166 - RNA, 19 nt, Artificial Sequence
  Description of Artificial Sequence: Synthetic oligonucleotide
uuaucuuugugggcugggg

SEQ ID NO: 966167 - RNA, 19 nt, Artificial Sequence
  Description of Artificial Sequence: Synthetic oligonucleotide
aauucagaucugaaagaca

SEQ ID NO: 966168 - RNA, 19 nt, Artificial Sequence
  Description of Artificial Sequence: Synthetic oligonucleotide
uguuccugguucauuccug

SEQ ID NO: 966169 - RNA, 19 nt, Artificial Sequence
  Description of Artificial Sequence: Synthetic oligonucleotide
uccacgucaaagaguguug

SEQ ID NO: 966170 - RNA, 19 nt, Artificial Sequence
  Description of Artificial Sequence: Synthetic oligonucleotide
aguugaugcggugaaagga

SEQ ID NO: 966171 - RNA, 19 nt, Artificial Sequence
  Description of Artificial Sequence: Synthetic oligonucleotide
uuaaaguguugaguguaug

SEQ ID NO: 966172 - RNA, 19 nt, Artificial Sequence
  Description of Artificial Sequence: Synthetic oligonucleotide
augaguacuaaagcuuuag

SEQ ID NO: 966173 - RNA, 19 nt, Artificial Sequence
  Description of Artificial Sequence: Synthetic oligonucleotide
aauugugcagacgguuaag

SEQ ID NO: 966174 - RNA, 19 nt, Artificial Sequence
  Description of Artificial Sequence: Synthetic oligonucleotide
gguuagugcauaaucagug

SEQ ID NO: 966175 - RNA, 19 nt, Artificial Sequence
  Description of Artificial Sequence: Synthetic oligonucleotide
gauuaaaguguugagugua

SEQ ID NO: 966176 - RNA, 19 nt, Artificial Sequence
  Description of Artificial Sequence: Synthetic oligonucleotide
gcuuaauacaugaucacug

SEQ ID NO: 966177 - RNA, 19 nt, Artificial Sequence
  Description of Artificial Sequence: Synthetic oligonucleotide
uuuaaugcgcacgcaacaa

SEQ ID NO: 966178 - RNA, 19 nt, Artificial Sequence
  Description of Artificial Sequence: Synthetic oligonucleotide
uaugaacguaugcaugcau

SEQ ID NO: 966179 - RNA, 19 nt, Artificial Sequence
  Description of Artificial Sequence: Synthetic oligonucleotide
gaugcggugaaaggagucc

SEQ ID NO: 966180 - RNA, 19 nt, Artificial Sequence
  Description of Artificial Sequence: Synthetic oligonucleotide
guagaauuuccauggcgac

SEQ ID NO: 966181 - RNA, 19 nt, Artificial Sequence
  Description of Artificial Sequence: Synthetic oligonucleotide
uuaaugcgcacgcaacaau

SEQ ID NO: 966182 - RNA, 19 nt, Artificial Sequence
  Description of Artificial Sequence: Synthetic oligonucleotide
gugcagacgguuaagguug

SEQ ID NO: 966183 - RNA, 19 nt, Artificial Sequence
  Description of Artificial Sequence: Synthetic oligonucleotide
ugggccuguucaaacauaa

SEQ ID NO: 966184 - RNA, 19 nt, Artificial Sequence
  Description of Artificial Sequence: Synthetic oligonucleotide
ugguuugcccucuccacgc

SEQ ID NO: 966185 - RNA, 19 nt, Artificial Sequence
  Description of Artificial Sequence: Synthetic oligonucleotide
uggucgacugacugaugcg

SEQ ID NO: 966186 - RNA, 19 nt, Artificial Sequence
  Description of Artificial Sequence: Synthetic oligonucleotide
gacuauaacucucaacuau

SEQ ID NO: 966187 - RNA, 19 nt, Artificial Sequence
  Description of Artificial Sequence: Synthetic oligonucleotide
gacgguuaagguugacagc

SEQ ID NO: 966188 - RNA, 19 nt, Artificial Sequence
  Description of Artificial Sequence: Synthetic oligonucleotide
uggcaauucagaucugaaa

SEQ ID NO: 966189 - RNA, 19 nt, Artificial Sequence
  Description of Artificial Sequence: Synthetic oligonucleotide
agcuuaauacaugaucacu

SEQ ID NO: 966190 - RNA, 19 nt, Artificial Sequence
  Description of Artificial Sequence: Synthetic oligonucleotide
aguuaaggucgauuagggu

SEQ ID NO: 966191 - RNA, 19 nt, Artificial Sequence
  Description of Artificial Sequence: Synthetic oligonucleotide
ugcucauacuggaauacuu

SEQ ID NO: 966192 - RNA, 19 nt, Artificial Sequence
  Description of Artificial Sequence: Synthetic oligonucleotide
cgucaaagaguguugaucc

SEQ ID NO: 966193 - RNA, 19 nt, Artificial Sequence
  Description of Artificial Sequence: Synthetic oligonucleotide
caggcguucauauggggug

SEQ ID NO: 966194 - RNA, 19 nt, Artificial Sequence
  Description of Artificial Sequence: Synthetic oligonucleotide
gaaccaccgacccgguccg

SEQ ID NO: 966195 - RNA, 19 nt, Artificial Sequence
  Description of Artificial Sequence: Synthetic oligonucleotide
ugacguggcagcuagucuu

SEQ ID NO: 966196 - RNA, 19 nt, Artificial Sequence
  Description of Artificial Sequence: Synthetic oligonucleotide
gacugaugcgagcuuugag

SEQ ID NO: 966197 - RNA, 19 nt, Artificial Sequence
  Description of Artificial Sequence: Synthetic oligonucleotide
auguaagcuuucaugagcu

SEQ ID NO: 966198 - RNA, 19 nt, Artificial Sequence
  Description of Artificial Sequence: Synthetic oligonucleotide
acauaaacgcaaacuccac

SEQ ID NO: 966199 - RNA, 19 nt, Artificial Sequence
  Description of Artificial Sequence: Synthetic oligonucleotide
uuaaggcacuucuggcugc

SEQ ID NO: 966200 - RNA, 19 nt, Artificial Sequence
  Description of Artificial Sequence: Synthetic oligonucleotide
ugacaaacgggguuccaaa

SEQ ID NO: 966201 - RNA, 19 nt, Artificial Sequence
  Description of Artificial Sequence: Synthetic oligonucleotide
acugucuuuuggcacgcug

SEQ ID NO: 966202 - RNA, 19 nt, Artificial Sequence
  Description of Artificial Sequence: Synthetic oligonucleotide
caaugauacuggcucgagc

SEQ ID NO: 966203 - RNA, 19 nt, Artificial Sequence
  Description of Artificial Sequence: Synthetic oligonucleotide
gaucaaggccauauacuug

SEQ ID NO: 966204 - RNA, 19 nt, Artificial Sequence
  Description of Artificial Sequence: Synthetic oligonucleotide
cuaaugguuugcccucucc

SEQ ID NO: 966205 - RNA, 19 nt, Artificial Sequence
  Description of Artificial Sequence: Synthetic oligonucleotide
uuaagguugacagcuuaau

SEQ ID NO: 966206 - RNA, 19 nt, Artificial Sequence
  Description of Artificial Sequence: Synthetic oligonucleotide
cuuuguguuuaaugcgcac

SEQ ID NO: 966207 - RNA, 19 nt, Artificial Sequence
  Description of Artificial Sequence: Synthetic oligonucleotide
aaugcgcacgcaacaauga

SEQ ID NO: 966208 - RNA, 19 nt, Artificial Sequence
  Description of Artificial Sequence: Synthetic oligonucleotide
ucaaugauacuggcucgag

SEQ ID NO: 966209 - RNA, 19 nt, Artificial Sequence
  Description of Artificial Sequence: Synthetic oligonucleotide
accgacccgguccggaagc

SEQ ID NO: 966210 - RNA, 19 nt, Artificial Sequence
  Description of Artificial Sequence: Synthetic oligonucleotide
uucugcaaguuaaggcacu

SEQ ID NO: 966211 - RNA, 19 nt, Artificial Sequence
  Description of Artificial Sequence: Synthetic oligonucleotide
augaacguaugcaugcaug

SEQ ID NO: 966212 - RNA, 19 nt, Artificial Sequence
  Description of Artificial Sequence: Synthetic oligonucleotide
agucggguguaauugcccu

SEQ ID NO: 966213 - RNA, 19 nt, Artificial Sequence
  Description of Artificial Sequence: Synthetic oligonucleotide
uuacaaacuuggccaggac

SEQ ID NO: 966214 - RNA, 19 nt, Artificial Sequence
  Description of Artificial Sequence: Synthetic oligonucleotide
aucaugcugauguaagcuu

SEQ ID NO: 966215 - RNA, 19 nt, Artificial Sequence
  Description of Artificial Sequence: Synthetic oligonucleotide
cauaaacgcaaacuccaca

SEQ ID NO: 966216 - RNA, 19 nt, Artificial Sequence
  Description of Artificial Sequence: Synthetic oligonucleotide
ugaugcggugaaaggaguc

SEQ ID NO: 966217 - RNA, 19 nt, Artificial Sequence
  Description of Artificial Sequence: Synthetic oligonucleotide
aucaguggaucgaugcccg

SEQ ID NO: 966218 - RNA, 19 nt, Artificial Sequence
  Description of Artificial Sequence: Synthetic oligonucleotide
agaaauugugcagacgguu

SEQ ID NO: 966219 - RNA, 19 nt, Artificial Sequence
  Description of Artificial Sequence: Synthetic oligonucleotide
caugcaugcaugggcaagc

SEQ ID NO: 966220 - RNA, 19 nt, Artificial Sequence
  Description of Artificial Sequence: Synthetic oligonucleotide
ucggguguaauugcccugc

SEQ ID NO: 966221 - RNA, 19 nt, Artificial Sequence
  Description of Artificial Sequence: Synthetic oligonucleotide
ggcaucgugguuuucuccc

SEQ ID NO: 966222 - RNA, 19 nt, Artificial Sequence
  Description of Artificial Sequence: Synthetic oligonucleotide
guaugcaugcaugcauggg

SEQ ID NO: 966223 - RNA, 19 nt, Artificial Sequence
  Description of Artificial Sequence: Synthetic oligonucleotide
aaccacaaucuuguacgug

SEQ ID NO: 966224 - RNA, 19 nt, Artificial Sequence
  Description of Artificial Sequence: Synthetic oligonucleotide
ucugacguggcagcuaguc

SEQ ID NO: 966225 - RNA, 19 nt, Artificial Sequence
  Description of Artificial Sequence: Synthetic oligonucleotide
ccgaaaugacuucauauug

SEQ ID NO: 966226 - RNA, 19 nt, Artificial Sequence
  Description of Artificial Sequence: Synthetic oligonucleotide
agacuauaacucucaacua

SEQ ID NO: 966227 - RNA, 19 nt, Artificial Sequence
  Description of Artificial Sequence: Synthetic oligonucleotide
uguuuacaccauugcacau

SEQ ID NO: 966228 - RNA, 19 nt, Artificial Sequence
  Description of Artificial Sequence: Synthetic oligonucleotide
gaugugcucauacuggaau

SEQ ID NO: 966229 - RNA, 19 nt, Artificial Sequence
  Description of Artificial Sequence: Synthetic oligonucleotide
auguaaaacgaaacugagu

SEQ ID NO: 966230 - RNA, 19 nt, Artificial Sequence
  Description of Artificial Sequence: Synthetic oligonucleotide
agcuagucuuuacaaacuu

SEQ ID NO: 966231 - RNA, 19 nt, Artificial Sequence
  Description of Artificial Sequence: Synthetic oligonucleotide
uggcagcuagucuuuacaa

SEQ ID NO: 966232 - RNA, 19 nt, Artificial Sequence
  Description of Artificial Sequence: Synthetic oligonucleotide
uguguuuaaugcgcacgca

SEQ ID NO: 966233 - RNA, 19 nt, Artificial Sequence
  Description of Artificial Sequence: Synthetic oligonucleotide
acuauaacucucaacuauu

SEQ ID NO: 966234 - RNA, 19 nt, Artificial Sequence
  Description of Artificial Sequence: Synthetic oligonucleotide
cccuuuguguuuaaugcgc

SEQ ID NO: 966235 - RNA, 19 nt, Artificial Sequence
  Description of Artificial Sequence: Synthetic oligonucleotide
guagcgcuucuucacaauc

SEQ ID NO: 966236 - RNA, 19 nt, Artificial Sequence
  Description of Artificial Sequence: Synthetic oligonucleotide
guuaucuuugugggcuggg

SEQ ID NO: 966237 - RNA, 19 nt, Artificial Sequence
  Description of Artificial Sequence: Synthetic oligonucleotide
aacgggguuccaaaagccu

SEQ ID NO: 966238 - RNA, 19 nt, Artificial Sequence
  Description of Artificial Sequence: Synthetic oligonucleotide
guguuuaaugcgcacgcaa

SEQ ID NO: 966239 - RNA, 19 nt, Artificial Sequence
  Description of Artificial Sequence: Synthetic oligonucleotide
ugcgcacgcaacaaugauu

SEQ ID NO: 966240 - RNA, 19 nt, Artificial Sequence
  Description of Artificial Sequence: Synthetic oligonucleotide
caaggauuggucaggaccu

SEQ ID NO: 966241 - RNA, 19 nt, Artificial Sequence
  Description of Artificial Sequence: Synthetic oligonucleotide
ggucgauuagggucgauuc

SEQ ID NO: 966242 - RNA, 19 nt, Artificial Sequence
  Description of Artificial Sequence: Synthetic oligonucleotide
gucaaguaucuaugaguac

SEQ ID NO: 966243 - RNA, 19 nt, Artificial Sequence
  Description of Artificial Sequence: Synthetic oligonucleotide
aaguaucuaugaguacuaa

SEQ ID NO: 966244 - RNA, 19 nt, Artificial Sequence
  Description of Artificial Sequence: Synthetic oligonucleotide
cuauaacucucaacuauua

SEQ ID NO: 966245 - RNA, 19 nt, Artificial Sequence
  Description of Artificial Sequence: Synthetic oligonucleotide
gggagguuagugcauaauc

SEQ ID NO: 966246 - RNA, 19 nt, Artificial Sequence
  Description of Artificial Sequence: Synthetic oligonucleotide
uggcaucgugguuuucucc

SEQ ID NO: 966247 - RNA, 19 nt, Artificial Sequence
  Description of Artificial Sequence: Synthetic oligonucleotide
gcaauucagaucugaaaga

SEQ ID NO: 966248 - RNA, 19 nt, Artificial Sequence
  Description of Artificial Sequence: Synthetic oligonucleotide
ggagacuauaacucucaac

SEQ ID NO: 966249 - RNA, 19 nt, Artificial Sequence
  Description of Artificial Sequence: Synthetic oligonucleotide
acgcaacaaugauuaaagu

SEQ ID NO: 966250 - RNA, 19 nt, Artificial Sequence
  Description of Artificial Sequence: Synthetic oligonucleotide
ggagguuagugcauaauca

SEQ ID NO: 966251 - RNA, 19 nt, Artificial Sequence
  Description of Artificial Sequence: Synthetic oligonucleotide
ugacagcuuaauacaugau

SEQ ID NO: 966252 - RNA, 19 nt, Artificial Sequence
  Description of Artificial Sequence: Synthetic oligonucleotide
gaguguugauccauagcca

SEQ ID NO: 966253 - RNA, 19 nt, Artificial Sequence
  Description of Artificial Sequence: Synthetic oligonucleotide
aaaacgaaacugagucaaa

SEQ ID NO: 966254 - RNA, 19 nt, Artificial Sequence
  Description of Artificial Sequence: Synthetic oligonucleotide
aggauuggucaggaccugg

SEQ ID NO: 966255 - RNA, 19 nt, Artificial Sequence
  Description of Artificial Sequence: Synthetic oligonucleotide
uuuggucgacugacugaug

SEQ ID NO: 966256 - RNA, 19 nt, Artificial Sequence
  Description of Artificial Sequence: Synthetic oligonucleotide
aaaucgggcugggagguua

SEQ ID NO: 966257 - RNA, 19 nt, Artificial Sequence
  Description of Artificial Sequence: Synthetic oligonucleotide
guugauccauagccaggcc

SEQ ID NO: 966258 - RNA, 19 nt, Artificial Sequence
  Description of Artificial Sequence: Synthetic oligonucleotide
aguucccgcucaucaacca

SEQ ID NO: 966259 - RNA, 19 nt, Artificial Sequence
  Description of Artificial Sequence: Synthetic oligonucleotide
gaacguaugcaugcaugca

SEQ ID NO: 966260 - RNA, 19 nt, Artificial Sequence
  Description of Artificial Sequence: Synthetic oligonucleotide
gagucggguguaauugccc

SEQ ID NO: 966261 - RNA, 19 nt, Artificial Sequence
  Description of Artificial Sequence: Synthetic oligonucleotide
acgcuuguagacugacaca

SEQ ID NO: 966262 - RNA, 19 nt, Artificial Sequence
  Description of Artificial Sequence: Synthetic oligonucleotide
uucuaaugguuugcccucu

SEQ ID NO: 966263 - RNA, 19 nt, Artificial Sequence
  Description of Artificial Sequence: Synthetic oligonucleotide
ggugaaaggaguccuggaa

SEQ ID NO: 966264 - RNA, 19 nt, Artificial Sequence
  Description of Artificial Sequence: Synthetic oligonucleotide
aaggauuggucaggaccug

SEQ ID NO: 966265 - RNA, 19 nt, Artificial Sequence
  Description of Artificial Sequence: Synthetic oligonucleotide
cuaugaguacuaaagcuuu

SEQ ID NO: 966266 - RNA, 19 nt, Artificial Sequence
  Description of Artificial Sequence: Synthetic oligonucleotide
gucaaagaguguugaucca

SEQ ID NO: 966267 - RNA, 19 nt, Artificial Sequence
  Description of Artificial Sequence: Synthetic oligonucleotide
caccuuggagacuauaacu

SEQ ID NO: 966268 - RNA, 19 nt, Artificial Sequence
  Description of Artificial Sequence: Synthetic oligonucleotide
gaugcccgcuuccaagcuc

SEQ ID NO: 966269 - RNA, 19 nt, Artificial Sequence
  Description of Artificial Sequence: Synthetic oligonucleotide
aguggaucgaugcccgcuu

SEQ ID NO: 966270 - RNA, 19 nt, Artificial Sequence
  Description of Artificial Sequence: Synthetic oligonucleotide
guucauuccugcaauuucu

SEQ ID NO: 966271 - RNA, 19 nt, Artificial Sequence
  Description of Artificial Sequence: Synthetic oligonucleotide
caguuaucuuugugggcug

SEQ ID NO: 966272 - RNA, 19 nt, Artificial Sequence
  Description of Artificial Sequence: Synthetic oligonucleotide
ugacugaugcgagcuuuga

SEQ ID NO: 966273 - RNA, 19 nt, Artificial Sequence
  Description of Artificial Sequence: Synthetic oligonucleotide
uacaacacacugucuccuu

SEQ ID NO: 966274 - RNA, 19 nt, Artificial Sequence
  Description of Artificial Sequence: Synthetic oligonucleotide
cuccgaaaugacuucauau

SEQ ID NO: 966275 - RNA, 19 nt, Artificial Sequence
  Description of Artificial Sequence: Synthetic oligonucleotide
aaucgggcugggagguuag

SEQ ID NO: 966276 - RNA, 19 nt, Artificial Sequence
  Description of Artificial Sequence: Synthetic oligonucleotide
gcuagucuuuacaaacuug

SEQ ID NO: 966277 - RNA, 19 nt, Artificial Sequence
  Description of Artificial Sequence: Synthetic oligonucleotide
gucgacugacugaugcgag

SEQ ID NO: 966278 - RNA, 19 nt, Artificial Sequence
  Description of Artificial Sequence: Synthetic oligonucleotide
ucaguggaucgaugcccgc

SEQ ID NO: 966279 - RNA, 19 nt, Artificial Sequence
  Description of Artificial Sequence: Synthetic oligonucleotide
gcacaguuaaggucgauua

SEQ ID NO: 966280 - RNA, 19 nt, Artificial Sequence
  Description of Artificial Sequence: Synthetic oligonucleotide
accaccuuggagacuauaa

SEQ ID NO: 966281 - RNA, 19 nt, Artificial Sequence
  Description of Artificial Sequence: Synthetic oligonucleotide
uagggucgauucugcaagu

SEQ ID NO: 966282 - RNA, 19 nt, Artificial Sequence
  Description of Artificial Sequence: Synthetic oligonucleotide
guuaagguugacagcuuaa

SEQ ID NO: 966283 - RNA, 19 nt, Artificial Sequence
  Description of Artificial Sequence: Synthetic oligonucleotide
ugcaugcaugcaugggcaa

SEQ ID NO: 966284 - RNA, 19 nt, Artificial Sequence
  Description of Artificial Sequence: Synthetic oligonucleotide
uccacgcuuguagacugac

SEQ ID NO: 966285 - RNA, 19 nt, Artificial Sequence
  Description of Artificial Sequence: Synthetic oligonucleotide
guaugaacguaugcaugca

SEQ ID NO: 966286 - RNA, 19 nt, Artificial Sequence
  Description of Artificial Sequence: Synthetic oligonucleotide
augcgcacgcaacaaugau

SEQ ID NO: 966287 - RNA, 19 nt, Artificial Sequence
  Description of Artificial Sequence: Synthetic oligonucleotide
uaggcgagaguggcaauuc

SEQ ID NO: 966288 - RNA, 19 nt, Artificial Sequence
  Description of Artificial Sequence: Synthetic oligonucleotide
ggaagcaauaaaguuugaa

SEQ ID NO: 966289 - RNA, 19 nt, Artificial Sequence
  Description of Artificial Sequence: Synthetic oligonucleotide
gaagcuggcccgccucuuc

SEQ ID NO: 966290 - RNA, 19 nt, Artificial Sequence
  Description of Artificial Sequence: Synthetic oligonucleotide
aggcgagaguggcaauuca

SEQ ID NO: 966291 - RNA, 19 nt, Artificial Sequence
  Description of Artificial Sequence: Synthetic oligonucleotide
gcaaguuaaggcacuucug

SEQ ID NO: 966292 - RNA, 19 nt, Artificial Sequence
  Description of Artificial Sequence: Synthetic oligonucleotide
guggcaucgugguuuucuc

SEQ ID NO: 966293 - RNA, 19 nt, Artificial Sequence
  Description of Artificial Sequence: Synthetic oligonucleotide
cugucuuuuggcacgcugu

SEQ ID NO: 966294 - RNA, 19 nt, Artificial Sequence
  Description of Artificial Sequence: Synthetic oligonucleotide
gguuaagguugacagcuua

SEQ ID NO: 966295 - RNA, 19 nt, Artificial Sequence
  Description of Artificial Sequence: Synthetic oligonucleotide
uggggaccuguuaguaaua

SEQ ID NO: 966296 - RNA, 19 nt, Artificial Sequence
  Description of Artificial Sequence: Synthetic oligonucleotide
ccaccuuggagacuauaac

SEQ ID NO: 966297 - RNA, 19 nt, Artificial Sequence
  Description of Artificial Sequence: Synthetic oligonucleotide
cugccgaaccaccgacccg

SEQ ID NO: 966298 - RNA, 19 nt, Artificial Sequence
  Description of Artificial Sequence: Synthetic oligonucleotide
ucgugguuuucuccccuuu

SEQ ID NO: 966299 - RNA, 19 nt, Artificial Sequence
  Description of Artificial Sequence: Synthetic oligonucleotide
gucgauuagggucgauucu

SEQ ID NO: 966300 - RNA, 19 nt, Artificial Sequence
  Description of Artificial Sequence: Synthetic oligonucleotide
ggauuggucaggaccuggc

SEQ ID NO: 966301 - RNA, 19 nt, Artificial Sequence
  Description of Artificial Sequence: Synthetic oligonucleotide
aggucgauuagggucgauu

SEQ ID NO: 966302 - RNA, 19 nt, Artificial Sequence
  Description of Artificial Sequence: Synthetic oligonucleotide
cuuguacguguuggccagg

SEQ ID NO: 966303 - RNA, 19 nt, Artificial Sequence
  Description of Artificial Sequence: Synthetic oligonucleotide
auauacagacagacuguuu

SEQ ID NO: 966304 - RNA, 19 nt, Artificial Sequence
  Description of Artificial Sequence: Synthetic oligonucleotide
augcccgcuuccaagcucu

SEQ ID NO: 966305 - RNA, 19 nt, Artificial Sequence
  Description of Artificial Sequence: Synthetic oligonucleotide
uggcucgagcagagcagac

SEQ ID NO: 966306 - RNA, 19 nt, Artificial Sequence
  Description of Artificial Sequence: Synthetic oligonucleotide
uaaggucgauuagggucga

SEQ ID NO: 966307 - RNA, 19 nt, Artificial Sequence
  Description of Artificial Sequence: Synthetic oligonucleotide
gcgagcuuugagucgggug

SEQ ID NO: 966308 - RNA, 19 nt, Artificial Sequence
  Description of Artificial Sequence: Synthetic oligonucleotide
gugcuuucccucaguagca

SEQ ID NO: 966309 - RNA, 19 nt, Artificial Sequence
  Description of Artificial Sequence: Synthetic oligonucleotide
ugacgcccagccagaguuc

SEQ ID NO: 966310 - RNA, 19 nt, Artificial Sequence
  Description of Artificial Sequence: Synthetic oligonucleotide
cagcuagucuuuacaaacu

SEQ ID NO: 966311 - RNA, 19 nt, Artificial Sequence
  Description of Artificial Sequence: Synthetic oligonucleotide
agcccuugcuacauguaaa

SEQ ID NO: 966312 - RNA, 19 nt, Artificial Sequence
  Description of Artificial Sequence: Synthetic oligonucleotide
auauggggugaagguuuug

SEQ ID NO: 966313 - RNA, 19 nt, Artificial Sequence
  Description of Artificial Sequence: Synthetic oligonucleotide
ccagcagcgcuccaacuac

SEQ ID NO: 966314 - RNA, 19 nt, Artificial Sequence
  Description of Artificial Sequence: Synthetic oligonucleotide
cuguagcgcuucuucacaa

SEQ ID NO: 966315 - RNA, 19 nt, Artificial Sequence
  Description of Artificial Sequence: Synthetic oligonucleotide
ggucgacugacugaugcga

SEQ ID NO: 966316 - RNA, 19 nt, Artificial Sequence
  Description of Artificial Sequence: Synthetic oligonucleotide
guagacugacacagcaucu

SEQ ID NO: 966317 - RNA, 19 nt, Artificial Sequence
  Description of Artificial Sequence: Synthetic oligonucleotide
gcaucgugguuuucucccc

SEQ ID NO: 966318 - RNA, 19 nt, Artificial Sequence
  Description of Artificial Sequence: Synthetic oligonucleotide
caacacacugucuccuucu

SEQ ID NO: 966319 - RNA, 19 nt, Artificial Sequence
  Description of Artificial Sequence: Synthetic oligonucleotide
cugcaaguuaaggcacuuc

SEQ ID NO: 966320 - RNA, 19 nt, Artificial Sequence
  Description of Artificial Sequence: Synthetic oligonucleotide
cugacgcccagccagaguu

SEQ ID NO: 966321 - RNA, 19 nt, Artificial Sequence
  Description of Artificial Sequence: Synthetic oligonucleotide
aucgugguuuucuccccuu

SEQ ID NO: 966322 - RNA, 19 nt, Artificial Sequence
  Description of Artificial Sequence: Synthetic oligonucleotide
cugacaaacgggguuccaa

SEQ ID NO: 966323 - RNA, 19 nt, Artificial Sequence
  Description of Artificial Sequence: Synthetic oligonucleotide
gcaugcaugcaugggcaag

SEQ ID NO: 966324 - RNA, 19 nt, Artificial Sequence
  Description of Artificial Sequence: Synthetic oligonucleotide
cgauuagggucgauucugc

SEQ ID NO: 966325 - RNA, 19 nt, Artificial Sequence
  Description of Artificial Sequence: Synthetic oligonucleotide
gguccggaagcuucgccuc

SEQ ID NO: 966326 - RNA, 19 nt, Artificial Sequence
  Description of Artificial Sequence: Synthetic oligonucleotide
gguugcagcccuugcuaca

SEQ ID NO: 966327 - RNA, 19 nt, Artificial Sequence
  Description of Artificial Sequence: Synthetic oligonucleotide
caccgacccgguccggaag

SEQ ID NO: 966328 - RNA, 19 nt, Artificial Sequence
  Description of Artificial Sequence: Synthetic oligonucleotide
ugcgagcuuugagucgggu

SEQ ID NO: 966329 - RNA, 19 nt, Artificial Sequence
  Description of Artificial Sequence: Synthetic oligonucleotide
gcgcacgcaacaaugauua

SEQ ID NO: 966330 - RNA, 19 nt, Artificial Sequence
  Description of Artificial Sequence: Synthetic oligonucleotide
gcgagaguggcaauucaga

SEQ ID NO: 966331 - RNA, 19 nt, Artificial Sequence
  Description of Artificial Sequence: Synthetic oligonucleotide
cuacaacacacugucuccu

SEQ ID NO: 966332 - RNA, 19 nt, Artificial Sequence
  Description of Artificial Sequence: Synthetic oligonucleotide
gcccuugcuacauguaaaa

SEQ ID NO: 966333 - RNA, 19 nt, Artificial Sequence
  Description of Artificial Sequence: Synthetic oligonucleotide
ggagcguguggugcuguag

SEQ ID NO: 966334 - RNA, 19 nt, Artificial Sequence
  Description of Artificial Sequence: Synthetic oligonucleotide
acccgguccggaagcuucg

SEQ ID NO: 966335 - RNA, 19 nt, Artificial Sequence
  Description of Artificial Sequence: Synthetic oligonucleotide
aggagcauucaggguucug

SEQ ID NO: 966336 - RNA, 19 nt, Artificial Sequence
  Description of Artificial Sequence: Synthetic oligonucleotide
ggccauauacuuggccaug

SEQ ID NO: 966337 - RNA, 19 nt, Artificial Sequence
  Description of Artificial Sequence: Synthetic oligonucleotide
aaccaccgacccgguccgg

SEQ ID NO: 966338 - RNA, 19 nt, Artificial Sequence
  Description of Artificial Sequence: Synthetic oligonucleotide
caguuuaagagugguuuau

SEQ ID NO: 966339 - RNA, 19 nt, Artificial Sequence
  Description of Artificial Sequence: Synthetic oligonucleotide
guccggaagcuucgccuca

SEQ ID NO: 966340 - RNA, 19 nt, Artificial Sequence
  Description of Artificial Sequence: Synthetic oligonucleotide
agcagcgcuccaacuacaa

SEQ ID NO: 966341 - RNA, 19 nt, Artificial Sequence
  Description of Artificial Sequence: Synthetic oligonucleotide
gcuuucccucaguagcaca

SEQ ID NO: 966342 - RNA, 19 nt, Artificial Sequence
  Description of Artificial Sequence: Synthetic oligonucleotide
cccgcuuccaagcucugca

SEQ ID NO: 966343 - RNA, 19 nt, Artificial Sequence
  Description of Artificial Sequence: Synthetic oligonucleotide
ccgcuucugacguggcagc

SEQ ID NO: 966344 - RNA, 19 nt, Artificial Sequence
  Description of Artificial Sequence: Synthetic oligonucleotide
accaccgacccgguccgga

SEQ ID NO: 966345 - RNA, 19 nt, Artificial Sequence
  Description of Artificial Sequence: Synthetic oligonucleotide
ggaaaucgggcugggaggu

SEQ ID NO: 966346 - RNA, 19 nt, Artificial Sequence
  Description of Artificial Sequence: Synthetic oligonucleotide
cugacguggcagcuagucu

SEQ ID NO: 966347 - RNA, 19 nt, Artificial Sequence
  Description of Artificial Sequence: Synthetic oligonucleotide
cagcagcgcuccaacuaca

SEQ ID NO: 966348 - RNA, 19 nt, Artificial Sequence
  Description of Artificial Sequence: Synthetic oligonucleotide
gacgcccagccagaguucu

SEQ ID NO: 966349 - RNA, 19 nt, Artificial Sequence
  Description of Artificial Sequence: Synthetic oligonucleotide
cucuccacgcuuguagacu

SEQ ID NO: 966350 - RNA, 19 nt, Artificial Sequence
  Description of Artificial Sequence: Synthetic oligonucleotide
gcguguggugcuguagcgc

SEQ ID NO: 966351 - RNA, 19 nt, Artificial Sequence
  Description of Artificial Sequence: Synthetic oligonucleotide
gugcucauacuggaauacu

SEQ ID NO: 966352 - RNA, 19 nt, Artificial Sequence
  Description of Artificial Sequence: Synthetic oligonucleotide
augcgagcuuugagucggg

SEQ ID NO: 966353 - RNA, 19 nt, Artificial Sequence
  Description of Artificial Sequence: Synthetic oligonucleotide
aaggucgauuagggucgau

SEQ ID NO: 966354 - RNA, 19 nt, Artificial Sequence
  Description of Artificial Sequence: Synthetic oligonucleotide
caucgugguuuucuccccu

SEQ ID NO: 966355 - RNA, 19 nt, Artificial Sequence
  Description of Artificial Sequence: Synthetic oligonucleotide
cuccacgcuuguagacuga

SEQ ID NO: 966356 - RNA, 19 nt, Artificial Sequence
  Description of Artificial Sequence: Synthetic oligonucleotide
cuuccaagcucugcaaauu

SEQ ID NO: 966357 - RNA, 19 nt, Artificial Sequence
  Description of Artificial Sequence: Synthetic oligonucleotide
cacggagcguguggugcug

SEQ ID NO: 966358 - RNA, 19 nt, Artificial Sequence
  Description of Artificial Sequence: Synthetic oligonucleotide
gccuaggcgagaguggcaa

SEQ ID NO: 966359 - RNA, 19 nt, Artificial Sequence
  Description of Artificial Sequence: Synthetic oligonucleotide
gcguucauauggggugaag

SEQ ID NO: 966360 - RNA, 19 nt, Artificial Sequence
  Description of Artificial Sequence: Synthetic oligonucleotide
gacugacugaugcgagcuu

SEQ ID NO: 966361 - RNA, 19 nt, Artificial Sequence
  Description of Artificial Sequence: Synthetic oligonucleotide
acggagcguguggugcugu

SEQ ID NO: 966362 - RNA, 19 nt, Artificial Sequence
  Description of Artificial Sequence: Synthetic oligonucleotide
ccccugacaaacgggguuc

SEQ ID NO: 966363 - RNA, 19 nt, Artificial Sequence
  Description of Artificial Sequence: Synthetic oligonucleotide
ccaggcguucauauggggu

SEQ ID NO: 966364 - RNA, 19 nt, Artificial Sequence
  Description of Artificial Sequence: Synthetic oligonucleotide
cuaggcgagaguggcaauu

SEQ ID NO: 966365 - RNA, 19 nt, Artificial Sequence
  Description of Artificial Sequence: Synthetic oligonucleotide
caguggaucgaugcccgcu

SEQ ID NO: 966366 - RNA, 19 nt, Artificial Sequence
  Description of Artificial Sequence: Synthetic oligonucleotide
cccugacaaacgggguucc

SEQ ID NO: 966367 - RNA, 19 nt, Artificial Sequence
  Description of Artificial Sequence: Synthetic oligonucleotide
guuugcccucuccacgcuu

SEQ ID NO: 966368 - RNA, 19 nt, Artificial Sequence
  Description of Artificial Sequence: Synthetic oligonucleotide
ccacgcuuguagacugaca

SEQ ID NO: 966369 - RNA, 19 nt, Artificial Sequence
  Description of Artificial Sequence: Synthetic oligonucleotide
cguguggugcuguagcgcu

SEQ ID NO: 966370 - RNA, 19 nt, Artificial Sequence
  Description of Artificial Sequence: Synthetic oligonucleotide
gcacuccacgucaaagagu

SEQ ID NO: 966371 - RNA, 19 nt, Artificial Sequence
  Description of Artificial Sequence: Synthetic oligonucleotide
gcccgcuuccaagcucugc

SEQ ID NO: 966372 - RNA, 19 nt, Artificial Sequence
  Description of Artificial Sequence: Synthetic oligonucleotide
gaaaucgggcugggagguu

SEQ ID NO: 966373 - RNA, 19 nt, Artificial Sequence
  Description of Artificial Sequence: Synthetic oligonucleotide
gcacugacgcccagccaga

SEQ ID NO: 966374 - RNA, 19 nt, Artificial Sequence
  Description of Artificial Sequence: Synthetic oligonucleotide
gcagacgguuaagguugac

SEQ ID NO: 966375 - RNA, 19 nt, Artificial Sequence
  Description of Artificial Sequence: Synthetic oligonucleotide
ggcguucauauggggugaa

SEQ ID NO: 966376 - RNA, 19 nt, Artificial Sequence
  Description of Artificial Sequence: Synthetic oligonucleotide
ccugacaaacgggguucca

SEQ ID NO: 966377 - RNA, 19 nt, Artificial Sequence
  Description of Artificial Sequence: Synthetic oligonucleotide
ccgaaccaccgacccgguc

SEQ ID NO: 966378 - RNA, 19 nt, Artificial Sequence
  Description of Artificial Sequence: Synthetic oligonucleotide
ccaccgacccgguccggaa

SEQ ID NO: 966379 - RNA, 19 nt, Artificial Sequence
  Description of Artificial Sequence: Synthetic oligonucleotide
gucacagguugcagcccuu

SEQ ID NO: 966380 - RNA, 19 nt, Artificial Sequence
  Description of Artificial Sequence: Synthetic oligonucleotide
acgcccagccagaguucuu

SEQ ID NO: 966381 - RNA, 19 nt, Artificial Sequence
  Description of Artificial Sequence: Synthetic oligonucleotide
ccccgcuucugacguggca

SEQ ID NO: 966382 - RNA, 19 nt, Artificial Sequence
  Description of Artificial Sequence: Synthetic oligonucleotide
ccgccucuucuccaggcgu

SEQ ID NO: 966383 - RNA, 19 nt, Artificial Sequence
  Description of Artificial Sequence: Synthetic oligonucleotide
cgcacgcaacaaugauuaa

SEQ ID NO: 966384 - RNA, 19 nt, Artificial Sequence
  Description of Artificial Sequence: Synthetic oligonucleotide
ccuaggcgagaguggcaau

SEQ ID NO: 966385 - RNA, 19 nt, Artificial Sequence
  Description of Artificial Sequence: Synthetic oligonucleotide
cgaugcccgcuuccaagcu

SEQ ID NO: 966386 - RNA, 19 nt, Artificial Sequence
  Description of Artificial Sequence: Synthetic oligonucleotide
aauacaaaaccucuacccc

SEQ ID NO: 966387 - RNA, 19 nt, Artificial Sequence
  Description of Artificial Sequence: Synthetic oligonucleotide
uuuaguaccagguaagucg

SEQ ID NO: 966388 - RNA, 19 nt, Artificial Sequence
  Description of Artificial Sequence: Synthetic oligonucleotide
uuuuauaccacaaacuucu

SEQ ID NO: 966389 - RNA, 19 nt, Artificial Sequence
  Description of Artificial Sequence: Synthetic oligonucleotide
uggucuuucaacaggaucg

SEQ ID NO: 966390 - RNA, 19 nt, Artificial Sequence
  Description of Artificial Sequence: Synthetic oligonucleotide
ucuuucaaugguuucaagg

SEQ ID NO: 966391 - RNA, 19 nt, Artificial Sequence
  Description of Artificial Sequence: Synthetic oligonucleotide
aaacaauccuuacagagga

SEQ ID NO: 966392 - RNA, 19 nt, Artificial Sequence
  Description of Artificial Sequence: Synthetic oligonucleotide
uugaauuucaguagcagga

SEQ ID NO: 966393 - RNA, 19 nt, Artificial Sequence
  Description of Artificial Sequence: Synthetic oligonucleotide
aauucugauuacuccaauc

SEQ ID NO: 966394 - RNA, 19 nt, Artificial Sequence
  Description of Artificial Sequence: Synthetic oligonucleotide
gaaaucagcaaaaugccgg

SEQ ID NO: 966395 - RNA, 19 nt, Artificial Sequence
  Description of Artificial Sequence: Synthetic oligonucleotide
uuugucuaggauuugggcc

SEQ ID NO: 966396 - RNA, 19 nt, Artificial Sequence
  Description of Artificial Sequence: Synthetic oligonucleotide
ucuaacgaggaacugaaga

SEQ ID NO: 966397 - RNA, 19 nt, Artificial Sequence
  Description of Artificial Sequence: Synthetic oligonucleotide
agagcuguuguccaagagc

SEQ ID NO: 966398 - RNA, 19 nt, Artificial Sequence
  Description of Artificial Sequence: Synthetic oligonucleotide
auuaugaugagcccguuug

SEQ ID NO: 966399 - RNA, 19 nt, Artificial Sequence
  Description of Artificial Sequence: Synthetic oligonucleotide
uggaauggaaucaaauacc

SEQ ID NO: 966400 - RNA, 19 nt, Artificial Sequence
  Description of Artificial Sequence: Synthetic oligonucleotide
aaucuggucuuucaacagg

SEQ ID NO: 966401 - RNA, 19 nt, Artificial Sequence
  Description of Artificial Sequence: Synthetic oligonucleotide
aaggguucuaacgaggaac

SEQ ID NO: 966402 - RNA, 19 nt, Artificial Sequence
  Description of Artificial Sequence: Synthetic oligonucleotide
aagacaugaaacccuucac

SEQ ID NO: 966403 - RNA, 19 nt, Artificial Sequence
  Description of Artificial Sequence: Synthetic oligonucleotide
ugaagauuugaucauugcu

SEQ ID NO: 966404 - RNA, 19 nt, Artificial Sequence
  Description of Artificial Sequence: Synthetic oligonucleotide
ugaaacaugccaaggauuc

SEQ ID NO: 966405 - RNA, 19 nt, Artificial Sequence
  Description of Artificial Sequence: Synthetic oligonucleotide
uggcccuuaauacaaaacc

SEQ ID NO: 966406 - RNA, 19 nt, Artificial Sequence
  Description of Artificial Sequence: Synthetic oligonucleotide
aauaucgacaucaucagaa

SEQ ID NO: 966407 - RNA, 19 nt, Artificial Sequence
  Description of Artificial Sequence: Synthetic oligonucleotide
gaaucaaauaccgacugag

SEQ ID NO: 966408 - RNA, 19 nt, Artificial Sequence
  Description of Artificial Sequence: Synthetic oligonucleotide
aaaccucuaccccaccuac

SEQ ID NO: 966409 - RNA, 19 nt, Artificial Sequence
  Description of Artificial Sequence: Synthetic oligonucleotide
cagugcauuaugaugagcc

SEQ ID NO: 966410 - RNA, 19 nt, Artificial Sequence
  Description of Artificial Sequence: Synthetic oligonucleotide
auucugauuacuccaaucu

SEQ ID NO: 966411 - RNA, 19 nt, Artificial Sequence
  Description of Artificial Sequence: Synthetic oligonucleotide
uuggcguugguguagaggc

SEQ ID NO: 966412 - RNA, 19 nt, Artificial Sequence
  Description of Artificial Sequence: Synthetic oligonucleotide
cuaacgaggaacugaagag

SEQ ID NO: 966413 - RNA, 19 nt, Artificial Sequence
  Description of Artificial Sequence: Synthetic oligonucleotide
uuccuuuuauaccacaaac

SEQ ID NO: 966414 - RNA, 19 nt, Artificial Sequence
  Description of Artificial Sequence: Synthetic oligonucleotide
uuuauuuccauggaaugga

SEQ ID NO: 966415 - RNA, 19 nt, Artificial Sequence
  Description of Artificial Sequence: Synthetic oligonucleotide
uaacuugcaagacaauucu

SEQ ID NO: 966416 - RNA, 19 nt, Artificial Sequence
  Description of Artificial Sequence: Synthetic oligonucleotide
aauaggggcauuucauuca

SEQ ID NO: 966417 - RNA, 19 nt, Artificial Sequence
  Description of Artificial Sequence: Synthetic oligonucleotide
aauaguggacacagggacc

SEQ ID NO: 966418 - RNA, 19 nt, Artificial Sequence
  Description of Artificial Sequence: Synthetic oligonucleotide
cuugcaagacaauucuugg

SEQ ID NO: 966419 - RNA, 19 nt, Artificial Sequence
  Description of Artificial Sequence: Synthetic oligonucleotide
agugcauuaugaugagccc

SEQ ID NO: 966420 - RNA, 19 nt, Artificial Sequence
  Description of Artificial Sequence: Synthetic oligonucleotide
aacugaagaggaugagacg

SEQ ID NO: 966421 - RNA, 19 nt, Artificial Sequence
  Description of Artificial Sequence: Synthetic oligonucleotide
uucaaggguucuaacgagg

SEQ ID NO: 966422 - RNA, 19 nt, Artificial Sequence
  Description of Artificial Sequence: Synthetic oligonucleotide
uuaguaccagguaagucgc

SEQ ID NO: 966423 - RNA, 19 nt, Artificial Sequence
  Description of Artificial Sequence: Synthetic oligonucleotide
ucaaauaccgacugagacu

SEQ ID NO: 966424 - RNA, 19 nt, Artificial Sequence
  Description of Artificial Sequence: Synthetic oligonucleotide
uccuuuuauaccacaaacu

SEQ ID NO: 966425 - RNA, 19 nt, Artificial Sequence
  Description of Artificial Sequence: Synthetic oligonucleotide
aaaugaagccuaaagacau

SEQ ID NO: 966426 - RNA, 19 nt, Artificial Sequence
  Description of Artificial Sequence: Synthetic oligonucleotide
gaagccuuaacuugcaaga

SEQ ID NO: 966427 - RNA, 19 nt, Artificial Sequence
  Description of Artificial Sequence: Synthetic oligonucleotide
cugagcuggagucugaacc

SEQ ID NO: 966428 - RNA, 19 nt, Artificial Sequence
  Description of Artificial Sequence: Synthetic oligonucleotide
gacaccauguacucagagg

SEQ ID NO: 966429 - RNA, 19 nt, Artificial Sequence
  Description of Artificial Sequence: Synthetic oligonucleotide
agaguauacacuagaaauc

SEQ ID NO: 966430 - RNA, 19 nt, Artificial Sequence
  Description of Artificial Sequence: Synthetic oligonucleotide
gaugagacgauggagacga

SEQ ID NO: 966431 - RNA, 19 nt, Artificial Sequence
  Description of Artificial Sequence: Synthetic oligonucleotide
uccuauacauaccaguguc

SEQ ID NO: 966432 - RNA, 19 nt, Artificial Sequence
  Description of Artificial Sequence: Synthetic oligonucleotide
cuuuacaauaucgacauca

SEQ ID NO: 966433 - RNA, 19 nt, Artificial Sequence
  Description of Artificial Sequence: Synthetic oligonucleotide
acaugaaacccuucacugg

SEQ ID NO: 966434 - RNA, 19 nt, Artificial Sequence
  Description of Artificial Sequence: Synthetic oligonucleotide
aaucugucgcuuuacaaua

SEQ ID NO: 966435 - RNA, 19 nt, Artificial Sequence
  Description of Artificial Sequence: Synthetic oligonucleotide
uugaucauugcuuuaugaa

SEQ ID NO: 966436 - RNA, 19 nt, Artificial Sequence
  Description of Artificial Sequence: Synthetic oligonucleotide
cacaguggcgacaaguucc

SEQ ID NO: 966437 - RNA, 19 nt, Artificial Sequence
  Description of Artificial Sequence: Synthetic oligonucleotide
auacauaccagugucacgu

SEQ ID NO: 966438 - RNA, 19 nt, Artificial Sequence
  Description of Artificial Sequence: Synthetic oligonucleotide
uaacgaggaacugaagagg

SEQ ID NO: 966439 - RNA, 19 nt, Artificial Sequence
  Description of Artificial Sequence: Synthetic oligonucleotide
acaauccuuacagaggagg

SEQ ID NO: 966440 - RNA, 19 nt, Artificial Sequence
  Description of Artificial Sequence: Synthetic oligonucleotide
uuucaaggguucuaacgag

SEQ ID NO: 966441 - RNA, 19 nt, Artificial Sequence
  Description of Artificial Sequence: Synthetic oligonucleotide
ugcguuuucguuccagugc

SEQ ID NO: 966442 - RNA, 19 nt, Artificial Sequence
  Description of Artificial Sequence: Synthetic oligonucleotide
gguuucaaggguucuaacg

SEQ ID NO: 966443 - RNA, 19 nt, Artificial Sequence
  Description of Artificial Sequence: Synthetic oligonucleotide
uuaaaauuucuggugggga

SEQ ID NO: 966444 - RNA, 19 nt, Artificial Sequence
  Description of Artificial Sequence: Synthetic oligonucleotide
guuucaaggguucuaacga

SEQ ID NO: 966445 - RNA, 19 nt, Artificial Sequence
  Description of Artificial Sequence: Synthetic oligonucleotide
uggguuuaguaccagguaa

SEQ ID NO: 966446 - RNA, 19 nt, Artificial Sequence
  Description of Artificial Sequence: Synthetic oligonucleotide
gaucauugcuuuaugaauc

SEQ ID NO: 966447 - RNA, 19 nt, Artificial Sequence
  Description of Artificial Sequence: Synthetic oligonucleotide
aggaugagacgauggagac

SEQ ID NO: 966448 - RNA, 19 nt, Artificial Sequence
  Description of Artificial Sequence: Synthetic oligonucleotide
auaguggacacagggaccg

SEQ ID NO: 966449 - RNA, 19 nt, Artificial Sequence
  Description of Artificial Sequence: Synthetic oligonucleotide
cuuugucuaggauuugggc

SEQ ID NO: 966450 - RNA, 19 nt, Artificial Sequence
  Description of Artificial Sequence: Synthetic oligonucleotide
gucaccgacaacaacaagc

SEQ ID NO: 966451 - RNA, 19 nt, Artificial Sequence
  Description of Artificial Sequence: Synthetic oligonucleotide
aaaauaguggacacaggga

SEQ ID NO: 966452 - RNA, 19 nt, Artificial Sequence
  Description of Artificial Sequence: Synthetic oligonucleotide
ucgaaggcagagauggugc

SEQ ID NO: 966453 - RNA, 19 nt, Artificial Sequence
  Description of Artificial Sequence: Synthetic oligonucleotide
guauacacuagaaaucagc

SEQ ID NO: 966454 - RNA, 19 nt, Artificial Sequence
  Description of Artificial Sequence: Synthetic oligonucleotide
agacaugaaacccuucacu

SEQ ID NO: 966455 - RNA, 19 nt, Artificial Sequence
  Description of Artificial Sequence: Synthetic oligonucleotide
ugaugagcccguuugucag

SEQ ID NO: 966456 - RNA, 19 nt, Artificial Sequence
  Description of Artificial Sequence: Synthetic oligonucleotide
ugucgcuuuacaauaucga

SEQ ID NO: 966457 - RNA, 19 nt, Artificial Sequence
  Description of Artificial Sequence: Synthetic oligonucleotide
aacaugccaaggauucugc

SEQ ID NO: 966458 - RNA, 19 nt, Artificial Sequence
  Description of Artificial Sequence: Synthetic oligonucleotide
aagagcugccaaguuaggg

SEQ ID NO: 966459 - RNA, 19 nt, Artificial Sequence
  Description of Artificial Sequence: Synthetic oligonucleotide
aggcuuaaacaacugaaga

SEQ ID NO: 966460 - RNA, 19 nt, Artificial Sequence
  Description of Artificial Sequence: Synthetic oligonucleotide
ucaaggguucuaacgagga

SEQ ID NO: 966461 - RNA, 19 nt, Artificial Sequence
  Description of Artificial Sequence: Synthetic oligonucleotide
gguuaauucugauuacucc

SEQ ID NO: 966462 - RNA, 19 nt, Artificial Sequence
  Description of Artificial Sequence: Synthetic oligonucleotide
cugucgcuuuacaauaucg

SEQ ID NO: 966463 - RNA, 19 nt, Artificial Sequence
  Description of Artificial Sequence: Synthetic oligonucleotide
gagacgauggagacgacag

SEQ ID NO: 966464 - RNA, 19 nt, Artificial Sequence
  Description of Artificial Sequence: Synthetic oligonucleotide
ggaauggaaucaaauaccg

SEQ ID NO: 966465 - RNA, 19 nt, Artificial Sequence
  Description of Artificial Sequence: Synthetic oligonucleotide
ugcauuaugaugagcccgu

SEQ ID NO: 966466 - RNA, 19 nt, Artificial Sequence
  Description of Artificial Sequence: Synthetic oligonucleotide
auaccagugucacguggcc

SEQ ID NO: 966467 - RNA, 19 nt, Artificial Sequence
  Description of Artificial Sequence: Synthetic oligonucleotide
guuccagugcauuaugaug

SEQ ID NO: 966468 - RNA, 19 nt, Artificial Sequence
  Description of Artificial Sequence: Synthetic oligonucleotide
agaaaucagcaaaaugccg

SEQ ID NO: 966469 - RNA, 19 nt, Artificial Sequence
  Description of Artificial Sequence: Synthetic oligonucleotide
aacaacaagccgagugccc

SEQ ID NO: 966470 - RNA, 19 nt, Artificial Sequence
  Description of Artificial Sequence: Synthetic oligonucleotide
aagccuuaacuugcaagac

SEQ ID NO: 966471 - RNA, 19 nt, Artificial Sequence
  Description of Artificial Sequence: Synthetic oligonucleotide
aucuccuauacauaccagu

SEQ ID NO: 966472 - RNA, 19 nt, Artificial Sequence
  Description of Artificial Sequence: Synthetic oligonucleotide
guaguuggucugcaguugg

SEQ ID NO: 966473 - RNA, 19 nt, Artificial Sequence
  Description of Artificial Sequence: Synthetic oligonucleotide
caggcuuaaacaacugaag

SEQ ID NO: 966474 - RNA, 19 nt, Artificial Sequence
  Description of Artificial Sequence: Synthetic oligonucleotide
cauaccagugucacguggc

SEQ ID NO: 966475 - RNA, 19 nt, Artificial Sequence
  Description of Artificial Sequence: Synthetic oligonucleotide
uucauucagauuugaauuu

SEQ ID NO: 966476 - RNA, 19 nt, Artificial Sequence
  Description of Artificial Sequence: Synthetic oligonucleotide
caugccaaggauucugcag

SEQ ID NO: 966477 - RNA, 19 nt, Artificial Sequence
  Description of Artificial Sequence: Synthetic oligonucleotide
acauaccagugucacgugg

SEQ ID NO: 966478 - RNA, 19 nt, Artificial Sequence
  Description of Artificial Sequence: Synthetic oligonucleotide
caucacuggcccuuaauac

SEQ ID NO: 966479 - RNA, 19 nt, Artificial Sequence
  Description of Artificial Sequence: Synthetic oligonucleotide
aucacuggcccuuaauaca

SEQ ID NO: 966480 - RNA, 19 nt, Artificial Sequence
  Description of Artificial Sequence: Synthetic oligonucleotide
uacucagaggucuggccgg

SEQ ID NO: 966481 - RNA, 19 nt, Artificial Sequence
  Description of Artificial Sequence: Synthetic oligonucleotide
caccaaacagaggugaggg

SEQ ID NO: 966482 - RNA, 19 nt, Artificial Sequence
  Description of Artificial Sequence: Synthetic oligonucleotide
aaugucuugcuggugcgug

SEQ ID NO: 966483 - RNA, 19 nt, Artificial Sequence
  Description of Artificial Sequence: Synthetic oligonucleotide
ucgcauauacuggauauac

SEQ ID NO: 966484 - RNA, 19 nt, Artificial Sequence
  Description of Artificial Sequence: Synthetic oligonucleotide
cuauacauaccagugucac

SEQ ID NO: 966485 - RNA, 19 nt, Artificial Sequence
  Description of Artificial Sequence: Synthetic oligonucleotide
auaggggcauuucauucag

SEQ ID NO: 966486 - RNA, 19 nt, Artificial Sequence
  Description of Artificial Sequence: Synthetic oligonucleotide
ugcaggcuuaaacaacuga

SEQ ID NO: 966487 - RNA, 19 nt, Artificial Sequence
  Description of Artificial Sequence: Synthetic oligonucleotide
gucgcuuuacaauaucgac

SEQ ID NO: 966488 - RNA, 19 nt, Artificial Sequence
  Description of Artificial Sequence: Synthetic oligonucleotide
ggcaguauguacaacauac

SEQ ID NO: 966489 - RNA, 19 nt, Artificial Sequence
  Description of Artificial Sequence: Synthetic oligonucleotide
cacaaacacacaacacggg

SEQ ID NO: 966490 - RNA, 19 nt, Artificial Sequence
  Description of Artificial Sequence: Synthetic oligonucleotide
aacgaggaacugaagagga

SEQ ID NO: 966491 - RNA, 19 nt, Artificial Sequence
  Description of Artificial Sequence: Synthetic oligonucleotide
aaaaccucuaccccaccua

SEQ ID NO: 966492 - RNA, 19 nt, Artificial Sequence
  Description of Artificial Sequence: Synthetic oligonucleotide
gagugaaacaugccaagga

SEQ ID NO: 966493 - RNA, 19 nt, Artificial Sequence
  Description of Artificial Sequence: Synthetic oligonucleotide
ucaaugguuucaaggguuc

SEQ ID NO: 966494 - RNA, 19 nt, Artificial Sequence
  Description of Artificial Sequence: Synthetic oligonucleotide
gugcauuaugaugagcccg

SEQ ID NO: 966495 - RNA, 19 nt, Artificial Sequence
  Description of Artificial Sequence: Synthetic oligonucleotide
uuaugaaucugucgcuuua

SEQ ID NO: 966496 - RNA, 19 nt, Artificial Sequence
  Description of Artificial Sequence: Synthetic oligonucleotide
uuaugaugagcccguuugu

SEQ ID NO: 966497 - RNA, 19 nt, Artificial Sequence
  Description of Artificial Sequence: Synthetic oligonucleotide
ugaagggaauacauuuaaa

SEQ ID NO: 966498 - RNA, 19 nt, Artificial Sequence
  Description of Artificial Sequence: Synthetic oligonucleotide
uaggauuugggcccgggau

SEQ ID NO: 966499 - RNA, 19 nt, Artificial Sequence
  Description of Artificial Sequence: Synthetic oligonucleotide
acugggaucugcugaccac

SEQ ID NO: 966500 - RNA, 19 nt, Artificial Sequence
  Description of Artificial Sequence: Synthetic oligonucleotide
ccaucgaaggcagagaugg

SEQ ID NO: 966501 - RNA, 19 nt, Artificial Sequence
  Description of Artificial Sequence: Synthetic oligonucleotide
aggaucgauagcuuuugca

SEQ ID NO: 966502 - RNA, 19 nt, Artificial Sequence
  Description of Artificial Sequence: Synthetic oligonucleotide
aaucaaauaccgacugaga

SEQ ID NO: 966503 - RNA, 19 nt, Artificial Sequence
  Description of Artificial Sequence: Synthetic oligonucleotide
auacuuuuauuuccaugga

SEQ ID NO: 966504 - RNA, 19 nt, Artificial Sequence
  Description of Artificial Sequence: Synthetic oligonucleotide
uggccuucuguaaggcugg

SEQ ID NO: 966505 - RNA, 19 nt, Artificial Sequence
  Description of Artificial Sequence: Synthetic oligonucleotide
aguuaggguguuuugguuu

SEQ ID NO: 966506 - RNA, 19 nt, Artificial Sequence
  Description of Artificial Sequence: Synthetic oligonucleotide
uuauuuccauggaauggaa

SEQ ID NO: 966507 - RNA, 19 nt, Artificial Sequence
  Description of Artificial Sequence: Synthetic oligonucleotide
agucgcucuugguauuuac

SEQ ID NO: 966508 - RNA, 19 nt, Artificial Sequence
  Description of Artificial Sequence: Synthetic oligonucleotide
augccuuuucuccuuggag

SEQ ID NO: 966509 - RNA, 19 nt, Artificial Sequence
  Description of Artificial Sequence: Synthetic oligonucleotide
ggaagccuuaacuugcaag

SEQ ID NO: 966510 - RNA, 19 nt, Artificial Sequence
  Description of Artificial Sequence: Synthetic oligonucleotide
gaagagugaaacaugccaa

SEQ ID NO: 966511 - RNA, 19 nt, Artificial Sequence
  Description of Artificial Sequence: Synthetic oligonucleotide
uucuccuuggagugacggg

SEQ ID NO: 966512 - RNA, 19 nt, Artificial Sequence
  Description of Artificial Sequence: Synthetic oligonucleotide
uuccuucgcauauacugga

SEQ ID NO: 966513 - RNA, 19 nt, Artificial Sequence
  Description of Artificial Sequence: Synthetic oligonucleotide
uuuucguuccagugcauua

SEQ ID NO: 966514 - RNA, 19 nt, Artificial Sequence
  Description of Artificial Sequence: Synthetic oligonucleotide
uauuuccauggaauggaau

SEQ ID NO: 966515 - RNA, 19 nt, Artificial Sequence
  Description of Artificial Sequence: Synthetic oligonucleotide
gaaucugucgcuuuacaau

SEQ ID NO: 966516 - RNA, 19 nt, Artificial Sequence
  Description of Artificial Sequence: Synthetic oligonucleotide
ucgcucuugguauuuacau

SEQ ID NO: 966517 - RNA, 19 nt, Artificial Sequence
  Description of Artificial Sequence: Synthetic oligonucleotide
gaucgauagcuuuugcaaa

SEQ ID NO: 966518 - RNA, 19 nt, Artificial Sequence
  Description of Artificial Sequence: Synthetic oligonucleotide
uucguuccagugcauuaug

SEQ ID NO: 966519 - RNA, 19 nt, Artificial Sequence
  Description of Artificial Sequence: Synthetic oligonucleotide
aaguuaggguguuuugguu

SEQ ID NO: 966520 - RNA, 19 nt, Artificial Sequence
  Description of Artificial Sequence: Synthetic oligonucleotide
cacagggaccggaugagag

SEQ ID NO: 966521 - RNA, 19 nt, Artificial Sequence
  Description of Artificial Sequence: Synthetic oligonucleotide
ugaauuucaguagcaggaa

SEQ ID NO: 966522 - RNA, 19 nt, Artificial Sequence
  Description of Artificial Sequence: Synthetic oligonucleotide
augaagccuaaagacauga

SEQ ID NO: 966523 - RNA, 19 nt, Artificial Sequence
  Description of Artificial Sequence: Synthetic oligonucleotide
ucuaccccaccuacgacuc

SEQ ID NO: 966524 - RNA, 19 nt, Artificial Sequence
  Description of Artificial Sequence: Synthetic oligonucleotide
aucagcaaaaugccggcaa

SEQ ID NO: 966525 - RNA, 19 nt, Artificial Sequence
  Description of Artificial Sequence: Synthetic oligonucleotide
agaaauaggggcauuucau

SEQ ID NO: 966526 - RNA, 19 nt, Artificial Sequence
  Description of Artificial Sequence: Synthetic oligonucleotide
aaugaagccuaaagacaug

SEQ ID NO: 966527 - RNA, 19 nt, Artificial Sequence
  Description of Artificial Sequence: Synthetic oligonucleotide
agccgagugccccacgcac

SEQ ID NO: 966528 - RNA, 19 nt, Artificial Sequence
  Description of Artificial Sequence: Synthetic oligonucleotide
augccggcaacagaguagg

SEQ ID NO: 966529 - RNA, 19 nt, Artificial Sequence
  Description of Artificial Sequence: Synthetic oligonucleotide
accauguacucagaggucu

SEQ ID NO: 966530 - RNA, 19 nt, Artificial Sequence
  Description of Artificial Sequence: Synthetic oligonucleotide
guggcgacaaguuccagga

SEQ ID NO: 966531 - RNA, 19 nt, Artificial Sequence
  Description of Artificial Sequence: Synthetic oligonucleotide
uucuaacgaggaacugaag

SEQ ID NO: 966532 - RNA, 19 nt, Artificial Sequence
  Description of Artificial Sequence: Synthetic oligonucleotide
agguaagucgcucuuggua

SEQ ID NO: 966533 - RNA, 19 nt, Artificial Sequence
  Description of Artificial Sequence: Synthetic oligonucleotide
ggcgacaaguuccaggacc

SEQ ID NO: 966534 - RNA, 19 nt, Artificial Sequence
  Description of Artificial Sequence: Synthetic oligonucleotide
ucugucgcuuuacaauauc

SEQ ID NO: 966535 - RNA, 19 nt, Artificial Sequence
  Description of Artificial Sequence: Synthetic oligonucleotide
uaugaugagcccguuuguc

SEQ ID NO: 966536 - RNA, 19 nt, Artificial Sequence
  Description of Artificial Sequence: Synthetic oligonucleotide
aacaagccgagugccccac

SEQ ID NO: 966537 - RNA, 19 nt, Artificial Sequence
  Description of Artificial Sequence: Synthetic oligonucleotide
uccaggcacacgcucugag

SEQ ID NO: 966538 - RNA, 19 nt, Artificial Sequence
  Description of Artificial Sequence: Synthetic oligonucleotide
cuggucuuucaacaggauc

SEQ ID NO: 966539 - RNA, 19 nt, Artificial Sequence
  Description of Artificial Sequence: Synthetic oligonucleotide
ugggcaguauguacaacau

SEQ ID NO: 966540 - RNA, 19 nt, Artificial Sequence
  Description of Artificial Sequence: Synthetic oligonucleotide
ugagacgauggagacgaca

SEQ ID NO: 966541 - RNA, 19 nt, Artificial Sequence
  Description of Artificial Sequence: Synthetic oligonucleotide
cuggcccuuaauacaaaac

SEQ ID NO: 966542 - RNA, 19 nt, Artificial Sequence
  Description of Artificial Sequence: Synthetic oligonucleotide
aguauacacuagaaaucag

SEQ ID NO: 966543 - RNA, 19 nt, Artificial Sequence
  Description of Artificial Sequence: Synthetic oligonucleotide
aaugguuucaaggguucua

SEQ ID NO: 966544 - RNA, 19 nt, Artificial Sequence
  Description of Artificial Sequence: Synthetic oligonucleotide
cagaaauaggggcauuuca

SEQ ID NO: 966545 - RNA, 19 nt, Artificial Sequence
  Description of Artificial Sequence: Synthetic oligonucleotide
ggcucuauuucuuagaaau

SEQ ID NO: 966546 - RNA, 19 nt, Artificial Sequence
  Description of Artificial Sequence: Synthetic oligonucleotide
cacguggccuucuguaagg

SEQ ID NO: 966547 - RNA, 19 nt, Artificial Sequence
  Description of Artificial Sequence: Synthetic oligonucleotide
guggccuucuguaaggcug

SEQ ID NO: 966548 - RNA, 19 nt, Artificial Sequence
  Description of Artificial Sequence: Synthetic oligonucleotide
ugaagccuaaagacaugaa

SEQ ID NO: 966549 - RNA, 19 nt, Artificial Sequence
  Description of Artificial Sequence: Synthetic oligonucleotide
uaccgacugagacuacaga

SEQ ID NO: 966550 - RNA, 19 nt, Artificial Sequence
  Description of Artificial Sequence: Synthetic oligonucleotide
uugauguggucccugcguu

SEQ ID NO: 966551 - RNA, 19 nt, Artificial Sequence
  Description of Artificial Sequence: Synthetic oligonucleotide
gaugagcccguuugucagc

SEQ ID NO: 966552 - RNA, 19 nt, Artificial Sequence
  Description of Artificial Sequence: Synthetic oligonucleotide
agagcauucugccgcuuga

SEQ ID NO: 966553 - RNA, 19 nt, Artificial Sequence
  Description of Artificial Sequence: Synthetic oligonucleotide
cauauacuggauauacucu

SEQ ID NO: 966554 - RNA, 19 nt, Artificial Sequence
  Description of Artificial Sequence: Synthetic oligonucleotide
ugccccacauggcuuagcu

SEQ ID NO: 966555 - RNA, 19 nt, Artificial Sequence
  Description of Artificial Sequence: Synthetic oligonucleotide
gagugccccacgcacacac

SEQ ID NO: 966556 - RNA, 19 nt, Artificial Sequence
  Description of Artificial Sequence: Synthetic oligonucleotide
guuggcucuauuucuuaga

SEQ ID NO: 966557 - RNA, 19 nt, Artificial Sequence
  Description of Artificial Sequence: Synthetic oligonucleotide
gcugucuuugauguggucc

SEQ ID NO: 966558 - RNA, 19 nt, Artificial Sequence
  Description of Artificial Sequence: Synthetic oligonucleotide
gucccgcaaacugugaaag

SEQ ID NO: 966559 - RNA, 19 nt, Artificial Sequence
  Description of Artificial Sequence: Synthetic oligonucleotide
aaguuggcucuauuucuua

SEQ ID NO: 966560 - RNA, 19 nt, Artificial Sequence
  Description of Artificial Sequence: Synthetic oligonucleotide
aacaggaucgauagcuuuu

SEQ ID NO: 966561 - RNA, 19 nt, Artificial Sequence
  Description of Artificial Sequence: Synthetic oligonucleotide
uuauugcuggccugcccca

SEQ ID NO: 966562 - RNA, 19 nt, Artificial Sequence
  Description of Artificial Sequence: Synthetic oligonucleotide
cugaagggaauacauuuaa

SEQ ID NO: 966563 - RNA, 19 nt, Artificial Sequence
  Description of Artificial Sequence: Synthetic oligonucleotide
ggggaagucaccgacaaca

SEQ ID NO: 966564 - RNA, 19 nt, Artificial Sequence
  Description of Artificial Sequence: Synthetic oligonucleotide
caucuccuauacauaccag

SEQ ID NO: 966565 - RNA, 19 nt, Artificial Sequence
  Description of Artificial Sequence: Synthetic oligonucleotide
uuucguuccagugcauuau

SEQ ID NO: 966566 - RNA, 19 nt, Artificial Sequence
  Description of Artificial Sequence: Synthetic oligonucleotide
gauuugaucauugcuuuau

SEQ ID NO: 966567 - RNA, 19 nt, Artificial Sequence
  Description of Artificial Sequence: Synthetic oligonucleotide
guuuaguaccagguaaguc

SEQ ID NO: 966568 - RNA, 19 nt, Artificial Sequence
  Description of Artificial Sequence: Synthetic oligonucleotide
agugcacggacuuguugcu

SEQ ID NO: 966569 - RNA, 19 nt, Artificial Sequence
  Description of Artificial Sequence: Synthetic oligonucleotide
augagcccguuugucagcg

SEQ ID NO: 966570 - RNA, 19 nt, Artificial Sequence
  Description of Artificial Sequence: Synthetic oligonucleotide
ugucuaggauuugggcccg

SEQ ID NO: 966571 - RNA, 19 nt, Artificial Sequence
  Description of Artificial Sequence: Synthetic oligonucleotide
aaaaugccggcaacagagu

SEQ ID NO: 966572 - RNA, 19 nt, Artificial Sequence
  Description of Artificial Sequence: Synthetic oligonucleotide
ucauugcuuuaugaaucug

SEQ ID NO: 966573 - RNA, 19 nt, Artificial Sequence
  Description of Artificial Sequence: Synthetic oligonucleotide
gaauggaaucaaauaccga

SEQ ID NO: 966574 - RNA, 19 nt, Artificial Sequence
  Description of Artificial Sequence: Synthetic oligonucleotide
gaaacccuucacugggauc

SEQ ID NO: 966575 - RNA, 19 nt, Artificial Sequence
  Description of Artificial Sequence: Synthetic oligonucleotide
guucuaacgaggaacugaa

SEQ ID NO: 966576 - RNA, 19 nt, Artificial Sequence
  Description of Artificial Sequence: Synthetic oligonucleotide
gacacagggaccggaugag

SEQ ID NO: 966577 - RNA, 19 nt, Artificial Sequence
  Description of Artificial Sequence: Synthetic oligonucleotide
uuuauaccacaaacuucuu

SEQ ID NO: 966578 - RNA, 19 nt, Artificial Sequence
  Description of Artificial Sequence: Synthetic oligonucleotide
uacauaccagugucacgug

SEQ ID NO: 966579 - RNA, 19 nt, Artificial Sequence
  Description of Artificial Sequence: Synthetic oligonucleotide
gaaauaggggcauuucauu

SEQ ID NO: 966580 - RNA, 19 nt, Artificial Sequence
  Description of Artificial Sequence: Synthetic oligonucleotide
ugucuguccuccacagaaa

SEQ ID NO: 966581 - RNA, 19 nt, Artificial Sequence
  Description of Artificial Sequence: Synthetic oligonucleotide
cugagacuacagaguauac

SEQ ID NO: 966582 - RNA, 19 nt, Artificial Sequence
  Description of Artificial Sequence: Synthetic oligonucleotide
acuggcccuuaauacaaaa

SEQ ID NO: 966583 - RNA, 19 nt, Artificial Sequence
  Description of Artificial Sequence: Synthetic oligonucleotide
auaccgacugagacuacag

SEQ ID NO: 966584 - RNA, 19 nt, Artificial Sequence
  Description of Artificial Sequence: Synthetic oligonucleotide
gaccggaugagagcuguug

SEQ ID NO: 966585 - RNA, 19 nt, Artificial Sequence
  Description of Artificial Sequence: Synthetic oligonucleotide
cccgcuuuccuuuuauacc

SEQ ID NO: 966586 - RNA, 19 nt, Artificial Sequence
  Description of Artificial Sequence: Synthetic oligonucleotide
agucaccgacaacaacaag

SEQ ID NO: 966587 - RNA, 19 nt, Artificial Sequence
  Description of Artificial Sequence: Synthetic oligonucleotide
ggccggaucgcacaguggc

SEQ ID NO: 966588 - RNA, 19 nt, Artificial Sequence
  Description of Artificial Sequence: Synthetic oligonucleotide
aggguucuaacgaggaacu

SEQ ID NO: 966589 - RNA, 19 nt, Artificial Sequence
  Description of Artificial Sequence: Synthetic oligonucleotide
agucuuucaaugguuucaa

SEQ ID NO: 966590 - RNA, 19 nt, Artificial Sequence
  Description of Artificial Sequence: Synthetic oligonucleotide
ucccgcaaacugugaaagc

SEQ ID NO: 966591 - RNA, 19 nt, Artificial Sequence
  Description of Artificial Sequence: Synthetic oligonucleotide
agggccggaucgcacagug

SEQ ID NO: 966592 - RNA, 19 nt, Artificial Sequence
  Description of Artificial Sequence: Synthetic oligonucleotide
guuaggguguuuugguuua

SEQ ID NO: 966593 - RNA, 19 nt, Artificial Sequence
  Description of Artificial Sequence: Synthetic oligonucleotide
accuacgacucccucccug

SEQ ID NO: 966594 - RNA, 19 nt, Artificial Sequence
  Description of Artificial Sequence: Synthetic oligonucleotide
agauuugaucauugcuuua

SEQ ID NO: 966595 - RNA, 19 nt, Artificial Sequence
  Description of Artificial Sequence: Synthetic oligonucleotide
agagagucacaaaguccac

SEQ ID NO: 966596 - RNA, 19 nt, Artificial Sequence
  Description of Artificial Sequence: Synthetic oligonucleotide
gcuuaaacaacugaagagu

SEQ ID NO: 966597 - RNA, 19 nt, Artificial Sequence
  Description of Artificial Sequence: Synthetic oligonucleotide
augguuucaaggguucuaa

SEQ ID NO: 966598 - RNA, 19 nt, Artificial Sequence
  Description of Artificial Sequence: Synthetic oligonucleotide
agucccgcaaacugugaaa

SEQ ID NO: 966599 - RNA, 19 nt, Artificial Sequence
  Description of Artificial Sequence: Synthetic oligonucleotide
gguucuaacgaggaacuga

SEQ ID NO: 966600 - RNA, 19 nt, Artificial Sequence
  Description of Artificial Sequence: Synthetic oligonucleotide
ggagugacgggaccgaguc

SEQ ID NO: 966601 - RNA, 19 nt, Artificial Sequence
  Description of Artificial Sequence: Synthetic oligonucleotide
agugucacguggccuucug

SEQ ID NO: 966602 - RNA, 19 nt, Artificial Sequence
  Description of Artificial Sequence: Synthetic oligonucleotide
aagccgagugccccacgca

SEQ ID NO: 966603 - RNA, 19 nt, Artificial Sequence
  Description of Artificial Sequence: Synthetic oligonucleotide
acguggccuucuguaaggc

SEQ ID NO: 966604 - RNA, 19 nt, Artificial Sequence
  Description of Artificial Sequence: Synthetic oligonucleotide
caaguuaggguguuuuggu

SEQ ID NO: 966605 - RNA, 19 nt, Artificial Sequence
  Description of Artificial Sequence: Synthetic oligonucleotide
cuucgcauauacuggauau

SEQ ID NO: 966606 - RNA, 19 nt, Artificial Sequence
  Description of Artificial Sequence: Synthetic oligonucleotide
ggacaccauguacucagag

SEQ ID NO: 966607 - RNA, 19 nt, Artificial Sequence
  Description of Artificial Sequence: Synthetic oligonucleotide
cugcaguugggcacuugac

SEQ ID NO: 966608 - RNA, 19 nt, Artificial Sequence
  Description of Artificial Sequence: Synthetic oligonucleotide
acggacuuguugcuccaga

SEQ ID NO: 966609 - RNA, 19 nt, Artificial Sequence
  Description of Artificial Sequence: Synthetic oligonucleotide
gcugccaucuccuauacau

SEQ ID NO: 966610 - RNA, 19 nt, Artificial Sequence
  Description of Artificial Sequence: Synthetic oligonucleotide
gcaagacaauucuugggca

SEQ ID NO: 966611 - RNA, 19 nt, Artificial Sequence
  Description of Artificial Sequence: Synthetic oligonucleotide
ugccccacgcacacacuca

SEQ ID NO: 966612 - RNA, 19 nt, Artificial Sequence
  Description of Artificial Sequence: Synthetic oligonucleotide
auucugccgcuugagguca

SEQ ID NO: 966613 - RNA, 19 nt, Artificial Sequence
  Description of Artificial Sequence: Synthetic oligonucleotide
uucgcauauacuggauaua

SEQ ID NO: 966614 - RNA, 19 nt, Artificial Sequence
  Description of Artificial Sequence: Synthetic oligonucleotide
ggcucggacucugagcugg

SEQ ID NO: 966615 - RNA, 19 nt, Artificial Sequence
  Description of Artificial Sequence: Synthetic oligonucleotide
ggacacagggaccggauga

SEQ ID NO: 966616 - RNA, 19 nt, Artificial Sequence
  Description of Artificial Sequence: Synthetic oligonucleotide
cccgggaugccuuuucucc

SEQ ID NO: 966617 - RNA, 19 nt, Artificial Sequence
  Description of Artificial Sequence: Synthetic oligonucleotide
gguaagucgcucuugguau

SEQ ID NO: 966618 - RNA, 19 nt, Artificial Sequence
  Description of Artificial Sequence: Synthetic oligonucleotide
caggaucgauagcuuuugc

SEQ ID NO: 966619 - RNA, 19 nt, Artificial Sequence
  Description of Artificial Sequence: Synthetic oligonucleotide
ccaccuacgacucccuccc

SEQ ID NO: 966620 - RNA, 19 nt, Artificial Sequence
  Description of Artificial Sequence: Synthetic oligonucleotide
uaccagguaagucgcucuu

SEQ ID NO: 966621 - RNA, 19 nt, Artificial Sequence
  Description of Artificial Sequence: Synthetic oligonucleotide
ggaugagacgauggagacg

SEQ ID NO: 966622 - RNA, 19 nt, Artificial Sequence
  Description of Artificial Sequence: Synthetic oligonucleotide
gucagcgguggagggaagg

SEQ ID NO: 966623 - RNA, 19 nt, Artificial Sequence
  Description of Artificial Sequence: Synthetic oligonucleotide
uaguaccagguaagucgcu

SEQ ID NO: 966624 - RNA, 19 nt, Artificial Sequence
  Description of Artificial Sequence: Synthetic oligonucleotide
cacaaacagccaccccacc

SEQ ID NO: 966625 - RNA, 19 nt, Artificial Sequence
  Description of Artificial Sequence: Synthetic oligonucleotide
ggguuaauucugauuacuc

SEQ ID NO: 966626 - RNA, 19 nt, Artificial Sequence
  Description of Artificial Sequence: Synthetic oligonucleotide
ggauuugggcccgggaugc

SEQ ID NO: 966627 - RNA, 19 nt, Artificial Sequence
  Description of Artificial Sequence: Synthetic oligonucleotide
gcguuuucguuccagugca

SEQ ID NO: 966628 - RNA, 19 nt, Artificial Sequence
  Description of Artificial Sequence: Synthetic oligonucleotide
acaagccgagugccccacg

SEQ ID NO: 966629 - RNA, 19 nt, Artificial Sequence
  Description of Artificial Sequence: Synthetic oligonucleotide
gagugacgggaccgagucc

SEQ ID NO: 966630 - RNA, 19 nt, Artificial Sequence
  Description of Artificial Sequence: Synthetic oligonucleotide
ggaagucaccgacaacaac

SEQ ID NO: 966631 - RNA, 19 nt, Artificial Sequence
  Description of Artificial Sequence: Synthetic oligonucleotide
gguaguuggucugcaguug

SEQ ID NO: 966632 - RNA, 19 nt, Artificial Sequence
  Description of Artificial Sequence: Synthetic oligonucleotide
ccaucuccuauacauacca

SEQ ID NO: 966633 - RNA, 19 nt, Artificial Sequence
  Description of Artificial Sequence: Synthetic oligonucleotide
gaucgcacaguggcgacaa

SEQ ID NO: 966634 - RNA, 19 nt, Artificial Sequence
  Description of Artificial Sequence: Synthetic oligonucleotide
ugagcccguuugucagcgg

SEQ ID NO: 966635 - RNA, 19 nt, Artificial Sequence
  Description of Artificial Sequence: Synthetic oligonucleotide
caggcucggacucugagcu

SEQ ID NO: 966636 - RNA, 19 nt, Artificial Sequence
  Description of Artificial Sequence: Synthetic oligonucleotide
cucuaccccaccuacgacu

SEQ ID NO: 966637 - RNA, 19 nt, Artificial Sequence
  Description of Artificial Sequence: Synthetic oligonucleotide
gacgauggagacgacaguu

SEQ ID NO: 966638 - RNA, 19 nt, Artificial Sequence
  Description of Artificial Sequence: Synthetic oligonucleotide
acaguggcgacaaguucca

SEQ ID NO: 966639 - RNA, 19 nt, Artificial Sequence
  Description of Artificial Sequence: Synthetic oligonucleotide
aguccaccaaacagaggug

SEQ ID NO: 966640 - RNA, 19 nt, Artificial Sequence
  Description of Artificial Sequence: Synthetic oligonucleotide
caguagcaggaaauaaaua

SEQ ID NO: 966641 - RNA, 19 nt, Artificial Sequence
  Description of Artificial Sequence: Synthetic oligonucleotide
auacaaaaguuggcucuau

SEQ ID NO: 966642 - RNA, 19 nt, Artificial Sequence
  Description of Artificial Sequence: Synthetic oligonucleotide
ccgcuuuccuuuuauacca

SEQ ID NO: 966643 - RNA, 19 nt, Artificial Sequence
  Description of Artificial Sequence: Synthetic oligonucleotide
accgagucccgcaaacugu

SEQ ID NO: 966644 - RNA, 19 nt, Artificial Sequence
  Description of Artificial Sequence: Synthetic oligonucleotide
cuaggauuugggcccggga

SEQ ID NO: 966645 - RNA, 19 nt, Artificial Sequence
  Description of Artificial Sequence: Synthetic oligonucleotide
uggcgacaaguuccaggac

SEQ ID NO: 966646 - RNA, 19 nt, Artificial Sequence
  Description of Artificial Sequence: Synthetic oligonucleotide
gucgcucuugguauuuaca

SEQ ID NO: 966647 - RNA, 19 nt, Artificial Sequence
  Description of Artificial Sequence: Synthetic oligonucleotide
caccccaccacuccuggga

SEQ ID NO: 966648 - RNA, 19 nt, Artificial Sequence
  Description of Artificial Sequence: Synthetic oligonucleotide
ccacaaacagccaccccac

SEQ ID NO: 966649 - RNA, 19 nt, Artificial Sequence
  Description of Artificial Sequence: Synthetic oligonucleotide
ggcguugguguagaggcug

SEQ ID NO: 966650 - RNA, 19 nt, Artificial Sequence
  Description of Artificial Sequence: Synthetic oligonucleotide
cacugggaucugcugacca

SEQ ID NO: 966651 - RNA, 19 nt, Artificial Sequence
  Description of Artificial Sequence: Synthetic oligonucleotide
cuccuauacauaccagugu

SEQ ID NO: 966652 - RNA, 19 nt, Artificial Sequence
  Description of Artificial Sequence: Synthetic oligonucleotide
agacaauucuugggcagua

SEQ ID NO: 966653 - RNA, 19 nt, Artificial Sequence
  Description of Artificial Sequence: Synthetic oligonucleotide
ggauauacucuguugcuuu

SEQ ID NO: 966654 - RNA, 19 nt, Artificial Sequence
  Description of Artificial Sequence: Synthetic oligonucleotide
ccuauacauaccaguguca

SEQ ID NO: 966655 - RNA, 19 nt, Artificial Sequence
  Description of Artificial Sequence: Synthetic oligonucleotide
gaaacaugccaaggauucu

SEQ ID NO: 966656 - RNA, 19 nt, Artificial Sequence
  Description of Artificial Sequence: Synthetic oligonucleotide
uuaggguguuuugguuuaa

SEQ ID NO: 966657 - RNA, 19 nt, Artificial Sequence
  Description of Artificial Sequence: Synthetic oligonucleotide
gcuuuaugaaucugucgcu

SEQ ID NO: 966658 - RNA, 19 nt, Artificial Sequence
  Description of Artificial Sequence: Synthetic oligonucleotide
uccagugcacggacuuguu

SEQ ID NO: 966659 - RNA, 19 nt, Artificial Sequence
  Description of Artificial Sequence: Synthetic oligonucleotide
gagcccguuugucagcggu

SEQ ID NO: 966660 - RNA, 19 nt, Artificial Sequence
  Description of Artificial Sequence: Synthetic oligonucleotide
ccuuaauacaaaaccucua

SEQ ID NO: 966661 - RNA, 19 nt, Artificial Sequence
  Description of Artificial Sequence: Synthetic oligonucleotide
gauuugggcccgggaugcc

SEQ ID NO: 966662 - RNA, 19 nt, Artificial Sequence
  Description of Artificial Sequence: Synthetic oligonucleotide
ugcuggugcgugugguuuu

SEQ ID NO: 966663 - RNA, 19 nt, Artificial Sequence
  Description of Artificial Sequence: Synthetic oligonucleotide
cuaccccaccuacgacucc

SEQ ID NO: 966664 - RNA, 19 nt, Artificial Sequence
  Description of Artificial Sequence: Synthetic oligonucleotide
gacucccucccugucccac

SEQ ID NO: 966665 - RNA, 19 nt, Artificial Sequence
  Description of Artificial Sequence: Synthetic oligonucleotide
ccgagucccgcaaacugug

SEQ ID NO: 966666 - RNA, 19 nt, Artificial Sequence
  Description of Artificial Sequence: Synthetic oligonucleotide
ggcccuuaauacaaaaccu

SEQ ID NO: 966667 - RNA, 19 nt, Artificial Sequence
  Description of Artificial Sequence: Synthetic oligonucleotide
cuacgacucccucccuguc

SEQ ID NO: 966668 - RNA, 19 nt, Artificial Sequence
  Description of Artificial Sequence: Synthetic oligonucleotide
acacagggaccggaugaga

SEQ ID NO: 966669 - RNA, 19 nt, Artificial Sequence
  Description of Artificial Sequence: Synthetic oligonucleotide
ccauguacucagaggucug

SEQ ID NO: 966670 - RNA, 19 nt, Artificial Sequence
  Description of Artificial Sequence: Synthetic oligonucleotide
gcgacaaguuccaggacca

SEQ ID NO: 966671 - RNA, 19 nt, Artificial Sequence
  Description of Artificial Sequence: Synthetic oligonucleotide
gccaucuccuauacauacc

SEQ ID NO: 966672 - RNA, 19 nt, Artificial Sequence
  Description of Artificial Sequence: Synthetic oligonucleotide
aggcucggacucugagcug

SEQ ID NO: 966673 - RNA, 19 nt, Artificial Sequence
  Description of Artificial Sequence: Synthetic oligonucleotide
ccggaugagagcuguuguc

SEQ ID NO: 966674 - RNA, 19 nt, Artificial Sequence
  Description of Artificial Sequence: Synthetic oligonucleotide
ugccggcaacagaguagga

SEQ ID NO: 966675 - RNA, 19 nt, Artificial Sequence
  Description of Artificial Sequence: Synthetic oligonucleotide
cugccaucuccuauacaua

SEQ ID NO: 966676 - RNA, 19 nt, Artificial Sequence
  Description of Artificial Sequence: Synthetic oligonucleotide
agcccguuugucagcggug

SEQ ID NO: 966677 - RNA, 19 nt, Artificial Sequence
  Description of Artificial Sequence: Synthetic oligonucleotide
caacaggaucgauagcuuu

SEQ ID NO: 966678 - RNA, 19 nt, Artificial Sequence
  Description of Artificial Sequence: Synthetic oligonucleotide
cgcuuuacaauaucgacau

SEQ ID NO: 966679 - RNA, 19 nt, Artificial Sequence
  Description of Artificial Sequence: Synthetic oligonucleotide
ccguuugucagcgguggag

SEQ ID NO: 966680 - RNA, 19 nt, Artificial Sequence
  Description of Artificial Sequence: Synthetic oligonucleotide
gggguuaauucugauuacu

SEQ ID NO: 966681 - RNA, 19 nt, Artificial Sequence
  Description of Artificial Sequence: Synthetic oligonucleotide
acgaggaacugaagaggau

SEQ ID NO: 966682 - RNA, 19 nt, Artificial Sequence
  Description of Artificial Sequence: Synthetic oligonucleotide
augagacgauggagacgac

SEQ ID NO: 966683 - RNA, 19 nt, Artificial Sequence
  Description of Artificial Sequence: Synthetic oligonucleotide
cagggaccggaugagagcu

SEQ ID NO: 966684 - RNA, 19 nt, Artificial Sequence
  Description of Artificial Sequence: Synthetic oligonucleotide
gguuuaguaccagguaagu

SEQ ID NO: 966685 - RNA, 19 nt, Artificial Sequence
  Description of Artificial Sequence: Synthetic oligonucleotide
cauuaugaugagcccguuu

SEQ ID NO: 966686 - RNA, 19 nt, Artificial Sequence
  Description of Artificial Sequence: Synthetic oligonucleotide
ggcccggugcagcaggcac

SEQ ID NO: 966687 - RNA, 19 nt, Artificial Sequence
  Description of Artificial Sequence: Synthetic oligonucleotide
guaagucgcucuugguauu

SEQ ID NO: 966688 - RNA, 19 nt, Artificial Sequence
  Description of Artificial Sequence: Synthetic oligonucleotide
guuuucguuccagugcauu

SEQ ID NO: 966689 - RNA, 19 nt, Artificial Sequence
  Description of Artificial Sequence: Synthetic oligonucleotide
ggguucuaacgaggaacug

SEQ ID NO: 966690 - RNA, 19 nt, Artificial Sequence
  Description of Artificial Sequence: Synthetic oligonucleotide
ccauggaauggaaucaaau

SEQ ID NO: 966691 - RNA, 19 nt, Artificial Sequence
  Description of Artificial Sequence: Synthetic oligonucleotide
cuguugucugaggaggggu

SEQ ID NO: 966692 - RNA, 19 nt, Artificial Sequence
  Description of Artificial Sequence: Synthetic oligonucleotide
cacacaacacggggcgaca

SEQ ID NO: 966693 - RNA, 19 nt, Artificial Sequence
  Description of Artificial Sequence: Synthetic oligonucleotide
ccgagugccccacgcacac

SEQ ID NO: 966694 - RNA, 19 nt, Artificial Sequence
  Description of Artificial Sequence: Synthetic oligonucleotide
gggcaguauguacaacaua

SEQ ID NO: 966695 - RNA, 19 nt, Artificial Sequence
  Description of Artificial Sequence: Synthetic oligonucleotide
ccgacugagacuacagagu

SEQ ID NO: 966696 - RNA, 19 nt, Artificial Sequence
  Description of Artificial Sequence: Synthetic oligonucleotide
ucccugcguuuucguucca

SEQ ID NO: 966697 - RNA, 19 nt, Artificial Sequence
  Description of Artificial Sequence: Synthetic oligonucleotide
cuccagugcacggacuugu

SEQ ID NO: 966698 - RNA, 19 nt, Artificial Sequence
  Description of Artificial Sequence: Synthetic oligonucleotide
cagguaagucgcucuuggu

SEQ ID NO: 966699 - RNA, 19 nt, Artificial Sequence
  Description of Artificial Sequence: Synthetic oligonucleotide
gugucacguggccuucugu

SEQ ID NO: 966700 - RNA, 19 nt, Artificial Sequence
  Description of Artificial Sequence: Synthetic oligonucleotide
cugccccacauggcuuagc

SEQ ID NO: 966701 - RNA, 19 nt, Artificial Sequence
  Description of Artificial Sequence: Synthetic oligonucleotide
agggaccggaugagagcug

SEQ ID NO: 966702 - RNA, 19 nt, Artificial Sequence
  Description of Artificial Sequence: Synthetic oligonucleotide
ccucuaccccaccuacgac

SEQ ID NO: 966703 - RNA, 19 nt, Artificial Sequence
  Description of Artificial Sequence: Synthetic oligonucleotide
ggggaagccuuaacuugca

SEQ ID NO: 966704 - RNA, 19 nt, Artificial Sequence
  Description of Artificial Sequence: Synthetic oligonucleotide
gggaagccuuaacuugcaa

SEQ ID NO: 966705 - RNA, 19 nt, Artificial Sequence
  Description of Artificial Sequence: Synthetic oligonucleotide
gccgcuugaggucaucaau

SEQ ID NO: 966706 - RNA, 19 nt, Artificial Sequence
  Description of Artificial Sequence: Synthetic oligonucleotide
ccccaccacuccugggagg

SEQ ID NO: 966707 - RNA, 19 nt, Artificial Sequence
  Description of Artificial Sequence: Synthetic oligonucleotide
ccggcugucuguccuccac

SEQ ID NO: 966708 - RNA, 19 nt, Artificial Sequence
  Description of Artificial Sequence: Synthetic oligonucleotide
ggaucgcacaguggcgaca

SEQ ID NO: 966709 - RNA, 19 nt, Artificial Sequence
  Description of Artificial Sequence: Synthetic oligonucleotide
gggccggaucgcacagugg

SEQ ID NO: 966710 - RNA, 19 nt, Artificial Sequence
  Description of Artificial Sequence: Synthetic oligonucleotide
ccaccccaccacuccuggg

SEQ ID NO: 966711 - RNA, 19 nt, Artificial Sequence
  Description of Artificial Sequence: Synthetic oligonucleotide
ggggcauuucauucagauu

SEQ ID NO: 966712 - RNA, 19 nt, Artificial Sequence
  Description of Artificial Sequence: Synthetic oligonucleotide
guccccgcuuuccuuuuau

SEQ ID NO: 966713 - RNA, 19 nt, Artificial Sequence
  Description of Artificial Sequence: Synthetic oligonucleotide
ccuacgacucccucccugu

SEQ ID NO: 966714 - RNA, 19 nt, Artificial Sequence
  Description of Artificial Sequence: Synthetic oligonucleotide
cccugcguuuucguuccag

SEQ ID NO: 966715 - RNA, 19 nt, Artificial Sequence
  Description of Artificial Sequence: Synthetic oligonucleotide
accccaccuacgacucccu

SEQ ID NO: 966716 - RNA, 19 nt, Artificial Sequence
  Description of Artificial Sequence: Synthetic oligonucleotide
ccugcguuuucguuccagu

SEQ ID NO: 966717 - RNA, 19 nt, Artificial Sequence
  Description of Artificial Sequence: Synthetic oligonucleotide
ggucuggccggcugucugu

SEQ ID NO: 966718 - RNA, 19 nt, Artificial Sequence
  Description of Artificial Sequence: Synthetic oligonucleotide
gggaccggaugagagcugu

SEQ ID NO: 966719 - RNA, 19 nt, Artificial Sequence
  Description of Artificial Sequence: Synthetic oligonucleotide
cggaucgcacaguggcgac

SEQ ID NO: 966720 - RNA, 19 nt, Artificial Sequence
  Description of Artificial Sequence: Synthetic oligonucleotide
ccccaucgaaggcagagau

SEQ ID NO: 966721 - RNA, 19 nt, Artificial Sequence
  Description of Artificial Sequence: Synthetic oligonucleotide
ggaccgagucccgcaaacu

SEQ ID NO: 966722 - RNA, 19 nt, Artificial Sequence
  Description of Artificial Sequence: Synthetic oligonucleotide
gcacuugaccuugccuucu

SEQ ID NO: 966723 - RNA, 19 nt, Artificial Sequence
  Description of Artificial Sequence: Synthetic oligonucleotide
ccuuaacuugcaagacaau

SEQ ID NO: 966724 - RNA, 19 nt, Artificial Sequence
  Description of Artificial Sequence: Synthetic oligonucleotide
ggcccgggaugccuuuucu

SEQ ID NO: 966725 - RNA, 19 nt, Artificial Sequence
  Description of Artificial Sequence: Synthetic oligonucleotide
ggccuccauccggaguuuc

SEQ ID NO: 966726 - RNA, 19 nt, Artificial Sequence
  Description of Artificial Sequence: Synthetic oligonucleotide
cgauggagacgacaguuuu

SEQ ID NO: 966727 - RNA, 19 nt, Artificial Sequence
  Description of Artificial Sequence: Synthetic oligonucleotide
cagugucacguggccuucu

SEQ ID NO: 966728 - RNA, 19 nt, Artificial Sequence
  Description of Artificial Sequence: Synthetic oligonucleotide
cucagaggucuggccggcu

SEQ ID NO: 966729 - RNA, 19 nt, Artificial Sequence
  Description of Artificial Sequence: Synthetic oligonucleotide
gcucggacucugagcugga

SEQ ID NO: 966730 - RNA, 19 nt, Artificial Sequence
  Description of Artificial Sequence: Synthetic oligonucleotide
caccuacgacucccucccu

SEQ ID NO: 966731 - RNA, 19 nt, Artificial Sequence
  Description of Artificial Sequence: Synthetic oligonucleotide
gcauuaugaugagcccguu

SEQ ID NO: 966732 - RNA, 19 nt, Artificial Sequence
  Description of Artificial Sequence: Synthetic oligonucleotide
cguuuucguuccagugcau

SEQ ID NO: 966733 - RNA, 19 nt, Artificial Sequence
  Description of Artificial Sequence: Synthetic oligonucleotide
ggaccggaugagagcuguu

SEQ ID NO: 966734 - RNA, 19 nt, Artificial Sequence
  Description of Artificial Sequence: Synthetic oligonucleotide
cgagugccccacgcacaca

SEQ ID NO: 966735 - RNA, 19 nt, Artificial Sequence
  Description of Artificial Sequence: Synthetic oligonucleotide
uucuuaaaauacuucaggg

SEQ ID NO: 966736 - RNA, 19 nt, Artificial Sequence
  Description of Artificial Sequence: Synthetic oligonucleotide
uguacaaaaggccauaagu

SEQ ID NO: 966737 - RNA, 19 nt, Artificial Sequence
  Description of Artificial Sequence: Synthetic oligonucleotide
acugguaaaucccaauucc

SEQ ID NO: 966738 - RNA, 19 nt, Artificial Sequence
  Description of Artificial Sequence: Synthetic oligonucleotide
uucucgaaauagcagaugg

SEQ ID NO: 966739 - RNA, 19 nt, Artificial Sequence
  Description of Artificial Sequence: Synthetic oligonucleotide
ugugaaaucuuucugccag

SEQ ID NO: 966740 - RNA, 19 nt, Artificial Sequence
  Description of Artificial Sequence: Synthetic oligonucleotide
gauguaauacacuugucug

SEQ ID NO: 966741 - RNA, 19 nt, Artificial Sequence
  Description of Artificial Sequence: Synthetic oligonucleotide
uuugaguaaagcaccagca

SEQ ID NO: 966742 - RNA, 19 nt, Artificial Sequence
  Description of Artificial Sequence: Synthetic oligonucleotide
uguggcaugauccucuugc

SEQ ID NO: 966743 - RNA, 19 nt, Artificial Sequence
  Description of Artificial Sequence: Synthetic oligonucleotide
uauuccaugugaaaggcac

SEQ ID NO: 966744 - RNA, 19 nt, Artificial Sequence
  Description of Artificial Sequence: Synthetic oligonucleotide
uucauugucaauguggaca

SEQ ID NO: 966745 - RNA, 19 nt, Artificial Sequence
  Description of Artificial Sequence: Synthetic oligonucleotide
aacgcugagaugugaaauc

SEQ ID NO: 966746 - RNA, 19 nt, Artificial Sequence
  Description of Artificial Sequence: Synthetic oligonucleotide
uaaaucccaauuccgugcg

SEQ ID NO: 966747 - RNA, 19 nt, Artificial Sequence
  Description of Artificial Sequence: Synthetic oligonucleotide
uuugucuugagaacacaag

SEQ ID NO: 966748 - RNA, 19 nt, Artificial Sequence
  Description of Artificial Sequence: Synthetic oligonucleotide
agagcuaucagcaucuccg

SEQ ID NO: 966749 - RNA, 19 nt, Artificial Sequence
  Description of Artificial Sequence: Synthetic oligonucleotide
ucgaaauagcagaugguag

SEQ ID NO: 966750 - RNA, 19 nt, Artificial Sequence
  Description of Artificial Sequence: Synthetic oligonucleotide
acuucagcgucacagcucg

SEQ ID NO: 966751 - RNA, 19 nt, Artificial Sequence
  Description of Artificial Sequence: Synthetic oligonucleotide
uuuucaaacucugaggggu

SEQ ID NO: 966752 - RNA, 19 nt, Artificial Sequence
  Description of Artificial Sequence: Synthetic oligonucleotide
ugagaugugaaaucuuucu

SEQ ID NO: 966753 - RNA, 19 nt, Artificial Sequence
  Description of Artificial Sequence: Synthetic oligonucleotide
caugugaaaggcaccaucc

SEQ ID NO: 966754 - RNA, 19 nt, Artificial Sequence
  Description of Artificial Sequence: Synthetic oligonucleotide
cauaaaacaucaugaggag

SEQ ID NO: 966755 - RNA, 19 nt, Artificial Sequence
  Description of Artificial Sequence: Synthetic oligonucleotide
agcacauuauugcgggucc

SEQ ID NO: 966756 - RNA, 19 nt, Artificial Sequence
  Description of Artificial Sequence: Synthetic oligonucleotide
ucggucaggugauaaacgg

SEQ ID NO: 966757 - RNA, 19 nt, Artificial Sequence
  Description of Artificial Sequence: Synthetic oligonucleotide
aacggagccgcccucaucu

SEQ ID NO: 966758 - RNA, 19 nt, Artificial Sequence
  Description of Artificial Sequence: Synthetic oligonucleotide
cucgccauucuuaaaauac

SEQ ID NO: 966759 - RNA, 19 nt, Artificial Sequence
  Description of Artificial Sequence: Synthetic oligonucleotide
uccacgauguccucggccg

SEQ ID NO: 966760 - RNA, 19 nt, Artificial Sequence
  Description of Artificial Sequence: Synthetic oligonucleotide
ugugaaaggcaccauccug

SEQ ID NO: 966761 - RNA, 19 nt, Artificial Sequence
  Description of Artificial Sequence: Synthetic oligonucleotide
guaaaucccaauuccgugc

SEQ ID NO: 966762 - RNA, 19 nt, Artificial Sequence
  Description of Artificial Sequence: Synthetic oligonucleotide
ugugggauggccuucuuac

SEQ ID NO: 966763 - RNA, 19 nt, Artificial Sequence
  Description of Artificial Sequence: Synthetic oligonucleotide
auguggacaacaucuuugg

SEQ ID NO: 966764 - RNA, 19 nt, Artificial Sequence
  Description of Artificial Sequence: Synthetic oligonucleotide
auuauugcggguccuaaga

SEQ ID NO: 966765 - RNA, 19 nt, Artificial Sequence
  Description of Artificial Sequence: Synthetic oligonucleotide
cuucaaguccuuagggucg

SEQ ID NO: 966766 - RNA, 19 nt, Artificial Sequence
  Description of Artificial Sequence: Synthetic oligonucleotide
acgcacauuguacucuucc

SEQ ID NO: 966767 - RNA, 19 nt, Artificial Sequence
  Description of Artificial Sequence: Synthetic oligonucleotide
gaggguucgaaugaaacug

SEQ ID NO: 966768 - RNA, 19 nt, Artificial Sequence
  Description of Artificial Sequence: Synthetic oligonucleotide
ugguaauggaauaauucaa

SEQ ID NO: 966769 - RNA, 19 nt, Artificial Sequence
  Description of Artificial Sequence: Synthetic oligonucleotide
cugguaaaucccaauuccg

SEQ ID NO: 966770 - RNA, 19 nt, Artificial Sequence
  Description of Artificial Sequence: Synthetic oligonucleotide
gagauucucucaaugagug

SEQ ID NO: 966771 - RNA, 19 nt, Artificial Sequence
  Description of Artificial Sequence: Synthetic oligonucleotide
uucaggaggcgucugaagu

SEQ ID NO: 966772 - RNA, 19 nt, Artificial Sequence
  Description of Artificial Sequence: Synthetic oligonucleotide
uuuucuacucucuguguca

SEQ ID NO: 966773 - RNA, 19 nt, Artificial Sequence
  Description of Artificial Sequence: Synthetic oligonucleotide
acaauuuucuacucucugu

SEQ ID NO: 966774 - RNA, 19 nt, Artificial Sequence
  Description of Artificial Sequence: Synthetic oligonucleotide
uugaguaaagcaccagcac

SEQ ID NO: 966775 - RNA, 19 nt, Artificial Sequence
  Description of Artificial Sequence: Synthetic oligonucleotide
ugguaaaucccaauuccgu

SEQ ID NO: 966776 - RNA, 19 nt, Artificial Sequence
  Description of Artificial Sequence: Synthetic oligonucleotide
guaauggaauaauucaauc

SEQ ID NO: 966777 - RNA, 19 nt, Artificial Sequence
  Description of Artificial Sequence: Synthetic oligonucleotide
cugguaauggaauaauuca

SEQ ID NO: 966778 - RNA, 19 nt, Artificial Sequence
  Description of Artificial Sequence: Synthetic oligonucleotide
agucucggggaccuggggc

SEQ ID NO: 966779 - RNA, 19 nt, Artificial Sequence
  Description of Artificial Sequence: Synthetic oligonucleotide
gugaaaggcaccauccugg

SEQ ID NO: 966780 - RNA, 19 nt, Artificial Sequence
  Description of Artificial Sequence: Synthetic oligonucleotide
gcauaaaacaucaugagga

SEQ ID NO: 966781 - RNA, 19 nt, Artificial Sequence
  Description of Artificial Sequence: Synthetic oligonucleotide
aaauacuucaggguaggaa

SEQ ID NO: 966782 - RNA, 19 nt, Artificial Sequence
  Description of Artificial Sequence: Synthetic oligonucleotide
ugcaaguuucccguagugg

SEQ ID NO: 966783 - RNA, 19 nt, Artificial Sequence
  Description of Artificial Sequence: Synthetic oligonucleotide
ugaagagaccuuuguggag

SEQ ID NO: 966784 - RNA, 19 nt, Artificial Sequence
  Description of Artificial Sequence: Synthetic oligonucleotide
gcuaucagcaucuccgugg

SEQ ID NO: 966785 - RNA, 19 nt, Artificial Sequence
  Description of Artificial Sequence: Synthetic oligonucleotide
acgcauaguucucauacug

SEQ ID NO: 966786 - RNA, 19 nt, Artificial Sequence
  Description of Artificial Sequence: Synthetic oligonucleotide
aaguuucccguagugguag

SEQ ID NO: 966787 - RNA, 19 nt, Artificial Sequence
  Description of Artificial Sequence: Synthetic oligonucleotide
uuacagugugggcaccacg

SEQ ID NO: 966788 - RNA, 19 nt, Artificial Sequence
  Description of Artificial Sequence: Synthetic oligonucleotide
ugauaaacggagccgcccu

SEQ ID NO: 966789 - RNA, 19 nt, Artificial Sequence
  Description of Artificial Sequence: Synthetic oligonucleotide
uucggguccuucagaaagg

SEQ ID NO: 966790 - RNA, 19 nt, Artificial Sequence
  Description of Artificial Sequence: Synthetic oligonucleotide
ucggagauucucucaauga

SEQ ID NO: 966791 - RNA, 19 nt, Artificial Sequence
  Description of Artificial Sequence: Synthetic oligonucleotide
ucuacucucugugucacca

SEQ ID NO: 966792 - RNA, 19 nt, Artificial Sequence
  Description of Artificial Sequence: Synthetic oligonucleotide
agggacuucagcgucacag

SEQ ID NO: 966793 - RNA, 19 nt, Artificial Sequence
  Description of Artificial Sequence: Synthetic oligonucleotide
gauucucucaaugagugaa

SEQ ID NO: 966794 - RNA, 19 nt, Artificial Sequence
  Description of Artificial Sequence: Synthetic oligonucleotide
agcucggucauauuccaug

SEQ ID NO: 966795 - RNA, 19 nt, Artificial Sequence
  Description of Artificial Sequence: Synthetic oligonucleotide
cacagcucggucauauucc

SEQ ID NO: 966796 - RNA, 19 nt, Artificial Sequence
  Description of Artificial Sequence: Synthetic oligonucleotide
ugguaguaguggaaaguug

SEQ ID NO: 966797 - RNA, 19 nt, Artificial Sequence
  Description of Artificial Sequence: Synthetic oligonucleotide
uuuguggaggacagccaag

SEQ ID NO: 966798 - RNA, 19 nt, Artificial Sequence
  Description of Artificial Sequence: Synthetic oligonucleotide
guaggaaacgcugagaugu

SEQ ID NO: 966799 - RNA, 19 nt, Artificial Sequence
  Description of Artificial Sequence: Synthetic oligonucleotide
aguggaaaguuggguaggc

SEQ ID NO: 966800 - RNA, 19 nt, Artificial Sequence
  Description of Artificial Sequence: Synthetic oligonucleotide
uuagggucggagauucucu

SEQ ID NO: 966801 - RNA, 19 nt, Artificial Sequence
  Description of Artificial Sequence: Synthetic oligonucleotide
ugaaaucuuucugccaggc

SEQ ID NO: 966802 - RNA, 19 nt, Artificial Sequence
  Description of Artificial Sequence: Synthetic oligonucleotide
augacgaggacagaggagu

SEQ ID NO: 966803 - RNA, 19 nt, Artificial Sequence
  Description of Artificial Sequence: Synthetic oligonucleotide
gggagcauaaaacaucaug

SEQ ID NO: 966804 - RNA, 19 nt, Artificial Sequence
  Description of Artificial Sequence: Synthetic oligonucleotide
aaacgcugagaugugaaau

SEQ ID NO: 966805 - RNA, 19 nt, Artificial Sequence
  Description of Artificial Sequence: Synthetic oligonucleotide
aaaucccaauuccgugcgg

SEQ ID NO: 966806 - RNA, 19 nt, Artificial Sequence
  Description of Artificial Sequence: Synthetic oligonucleotide
gaaaucuuucugccaggcc

SEQ ID NO: 966807 - RNA, 19 nt, Artificial Sequence
  Description of Artificial Sequence: Synthetic oligonucleotide
ucgccauucuuaaaauacu

SEQ ID NO: 966808 - RNA, 19 nt, Artificial Sequence
  Description of Artificial Sequence: Synthetic oligonucleotide
uuauugcggguccuaagaa

SEQ ID NO: 966809 - RNA, 19 nt, Artificial Sequence
  Description of Artificial Sequence: Synthetic oligonucleotide
gguaaaucccaauuccgug

SEQ ID NO: 966810 - RNA, 19 nt, Artificial Sequence
  Description of Artificial Sequence: Synthetic oligonucleotide
uguggacaacaucuuuggc

SEQ ID NO: 966811 - RNA, 19 nt, Artificial Sequence
  Description of Artificial Sequence: Synthetic oligonucleotide
ucgaaugaaacugguaaau

SEQ ID NO: 966812 - RNA, 19 nt, Artificial Sequence
  Description of Artificial Sequence: Synthetic oligonucleotide
cacucaauaaacuucuucu

SEQ ID NO: 966813 - RNA, 19 nt, Artificial Sequence
  Description of Artificial Sequence: Synthetic oligonucleotide
ggacgcauaguucucauac

SEQ ID NO: 966814 - RNA, 19 nt, Artificial Sequence
  Description of Artificial Sequence: Synthetic oligonucleotide
ucucgaaauagcagauggu

SEQ ID NO: 966815 - RNA, 19 nt, Artificial Sequence
  Description of Artificial Sequence: Synthetic oligonucleotide
aauacacuugucuguuguu

SEQ ID NO: 966816 - RNA, 19 nt, Artificial Sequence
  Description of Artificial Sequence: Synthetic oligonucleotide
uuucccguagugguaguag

SEQ ID NO: 966817 - RNA, 19 nt, Artificial Sequence
  Description of Artificial Sequence: Synthetic oligonucleotide
aaguuggguaggccuucac

SEQ ID NO: 966818 - RNA, 19 nt, Artificial Sequence
  Description of Artificial Sequence: Synthetic oligonucleotide
cauuauugcggguccuaag

SEQ ID NO: 966819 - RNA, 19 nt, Artificial Sequence
  Description of Artificial Sequence: Synthetic oligonucleotide
aguccuuagggucggagau

SEQ ID NO: 966820 - RNA, 19 nt, Artificial Sequence
  Description of Artificial Sequence: Synthetic oligonucleotide
uaguggaaaguuggguagg

SEQ ID NO: 966821 - RNA, 19 nt, Artificial Sequence
  Description of Artificial Sequence: Synthetic oligonucleotide
uagcuugagaugacuuuca

SEQ ID NO: 966822 - RNA, 19 nt, Artificial Sequence
  Description of Artificial Sequence: Synthetic oligonucleotide
aguagcuugagaugacuuu

SEQ ID NO: 966823 - RNA, 19 nt, Artificial Sequence
  Description of Artificial Sequence: Synthetic oligonucleotide
cacaguggacaguagcuug

SEQ ID NO: 966824 - RNA, 19 nt, Artificial Sequence
  Description of Artificial Sequence: Synthetic oligonucleotide
gucuugagaacacaaggaa

SEQ ID NO: 966825 - RNA, 19 nt, Artificial Sequence
  Description of Artificial Sequence: Synthetic oligonucleotide
ucugcgaccggcucucgug

SEQ ID NO: 966826 - RNA, 19 nt, Artificial Sequence
  Description of Artificial Sequence: Synthetic oligonucleotide
uaggcaucauucacagugu

SEQ ID NO: 966827 - RNA, 19 nt, Artificial Sequence
  Description of Artificial Sequence: Synthetic oligonucleotide
gucggagauucucucaaug

SEQ ID NO: 966828 - RNA, 19 nt, Artificial Sequence
  Description of Artificial Sequence: Synthetic oligonucleotide
uggccuucuuacagugugg

SEQ ID NO: 966829 - RNA, 19 nt, Artificial Sequence
  Description of Artificial Sequence: Synthetic oligonucleotide
gguccuaagaaguuucuuc

SEQ ID NO: 966830 - RNA, 19 nt, Artificial Sequence
  Description of Artificial Sequence: Synthetic oligonucleotide
auugcggguccuaagaagu

SEQ ID NO: 966831 - RNA, 19 nt, Artificial Sequence
  Description of Artificial Sequence: Synthetic oligonucleotide
cuaagaaguuucuucaagu

SEQ ID NO: 966832 - RNA, 19 nt, Artificial Sequence
  Description of Artificial Sequence: Synthetic oligonucleotide
caugacgaggacagaggag

SEQ ID NO: 966833 - RNA, 19 nt, Artificial Sequence
  Description of Artificial Sequence: Synthetic oligonucleotide
aaucuuucugccaggcccu

SEQ ID NO: 966834 - RNA, 19 nt, Artificial Sequence
  Description of Artificial Sequence: Synthetic oligonucleotide
aaacggagccgcccucauc

SEQ ID NO: 966835 - RNA, 19 nt, Artificial Sequence
  Description of Artificial Sequence: Synthetic oligonucleotide
agaggagugcuccuucaca

SEQ ID NO: 966836 - RNA, 19 nt, Artificial Sequence
  Description of Artificial Sequence: Synthetic oligonucleotide
agugguaguaguggaaagu

SEQ ID NO: 966837 - RNA, 19 nt, Artificial Sequence
  Description of Artificial Sequence: Synthetic oligonucleotide
caggugauaaacggagccg

SEQ ID NO: 966838 - RNA, 19 nt, Artificial Sequence
  Description of Artificial Sequence: Synthetic oligonucleotide
cuuuugaggucucccuccc

SEQ ID NO: 966839 - RNA, 19 nt, Artificial Sequence
  Description of Artificial Sequence: Synthetic oligonucleotide
uagucuuuugaggucuccc

SEQ ID NO: 966840 - RNA, 19 nt, Artificial Sequence
  Description of Artificial Sequence: Synthetic oligonucleotide
uuucucgaaauagcagaug

SEQ ID NO: 966841 - RNA, 19 nt, Artificial Sequence
  Description of Artificial Sequence: Synthetic oligonucleotide
cacuccacgauguccucgg

SEQ ID NO: 966842 - RNA, 19 nt, Artificial Sequence
  Description of Artificial Sequence: Synthetic oligonucleotide
uuggguaggccuucacggc

SEQ ID NO: 966843 - RNA, 19 nt, Artificial Sequence
  Description of Artificial Sequence: Synthetic oligonucleotide
cagggagcauaaaacauca

SEQ ID NO: 966844 - RNA, 19 nt, Artificial Sequence
  Description of Artificial Sequence: Synthetic oligonucleotide
auccacucaauaaacuucu

SEQ ID NO: 966845 - RNA, 19 nt, Artificial Sequence
  Description of Artificial Sequence: Synthetic oligonucleotide
ugaagugugggauggccuu

SEQ ID NO: 966846 - RNA, 19 nt, Artificial Sequence
  Description of Artificial Sequence: Synthetic oligonucleotide
ugccuuguccuuucacugc

SEQ ID NO: 966847 - RNA, 19 nt, Artificial Sequence
  Description of Artificial Sequence: Synthetic oligonucleotide
cuucaggguaucccggaag

SEQ ID NO: 966848 - RNA, 19 nt, Artificial Sequence
  Description of Artificial Sequence: Synthetic oligonucleotide
aucggucaggugauaaacg

SEQ ID NO: 966849 - RNA, 19 nt, Artificial Sequence
  Description of Artificial Sequence: Synthetic oligonucleotide
caucggucaggugauaaac

SEQ ID NO: 966850 - RNA, 19 nt, Artificial Sequence
  Description of Artificial Sequence: Synthetic oligonucleotide
uccuaagaaguuucuucaa

SEQ ID NO: 966851 - RNA, 19 nt, Artificial Sequence
  Description of Artificial Sequence: Synthetic oligonucleotide
ugcaaggacaccagagcua

SEQ ID NO: 966852 - RNA, 19 nt, Artificial Sequence
  Description of Artificial Sequence: Synthetic oligonucleotide
augugaaaggcaccauccu

SEQ ID NO: 966853 - RNA, 19 nt, Artificial Sequence
  Description of Artificial Sequence: Synthetic oligonucleotide
uucgcagccgcuccccgcc

SEQ ID NO: 966854 - RNA, 19 nt, Artificial Sequence
  Description of Artificial Sequence: Synthetic oligonucleotide
gaggagugcuccuucacaa

SEQ ID NO: 966855 - RNA, 19 nt, Artificial Sequence
  Description of Artificial Sequence: Synthetic oligonucleotide
uaggaaacgcugagaugug

SEQ ID NO: 966856 - RNA, 19 nt, Artificial Sequence
  Description of Artificial Sequence: Synthetic oligonucleotide
aaaggccauaaguggcuau

SEQ ID NO: 966857 - RNA, 19 nt, Artificial Sequence
  Description of Artificial Sequence: Synthetic oligonucleotide
gaccuuucggguccuucag

SEQ ID NO: 966858 - RNA, 19 nt, Artificial Sequence
  Description of Artificial Sequence: Synthetic oligonucleotide
aucgacagcugcaaggaca

SEQ ID NO: 966859 - RNA, 19 nt, Artificial Sequence
  Description of Artificial Sequence: Synthetic oligonucleotide
ugacgaggacagaggagug

SEQ ID NO: 966860 - RNA, 19 nt, Artificial Sequence
  Description of Artificial Sequence: Synthetic oligonucleotide
guggacaguagcuugagau

SEQ ID NO: 966861 - RNA, 19 nt, Artificial Sequence
  Description of Artificial Sequence: Synthetic oligonucleotide
gaaauguggcaugauccuc

SEQ ID NO: 966862 - RNA, 19 nt, Artificial Sequence
  Description of Artificial Sequence: Synthetic oligonucleotide
guaucccggaaguuauccc

SEQ ID NO: 966863 - RNA, 19 nt, Artificial Sequence
  Description of Artificial Sequence: Synthetic oligonucleotide
ugcggucacuuucauacuu

SEQ ID NO: 966864 - RNA, 19 nt, Artificial Sequence
  Description of Artificial Sequence: Synthetic oligonucleotide
guggccucgcacuugggug

SEQ ID NO: 966865 - RNA, 19 nt, Artificial Sequence
  Description of Artificial Sequence: Synthetic oligonucleotide
uuccgugcggucacuuuca

SEQ ID NO: 966866 - RNA, 19 nt, Artificial Sequence
  Description of Artificial Sequence: Synthetic oligonucleotide
cuuagggucggagauucuc

SEQ ID NO: 966867 - RNA, 19 nt, Artificial Sequence
  Description of Artificial Sequence: Synthetic oligonucleotide
agauucucucaaugaguga

SEQ ID NO: 966868 - RNA, 19 nt, Artificial Sequence
  Description of Artificial Sequence: Synthetic oligonucleotide
uucccguagugguaguagu

SEQ ID NO: 966869 - RNA, 19 nt, Artificial Sequence
  Description of Artificial Sequence: Synthetic oligonucleotide
ucaucggucaggugauaaa

SEQ ID NO: 966870 - RNA, 19 nt, Artificial Sequence
  Description of Artificial Sequence: Synthetic oligonucleotide
ucucgugcacgcccgccag

SEQ ID NO: 966871 - RNA, 19 nt, Artificial Sequence
  Description of Artificial Sequence: Synthetic oligonucleotide
agaaaccgcccuuucucga

SEQ ID NO: 966872 - RNA, 19 nt, Artificial Sequence
  Description of Artificial Sequence: Synthetic oligonucleotide
aauuccgugcggucacuuu

SEQ ID NO: 966873 - RNA, 19 nt, Artificial Sequence
  Description of Artificial Sequence: Synthetic oligonucleotide
ucuucaggguaucccggaa

SEQ ID NO: 966874 - RNA, 19 nt, Artificial Sequence
  Description of Artificial Sequence: Synthetic oligonucleotide
gugauaaacggagccgccc

SEQ ID NO: 966875 - RNA, 19 nt, Artificial Sequence
  Description of Artificial Sequence: Synthetic oligonucleotide
uucaucggucaggugauaa

SEQ ID NO: 966876 - RNA, 19 nt, Artificial Sequence
  Description of Artificial Sequence: Synthetic oligonucleotide
gauaaacggagccgcccuc

SEQ ID NO: 966877 - RNA, 19 nt, Artificial Sequence
  Description of Artificial Sequence: Synthetic oligonucleotide
gauggugccuuguccuuuc

SEQ ID NO: 966878 - RNA, 19 nt, Artificial Sequence
  Description of Artificial Sequence: Synthetic oligonucleotide
aggguugugcauccacuca

SEQ ID NO: 966879 - RNA, 19 nt, Artificial Sequence
  Description of Artificial Sequence: Synthetic oligonucleotide
ucagcgucacagcucgguc

SEQ ID NO: 966880 - RNA, 19 nt, Artificial Sequence
  Description of Artificial Sequence: Synthetic oligonucleotide
gguaucccggaaguuaucc

SEQ ID NO: 966881 - RNA, 19 nt, Artificial Sequence
  Description of Artificial Sequence: Synthetic oligonucleotide
caucagauguaauacacuu

SEQ ID NO: 966882 - RNA, 19 nt, Artificial Sequence
  Description of Artificial Sequence: Synthetic oligonucleotide
cucgaaauagcagauggua

SEQ ID NO: 966883 - RNA, 19 nt, Artificial Sequence
  Description of Artificial Sequence: Synthetic oligonucleotide
uucagcgucacagcucggu

SEQ ID NO: 966884 - RNA, 19 nt, Artificial Sequence
  Description of Artificial Sequence: Synthetic oligonucleotide
aaaccgcccuuucucgaaa

SEQ ID NO: 966885 - RNA, 19 nt, Artificial Sequence
  Description of Artificial Sequence: Synthetic oligonucleotide
ucuagucuuuugaggucuc

SEQ ID NO: 966886 - RNA, 19 nt, Artificial Sequence
  Description of Artificial Sequence: Synthetic oligonucleotide
cauggggcguggaacauga

SEQ ID NO: 966887 - RNA, 19 nt, Artificial Sequence
  Description of Artificial Sequence: Synthetic oligonucleotide
guaaagcaccagcacauua

SEQ ID NO: 966888 - RNA, 19 nt, Artificial Sequence
  Description of Artificial Sequence: Synthetic oligonucleotide
gacgaggacagaggagugc

SEQ ID NO: 966889 - RNA, 19 nt, Artificial Sequence
  Description of Artificial Sequence: Synthetic oligonucleotide
cagauguaauacacuuguc

SEQ ID NO: 966890 - RNA, 19 nt, Artificial Sequence
  Description of Artificial Sequence: Synthetic oligonucleotide
aaggccauaaguggcuaua

SEQ ID NO: 966891 - RNA, 19 nt, Artificial Sequence
  Description of Artificial Sequence: Synthetic oligonucleotide
ucaaacucugagggguaga

SEQ ID NO: 966892 - RNA, 19 nt, Artificial Sequence
  Description of Artificial Sequence: Synthetic oligonucleotide
caacaucuuuggcuccagg

SEQ ID NO: 966893 - RNA, 19 nt, Artificial Sequence
  Description of Artificial Sequence: Synthetic oligonucleotide
acgcugagaugugaaaucu

SEQ ID NO: 966894 - RNA, 19 nt, Artificial Sequence
  Description of Artificial Sequence: Synthetic oligonucleotide
ugcucgccauucuuaaaau

SEQ ID NO: 966895 - RNA, 19 nt, Artificial Sequence
  Description of Artificial Sequence: Synthetic oligonucleotide
aaaaggccauaaguggcua

SEQ ID NO: 966896 - RNA, 19 nt, Artificial Sequence
  Description of Artificial Sequence: Synthetic oligonucleotide
gaacagaaaccgcccuuuc

SEQ ID NO: 966897 - RNA, 19 nt, Artificial Sequence
  Description of Artificial Sequence: Synthetic oligonucleotide
ucggguccuucagaaaggc

SEQ ID NO: 966898 - RNA, 19 nt, Artificial Sequence
  Description of Artificial Sequence: Synthetic oligonucleotide
cugcaaguuucccguagug

SEQ ID NO: 966899 - RNA, 19 nt, Artificial Sequence
  Description of Artificial Sequence: Synthetic oligonucleotide
uguacucuuccuugauauu

SEQ ID NO: 966900 - RNA, 19 nt, Artificial Sequence
  Description of Artificial Sequence: Synthetic oligonucleotide
uucuacucucugugucacc

SEQ ID NO: 966901 - RNA, 19 nt, Artificial Sequence
  Description of Artificial Sequence: Synthetic oligonucleotide
cacuagggacuucagcguc

SEQ ID NO: 966902 - RNA, 19 nt, Artificial Sequence
  Description of Artificial Sequence: Synthetic oligonucleotide
gaaaccgcccuuucucgaa

SEQ ID NO: 966903 - RNA, 19 nt, Artificial Sequence
  Description of Artificial Sequence: Synthetic oligonucleotide
gagucucggggaccugggg

SEQ ID NO: 966904 - RNA, 19 nt, Artificial Sequence
  Description of Artificial Sequence: Synthetic oligonucleotide
uagggucggagauucucuc

SEQ ID NO: 966905 - RNA, 19 nt, Artificial Sequence
  Description of Artificial Sequence: Synthetic oligonucleotide
auaaacggagccgcccuca

SEQ ID NO: 966906 - RNA, 19 nt, Artificial Sequence
  Description of Artificial Sequence: Synthetic oligonucleotide
gaguaaagcaccagcacau

SEQ ID NO: 966907 - RNA, 19 nt, Artificial Sequence
  Description of Artificial Sequence: Synthetic oligonucleotide
cugcucgccauucuuaaaa

SEQ ID NO: 966908 - RNA, 19 nt, Artificial Sequence
  Description of Artificial Sequence: Synthetic oligonucleotide
ggcagcacaggcaaucuug

SEQ ID NO: 966909 - RNA, 19 nt, Artificial Sequence
  Description of Artificial Sequence: Synthetic oligonucleotide
gugcacgcccgccagcucc

SEQ ID NO: 966910 - RNA, 19 nt, Artificial Sequence
  Description of Artificial Sequence: Synthetic oligonucleotide
agcgucacagcucggucau

SEQ ID NO: 966911 - RNA, 19 nt, Artificial Sequence
  Description of Artificial Sequence: Synthetic oligonucleotide
cuagucuuuugaggucucc

SEQ ID NO: 966912 - RNA, 19 nt, Artificial Sequence
  Description of Artificial Sequence: Synthetic oligonucleotide
caaaaggccauaaguggcu

SEQ ID NO: 966913 - RNA, 19 nt, Artificial Sequence
  Description of Artificial Sequence: Synthetic oligonucleotide
accagggagcauaaaacau

SEQ ID NO: 966914 - RNA, 19 nt, Artificial Sequence
  Description of Artificial Sequence: Synthetic oligonucleotide
agggucggagauucucuca

SEQ ID NO: 966915 - RNA, 19 nt, Artificial Sequence
  Description of Artificial Sequence: Synthetic oligonucleotide
cacggggcauagaacauga

SEQ ID NO: 966916 - RNA, 19 nt, Artificial Sequence
  Description of Artificial Sequence: Synthetic oligonucleotide
acaggcaaucuugcgguca

SEQ ID NO: 966917 - RNA, 19 nt, Artificial Sequence
  Description of Artificial Sequence: Synthetic oligonucleotide
gcaaguuucccguaguggu

SEQ ID NO: 966918 - RNA, 19 nt, Artificial Sequence
  Description of Artificial Sequence: Synthetic oligonucleotide
gccacggccacuucgcagc

SEQ ID NO: 966919 - RNA, 19 nt, Artificial Sequence
  Description of Artificial Sequence: Synthetic oligonucleotide
gacaguagcuugagaugac

SEQ ID NO: 966920 - RNA, 19 nt, Artificial Sequence
  Description of Artificial Sequence: Synthetic oligonucleotide
acauuauugcggguccuaa

SEQ ID NO: 966921 - RNA, 19 nt, Artificial Sequence
  Description of Artificial Sequence: Synthetic oligonucleotide
cuccccgccuccgaguucc

SEQ ID NO: 966922 - RNA, 19 nt, Artificial Sequence
  Description of Artificial Sequence: Synthetic oligonucleotide
ccacucaauaaacuucuuc

SEQ ID NO: 966923 - RNA, 19 nt, Artificial Sequence
  Description of Artificial Sequence: Synthetic oligonucleotide
cugcgaccggcucucgugc

SEQ ID NO: 966924 - RNA, 19 nt, Artificial Sequence
  Description of Artificial Sequence: Synthetic oligonucleotide
cggagauucucucaaugag

SEQ ID NO: 966925 - RNA, 19 nt, Artificial Sequence
  Description of Artificial Sequence: Synthetic oligonucleotide
cuuucucgaaauagcagau

SEQ ID NO: 966926 - RNA, 19 nt, Artificial Sequence
  Description of Artificial Sequence: Synthetic oligonucleotide
ucaugaggagugguuucuc

SEQ ID NO: 966927 - RNA, 19 nt, Artificial Sequence
  Description of Artificial Sequence: Synthetic oligonucleotide
gacgcauaguucucauacu

SEQ ID NO: 966928 - RNA, 19 nt, Artificial Sequence
  Description of Artificial Sequence: Synthetic oligonucleotide
aggaaacgcugagauguga

SEQ ID NO: 966929 - RNA, 19 nt, Artificial Sequence
  Description of Artificial Sequence: Synthetic oligonucleotide
caguccacggcagcacagg

SEQ ID NO: 966930 - RNA, 19 nt, Artificial Sequence
  Description of Artificial Sequence: Synthetic oligonucleotide
cuagggacuucagcgucac

SEQ ID NO: 966931 - RNA, 19 nt, Artificial Sequence
  Description of Artificial Sequence: Synthetic oligonucleotide
acuagggacuucagcguca

SEQ ID NO: 966932 - RNA, 19 nt, Artificial Sequence
  Description of Artificial Sequence: Synthetic oligonucleotide
cugcaaggacaccagagcu

SEQ ID NO: 966933 - RNA, 19 nt, Artificial Sequence
  Description of Artificial Sequence: Synthetic oligonucleotide
cggggcauagaacaugacc

SEQ ID NO: 966934 - RNA, 19 nt, Artificial Sequence
  Description of Artificial Sequence: Synthetic oligonucleotide
aggguaucccggaaguuau

SEQ ID NO: 966935 - RNA, 19 nt, Artificial Sequence
  Description of Artificial Sequence: Synthetic oligonucleotide
cucgcacuuggguggcagc

SEQ ID NO: 966936 - RNA, 19 nt, Artificial Sequence
  Description of Artificial Sequence: Synthetic oligonucleotide
ccaugugaaaggcaccauc

SEQ ID NO: 966937 - RNA, 19 nt, Artificial Sequence
  Description of Artificial Sequence: Synthetic oligonucleotide
ugaggucaacuuucaucuu

SEQ ID NO: 966938 - RNA, 19 nt, Artificial Sequence
  Description of Artificial Sequence: Synthetic oligonucleotide
cacggcagcacaggcaauc

SEQ ID NO: 966939 - RNA, 19 nt, Artificial Sequence
  Description of Artificial Sequence: Synthetic oligonucleotide
uugcggguccuaagaaguu

SEQ ID NO: 966940 - RNA, 19 nt, Artificial Sequence
  Description of Artificial Sequence: Synthetic oligonucleotide
aggcaucauucacagugua

SEQ ID NO: 966941 - RNA, 19 nt, Artificial Sequence
  Description of Artificial Sequence: Synthetic oligonucleotide
guacucuuccuugauauuu

SEQ ID NO: 966942 - RNA, 19 nt, Artificial Sequence
  Description of Artificial Sequence: Synthetic oligonucleotide
accgcggccaacagccacg

SEQ ID NO: 966943 - RNA, 19 nt, Artificial Sequence
  Description of Artificial Sequence: Synthetic oligonucleotide
aguuucccguagugguagu

SEQ ID NO: 966944 - RNA, 19 nt, Artificial Sequence
  Description of Artificial Sequence: Synthetic oligonucleotide
ggugauaaacggagccgcc

SEQ ID NO: 966945 - RNA, 19 nt, Artificial Sequence
  Description of Artificial Sequence: Synthetic oligonucleotide
ucgugcacgcccgccagcu

SEQ ID NO: 966946 - RNA, 19 nt, Artificial Sequence
  Description of Artificial Sequence: Synthetic oligonucleotide
aggaccaccccgaucgcca

SEQ ID NO: 966947 - RNA, 19 nt, Artificial Sequence
  Description of Artificial Sequence: Synthetic oligonucleotide
caaguuucccguaguggua

SEQ ID NO: 966948 - RNA, 19 nt, Artificial Sequence
  Description of Artificial Sequence: Synthetic oligonucleotide
cagcgucacagcucgguca

SEQ ID NO: 966949 - RNA, 19 nt, Artificial Sequence
  Description of Artificial Sequence: Synthetic oligonucleotide
ugcggguccuaagaaguuu

SEQ ID NO: 966950 - RNA, 19 nt, Artificial Sequence
  Description of Artificial Sequence: Synthetic oligonucleotide
aguaaagcaccagcacauu

SEQ ID NO: 966951 - RNA, 19 nt, Artificial Sequence
  Description of Artificial Sequence: Synthetic oligonucleotide
agccaagcuggcaggacca

SEQ ID NO: 966952 - RNA, 19 nt, Artificial Sequence
  Description of Artificial Sequence: Synthetic oligonucleotide
cucuagucuuuugaggucu

SEQ ID NO: 966953 - RNA, 19 nt, Artificial Sequence
  Description of Artificial Sequence: Synthetic oligonucleotide
caugaggagugguuucucu

SEQ ID NO: 966954 - RNA, 19 nt, Artificial Sequence
  Description of Artificial Sequence: Synthetic oligonucleotide
acaugaccaaggugugcuu

SEQ ID NO: 966955 - RNA, 19 nt, Artificial Sequence
  Description of Artificial Sequence: Synthetic oligonucleotide
cuucagcgucacagcucgg

SEQ ID NO: 966956 - RNA, 19 nt, Artificial Sequence
  Description of Artificial Sequence: Synthetic oligonucleotide
aggccauaaguggcuauaa

SEQ ID NO: 966957 - RNA, 19 nt, Artificial Sequence
  Description of Artificial Sequence: Synthetic oligonucleotide
cauccccgcugccuccugc

SEQ ID NO: 966958 - RNA, 19 nt, Artificial Sequence
  Description of Artificial Sequence: Synthetic oligonucleotide
gaccuuuguggaggacagc

SEQ ID NO: 966959 - RNA, 19 nt, Artificial Sequence
  Description of Artificial Sequence: Synthetic oligonucleotide
caggguaucccggaaguua

SEQ ID NO: 966960 - RNA, 19 nt, Artificial Sequence
  Description of Artificial Sequence: Synthetic oligonucleotide
cuuucggguccuucagaaa

SEQ ID NO: 966961 - RNA, 19 nt, Artificial Sequence
  Description of Artificial Sequence: Synthetic oligonucleotide
ggcgucugaaguccuuuuc

SEQ ID NO: 966962 - RNA, 19 nt, Artificial Sequence
  Description of Artificial Sequence: Synthetic oligonucleotide
ucaggguaucccggaaguu

SEQ ID NO: 966963 - RNA, 19 nt, Artificial Sequence
  Description of Artificial Sequence: Synthetic oligonucleotide
gcggucaucuuugaaggca

SEQ ID NO: 966964 - RNA, 19 nt, Artificial Sequence
  Description of Artificial Sequence: Synthetic oligonucleotide
ggaaacgcugagaugugaa

SEQ ID NO: 966965 - RNA, 19 nt, Artificial Sequence
  Description of Artificial Sequence: Synthetic oligonucleotide
cacuucgcagccgcucccc

SEQ ID NO: 966966 - RNA, 19 nt, Artificial Sequence
  Description of Artificial Sequence: Synthetic oligonucleotide
ccuugacacaguccacggc

SEQ ID NO: 966967 - RNA, 19 nt, Artificial Sequence
  Description of Artificial Sequence: Synthetic oligonucleotide
aaguggccucgcacuuggg

SEQ ID NO: 966968 - RNA, 19 nt, Artificial Sequence
  Description of Artificial Sequence: Synthetic oligonucleotide
cgcccuuucucgaaauagc

SEQ ID NO: 966969 - RNA, 19 nt, Artificial Sequence
  Description of Artificial Sequence: Synthetic oligonucleotide
caccgcggccaacagccac

SEQ ID NO: 966970 - RNA, 19 nt, Artificial Sequence
  Description of Artificial Sequence: Synthetic oligonucleotide
ggagccgcccucaucugcc

SEQ ID NO: 966971 - RNA, 19 nt, Artificial Sequence
  Description of Artificial Sequence: Synthetic oligonucleotide
gcauccacucaauaaacuu

SEQ ID NO: 966972 - RNA, 19 nt, Artificial Sequence
  Description of Artificial Sequence: Synthetic oligonucleotide
gguggcaucgacagcugca

SEQ ID NO: 966973 - RNA, 19 nt, Artificial Sequence
  Description of Artificial Sequence: Synthetic oligonucleotide
ucggccguggacgcauagu

SEQ ID NO: 966974 - RNA, 19 nt, Artificial Sequence
  Description of Artificial Sequence: Synthetic oligonucleotide
gggucggagauucucucaa

SEQ ID NO: 966975 - RNA, 19 nt, Artificial Sequence
  Description of Artificial Sequence: Synthetic oligonucleotide
cacgcacauuguacucuuc

SEQ ID NO: 966976 - RNA, 19 nt, Artificial Sequence
  Description of Artificial Sequence: Synthetic oligonucleotide
ggagucucggggaccuggg

SEQ ID NO: 966977 - RNA, 19 nt, Artificial Sequence
  Description of Artificial Sequence: Synthetic oligonucleotide
cagcacccucaaacucugg

SEQ ID NO: 966978 - RNA, 19 nt, Artificial Sequence
  Description of Artificial Sequence: Synthetic oligonucleotide
uccgugcggucacuuucau

SEQ ID NO: 966979 - RNA, 19 nt, Artificial Sequence
  Description of Artificial Sequence: Synthetic oligonucleotide
acggggcauagaacaugac

SEQ ID NO: 966980 - RNA, 19 nt, Artificial Sequence
  Description of Artificial Sequence: Synthetic oligonucleotide
cucccucccggaggguucg

SEQ ID NO: 966981 - RNA, 19 nt, Artificial Sequence
  Description of Artificial Sequence: Synthetic oligonucleotide
cucucgugcacgcccgcca

SEQ ID NO: 966982 - RNA, 19 nt, Artificial Sequence
  Description of Artificial Sequence: Synthetic oligonucleotide
caucagcuguggcagugaa

SEQ ID NO: 966983 - RNA, 19 nt, Artificial Sequence
  Description of Artificial Sequence: Synthetic oligonucleotide
ggacuucagcgucacagcu

SEQ ID NO: 966984 - RNA, 19 nt, Artificial Sequence
  Description of Artificial Sequence: Synthetic oligonucleotide
cucggccguggacgcauag

SEQ ID NO: 966985 - RNA, 19 nt, Artificial Sequence
  Description of Artificial Sequence: Synthetic oligonucleotide
gcgggguuacagcuccucc

SEQ ID NO: 966986 - RNA, 19 nt, Artificial Sequence
  Description of Artificial Sequence: Synthetic oligonucleotide
cccgccuccgaguucccgg

SEQ ID NO: 966987 - RNA, 19 nt, Artificial Sequence
  Description of Artificial Sequence: Synthetic oligonucleotide
ccgcccuuucucgaaauag

SEQ ID NO: 966988 - RNA, 19 nt, Artificial Sequence
  Description of Artificial Sequence: Synthetic oligonucleotide
cccgaucgccaguagcagc

SEQ ID NO: 966989 - RNA, 19 nt, Artificial Sequence
  Description of Artificial Sequence: Synthetic oligonucleotide
ugaccaaggugugcuucuu

SEQ ID NO: 966990 - RNA, 19 nt, Artificial Sequence
  Description of Artificial Sequence: Synthetic oligonucleotide
caaggacaccagagcuauc

SEQ ID NO: 966991 - RNA, 19 nt, Artificial Sequence
  Description of Artificial Sequence: Synthetic oligonucleotide
ccgccucagauuuugagua

SEQ ID NO: 966992 - RNA, 19 nt, Artificial Sequence
  Description of Artificial Sequence: Synthetic oligonucleotide
ccggcucucgugcacgccc

SEQ ID NO: 966993 - RNA, 19 nt, Artificial Sequence
  Description of Artificial Sequence: Synthetic oligonucleotide
cuuugggcugaggucaacu

SEQ ID NO: 966994 - RNA, 19 nt, Artificial Sequence
  Description of Artificial Sequence: Synthetic oligonucleotide
caguagcuugagaugacuu

SEQ ID NO: 966995 - RNA, 19 nt, Artificial Sequence
  Description of Artificial Sequence: Synthetic oligonucleotide
gguucgaaugaaacuggua

SEQ ID NO: 966996 - RNA, 19 nt, Artificial Sequence
  Description of Artificial Sequence: Synthetic oligonucleotide
ggcaucauucacaguguaa

SEQ ID NO: 966997 - RNA, 19 nt, Artificial Sequence
  Description of Artificial Sequence: Synthetic oligonucleotide
accaccccgaucgccagua

SEQ ID NO: 966998 - RNA, 19 nt, Artificial Sequence
  Description of Artificial Sequence: Synthetic oligonucleotide
cacauuauugcggguccua

SEQ ID NO: 966999 - RNA, 19 nt, Artificial Sequence
  Description of Artificial Sequence: Synthetic oligonucleotide
gccgccucagauuuugagu

SEQ ID NO: 967000 - RNA, 19 nt, Artificial Sequence
  Description of Artificial Sequence: Synthetic oligonucleotide
cacccucaaacucuggcuu

SEQ ID NO: 967001 - RNA, 19 nt, Artificial Sequence
  Description of Artificial Sequence: Synthetic oligonucleotide
gcacccucaaacucuggcu

SEQ ID NO: 967002 - RNA, 19 nt, Artificial Sequence
  Description of Artificial Sequence: Synthetic oligonucleotide
gcucgccauucuuaaaaua

SEQ ID NO: 967003 - RNA, 19 nt, Artificial Sequence
  Description of Artificial Sequence: Synthetic oligonucleotide
gggauggccuucuuacagu

SEQ ID NO: 967004 - RNA, 19 nt, Artificial Sequence
  Description of Artificial Sequence: Synthetic oligonucleotide
guuucccguagugguagua

SEQ ID NO: 967005 - RNA, 19 nt, Artificial Sequence
  Description of Artificial Sequence: Synthetic oligonucleotide
cguggaacaugacgaggac

SEQ ID NO: 967006 - RNA, 19 nt, Artificial Sequence
  Description of Artificial Sequence: Synthetic oligonucleotide
ccaucagauguaauacacu

SEQ ID NO: 967007 - RNA, 19 nt, Artificial Sequence
  Description of Artificial Sequence: Synthetic oligonucleotide
cacggccacuucgcagccg

SEQ ID NO: 967008 - RNA, 19 nt, Artificial Sequence
  Description of Artificial Sequence: Synthetic oligonucleotide
gcuggcaggaccaccccga

SEQ ID NO: 967009 - RNA, 19 nt, Artificial Sequence
  Description of Artificial Sequence: Synthetic oligonucleotide
aggccacuagggacuucag

SEQ ID NO: 967010 - RNA, 19 nt, Artificial Sequence
  Description of Artificial Sequence: Synthetic oligonucleotide
cagcaucuccguggaggac

SEQ ID NO: 967011 - RNA, 19 nt, Artificial Sequence
  Description of Artificial Sequence: Synthetic oligonucleotide
ggcccucauugaugguggc

SEQ ID NO: 967012 - RNA, 19 nt, Artificial Sequence
  Description of Artificial Sequence: Synthetic oligonucleotide
ccacuucgcagccgcuccc

SEQ ID NO: 967013 - RNA, 19 nt, Artificial Sequence
  Description of Artificial Sequence: Synthetic oligonucleotide
gccgcuccccgccuccgag

SEQ ID NO: 967014 - RNA, 19 nt, Artificial Sequence
  Description of Artificial Sequence: Synthetic oligonucleotide
gugcggucacuuucauacu

SEQ ID NO: 967015 - RNA, 19 nt, Artificial Sequence
  Description of Artificial Sequence: Synthetic oligonucleotide
uccccgccuccgaguuccc

SEQ ID NO: 967016 - RNA, 19 nt, Artificial Sequence
  Description of Artificial Sequence: Synthetic oligonucleotide
cggucaggugauaaacgga

SEQ ID NO: 967017 - RNA, 19 nt, Artificial Sequence
  Description of Artificial Sequence: Synthetic oligonucleotide
gcugcucgccauucuuaaa

SEQ ID NO: 967018 - RNA, 19 nt, Artificial Sequence
  Description of Artificial Sequence: Synthetic oligonucleotide
cugagggguagauguucau

SEQ ID NO: 967019 - RNA, 19 nt, Artificial Sequence
  Description of Artificial Sequence: Synthetic oligonucleotide
gcccgcgccauccccgcug

SEQ ID NO: 967020 - RNA, 19 nt, Artificial Sequence
  Description of Artificial Sequence: Synthetic oligonucleotide
ccacuagggacuucagcgu

SEQ ID NO: 967021 - RNA, 19 nt, Artificial Sequence
  Description of Artificial Sequence: Synthetic oligonucleotide
cagggagucucggggaccu

SEQ ID NO: 967022 - RNA, 19 nt, Artificial Sequence
  Description of Artificial Sequence: Synthetic oligonucleotide
ccguggacgcauaguucuc

SEQ ID NO: 967023 - RNA, 19 nt, Artificial Sequence
  Description of Artificial Sequence: Synthetic oligonucleotide
gcccucauugaugguggca

SEQ ID NO: 967024 - RNA, 19 nt, Artificial Sequence
  Description of Artificial Sequence: Synthetic oligonucleotide
ggcgggguuacagcuccuc

SEQ ID NO: 967025 - RNA, 19 nt, Artificial Sequence
  Description of Artificial Sequence: Synthetic oligonucleotide
gccacgcacauuguacucu

SEQ ID NO: 967026 - RNA, 19 nt, Artificial Sequence
  Description of Artificial Sequence: Synthetic oligonucleotide
agggagucucggggaccug

SEQ ID NO: 967027 - RNA, 19 nt, Artificial Sequence
  Description of Artificial Sequence: Synthetic oligonucleotide
ggguaucccggaaguuauc

SEQ ID NO: 967028 - RNA, 19 nt, Artificial Sequence
  Description of Artificial Sequence: Synthetic oligonucleotide
gaccaccccgaucgccagu

SEQ ID NO: 967029 - RNA, 19 nt, Artificial Sequence
  Description of Artificial Sequence: Synthetic oligonucleotide
ggucggagauucucucaau

SEQ ID NO: 967030 - RNA, 19 nt, Artificial Sequence
  Description of Artificial Sequence: Synthetic oligonucleotide
ggccucgcacuuggguggc

SEQ ID NO: 967031 - RNA, 19 nt, Artificial Sequence
  Description of Artificial Sequence: Synthetic oligonucleotide
cuucaucggucaggugaua

SEQ ID NO: 967032 - RNA, 19 nt, Artificial Sequence
  Description of Artificial Sequence: Synthetic oligonucleotide
ccgcggccaacagccacgg

SEQ ID NO: 967033 - RNA, 19 nt, Artificial Sequence
  Description of Artificial Sequence: Synthetic oligonucleotide
guccuuagggucggagauu

SEQ ID NO: 967034 - RNA, 19 nt, Artificial Sequence
  Description of Artificial Sequence: Synthetic oligonucleotide
cguggacgcauaguucuca

SEQ ID NO: 967035 - RNA, 19 nt, Artificial Sequence
  Description of Artificial Sequence: Synthetic oligonucleotide
ccgucugcgaccggcucuc

SEQ ID NO: 967036 - RNA, 19 nt, Artificial Sequence
  Description of Artificial Sequence: Synthetic oligonucleotide
cagcucggucauauuccau

SEQ ID NO: 967037 - RNA, 19 nt, Artificial Sequence
  Description of Artificial Sequence: Synthetic oligonucleotide
ucccucccggaggguucga

SEQ ID NO: 967038 - RNA, 19 nt, Artificial Sequence
  Description of Artificial Sequence: Synthetic oligonucleotide
ccagagcuaucagcaucuc

SEQ ID NO: 967039 - RNA, 19 nt, Artificial Sequence
  Description of Artificial Sequence: Synthetic oligonucleotide
caauuccgugcggucacuu

SEQ ID NO: 967040 - RNA, 19 nt, Artificial Sequence
  Description of Artificial Sequence: Synthetic oligonucleotide
ccuuugggcugaggucaac

SEQ ID NO: 967041 - RNA, 19 nt, Artificial Sequence
  Description of Artificial Sequence: Synthetic oligonucleotide
cuggcaggaccaccccgau

SEQ ID NO: 967042 - RNA, 19 nt, Artificial Sequence
  Description of Artificial Sequence: Synthetic oligonucleotide
aggcgggguuacagcuccu

SEQ ID NO: 967043 - RNA, 19 nt, Artificial Sequence
  Description of Artificial Sequence: Synthetic oligonucleotide
ccacgcacauuguacucuu

SEQ ID NO: 967044 - RNA, 19 nt, Artificial Sequence
  Description of Artificial Sequence: Synthetic oligonucleotide
gcuccccgccuccgaguuc

SEQ ID NO: 967045 - RNA, 19 nt, Artificial Sequence
  Description of Artificial Sequence: Synthetic oligonucleotide
agcugccgccucagauuuu

SEQ ID NO: 967046 - RNA, 19 nt, Artificial Sequence
  Description of Artificial Sequence: Synthetic oligonucleotide
ccccgccuccgaguucccg

SEQ ID NO: 967047 - RNA, 19 nt, Artificial Sequence
  Description of Artificial Sequence: Synthetic oligonucleotide
cccggaggguucgaaugaa

SEQ ID NO: 967048 - RNA, 19 nt, Artificial Sequence
  Description of Artificial Sequence: Synthetic oligonucleotide
ccgugcggucacuuucaua

SEQ ID NO: 967049 - RNA, 19 nt, Artificial Sequence
  Description of Artificial Sequence: Synthetic oligonucleotide
ccucccggaggguucgaau

SEQ ID NO: 967050 - RNA, 19 nt, Artificial Sequence
  Description of Artificial Sequence: Synthetic oligonucleotide
ccuuagggucggagauucu

SEQ ID NO: 967051 - RNA, 19 nt, Artificial Sequence
  Description of Artificial Sequence: Synthetic oligonucleotide
cgugcacgcccgccagcuc

SEQ ID NO: 967052 - RNA, 19 nt, Artificial Sequence
  Description of Artificial Sequence: Synthetic oligonucleotide
ccaauuccgugcggucacu

SEQ ID NO: 967053 - RNA, 19 nt, Artificial Sequence
  Description of Artificial Sequence: Synthetic oligonucleotide
ccgcgccauccccgcugcc

SEQ ID NO: 967054 - RNA, 19 nt, Artificial Sequence
  Description of Artificial Sequence: Synthetic oligonucleotide
gcgucacagcucggucaua

SEQ ID NO: 967055 - RNA, 19 nt, Artificial Sequence
  Description of Artificial Sequence: Synthetic oligonucleotide
ggucucccucccggagggu

SEQ ID NO: 967056 - RNA, 19 nt, Artificial Sequence
  Description of Artificial Sequence: Synthetic oligonucleotide
ccgcuccccgccuccgagu

SEQ ID NO: 967057 - RNA, 19 nt, Artificial Sequence
  Description of Artificial Sequence: Synthetic oligonucleotide
agugcuacgauuucgaucc

SEQ ID NO: 967058 - RNA, 19 nt, Artificial Sequence
  Description of Artificial Sequence: Synthetic oligonucleotide
cuuguuauaaucuagccgg

SEQ ID NO: 967059 - RNA, 19 nt, Artificial Sequence
  Description of Artificial Sequence: Synthetic oligonucleotide
aagauuaucuacuaagaag

SEQ ID NO: 967060 - RNA, 19 nt, Artificial Sequence
  Description of Artificial Sequence: Synthetic oligonucleotide
aaaaucucuacccgaaggg

SEQ ID NO: 967061 - RNA, 19 nt, Artificial Sequence
  Description of Artificial Sequence: Synthetic oligonucleotide
agauuaucuacuaagaagg

SEQ ID NO: 967062 - RNA, 19 nt, Artificial Sequence
  Description of Artificial Sequence: Synthetic oligonucleotide
cuugaaaacaacauuguac

SEQ ID NO: 967063 - RNA, 19 nt, Artificial Sequence
  Description of Artificial Sequence: Synthetic oligonucleotide
aaugaacucagugaaucgc

SEQ ID NO: 967064 - RNA, 19 nt, Artificial Sequence
  Description of Artificial Sequence: Synthetic oligonucleotide
aaauccacgaggcugaaga

SEQ ID NO: 967065 - RNA, 19 nt, Artificial Sequence
  Description of Artificial Sequence: Synthetic oligonucleotide
auugcuuaggaagugaucg

SEQ ID NO: 967066 - RNA, 19 nt, Artificial Sequence
  Description of Artificial Sequence: Synthetic oligonucleotide
acgauuucgauccaccacc

SEQ ID NO: 967067 - RNA, 19 nt, Artificial Sequence
  Description of Artificial Sequence: Synthetic oligonucleotide
aguacgcucgcccagaaac

SEQ ID NO: 967068 - RNA, 19 nt, Artificial Sequence
  Description of Artificial Sequence: Synthetic oligonucleotide
acuuguuauaaucuagccg

SEQ ID NO: 967069 - RNA, 19 nt, Artificial Sequence
  Description of Artificial Sequence: Synthetic oligonucleotide
aauuaggcaacucuucaug

SEQ ID NO: 967070 - RNA, 19 nt, Artificial Sequence
  Description of Artificial Sequence: Synthetic oligonucleotide
uuaugaaccaguuuucaca

SEQ ID NO: 967071 - RNA, 19 nt, Artificial Sequence
  Description of Artificial Sequence: Synthetic oligonucleotide
auuaggcaacucuucaugc

SEQ ID NO: 967072 - RNA, 19 nt, Artificial Sequence
  Description of Artificial Sequence: Synthetic oligonucleotide
  modified_base (4)..(4): a, c, u, g, unknown or other
uacnguucaaugaacucag

SEQ ID NO: 967073 - RNA, 19 nt, Artificial Sequence
  Description of Artificial Sequence: Synthetic oligonucleotide
auacucaauugucaagugc

SEQ ID NO: 967074 - RNA, 19 nt, Artificial Sequence
  Description of Artificial Sequence: Synthetic oligonucleotide
ucgugaaucauuucugggg

SEQ ID NO: 967075 - RNA, 19 nt, Artificial Sequence
  Description of Artificial Sequence: Synthetic oligonucleotide
uauacaugacuccauguca

SEQ ID NO: 967076 - RNA, 19 nt, Artificial Sequence
  Description of Artificial Sequence: Synthetic oligonucleotide
ugaagauuaucuacuaaga

SEQ ID NO: 967077 - RNA, 19 nt, Artificial Sequence
  Description of Artificial Sequence: Synthetic oligonucleotide
uuaauaacuggggagaugu

SEQ ID NO: 967078 - RNA, 19 nt, Artificial Sequence
  Description of Artificial Sequence: Synthetic oligonucleotide
ucaauugucaagugcaaca

SEQ ID NO: 967079 - RNA, 19 nt, Artificial Sequence
  Description of Artificial Sequence: Synthetic oligonucleotide
auuaucuacuaagaaggcc

SEQ ID NO: 967080 - RNA, 19 nt, Artificial Sequence
  Description of Artificial Sequence: Synthetic oligonucleotide
aucgcauguagucugugcc

SEQ ID NO: 967081 - RNA, 19 nt, Artificial Sequence
  Description of Artificial Sequence: Synthetic oligonucleotide
ucuaccauuagcuuccaga

SEQ ID NO: 967082 - RNA, 19 nt, Artificial Sequence
  Description of Artificial Sequence: Synthetic oligonucleotide
aacucagugaaucgcaugu

SEQ ID NO: 967083 - RNA, 19 nt, Artificial Sequence
  Description of Artificial Sequence: Synthetic oligonucleotide
uggguacccacucagagcc

SEQ ID NO: 967084 - RNA, 19 nt, Artificial Sequence
  Description of Artificial Sequence: Synthetic oligonucleotide
uguacuuuguaggagagac

SEQ ID NO: 967085 - RNA, 19 nt, Artificial Sequence
  Description of Artificial Sequence: Synthetic oligonucleotide
agauuugaggugcuugcgc

SEQ ID NO: 967086 - RNA, 19 nt, Artificial Sequence
  Description of Artificial Sequence: Synthetic oligonucleotide
uguaggaugguaaaaucuc

SEQ ID NO: 967087 - RNA, 19 nt, Artificial Sequence
  Description of Artificial Sequence: Synthetic oligonucleotide
uguuauacaugacuccaug

SEQ ID NO: 967088 - RNA, 19 nt, Artificial Sequence
  Description of Artificial Sequence: Synthetic oligonucleotide
ugcucaaaauccacgaggc

SEQ ID NO: 967089 - RNA, 19 nt, Artificial Sequence
  Description of Artificial Sequence: Synthetic oligonucleotide
uucacgagaaugcucagcu

SEQ ID NO: 967090 - RNA, 19 nt, Artificial Sequence
  Description of Artificial Sequence: Synthetic oligonucleotide
auacuuguuauaaucuagc

SEQ ID NO: 967091 - RNA, 19 nt, Artificial Sequence
  Description of Artificial Sequence: Synthetic oligonucleotide
augguaaaaucucuacccg

SEQ ID NO: 967092 - RNA, 19 nt, Artificial Sequence
  Description of Artificial Sequence: Synthetic oligonucleotide
aggaugguaaaaucucuac

SEQ ID NO: 967093 - RNA, 19 nt, Artificial Sequence
  Description of Artificial Sequence: Synthetic oligonucleotide
gaucuggugauuucgaaca

SEQ ID NO: 967094 - RNA, 19 nt, Artificial Sequence
  Description of Artificial Sequence: Synthetic oligonucleotide
gauuucgaacacuggaaag

SEQ ID NO: 967095 - RNA, 19 nt, Artificial Sequence
  Description of Artificial Sequence: Synthetic oligonucleotide
ucuacuaagaaggccaugu

SEQ ID NO: 967096 - RNA, 19 nt, Artificial Sequence
  Description of Artificial Sequence: Synthetic oligonucleotide
agaucuaggauuucauuca

SEQ ID NO: 967097 - RNA, 19 nt, Artificial Sequence
  Description of Artificial Sequence: Synthetic oligonucleotide
ugauacucaauugucaagu

SEQ ID NO: 967098 - RNA, 19 nt, Artificial Sequence
  Description of Artificial Sequence: Synthetic oligonucleotide
aauaacuggggagaugugu

SEQ ID NO: 967099 - RNA, 19 nt, Artificial Sequence
  Description of Artificial Sequence: Synthetic oligonucleotide
ucacuggaauguaggaugg

SEQ ID NO: 967100 - RNA, 19 nt, Artificial Sequence
  Description of Artificial Sequence: Synthetic oligonucleotide
uacuuguuauaaucuagcc

SEQ ID NO: 967101 - RNA, 19 nt, Artificial Sequence
  Description of Artificial Sequence: Synthetic oligonucleotide
gaaaauggauccuggguac

SEQ ID NO: 967102 - RNA, 19 nt, Artificial Sequence
  Description of Artificial Sequence: Synthetic oligonucleotide
acagguuucagcaaaauaa

SEQ ID NO: 967103 - RNA, 19 nt, Artificial Sequence
  Description of Artificial Sequence: Synthetic oligonucleotide
aaaauggauccuggguacc

SEQ ID NO: 967104 - RNA, 19 nt, Artificial Sequence
  Description of Artificial Sequence: Synthetic oligonucleotide
uguuccaagugaaaaugga

SEQ ID NO: 967105 - RNA, 19 nt, Artificial Sequence
  Description of Artificial Sequence: Synthetic oligonucleotide
uuaacauguguugagcugu

SEQ ID NO: 967106 - RNA, 19 nt, Artificial Sequence
  Description of Artificial Sequence: Synthetic oligonucleotide
aauucgugaaucauuucug

SEQ ID NO: 967107 - RNA, 19 nt, Artificial Sequence
  Description of Artificial Sequence: Synthetic oligonucleotide
acggcguacacucaguaag

SEQ ID NO: 967108 - RNA, 19 nt, Artificial Sequence
  Description of Artificial Sequence: Synthetic oligonucleotide
uguugcugcacauggcccg

SEQ ID NO: 967109 - RNA, 19 nt, Artificial Sequence
  Description of Artificial Sequence: Synthetic oligonucleotide
cuuaggaagugaucguggg

SEQ ID NO: 967110 - RNA, 19 nt, Artificial Sequence
  Description of Artificial Sequence: Synthetic oligonucleotide
ugucagguagauaccaugu

SEQ ID NO: 967111 - RNA, 19 nt, Artificial Sequence
  Description of Artificial Sequence: Synthetic oligonucleotide
ugaaucauuucuggggcgg

SEQ ID NO: 967112 - RNA, 19 nt, Artificial Sequence
  Description of Artificial Sequence: Synthetic oligonucleotide
gugaucgugggcuaaucgg

SEQ ID NO: 967113 - RNA, 19 nt, Artificial Sequence
  Description of Artificial Sequence: Synthetic oligonucleotide
agugaucgugggcuaaucg

SEQ ID NO: 967114 - RNA, 19 nt, Artificial Sequence
  Description of Artificial Sequence: Synthetic oligonucleotide
gaagauuaucuacuaagaa

SEQ ID NO: 967115 - RNA, 19 nt, Artificial Sequence
  Description of Artificial Sequence: Synthetic oligonucleotide
cucaguaaguacuugaaaa

SEQ ID NO: 967116 - RNA, 19 nt, Artificial Sequence
  Description of Artificial Sequence: Synthetic oligonucleotide
aagucugauuccucuacca

SEQ ID NO: 967117 - RNA, 19 nt, Artificial Sequence
  Description of Artificial Sequence: Synthetic oligonucleotide
ugugcggacuguugaaagg

SEQ ID NO: 967118 - RNA, 19 nt, Artificial Sequence
  Description of Artificial Sequence: Synthetic oligonucleotide
uucaagauggacccuuuuc

SEQ ID NO: 967119 - RNA, 19 nt, Artificial Sequence
  Description of Artificial Sequence: Synthetic oligonucleotide
ugaucgugggcuaaucgga

SEQ ID NO: 967120 - RNA, 19 nt, Artificial Sequence
  Description of Artificial Sequence: Synthetic oligonucleotide
guaaaagucuuuaaugauc

SEQ ID NO: 967121 - RNA, 19 nt, Artificial Sequence
  Description of Artificial Sequence: Synthetic oligonucleotide
gagaaggcccuucucuugg

SEQ ID NO: 967122 - RNA, 19 nt, Artificial Sequence
  Description of Artificial Sequence: Synthetic oligonucleotide
uuggacacggcguacacuc

SEQ ID NO: 967123 - RNA, 19 nt, Artificial Sequence
  Description of Artificial Sequence: Synthetic oligonucleotide
agaaugcucagcugggcag

SEQ ID NO: 967124 - RNA, 19 nt, Artificial Sequence
  Description of Artificial Sequence: Synthetic oligonucleotide
aaaggacugggccagcaaa

SEQ ID NO: 967125 - RNA, 19 nt, Artificial Sequence
  Description of Artificial Sequence: Synthetic oligonucleotide
aauugcuuaggaagugauc

SEQ ID NO: 967126 - RNA, 19 nt, Artificial Sequence
  Description of Artificial Sequence: Synthetic oligonucleotide
cugguuagauuugaggugc

SEQ ID NO: 967127 - RNA, 19 nt, Artificial Sequence
  Description of Artificial Sequence: Synthetic oligonucleotide
uacccgaagggaaaacugc

SEQ ID NO: 967128 - RNA, 19 nt, Artificial Sequence
  Description of Artificial Sequence: Synthetic oligonucleotide
gaacaguucuccucguccc

SEQ ID NO: 967129 - RNA, 19 nt, Artificial Sequence
  Description of Artificial Sequence: Synthetic oligonucleotide
caaacgaguacgcucgccc

SEQ ID NO: 967130 - RNA, 19 nt, Artificial Sequence
  Description of Artificial Sequence: Synthetic oligonucleotide
ugaucuggugauuucgaac

SEQ ID NO: 967131 - RNA, 19 nt, Artificial Sequence
  Description of Artificial Sequence: Synthetic oligonucleotide
uaccauuagcuuccagagg

SEQ ID NO: 967132 - RNA, 19 nt, Artificial Sequence
  Description of Artificial Sequence: Synthetic oligonucleotide
  modified_base (6)..(6): a, c, u, g, unknown or other
uguacnguucaaugaacuc

SEQ ID NO: 967133 - RNA, 19 nt, Artificial Sequence
  Description of Artificial Sequence: Synthetic oligonucleotide
uacgauuucgauccaccac

SEQ ID NO: 967134 - RNA, 19 nt, Artificial Sequence
  Description of Artificial Sequence: Synthetic oligonucleotide
cuuugagcgccucugcggg

SEQ ID NO: 967135 - RNA, 19 nt, Artificial Sequence
  Description of Artificial Sequence: Synthetic oligonucleotide
uuaggcgccacuugacugc

SEQ ID NO: 967136 - RNA, 19 nt, Artificial Sequence
  Description of Artificial Sequence: Synthetic oligonucleotide
ucgugggcuaaucggaugc

SEQ ID NO: 967137 - RNA, 19 nt, Artificial Sequence
  Description of Artificial Sequence: Synthetic oligonucleotide
gagaauaugcaguggccac

SEQ ID NO: 967138 - RNA, 19 nt, Artificial Sequence
  Description of Artificial Sequence: Synthetic oligonucleotide
gauucaggacgcuagucuc

SEQ ID NO: 967139 - RNA, 19 nt, Artificial Sequence
  Description of Artificial Sequence: Synthetic oligonucleotide
  modified_base (2)..(2): a, c, u, g, unknown or other
cnguucaaugaacucagug

SEQ ID NO: 967140 - RNA, 19 nt, Artificial Sequence
  Description of Artificial Sequence: Synthetic oligonucleotide
gaauugaucugaugaagaa

SEQ ID NO: 967141 - RNA, 19 nt, Artificial Sequence
  Description of Artificial Sequence: Synthetic oligonucleotide
uauaaucuagccggagcag

SEQ ID NO: 967142 - RNA, 19 nt, Artificial Sequence
  Description of Artificial Sequence: Synthetic oligonucleotide
aaaucucuacccgaaggga

SEQ ID NO: 967143 - RNA, 19 nt, Artificial Sequence
  Description of Artificial Sequence: Synthetic oligonucleotide
gugaaucgcauguagucug

SEQ ID NO: 967144 - RNA, 19 nt, Artificial Sequence
  Description of Artificial Sequence: Synthetic oligonucleotide
uggguauaauacuuguuau

SEQ ID NO: 967145 - RNA, 19 nt, Artificial Sequence
  Description of Artificial Sequence: Synthetic oligonucleotide
uguuauaaucuagccggag

SEQ ID NO: 967146 - RNA, 19 nt, Artificial Sequence
  Description of Artificial Sequence: Synthetic oligonucleotide
aacgaguacgcucgcccag

SEQ ID NO: 967147 - RNA, 19 nt, Artificial Sequence
  Description of Artificial Sequence: Synthetic oligonucleotide
uacaugacuccaugucagg

SEQ ID NO: 967148 - RNA, 19 nt, Artificial Sequence
  Description of Artificial Sequence: Synthetic oligonucleotide
augucagguagauaccaug

SEQ ID NO: 967149 - RNA, 19 nt, Artificial Sequence
  Description of Artificial Sequence: Synthetic oligonucleotide
gaagaaaugggaaguccug

SEQ ID NO: 967150 - RNA, 19 nt, Artificial Sequence
  Description of Artificial Sequence: Synthetic oligonucleotide
ucagcuacagugcuacgau

SEQ ID NO: 967151 - RNA, 19 nt, Artificial Sequence
  Description of Artificial Sequence: Synthetic oligonucleotide
aaacgaguacgcucgccca

SEQ ID NO: 967152 - RNA, 19 nt, Artificial Sequence
  Description of Artificial Sequence: Synthetic oligonucleotide
agaauugaucugaugaaga

SEQ ID NO: 967153 - RNA, 19 nt, Artificial Sequence
  Description of Artificial Sequence: Synthetic oligonucleotide
acacucaguaaguacuuga

SEQ ID NO: 967154 - RNA, 19 nt, Artificial Sequence
  Description of Artificial Sequence: Synthetic oligonucleotide
  modified_base (5)..(5): a, c, u, g, unknown or other
guacnguucaaugaacuca

SEQ ID NO: 967155 - RNA, 19 nt, Artificial Sequence
  Description of Artificial Sequence: Synthetic oligonucleotide
auacaugacuccaugucag

SEQ ID NO: 967156 - RNA, 19 nt, Artificial Sequence
  Description of Artificial Sequence: Synthetic oligonucleotide
caauugucaagugcaacag

SEQ ID NO: 967157 - RNA, 19 nt, Artificial Sequence
  Description of Artificial Sequence: Synthetic oligonucleotide
gcgacuaaagcccuucacg

SEQ ID NO: 967158 - RNA, 19 nt, Artificial Sequence
  Description of Artificial Sequence: Synthetic oligonucleotide
uggugauuucgaacacugg

SEQ ID NO: 967159 - RNA, 19 nt, Artificial Sequence
  Description of Artificial Sequence: Synthetic oligonucleotide
ucuuaggcgccacuugacu

SEQ ID NO: 967160 - RNA, 19 nt, Artificial Sequence
  Description of Artificial Sequence: Synthetic oligonucleotide
agagaauaugcaguggcca

SEQ ID NO: 967161 - RNA, 19 nt, Artificial Sequence
  Description of Artificial Sequence: Synthetic oligonucleotide
guagaauugaucugaugaa

SEQ ID NO: 967162 - RNA, 19 nt, Artificial Sequence
  Description of Artificial Sequence: Synthetic oligonucleotide
cuuaggcgccacuugacug

SEQ ID NO: 967163 - RNA, 19 nt, Artificial Sequence
  Description of Artificial Sequence: Synthetic oligonucleotide
acccaaacgaguacgcucg

SEQ ID NO: 967164 - RNA, 19 nt, Artificial Sequence
  Description of Artificial Sequence: Synthetic oligonucleotide
ucauuuuaugaaccaguuu

SEQ ID NO: 967165 - RNA, 19 nt, Artificial Sequence
  Description of Artificial Sequence: Synthetic oligonucleotide
ucucgucagguucacauuu

SEQ ID NO: 967166 - RNA, 19 nt, Artificial Sequence
  Description of Artificial Sequence: Synthetic oligonucleotide
aucuagccggagcaguaac

SEQ ID NO: 967167 - RNA, 19 nt, Artificial Sequence
  Description of Artificial Sequence: Synthetic oligonucleotide
ugugagaacugagacucca

SEQ ID NO: 967168 - RNA, 19 nt, Artificial Sequence
  Description of Artificial Sequence: Synthetic oligonucleotide
ggggagauguguuacagac

SEQ ID NO: 967169 - RNA, 19 nt, Artificial Sequence
  Description of Artificial Sequence: Synthetic oligonucleotide
uuguuauaaucuagccgga

SEQ ID NO: 967170 - RNA, 19 nt, Artificial Sequence
  Description of Artificial Sequence: Synthetic oligonucleotide
aguaaguacuugaaaacaa

SEQ ID NO: 967171 - RNA, 19 nt, Artificial Sequence
  Description of Artificial Sequence: Synthetic oligonucleotide
cuacccgaagggaaaacug

SEQ ID NO: 967172 - RNA, 19 nt, Artificial Sequence
  Description of Artificial Sequence: Synthetic oligonucleotide
acugugacagagaucuagg

SEQ ID NO: 967173 - RNA, 19 nt, Artificial Sequence
  Description of Artificial Sequence: Synthetic oligonucleotide
auguaggaugguaaaaucu

SEQ ID NO: 967174 - RNA, 19 nt, Artificial Sequence
  Description of Artificial Sequence: Synthetic oligonucleotide
accuagagcagcccacccg

SEQ ID NO: 967175 - RNA, 19 nt, Artificial Sequence
  Description of Artificial Sequence: Synthetic oligonucleotide
gugaaucauuucuggggcg

SEQ ID NO: 967176 - RNA, 19 nt, Artificial Sequence
  Description of Artificial Sequence: Synthetic oligonucleotide
agauggacccuuuucucgu

SEQ ID NO: 967177 - RNA, 19 nt, Artificial Sequence
  Description of Artificial Sequence: Synthetic oligonucleotide
aaauugcuuaggaagugau

SEQ ID NO: 967178 - RNA, 19 nt, Artificial Sequence
  Description of Artificial Sequence: Synthetic oligonucleotide
cauguguugagcuguguca

SEQ ID NO: 967179 - RNA, 19 nt, Artificial Sequence
  Description of Artificial Sequence: Synthetic oligonucleotide
cuggguauaauacuuguua

SEQ ID NO: 967180 - RNA, 19 nt, Artificial Sequence
  Description of Artificial Sequence: Synthetic oligonucleotide
uaguacugaagauuaucua

SEQ ID NO: 967181 - RNA, 19 nt, Artificial Sequence
  Description of Artificial Sequence: Synthetic oligonucleotide
ucuagccggagcaguaacu

SEQ ID NO: 967182 - RNA, 19 nt, Artificial Sequence
  Description of Artificial Sequence: Synthetic oligonucleotide
cuacagugcuacgauuucg

SEQ ID NO: 967183 - RNA, 19 nt, Artificial Sequence
  Description of Artificial Sequence: Synthetic oligonucleotide
acguuucccgagaaggccc

SEQ ID NO: 967184 - RNA, 19 nt, Artificial Sequence
  Description of Artificial Sequence: Synthetic oligonucleotide
caggacgcuagucucacug

SEQ ID NO: 967185 - RNA, 19 nt, Artificial Sequence
  Description of Artificial Sequence: Synthetic oligonucleotide
ucgcucauccaguggaccc

SEQ ID NO: 967186 - RNA, 19 nt, Artificial Sequence
  Description of Artificial Sequence: Synthetic oligonucleotide
ucuacccgaagggaaaacu

SEQ ID NO: 967187 - RNA, 19 nt, Artificial Sequence
  Description of Artificial Sequence: Synthetic oligonucleotide
aaucucuacccgaagggaa

SEQ ID NO: 967188 - RNA, 19 nt, Artificial Sequence
  Description of Artificial Sequence: Synthetic oligonucleotide
gacguuucccgagaaggcc

SEQ ID NO: 967189 - RNA, 19 nt, Artificial Sequence
  Description of Artificial Sequence: Synthetic oligonucleotide
agaccuagagcagcccacc

SEQ ID NO: 967190 - RNA, 19 nt, Artificial Sequence
  Description of Artificial Sequence: Synthetic oligonucleotide
gaaucuugaacaggaguga

SEQ ID NO: 967191 - RNA, 19 nt, Artificial Sequence
  Description of Artificial Sequence: Synthetic oligonucleotide
uaauaacuggggagaugug

SEQ ID NO: 967192 - RNA, 19 nt, Artificial Sequence
  Description of Artificial Sequence: Synthetic oligonucleotide
ccuggaacaguucuccucg

SEQ ID NO: 967193 - RNA, 19 nt, Artificial Sequence
  Description of Artificial Sequence: Synthetic oligonucleotide
ugaaucgcauguagucugu

SEQ ID NO: 967194 - RNA, 19 nt, Artificial Sequence
  Description of Artificial Sequence: Synthetic oligonucleotide
aggacgcuagucucacugg

SEQ ID NO: 967195 - RNA, 19 nt, Artificial Sequence
  Description of Artificial Sequence: Synthetic oligonucleotide
uaaucuagccggagcagua

SEQ ID NO: 967196 - RNA, 19 nt, Artificial Sequence
  Description of Artificial Sequence: Synthetic oligonucleotide
ucugcgggcguccacucac

SEQ ID NO: 967197 - RNA, 19 nt, Artificial Sequence
  Description of Artificial Sequence: Synthetic oligonucleotide
caauucgugaaucauuucu

SEQ ID NO: 967198 - RNA, 19 nt, Artificial Sequence
  Description of Artificial Sequence: Synthetic oligonucleotide
agaccuaccgccuucucuu

SEQ ID NO: 967199 - RNA, 19 nt, Artificial Sequence
  Description of Artificial Sequence: Synthetic oligonucleotide
cuggguacccacucagagc

SEQ ID NO: 967200 - RNA, 19 nt, Artificial Sequence
  Description of Artificial Sequence: Synthetic oligonucleotide
ugcggacuguugaaaggcc

SEQ ID NO: 967201 - RNA, 19 nt, Artificial Sequence
  Description of Artificial Sequence: Synthetic oligonucleotide
agguuucagcaaaauaaag

SEQ ID NO: 967202 - RNA, 19 nt, Artificial Sequence
  Description of Artificial Sequence: Synthetic oligonucleotide
aagugaucgugggcuaauc

SEQ ID NO: 967203 - RNA, 19 nt, Artificial Sequence
  Description of Artificial Sequence: Synthetic oligonucleotide
ucgauccaccaccugcuca

SEQ ID NO: 967204 - RNA, 19 nt, Artificial Sequence
  Description of Artificial Sequence: Synthetic oligonucleotide
gugugcggacuguugaaag

SEQ ID NO: 967205 - RNA, 19 nt, Artificial Sequence
  Description of Artificial Sequence: Synthetic oligonucleotide
guucugacugaccagugaa

SEQ ID NO: 967206 - RNA, 19 nt, Artificial Sequence
  Description of Artificial Sequence: Synthetic oligonucleotide
uugaucuggugauuucgaa

SEQ ID NO: 967207 - RNA, 19 nt, Artificial Sequence
  Description of Artificial Sequence: Synthetic oligonucleotide
cacccaaacgaguacgcuc

SEQ ID NO: 967208 - RNA, 19 nt, Artificial Sequence
  Description of Artificial Sequence: Synthetic oligonucleotide
ugaguugaucuggugauuu

SEQ ID NO: 967209 - RNA, 19 nt, Artificial Sequence
  Description of Artificial Sequence: Synthetic oligonucleotide
agccaagagcaauucguga

SEQ ID NO: 967210 - RNA, 19 nt, Artificial Sequence
  Description of Artificial Sequence: Synthetic oligonucleotide
uccaguggacccagguucu

SEQ ID NO: 967211 - RNA, 19 nt, Artificial Sequence
  Description of Artificial Sequence: Synthetic oligonucleotide
aguaagucugauuccucua

SEQ ID NO: 967212 - RNA, 19 nt, Artificial Sequence
  Description of Artificial Sequence: Synthetic oligonucleotide
agucugauuccucuaccau

SEQ ID NO: 967213 - RNA, 19 nt, Artificial Sequence
  Description of Artificial Sequence: Synthetic oligonucleotide
uugagcgccucugcgggcg

SEQ ID NO: 967214 - RNA, 19 nt, Artificial Sequence
  Description of Artificial Sequence: Synthetic oligonucleotide
acgcuagucucacuggggu

SEQ ID NO: 967215 - RNA, 19 nt, Artificial Sequence
  Description of Artificial Sequence: Synthetic oligonucleotide
uaaaggacugggccagcaa

SEQ ID NO: 967216 - RNA, 19 nt, Artificial Sequence
  Description of Artificial Sequence: Synthetic oligonucleotide
cuugugugcggacuguuga

SEQ ID NO: 967217 - RNA, 19 nt, Artificial Sequence
  Description of Artificial Sequence: Synthetic oligonucleotide
cuacuaagaaggccaugug

SEQ ID NO: 967218 - RNA, 19 nt, Artificial Sequence
  Description of Artificial Sequence: Synthetic oligonucleotide
aagucccucguagaauuga

SEQ ID NO: 967219 - RNA, 19 nt, Artificial Sequence
  Description of Artificial Sequence: Synthetic oligonucleotide
gugaaaauggauccugggu

SEQ ID NO: 967220 - RNA, 19 nt, Artificial Sequence
  Description of Artificial Sequence: Synthetic oligonucleotide
ucgucccagaagguaaaag

SEQ ID NO: 967221 - RNA, 19 nt, Artificial Sequence
  Description of Artificial Sequence: Synthetic oligonucleotide
auaugcaguggccacugua

SEQ ID NO: 967222 - RNA, 19 nt, Artificial Sequence
  Description of Artificial Sequence: Synthetic oligonucleotide
ugggcuaaucggaugcuuu

SEQ ID NO: 967223 - RNA, 19 nt, Artificial Sequence
  Description of Artificial Sequence: Synthetic oligonucleotide
cuagccggagcaguaacug

SEQ ID NO: 967224 - RNA, 19 nt, Artificial Sequence
  Description of Artificial Sequence: Synthetic oligonucleotide
uacgcucgcccagaaaccc

SEQ ID NO: 967225 - RNA, 19 nt, Artificial Sequence
  Description of Artificial Sequence: Synthetic oligonucleotide
auggccuguuacuucauuu

SEQ ID NO: 967226 - RNA, 19 nt, Artificial Sequence
  Description of Artificial Sequence: Synthetic oligonucleotide
ucacgagaaugcucagcug

SEQ ID NO: 967227 - RNA, 19 nt, Artificial Sequence
  Description of Artificial Sequence: Synthetic oligonucleotide
cauuuugauucucaaacau

SEQ ID NO: 967228 - RNA, 19 nt, Artificial Sequence
  Description of Artificial Sequence: Synthetic oligonucleotide
gugcggacuguugaaaggc

SEQ ID NO: 967229 - RNA, 19 nt, Artificial Sequence
  Description of Artificial Sequence: Synthetic oligonucleotide
agcaacccucacuggaaug

SEQ ID NO: 967230 - RNA, 19 nt, Artificial Sequence
  Description of Artificial Sequence: Synthetic oligonucleotide
uggacccuuuucucgucag

SEQ ID NO: 967231 - RNA, 19 nt, Artificial Sequence
  Description of Artificial Sequence: Synthetic oligonucleotide
cuucacgagaaugcucagc

SEQ ID NO: 967232 - RNA, 19 nt, Artificial Sequence
  Description of Artificial Sequence: Synthetic oligonucleotide
ggacgcuagucucacuggg

SEQ ID NO: 967233 - RNA, 19 nt, Artificial Sequence
  Description of Artificial Sequence: Synthetic oligonucleotide
aucgugggcuaaucggaug

SEQ ID NO: 967234 - RNA, 19 nt, Artificial Sequence
  Description of Artificial Sequence: Synthetic oligonucleotide
agccggagcaguaacugag

SEQ ID NO: 967235 - RNA, 19 nt, Artificial Sequence
  Description of Artificial Sequence: Synthetic oligonucleotide
aaucuagccggagcaguaa

SEQ ID NO: 967236 - RNA, 19 nt, Artificial Sequence
  Description of Artificial Sequence: Synthetic oligonucleotide
cauguagcauccaggcuga

SEQ ID NO: 967237 - RNA, 19 nt, Artificial Sequence
  Description of Artificial Sequence: Synthetic oligonucleotide
gugauuucgaacacuggaa

SEQ ID NO: 967238 - RNA, 19 nt, Artificial Sequence
  Description of Artificial Sequence: Synthetic oligonucleotide
cuaaagcccuucacgagaa

SEQ ID NO: 967239 - RNA, 19 nt, Artificial Sequence
  Description of Artificial Sequence: Synthetic oligonucleotide
cuacgauuucgauccacca

SEQ ID NO: 967240 - RNA, 19 nt, Artificial Sequence
  Description of Artificial Sequence: Synthetic oligonucleotide
uucccgagaaggcccuucu

SEQ ID NO: 967241 - RNA, 19 nt, Artificial Sequence
  Description of Artificial Sequence: Synthetic oligonucleotide
uucaggacgcuagucucac

SEQ ID NO: 967242 - RNA, 19 nt, Artificial Sequence
  Description of Artificial Sequence: Synthetic oligonucleotide
gaccuagagcagcccaccc

SEQ ID NO: 967243 - RNA, 19 nt, Artificial Sequence
  Description of Artificial Sequence: Synthetic oligonucleotide
uaacuggggagauguguua

SEQ ID NO: 967244 - RNA, 19 nt, Artificial Sequence
  Description of Artificial Sequence: Synthetic oligonucleotide
gcuguuauacaugacucca

SEQ ID NO: 967245 - RNA, 19 nt, Artificial Sequence
  Description of Artificial Sequence: Synthetic oligonucleotide
agccgauucaggacgcuag

SEQ ID NO: 967246 - RNA, 19 nt, Artificial Sequence
  Description of Artificial Sequence: Synthetic oligonucleotide
cacucaguaaguacuugaa

SEQ ID NO: 967247 - RNA, 19 nt, Artificial Sequence
  Description of Artificial Sequence: Synthetic oligonucleotide
uuugagcgccucugcgggc

SEQ ID NO: 967248 - RNA, 19 nt, Artificial Sequence
  Description of Artificial Sequence: Synthetic oligonucleotide
uagccggagcaguaacuga

SEQ ID NO: 967249 - RNA, 19 nt, Artificial Sequence
  Description of Artificial Sequence: Synthetic oligonucleotide
guacuuuguaggagagacc

SEQ ID NO: 967250 - RNA, 19 nt, Artificial Sequence
  Description of Artificial Sequence: Synthetic oligonucleotide
uggauccuggguacccacu

SEQ ID NO: 967251 - RNA, 19 nt, Artificial Sequence
  Description of Artificial Sequence: Synthetic oligonucleotide
  modified_base (7)..(7): a, c, u, g, unknown or other
guguacnguucaaugaacu

SEQ ID NO: 967252 - RNA, 19 nt, Artificial Sequence
  Description of Artificial Sequence: Synthetic oligonucleotide
uacccacucagagccaaga

SEQ ID NO: 967253 - RNA, 19 nt, Artificial Sequence
  Description of Artificial Sequence: Synthetic oligonucleotide
uguguugagcugugucaau

SEQ ID NO: 967254 - RNA, 19 nt, Artificial Sequence
  Description of Artificial Sequence: Synthetic oligonucleotide
gcaucucugauguuuaaua

SEQ ID NO: 967255 - RNA, 19 nt, Artificial Sequence
  Description of Artificial Sequence: Synthetic oligonucleotide
gcuacgauuucgauccacc

SEQ ID NO: 967256 - RNA, 19 nt, Artificial Sequence
  Description of Artificial Sequence: Synthetic oligonucleotide
cugugagaacugagacucc

SEQ ID NO: 967257 - RNA, 19 nt, Artificial Sequence
  Description of Artificial Sequence: Synthetic oligonucleotide
ugugccaagccggcagagc

SEQ ID NO: 967258 - RNA, 19 nt, Artificial Sequence
  Description of Artificial Sequence: Synthetic oligonucleotide
uggcgacuaaagcccuuca

SEQ ID NO: 967259 - RNA, 19 nt, Artificial Sequence
  Description of Artificial Sequence: Synthetic oligonucleotide
ugcuacgauuucgauccac

SEQ ID NO: 967260 - RNA, 19 nt, Artificial Sequence
  Description of Artificial Sequence: Synthetic oligonucleotide
ggacacggcguacacucag

SEQ ID NO: 967261 - RNA, 19 nt, Artificial Sequence
  Description of Artificial Sequence: Synthetic oligonucleotide
gccacuguacuuuguagga

SEQ ID NO: 967262 - RNA, 19 nt, Artificial Sequence
  Description of Artificial Sequence: Synthetic oligonucleotide
ggacugggccagcaaauug

SEQ ID NO: 967263 - RNA, 19 nt, Artificial Sequence
  Description of Artificial Sequence: Synthetic oligonucleotide
ggguauaauacuuguuaua

SEQ ID NO: 967264 - RNA, 19 nt, Artificial Sequence
  Description of Artificial Sequence: Synthetic oligonucleotide
uggacacggcguacacuca

SEQ ID NO: 967265 - RNA, 19 nt, Artificial Sequence
  Description of Artificial Sequence: Synthetic oligonucleotide
cccuucacgagaaugcuca

SEQ ID NO: 967266 - RNA, 19 nt, Artificial Sequence
  Description of Artificial Sequence: Synthetic oligonucleotide
guacgcucgcccagaaacc

SEQ ID NO: 967267 - RNA, 19 nt, Artificial Sequence
  Description of Artificial Sequence: Synthetic oligonucleotide
  modified_base (11)..(11): a, c, u, g, unknown or other
gcccguguacnguucaaug

SEQ ID NO: 967268 - RNA, 19 nt, Artificial Sequence
  Description of Artificial Sequence: Synthetic oligonucleotide
uugaggugcuugcgcugca

SEQ ID NO: 967269 - RNA, 19 nt, Artificial Sequence
  Description of Artificial Sequence: Synthetic oligonucleotide
gcguacacucaguaaguac

SEQ ID NO: 967270 - RNA, 19 nt, Artificial Sequence
  Description of Artificial Sequence: Synthetic oligonucleotide
ccgaagggaaaacugcuuc

SEQ ID NO: 967271 - RNA, 19 nt, Artificial Sequence
  Description of Artificial Sequence: Synthetic oligonucleotide
  modified_base (10)..(10): a, c, u, g, unknown or other
cccguguacnguucaauga

SEQ ID NO: 967272 - RNA, 19 nt, Artificial Sequence
  Description of Artificial Sequence: Synthetic oligonucleotide
aucucuacccgaagggaaa

SEQ ID NO: 967273 - RNA, 19 nt, Artificial Sequence
  Description of Artificial Sequence: Synthetic oligonucleotide
agccuggguauaauacuug

SEQ ID NO: 967274 - RNA, 19 nt, Artificial Sequence
  Description of Artificial Sequence: Synthetic oligonucleotide
cuuuucucgucagguucac

SEQ ID NO: 967275 - RNA, 19 nt, Artificial Sequence
  Description of Artificial Sequence: Synthetic oligonucleotide
acacccaaacgaguacgcu

SEQ ID NO: 967276 - RNA, 19 nt, Artificial Sequence
  Description of Artificial Sequence: Synthetic oligonucleotide
acacggcguacacucagua

SEQ ID NO: 967277 - RNA, 19 nt, Artificial Sequence
  Description of Artificial Sequence: Synthetic oligonucleotide
gcuagucucacugggguga

SEQ ID NO: 967278 - RNA, 19 nt, Artificial Sequence
  Description of Artificial Sequence: Synthetic oligonucleotide
ggcgacuaaagcccuucac

SEQ ID NO: 967279 - RNA, 19 nt, Artificial Sequence
  Description of Artificial Sequence: Synthetic oligonucleotide
agcccuucacgagaaugcu

SEQ ID NO: 967280 - RNA, 19 nt, Artificial Sequence
  Description of Artificial Sequence: Synthetic oligonucleotide
ugcgggcguccacucacac

SEQ ID NO: 967281 - RNA, 19 nt, Artificial Sequence
  Description of Artificial Sequence: Synthetic oligonucleotide
  modified_base (15)..(15): a, c, u, g, unknown or other
cauggcccguguacnguuc

SEQ ID NO: 967282 - RNA, 19 nt, Artificial Sequence
  Description of Artificial Sequence: Synthetic oligonucleotide
cuggcgacuaaagcccuuc

SEQ ID NO: 967283 - RNA, 19 nt, Artificial Sequence
  Description of Artificial Sequence: Synthetic oligonucleotide
gcuacagugcuacgauuuc

SEQ ID NO: 967284 - RNA, 19 nt, Artificial Sequence
  Description of Artificial Sequence: Synthetic oligonucleotide
  modified_base (8)..(8): a, c, u, g, unknown or other
cguguacnguucaaugaac

SEQ ID NO: 967285 - RNA, 19 nt, Artificial Sequence
  Description of Artificial Sequence: Synthetic oligonucleotide
ccggagcaguaacugagcc

SEQ ID NO: 967286 - RNA, 19 nt, Artificial Sequence
  Description of Artificial Sequence: Synthetic oligonucleotide
cgacuaaagcccuucacga

SEQ ID NO: 967287 - RNA, 19 nt, Artificial Sequence
  Description of Artificial Sequence: Synthetic oligonucleotide
ucccgagaaggcccuucuc

SEQ ID NO: 967288 - RNA, 19 nt, Artificial Sequence
  Description of Artificial Sequence: Synthetic oligonucleotide
ucaggacgcuagucucacu

SEQ ID NO: 967289 - RNA, 19 nt, Artificial Sequence
  Description of Artificial Sequence: Synthetic oligonucleotide
cguacacucaguaaguacu

SEQ ID NO: 967290 - RNA, 19 nt, Artificial Sequence
  Description of Artificial Sequence: Synthetic oligonucleotide
gcuaaucggaugcuuucaa

SEQ ID NO: 967291 - RNA, 19 nt, Artificial Sequence
  Description of Artificial Sequence: Synthetic oligonucleotide
ggugcuugcgcugcaucug

SEQ ID NO: 967292 - RNA, 19 nt, Artificial Sequence
  Description of Artificial Sequence: Synthetic oligonucleotide
cucuacccgaagggaaaac

SEQ ID NO: 967293 - RNA, 19 nt, Artificial Sequence
  Description of Artificial Sequence: Synthetic oligonucleotide
gucucacuggggugaagaa

SEQ ID NO: 967294 - RNA, 19 nt, Artificial Sequence
  Description of Artificial Sequence: Synthetic oligonucleotide
acgaguacgcucgcccaga

SEQ ID NO: 967295 - RNA, 19 nt, Artificial Sequence
  Description of Artificial Sequence: Synthetic oligonucleotide
  modified_base (3)..(3): a, c, u, g, unknown or other
acnguucaaugaacucagu

SEQ ID NO: 967296 - RNA, 19 nt, Artificial Sequence
  Description of Artificial Sequence: Synthetic oligonucleotide
gagcaauucgugaaucauu

SEQ ID NO: 967297 - RNA, 19 nt, Artificial Sequence
  Description of Artificial Sequence: Synthetic oligonucleotide
cagagaucuaggauuucau

SEQ ID NO: 967298 - RNA, 19 nt, Artificial Sequence
  Description of Artificial Sequence: Synthetic oligonucleotide
gacuguugaaaggccacau

SEQ ID NO: 967299 - RNA, 19 nt, Artificial Sequence
  Description of Artificial Sequence: Synthetic oligonucleotide
ccuugugugcggacuguug

SEQ ID NO: 967300 - RNA, 19 nt, Artificial Sequence
  Description of Artificial Sequence: Synthetic oligonucleotide
  modified_base (9)..(9): a, c, u, g, unknown or other
ccguguacnguucaaugaa

SEQ ID NO: 967301 - RNA, 19 nt, Artificial Sequence
  Description of Artificial Sequence: Synthetic oligonucleotide
ggggacguuucccgagaag

SEQ ID NO: 967302 - RNA, 19 nt, Artificial Sequence
  Description of Artificial Sequence: Synthetic oligonucleotide
uagucucacuggggugaag

SEQ ID NO: 967303 - RNA, 19 nt, Artificial Sequence
  Description of Artificial Sequence: Synthetic oligonucleotide
cuguuauacaugacuccau

SEQ ID NO: 967304 - RNA, 19 nt, Artificial Sequence
  Description of Artificial Sequence: Synthetic oligonucleotide
cacggcguacacucaguaa

SEQ ID NO: 967305 - RNA, 19 nt, Artificial Sequence
  Description of Artificial Sequence: Synthetic oligonucleotide
ggccuguuacuucauuuua

SEQ ID NO: 967306 - RNA, 19 nt, Artificial Sequence
  Description of Artificial Sequence: Synthetic oligonucleotide
ggcuaaucggaugcuuuca

SEQ ID NO: 967307 - RNA, 19 nt, Artificial Sequence
  Description of Artificial Sequence: Synthetic oligonucleotide
guacccacucagagccaag

SEQ ID NO: 967308 - RNA, 19 nt, Artificial Sequence
  Description of Artificial Sequence: Synthetic oligonucleotide
gaguacgcucgcccagaaa

SEQ ID NO: 967309 - RNA, 19 nt, Artificial Sequence
  Description of Artificial Sequence: Synthetic oligonucleotide
cagccuggguauaauacuu

SEQ ID NO: 967310 - RNA, 19 nt, Artificial Sequence
  Description of Artificial Sequence: Synthetic oligonucleotide
cggacuguugaaaggccac

SEQ ID NO: 967311 - RNA, 19 nt, Artificial Sequence
  Description of Artificial Sequence: Synthetic oligonucleotide
gaucgugggcuaaucggau

SEQ ID NO: 967312 - RNA, 19 nt, Artificial Sequence
  Description of Artificial Sequence: Synthetic oligonucleotide
ccaugucagguagauacca

SEQ ID NO: 967313 - RNA, 19 nt, Artificial Sequence
  Description of Artificial Sequence: Synthetic oligonucleotide
gggagauguguuacagaca

SEQ ID NO: 967314 - RNA, 19 nt, Artificial Sequence
  Description of Artificial Sequence: Synthetic oligonucleotide
agagccgauucaggacgcu

SEQ ID NO: 967315 - RNA, 19 nt, Artificial Sequence
  Description of Artificial Sequence: Synthetic oligonucleotide
ccuucacgagaaugcucag

SEQ ID NO: 967316 - RNA, 19 nt, Artificial Sequence
  Description of Artificial Sequence: Synthetic oligonucleotide
ccaaacgaguacgcucgcc

SEQ ID NO: 967317 - RNA, 19 nt, Artificial Sequence
  Description of Artificial Sequence: Synthetic oligonucleotide
gagccgauucaggacgcua

SEQ ID NO: 967318 - RNA, 19 nt, Artificial Sequence
  Description of Artificial Sequence: Synthetic oligonucleotide
gcaacccucacuggaaugu

SEQ ID NO: 967319 - RNA, 19 nt, Artificial Sequence
  Description of Artificial Sequence: Synthetic oligonucleotide
cgucccagaagguaaaagu

SEQ ID NO: 967320 - RNA, 19 nt, Artificial Sequence
  Description of Artificial Sequence: Synthetic oligonucleotide
gcggacuguugaaaggcca

SEQ ID NO: 967321 - RNA, 19 nt, Artificial Sequence
  Description of Artificial Sequence: Synthetic oligonucleotide
gcgggcguccacucacacc

SEQ ID NO: 967322 - RNA, 19 nt, Artificial Sequence
  Description of Artificial Sequence: Synthetic oligonucleotide
gacacggcguacacucagu

SEQ ID NO: 967323 - RNA, 19 nt, Artificial Sequence
  Description of Artificial Sequence: Synthetic oligonucleotide
ccucaauuaggcaacucuu

SEQ ID NO: 967324 - RNA, 19 nt, Artificial Sequence
  Description of Artificial Sequence: Synthetic oligonucleotide
gacuggcgacuaaagcccu

SEQ ID NO: 967325 - RNA, 19 nt, Artificial Sequence
  Description of Artificial Sequence: Synthetic oligonucleotide
cgagaaugcucagcugggc

SEQ ID NO: 967326 - RNA, 19 nt, Artificial Sequence
  Description of Artificial Sequence: Synthetic oligonucleotide
cuagucucacuggggugaa

SEQ ID NO: 967327 - RNA, 19 nt, Artificial Sequence
  Description of Artificial Sequence: Synthetic oligonucleotide
ccgauucaggacgcuaguc

SEQ ID NO: 967328 - RNA, 19 nt, Artificial Sequence
  Description of Artificial Sequence: Synthetic oligonucleotide
cccaaacgaguacgcucgc

SEQ ID NO: 967329 - RNA, 19 nt, Artificial Sequence
  Description of Artificial Sequence: Synthetic oligonucleotide
cucugcgggcguccacuca

SEQ ID NO: 967330 - RNA, 19 nt, Artificial Sequence
  Description of Artificial Sequence: Synthetic oligonucleotide
cucgucagguucacauuuu

SEQ ID NO: 967331 - RNA, 19 nt, Artificial Sequence
  Description of Artificial Sequence: Synthetic oligonucleotide
gugcuacgauuucgaucca

SEQ ID NO: 967332 - RNA, 19 nt, Artificial Sequence
  Description of Artificial Sequence: Synthetic oligonucleotide
ggcguacacucaguaagua

SEQ ID NO: 967333 - RNA, 19 nt, Artificial Sequence
  Description of Artificial Sequence: Synthetic oligonucleotide
cgcuagucucacuggggug

SEQ ID NO: 967334 - RNA, 19 nt, Artificial Sequence
  Description of Artificial Sequence: Synthetic oligonucleotide
cugcgggcguccacucaca

SEQ ID NO: 967335 - RNA, 19 nt, Artificial Sequence
  Description of Artificial Sequence: Synthetic oligonucleotide
ggcaacucuucaugcuggu

SEQ ID NO: 967336 - RNA, 19 nt, Artificial Sequence
  Description of Artificial Sequence: Synthetic oligonucleotide
gccaagccggcagagccga

SEQ ID NO: 967337 - RNA, 19 nt, Artificial Sequence
  Description of Artificial Sequence: Synthetic oligonucleotide
cggagcaguaacugagcca

SEQ ID NO: 967338 - RNA, 19 nt, Artificial Sequence
  Description of Artificial Sequence: Synthetic oligonucleotide
ggcguccacucacacccaa

SEQ ID NO: 967339 - RNA, 19 nt, Artificial Sequence
  Description of Artificial Sequence: Synthetic oligonucleotide
gcccuucacgagaaugcuc

SEQ ID NO: 967340 - RNA, 19 nt, Artificial Sequence
  Description of Artificial Sequence: Synthetic oligonucleotide
ccacuccgcuuguuccaag

SEQ ID NO: 967341 - RNA, 19 nt, Artificial Sequence
  Description of Artificial Sequence: Synthetic oligonucleotide
ccaagugaaaauggauccu

SEQ ID NO: 967342 - RNA, 19 nt, Artificial Sequence
  Description of Artificial Sequence: Synthetic oligonucleotide
gaccuaccgccuucucuuu

SEQ ID NO: 967343 - RNA, 19 nt, Artificial Sequence
  Description of Artificial Sequence: Synthetic oligonucleotide
cucggagcucccagaccua

SEQ ID NO: 967344 - RNA, 19 nt, Artificial Sequence
  Description of Artificial Sequence: Synthetic oligonucleotide
gccgauucaggacgcuagu

SEQ ID NO: 967345 - RNA, 19 nt, Artificial Sequence
  Description of Artificial Sequence: Synthetic oligonucleotide
cgccacuugacugcaucug

SEQ ID NO: 967346 - RNA, 19 nt, Artificial Sequence
  Description of Artificial Sequence: Synthetic oligonucleotide
ccucgucccagaagguaaa

SEQ ID NO: 967347 - RNA, 19 nt, Artificial Sequence
  Description of Artificial Sequence: Synthetic oligonucleotide
gugggcuaaucggaugcuu

SEQ ID NO: 967348 - RNA, 19 nt, Artificial Sequence
  Description of Artificial Sequence: Synthetic oligonucleotide
ccucugcgggcguccacuc

SEQ ID NO: 967349 - RNA, 19 nt, Artificial Sequence
  Description of Artificial Sequence: Synthetic oligonucleotide
cugaguugaucuggugauu

SEQ ID NO: 967350 - RNA, 19 nt, Artificial Sequence
  Description of Artificial Sequence: Synthetic oligonucleotide
cacuggaauguaggauggu

SEQ ID NO: 967351 - RNA, 19 nt, Artificial Sequence
  Description of Artificial Sequence: Synthetic oligonucleotide
caagccggcagagccgauu

SEQ ID NO: 967352 - RNA, 19 nt, Artificial Sequence
  Description of Artificial Sequence: Synthetic oligonucleotide
ccgagaaggcccuucucuu

SEQ ID NO: 967353 - RNA, 19 nt, Artificial Sequence
  Description of Artificial Sequence: Synthetic oligonucleotide
gccucugcgggcguccacu

SEQ ID NO: 967354 - RNA, 19 nt, Artificial Sequence
  Description of Artificial Sequence: Synthetic oligonucleotide
ggguacccacucagagcca

SEQ ID NO: 967355 - RNA, 19 nt, Artificial Sequence
  Description of Artificial Sequence: Synthetic oligonucleotide
cccagaguuccaccagccu

SEQ ID NO: 967356 - RNA, 19 nt, Artificial Sequence
  Description of Artificial Sequence: Synthetic oligonucleotide
cggcguacacucaguaagu

SEQ ID NO: 967357 - RNA, 19 nt, Artificial Sequence
  Description of Artificial Sequence: Synthetic oligonucleotide
gggaaaccugcaggccacu

SEQ ID NO: 967358 - RNA, 19 nt, Artificial Sequence
  Description of Artificial Sequence: Synthetic oligonucleotide
gggcguccacucacaccca

SEQ ID NO: 967359 - RNA, 19 nt, Artificial Sequence
  Description of Artificial Sequence: Synthetic oligonucleotide
cgaguacgcucgcccagaa

SEQ ID NO: 967360 - RNA, 19 nt, Artificial Sequence
  Description of Artificial Sequence: Synthetic oligonucleotide
ccaagacagcuggggugaa

SEQ ID NO: 967361 - RNA, 19 nt, Artificial Sequence
  Description of Artificial Sequence: Synthetic oligonucleotide
cgccucugcgggcguccac

SEQ ID NO: 967362 - RNA, 19 nt, Artificial Sequence
  Description of Artificial Sequence: Synthetic oligonucleotide
gcgccucugcgggcgucca

SEQ ID NO: 967363 - RNA, 19 nt, Artificial Sequence
  Description of Artificial Sequence: Synthetic oligonucleotide
cgugggcuaaucggaugcu

SEQ ID NO: 967364 - RNA, 19 nt, Artificial Sequence
  Description of Artificial Sequence: Synthetic oligonucleotide
ccaagccggcagagccgau

SEQ ID NO: 967365 - RNA, 19 nt, Artificial Sequence
  Description of Artificial Sequence: Synthetic oligonucleotide
aacaauucaauuuacugcc

SEQ ID NO: 967366 - RNA, 19 nt, Artificial Sequence
  Description of Artificial Sequence: Synthetic oligonucleotide
aguaaugagagccaaaggg

SEQ ID NO: 967367 - RNA, 19 nt, Artificial Sequence
  Description of Artificial Sequence: Synthetic oligonucleotide
uaaacaauacuuuugguag

SEQ ID NO: 967368 - RNA, 19 nt, Artificial Sequence
  Description of Artificial Sequence: Synthetic oligonucleotide
ucaacuaugagguuugugg

SEQ ID NO: 967369 - RNA, 19 nt, Artificial Sequence
  Description of Artificial Sequence: Synthetic oligonucleotide
aagaacuacaauucaacac

SEQ ID NO: 967370 - RNA, 19 nt, Artificial Sequence
  Description of Artificial Sequence: Synthetic oligonucleotide
aaaccgaugagucuucagc

SEQ ID NO: 967371 - RNA, 19 nt, Artificial Sequence
  Description of Artificial Sequence: Synthetic oligonucleotide
auuagaaugcuacagaccu

SEQ ID NO: 967372 - RNA, 19 nt, Artificial Sequence
  Description of Artificial Sequence: Synthetic oligonucleotide
uuuaacacaauacauuggu

SEQ ID NO: 967373 - RNA, 19 nt, Artificial Sequence
  Description of Artificial Sequence: Synthetic oligonucleotide
aaccgaugagucuucagcc

SEQ ID NO: 967374 - RNA, 19 nt, Artificial Sequence
  Description of Artificial Sequence: Synthetic oligonucleotide
uguaaaaugaggagggccc

SEQ ID NO: 967375 - RNA, 19 nt, Artificial Sequence
  Description of Artificial Sequence: Synthetic oligonucleotide
uuugguaggcauaaguagc

SEQ ID NO: 967376 - RNA, 19 nt, Artificial Sequence
  Description of Artificial Sequence: Synthetic oligonucleotide
uuuugguaggcauaaguag

SEQ ID NO: 967377 - RNA, 19 nt, Artificial Sequence
  Description of Artificial Sequence: Synthetic oligonucleotide
uucaacacagagaacacug

SEQ ID NO: 967378 - RNA, 19 nt, Artificial Sequence
  Description of Artificial Sequence: Synthetic oligonucleotide
acacauuauguacacacac

SEQ ID NO: 967379 - RNA, 19 nt, Artificial Sequence
  Description of Artificial Sequence: Synthetic oligonucleotide
ucguuuguaguauacacug

SEQ ID NO: 967380 - RNA, 19 nt, Artificial Sequence
  Description of Artificial Sequence: Synthetic oligonucleotide
uguacgagaauguauugug

SEQ ID NO: 967381 - RNA, 19 nt, Artificial Sequence
  Description of Artificial Sequence: Synthetic oligonucleotide
aaugcuacagaccuguguu

SEQ ID NO: 967382 - RNA, 19 nt, Artificial Sequence
  Description of Artificial Sequence: Synthetic oligonucleotide
acaaucgugauccagcuga

SEQ ID NO: 967383 - RNA, 19 nt, Artificial Sequence
  Description of Artificial Sequence: Synthetic oligonucleotide
uauuagaaugcuacagacc

SEQ ID NO: 967384 - RNA, 19 nt, Artificial Sequence
  Description of Artificial Sequence: Synthetic oligonucleotide
aagagauauucccguauuc

SEQ ID NO: 967385 - RNA, 19 nt, Artificial Sequence
  Description of Artificial Sequence: Synthetic oligonucleotide
aguauacacugacaacugc

SEQ ID NO: 967386 - RNA, 19 nt, Artificial Sequence
  Description of Artificial Sequence: Synthetic oligonucleotide
aacauuggagcaauuuucg

SEQ ID NO: 967387 - RNA, 19 nt, Artificial Sequence
  Description of Artificial Sequence: Synthetic oligonucleotide
ugagguuuguggaacagug

SEQ ID NO: 967388 - RNA, 19 nt, Artificial Sequence
  Description of Artificial Sequence: Synthetic oligonucleotide
uguauuguggucauccagu

SEQ ID NO: 967389 - RNA, 19 nt, Artificial Sequence
  Description of Artificial Sequence: Synthetic oligonucleotide
uugguaggcauaaguagcg

SEQ ID NO: 967390 - RNA, 19 nt, Artificial Sequence
  Description of Artificial Sequence: Synthetic oligonucleotide
aauaucaacuaugagguuu

SEQ ID NO: 967391 - RNA, 19 nt, Artificial Sequence
  Description of Artificial Sequence: Synthetic oligonucleotide
cuauuagaaugcuacagac

SEQ ID NO: 967392 - RNA, 19 nt, Artificial Sequence
  Description of Artificial Sequence: Synthetic oligonucleotide
uucaauuuacugccuuugg

SEQ ID NO: 967393 - RNA, 19 nt, Artificial Sequence
  Description of Artificial Sequence: Synthetic oligonucleotide
aaagcaaaguggaauucac

SEQ ID NO: 967394 - RNA, 19 nt, Artificial Sequence
  Description of Artificial Sequence: Synthetic oligonucleotide
ugugaguuuagucuggcau

SEQ ID NO: 967395 - RNA, 19 nt, Artificial Sequence
  Description of Artificial Sequence: Synthetic oligonucleotide
ugucggaagccccagacgc

SEQ ID NO: 967396 - RNA, 19 nt, Artificial Sequence
  Description of Artificial Sequence: Synthetic oligonucleotide
auggacacaaucuaaaaua

SEQ ID NO: 967397 - RNA, 19 nt, Artificial Sequence
  Description of Artificial Sequence: Synthetic oligonucleotide
aauguacgagaauguauug

SEQ ID NO: 967398 - RNA, 19 nt, Artificial Sequence
  Description of Artificial Sequence: Synthetic oligonucleotide
gucuucgugauggagaucg

SEQ ID NO: 967399 - RNA, 19 nt, Artificial Sequence
  Description of Artificial Sequence: Synthetic oligonucleotide
uucuuuccgaacauuggag

SEQ ID NO: 967400 - RNA, 19 nt, Artificial Sequence
  Description of Artificial Sequence: Synthetic oligonucleotide
gguacgacaaucgugaucc

SEQ ID NO: 967401 - RNA, 19 nt, Artificial Sequence
  Description of Artificial Sequence: Synthetic oligonucleotide
aacuagcaggaccucaaag

SEQ ID NO: 967402 - RNA, 19 nt, Artificial Sequence
  Description of Artificial Sequence: Synthetic oligonucleotide
aaagacuaauacagccucc

SEQ ID NO: 967403 - RNA, 19 nt, Artificial Sequence
  Description of Artificial Sequence: Synthetic oligonucleotide
uggacacaaucuaaaauac

SEQ ID NO: 967404 - RNA, 19 nt, Artificial Sequence
  Description of Artificial Sequence: Synthetic oligonucleotide
aacgaaaagaguggcauga

SEQ ID NO: 967405 - RNA, 19 nt, Artificial Sequence
  Description of Artificial Sequence: Synthetic oligonucleotide
cuauuugaacaguaggaac

SEQ ID NO: 967406 - RNA, 19 nt, Artificial Sequence
  Description of Artificial Sequence: Synthetic oligonucleotide
gauauugacagagcacagg

SEQ ID NO: 967407 - RNA, 19 nt, Artificial Sequence
  Description of Artificial Sequence: Synthetic oligonucleotide
gaaaagaguggcaugaaga

SEQ ID NO: 967408 - RNA, 19 nt, Artificial Sequence
  Description of Artificial Sequence: Synthetic oligonucleotide
cuucguuuguaguauacac

SEQ ID NO: 967409 - RNA, 19 nt, Artificial Sequence
  Description of Artificial Sequence: Synthetic oligonucleotide
uggauaauccuguccagcc

SEQ ID NO: 967410 - RNA, 19 nt, Artificial Sequence
  Description of Artificial Sequence: Synthetic oligonucleotide
ucuuuccgaacauuggagc

SEQ ID NO: 967411 - RNA, 19 nt, Artificial Sequence
  Description of Artificial Sequence: Synthetic oligonucleotide
uguucuucgcugcucagca

SEQ ID NO: 967412 - RNA, 19 nt, Artificial Sequence
  Description of Artificial Sequence: Synthetic oligonucleotide
acaauacauugguauugcc

SEQ ID NO: 967413 - RNA, 19 nt, Artificial Sequence
  Description of Artificial Sequence: Synthetic oligonucleotide
acuaugagguuuguggaac

SEQ ID NO: 967414 - RNA, 19 nt, Artificial Sequence
  Description of Artificial Sequence: Synthetic oligonucleotide
aggaacgacaugaggaucc

SEQ ID NO: 967415 - RNA, 19 nt, Artificial Sequence
  Description of Artificial Sequence: Synthetic oligonucleotide
aaacgaaaagaguggcaug

SEQ ID NO: 967416 - RNA, 19 nt, Artificial Sequence
  Description of Artificial Sequence: Synthetic oligonucleotide
acuuuugguaggcauaagu

SEQ ID NO: 967417 - RNA, 19 nt, Artificial Sequence
  Description of Artificial Sequence: Synthetic oligonucleotide
gagaucguaagagauauuc

SEQ ID NO: 967418 - RNA, 19 nt, Artificial Sequence
  Description of Artificial Sequence: Synthetic oligonucleotide
uucguuuguaguauacacu

SEQ ID NO: 967419 - RNA, 19 nt, Artificial Sequence
  Description of Artificial Sequence: Synthetic oligonucleotide
uguaguauacacugacaac

SEQ ID NO: 967420 - RNA, 19 nt, Artificial Sequence
  Description of Artificial Sequence: Synthetic oligonucleotide
aggauauugacagagcaca

SEQ ID NO: 967421 - RNA, 19 nt, Artificial Sequence
  Description of Artificial Sequence: Synthetic oligonucleotide
aacgucguagccaucaaug

SEQ ID NO: 967422 - RNA, 19 nt, Artificial Sequence
  Description of Artificial Sequence: Synthetic oligonucleotide
uuuuagacuagcaguguau

SEQ ID NO: 967423 - RNA, 19 nt, Artificial Sequence
  Description of Artificial Sequence: Synthetic oligonucleotide
uaguauacacugacaacug

SEQ ID NO: 967424 - RNA, 19 nt, Artificial Sequence
  Description of Artificial Sequence: Synthetic oligonucleotide
gaggguguaaaaugaggag

SEQ ID NO: 967425 - RNA, 19 nt, Artificial Sequence
  Description of Artificial Sequence: Synthetic oligonucleotide
aacaguaggaacacuagaa

SEQ ID NO: 967426 - RNA, 19 nt, Artificial Sequence
  Description of Artificial Sequence: Synthetic oligonucleotide
uacgagaauguauuguggu

SEQ ID NO: 967427 - RNA, 19 nt, Artificial Sequence
  Description of Artificial Sequence: Synthetic oligonucleotide
gugggagagaauuugguac

SEQ ID NO: 967428 - RNA, 19 nt, Artificial Sequence
  Description of Artificial Sequence: Synthetic oligonucleotide
aauucaauuuacugccuuu

SEQ ID NO: 967429 - RNA, 19 nt, Artificial Sequence
  Description of Artificial Sequence: Synthetic oligonucleotide
caaagacuaauacagccuc

SEQ ID NO: 967430 - RNA, 19 nt, Artificial Sequence
  Description of Artificial Sequence: Synthetic oligonucleotide
uagcucuuaagacacggac

SEQ ID NO: 967431 - RNA, 19 nt, Artificial Sequence
  Description of Artificial Sequence: Synthetic oligonucleotide
ugggaagacuucaaguaga

SEQ ID NO: 967432 - RNA, 19 nt, Artificial Sequence
  Description of Artificial Sequence: Synthetic oligonucleotide
ggaauucacugguacaugg

SEQ ID NO: 967433 - RNA, 19 nt, Artificial Sequence
  Description of Artificial Sequence: Synthetic oligonucleotide
aggacucuguguuauaacu

SEQ ID NO: 967434 - RNA, 19 nt, Artificial Sequence
  Description of Artificial Sequence: Synthetic oligonucleotide
agaucguaagagauauucc

SEQ ID NO: 967435 - RNA, 19 nt, Artificial Sequence
  Description of Artificial Sequence: Synthetic oligonucleotide
acgagaauguauugugguc

SEQ ID NO: 967436 - RNA, 19 nt, Artificial Sequence
  Description of Artificial Sequence: Synthetic oligonucleotide
auguauuguggucauccag

SEQ ID NO: 967437 - RNA, 19 nt, Artificial Sequence
  Description of Artificial Sequence: Synthetic oligonucleotide
acgacaaucgugauccagc

SEQ ID NO: 967438 - RNA, 19 nt, Artificial Sequence
  Description of Artificial Sequence: Synthetic oligonucleotide
cacacacaaagacuaauac

SEQ ID NO: 967439 - RNA, 19 nt, Artificial Sequence
  Description of Artificial Sequence: Synthetic oligonucleotide
gaggaacguauuuuccagg

SEQ ID NO: 967440 - RNA, 19 nt, Artificial Sequence
  Description of Artificial Sequence: Synthetic oligonucleotide
cuucugaaaccgaugaguc

SEQ ID NO: 967441 - RNA, 19 nt, Artificial Sequence
  Description of Artificial Sequence: Synthetic oligonucleotide
uggaaagcgaguucucuca

SEQ ID NO: 967442 - RNA, 19 nt, Artificial Sequence
  Description of Artificial Sequence: Synthetic oligonucleotide
uucgugauggagaucguaa

SEQ ID NO: 967443 - RNA, 19 nt, Artificial Sequence
  Description of Artificial Sequence: Synthetic oligonucleotide
uagaaugcuacagaccugu

SEQ ID NO: 967444 - RNA, 19 nt, Artificial Sequence
  Description of Artificial Sequence: Synthetic oligonucleotide
aucguaagagauauucccg

SEQ ID NO: 967445 - RNA, 19 nt, Artificial Sequence
  Description of Artificial Sequence: Synthetic oligonucleotide
aagacuaauacagccuccu

SEQ ID NO: 967446 - RNA, 19 nt, Artificial Sequence
  Description of Artificial Sequence: Synthetic oligonucleotide
ucguaagagauauucccgu

SEQ ID NO: 967447 - RNA, 19 nt, Artificial Sequence
  Description of Artificial Sequence: Synthetic oligonucleotide
aacuaugagguuuguggaa

SEQ ID NO: 967448 - RNA, 19 nt, Artificial Sequence
  Description of Artificial Sequence: Synthetic oligonucleotide
aaucccugcgaauaccaaa

SEQ ID NO: 967449 - RNA, 19 nt, Artificial Sequence
  Description of Artificial Sequence: Synthetic oligonucleotide
ugguacaugguuucuauuu

SEQ ID NO: 967450 - RNA, 19 nt, Artificial Sequence
  Description of Artificial Sequence: Synthetic oligonucleotide
caauacauugguauugcca

SEQ ID NO: 967451 - RNA, 19 nt, Artificial Sequence
  Description of Artificial Sequence: Synthetic oligonucleotide
cugcgaauaccaaaccacc

SEQ ID NO: 967452 - RNA, 19 nt, Artificial Sequence
  Description of Artificial Sequence: Synthetic oligonucleotide
uuuguggaacagugguggg

SEQ ID NO: 967453 - RNA, 19 nt, Artificial Sequence
  Description of Artificial Sequence: Synthetic oligonucleotide
acacaauacauugguauug

SEQ ID NO: 967454 - RNA, 19 nt, Artificial Sequence
  Description of Artificial Sequence: Synthetic oligonucleotide
aaaaucccugcgaauacca

SEQ ID NO: 967455 - RNA, 19 nt, Artificial Sequence
  Description of Artificial Sequence: Synthetic oligonucleotide
guaguauacacugacaacu

SEQ ID NO: 967456 - RNA, 19 nt, Artificial Sequence
  Description of Artificial Sequence: Synthetic oligonucleotide
uggagcaauuuucggagcu

SEQ ID NO: 967457 - RNA, 19 nt, Artificial Sequence
  Description of Artificial Sequence: Synthetic oligonucleotide
aacgacaugaggauccaga

SEQ ID NO: 967458 - RNA, 19 nt, Artificial Sequence
  Description of Artificial Sequence: Synthetic oligonucleotide
uaagagauauucccguauu

SEQ ID NO: 967459 - RNA, 19 nt, Artificial Sequence
  Description of Artificial Sequence: Synthetic oligonucleotide
gaugcacugccucuagaug

SEQ ID NO: 967460 - RNA, 19 nt, Artificial Sequence
  Description of Artificial Sequence: Synthetic oligonucleotide
ucgugauggagaucguaag

SEQ ID NO: 967461 - RNA, 19 nt, Artificial Sequence
  Description of Artificial Sequence: Synthetic oligonucleotide
uuagaaugcuacagaccug

SEQ ID NO: 967462 - RNA, 19 nt, Artificial Sequence
  Description of Artificial Sequence: Synthetic oligonucleotide
agagauauucccguauucu

SEQ ID NO: 967463 - RNA, 19 nt, Artificial Sequence
  Description of Artificial Sequence: Synthetic oligonucleotide
uggagaucguaagagauau

SEQ ID NO: 967464 - RNA, 19 nt, Artificial Sequence
  Description of Artificial Sequence: Synthetic oligonucleotide
aauacuuuugguaggcaua

SEQ ID NO: 967465 - RNA, 19 nt, Artificial Sequence
  Description of Artificial Sequence: Synthetic oligonucleotide
aggaacguauuuuccagga

SEQ ID NO: 967466 - RNA, 19 nt, Artificial Sequence
  Description of Artificial Sequence: Synthetic oligonucleotide
uggcauaucaaugcuuagc

SEQ ID NO: 967467 - RNA, 19 nt, Artificial Sequence
  Description of Artificial Sequence: Synthetic oligonucleotide
uacauugguauugccaaga

SEQ ID NO: 967468 - RNA, 19 nt, Artificial Sequence
  Description of Artificial Sequence: Synthetic oligonucleotide
acaguaggaacacuagaaa

SEQ ID NO: 967469 - RNA, 19 nt, Artificial Sequence
  Description of Artificial Sequence: Synthetic oligonucleotide
cauuggagcaauuuucgga

SEQ ID NO: 967470 - RNA, 19 nt, Artificial Sequence
  Description of Artificial Sequence: Synthetic oligonucleotide
uccgucuaaacgucguagc

SEQ ID NO: 967471 - RNA, 19 nt, Artificial Sequence
  Description of Artificial Sequence: Synthetic oligonucleotide
guguaaaaugaggagggcc

SEQ ID NO: 967472 - RNA, 19 nt, Artificial Sequence
  Description of Artificial Sequence: Synthetic oligonucleotide
uuagcuugggaggcggagg

SEQ ID NO: 967473 - RNA, 19 nt, Artificial Sequence
  Description of Artificial Sequence: Synthetic oligonucleotide
gaacacugcuaaaacauuc

SEQ ID NO: 967474 - RNA, 19 nt, Artificial Sequence
  Description of Artificial Sequence: Synthetic oligonucleotide
aucccugcgaauaccaaac

SEQ ID NO: 967475 - RNA, 19 nt, Artificial Sequence
  Description of Artificial Sequence: Synthetic oligonucleotide
agaggaacgacaugaggau

SEQ ID NO: 967476 - RNA, 19 nt, Artificial Sequence
  Description of Artificial Sequence: Synthetic oligonucleotide
guguuagcaaagcccaaag

SEQ ID NO: 967477 - RNA, 19 nt, Artificial Sequence
  Description of Artificial Sequence: Synthetic oligonucleotide
uuagacuagcaguguauaa

SEQ ID NO: 967478 - RNA, 19 nt, Artificial Sequence
  Description of Artificial Sequence: Synthetic oligonucleotide
uggcgaaggaugcacugcc

SEQ ID NO: 967479 - RNA, 19 nt, Artificial Sequence
  Description of Artificial Sequence: Synthetic oligonucleotide
ugcaggauauugacagagc

SEQ ID NO: 967480 - RNA, 19 nt, Artificial Sequence
  Description of Artificial Sequence: Synthetic oligonucleotide
gaacaguaggaacacuaga

SEQ ID NO: 967481 - RNA, 19 nt, Artificial Sequence
  Description of Artificial Sequence: Synthetic oligonucleotide
agacuaggaucucaaacau

SEQ ID NO: 967482 - RNA, 19 nt, Artificial Sequence
  Description of Artificial Sequence: Synthetic oligonucleotide
gaaaccgaugagucuucag

SEQ ID NO: 967483 - RNA, 19 nt, Artificial Sequence
  Description of Artificial Sequence: Synthetic oligonucleotide
auacauugguauugccaag

SEQ ID NO: 967484 - RNA, 19 nt, Artificial Sequence
  Description of Artificial Sequence: Synthetic oligonucleotide
guacgagaauguauugugg

SEQ ID NO: 967485 - RNA, 19 nt, Artificial Sequence
  Description of Artificial Sequence: Synthetic oligonucleotide
uuccgucuaaacgucguag

SEQ ID NO: 967486 - RNA, 19 nt, Artificial Sequence
  Description of Artificial Sequence: Synthetic oligonucleotide
cuuuugguaggcauaagua

SEQ ID NO: 967487 - RNA, 19 nt, Artificial Sequence
  Description of Artificial Sequence: Synthetic oligonucleotide
uaugagguuuguggaacag

SEQ ID NO: 967488 - RNA, 19 nt, Artificial Sequence
  Description of Artificial Sequence: Synthetic oligonucleotide
ggaggaacguauuuuccag

SEQ ID NO: 967489 - RNA, 19 nt, Artificial Sequence
  Description of Artificial Sequence: Synthetic oligonucleotide
gcuggaugaacacagaaaa

SEQ ID NO: 967490 - RNA, 19 nt, Artificial Sequence
  Description of Artificial Sequence: Synthetic oligonucleotide
uccagucugugaacuagca

SEQ ID NO: 967491 - RNA, 19 nt, Artificial Sequence
  Description of Artificial Sequence: Synthetic oligonucleotide
uuuagacuagcaguguaua

SEQ ID NO: 967492 - RNA, 19 nt, Artificial Sequence
  Description of Artificial Sequence: Synthetic oligonucleotide
acugguacaugguuucuau

SEQ ID NO: 967493 - RNA, 19 nt, Artificial Sequence
  Description of Artificial Sequence: Synthetic oligonucleotide
agggguacgacaaucguga

SEQ ID NO: 967494 - RNA, 19 nt, Artificial Sequence
  Description of Artificial Sequence: Synthetic oligonucleotide
uccuucguuuguaguauac

SEQ ID NO: 967495 - RNA, 19 nt, Artificial Sequence
  Description of Artificial Sequence: Synthetic oligonucleotide
aaauaucaacuaugagguu

SEQ ID NO: 967496 - RNA, 19 nt, Artificial Sequence
  Description of Artificial Sequence: Synthetic oligonucleotide
aaacgucguagccaucaau

SEQ ID NO: 967497 - RNA, 19 nt, Artificial Sequence
  Description of Artificial Sequence: Synthetic oligonucleotide
ucgugauccagcugauggc

SEQ ID NO: 967498 - RNA, 19 nt, Artificial Sequence
  Description of Artificial Sequence: Synthetic oligonucleotide
uacgacaaucgugauccag

SEQ ID NO: 967499 - RNA, 19 nt, Artificial Sequence
  Description of Artificial Sequence: Synthetic oligonucleotide
accggggaaacgaaaagag

SEQ ID NO: 967500 - RNA, 19 nt, Artificial Sequence
  Description of Artificial Sequence: Synthetic oligonucleotide
cuuuccgaacauuggagca

SEQ ID NO: 967501 - RNA, 19 nt, Artificial Sequence
  Description of Artificial Sequence: Synthetic oligonucleotide
gaaacgaaaagaguggcau

SEQ ID NO: 967502 - RNA, 19 nt, Artificial Sequence
  Description of Artificial Sequence: Synthetic oligonucleotide
ccaaggaccugucaugucg

SEQ ID NO: 967503 - RNA, 19 nt, Artificial Sequence
  Description of Artificial Sequence: Synthetic oligonucleotide
uucauggcgaaggaugcac

SEQ ID NO: 967504 - RNA, 19 nt, Artificial Sequence
  Description of Artificial Sequence: Synthetic oligonucleotide
cauacgcccgcacccaccg

SEQ ID NO: 967505 - RNA, 19 nt, Artificial Sequence
  Description of Artificial Sequence: Synthetic oligonucleotide
cauugguauugccaagaac

SEQ ID NO: 967506 - RNA, 19 nt, Artificial Sequence
  Description of Artificial Sequence: Synthetic oligonucleotide
uguguuagcaaagcccaaa

SEQ ID NO: 967507 - RNA, 19 nt, Artificial Sequence
  Description of Artificial Sequence: Synthetic oligonucleotide
cauggccaguggauaaucc

SEQ ID NO: 967508 - RNA, 19 nt, Artificial Sequence
  Description of Artificial Sequence: Synthetic oligonucleotide
caacuaugagguuugugga

SEQ ID NO: 967509 - RNA, 19 nt, Artificial Sequence
  Description of Artificial Sequence: Synthetic oligonucleotide
ugaguuuagucuggcauau

SEQ ID NO: 967510 - RNA, 19 nt, Artificial Sequence
  Description of Artificial Sequence: Synthetic oligonucleotide
guugcgggcccauacgccc

SEQ ID NO: 967511 - RNA, 19 nt, Artificial Sequence
  Description of Artificial Sequence: Synthetic oligonucleotide
cuccguacgguagcgaggg

SEQ ID NO: 967512 - RNA, 19 nt, Artificial Sequence
  Description of Artificial Sequence: Synthetic oligonucleotide
acaccggggaaacgaaaag

SEQ ID NO: 967513 - RNA, 19 nt, Artificial Sequence
  Description of Artificial Sequence: Synthetic oligonucleotide
cacggagaagagcagcaag

SEQ ID NO: 967514 - RNA, 19 nt, Artificial Sequence
  Description of Artificial Sequence: Synthetic oligonucleotide
gcgaagaccgcccaguagc

SEQ ID NO: 967515 - RNA, 19 nt, Artificial Sequence
  Description of Artificial Sequence: Synthetic oligonucleotide
auguacgagaauguauugu

SEQ ID NO: 967516 - RNA, 19 nt, Artificial Sequence
  Description of Artificial Sequence: Synthetic oligonucleotide
cuaaacgucguagccauca

SEQ ID NO: 967517 - RNA, 19 nt, Artificial Sequence
  Description of Artificial Sequence: Synthetic oligonucleotide
uaugcagauucacuccauu

SEQ ID NO: 967518 - RNA, 19 nt, Artificial Sequence
  Description of Artificial Sequence: Synthetic oligonucleotide
ggggaaacgaaaagagugg

SEQ ID NO: 967519 - RNA, 19 nt, Artificial Sequence
  Description of Artificial Sequence: Synthetic oligonucleotide
ccugcgaauaccaaaccac

SEQ ID NO: 967520 - RNA, 19 nt, Artificial Sequence
  Description of Artificial Sequence: Synthetic oligonucleotide
cagggguacgacaaucgug

SEQ ID NO: 967521 - RNA, 19 nt, Artificial Sequence
  Description of Artificial Sequence: Synthetic oligonucleotide
ugguauugccaagaacuac

SEQ ID NO: 967522 - RNA, 19 nt, Artificial Sequence
  Description of Artificial Sequence: Synthetic oligonucleotide
gguauugccaagaacuaca

SEQ ID NO: 967523 - RNA, 19 nt, Artificial Sequence
  Description of Artificial Sequence: Synthetic oligonucleotide
agagaccgcagaaacagga

SEQ ID NO: 967524 - RNA, 19 nt, Artificial Sequence
  Description of Artificial Sequence: Synthetic oligonucleotide
aggguugcgggcccauacg

SEQ ID NO: 967525 - RNA, 19 nt, Artificial Sequence
  Description of Artificial Sequence: Synthetic oligonucleotide
uuuccgaacauuggagcaa

SEQ ID NO: 967526 - RNA, 19 nt, Artificial Sequence
  Description of Artificial Sequence: Synthetic oligonucleotide
acgucguagccaucaaugu

SEQ ID NO: 967527 - RNA, 19 nt, Artificial Sequence
  Description of Artificial Sequence: Synthetic oligonucleotide
gaaagcgaguucucucaca

SEQ ID NO: 967528 - RNA, 19 nt, Artificial Sequence
  Description of Artificial Sequence: Synthetic oligonucleotide
caaaguggaauucacuggu

SEQ ID NO: 967529 - RNA, 19 nt, Artificial Sequence
  Description of Artificial Sequence: Synthetic oligonucleotide
uauaacuacccuggcuuuc

SEQ ID NO: 967530 - RNA, 19 nt, Artificial Sequence
  Description of Artificial Sequence: Synthetic oligonucleotide
accgaugagucuucagccu

SEQ ID NO: 967531 - RNA, 19 nt, Artificial Sequence
  Description of Artificial Sequence: Synthetic oligonucleotide
uguguucuucgcugcucag

SEQ ID NO: 967532 - RNA, 19 nt, Artificial Sequence
  Description of Artificial Sequence: Synthetic oligonucleotide
gacaaucgugauccagcug

SEQ ID NO: 967533 - RNA, 19 nt, Artificial Sequence
  Description of Artificial Sequence: Synthetic oligonucleotide
caucuauuagaaugcuaca

SEQ ID NO: 967534 - RNA, 19 nt, Artificial Sequence
  Description of Artificial Sequence: Synthetic oligonucleotide
cggggaaacgaaaagagug

SEQ ID NO: 967535 - RNA, 19 nt, Artificial Sequence
  Description of Artificial Sequence: Synthetic oligonucleotide
auaacuacccuggcuuucu

SEQ ID NO: 967536 - RNA, 19 nt, Artificial Sequence
  Description of Artificial Sequence: Synthetic oligonucleotide
caggagggaccacacaaug

SEQ ID NO: 967537 - RNA, 19 nt, Artificial Sequence
  Description of Artificial Sequence: Synthetic oligonucleotide
gacuaggaucucaaacaug

SEQ ID NO: 967538 - RNA, 19 nt, Artificial Sequence
  Description of Artificial Sequence: Synthetic oligonucleotide
aacuacaauucaacacaga

SEQ ID NO: 967539 - RNA, 19 nt, Artificial Sequence
  Description of Artificial Sequence: Synthetic oligonucleotide
ucggaagccccagacgcag

SEQ ID NO: 967540 - RNA, 19 nt, Artificial Sequence
  Description of Artificial Sequence: Synthetic oligonucleotide
agacacggaccuggaaagc

SEQ ID NO: 967541 - RNA, 19 nt, Artificial Sequence
  Description of Artificial Sequence: Synthetic oligonucleotide
ugucaguaaugagagccaa

SEQ ID NO: 967542 - RNA, 19 nt, Artificial Sequence
  Description of Artificial Sequence: Synthetic oligonucleotide
uucgcugcucagcaaccac

SEQ ID NO: 967543 - RNA, 19 nt, Artificial Sequence
  Description of Artificial Sequence: Synthetic oligonucleotide
ucccugcgaauaccaaacc

SEQ ID NO: 967544 - RNA, 19 nt, Artificial Sequence
  Description of Artificial Sequence: Synthetic oligonucleotide
cagauucacuccauuagaa

SEQ ID NO: 967545 - RNA, 19 nt, Artificial Sequence
  Description of Artificial Sequence: Synthetic oligonucleotide
acauugguauugccaagaa

SEQ ID NO: 967546 - RNA, 19 nt, Artificial Sequence
  Description of Artificial Sequence: Synthetic oligonucleotide
agucugugaacuagcagga

SEQ ID NO: 967547 - RNA, 19 nt, Artificial Sequence
  Description of Artificial Sequence: Synthetic oligonucleotide
uaaacgucguagccaucaa

SEQ ID NO: 967548 - RNA, 19 nt, Artificial Sequence
  Description of Artificial Sequence: Synthetic oligonucleotide
aacuacccuggcuuucuuu

SEQ ID NO: 967549 - RNA, 19 nt, Artificial Sequence
  Description of Artificial Sequence: Synthetic oligonucleotide
gaggguugcgggcccauac

SEQ ID NO: 967550 - RNA, 19 nt, Artificial Sequence
  Description of Artificial Sequence: Synthetic oligonucleotide
uugcgggcccauacgcccg

SEQ ID NO: 967551 - RNA, 19 nt, Artificial Sequence
  Description of Artificial Sequence: Synthetic oligonucleotide
gcauaaguagcgcuuaaaa

SEQ ID NO: 967552 - RNA, 19 nt, Artificial Sequence
  Description of Artificial Sequence: Synthetic oligonucleotide
ggcauaucaaugcuuagcu

SEQ ID NO: 967553 - RNA, 19 nt, Artificial Sequence
  Description of Artificial Sequence: Synthetic oligonucleotide
aaucgugauccagcugaug

SEQ ID NO: 967554 - RNA, 19 nt, Artificial Sequence
  Description of Artificial Sequence: Synthetic oligonucleotide
cuacagaccuguguuagca

SEQ ID NO: 967555 - RNA, 19 nt, Artificial Sequence
  Description of Artificial Sequence: Synthetic oligonucleotide
cagagaccgcagaaacagg

SEQ ID NO: 967556 - RNA, 19 nt, Artificial Sequence
  Description of Artificial Sequence: Synthetic oligonucleotide
guagcgaggguugcgggcc

SEQ ID NO: 967557 - RNA, 19 nt, Artificial Sequence
  Description of Artificial Sequence: Synthetic oligonucleotide
gugaguuuagucuggcaua

SEQ ID NO: 967558 - RNA, 19 nt, Artificial Sequence
  Description of Artificial Sequence: Synthetic oligonucleotide
cacggaccuggaaagcgag

SEQ ID NO: 967559 - RNA, 19 nt, Artificial Sequence
  Description of Artificial Sequence: Synthetic oligonucleotide
uuuccgucuaaacgucgua

SEQ ID NO: 967560 - RNA, 19 nt, Artificial Sequence
  Description of Artificial Sequence: Synthetic oligonucleotide
gaugccguccaggcgcagg

SEQ ID NO: 967561 - RNA, 19 nt, Artificial Sequence
  Description of Artificial Sequence: Synthetic oligonucleotide
acgguagcgaggguugcgg

SEQ ID NO: 967562 - RNA, 19 nt, Artificial Sequence
  Description of Artificial Sequence: Synthetic oligonucleotide
aggccuagaaacaauucaa

SEQ ID NO: 967563 - RNA, 19 nt, Artificial Sequence
  Description of Artificial Sequence: Synthetic oligonucleotide
acgaacaccaccagccaug

SEQ ID NO: 967564 - RNA, 19 nt, Artificial Sequence
  Description of Artificial Sequence: Synthetic oligonucleotide
acauguguucuucgcugcu

SEQ ID NO: 967565 - RNA, 19 nt, Artificial Sequence
  Description of Artificial Sequence: Synthetic oligonucleotide
ugguaggcauaaguagcgc

SEQ ID NO: 967566 - RNA, 19 nt, Artificial Sequence
  Description of Artificial Sequence: Synthetic oligonucleotide
gggaaacgaaaagaguggc

SEQ ID NO: 967567 - RNA, 19 nt, Artificial Sequence
  Description of Artificial Sequence: Synthetic oligonucleotide
cuagcaggaccucaaaggu

SEQ ID NO: 967568 - RNA, 19 nt, Artificial Sequence
  Description of Artificial Sequence: Synthetic oligonucleotide
gguucauggcgaaggaugc

SEQ ID NO: 967569 - RNA, 19 nt, Artificial Sequence
  Description of Artificial Sequence: Synthetic oligonucleotide
cuuaagacacggaccugga

SEQ ID NO: 967570 - RNA, 19 nt, Artificial Sequence
  Description of Artificial Sequence: Synthetic oligonucleotide
gcagauucacuccauuaga

SEQ ID NO: 967571 - RNA, 19 nt, Artificial Sequence
  Description of Artificial Sequence: Synthetic oligonucleotide
ugaaaccgaugagucuuca

SEQ ID NO: 967572 - RNA, 19 nt, Artificial Sequence
  Description of Artificial Sequence: Synthetic oligonucleotide
aggggcacgaacaccacca

SEQ ID NO: 967573 - RNA, 19 nt, Artificial Sequence
  Description of Artificial Sequence: Synthetic oligonucleotide
guaaaaugaggagggccca

SEQ ID NO: 967574 - RNA, 19 nt, Artificial Sequence
  Description of Artificial Sequence: Synthetic oligonucleotide
cugaaaccgaugagucuuc

SEQ ID NO: 967575 - RNA, 19 nt, Artificial Sequence
  Description of Artificial Sequence: Synthetic oligonucleotide
gucuaaacgucguagccau

SEQ ID NO: 967576 - RNA, 19 nt, Artificial Sequence
  Description of Artificial Sequence: Synthetic oligonucleotide
augucaguaaugagagcca

SEQ ID NO: 967577 - RNA, 19 nt, Artificial Sequence
  Description of Artificial Sequence: Synthetic oligonucleotide
gacaccggggaaacgaaaa

SEQ ID NO: 967578 - RNA, 19 nt, Artificial Sequence
  Description of Artificial Sequence: Synthetic oligonucleotide
uaggcauaaguagcgcuua

SEQ ID NO: 967579 - RNA, 19 nt, Artificial Sequence
  Description of Artificial Sequence: Synthetic oligonucleotide
ggauauugacagagcacag

SEQ ID NO: 967580 - RNA, 19 nt, Artificial Sequence
  Description of Artificial Sequence: Synthetic oligonucleotide
cacgaugaccaggagcuuc

SEQ ID NO: 967581 - RNA, 19 nt, Artificial Sequence
  Description of Artificial Sequence: Synthetic oligonucleotide
gguagcgaggguugcgggc

SEQ ID NO: 967582 - RNA, 19 nt, Artificial Sequence
  Description of Artificial Sequence: Synthetic oligonucleotide
gaggaacgacaugaggauc

SEQ ID NO: 967583 - RNA, 19 nt, Artificial Sequence
  Description of Artificial Sequence: Synthetic oligonucleotide
ggcggaggaacguauuuuc

SEQ ID NO: 967584 - RNA, 19 nt, Artificial Sequence
  Description of Artificial Sequence: Synthetic oligonucleotide
ucuaaacgucguagccauc

SEQ ID NO: 967585 - RNA, 19 nt, Artificial Sequence
  Description of Artificial Sequence: Synthetic oligonucleotide
ucuucgugauggagaucgu

SEQ ID NO: 967586 - RNA, 19 nt, Artificial Sequence
  Description of Artificial Sequence: Synthetic oligonucleotide
ugggugccccucuccaccc

SEQ ID NO: 967587 - RNA, 19 nt, Artificial Sequence
  Description of Artificial Sequence: Synthetic oligonucleotide
ccgucuaaacgucguagcc

SEQ ID NO: 967588 - RNA, 19 nt, Artificial Sequence
  Description of Artificial Sequence: Synthetic oligonucleotide
caccgaggcgcccacgaug

SEQ ID NO: 967589 - RNA, 19 nt, Artificial Sequence
  Description of Artificial Sequence: Synthetic oligonucleotide
ggaaagcgaguucucucac

SEQ ID NO: 967590 - RNA, 19 nt, Artificial Sequence
  Description of Artificial Sequence: Synthetic oligonucleotide
ugugaacuagcaggaccuc

SEQ ID NO: 967591 - RNA, 19 nt, Artificial Sequence
  Description of Artificial Sequence: Synthetic oligonucleotide
auaauccuguccagccuca

SEQ ID NO: 967592 - RNA, 19 nt, Artificial Sequence
  Description of Artificial Sequence: Synthetic oligonucleotide
ccuuuccgucuaaacgucg

SEQ ID NO: 967593 - RNA, 19 nt, Artificial Sequence
  Description of Artificial Sequence: Synthetic oligonucleotide
auauucccguauucucuua

SEQ ID NO: 967594 - RNA, 19 nt, Artificial Sequence
  Description of Artificial Sequence: Synthetic oligonucleotide
aggagggaccacacaaugu

SEQ ID NO: 967595 - RNA, 19 nt, Artificial Sequence
  Description of Artificial Sequence: Synthetic oligonucleotide
ggaaauguacgagaaugua

SEQ ID NO: 967596 - RNA, 19 nt, Artificial Sequence
  Description of Artificial Sequence: Synthetic oligonucleotide
accgcagaaacaggaggga

SEQ ID NO: 967597 - RNA, 19 nt, Artificial Sequence
  Description of Artificial Sequence: Synthetic oligonucleotide
ggguugcgggcccauacgc

SEQ ID NO: 967598 - RNA, 19 nt, Artificial Sequence
  Description of Artificial Sequence: Synthetic oligonucleotide
accgaggcgcccacgauga

SEQ ID NO: 967599 - RNA, 19 nt, Artificial Sequence
  Description of Artificial Sequence: Synthetic oligonucleotide
ggcccauacgcccgcaccc

SEQ ID NO: 967600 - RNA, 19 nt, Artificial Sequence
  Description of Artificial Sequence: Synthetic oligonucleotide
cuuuccgucuaaacgucgu

SEQ ID NO: 967601 - RNA, 19 nt, Artificial Sequence
  Description of Artificial Sequence: Synthetic oligonucleotide
ccagucugugaacuagcag

SEQ ID NO: 967602 - RNA, 19 nt, Artificial Sequence
  Description of Artificial Sequence: Synthetic oligonucleotide
caccggggaaacgaaaaga

SEQ ID NO: 967603 - RNA, 19 nt, Artificial Sequence
  Description of Artificial Sequence: Synthetic oligonucleotide
ggaacacuagaaauaucaa

SEQ ID NO: 967604 - RNA, 19 nt, Artificial Sequence
  Description of Artificial Sequence: Synthetic oligonucleotide
gagggaccacacaauguaa

SEQ ID NO: 967605 - RNA, 19 nt, Artificial Sequence
  Description of Artificial Sequence: Synthetic oligonucleotide
accaggcagaggaacgaca

SEQ ID NO: 967606 - RNA, 19 nt, Artificial Sequence
  Description of Artificial Sequence: Synthetic oligonucleotide
uaacuacccuggcuuucuu

SEQ ID NO: 967607 - RNA, 19 nt, Artificial Sequence
  Description of Artificial Sequence: Synthetic oligonucleotide
ggguacgacaaucgugauc

SEQ ID NO: 967608 - RNA, 19 nt, Artificial Sequence
  Description of Artificial Sequence: Synthetic oligonucleotide
ggugagcagggguacgaca

SEQ ID NO: 967609 - RNA, 19 nt, Artificial Sequence
  Description of Artificial Sequence: Synthetic oligonucleotide
acgaaaagaguggcaugaa

SEQ ID NO: 967610 - RNA, 19 nt, Artificial Sequence
  Description of Artificial Sequence: Synthetic oligonucleotide
cugucuucgugauggagau

SEQ ID NO: 967611 - RNA, 19 nt, Artificial Sequence
  Description of Artificial Sequence: Synthetic oligonucleotide
cguacgguagcgaggguug

SEQ ID NO: 967612 - RNA, 19 nt, Artificial Sequence
  Description of Artificial Sequence: Synthetic oligonucleotide
agaaugcuacagaccugug

SEQ ID NO: 967613 - RNA, 19 nt, Artificial Sequence
  Description of Artificial Sequence: Synthetic oligonucleotide
ccuccguacgguagcgagg

SEQ ID NO: 967614 - RNA, 19 nt, Artificial Sequence
  Description of Artificial Sequence: Synthetic oligonucleotide
cccuccguacgguagcgag

SEQ ID NO: 967615 - RNA, 19 nt, Artificial Sequence
  Description of Artificial Sequence: Synthetic oligonucleotide
ggucuuuugaaggccuaga

SEQ ID NO: 967616 - RNA, 19 nt, Artificial Sequence
  Description of Artificial Sequence: Synthetic oligonucleotide
gggaccacacaauguaaua

SEQ ID NO: 967617 - RNA, 19 nt, Artificial Sequence
  Description of Artificial Sequence: Synthetic oligonucleotide
ccgaugagucuucagccuc

SEQ ID NO: 967618 - RNA, 19 nt, Artificial Sequence
  Description of Artificial Sequence: Synthetic oligonucleotide
guacgguagcgaggguugc

SEQ ID NO: 967619 - RNA, 19 nt, Artificial Sequence
  Description of Artificial Sequence: Synthetic oligonucleotide
ggaugcacugccucuagau

SEQ ID NO: 967620 - RNA, 19 nt, Artificial Sequence
  Description of Artificial Sequence: Synthetic oligonucleotide
guaggcauaaguagcgcuu

SEQ ID NO: 967621 - RNA, 19 nt, Artificial Sequence
  Description of Artificial Sequence: Synthetic oligonucleotide
gaguuuagucuggcauauc

SEQ ID NO: 967622 - RNA, 19 nt, Artificial Sequence
  Description of Artificial Sequence: Synthetic oligonucleotide
uccgaacauuggagcaauu

SEQ ID NO: 967623 - RNA, 19 nt, Artificial Sequence
  Description of Artificial Sequence: Synthetic oligonucleotide
aggcggaggaacguauuuu

SEQ ID NO: 967624 - RNA, 19 nt, Artificial Sequence
  Description of Artificial Sequence: Synthetic oligonucleotide
gguugcgggcccauacgcc

SEQ ID NO: 967625 - RNA, 19 nt, Artificial Sequence
  Description of Artificial Sequence: Synthetic oligonucleotide
uuacugccuuuggcuagcu

SEQ ID NO: 967626 - RNA, 19 nt, Artificial Sequence
  Description of Artificial Sequence: Synthetic oligonucleotide
cuguguuagcaaagcccaa

SEQ ID NO: 967627 - RNA, 19 nt, Artificial Sequence
  Description of Artificial Sequence: Synthetic oligonucleotide
gaggcggaggaacguauuu

SEQ ID NO: 967628 - RNA, 19 nt, Artificial Sequence
  Description of Artificial Sequence: Synthetic oligonucleotide
acgcaggcagccacggaca

SEQ ID NO: 967629 - RNA, 19 nt, Artificial Sequence
  Description of Artificial Sequence: Synthetic oligonucleotide
ggacucuguguuauaacua

SEQ ID NO: 967630 - RNA, 19 nt, Artificial Sequence
  Description of Artificial Sequence: Synthetic oligonucleotide
ugucuucgugauggagauc

SEQ ID NO: 967631 - RNA, 19 nt, Artificial Sequence
  Description of Artificial Sequence: Synthetic oligonucleotide
cuucgugauggagaucgua

SEQ ID NO: 967632 - RNA, 19 nt, Artificial Sequence
  Description of Artificial Sequence: Synthetic oligonucleotide
gccguccaggcgcaggggc

SEQ ID NO: 967633 - RNA, 19 nt, Artificial Sequence
  Description of Artificial Sequence: Synthetic oligonucleotide
uccguacgguagcgagggu

SEQ ID NO: 967634 - RNA, 19 nt, Artificial Sequence
  Description of Artificial Sequence: Synthetic oligonucleotide
ccauacgcccgcacccacc

SEQ ID NO: 967635 - RNA, 19 nt, Artificial Sequence
  Description of Artificial Sequence: Synthetic oligonucleotide
cccugcgaauaccaaacca

SEQ ID NO: 967636 - RNA, 19 nt, Artificial Sequence
  Description of Artificial Sequence: Synthetic oligonucleotide
augaugccguccaggcgca

SEQ ID NO: 967637 - RNA, 19 nt, Artificial Sequence
  Description of Artificial Sequence: Synthetic oligonucleotide
acccugucacagacuagga

SEQ ID NO: 967638 - RNA, 19 nt, Artificial Sequence
  Description of Artificial Sequence: Synthetic oligonucleotide
guacgacaaucgugaucca

SEQ ID NO: 967639 - RNA, 19 nt, Artificial Sequence
  Description of Artificial Sequence: Synthetic oligonucleotide
ccuucguuuguaguauaca

SEQ ID NO: 967640 - RNA, 19 nt, Artificial Sequence
  Description of Artificial Sequence: Synthetic oligonucleotide
ugaugccguccaggcgcag

SEQ ID NO: 967641 - RNA, 19 nt, Artificial Sequence
  Description of Artificial Sequence: Synthetic oligonucleotide
auacgcccgcacccaccga

SEQ ID NO: 967642 - RNA, 19 nt, Artificial Sequence
  Description of Artificial Sequence: Synthetic oligonucleotide
cguuuguaguauacacuga

SEQ ID NO: 967643 - RNA, 19 nt, Artificial Sequence
  Description of Artificial Sequence: Synthetic oligonucleotide
gcauaucaaugcuuagcuu

SEQ ID NO: 967644 - RNA, 19 nt, Artificial Sequence
  Description of Artificial Sequence: Synthetic oligonucleotide
caaucgugauccagcugau

SEQ ID NO: 967645 - RNA, 19 nt, Artificial Sequence
  Description of Artificial Sequence: Synthetic oligonucleotide
ggccuagaaacaauucaau

SEQ ID NO: 967646 - RNA, 19 nt, Artificial Sequence
  Description of Artificial Sequence: Synthetic oligonucleotide
ggaacaggccucugggguu

SEQ ID NO: 967647 - RNA, 19 nt, Artificial Sequence
  Description of Artificial Sequence: Synthetic oligonucleotide
cauggucacauguguucuu

SEQ ID NO: 967648 - RNA, 19 nt, Artificial Sequence
  Description of Artificial Sequence: Synthetic oligonucleotide
cguaagagauauucccgua

SEQ ID NO: 967649 - RNA, 19 nt, Artificial Sequence
  Description of Artificial Sequence: Synthetic oligonucleotide
cgguagcgaggguugcggg

SEQ ID NO: 967650 - RNA, 19 nt, Artificial Sequence
  Description of Artificial Sequence: Synthetic oligonucleotide
gcaggaccucaaaggugag

SEQ ID NO: 967651 - RNA, 19 nt, Artificial Sequence
  Description of Artificial Sequence: Synthetic oligonucleotide
ccacggacaccggggaaac

SEQ ID NO: 967652 - RNA, 19 nt, Artificial Sequence
  Description of Artificial Sequence: Synthetic oligonucleotide
cccauacgcccgcacccac

SEQ ID NO: 967653 - RNA, 19 nt, Artificial Sequence
  Description of Artificial Sequence: Synthetic oligonucleotide
ccggggaaacgaaaagagu

SEQ ID NO: 967654 - RNA, 19 nt, Artificial Sequence
  Description of Artificial Sequence: Synthetic oligonucleotide
cgacaaucgugauccagcu

SEQ ID NO: 967655 - RNA, 19 nt, Artificial Sequence
  Description of Artificial Sequence: Synthetic oligonucleotide
cgaaggaugcacugccucu

SEQ ID NO: 967656 - RNA, 19 nt, Artificial Sequence
  Description of Artificial Sequence: Synthetic oligonucleotide
cccaccgaggcgcccacga

SEQ ID NO: 967657 - RNA, 19 nt, Artificial Sequence
  Description of Artificial Sequence: Synthetic oligonucleotide
gggcgaagaccgcccagua

SEQ ID NO: 967658 - RNA, 19 nt, Artificial Sequence
  Description of Artificial Sequence: Synthetic oligonucleotide
ggggcgaagaccgcccagu

SEQ ID NO: 967659 - RNA, 19 nt, Artificial Sequence
  Description of Artificial Sequence: Synthetic oligonucleotide
gcccauacgcccgcaccca

SEQ ID NO: 967660 - RNA, 19 nt, Artificial Sequence
  Description of Artificial Sequence: Synthetic oligonucleotide
ccgaacauuggagcaauuu

SEQ ID NO: 967661 - RNA, 19 nt, Artificial Sequence
  Description of Artificial Sequence: Synthetic oligonucleotide
ccuccuucguuuguaguau

SEQ ID NO: 967662 - RNA, 19 nt, Artificial Sequence
  Description of Artificial Sequence: Synthetic oligonucleotide
ggcgaaggaugcacugccu

SEQ ID NO: 967663 - RNA, 19 nt, Artificial Sequence
  Description of Artificial Sequence: Synthetic oligonucleotide
gggguacgacaaucgugau

SEQ ID NO: 967664 - RNA, 19 nt, Artificial Sequence
  Description of Artificial Sequence: Synthetic oligonucleotide
cgaagaccgcccaguagcu

SEQ ID NO: 967665 - RNA, 19 nt, Artificial Sequence
  Description of Artificial Sequence: Synthetic oligonucleotide
ggagaucguaagagauauu

SEQ ID NO: 967666 - RNA, 19 nt, Artificial Sequence
  Description of Artificial Sequence: Synthetic oligonucleotide
ccguacgguagcgaggguu

SEQ ID NO: 967667 - RNA, 19 nt, Artificial Sequence
  Description of Artificial Sequence: Synthetic oligonucleotide
ccgaggcgcccacgaugac

SEQ ID NO: 967668 - RNA, 19 nt, Artificial Sequence
  Description of Artificial Sequence: Synthetic oligonucleotide
gcgaguucucucacacauu

SEQ ID NO: 967669 - RNA, 19 nt, Artificial Sequence
  Description of Artificial Sequence: Synthetic oligonucleotide
ccccagacgcaggcagcca

SEQ ID NO: 967670 - RNA, 19 nt, Artificial Sequence
  Description of Artificial Sequence: Synthetic oligonucleotide
ccccuccguacgguagcga

SEQ ID NO: 967671 - RNA, 19 nt, Artificial Sequence
  Description of Artificial Sequence: Synthetic oligonucleotide
ccaccgaggcgcccacgau

SEQ ID NO: 967672 - RNA, 19 nt, Artificial Sequence
  Description of Artificial Sequence: Synthetic oligonucleotide
gcgaggguugcgggcccau

SEQ ID NO: 967673 - RNA, 19 nt, Artificial Sequence
  Description of Artificial Sequence: Synthetic oligonucleotide
cgaggguugcgggcccaua

SEQ ID NO: 967674 - RNA, 19 nt, Artificial Sequence
  Description of Artificial Sequence: Synthetic oligonucleotide
agauugaacaauuggagac

SEQ ID NO: 967675 - RNA, 19 nt, Artificial Sequence
  Description of Artificial Sequence: Synthetic oligonucleotide
ucauaucagaguaagauac

SEQ ID NO: 967676 - RNA, 19 nt, Artificial Sequence
  Description of Artificial Sequence: Synthetic oligonucleotide
gagacuuggaccgagagcg

SEQ ID NO: 967677 - RNA, 19 nt, Artificial Sequence
  Description of Artificial Sequence: Synthetic oligonucleotide
uccacaauaagucuguacu

SEQ ID NO: 967678 - RNA, 19 nt, Artificial Sequence
  Description of Artificial Sequence: Synthetic oligonucleotide
aauuuaauggaaacagggg

SEQ ID NO: 967679 - RNA, 19 nt, Artificial Sequence
  Description of Artificial Sequence: Synthetic oligonucleotide
auuuaauggaaacaggggu

SEQ ID NO: 967680 - RNA, 19 nt, Artificial Sequence
  Description of Artificial Sequence: Synthetic oligonucleotide
uauacuuugcaagacgggg

SEQ ID NO: 967681 - RNA, 19 nt, Artificial Sequence
  Description of Artificial Sequence: Synthetic oligonucleotide
uguuaaguccagaaauagg

SEQ ID NO: 967682 - RNA, 19 nt, Artificial Sequence
  Description of Artificial Sequence: Synthetic oligonucleotide
agcacgaugaaauuuuguc

SEQ ID NO: 967683 - RNA, 19 nt, Artificial Sequence
  Description of Artificial Sequence: Synthetic oligonucleotide
agaauauggagcucuacag

SEQ ID NO: 967684 - RNA, 19 nt, Artificial Sequence
  Description of Artificial Sequence: Synthetic oligonucleotide
caauguacagcagugaggg

SEQ ID NO: 967685 - RNA, 19 nt, Artificial Sequence
  Description of Artificial Sequence: Synthetic oligonucleotide
aauauggagcucuacaguu

SEQ ID NO: 967686 - RNA, 19 nt, Artificial Sequence
  Description of Artificial Sequence: Synthetic oligonucleotide
uuuaauggaaacagggguc

SEQ ID NO: 967687 - RNA, 19 nt, Artificial Sequence
  Description of Artificial Sequence: Synthetic oligonucleotide
cuuccuaugggcuaugcag

SEQ ID NO: 967688 - RNA, 19 nt, Artificial Sequence
  Description of Artificial Sequence: Synthetic oligonucleotide
accaacauguacaaaagac

SEQ ID NO: 967689 - RNA, 19 nt, Artificial Sequence
  Description of Artificial Sequence: Synthetic oligonucleotide
aaaacggcugaacucacca

SEQ ID NO: 967690 - RNA, 19 nt, Artificial Sequence
  Description of Artificial Sequence: Synthetic oligonucleotide
accggcgccgucuagaacc

SEQ ID NO: 967691 - RNA, 19 nt, Artificial Sequence
  Description of Artificial Sequence: Synthetic oligonucleotide
uccuuugagacugagcggg

SEQ ID NO: 967692 - RNA, 19 nt, Artificial Sequence
  Description of Artificial Sequence: Synthetic oligonucleotide
uuggagacacaccauuagg

SEQ ID NO: 967693 - RNA, 19 nt, Artificial Sequence
  Description of Artificial Sequence: Synthetic oligonucleotide
uacugugaguaaaggaagg

SEQ ID NO: 967694 - RNA, 19 nt, Artificial Sequence
  Description of Artificial Sequence: Synthetic oligonucleotide
uacaaaagacuucucggca

SEQ ID NO: 967695 - RNA, 19 nt, Artificial Sequence
  Description of Artificial Sequence: Synthetic oligonucleotide
ucgauuccagggcaaaacg

SEQ ID NO: 967696 - RNA, 19 nt, Artificial Sequence
  Description of Artificial Sequence: Synthetic oligonucleotide
acaguuuacuuccuauggg

SEQ ID NO: 967697 - RNA, 19 nt, Artificial Sequence
  Description of Artificial Sequence: Synthetic oligonucleotide
uggcauacaucaaagggca

SEQ ID NO: 967698 - RNA, 19 nt, Artificial Sequence
  Description of Artificial Sequence: Synthetic oligonucleotide
caauaccagaauauggagc

SEQ ID NO: 967699 - RNA, 19 nt, Artificial Sequence
  Description of Artificial Sequence: Synthetic oligonucleotide
acuauacuuugcaagacgg

SEQ ID NO: 967700 - RNA, 19 nt, Artificial Sequence
  Description of Artificial Sequence: Synthetic oligonucleotide
uggagcgcgacucugcggg

SEQ ID NO: 967701 - RNA, 19 nt, Artificial Sequence
  Description of Artificial Sequence: Synthetic oligonucleotide
gaugaaauuuugucaagca

SEQ ID NO: 967702 - RNA, 19 nt, Artificial Sequence
  Description of Artificial Sequence: Synthetic oligonucleotide
acgcauguaauccuuuagg

SEQ ID NO: 967703 - RNA, 19 nt, Artificial Sequence
  Description of Artificial Sequence: Synthetic oligonucleotide
aacguuguuaaguccagaa

SEQ ID NO: 967704 - RNA, 19 nt, Artificial Sequence
  Description of Artificial Sequence: Synthetic oligonucleotide
guacaaaagacuucucggc

SEQ ID NO: 967705 - RNA, 19 nt, Artificial Sequence
  Description of Artificial Sequence: Synthetic oligonucleotide
uggaauaagaccggcgccg

SEQ ID NO: 967706 - RNA, 19 nt, Artificial Sequence
  Description of Artificial Sequence: Synthetic oligonucleotide
cauacaucaaagggcaucg

SEQ ID NO: 967707 - RNA, 19 nt, Artificial Sequence
  Description of Artificial Sequence: Synthetic oligonucleotide
uucacaacguuguuaaguc

SEQ ID NO: 967708 - RNA, 19 nt, Artificial Sequence
  Description of Artificial Sequence: Synthetic oligonucleotide
uggaucuagaccgggaggg

SEQ ID NO: 967709 - RNA, 19 nt, Artificial Sequence
  Description of Artificial Sequence: Synthetic oligonucleotide
uccagcguggcauagccag

SEQ ID NO: 967710 - RNA, 19 nt, Artificial Sequence
  Description of Artificial Sequence: Synthetic oligonucleotide
auugaacaauuggagacac

SEQ ID NO: 967711 - RNA, 19 nt, Artificial Sequence
  Description of Artificial Sequence: Synthetic oligonucleotide
ccaguuaggaccuugagug

SEQ ID NO: 967712 - RNA, 19 nt, Artificial Sequence
  Description of Artificial Sequence: Synthetic oligonucleotide
uacguggcauacaucaaag

SEQ ID NO: 967713 - RNA, 19 nt, Artificial Sequence
  Description of Artificial Sequence: Synthetic oligonucleotide
ucuagaaccuggcuugucu

SEQ ID NO: 967714 - RNA, 19 nt, Artificial Sequence
  Description of Artificial Sequence: Synthetic oligonucleotide
ucaagcacgaugaaauuuu

SEQ ID NO: 967715 - RNA, 19 nt, Artificial Sequence
  Description of Artificial Sequence: Synthetic oligonucleotide
uguccuacugugaguaaag

SEQ ID NO: 967716 - RNA, 19 nt, Artificial Sequence
  Description of Artificial Sequence: Synthetic oligonucleotide
uuuugaagcugacuuugac

SEQ ID NO: 967717 - RNA, 19 nt, Artificial Sequence
  Description of Artificial Sequence: Synthetic oligonucleotide
uuaggggaguucaauguac

SEQ ID NO: 967718 - RNA, 19 nt, Artificial Sequence
  Description of Artificial Sequence: Synthetic oligonucleotide
uuuacucuugcuucggguc

SEQ ID NO: 967719 - RNA, 19 nt, Artificial Sequence
  Description of Artificial Sequence: Synthetic oligonucleotide
cuaccuaugccaucauucc

SEQ ID NO: 967720 - RNA, 19 nt, Artificial Sequence
  Description of Artificial Sequence: Synthetic oligonucleotide
cacuauacuuugcaagacg

SEQ ID NO: 967721 - RNA, 19 nt, Artificial Sequence
  Description of Artificial Sequence: Synthetic oligonucleotide
uucauaucagaguaagaua

SEQ ID NO: 967722 - RNA, 19 nt, Artificial Sequence
  Description of Artificial Sequence: Synthetic oligonucleotide
aauaagaccggcgccgucu

SEQ ID NO: 967723 - RNA, 19 nt, Artificial Sequence
  Description of Artificial Sequence: Synthetic oligonucleotide
ucuacaguuuacuuccuau

SEQ ID NO: 967724 - RNA, 19 nt, Artificial Sequence
  Description of Artificial Sequence: Synthetic oligonucleotide
cuauacuuugcaagacggg

SEQ ID NO: 967725 - RNA, 19 nt, Artificial Sequence
  Description of Artificial Sequence: Synthetic oligonucleotide
ggucacuauacuuugcaag

SEQ ID NO: 967726 - RNA, 19 nt, Artificial Sequence
  Description of Artificial Sequence: Synthetic oligonucleotide
uuugagacugagcgggaug

SEQ ID NO: 967727 - RNA, 19 nt, Artificial Sequence
  Description of Artificial Sequence: Synthetic oligonucleotide
ucccuugugagcaucugca

SEQ ID NO: 967728 - RNA, 19 nt, Artificial Sequence
  Description of Artificial Sequence: Synthetic oligonucleotide
uccuggaauaagaccggcg

SEQ ID NO: 967729 - RNA, 19 nt, Artificial Sequence
  Description of Artificial Sequence: Synthetic oligonucleotide
cacuacguggcauacauca

SEQ ID NO: 967730 - RNA, 19 nt, Artificial Sequence
  Description of Artificial Sequence: Synthetic oligonucleotide
gacuugacaaauucuccac

SEQ ID NO: 967731 - RNA, 19 nt, Artificial Sequence
  Description of Artificial Sequence: Synthetic oligonucleotide
guggcauacaucaaagggc

SEQ ID NO: 967732 - RNA, 19 nt, Artificial Sequence
  Description of Artificial Sequence: Synthetic oligonucleotide
accgacuugacaaauucuc

SEQ ID NO: 967733 - RNA, 19 nt, Artificial Sequence
  Description of Artificial Sequence: Synthetic oligonucleotide
aucgauuccagggcaaaac

SEQ ID NO: 967734 - RNA, 19 nt, Artificial Sequence
  Description of Artificial Sequence: Synthetic oligonucleotide
uccuacugugaguaaagga

SEQ ID NO: 967735 - RNA, 19 nt, Artificial Sequence
  Description of Artificial Sequence: Synthetic oligonucleotide
uggagacuuggaccgagag

SEQ ID NO: 967736 - RNA, 19 nt, Artificial Sequence
  Description of Artificial Sequence: Synthetic oligonucleotide
acuagguuuggauuuggaa

SEQ ID NO: 967737 - RNA, 19 nt, Artificial Sequence
  Description of Artificial Sequence: Synthetic oligonucleotide
uacaucaaagggcaucgau

SEQ ID NO: 967738 - RNA, 19 nt, Artificial Sequence
  Description of Artificial Sequence: Synthetic oligonucleotide
ucugccguugacuucaguu

SEQ ID NO: 967739 - RNA, 19 nt, Artificial Sequence
  Description of Artificial Sequence: Synthetic oligonucleotide
uacuuugcaagacggggaa

SEQ ID NO: 967740 - RNA, 19 nt, Artificial Sequence
  Description of Artificial Sequence: Synthetic oligonucleotide
agaguaagauacaaauuca

SEQ ID NO: 967741 - RNA, 19 nt, Artificial Sequence
  Description of Artificial Sequence: Synthetic oligonucleotide
uacggcuaccaacauguac

SEQ ID NO: 967742 - RNA, 19 nt, Artificial Sequence
  Description of Artificial Sequence: Synthetic oligonucleotide
ucgggaucgacucuuugaa

SEQ ID NO: 967743 - RNA, 19 nt, Artificial Sequence
  Description of Artificial Sequence: Synthetic oligonucleotide
cacgaugaaauuuugucaa

SEQ ID NO: 967744 - RNA, 19 nt, Artificial Sequence
  Description of Artificial Sequence: Synthetic oligonucleotide
gacuuugaccuggagcgcg

SEQ ID NO: 967745 - RNA, 19 nt, Artificial Sequence
  Description of Artificial Sequence: Synthetic oligonucleotide
gggaucgacucuuugaaug

SEQ ID NO: 967746 - RNA, 19 nt, Artificial Sequence
  Description of Artificial Sequence: Synthetic oligonucleotide
gagccaaggcguuuggaug

SEQ ID NO: 967747 - RNA, 19 nt, Artificial Sequence
  Description of Artificial Sequence: Synthetic oligonucleotide
ggaucgacucuuugaaugg

SEQ ID NO: 967748 - RNA, 19 nt, Artificial Sequence
  Description of Artificial Sequence: Synthetic oligonucleotide
agcgcugucguuguucugg

SEQ ID NO: 967749 - RNA, 19 nt, Artificial Sequence
  Description of Artificial Sequence: Synthetic oligonucleotide
aaacaggggucacuauacu

SEQ ID NO: 967750 - RNA, 19 nt, Artificial Sequence
  Description of Artificial Sequence: Synthetic oligonucleotide
acggcuaccaacauguaca

SEQ ID NO: 967751 - RNA, 19 nt, Artificial Sequence
  Description of Artificial Sequence: Synthetic oligonucleotide
uccgacuuuuacugucacg

SEQ ID NO: 967752 - RNA, 19 nt, Artificial Sequence
  Description of Artificial Sequence: Synthetic oligonucleotide
aguuacuucuccugccuga

SEQ ID NO: 967753 - RNA, 19 nt, Artificial Sequence
  Description of Artificial Sequence: Synthetic oligonucleotide
cuaugcagguaucaauuuc

SEQ ID NO: 967754 - RNA, 19 nt, Artificial Sequence
  Description of Artificial Sequence: Synthetic oligonucleotide
uaccuaugccaucauucca

SEQ ID NO: 967755 - RNA, 19 nt, Artificial Sequence
  Description of Artificial Sequence: Synthetic oligonucleotide
ugaacucaccacaccuacc

SEQ ID NO: 967756 - RNA, 19 nt, Artificial Sequence
  Description of Artificial Sequence: Synthetic oligonucleotide
aauggaaacaggggucacu

SEQ ID NO: 967757 - RNA, 19 nt, Artificial Sequence
  Description of Artificial Sequence: Synthetic oligonucleotide
ucuuugcugggacuccggc

SEQ ID NO: 967758 - RNA, 19 nt, Artificial Sequence
  Description of Artificial Sequence: Synthetic oligonucleotide
guucccgcuccuuugagac

SEQ ID NO: 967759 - RNA, 19 nt, Artificial Sequence
  Description of Artificial Sequence: Synthetic oligonucleotide
ccgacuuuuacugucacgg

SEQ ID NO: 967760 - RNA, 19 nt, Artificial Sequence
  Description of Artificial Sequence: Synthetic oligonucleotide
accuaugccaucauuccag

SEQ ID NO: 967761 - RNA, 19 nt, Artificial Sequence
  Description of Artificial Sequence: Synthetic oligonucleotide
cagaauauggagcucuaca

SEQ ID NO: 967762 - RNA, 19 nt, Artificial Sequence
  Description of Artificial Sequence: Synthetic oligonucleotide
cuggaauaagaccggcgcc

SEQ ID NO: 967763 - RNA, 19 nt, Artificial Sequence
  Description of Artificial Sequence: Synthetic oligonucleotide
ugcggcuccuggaauaaga

SEQ ID NO: 967764 - RNA, 19 nt, Artificial Sequence
  Description of Artificial Sequence: Synthetic oligonucleotide
caucauuccagcccgagaa

SEQ ID NO: 967765 - RNA, 19 nt, Artificial Sequence
  Description of Artificial Sequence: Synthetic oligonucleotide
acguggcauacaucaaagg

SEQ ID NO: 967766 - RNA, 19 nt, Artificial Sequence
  Description of Artificial Sequence: Synthetic oligonucleotide
caauuucucuugacugugc

SEQ ID NO: 967767 - RNA, 19 nt, Artificial Sequence
  Description of Artificial Sequence: Synthetic oligonucleotide
ggucuuuacucuugcuucg

SEQ ID NO: 967768 - RNA, 19 nt, Artificial Sequence
  Description of Artificial Sequence: Synthetic oligonucleotide
auuaggggaguucaaugua

SEQ ID NO: 967769 - RNA, 19 nt, Artificial Sequence
  Description of Artificial Sequence: Synthetic oligonucleotide
ugcagguaucaauuucucu

SEQ ID NO: 967770 - RNA, 19 nt, Artificial Sequence
  Description of Artificial Sequence: Synthetic oligonucleotide
uauucacaacguuguuaag

SEQ ID NO: 967771 - RNA, 19 nt, Artificial Sequence
  Description of Artificial Sequence: Synthetic oligonucleotide
ugccgagcucccuuuagcc

SEQ ID NO: 967772 - RNA, 19 nt, Artificial Sequence
  Description of Artificial Sequence: Synthetic oligonucleotide
agccaaggcguuuggaugu

SEQ ID NO: 967773 - RNA, 19 nt, Artificial Sequence
  Description of Artificial Sequence: Synthetic oligonucleotide
gaccuugagugacugcggc

SEQ ID NO: 967774 - RNA, 19 nt, Artificial Sequence
  Description of Artificial Sequence: Synthetic oligonucleotide
aggcguuuggauguccuac

SEQ ID NO: 967775 - RNA, 19 nt, Artificial Sequence
  Description of Artificial Sequence: Synthetic oligonucleotide
gaucuagaccgggagggag

SEQ ID NO: 967776 - RNA, 19 nt, Artificial Sequence
  Description of Artificial Sequence: Synthetic oligonucleotide
ucuugugcuacggcuacca

SEQ ID NO: 967777 - RNA, 19 nt, Artificial Sequence
  Description of Artificial Sequence: Synthetic oligonucleotide
gaauauggagcucuacagu

SEQ ID NO: 967778 - RNA, 19 nt, Artificial Sequence
  Description of Artificial Sequence: Synthetic oligonucleotide
cuggaucuagaccgggagg

SEQ ID NO: 967779 - RNA, 19 nt, Artificial Sequence
  Description of Artificial Sequence: Synthetic oligonucleotide
gaagacuugcacuuucacu

SEQ ID NO: 967780 - RNA, 19 nt, Artificial Sequence
  Description of Artificial Sequence: Synthetic oligonucleotide
uucaagcacgaugaaauuu

SEQ ID NO: 967781 - RNA, 19 nt, Artificial Sequence
  Description of Artificial Sequence: Synthetic oligonucleotide
gacuuggaccgagagcgcg

SEQ ID NO: 967782 - RNA, 19 nt, Artificial Sequence
  Description of Artificial Sequence: Synthetic oligonucleotide
gaguaagauacaaauucaa

SEQ ID NO: 967783 - RNA, 19 nt, Artificial Sequence
  Description of Artificial Sequence: Synthetic oligonucleotide
ugcuacggcuaccaacaug

SEQ ID NO: 967784 - RNA, 19 nt, Artificial Sequence
  Description of Artificial Sequence: Synthetic oligonucleotide
ccuaccuaugccaucauuc

SEQ ID NO: 967785 - RNA, 19 nt, Artificial Sequence
  Description of Artificial Sequence: Synthetic oligonucleotide
agaccugccuucccucugg

SEQ ID NO: 967786 - RNA, 19 nt, Artificial Sequence
  Description of Artificial Sequence: Synthetic oligonucleotide
caguuaggaccuugagugg

SEQ ID NO: 967787 - RNA, 19 nt, Artificial Sequence
  Description of Artificial Sequence: Synthetic oligonucleotide
uaugcuugcggcugcgcuc

SEQ ID NO: 967788 - RNA, 19 nt, Artificial Sequence
  Description of Artificial Sequence: Synthetic oligonucleotide
ucggugucguccuucuucu

SEQ ID NO: 967789 - RNA, 19 nt, Artificial Sequence
  Description of Artificial Sequence: Synthetic oligonucleotide
aguuuacuuccuaugggcu

SEQ ID NO: 967790 - RNA, 19 nt, Artificial Sequence
  Description of Artificial Sequence: Synthetic oligonucleotide
uggcauagccaguuaggac

SEQ ID NO: 967791 - RNA, 19 nt, Artificial Sequence
  Description of Artificial Sequence: Synthetic oligonucleotide
agagcgagaccuugaguga

SEQ ID NO: 967792 - RNA, 19 nt, Artificial Sequence
  Description of Artificial Sequence: Synthetic oligonucleotide
aguccagaaauaggaaaca

SEQ ID NO: 967793 - RNA, 19 nt, Artificial Sequence
  Description of Artificial Sequence: Synthetic oligonucleotide
auucaaucacuccuucauu

SEQ ID NO: 967794 - RNA, 19 nt, Artificial Sequence
  Description of Artificial Sequence: Synthetic oligonucleotide
ugcuccgacuuuuacuguc

SEQ ID NO: 967795 - RNA, 19 nt, Artificial Sequence
  Description of Artificial Sequence: Synthetic oligonucleotide
uugaccuggagcgcgacuc

SEQ ID NO: 967796 - RNA, 19 nt, Artificial Sequence
  Description of Artificial Sequence: Synthetic oligonucleotide
ucugcggggagacuagguu

SEQ ID NO: 967797 - RNA, 19 nt, Artificial Sequence
  Description of Artificial Sequence: Synthetic oligonucleotide
acguuguuaaguccagaaa

SEQ ID NO: 967798 - RNA, 19 nt, Artificial Sequence
  Description of Artificial Sequence: Synthetic oligonucleotide
ucuuacugcgggaguggga

SEQ ID NO: 967799 - RNA, 19 nt, Artificial Sequence
  Description of Artificial Sequence: Synthetic oligonucleotide
gaucgacucuuugaauggc

SEQ ID NO: 967800 - RNA, 19 nt, Artificial Sequence
  Description of Artificial Sequence: Synthetic oligonucleotide
acuuccuaugggcuaugca

SEQ ID NO: 967801 - RNA, 19 nt, Artificial Sequence
  Description of Artificial Sequence: Synthetic oligonucleotide
auacuuugcaagacgggga

SEQ ID NO: 967802 - RNA, 19 nt, Artificial Sequence
  Description of Artificial Sequence: Synthetic oligonucleotide
uagccaguuaggaccuuga

SEQ ID NO: 967803 - RNA, 19 nt, Artificial Sequence
  Description of Artificial Sequence: Synthetic oligonucleotide
cuugcacuuucacuacgug

SEQ ID NO: 967804 - RNA, 19 nt, Artificial Sequence
  Description of Artificial Sequence: Synthetic oligonucleotide
uaccgaggaagcacugaga

SEQ ID NO: 967805 - RNA, 19 nt, Artificial Sequence
  Description of Artificial Sequence: Synthetic oligonucleotide
gaagcggaccuggauggag

SEQ ID NO: 967806 - RNA, 19 nt, Artificial Sequence
  Description of Artificial Sequence: Synthetic oligonucleotide
gagacuagguuuggauuug

SEQ ID NO: 967807 - RNA, 19 nt, Artificial Sequence
  Description of Artificial Sequence: Synthetic oligonucleotide
gucuugucggcgcugcggc

SEQ ID NO: 967808 - RNA, 19 nt, Artificial Sequence
  Description of Artificial Sequence: Synthetic oligonucleotide
ucucuugacugugcuauuc

SEQ ID NO: 967809 - RNA, 19 nt, Artificial Sequence
  Description of Artificial Sequence: Synthetic oligonucleotide
cuugagugacugcggcucc

SEQ ID NO: 967810 - RNA, 19 nt, Artificial Sequence
  Description of Artificial Sequence: Synthetic oligonucleotide
cauuaggggaguucaaugu

SEQ ID NO: 967811 - RNA, 19 nt, Artificial Sequence
  Description of Artificial Sequence: Synthetic oligonucleotide
aagcacgaugaaauuuugu

SEQ ID NO: 967812 - RNA, 19 nt, Artificial Sequence
  Description of Artificial Sequence: Synthetic oligonucleotide
augcuugcggcugcgcucg

SEQ ID NO: 967813 - RNA, 19 nt, Artificial Sequence
  Description of Artificial Sequence: Synthetic oligonucleotide
cugccugacgcauguaauc

SEQ ID NO: 967814 - RNA, 19 nt, Artificial Sequence
  Description of Artificial Sequence: Synthetic oligonucleotide
cuucgggucuugucggcgc

SEQ ID NO: 967815 - RNA, 19 nt, Artificial Sequence
  Description of Artificial Sequence: Synthetic oligonucleotide
gucccuugugagcaucugc

SEQ ID NO: 967816 - RNA, 19 nt, Artificial Sequence
  Description of Artificial Sequence: Synthetic oligonucleotide
ucuagaccgggagggagac

SEQ ID NO: 967817 - RNA, 19 nt, Artificial Sequence
  Description of Artificial Sequence: Synthetic oligonucleotide
agacuagguuuggauuugg

SEQ ID NO: 967818 - RNA, 19 nt, Artificial Sequence
  Description of Artificial Sequence: Synthetic oligonucleotide
aagaccggcgccgucuaga

SEQ ID NO: 967819 - RNA, 19 nt, Artificial Sequence
  Description of Artificial Sequence: Synthetic oligonucleotide
augcagguaucaauuucuc

SEQ ID NO: 967820 - RNA, 19 nt, Artificial Sequence
  Description of Artificial Sequence: Synthetic oligonucleotide
ugcugcuaugcuugcggcu

SEQ ID NO: 967821 - RNA, 19 nt, Artificial Sequence
  Description of Artificial Sequence: Synthetic oligonucleotide
gaaccggaccuggaucggg

SEQ ID NO: 967822 - RNA, 19 nt, Artificial Sequence
  Description of Artificial Sequence: Synthetic oligonucleotide
cuacguggcauacaucaaa

SEQ ID NO: 967823 - RNA, 19 nt, Artificial Sequence
  Description of Artificial Sequence: Synthetic oligonucleotide
gaggcgguaccgaggaagc

SEQ ID NO: 967824 - RNA, 19 nt, Artificial Sequence
  Description of Artificial Sequence: Synthetic oligonucleotide
cuuugcaagacggggaaaa

SEQ ID NO: 967825 - RNA, 19 nt, Artificial Sequence
  Description of Artificial Sequence: Synthetic oligonucleotide
ccgacuugacaaauucucc

SEQ ID NO: 967826 - RNA, 19 nt, Artificial Sequence
  Description of Artificial Sequence: Synthetic oligonucleotide
uaugggcuaugcagguauc

SEQ ID NO: 967827 - RNA, 19 nt, Artificial Sequence
  Description of Artificial Sequence: Synthetic oligonucleotide
agcucccuuuagccguggc

SEQ ID NO: 967828 - RNA, 19 nt, Artificial Sequence
  Description of Artificial Sequence: Synthetic oligonucleotide
acuugcacuuucacuacgu

SEQ ID NO: 967829 - RNA, 19 nt, Artificial Sequence
  Description of Artificial Sequence: Synthetic oligonucleotide
cugaagacuugcacuuuca

SEQ ID NO: 967830 - RNA, 19 nt, Artificial Sequence
  Description of Artificial Sequence: Synthetic oligonucleotide
aacucaccacaccuaccua

SEQ ID NO: 967831 - RNA, 19 nt, Artificial Sequence
  Description of Artificial Sequence: Synthetic oligonucleotide
cuucgacuucugcucuucc

SEQ ID NO: 967832 - RNA, 19 nt, Artificial Sequence
  Description of Artificial Sequence: Synthetic oligonucleotide
ggaggcgguaccgaggaag

SEQ ID NO: 967833 - RNA, 19 nt, Artificial Sequence
  Description of Artificial Sequence: Synthetic oligonucleotide
gaccgggagggagaccugg

SEQ ID NO: 967834 - RNA, 19 nt, Artificial Sequence
  Description of Artificial Sequence: Synthetic oligonucleotide
ccgucuagaaccuggcuug

SEQ ID NO: 967835 - RNA, 19 nt, Artificial Sequence
  Description of Artificial Sequence: Synthetic oligonucleotide
ugacuuugaccuggagcgc

SEQ ID NO: 967836 - RNA, 19 nt, Artificial Sequence
  Description of Artificial Sequence: Synthetic oligonucleotide
ugcuauucacaacguuguu

SEQ ID NO: 967837 - RNA, 19 nt, Artificial Sequence
  Description of Artificial Sequence: Synthetic oligonucleotide
aggggucacuauacuuugc

SEQ ID NO: 967838 - RNA, 19 nt, Artificial Sequence
  Description of Artificial Sequence: Synthetic oligonucleotide
guggcauagccaguuagga

SEQ ID NO: 967839 - RNA, 19 nt, Artificial Sequence
  Description of Artificial Sequence: Synthetic oligonucleotide
uggcgaccgggaguggucg

SEQ ID NO: 967840 - RNA, 19 nt, Artificial Sequence
  Description of Artificial Sequence: Synthetic oligonucleotide
gagcgagaccuugagugac

SEQ ID NO: 967841 - RNA, 19 nt, Artificial Sequence
  Description of Artificial Sequence: Synthetic oligonucleotide
aagcggaccuggauggaga

SEQ ID NO: 967842 - RNA, 19 nt, Artificial Sequence
  Description of Artificial Sequence: Synthetic oligonucleotide
auguccuacugugaguaaa

SEQ ID NO: 967843 - RNA, 19 nt, Artificial Sequence
  Description of Artificial Sequence: Synthetic oligonucleotide
uaagaccggcgccgucuag

SEQ ID NO: 967844 - RNA, 19 nt, Artificial Sequence
  Description of Artificial Sequence: Synthetic oligonucleotide
ugcgacuccugcucacgcu

SEQ ID NO: 967845 - RNA, 19 nt, Artificial Sequence
  Description of Artificial Sequence: Synthetic oligonucleotide
ucgucccuugugagcaucu

SEQ ID NO: 967846 - RNA, 19 nt, Artificial Sequence
  Description of Artificial Sequence: Synthetic oligonucleotide
gugccgagcucccuuuagc

SEQ ID NO: 967847 - RNA, 19 nt, Artificial Sequence
  Description of Artificial Sequence: Synthetic oligonucleotide
ggggucacuauacuuugca

SEQ ID NO: 967848 - RNA, 19 nt, Artificial Sequence
  Description of Artificial Sequence: Synthetic oligonucleotide
accuggagcgcgacucugc

SEQ ID NO: 967849 - RNA, 19 nt, Artificial Sequence
  Description of Artificial Sequence: Synthetic oligonucleotide
ccacaauaagucuguacuc

SEQ ID NO: 967850 - RNA, 19 nt, Artificial Sequence
  Description of Artificial Sequence: Synthetic oligonucleotide
aucgacucuuugaauggcu

SEQ ID NO: 967851 - RNA, 19 nt, Artificial Sequence
  Description of Artificial Sequence: Synthetic oligonucleotide
ugcuucgggucuugucggc

SEQ ID NO: 967852 - RNA, 19 nt, Artificial Sequence
  Description of Artificial Sequence: Synthetic oligonucleotide
ccuggaucgggaucgacuc

SEQ ID NO: 967853 - RNA, 19 nt, Artificial Sequence
  Description of Artificial Sequence: Synthetic oligonucleotide
cuuuacucuugcuucgggu

SEQ ID NO: 967854 - RNA, 19 nt, Artificial Sequence
  Description of Artificial Sequence: Synthetic oligonucleotide
uucgggucuugucggcgcu

SEQ ID NO: 967855 - RNA, 19 nt, Artificial Sequence
  Description of Artificial Sequence: Synthetic oligonucleotide
ugucacgcuugcugcuaug

SEQ ID NO: 967856 - RNA, 19 nt, Artificial Sequence
  Description of Artificial Sequence: Synthetic oligonucleotide
uacuuccuaugggcuaugc

SEQ ID NO: 967857 - RNA, 19 nt, Artificial Sequence
  Description of Artificial Sequence: Synthetic oligonucleotide
gcuacggcuaccaacaugu

SEQ ID NO: 967858 - RNA, 19 nt, Artificial Sequence
  Description of Artificial Sequence: Synthetic oligonucleotide
gacucugcggggagacuag

SEQ ID NO: 967859 - RNA, 19 nt, Artificial Sequence
  Description of Artificial Sequence: Synthetic oligonucleotide
agacuuggaccgagagcgc

SEQ ID NO: 967860 - RNA, 19 nt, Artificial Sequence
  Description of Artificial Sequence: Synthetic oligonucleotide
cuucgagagcgagaccuug

SEQ ID NO: 967861 - RNA, 19 nt, Artificial Sequence
  Description of Artificial Sequence: Synthetic oligonucleotide
gaauaagaccggcgccguc

SEQ ID NO: 967862 - RNA, 19 nt, Artificial Sequence
  Description of Artificial Sequence: Synthetic oligonucleotide
cuggagcgcgacucugcgg

SEQ ID NO: 967863 - RNA, 19 nt, Artificial Sequence
  Description of Artificial Sequence: Synthetic oligonucleotide
gccgagcucccuuuagccg

SEQ ID NO: 967864 - RNA, 19 nt, Artificial Sequence
  Description of Artificial Sequence: Synthetic oligonucleotide
acaauuggagacacaccau

SEQ ID NO: 967865 - RNA, 19 nt, Artificial Sequence
  Description of Artificial Sequence: Synthetic oligonucleotide
auggagcucuacaguuuac

SEQ ID NO: 967866 - RNA, 19 nt, Artificial Sequence
  Description of Artificial Sequence: Synthetic oligonucleotide
gggcaaaacggcugaacuc

SEQ ID NO: 967867 - RNA, 19 nt, Artificial Sequence
  Description of Artificial Sequence: Synthetic oligonucleotide
gugcuauucacaacguugu

SEQ ID NO: 967868 - RNA, 19 nt, Artificial Sequence
  Description of Artificial Sequence: Synthetic oligonucleotide
uugccagcgcugucguugu

SEQ ID NO: 967869 - RNA, 19 nt, Artificial Sequence
  Description of Artificial Sequence: Synthetic oligonucleotide
gcucuuuucauaucagagu

SEQ ID NO: 967870 - RNA, 19 nt, Artificial Sequence
  Description of Artificial Sequence: Synthetic oligonucleotide
agcgcgacucugcggggag

SEQ ID NO: 967871 - RNA, 19 nt, Artificial Sequence
  Description of Artificial Sequence: Synthetic oligonucleotide
cguggcauagccaguuagg

SEQ ID NO: 967872 - RNA, 19 nt, Artificial Sequence
  Description of Artificial Sequence: Synthetic oligonucleotide
cacaccuaccuaugccauc

SEQ ID NO: 967873 - RNA, 19 nt, Artificial Sequence
  Description of Artificial Sequence: Synthetic oligonucleotide
ggucuugucggcgcugcgg

SEQ ID NO: 967874 - RNA, 19 nt, Artificial Sequence
  Description of Artificial Sequence: Synthetic oligonucleotide
cuaugggcuaugcagguau

SEQ ID NO: 967875 - RNA, 19 nt, Artificial Sequence
  Description of Artificial Sequence: Synthetic oligonucleotide
caggaggcgguaccgagga

SEQ ID NO: 967876 - RNA, 19 nt, Artificial Sequence
  Description of Artificial Sequence: Synthetic oligonucleotide
aucuagaccgggagggaga

SEQ ID NO: 967877 - RNA, 19 nt, Artificial Sequence
  Description of Artificial Sequence: Synthetic oligonucleotide
gauguccuacugugaguaa

SEQ ID NO: 967878 - RNA, 19 nt, Artificial Sequence
  Description of Artificial Sequence: Synthetic oligonucleotide
aaccggaccuggaucggga

SEQ ID NO: 967879 - RNA, 19 nt, Artificial Sequence
  Description of Artificial Sequence: Synthetic oligonucleotide
gacuagguuuggauuugga

SEQ ID NO: 967880 - RNA, 19 nt, Artificial Sequence
  Description of Artificial Sequence: Synthetic oligonucleotide
auauggagcucuacaguuu

SEQ ID NO: 967881 - RNA, 19 nt, Artificial Sequence
  Description of Artificial Sequence: Synthetic oligonucleotide
gcguggcauagccaguuag

SEQ ID NO: 967882 - RNA, 19 nt, Artificial Sequence
  Description of Artificial Sequence: Synthetic oligonucleotide
uggaccgagagcgcguuuu

SEQ ID NO: 967883 - RNA, 19 nt, Artificial Sequence
  Description of Artificial Sequence: Synthetic oligonucleotide
auaagaccggcgccgucua

SEQ ID NO: 967884 - RNA, 19 nt, Artificial Sequence
  Description of Artificial Sequence: Synthetic oligonucleotide
cugcgucucuucuccuggc

SEQ ID NO: 967885 - RNA, 19 nt, Artificial Sequence
  Description of Artificial Sequence: Synthetic oligonucleotide
cuuuagccguggccaggcc

SEQ ID NO: 967886 - RNA, 19 nt, Artificial Sequence
  Description of Artificial Sequence: Synthetic oligonucleotide
guuaggaccuugaguggga

SEQ ID NO: 967887 - RNA, 19 nt, Artificial Sequence
  Description of Artificial Sequence: Synthetic oligonucleotide
gcucccuuuagccguggcc

SEQ ID NO: 967888 - RNA, 19 nt, Artificial Sequence
  Description of Artificial Sequence: Synthetic oligonucleotide
ggcgccgucuagaaccugg

SEQ ID NO: 967889 - RNA, 19 nt, Artificial Sequence
  Description of Artificial Sequence: Synthetic oligonucleotide
ggauguccuacugugagua

SEQ ID NO: 967890 - RNA, 19 nt, Artificial Sequence
  Description of Artificial Sequence: Synthetic oligonucleotide
acucugcggggagacuagg

SEQ ID NO: 967891 - RNA, 19 nt, Artificial Sequence
  Description of Artificial Sequence: Synthetic oligonucleotide
ggugccgagcucccuuuag

SEQ ID NO: 967892 - RNA, 19 nt, Artificial Sequence
  Description of Artificial Sequence: Synthetic oligonucleotide
caauuggagacacaccauu

SEQ ID NO: 967893 - RNA, 19 nt, Artificial Sequence
  Description of Artificial Sequence: Synthetic oligonucleotide
accuaccuaugccaucauu

SEQ ID NO: 967894 - RNA, 19 nt, Artificial Sequence
  Description of Artificial Sequence: Synthetic oligonucleotide
ggcucuuacugcgggagug

SEQ ID NO: 967895 - RNA, 19 nt, Artificial Sequence
  Description of Artificial Sequence: Synthetic oligonucleotide
auggcgaccgggagugguc

SEQ ID NO: 967896 - RNA, 19 nt, Artificial Sequence
  Description of Artificial Sequence: Synthetic oligonucleotide
gcuauucacaacguuguua

SEQ ID NO: 967897 - RNA, 19 nt, Artificial Sequence
  Description of Artificial Sequence: Synthetic oligonucleotide
gcuccuggaauaagaccgg

SEQ ID NO: 967898 - RNA, 19 nt, Artificial Sequence
  Description of Artificial Sequence: Synthetic oligonucleotide
auacaucaaagggcaucga

SEQ ID NO: 967899 - RNA, 19 nt, Artificial Sequence
  Description of Artificial Sequence: Synthetic oligonucleotide
agaccggcgccgucuagaa

SEQ ID NO: 967900 - RNA, 19 nt, Artificial Sequence
  Description of Artificial Sequence: Synthetic oligonucleotide
uucccgcuccuuugagacu

SEQ ID NO: 967901 - RNA, 19 nt, Artificial Sequence
  Description of Artificial Sequence: Synthetic oligonucleotide
gacugcggcucuuguuguc

SEQ ID NO: 967902 - RNA, 19 nt, Artificial Sequence
  Description of Artificial Sequence: Synthetic oligonucleotide
ccuugagugacugcggcuc

SEQ ID NO: 967903 - RNA, 19 nt, Artificial Sequence
  Description of Artificial Sequence: Synthetic oligonucleotide
gcucuuacugcgggagugg

SEQ ID NO: 967904 - RNA, 19 nt, Artificial Sequence
  Description of Artificial Sequence: Synthetic oligonucleotide
cagaccugccuucccucug

SEQ ID NO: 967905 - RNA, 19 nt, Artificial Sequence
  Description of Artificial Sequence: Synthetic oligonucleotide
ccuggagcgcgacucugcg

SEQ ID NO: 967906 - RNA, 19 nt, Artificial Sequence
  Description of Artificial Sequence: Synthetic oligonucleotide
ggcgguaccgaggaagcac

SEQ ID NO: 967907 - RNA, 19 nt, Artificial Sequence
  Description of Artificial Sequence: Synthetic oligonucleotide
cuuugcuccgacugcggcu

SEQ ID NO: 967908 - RNA, 19 nt, Artificial Sequence
  Description of Artificial Sequence: Synthetic oligonucleotide
gaccuggagcgcgacucug

SEQ ID NO: 967909 - RNA, 19 nt, Artificial Sequence
  Description of Artificial Sequence: Synthetic oligonucleotide
cgacuugacaaauucucca

SEQ ID NO: 967910 - RNA, 19 nt, Artificial Sequence
  Description of Artificial Sequence: Synthetic oligonucleotide
uuucgucccuugugagcau

SEQ ID NO: 967911 - RNA, 19 nt, Artificial Sequence
  Description of Artificial Sequence: Synthetic oligonucleotide
acuacguggcauacaucaa

SEQ ID NO: 967912 - RNA, 19 nt, Artificial Sequence
  Description of Artificial Sequence: Synthetic oligonucleotide
ccggcucuugagaagguuc

SEQ ID NO: 967913 - RNA, 19 nt, Artificial Sequence
  Description of Artificial Sequence: Synthetic oligonucleotide
cuuugcugggacuccggcu

SEQ ID NO: 967914 - RNA, 19 nt, Artificial Sequence
  Description of Artificial Sequence: Synthetic oligonucleotide
cuuugaccuggagcgcgac

SEQ ID NO: 967915 - RNA, 19 nt, Artificial Sequence
  Description of Artificial Sequence: Synthetic oligonucleotide
acuuugaccuggagcgcga

SEQ ID NO: 967916 - RNA, 19 nt, Artificial Sequence
  Description of Artificial Sequence: Synthetic oligonucleotide
cuaugcuugcggcugcgcu

SEQ ID NO: 967917 - RNA, 19 nt, Artificial Sequence
  Description of Artificial Sequence: Synthetic oligonucleotide
cucuacaguuuacuuccua

SEQ ID NO: 967918 - RNA, 19 nt, Artificial Sequence
  Description of Artificial Sequence: Synthetic oligonucleotide
agacuucucggcaguucca

SEQ ID NO: 967919 - RNA, 19 nt, Artificial Sequence
  Description of Artificial Sequence: Synthetic oligonucleotide
acuuugcaagacggggaaa

SEQ ID NO: 967920 - RNA, 19 nt, Artificial Sequence
  Description of Artificial Sequence: Synthetic oligonucleotide
gaguggucggugucguccu

SEQ ID NO: 967921 - RNA, 19 nt, Artificial Sequence
  Description of Artificial Sequence: Synthetic oligonucleotide
agcgggauggcgaccggga

SEQ ID NO: 967922 - RNA, 19 nt, Artificial Sequence
  Description of Artificial Sequence: Synthetic oligonucleotide
gggucacuauacuuugcaa

SEQ ID NO: 967923 - RNA, 19 nt, Artificial Sequence
  Description of Artificial Sequence: Synthetic oligonucleotide
agcgagaccuugagugacu

SEQ ID NO: 967924 - RNA, 19 nt, Artificial Sequence
  Description of Artificial Sequence: Synthetic oligonucleotide
cuagaaccuggcuugucuu

SEQ ID NO: 967925 - RNA, 19 nt, Artificial Sequence
  Description of Artificial Sequence: Synthetic oligonucleotide
accggaccuggaucgggau

SEQ ID NO: 967926 - RNA, 19 nt, Artificial Sequence
  Description of Artificial Sequence: Synthetic oligonucleotide
cugcggcuuuccucccugc

SEQ ID NO: 967927 - RNA, 19 nt, Artificial Sequence
  Description of Artificial Sequence: Synthetic oligonucleotide
gcgacuccugcucacgcuc

SEQ ID NO: 967928 - RNA, 19 nt, Artificial Sequence
  Description of Artificial Sequence: Synthetic oligonucleotide
ugcggcucuuguugucuuu

SEQ ID NO: 967929 - RNA, 19 nt, Artificial Sequence
  Description of Artificial Sequence: Synthetic oligonucleotide
ggaaccggaccuggaucgg

SEQ ID NO: 967930 - RNA, 19 nt, Artificial Sequence
  Description of Artificial Sequence: Synthetic oligonucleotide
caccgacuugacaaauucu

SEQ ID NO: 967931 - RNA, 19 nt, Artificial Sequence
  Description of Artificial Sequence: Synthetic oligonucleotide
gauggcgaccgggaguggu

SEQ ID NO: 967932 - RNA, 19 nt, Artificial Sequence
  Description of Artificial Sequence: Synthetic oligonucleotide
auggagacuuggaccgaga

SEQ ID NO: 967933 - RNA, 19 nt, Artificial Sequence
  Description of Artificial Sequence: Synthetic oligonucleotide
ccguggccaggccugagag

SEQ ID NO: 967934 - RNA, 19 nt, Artificial Sequence
  Description of Artificial Sequence: Synthetic oligonucleotide
cuagaccgggagggagacc

SEQ ID NO: 967935 - RNA, 19 nt, Artificial Sequence
  Description of Artificial Sequence: Synthetic oligonucleotide
agcguggcauagccaguua

SEQ ID NO: 967936 - RNA, 19 nt, Artificial Sequence
  Description of Artificial Sequence: Synthetic oligonucleotide
ccccuuugcuccgacugcg

SEQ ID NO: 967937 - RNA, 19 nt, Artificial Sequence
  Description of Artificial Sequence: Synthetic oligonucleotide
gaccggcgccgucuagaac

SEQ ID NO: 967938 - RNA, 19 nt, Artificial Sequence
  Description of Artificial Sequence: Synthetic oligonucleotide
ugucguuguucuggagcuu

SEQ ID NO: 967939 - RNA, 19 nt, Artificial Sequence
  Description of Artificial Sequence: Synthetic oligonucleotide
ggagcgcgacucugcgggg

SEQ ID NO: 967940 - RNA, 19 nt, Artificial Sequence
  Description of Artificial Sequence: Synthetic oligonucleotide
gucuagaaccuggcuuguc

SEQ ID NO: 967941 - RNA, 19 nt, Artificial Sequence
  Description of Artificial Sequence: Synthetic oligonucleotide
ggggagacuagguuuggau

SEQ ID NO: 967942 - RNA, 19 nt, Artificial Sequence
  Description of Artificial Sequence: Synthetic oligonucleotide
ggcuaugcagguaucaauu

SEQ ID NO: 967943 - RNA, 19 nt, Artificial Sequence
  Description of Artificial Sequence: Synthetic oligonucleotide
gguuugaggagcugcuuuu

SEQ ID NO: 967944 - RNA, 19 nt, Artificial Sequence
  Description of Artificial Sequence: Synthetic oligonucleotide
ggagcucuacaguuuacuu

SEQ ID NO: 967945 - RNA, 19 nt, Artificial Sequence
  Description of Artificial Sequence: Synthetic oligonucleotide
gcucacgcuccuucgcuuc

SEQ ID NO: 967946 - RNA, 19 nt, Artificial Sequence
  Description of Artificial Sequence: Synthetic oligonucleotide
caccauuaggggaguucaa

SEQ ID NO: 967947 - RNA, 19 nt, Artificial Sequence
  Description of Artificial Sequence: Synthetic oligonucleotide
uuggaccgagagcgcguuu

SEQ ID NO: 967948 - RNA, 19 nt, Artificial Sequence
  Description of Artificial Sequence: Synthetic oligonucleotide
caucgauuccagggcaaaa

SEQ ID NO: 967949 - RNA, 19 nt, Artificial Sequence
  Description of Artificial Sequence: Synthetic oligonucleotide
gcggcucuuguugucuuug

SEQ ID NO: 967950 - RNA, 19 nt, Artificial Sequence
  Description of Artificial Sequence: Synthetic oligonucleotide
ggcguuuggauguccuacu

SEQ ID NO: 967951 - RNA, 19 nt, Artificial Sequence
  Description of Artificial Sequence: Synthetic oligonucleotide
gcgggauggcgaccgggag

SEQ ID NO: 967952 - RNA, 19 nt, Artificial Sequence
  Description of Artificial Sequence: Synthetic oligonucleotide
gagcgcgacucugcgggga

SEQ ID NO: 967953 - RNA, 19 nt, Artificial Sequence
  Description of Artificial Sequence: Synthetic oligonucleotide
cugcggggagacuagguuu

SEQ ID NO: 967954 - RNA, 19 nt, Artificial Sequence
  Description of Artificial Sequence: Synthetic oligonucleotide
gccgucuagaaccuggcuu

SEQ ID NO: 967955 - RNA, 19 nt, Artificial Sequence
  Description of Artificial Sequence: Synthetic oligonucleotide
gcuaugcagguaucaauuu

SEQ ID NO: 967956 - RNA, 19 nt, Artificial Sequence
  Description of Artificial Sequence: Synthetic oligonucleotide
agaagccguccgggugccg

SEQ ID NO: 967957 - RNA, 19 nt, Artificial Sequence
  Description of Artificial Sequence: Synthetic oligonucleotide
aggcgguaccgaggaagca

SEQ ID NO: 967958 - RNA, 19 nt, Artificial Sequence
  Description of Artificial Sequence: Synthetic oligonucleotide
ggccugagagccaaggcgu

SEQ ID NO: 967959 - RNA, 19 nt, Artificial Sequence
  Description of Artificial Sequence: Synthetic oligonucleotide
gcugaacucaccacaccua

SEQ ID NO: 967960 - RNA, 19 nt, Artificial Sequence
  Description of Artificial Sequence: Synthetic oligonucleotide
ggaucuagaccgggaggga

SEQ ID NO: 967961 - RNA, 19 nt, Artificial Sequence
  Description of Artificial Sequence: Synthetic oligonucleotide
cucugcggggagacuaggu

SEQ ID NO: 967962 - RNA, 19 nt, Artificial Sequence
  Description of Artificial Sequence: Synthetic oligonucleotide
ccaucauuccagcccgaga

SEQ ID NO: 967963 - RNA, 19 nt, Artificial Sequence
  Description of Artificial Sequence: Synthetic oligonucleotide
gcuaugcuugcggcugcgc

SEQ ID NO: 967964 - RNA, 19 nt, Artificial Sequence
  Description of Artificial Sequence: Synthetic oligonucleotide
ccaaggcguuuggaugucc

SEQ ID NO: 967965 - RNA, 19 nt, Artificial Sequence
  Description of Artificial Sequence: Synthetic oligonucleotide
ggaauaagaccggcgccgu

SEQ ID NO: 967966 - RNA, 19 nt, Artificial Sequence
  Description of Artificial Sequence: Synthetic oligonucleotide
cuacggcuaccaacaugua

SEQ ID NO: 967967 - RNA, 19 nt, Artificial Sequence
  Description of Artificial Sequence: Synthetic oligonucleotide
gcggggagacuagguuugg

SEQ ID NO: 967968 - RNA, 19 nt, Artificial Sequence
  Description of Artificial Sequence: Synthetic oligonucleotide
cacuuucacuacguggcau

SEQ ID NO: 967969 - RNA, 19 nt, Artificial Sequence
  Description of Artificial Sequence: Synthetic oligonucleotide
gcgggagugggaaccggac

SEQ ID NO: 967970 - RNA, 19 nt, Artificial Sequence
  Description of Artificial Sequence: Synthetic oligonucleotide
agaccgggagggagaccug

SEQ ID NO: 967971 - RNA, 19 nt, Artificial Sequence
  Description of Artificial Sequence: Synthetic oligonucleotide
gcaucgauuccagggcaaa

SEQ ID NO: 967972 - RNA, 19 nt, Artificial Sequence
  Description of Artificial Sequence: Synthetic oligonucleotide
cuggaucgggaucgacucu

SEQ ID NO: 967973 - RNA, 19 nt, Artificial Sequence
  Description of Artificial Sequence: Synthetic oligonucleotide
ggcaucgauuccagggcaa

SEQ ID NO: 967974 - RNA, 19 nt, Artificial Sequence
  Description of Artificial Sequence: Synthetic oligonucleotide
acacaccauuaggggaguu

SEQ ID NO: 967975 - RNA, 19 nt, Artificial Sequence
  Description of Artificial Sequence: Synthetic oligonucleotide
cgggaaugucugcuucgag

SEQ ID NO: 967976 - RNA, 19 nt, Artificial Sequence
  Description of Artificial Sequence: Synthetic oligonucleotide
gcgcugucguuguucugga

SEQ ID NO: 967977 - RNA, 19 nt, Artificial Sequence
  Description of Artificial Sequence: Synthetic oligonucleotide
accuggcgcggggcucugg

SEQ ID NO: 967978 - RNA, 19 nt, Artificial Sequence
  Description of Artificial Sequence: Synthetic oligonucleotide
cugcggcucuuggcuuugc

SEQ ID NO: 967979 - RNA, 19 nt, Artificial Sequence
  Description of Artificial Sequence: Synthetic oligonucleotide
cggcugaacucaccacacc

SEQ ID NO: 967980 - RNA, 19 nt, Artificial Sequence
  Description of Artificial Sequence: Synthetic oligonucleotide
cugucacgcuugcugcuau

SEQ ID NO: 967981 - RNA, 19 nt, Artificial Sequence
  Description of Artificial Sequence: Synthetic oligonucleotide
gcugucacgcuugcugcua

SEQ ID NO: 967982 - RNA, 19 nt, Artificial Sequence
  Description of Artificial Sequence: Synthetic oligonucleotide
gcgguaccgaggaagcacu

SEQ ID NO: 967983 - RNA, 19 nt, Artificial Sequence
  Description of Artificial Sequence: Synthetic oligonucleotide
gggagaccuggaagcggac

SEQ ID NO: 967984 - RNA, 19 nt, Artificial Sequence
  Description of Artificial Sequence: Synthetic oligonucleotide
ggcuaccaacauguacaaa

SEQ ID NO: 967985 - RNA, 19 nt, Artificial Sequence
  Description of Artificial Sequence: Synthetic oligonucleotide
gggccugcacucucgcccu

SEQ ID NO: 967986 - RNA, 19 nt, Artificial Sequence
  Description of Artificial Sequence: Synthetic oligonucleotide
gaccuggcgcggggcucug

SEQ ID NO: 967987 - RNA, 19 nt, Artificial Sequence
  Description of Artificial Sequence: Synthetic oligonucleotide
gccaaggcguuuggauguc

SEQ ID NO: 967988 - RNA, 19 nt, Artificial Sequence
  Description of Artificial Sequence: Synthetic oligonucleotide
ccgggaaugucugcuucga

SEQ ID NO: 967989 - RNA, 19 nt, Artificial Sequence
  Description of Artificial Sequence: Synthetic oligonucleotide
gugcuacggcuaccaacau

SEQ ID NO: 967990 - RNA, 19 nt, Artificial Sequence
  Description of Artificial Sequence: Synthetic oligonucleotide
gucggcgcugcggcugcga

SEQ ID NO: 967991 - RNA, 19 nt, Artificial Sequence
  Description of Artificial Sequence: Synthetic oligonucleotide
cgcugucguuguucuggag

SEQ ID NO: 967992 - RNA, 19 nt, Artificial Sequence
  Description of Artificial Sequence: Synthetic oligonucleotide
ccacuucgacuucugcucu

SEQ ID NO: 967993 - RNA, 19 nt, Artificial Sequence
  Description of Artificial Sequence: Synthetic oligonucleotide
cgcgacucugcggggagac

SEQ ID NO: 967994 - RNA, 19 nt, Artificial Sequence
  Description of Artificial Sequence: Synthetic oligonucleotide
cuccggcuuuucuccuucu

SEQ ID NO: 967995 - RNA, 19 nt, Artificial Sequence
  Description of Artificial Sequence: Synthetic oligonucleotide
ccuggcgcggggcucugga

SEQ ID NO: 967996 - RNA, 19 nt, Artificial Sequence
  Description of Artificial Sequence: Synthetic oligonucleotide
ccacaccuaccuaugccau

SEQ ID NO: 967997 - RNA, 19 nt, Artificial Sequence
  Description of Artificial Sequence: Synthetic oligonucleotide
ccgcuccuuugagacugag

SEQ ID NO: 967998 - RNA, 19 nt, Artificial Sequence
  Description of Artificial Sequence: Synthetic oligonucleotide
cugcggcucuuguugucuu

SEQ ID NO: 967999 - RNA, 19 nt, Artificial Sequence
  Description of Artificial Sequence: Synthetic oligonucleotide
cgucccuugugagcaucug

SEQ ID NO: 968000 - RNA, 19 nt, Artificial Sequence
  Description of Artificial Sequence: Synthetic oligonucleotide
ccuaugggcuaugcaggua

SEQ ID NO: 968001 - RNA, 19 nt, Artificial Sequence
  Description of Artificial Sequence: Synthetic oligonucleotide
gggugccgagcucccuuua

SEQ ID NO: 968002 - RNA, 19 nt, Artificial Sequence
  Description of Artificial Sequence: Synthetic oligonucleotide
gcgcggggcucuggauggg

SEQ ID NO: 968003 - RNA, 19 nt, Artificial Sequence
  Description of Artificial Sequence: Synthetic oligonucleotide
cggaccuggauggagacuu

SEQ ID NO: 968004 - RNA, 19 nt, Artificial Sequence
  Description of Artificial Sequence: Synthetic oligonucleotide
cgaccgggaguggucggug

SEQ ID NO: 968005 - RNA, 19 nt, Artificial Sequence
  Description of Artificial Sequence: Synthetic oligonucleotide
cggcuccggcucuugagaa

SEQ ID NO: 968006 - RNA, 19 nt, Artificial Sequence
  Description of Artificial Sequence: Synthetic oligonucleotide
ccgaggaagcacugagauu

SEQ ID NO: 968007 - RNA, 19 nt, Artificial Sequence
  Description of Artificial Sequence: Synthetic oligonucleotide
gcgaccgggaguggucggu

SEQ ID NO: 968008 - RNA, 19 nt, Artificial Sequence
  Description of Artificial Sequence: Synthetic oligonucleotide
cuggcgccaggaggcggua

SEQ ID NO: 968009 - RNA, 19 nt, Artificial Sequence
  Description of Artificial Sequence: Synthetic oligonucleotide
gcggaccuggauggagacu

SEQ ID NO: 968010 - RNA, 19 nt, Artificial Sequence
  Description of Artificial Sequence: Synthetic oligonucleotide
cgacugcggcucuuguugu

SEQ ID NO: 968011 - RNA, 19 nt, Artificial Sequence
  Description of Artificial Sequence: Synthetic oligonucleotide
gcgcgacucugcggggaga

SEQ ID NO: 968012 - RNA, 19 nt, Artificial Sequence
  Description of Artificial Sequence: Synthetic oligonucleotide
cgggaucgacucuuugaau

SEQ ID NO: 968013 - RNA, 19 nt, Artificial Sequence
  Description of Artificial Sequence: Synthetic oligonucleotide
ggucggugucguccuucuu

SEQ ID NO: 968014 - RNA, 19 nt, Artificial Sequence
  Description of Artificial Sequence: Synthetic oligonucleotide
cggggagacuagguuugga

SEQ ID NO: 968015 - RNA, 19 nt, Artificial Sequence
  Description of Artificial Sequence: Synthetic oligonucleotide
ccggcgccgucuagaaccu

SEQ ID NO: 968016 - RNA, 19 nt, Artificial Sequence
  Description of Artificial Sequence: Synthetic oligonucleotide
gcgacucugcggggagacu

SEQ ID NO: 968017 - RNA, 19 nt, Artificial Sequence
  Description of Artificial Sequence: Synthetic oligonucleotide
cgucuagaaccuggcuugu

SEQ ID NO: 968018 - RNA, 19 nt, Artificial Sequence
  Description of Artificial Sequence: Synthetic oligonucleotide
cgccgucuagaaccuggcu

SEQ ID NO: 968019 - RNA, 19 nt, Artificial Sequence
  Description of Artificial Sequence: Synthetic oligonucleotide
cggcucuuacugcgggagu

SEQ ID NO: 968020 - RNA, 19 nt, Artificial Sequence
  Description of Artificial Sequence: Synthetic oligonucleotide
aaaauaaucgacaccaauc

SEQ ID NO: 968021 - RNA, 19 nt, Artificial Sequence
  Description of Artificial Sequence: Synthetic oligonucleotide
aaauaaucgacaccaaucu

SEQ ID NO: 968022 - RNA, 19 nt, Artificial Sequence
  Description of Artificial Sequence: Synthetic oligonucleotide
aggacuaauaauuaaaaca

SEQ ID NO: 968023 - RNA, 19 nt, Artificial Sequence
  Description of Artificial Sequence: Synthetic oligonucleotide
aaugacgaaacacuagaag

SEQ ID NO: 968024 - RNA, 19 nt, Artificial Sequence
  Description of Artificial Sequence: Synthetic oligonucleotide
uuaaaugucucauccaaag

SEQ ID NO: 968025 - RNA, 19 nt, Artificial Sequence
  Description of Artificial Sequence: Synthetic oligonucleotide
auggguuagaacuaccugc

SEQ ID NO: 968026 - RNA, 19 nt, Artificial Sequence
  Description of Artificial Sequence: Synthetic oligonucleotide
uccuguaguacaaagguag

SEQ ID NO: 968027 - RNA, 19 nt, Artificial Sequence
  Description of Artificial Sequence: Synthetic oligonucleotide
acuaauaauuaaaacauuc

SEQ ID NO: 968028 - RNA, 19 nt, Artificial Sequence
  Description of Artificial Sequence: Synthetic oligonucleotide
aacacuagaagaacaagac

SEQ ID NO: 968029 - RNA, 19 nt, Artificial Sequence
  Description of Artificial Sequence: Synthetic oligonucleotide
uuuaaugcuagacaucugu

SEQ ID NO: 968030 - RNA, 19 nt, Artificial Sequence
  Description of Artificial Sequence: Synthetic oligonucleotide
aauguuaguuacuaucaug

SEQ ID NO: 968031 - RNA, 19 nt, Artificial Sequence
  Description of Artificial Sequence: Synthetic oligonucleotide
aauuaugucaccaguuugg

SEQ ID NO: 968032 - RNA, 19 nt, Artificial Sequence
  Description of Artificial Sequence: Synthetic oligonucleotide
uuaaacaguaucauaggga

SEQ ID NO: 968033 - RNA, 19 nt, Artificial Sequence
  Description of Artificial Sequence: Synthetic oligonucleotide
uauuauuauuaacagugug

SEQ ID NO: 968034 - RNA, 19 nt, Artificial Sequence
  Description of Artificial Sequence: Synthetic oligonucleotide
uccuaguuucucuagaagg

SEQ ID NO: 968035 - RNA, 19 nt, Artificial Sequence
  Description of Artificial Sequence: Synthetic oligonucleotide
auuacuauuuaguucaaca

SEQ ID NO: 968036 - RNA, 19 nt, Artificial Sequence
  Description of Artificial Sequence: Synthetic oligonucleotide
uuauuguauucauucauag

SEQ ID NO: 968037 - RNA, 19 nt, Artificial Sequence
  Description of Artificial Sequence: Synthetic oligonucleotide
uagaguauacuauaguaug

SEQ ID NO: 968038 - RNA, 19 nt, Artificial Sequence
  Description of Artificial Sequence: Synthetic oligonucleotide
uugacuguuauuauuauua

SEQ ID NO: 968039 - RNA, 19 nt, Artificial Sequence
  Description of Artificial Sequence: Synthetic oligonucleotide
aguaguccgaacuugcugg

SEQ ID NO: 968040 - RNA, 19 nt, Artificial Sequence
  Description of Artificial Sequence: Synthetic oligonucleotide
aagacauugaacuccguga

SEQ ID NO: 968041 - RNA, 19 nt, Artificial Sequence
  Description of Artificial Sequence: Synthetic oligonucleotide
uugguaauacgauaaagga

SEQ ID NO: 968042 - RNA, 19 nt, Artificial Sequence
  Description of Artificial Sequence: Synthetic oligonucleotide
aaauaauagucaaagagaa

SEQ ID NO: 968043 - RNA, 19 nt, Artificial Sequence
  Description of Artificial Sequence: Synthetic oligonucleotide
auaauagucaaagagaaau

SEQ ID NO: 968044 - RNA, 19 nt, Artificial Sequence
  Description of Artificial Sequence: Synthetic oligonucleotide
uugcauauaaggcuccacg

SEQ ID NO: 968045 - RNA, 19 nt, Artificial Sequence
  Description of Artificial Sequence: Synthetic oligonucleotide
aucauagggacauugacca

SEQ ID NO: 968046 - RNA, 19 nt, Artificial Sequence
  Description of Artificial Sequence: Synthetic oligonucleotide
aaugcuagacaucuguggu

SEQ ID NO: 968047 - RNA, 19 nt, Artificial Sequence
  Description of Artificial Sequence: Synthetic oligonucleotide
uaauaauuaaaacauucuu

SEQ ID NO: 968048 - RNA, 19 nt, Artificial Sequence
  Description of Artificial Sequence: Synthetic oligonucleotide
aauauggcaggacuaauaa

SEQ ID NO: 968049 - RNA, 19 nt, Artificial Sequence
  Description of Artificial Sequence: Synthetic oligonucleotide
auagcauccacaugucgcc

SEQ ID NO: 968050 - RNA, 19 nt, Artificial Sequence
  Description of Artificial Sequence: Synthetic oligonucleotide
auguuaguuacuaucaugg

SEQ ID NO: 968051 - RNA, 19 nt, Artificial Sequence
  Description of Artificial Sequence: Synthetic oligonucleotide
uacuauuuaguucaacacu

SEQ ID NO: 968052 - RNA, 19 nt, Artificial Sequence
  Description of Artificial Sequence: Synthetic oligonucleotide
uauacuauaguaugucugu

SEQ ID NO: 968053 - RNA, 19 nt, Artificial Sequence
  Description of Artificial Sequence: Synthetic oligonucleotide
aaguuuuagaacacuuagc

SEQ ID NO: 968054 - RNA, 19 nt, Artificial Sequence
  Description of Artificial Sequence: Synthetic oligonucleotide
augacgaaacacuagaaga

SEQ ID NO: 968055 - RNA, 19 nt, Artificial Sequence
  Description of Artificial Sequence: Synthetic oligonucleotide
uauaguaacuuucagcauu

SEQ ID NO: 968056 - RNA, 19 nt, Artificial Sequence
  Description of Artificial Sequence: Synthetic oligonucleotide
acuauuuaguucaacacuc

SEQ ID NO: 968057 - RNA, 19 nt, Artificial Sequence
  Description of Artificial Sequence: Synthetic oligonucleotide
caaauaauagucaaagaga

SEQ ID NO: 968058 - RNA, 19 nt, Artificial Sequence
  Description of Artificial Sequence: Synthetic oligonucleotide
uuuguugcauauaaggcuc

SEQ ID NO: 968059 - RNA, 19 nt, Artificial Sequence
  Description of Artificial Sequence: Synthetic oligonucleotide
uaaugcuagcucaaaaucu

SEQ ID NO: 968060 - RNA, 19 nt, Artificial Sequence
  Description of Artificial Sequence: Synthetic oligonucleotide
uuuaugaaguuucugcaaa

SEQ ID NO: 968061 - RNA, 19 nt, Artificial Sequence
  Description of Artificial Sequence: Synthetic oligonucleotide
uagucaaagagaaauuaac

SEQ ID NO: 968062 - RNA, 19 nt, Artificial Sequence
  Description of Artificial Sequence: Synthetic oligonucleotide
uuacuauuuaguucaacac

SEQ ID NO: 968063 - RNA, 19 nt, Artificial Sequence
  Description of Artificial Sequence: Synthetic oligonucleotide
uccuacuggagaaauaucu

SEQ ID NO: 968064 - RNA, 19 nt, Artificial Sequence
  Description of Artificial Sequence: Synthetic oligonucleotide
aauccgaggaauuucuccu

SEQ ID NO: 968065 - RNA, 19 nt, Artificial Sequence
  Description of Artificial Sequence: Synthetic oligonucleotide
ugguggaugagauucaucu

SEQ ID NO: 968066 - RNA, 19 nt, Artificial Sequence
  Description of Artificial Sequence: Synthetic oligonucleotide
uuuuguuaccuccccagag

SEQ ID NO: 968067 - RNA, 19 nt, Artificial Sequence
  Description of Artificial Sequence: Synthetic oligonucleotide
augagcuguacagagauac

SEQ ID NO: 968068 - RNA, 19 nt, Artificial Sequence
  Description of Artificial Sequence: Synthetic oligonucleotide
aacaaucguacucacuuca

SEQ ID NO: 968069 - RNA, 19 nt, Artificial Sequence
  Description of Artificial Sequence: Synthetic oligonucleotide
aauggguuagaacuaccug

SEQ ID NO: 968070 - RNA, 19 nt, Artificial Sequence
  Description of Artificial Sequence: Synthetic oligonucleotide
uccuggauuaacaaauccc

SEQ ID NO: 968071 - RNA, 19 nt, Artificial Sequence
  Description of Artificial Sequence: Synthetic oligonucleotide
uugaccaaauguuaguuac

SEQ ID NO: 968072 - RNA, 19 nt, Artificial Sequence
  Description of Artificial Sequence: Synthetic oligonucleotide
auaaucgacaccaaucuuc

SEQ ID NO: 968073 - RNA, 19 nt, Artificial Sequence
  Description of Artificial Sequence: Synthetic oligonucleotide
uaauaguugacuguuauua

SEQ ID NO: 968074 - RNA, 19 nt, Artificial Sequence
  Description of Artificial Sequence: Synthetic oligonucleotide
cauagcauccacaugucgc

SEQ ID NO: 968075 - RNA, 19 nt, Artificial Sequence
  Description of Artificial Sequence: Synthetic oligonucleotide
uuacuaucauggaagacac

SEQ ID NO: 968076 - RNA, 19 nt, Artificial Sequence
  Description of Artificial Sequence: Synthetic oligonucleotide
agcugccgaaauuagagcg

SEQ ID NO: 968077 - RNA, 19 nt, Artificial Sequence
  Description of Artificial Sequence: Synthetic oligonucleotide
aaacaaucguacucacuuc

SEQ ID NO: 968078 - RNA, 19 nt, Artificial Sequence
  Description of Artificial Sequence: Synthetic oligonucleotide
cuucaaacguauuuugagc

SEQ ID NO: 968079 - RNA, 19 nt, Artificial Sequence
  Description of Artificial Sequence: Synthetic oligonucleotide
uuuuauagcuauuguaaaa

SEQ ID NO: 968080 - RNA, 19 nt, Artificial Sequence
  Description of Artificial Sequence: Synthetic oligonucleotide
ucuccuauaacuagaugcu

SEQ ID NO: 968081 - RNA, 19 nt, Artificial Sequence
  Description of Artificial Sequence: Synthetic oligonucleotide
ucuagaaggaauuccacua

SEQ ID NO: 968082 - RNA, 19 nt, Artificial Sequence
  Description of Artificial Sequence: Synthetic oligonucleotide
aagaguaguccgaacuugc

SEQ ID NO: 968083 - RNA, 19 nt, Artificial Sequence
  Description of Artificial Sequence: Synthetic oligonucleotide
aucguacucacuucaacuc

SEQ ID NO: 968084 - RNA, 19 nt, Artificial Sequence
  Description of Artificial Sequence: Synthetic oligonucleotide
ucuaaugcuagcucaaaau

SEQ ID NO: 968085 - RNA, 19 nt, Artificial Sequence
  Description of Artificial Sequence: Synthetic oligonucleotide
aauuacuauuuaguucaac

SEQ ID NO: 968086 - RNA, 19 nt, Artificial Sequence
  Description of Artificial Sequence: Synthetic oligonucleotide
uccaagaguaguccgaacu

SEQ ID NO: 968087 - RNA, 19 nt, Artificial Sequence
  Description of Artificial Sequence: Synthetic oligonucleotide
cauauaaggcuccacgagc

SEQ ID NO: 968088 - RNA, 19 nt, Artificial Sequence
  Description of Artificial Sequence: Synthetic oligonucleotide
uggauuaacaaaucccaga

SEQ ID NO: 968089 - RNA, 19 nt, Artificial Sequence
  Description of Artificial Sequence: Synthetic oligonucleotide
ggauuaacaaaucccagag

SEQ ID NO: 968090 - RNA, 19 nt, Artificial Sequence
  Description of Artificial Sequence: Synthetic oligonucleotide
uuuaacugguaucuuugcu

SEQ ID NO: 968091 - RNA, 19 nt, Artificial Sequence
  Description of Artificial Sequence: Synthetic oligonucleotide
guuacuaucauggaagaca

SEQ ID NO: 968092 - RNA, 19 nt, Artificial Sequence
  Description of Artificial Sequence: Synthetic oligonucleotide
gguaauacgauaaaggauc

SEQ ID NO: 968093 - RNA, 19 nt, Artificial Sequence
  Description of Artificial Sequence: Synthetic oligonucleotide
aauaguugacuguuauuau

SEQ ID NO: 968094 - RNA, 19 nt, Artificial Sequence
  Description of Artificial Sequence: Synthetic oligonucleotide
uaaucgacaccaaucuuca

SEQ ID NO: 968095 - RNA, 19 nt, Artificial Sequence
  Description of Artificial Sequence: Synthetic oligonucleotide
ucuauugcuuuguucagac

SEQ ID NO: 968096 - RNA, 19 nt, Artificial Sequence
  Description of Artificial Sequence: Synthetic oligonucleotide
uuaugaaguuucugcaaag

SEQ ID NO: 968097 - RNA, 19 nt, Artificial Sequence
  Description of Artificial Sequence: Synthetic oligonucleotide
cuaccugcaguuaaaggcc

SEQ ID NO: 968098 - RNA, 19 nt, Artificial Sequence
  Description of Artificial Sequence: Synthetic oligonucleotide
ucaagugacuuccaagagu

SEQ ID NO: 968099 - RNA, 19 nt, Artificial Sequence
  Description of Artificial Sequence: Synthetic oligonucleotide
gaauccgaggaauuucucc

SEQ ID NO: 968100 - RNA, 19 nt, Artificial Sequence
  Description of Artificial Sequence: Synthetic oligonucleotide
uagaacacuuagcaaauaa

SEQ ID NO: 968101 - RNA, 19 nt, Artificial Sequence
  Description of Artificial Sequence: Synthetic oligonucleotide
uucuacgagggucuggcag

SEQ ID NO: 968102 - RNA, 19 nt, Artificial Sequence
  Description of Artificial Sequence: Synthetic oligonucleotide
auauguaauaguugacugu

SEQ ID NO: 968103 - RNA, 19 nt, Artificial Sequence
  Description of Artificial Sequence: Synthetic oligonucleotide
ucucauuaaagauggugga

SEQ ID NO: 968104 - RNA, 19 nt, Artificial Sequence
  Description of Artificial Sequence: Synthetic oligonucleotide
uaggcauauguaauaguug

SEQ ID NO: 968105 - RNA, 19 nt, Artificial Sequence
  Description of Artificial Sequence: Synthetic oligonucleotide
uucgguuuugcuacuaccu

SEQ ID NO: 968106 - RNA, 19 nt, Artificial Sequence
  Description of Artificial Sequence: Synthetic oligonucleotide
cuaaugcuagcucaaaauc

SEQ ID NO: 968107 - RNA, 19 nt, Artificial Sequence
  Description of Artificial Sequence: Synthetic oligonucleotide
uucauaggacuccaaagaa

SEQ ID NO: 968108 - RNA, 19 nt, Artificial Sequence
  Description of Artificial Sequence: Synthetic oligonucleotide
ugguaauacgauaaaggau

SEQ ID NO: 968109 - RNA, 19 nt, Artificial Sequence
  Description of Artificial Sequence: Synthetic oligonucleotide
acuagaugcuuucaucuug

SEQ ID NO: 968110 - RNA, 19 nt, Artificial Sequence
  Description of Artificial Sequence: Synthetic oligonucleotide
ucaaacguauuuugagcag

SEQ ID NO: 968111 - RNA, 19 nt, Artificial Sequence
  Description of Artificial Sequence: Synthetic oligonucleotide
aaauccgcauuuugaaaga

SEQ ID NO: 968112 - RNA, 19 nt, Artificial Sequence
  Description of Artificial Sequence: Synthetic oligonucleotide
uaguugacuguuauuauua

SEQ ID NO: 968113 - RNA, 19 nt, Artificial Sequence
  Description of Artificial Sequence: Synthetic oligonucleotide
aaggaauccgaggaauuuc

SEQ ID NO: 968114 - RNA, 19 nt, Artificial Sequence
  Description of Artificial Sequence: Synthetic oligonucleotide
uugggcaguuuucuaaugc

SEQ ID NO: 968115 - RNA, 19 nt, Artificial Sequence
  Description of Artificial Sequence: Synthetic oligonucleotide
ugcauauaaggcuccacga

SEQ ID NO: 968116 - RNA, 19 nt, Artificial Sequence
  Description of Artificial Sequence: Synthetic oligonucleotide
acuccaaagaauuacuauu

SEQ ID NO: 968117 - RNA, 19 nt, Artificial Sequence
  Description of Artificial Sequence: Synthetic oligonucleotide
uggguuagaacuaccugca

SEQ ID NO: 968118 - RNA, 19 nt, Artificial Sequence
  Description of Artificial Sequence: Synthetic oligonucleotide
aguacuucacagaaccugg

SEQ ID NO: 968119 - RNA, 19 nt, Artificial Sequence
  Description of Artificial Sequence: Synthetic oligonucleotide
guauacuauaguaugucug

SEQ ID NO: 968120 - RNA, 19 nt, Artificial Sequence
  Description of Artificial Sequence: Synthetic oligonucleotide
ucugaccaugaauauguug

SEQ ID NO: 968121 - RNA, 19 nt, Artificial Sequence
  Description of Artificial Sequence: Synthetic oligonucleotide
uguaggccucucauuaaag

SEQ ID NO: 968122 - RNA, 19 nt, Artificial Sequence
  Description of Artificial Sequence: Synthetic oligonucleotide
caaaugacgaaacacuaga

SEQ ID NO: 968123 - RNA, 19 nt, Artificial Sequence
  Description of Artificial Sequence: Synthetic oligonucleotide
uuucgguuuugcuacuacc

SEQ ID NO: 968124 - RNA, 19 nt, Artificial Sequence
  Description of Artificial Sequence: Synthetic oligonucleotide
acgugauccagaguaagcg

SEQ ID NO: 968125 - RNA, 19 nt, Artificial Sequence
  Description of Artificial Sequence: Synthetic oligonucleotide
uauguuuaugaaguuucug

SEQ ID NO: 968126 - RNA, 19 nt, Artificial Sequence
  Description of Artificial Sequence: Synthetic oligonucleotide
aagacucaaaagagaaauc

SEQ ID NO: 968127 - RNA, 19 nt, Artificial Sequence
  Description of Artificial Sequence: Synthetic oligonucleotide
acugucacgugauccagag

SEQ ID NO: 968128 - RNA, 19 nt, Artificial Sequence
  Description of Artificial Sequence: Synthetic oligonucleotide
ugcaguuaaaggccagagc

SEQ ID NO: 968129 - RNA, 19 nt, Artificial Sequence
  Description of Artificial Sequence: Synthetic oligonucleotide
caaacguauuuugagcagg

SEQ ID NO: 968130 - RNA, 19 nt, Artificial Sequence
  Description of Artificial Sequence: Synthetic oligonucleotide
agucaaagagaaauuaaca

SEQ ID NO: 968131 - RNA, 19 nt, Artificial Sequence
  Description of Artificial Sequence: Synthetic oligonucleotide
aauaaucgacaccaaucuu

SEQ ID NO: 968132 - RNA, 19 nt, Artificial Sequence
  Description of Artificial Sequence: Synthetic oligonucleotide
cagagaaacaaucguacuc

SEQ ID NO: 968133 - RNA, 19 nt, Artificial Sequence
  Description of Artificial Sequence: Synthetic oligonucleotide
uagaacuaccugcaguuaa

SEQ ID NO: 968134 - RNA, 19 nt, Artificial Sequence
  Description of Artificial Sequence: Synthetic oligonucleotide
uaauagucaaagagaaauu

SEQ ID NO: 968135 - RNA, 19 nt, Artificial Sequence
  Description of Artificial Sequence: Synthetic oligonucleotide
ucgcccaaccuuaaaauaa

SEQ ID NO: 968136 - RNA, 19 nt, Artificial Sequence
  Description of Artificial Sequence: Synthetic oligonucleotide
uuguuaccuccccagagcu

SEQ ID NO: 968137 - RNA, 19 nt, Artificial Sequence
  Description of Artificial Sequence: Synthetic oligonucleotide
agagguauuuucuugcauu

SEQ ID NO: 968138 - RNA, 19 nt, Artificial Sequence
  Description of Artificial Sequence: Synthetic oligonucleotide
ucaucuucggagaaauuuu

SEQ ID NO: 968139 - RNA, 19 nt, Artificial Sequence
  Description of Artificial Sequence: Synthetic oligonucleotide
aauuagagcgcgugacuaa

SEQ ID NO: 968140 - RNA, 19 nt, Artificial Sequence
  Description of Artificial Sequence: Synthetic oligonucleotide
uguuaguuacuaucaugga

SEQ ID NO: 968141 - RNA, 19 nt, Artificial Sequence
  Description of Artificial Sequence: Synthetic oligonucleotide
ucguacucacuucaacuca

SEQ ID NO: 968142 - RNA, 19 nt, Artificial Sequence
  Description of Artificial Sequence: Synthetic oligonucleotide
cuuucuacgagggucuggc

SEQ ID NO: 968143 - RNA, 19 nt, Artificial Sequence
  Description of Artificial Sequence: Synthetic oligonucleotide
aaauuagagcgcgugacua

SEQ ID NO: 968144 - RNA, 19 nt, Artificial Sequence
  Description of Artificial Sequence: Synthetic oligonucleotide
aucuauuccuaguuucucu

SEQ ID NO: 968145 - RNA, 19 nt, Artificial Sequence
  Description of Artificial Sequence: Synthetic oligonucleotide
auaaggcuccacgagcuac

SEQ ID NO: 968146 - RNA, 19 nt, Artificial Sequence
  Description of Artificial Sequence: Synthetic oligonucleotide
ucgucagucagguaagguc

SEQ ID NO: 968147 - RNA, 19 nt, Artificial Sequence
  Description of Artificial Sequence: Synthetic oligonucleotide
aaucgacaccaaucuucac

SEQ ID NO: 968148 - RNA, 19 nt, Artificial Sequence
  Description of Artificial Sequence: Synthetic oligonucleotide
ucgaauuaugucaccaguu

SEQ ID NO: 968149 - RNA, 19 nt, Artificial Sequence
  Description of Artificial Sequence: Synthetic oligonucleotide
ucuacgagggucuggcaga

SEQ ID NO: 968150 - RNA, 19 nt, Artificial Sequence
  Description of Artificial Sequence: Synthetic oligonucleotide
uguaucuaauuaguuuucu

SEQ ID NO: 968151 - RNA, 19 nt, Artificial Sequence
  Description of Artificial Sequence: Synthetic oligonucleotide
aguaugucuguguaucuaa

SEQ ID NO: 968152 - RNA, 19 nt, Artificial Sequence
  Description of Artificial Sequence: Synthetic oligonucleotide
gaagacucaaaagagaaau

SEQ ID NO: 968153 - RNA, 19 nt, Artificial Sequence
  Description of Artificial Sequence: Synthetic oligonucleotide
auaguugacuguuauuauu

SEQ ID NO: 968154 - RNA, 19 nt, Artificial Sequence
  Description of Artificial Sequence: Synthetic oligonucleotide
ucuguguaucuaauuaguu

SEQ ID NO: 968155 - RNA, 19 nt, Artificial Sequence
  Description of Artificial Sequence: Synthetic oligonucleotide
aaagagaaauuaacagaga

SEQ ID NO: 968156 - RNA, 19 nt, Artificial Sequence
  Description of Artificial Sequence: Synthetic oligonucleotide
ucuauuccuaguuucucua

SEQ ID NO: 968157 - RNA, 19 nt, Artificial Sequence
  Description of Artificial Sequence: Synthetic oligonucleotide
uccgugagauuaaacagua

SEQ ID NO: 968158 - RNA, 19 nt, Artificial Sequence
  Description of Artificial Sequence: Synthetic oligonucleotide
gaguaguccgaacuugcug

SEQ ID NO: 968159 - RNA, 19 nt, Artificial Sequence
  Description of Artificial Sequence: Synthetic oligonucleotide
cucaaaagagaaauccgca

SEQ ID NO: 968160 - RNA, 19 nt, Artificial Sequence
  Description of Artificial Sequence: Synthetic oligonucleotide
ugacuguuauuauuauuaa

SEQ ID NO: 968161 - RNA, 19 nt, Artificial Sequence
  Description of Artificial Sequence: Synthetic oligonucleotide
ugacaauuucuuagagcug

SEQ ID NO: 968162 - RNA, 19 nt, Artificial Sequence
  Description of Artificial Sequence: Synthetic oligonucleotide
uagagcgcgugacuaagca

SEQ ID NO: 968163 - RNA, 19 nt, Artificial Sequence
  Description of Artificial Sequence: Synthetic oligonucleotide
uuuucgguuuugcuacuac

SEQ ID NO: 968164 - RNA, 19 nt, Artificial Sequence
  Description of Artificial Sequence: Synthetic oligonucleotide
agagaaauccgcauuuuga

SEQ ID NO: 968165 - RNA, 19 nt, Artificial Sequence
  Description of Artificial Sequence: Synthetic oligonucleotide
uauuauuaacaguguggaa

SEQ ID NO: 968166 - RNA, 19 nt, Artificial Sequence
  Description of Artificial Sequence: Synthetic oligonucleotide
ucacaccuaguuuaaugcu

SEQ ID NO: 968167 - RNA, 19 nt, Artificial Sequence
  Description of Artificial Sequence: Synthetic oligonucleotide
aguuacuaucauggaagac

SEQ ID NO: 968168 - RNA, 19 nt, Artificial Sequence
  Description of Artificial Sequence: Synthetic oligonucleotide
aacuagaugcuuucaucuu

SEQ ID NO: 968169 - RNA, 19 nt, Artificial Sequence
  Description of Artificial Sequence: Synthetic oligonucleotide
uucgugauaucugucaaua

SEQ ID NO: 968170 - RNA, 19 nt, Artificial Sequence
  Description of Artificial Sequence: Synthetic oligonucleotide
gacgaaacacuagaagaac

SEQ ID NO: 968171 - RNA, 19 nt, Artificial Sequence
  Description of Artificial Sequence: Synthetic oligonucleotide
cuaaaauauggcaggacua

SEQ ID NO: 968172 - RNA, 19 nt, Artificial Sequence
  Description of Artificial Sequence: Synthetic oligonucleotide
ucacuucaacucagcaaag

SEQ ID NO: 968173 - RNA, 19 nt, Artificial Sequence
  Description of Artificial Sequence: Synthetic oligonucleotide
auuagagcgcgugacuaag

SEQ ID NO: 968174 - RNA, 19 nt, Artificial Sequence
  Description of Artificial Sequence: Synthetic oligonucleotide
agugacuuccaagaguagu

SEQ ID NO: 968175 - RNA, 19 nt, Artificial Sequence
  Description of Artificial Sequence: Synthetic oligonucleotide
agaauggguuagaacuacc

SEQ ID NO: 968176 - RNA, 19 nt, Artificial Sequence
  Description of Artificial Sequence: Synthetic oligonucleotide
ugacuuccaagaguagucc

SEQ ID NO: 968177 - RNA, 19 nt, Artificial Sequence
  Description of Artificial Sequence: Synthetic oligonucleotide
aguccgaacuugcugguga

SEQ ID NO: 968178 - RNA, 19 nt, Artificial Sequence
  Description of Artificial Sequence: Synthetic oligonucleotide
ucuucuaacugcccuccuc

SEQ ID NO: 968179 - RNA, 19 nt, Artificial Sequence
  Description of Artificial Sequence: Synthetic oligonucleotide
auauaaggcuccacgagcu

SEQ ID NO: 968180 - RNA, 19 nt, Artificial Sequence
  Description of Artificial Sequence: Synthetic oligonucleotide
ugaagucaacauaauucuu

SEQ ID NO: 968181 - RNA, 19 nt, Artificial Sequence
  Description of Artificial Sequence: Synthetic oligonucleotide
aaacguauuuugagcaggu

SEQ ID NO: 968182 - RNA, 19 nt, Artificial Sequence
  Description of Artificial Sequence: Synthetic oligonucleotide
uuagagcgcgugacuaagc

SEQ ID NO: 968183 - RNA, 19 nt, Artificial Sequence
  Description of Artificial Sequence: Synthetic oligonucleotide
ugucgcccaaccuuaaaau

SEQ ID NO: 968184 - RNA, 19 nt, Artificial Sequence
  Description of Artificial Sequence: Synthetic oligonucleotide
agaguauacuauaguaugu

SEQ ID NO: 968185 - RNA, 19 nt, Artificial Sequence
  Description of Artificial Sequence: Synthetic oligonucleotide
aaaugacgaaacacuagaa

SEQ ID NO: 968186 - RNA, 19 nt, Artificial Sequence
  Description of Artificial Sequence: Synthetic oligonucleotide
gcaguuaaaggccagagcu

SEQ ID NO: 968187 - RNA, 19 nt, Artificial Sequence
  Description of Artificial Sequence: Synthetic oligonucleotide
acgagggucuggcagaggu

SEQ ID NO: 968188 - RNA, 19 nt, Artificial Sequence
  Description of Artificial Sequence: Synthetic oligonucleotide
uaugucuguguaucuaauu

SEQ ID NO: 968189 - RNA, 19 nt, Artificial Sequence
  Description of Artificial Sequence: Synthetic oligonucleotide
acaccuaguuuaaugcuag

SEQ ID NO: 968190 - RNA, 19 nt, Artificial Sequence
  Description of Artificial Sequence: Synthetic oligonucleotide
auagucaaagagaaauuaa

SEQ ID NO: 968191 - RNA, 19 nt, Artificial Sequence
  Description of Artificial Sequence: Synthetic oligonucleotide
caguuugguaauacgauaa

SEQ ID NO: 968192 - RNA, 19 nt, Artificial Sequence
  Description of Artificial Sequence: Synthetic oligonucleotide
gcauauaaggcuccacgag

SEQ ID NO: 968193 - RNA, 19 nt, Artificial Sequence
  Description of Artificial Sequence: Synthetic oligonucleotide
uccgaggaauuucuccuac

SEQ ID NO: 968194 - RNA, 19 nt, Artificial Sequence
  Description of Artificial Sequence: Synthetic oligonucleotide
ugauccagaguaagcguau

SEQ ID NO: 968195 - RNA, 19 nt, Artificial Sequence
  Description of Artificial Sequence: Synthetic oligonucleotide
caccaguuugguaauacga

SEQ ID NO: 968196 - RNA, 19 nt, Artificial Sequence
  Description of Artificial Sequence: Synthetic oligonucleotide
uguuuucaagugacuucca

SEQ ID NO: 968197 - RNA, 19 nt, Artificial Sequence
  Description of Artificial Sequence: Synthetic oligonucleotide
gcugacaauuucuuagagc

SEQ ID NO: 968198 - RNA, 19 nt, Artificial Sequence
  Description of Artificial Sequence: Synthetic oligonucleotide
ggagccucgguuuuguuac

SEQ ID NO: 968199 - RNA, 19 nt, Artificial Sequence
  Description of Artificial Sequence: Synthetic oligonucleotide
aguugacuguuauuauuau

SEQ ID NO: 968200 - RNA, 19 nt, Artificial Sequence
  Description of Artificial Sequence: Synthetic oligonucleotide
aguugggcaguuuucuaau

SEQ ID NO: 968201 - RNA, 19 nt, Artificial Sequence
  Description of Artificial Sequence: Synthetic oligonucleotide
ucuuucuacgagggucugg

SEQ ID NO: 968202 - RNA, 19 nt, Artificial Sequence
  Description of Artificial Sequence: Synthetic oligonucleotide
agagcgcgugacuaagcag

SEQ ID NO: 968203 - RNA, 19 nt, Artificial Sequence
  Description of Artificial Sequence: Synthetic oligonucleotide
agguaauagaguauacuau

SEQ ID NO: 968204 - RNA, 19 nt, Artificial Sequence
  Description of Artificial Sequence: Synthetic oligonucleotide
caagaguaguccgaacuug

SEQ ID NO: 968205 - RNA, 19 nt, Artificial Sequence
  Description of Artificial Sequence: Synthetic oligonucleotide
ugacuaagcaggugcugac

SEQ ID NO: 968206 - RNA, 19 nt, Artificial Sequence
  Description of Artificial Sequence: Synthetic oligonucleotide
ccaaccuuaaaauaaucga

SEQ ID NO: 968207 - RNA, 19 nt, Artificial Sequence
  Description of Artificial Sequence: Synthetic oligonucleotide
ugagcuguacagagauacu

SEQ ID NO: 968208 - RNA, 19 nt, Artificial Sequence
  Description of Artificial Sequence: Synthetic oligonucleotide
aguaucauagggacauuga

SEQ ID NO: 968209 - RNA, 19 nt, Artificial Sequence
  Description of Artificial Sequence: Synthetic oligonucleotide
guaggccucucauuaaaga

SEQ ID NO: 968210 - RNA, 19 nt, Artificial Sequence
  Description of Artificial Sequence: Synthetic oligonucleotide
augucgcccaaccuuaaaa

SEQ ID NO: 968211 - RNA, 19 nt, Artificial Sequence
  Description of Artificial Sequence: Synthetic oligonucleotide
cugccgaaauuagagcgcg

SEQ ID NO: 968212 - RNA, 19 nt, Artificial Sequence
  Description of Artificial Sequence: Synthetic oligonucleotide
acgaaacacuagaagaaca

SEQ ID NO: 968213 - RNA, 19 nt, Artificial Sequence
  Description of Artificial Sequence: Synthetic oligonucleotide
uggaugagauucaucuauu

SEQ ID NO: 968214 - RNA, 19 nt, Artificial Sequence
  Description of Artificial Sequence: Synthetic oligonucleotide
gaaauuagagcgcgugacu

SEQ ID NO: 968215 - RNA, 19 nt, Artificial Sequence
  Description of Artificial Sequence: Synthetic oligonucleotide
caguaucauagggacauug

SEQ ID NO: 968216 - RNA, 19 nt, Artificial Sequence
  Description of Artificial Sequence: Synthetic oligonucleotide
auauggcaggacuaauaau

SEQ ID NO: 968217 - RNA, 19 nt, Artificial Sequence
  Description of Artificial Sequence: Synthetic oligonucleotide
cgugagauuaaacaguauc

SEQ ID NO: 968218 - RNA, 19 nt, Artificial Sequence
  Description of Artificial Sequence: Synthetic oligonucleotide
ucuaacugcccuccucuuu

SEQ ID NO: 968219 - RNA, 19 nt, Artificial Sequence
  Description of Artificial Sequence: Synthetic oligonucleotide
cuuagagcuggcccuagca

SEQ ID NO: 968220 - RNA, 19 nt, Artificial Sequence
  Description of Artificial Sequence: Synthetic oligonucleotide
agcuaccagagcuuccaca

SEQ ID NO: 968221 - RNA, 19 nt, Artificial Sequence
  Description of Artificial Sequence: Synthetic oligonucleotide
uggcaggacuaauaauuaa

SEQ ID NO: 968222 - RNA, 19 nt, Artificial Sequence
  Description of Artificial Sequence: Synthetic oligonucleotide
agcucgaauuaugucacca

SEQ ID NO: 968223 - RNA, 19 nt, Artificial Sequence
  Description of Artificial Sequence: Synthetic oligonucleotide
guugggcaguuuucuaaug

SEQ ID NO: 968224 - RNA, 19 nt, Artificial Sequence
  Description of Artificial Sequence: Synthetic oligonucleotide
aacucagcaaagagacuga

SEQ ID NO: 968225 - RNA, 19 nt, Artificial Sequence
  Description of Artificial Sequence: Synthetic oligonucleotide
aauccgcauuuugaaagaa

SEQ ID NO: 968226 - RNA, 19 nt, Artificial Sequence
  Description of Artificial Sequence: Synthetic oligonucleotide
uuaugucaccaguuuggua

SEQ ID NO: 968227 - RNA, 19 nt, Artificial Sequence
  Description of Artificial Sequence: Synthetic oligonucleotide
ccuaguuuaaugcuagaca

SEQ ID NO: 968228 - RNA, 19 nt, Artificial Sequence
  Description of Artificial Sequence: Synthetic oligonucleotide
acuccuggauuaacaaauc

SEQ ID NO: 968229 - RNA, 19 nt, Artificial Sequence
  Description of Artificial Sequence: Synthetic oligonucleotide
guggaugagauucaucuau

SEQ ID NO: 968230 - RNA, 19 nt, Artificial Sequence
  Description of Artificial Sequence: Synthetic oligonucleotide
cagaauggguuagaacuac

SEQ ID NO: 968231 - RNA, 19 nt, Artificial Sequence
  Description of Artificial Sequence: Synthetic oligonucleotide
cugcaguuaaaggccagag

SEQ ID NO: 968232 - RNA, 19 nt, Artificial Sequence
  Description of Artificial Sequence: Synthetic oligonucleotide
aggaauccgaggaauuucu

SEQ ID NO: 968233 - RNA, 19 nt, Artificial Sequence
  Description of Artificial Sequence: Synthetic oligonucleotide
uguugcauauaaggcucca

SEQ ID NO: 968234 - RNA, 19 nt, Artificial Sequence
  Description of Artificial Sequence: Synthetic oligonucleotide
uggagccucgguuuuguua

SEQ ID NO: 968235 - RNA, 19 nt, Artificial Sequence
  Description of Artificial Sequence: Synthetic oligonucleotide
auuccacuacuccuggauu

SEQ ID NO: 968236 - RNA, 19 nt, Artificial Sequence
  Description of Artificial Sequence: Synthetic oligonucleotide
guauuuaacugguaucuuu

SEQ ID NO: 968237 - RNA, 19 nt, Artificial Sequence
  Description of Artificial Sequence: Synthetic oligonucleotide
gcucaugucuacugucacg

SEQ ID NO: 968238 - RNA, 19 nt, Artificial Sequence
  Description of Artificial Sequence: Synthetic oligonucleotide
agucaacauaauucuucaa

SEQ ID NO: 968239 - RNA, 19 nt, Artificial Sequence
  Description of Artificial Sequence: Synthetic oligonucleotide
ugucgucagucagguaagg

SEQ ID NO: 968240 - RNA, 19 nt, Artificial Sequence
  Description of Artificial Sequence: Synthetic oligonucleotide
agaaguaaucacaccuagu

SEQ ID NO: 968241 - RNA, 19 nt, Artificial Sequence
  Description of Artificial Sequence: Synthetic oligonucleotide
acuuccaagaguaguccga

SEQ ID NO: 968242 - RNA, 19 nt, Artificial Sequence
  Description of Artificial Sequence: Synthetic oligonucleotide
gcucgaauuaugucaccag

SEQ ID NO: 968243 - RNA, 19 nt, Artificial Sequence
  Description of Artificial Sequence: Synthetic oligonucleotide
augcuagcucaaaaucuuc

SEQ ID NO: 968244 - RNA, 19 nt, Artificial Sequence
  Description of Artificial Sequence: Synthetic oligonucleotide
gaauggguuagaacuaccu

SEQ ID NO: 968245 - RNA, 19 nt, Artificial Sequence
  Description of Artificial Sequence: Synthetic oligonucleotide
ccuagcauucacuucuuuc

SEQ ID NO: 968246 - RNA, 19 nt, Artificial Sequence
  Description of Artificial Sequence: Synthetic oligonucleotide
auguaccaaaugcacucaa

SEQ ID NO: 968247 - RNA, 19 nt, Artificial Sequence
  Description of Artificial Sequence: Synthetic oligonucleotide
gugacuaagcaggugcuga

SEQ ID NO: 968248 - RNA, 19 nt, Artificial Sequence
  Description of Artificial Sequence: Synthetic oligonucleotide
caucuauuccuaguuucuc

SEQ ID NO: 968249 - RNA, 19 nt, Artificial Sequence
  Description of Artificial Sequence: Synthetic oligonucleotide
gagcagguaauagaguaua

SEQ ID NO: 968250 - RNA, 19 nt, Artificial Sequence
  Description of Artificial Sequence: Synthetic oligonucleotide
cacagaaccuggcucccac

SEQ ID NO: 968251 - RNA, 19 nt, Artificial Sequence
  Description of Artificial Sequence: Synthetic oligonucleotide
ugaacuccgugagauuaaa

SEQ ID NO: 968252 - RNA, 19 nt, Artificial Sequence
  Description of Artificial Sequence: Synthetic oligonucleotide
aacugguaucuuugcucau

SEQ ID NO: 968253 - RNA, 19 nt, Artificial Sequence
  Description of Artificial Sequence: Synthetic oligonucleotide
ggcuccacgagcuaccaga

SEQ ID NO: 968254 - RNA, 19 nt, Artificial Sequence
  Description of Artificial Sequence: Synthetic oligonucleotide
uuagaacuaccugcaguua

SEQ ID NO: 968255 - RNA, 19 nt, Artificial Sequence
  Description of Artificial Sequence: Synthetic oligonucleotide
cacaccuaguuuaaugcua

SEQ ID NO: 968256 - RNA, 19 nt, Artificial Sequence
  Description of Artificial Sequence: Synthetic oligonucleotide
uucuucuaacugcccuccu

SEQ ID NO: 968257 - RNA, 19 nt, Artificial Sequence
  Description of Artificial Sequence: Synthetic oligonucleotide
uuccaagaguaguccgaac

SEQ ID NO: 968258 - RNA, 19 nt, Artificial Sequence
  Description of Artificial Sequence: Synthetic oligonucleotide
uuucuacgagggucuggca

SEQ ID NO: 968259 - RNA, 19 nt, Artificial Sequence
  Description of Artificial Sequence: Synthetic oligonucleotide
ugccugaguuuuauagcua

SEQ ID NO: 968260 - RNA, 19 nt, Artificial Sequence
  Description of Artificial Sequence: Synthetic oligonucleotide
cuagaugcuuucaucuugu

SEQ ID NO: 968261 - RNA, 19 nt, Artificial Sequence
  Description of Artificial Sequence: Synthetic oligonucleotide
auagagcauggaaaauacu

SEQ ID NO: 968262 - RNA, 19 nt, Artificial Sequence
  Description of Artificial Sequence: Synthetic oligonucleotide
ccucucauuaaagauggug

SEQ ID NO: 968263 - RNA, 19 nt, Artificial Sequence
  Description of Artificial Sequence: Synthetic oligonucleotide
ugguggaaaguaggcauau

SEQ ID NO: 968264 - RNA, 19 nt, Artificial Sequence
  Description of Artificial Sequence: Synthetic oligonucleotide
ccucgguuuuguuaccucc

SEQ ID NO: 968265 - RNA, 19 nt, Artificial Sequence
  Description of Artificial Sequence: Synthetic oligonucleotide
uuucuuagagcuggcccua

SEQ ID NO: 968266 - RNA, 19 nt, Artificial Sequence
  Description of Artificial Sequence: Synthetic oligonucleotide
cuacuccuggauuaacaaa

SEQ ID NO: 968267 - RNA, 19 nt, Artificial Sequence
  Description of Artificial Sequence: Synthetic oligonucleotide
gcuacuaccugccugaguu

SEQ ID NO: 968268 - RNA, 19 nt, Artificial Sequence
  Description of Artificial Sequence: Synthetic oligonucleotide
uacuaccugccugaguuuu

SEQ ID NO: 968269 - RNA, 19 nt, Artificial Sequence
  Description of Artificial Sequence: Synthetic oligonucleotide
ucugacuuauauggcuuuu

SEQ ID NO: 968270 - RNA, 19 nt, Artificial Sequence
  Description of Artificial Sequence: Synthetic oligonucleotide
gguuagaacuaccugcagu

SEQ ID NO: 968271 - RNA, 19 nt, Artificial Sequence
  Description of Artificial Sequence: Synthetic oligonucleotide
caaaagagaaauccgcauu

SEQ ID NO: 968272 - RNA, 19 nt, Artificial Sequence
  Description of Artificial Sequence: Synthetic oligonucleotide
cucgaauuaugucaccagu

SEQ ID NO: 968273 - RNA, 19 nt, Artificial Sequence
  Description of Artificial Sequence: Synthetic oligonucleotide
uucuuagagcuggcccuag

SEQ ID NO: 968274 - RNA, 19 nt, Artificial Sequence
  Description of Artificial Sequence: Synthetic oligonucleotide
cuccgugagauuaaacagu

SEQ ID NO: 968275 - RNA, 19 nt, Artificial Sequence
  Description of Artificial Sequence: Synthetic oligonucleotide
cgcgugacuaagcaggugc

SEQ ID NO: 968276 - RNA, 19 nt, Artificial Sequence
  Description of Artificial Sequence: Synthetic oligonucleotide
cuacuggagaaauaucuuu

SEQ ID NO: 968277 - RNA, 19 nt, Artificial Sequence
  Description of Artificial Sequence: Synthetic oligonucleotide
gucgcccaaccuuaaaaua

SEQ ID NO: 968278 - RNA, 19 nt, Artificial Sequence
  Description of Artificial Sequence: Synthetic oligonucleotide
guaucuaauuaguuuucuu

SEQ ID NO: 968279 - RNA, 19 nt, Artificial Sequence
  Description of Artificial Sequence: Synthetic oligonucleotide
agaguacuucacagaaccu

SEQ ID NO: 968280 - RNA, 19 nt, Artificial Sequence
  Description of Artificial Sequence: Synthetic oligonucleotide
gucuguguaucuaauuagu

SEQ ID NO: 968281 - RNA, 19 nt, Artificial Sequence
  Description of Artificial Sequence: Synthetic oligonucleotide
guaauacgauaaaggaucu

SEQ ID NO: 968282 - RNA, 19 nt, Artificial Sequence
  Description of Artificial Sequence: Synthetic oligonucleotide
gacuaauaauuaaaacauu

SEQ ID NO: 968283 - RNA, 19 nt, Artificial Sequence
  Description of Artificial Sequence: Synthetic oligonucleotide
cagagauacugcaaguuuu

SEQ ID NO: 968284 - RNA, 19 nt, Artificial Sequence
  Description of Artificial Sequence: Synthetic oligonucleotide
gugauccagaguaagcgua

SEQ ID NO: 968285 - RNA, 19 nt, Artificial Sequence
  Description of Artificial Sequence: Synthetic oligonucleotide
gccgaaauuagagcgcgug

SEQ ID NO: 968286 - RNA, 19 nt, Artificial Sequence
  Description of Artificial Sequence: Synthetic oligonucleotide
guugacuguuauuauuauu

SEQ ID NO: 968287 - RNA, 19 nt, Artificial Sequence
  Description of Artificial Sequence: Synthetic oligonucleotide
uaugcacguucucccugau

SEQ ID NO: 968288 - RNA, 19 nt, Artificial Sequence
  Description of Artificial Sequence: Synthetic oligonucleotide
uucuaacugcccuccucuu

SEQ ID NO: 968289 - RNA, 19 nt, Artificial Sequence
  Description of Artificial Sequence: Synthetic oligonucleotide
ucucccugauuuguauuua

SEQ ID NO: 968290 - RNA, 19 nt, Artificial Sequence
  Description of Artificial Sequence: Synthetic oligonucleotide
cagcucgaauuaugucacc

SEQ ID NO: 968291 - RNA, 19 nt, Artificial Sequence
  Description of Artificial Sequence: Synthetic oligonucleotide
auccgaggaauuucuccua

SEQ ID NO: 968292 - RNA, 19 nt, Artificial Sequence
  Description of Artificial Sequence: Synthetic oligonucleotide
ugccgaaauuagagcgcgu

SEQ ID NO: 968293 - RNA, 19 nt, Artificial Sequence
  Description of Artificial Sequence: Synthetic oligonucleotide
cgaaauuagagcgcgugac

SEQ ID NO: 968294 - RNA, 19 nt, Artificial Sequence
  Description of Artificial Sequence: Synthetic oligonucleotide
ggcauauguaauaguugac

SEQ ID NO: 968295 - RNA, 19 nt, Artificial Sequence
  Description of Artificial Sequence: Synthetic oligonucleotide
cacgagcuaccagagcuuc

SEQ ID NO: 968296 - RNA, 19 nt, Artificial Sequence
  Description of Artificial Sequence: Synthetic oligonucleotide
ucagucagguaaggucuuc

SEQ ID NO: 968297 - RNA, 19 nt, Artificial Sequence
  Description of Artificial Sequence: Synthetic oligonucleotide
acaaucguacucacuucaa

SEQ ID NO: 968298 - RNA, 19 nt, Artificial Sequence
  Description of Artificial Sequence: Synthetic oligonucleotide
caacacuccuccuguagua

SEQ ID NO: 968299 - RNA, 19 nt, Artificial Sequence
  Description of Artificial Sequence: Synthetic oligonucleotide
gaaggaauccgaggaauuu

SEQ ID NO: 968300 - RNA, 19 nt, Artificial Sequence
  Description of Artificial Sequence: Synthetic oligonucleotide
uugcuacuaccugccugag

SEQ ID NO: 968301 - RNA, 19 nt, Artificial Sequence
  Description of Artificial Sequence: Synthetic oligonucleotide
gagcuaccagagcuuccac

SEQ ID NO: 968302 - RNA, 19 nt, Artificial Sequence
  Description of Artificial Sequence: Synthetic oligonucleotide
gcugccgaaauuagagcgc

SEQ ID NO: 968303 - RNA, 19 nt, Artificial Sequence
  Description of Artificial Sequence: Synthetic oligonucleotide
gagccucgguuuuguuacc

SEQ ID NO: 968304 - RNA, 19 nt, Artificial Sequence
  Description of Artificial Sequence: Synthetic oligonucleotide
uccuugauuccagcucgaa

SEQ ID NO: 968305 - RNA, 19 nt, Artificial Sequence
  Description of Artificial Sequence: Synthetic oligonucleotide
cuagacaucugugguggaa

SEQ ID NO: 968306 - RNA, 19 nt, Artificial Sequence
  Description of Artificial Sequence: Synthetic oligonucleotide
agccucgguuuuguuaccu

SEQ ID NO: 968307 - RNA, 19 nt, Artificial Sequence
  Description of Artificial Sequence: Synthetic oligonucleotide
gguggaugagauucaucua

SEQ ID NO: 968308 - RNA, 19 nt, Artificial Sequence
  Description of Artificial Sequence: Synthetic oligonucleotide
cucuuucuacgagggucug

SEQ ID NO: 968309 - RNA, 19 nt, Artificial Sequence
  Description of Artificial Sequence: Synthetic oligonucleotide
gguggaaaguaggcauaug

SEQ ID NO: 968310 - RNA, 19 nt, Artificial Sequence
  Description of Artificial Sequence: Synthetic oligonucleotide
gcacguucucccugauuug

SEQ ID NO: 968311 - RNA, 19 nt, Artificial Sequence
  Description of Artificial Sequence: Synthetic oligonucleotide
caccuaguuuaaugcuaga

SEQ ID NO: 968312 - RNA, 19 nt, Artificial Sequence
  Description of Artificial Sequence: Synthetic oligonucleotide
agacuuccuuuuguugcau

SEQ ID NO: 968313 - RNA, 19 nt, Artificial Sequence
  Description of Artificial Sequence: Synthetic oligonucleotide
guaguccgaacuugcuggu

SEQ ID NO: 968314 - RNA, 19 nt, Artificial Sequence
  Description of Artificial Sequence: Synthetic oligonucleotide
agcgcgugacuaagcaggu

SEQ ID NO: 968315 - RNA, 19 nt, Artificial Sequence
  Description of Artificial Sequence: Synthetic oligonucleotide
ggacuccaaagaauuacua

SEQ ID NO: 968316 - RNA, 19 nt, Artificial Sequence
  Description of Artificial Sequence: Synthetic oligonucleotide
cguauuuugagcagguaau

SEQ ID NO: 968317 - RNA, 19 nt, Artificial Sequence
  Description of Artificial Sequence: Synthetic oligonucleotide
caugucgcccaaccuuaaa

SEQ ID NO: 968318 - RNA, 19 nt, Artificial Sequence
  Description of Artificial Sequence: Synthetic oligonucleotide
cuggcccuagcauucacuu

SEQ ID NO: 968319 - RNA, 19 nt, Artificial Sequence
  Description of Artificial Sequence: Synthetic oligonucleotide
guaugucuguguaucuaau

SEQ ID NO: 968320 - RNA, 19 nt, Artificial Sequence
  Description of Artificial Sequence: Synthetic oligonucleotide
ggaauccgaggaauuucuc

SEQ ID NO: 968321 - RNA, 19 nt, Artificial Sequence
  Description of Artificial Sequence: Synthetic oligonucleotide
gcauuccugugaguugggc

SEQ ID NO: 968322 - RNA, 19 nt, Artificial Sequence
  Description of Artificial Sequence: Synthetic oligonucleotide
ccgaaauuagagcgcguga

SEQ ID NO: 968323 - RNA, 19 nt, Artificial Sequence
  Description of Artificial Sequence: Synthetic oligonucleotide
cgucagucagguaaggucu

SEQ ID NO: 968324 - RNA, 19 nt, Artificial Sequence
  Description of Artificial Sequence: Synthetic oligonucleotide
gcccuccucuuucuacgag

SEQ ID NO: 968325 - RNA, 19 nt, Artificial Sequence
  Description of Artificial Sequence: Synthetic oligonucleotide
cacguucucccugauuugu

SEQ ID NO: 968326 - RNA, 19 nt, Artificial Sequence
  Description of Artificial Sequence: Synthetic oligonucleotide
gucgucagucagguaaggu

SEQ ID NO: 968327 - RNA, 19 nt, Artificial Sequence
  Description of Artificial Sequence: Synthetic oligonucleotide
acuaccugccugaguuuua

SEQ ID NO: 968328 - RNA, 19 nt, Artificial Sequence
  Description of Artificial Sequence: Synthetic oligonucleotide
acaugucgcccaaccuuaa

SEQ ID NO: 968329 - RNA, 19 nt, Artificial Sequence
  Description of Artificial Sequence: Synthetic oligonucleotide
gccucgguuuuguuaccuc

SEQ ID NO: 968330 - RNA, 19 nt, Artificial Sequence
  Description of Artificial Sequence: Synthetic oligonucleotide
cuggugaaguagaguacuu

SEQ ID NO: 968331 - RNA, 19 nt, Artificial Sequence
  Description of Artificial Sequence: Synthetic oligonucleotide
ccuacuggagaaauaucuu

SEQ ID NO: 968332 - RNA, 19 nt, Artificial Sequence
  Description of Artificial Sequence: Synthetic oligonucleotide
cgaauuaugucaccaguuu

SEQ ID NO: 968333 - RNA, 19 nt, Artificial Sequence
  Description of Artificial Sequence: Synthetic oligonucleotide
cuccuauaacuagaugcuu

SEQ ID NO: 968334 - RNA, 19 nt, Artificial Sequence
  Description of Artificial Sequence: Synthetic oligonucleotide
ccaagaguaguccgaacuu

SEQ ID NO: 968335 - RNA, 19 nt, Artificial Sequence
  Description of Artificial Sequence: Synthetic oligonucleotide
gcuuuucgguuuugcuacu

SEQ ID NO: 968336 - RNA, 19 nt, Artificial Sequence
  Description of Artificial Sequence: Synthetic oligonucleotide
cuaccagagcuuccacauu

SEQ ID NO: 968337 - RNA, 19 nt, Artificial Sequence
  Description of Artificial Sequence: Synthetic oligonucleotide
gucagucagguaaggucuu

SEQ ID NO: 968338 - RNA, 19 nt, Artificial Sequence
  Description of Artificial Sequence: Synthetic oligonucleotide
gcgcgugacuaagcaggug

SEQ ID NO: 968339 - RNA, 19 nt, Artificial Sequence
  Description of Artificial Sequence: Synthetic oligonucleotide
cgcccaaccuuaaaauaau

SEQ ID NO: 968340 - RNA, 19 nt, Artificial Sequence
  Description of Artificial Sequence: Synthetic oligonucleotide
cuggagccucgguuuuguu

SEQ ID NO: 968341 - RNA, 19 nt, Artificial Sequence
  Description of Artificial Sequence: Synthetic oligonucleotide
ccgugagauuaaacaguau

SEQ ID NO: 968342 - RNA, 19 nt, Artificial Sequence
  Description of Artificial Sequence: Synthetic oligonucleotide
gccucucauuaaagauggu

SEQ ID NO: 968343 - RNA, 19 nt, Artificial Sequence
  Description of Artificial Sequence: Synthetic oligonucleotide
acuagugacacguagauuc

SEQ ID NO: 968344 - RNA, 19 nt, Artificial Sequence
  Description of Artificial Sequence: Synthetic oligonucleotide
agagauuuaucguugacgc

SEQ ID NO: 968345 - RNA, 19 nt, Artificial Sequence
  Description of Artificial Sequence: Synthetic oligonucleotide
agcuaauucaaacagugac

SEQ ID NO: 968346 - RNA, 19 nt, Artificial Sequence
  Description of Artificial Sequence: Synthetic oligonucleotide
agauuuaucguugacgcgc

SEQ ID NO: 968347 - RNA, 19 nt, Artificial Sequence
  Description of Artificial Sequence: Synthetic oligonucleotide
ugagcuaauucaaacagug

SEQ ID NO: 968348 - RNA, 19 nt, Artificial Sequence
  Description of Artificial Sequence: Synthetic oligonucleotide
aagugcacgugucugauuc

SEQ ID NO: 968349 - RNA, 19 nt, Artificial Sequence
  Description of Artificial Sequence: Synthetic oligonucleotide
aaagugcugguuugcaccc

SEQ ID NO: 968350 - RNA, 19 nt, Artificial Sequence
  Description of Artificial Sequence: Synthetic oligonucleotide
ucaaacagugaccauagac

SEQ ID NO: 968351 - RNA, 19 nt, Artificial Sequence
  Description of Artificial Sequence: Synthetic oligonucleotide
accaccacgguacuggucc

SEQ ID NO: 968352 - RNA, 19 nt, Artificial Sequence
  Description of Artificial Sequence: Synthetic oligonucleotide
gauguagaugccaaggccg

SEQ ID NO: 968353 - RNA, 19 nt, Artificial Sequence
  Description of Artificial Sequence: Synthetic oligonucleotide
gaacuggcaauccacuucg

SEQ ID NO: 968354 - RNA, 19 nt, Artificial Sequence
  Description of Artificial Sequence: Synthetic oligonucleotide
ugugcugcggcccuguggg

SEQ ID NO: 968355 - RNA, 19 nt, Artificial Sequence
  Description of Artificial Sequence: Synthetic oligonucleotide
uauugagcuaauucaaaca

SEQ ID NO: 968356 - RNA, 19 nt, Artificial Sequence
  Description of Artificial Sequence: Synthetic oligonucleotide
ucuggguuaaccaggggcc

SEQ ID NO: 968357 - RNA, 19 nt, Artificial Sequence
  Description of Artificial Sequence: Synthetic oligonucleotide
gaucgugagacccagggac

SEQ ID NO: 968358 - RNA, 19 nt, Artificial Sequence
  Description of Artificial Sequence: Synthetic oligonucleotide
gaugugguuggugacauag

SEQ ID NO: 968359 - RNA, 19 nt, Artificial Sequence
  Description of Artificial Sequence: Synthetic oligonucleotide
uacgcguugaggcagugag

SEQ ID NO: 968360 - RNA, 19 nt, Artificial Sequence
  Description of Artificial Sequence: Synthetic oligonucleotide
ugucugauuccccaggcug

SEQ ID NO: 968361 - RNA, 19 nt, Artificial Sequence
  Description of Artificial Sequence: Synthetic oligonucleotide
uuggcaugggagauggagg

SEQ ID NO: 968362 - RNA, 19 nt, Artificial Sequence
  Description of Artificial Sequence: Synthetic oligonucleotide
agguaguacaucauggugg

SEQ ID NO: 968363 - RNA, 19 nt, Artificial Sequence
  Description of Artificial Sequence: Synthetic oligonucleotide
gacacguagauucccacgc

SEQ ID NO: 968364 - RNA, 19 nt, Artificial Sequence
  Description of Artificial Sequence: Synthetic oligonucleotide
gugaccauagaccagggac

SEQ ID NO: 968365 - RNA, 19 nt, Artificial Sequence
  Description of Artificial Sequence: Synthetic oligonucleotide
uuaucguugacgcgcagaa

SEQ ID NO: 968366 - RNA, 19 nt, Artificial Sequence
  Description of Artificial Sequence: Synthetic oligonucleotide
ucgucaugcaagaugcuga

SEQ ID NO: 968367 - RNA, 19 nt, Artificial Sequence
  Description of Artificial Sequence: Synthetic oligonucleotide
gaaagcuccgcccauucac

SEQ ID NO: 968368 - RNA, 19 nt, Artificial Sequence
  Description of Artificial Sequence: Synthetic oligonucleotide
ugacacguagauucccacg

SEQ ID NO: 968369 - RNA, 19 nt, Artificial Sequence
  Description of Artificial Sequence: Synthetic oligonucleotide
agagauggcaccaccacgg

SEQ ID NO: 968370 - RNA, 19 nt, Artificial Sequence
  Description of Artificial Sequence: Synthetic oligonucleotide
auccggacgguguaccucc

SEQ ID NO: 968371 - RNA, 19 nt, Artificial Sequence
  Description of Artificial Sequence: Synthetic oligonucleotide
cugagaagacaacuuggcg

SEQ ID NO: 968372 - RNA, 19 nt, Artificial Sequence
  Description of Artificial Sequence: Synthetic oligonucleotide
uucgucugguccacggugg

SEQ ID NO: 968373 - RNA, 19 nt, Artificial Sequence
  Description of Artificial Sequence: Synthetic oligonucleotide
uugagcuaauucaaacagu

SEQ ID NO: 968374 - RNA, 19 nt, Artificial Sequence
  Description of Artificial Sequence: Synthetic oligonucleotide
gacgcgcagaaucuggucc

SEQ ID NO: 968375 - RNA, 19 nt, Artificial Sequence
  Description of Artificial Sequence: Synthetic oligonucleotide
augaccagucgcaacaugg

SEQ ID NO: 968376 - RNA, 19 nt, Artificial Sequence
  Description of Artificial Sequence: Synthetic oligonucleotide
uccacuagugacacguaga

SEQ ID NO: 968377 - RNA, 19 nt, Artificial Sequence
  Description of Artificial Sequence: Synthetic oligonucleotide
  modified_base (3)..(3): a, c, u, g, unknown or other
ugngguggggauugggacc

SEQ ID NO: 968378 - RNA, 19 nt, Artificial Sequence
  Description of Artificial Sequence: Synthetic oligonucleotide
cacguuggcagacagcagc

SEQ ID NO: 968379 - RNA, 19 nt, Artificial Sequence
  Description of Artificial Sequence: Synthetic oligonucleotide
cuuggcguguguauugagc

SEQ ID NO: 968380 - RNA, 19 nt, Artificial Sequence
  Description of Artificial Sequence: Synthetic oligonucleotide
agcagacgccgcuugaccg

SEQ ID NO: 968381 - RNA, 19 nt, Artificial Sequence
  Description of Artificial Sequence: Synthetic oligonucleotide
uguaaauccuggcuuguuu

SEQ ID NO: 968382 - RNA, 19 nt, Artificial Sequence
  Description of Artificial Sequence: Synthetic oligonucleotide
ugucccuucuucugugagg

SEQ ID NO: 968383 - RNA, 19 nt, Artificial Sequence
  Description of Artificial Sequence: Synthetic oligonucleotide
ugggccuuuguaaauccug

SEQ ID NO: 968384 - RNA, 19 nt, Artificial Sequence
  Description of Artificial Sequence: Synthetic oligonucleotide
uaaccaggggccagguggg

SEQ ID NO: 968385 - RNA, 19 nt, Artificial Sequence
  Description of Artificial Sequence: Synthetic oligonucleotide
ugcugguuugcacccacag

SEQ ID NO: 968386 - RNA, 19 nt, Artificial Sequence
  Description of Artificial Sequence: Synthetic oligonucleotide
uguagaugugguuggugac

SEQ ID NO: 968387 - RNA, 19 nt, Artificial Sequence
  Description of Artificial Sequence: Synthetic oligonucleotide
uuguuugucccuucuucug

SEQ ID NO: 968388 - RNA, 19 nt, Artificial Sequence
  Description of Artificial Sequence: Synthetic oligonucleotide
gaggcguuuuccccaaucc

SEQ ID NO: 968389 - RNA, 19 nt, Artificial Sequence
  Description of Artificial Sequence: Synthetic oligonucleotide
uucacaucaggcucgcuau

SEQ ID NO: 968390 - RNA, 19 nt, Artificial Sequence
  Description of Artificial Sequence: Synthetic oligonucleotide
aggcguuuuccccaauccg

SEQ ID NO: 968391 - RNA, 19 nt, Artificial Sequence
  Description of Artificial Sequence: Synthetic oligonucleotide
uccaacguccuucacuguc

SEQ ID NO: 968392 - RNA, 19 nt, Artificial Sequence
  Description of Artificial Sequence: Synthetic oligonucleotide
gugggcuucgauuccgugg

SEQ ID NO: 968393 - RNA, 19 nt, Artificial Sequence
  Description of Artificial Sequence: Synthetic oligonucleotide
ucgaagacguugcggcgcg

SEQ ID NO: 968394 - RNA, 19 nt, Artificial Sequence
  Description of Artificial Sequence: Synthetic oligonucleotide
cacgccgucguuccgaacc

SEQ ID NO: 968395 - RNA, 19 nt, Artificial Sequence
  Description of Artificial Sequence: Synthetic oligonucleotide
caaggccguacucagcucc

SEQ ID NO: 968396 - RNA, 19 nt, Artificial Sequence
  Description of Artificial Sequence: Synthetic oligonucleotide
uuuaucguugacgcgcaga

SEQ ID NO: 968397 - RNA, 19 nt, Artificial Sequence
  Description of Artificial Sequence: Synthetic oligonucleotide
cacguagauucccacgccg

SEQ ID NO: 968398 - RNA, 19 nt, Artificial Sequence
  Description of Artificial Sequence: Synthetic oligonucleotide
ugaaacccaagcccucgug

SEQ ID NO: 968399 - RNA, 19 nt, Artificial Sequence
  Description of Artificial Sequence: Synthetic oligonucleotide
gauacgcccagcugaguac

SEQ ID NO: 968400 - RNA, 19 nt, Artificial Sequence
  Description of Artificial Sequence: Synthetic oligonucleotide
aagacaacuuggcgugugu

SEQ ID NO: 968401 - RNA, 19 nt, Artificial Sequence
  Description of Artificial Sequence: Synthetic oligonucleotide
guagauucccacgccgucg

SEQ ID NO: 968402 - RNA, 19 nt, Artificial Sequence
  Description of Artificial Sequence: Synthetic oligonucleotide
gcuaauucaaacagugacc

SEQ ID NO: 968403 - RNA, 19 nt, Artificial Sequence
  Description of Artificial Sequence: Synthetic oligonucleotide
guaacccuucccuuccucc

SEQ ID NO: 968404 - RNA, 19 nt, Artificial Sequence
  Description of Artificial Sequence: Synthetic oligonucleotide
  modified_base (8)..(8): a, c, u, g, unknown or other
ucaggugngguggggauug

SEQ ID NO: 968405 - RNA, 19 nt, Artificial Sequence
  Description of Artificial Sequence: Synthetic oligonucleotide
ccgggcuagagauuuaucg

SEQ ID NO: 968406 - RNA, 19 nt, Artificial Sequence
  Description of Artificial Sequence: Synthetic oligonucleotide
gaugccaaggccguacuca

SEQ ID NO: 968407 - RNA, 19 nt, Artificial Sequence
  Description of Artificial Sequence: Synthetic oligonucleotide
aggcucgcuauccggacgg

SEQ ID NO: 968408 - RNA, 19 nt, Artificial Sequence
  Description of Artificial Sequence: Synthetic oligonucleotide
ucguugacgcgcagaaucu

SEQ ID NO: 968409 - RNA, 19 nt, Artificial Sequence
  Description of Artificial Sequence: Synthetic oligonucleotide
guugacgcgcagaaucugg

SEQ ID NO: 968410 - RNA, 19 nt, Artificial Sequence
  Description of Artificial Sequence: Synthetic oligonucleotide
acccguaacccuucccuuc

SEQ ID NO: 968411 - RNA, 19 nt, Artificial Sequence
  Description of Artificial Sequence: Synthetic oligonucleotide
uuuguaaauccuggcuugu

SEQ ID NO: 968412 - RNA, 19 nt, Artificial Sequence
  Description of Artificial Sequence: Synthetic oligonucleotide
uagauucccacgccgucgu

SEQ ID NO: 968413 - RNA, 19 nt, Artificial Sequence
  Description of Artificial Sequence: Synthetic oligonucleotide
gaaucugguccccgacccg

SEQ ID NO: 968414 - RNA, 19 nt, Artificial Sequence
  Description of Artificial Sequence: Synthetic oligonucleotide
aucgugagacccagggacc

SEQ ID NO: 968415 - RNA, 19 nt, Artificial Sequence
  Description of Artificial Sequence: Synthetic oligonucleotide
gaagacguugcggcgcgcg

SEQ ID NO: 968416 - RNA, 19 nt, Artificial Sequence
  Description of Artificial Sequence: Synthetic oligonucleotide
guguagggcacuccuucgg

SEQ ID NO: 968417 - RNA, 19 nt, Artificial Sequence
  Description of Artificial Sequence: Synthetic oligonucleotide
  modified_base (2)..(2): a, c, u, g, unknown or other
gngguggggauugggaccc

SEQ ID NO: 968418 - RNA, 19 nt, Artificial Sequence
  Description of Artificial Sequence: Synthetic oligonucleotide
caacuuggcguguguauug

SEQ ID NO: 968419 - RNA, 19 nt, Artificial Sequence
  Description of Artificial Sequence: Synthetic oligonucleotide
cuucgucugguccacggug

SEQ ID NO: 968420 - RNA, 19 nt, Artificial Sequence
  Description of Artificial Sequence: Synthetic oligonucleotide
caguggugggcuucgauuc

SEQ ID NO: 968421 - RNA, 19 nt, Artificial Sequence
  Description of Artificial Sequence: Synthetic oligonucleotide
cuccacuagugacacguag

SEQ ID NO: 968422 - RNA, 19 nt, Artificial Sequence
  Description of Artificial Sequence: Synthetic oligonucleotide
gaugaccagucgcaacaug

SEQ ID NO: 968423 - RNA, 19 nt, Artificial Sequence
  Description of Artificial Sequence: Synthetic oligonucleotide
aguguggaggcugugcgug

SEQ ID NO: 968424 - RNA, 19 nt, Artificial Sequence
  Description of Artificial Sequence: Synthetic oligonucleotide
uugacgcgcagaaucuggu

SEQ ID NO: 968425 - RNA, 19 nt, Artificial Sequence
  Description of Artificial Sequence: Synthetic oligonucleotide
ucgugagacccagggaccg

SEQ ID NO: 968426 - RNA, 19 nt, Artificial Sequence
  Description of Artificial Sequence: Synthetic oligonucleotide
ggcguuuuccccaauccgg

SEQ ID NO: 968427 - RNA, 19 nt, Artificial Sequence
  Description of Artificial Sequence: Synthetic oligonucleotide
ugguccccgacccguaacc

SEQ ID NO: 968428 - RNA, 19 nt, Artificial Sequence
  Description of Artificial Sequence: Synthetic oligonucleotide
gaagacaacuuggcgugug

SEQ ID NO: 968429 - RNA, 19 nt, Artificial Sequence
  Description of Artificial Sequence: Synthetic oligonucleotide
guacacagacagcaccagc

SEQ ID NO: 968430 - RNA, 19 nt, Artificial Sequence
  Description of Artificial Sequence: Synthetic oligonucleotide
agaugccaaggccguacuc

SEQ ID NO: 968431 - RNA, 19 nt, Artificial Sequence
  Description of Artificial Sequence: Synthetic oligonucleotide
gaggggaugugcugcggcc

SEQ ID NO: 968432 - RNA, 19 nt, Artificial Sequence
  Description of Artificial Sequence: Synthetic oligonucleotide
uccgggaacuggcaaucca

SEQ ID NO: 968433 - RNA, 19 nt, Artificial Sequence
  Description of Artificial Sequence: Synthetic oligonucleotide
acgccgucguuccgaaccc

SEQ ID NO: 968434 - RNA, 19 nt, Artificial Sequence
  Description of Artificial Sequence: Synthetic oligonucleotide
cucgucaugcaagaugcug

SEQ ID NO: 968435 - RNA, 19 nt, Artificial Sequence
  Description of Artificial Sequence: Synthetic oligonucleotide
ugcacgugucugauucccc

SEQ ID NO: 968436 - RNA, 19 nt, Artificial Sequence
  Description of Artificial Sequence: Synthetic oligonucleotide
gauuuaucguugacgcgca

SEQ ID NO: 968437 - RNA, 19 nt, Artificial Sequence
  Description of Artificial Sequence: Synthetic oligonucleotide
uccgcgugggucacccggg

SEQ ID NO: 968438 - RNA, 19 nt, Artificial Sequence
  Description of Artificial Sequence: Synthetic oligonucleotide
aggcguaaaugggagagga

SEQ ID NO: 968439 - RNA, 19 nt, Artificial Sequence
  Description of Artificial Sequence: Synthetic oligonucleotide
aacuuggcguguguauuga

SEQ ID NO: 968440 - RNA, 19 nt, Artificial Sequence
  Description of Artificial Sequence: Synthetic oligonucleotide
uccacucugcaggaggugu

SEQ ID NO: 968441 - RNA, 19 nt, Artificial Sequence
  Description of Artificial Sequence: Synthetic oligonucleotide
gaggcguaaaugggagagg

SEQ ID NO: 968442 - RNA, 19 nt, Artificial Sequence
  Description of Artificial Sequence: Synthetic oligonucleotide
cacggugguacgagcgugg

SEQ ID NO: 968443 - RNA, 19 nt, Artificial Sequence
  Description of Artificial Sequence: Synthetic oligonucleotide
uagugacacguagauuccc

SEQ ID NO: 968444 - RNA, 19 nt, Artificial Sequence
  Description of Artificial Sequence: Synthetic oligonucleotide
gguguagggcacuccuucg

SEQ ID NO: 968445 - RNA, 19 nt, Artificial Sequence
  Description of Artificial Sequence: Synthetic oligonucleotide
uagaugccaaggccguacu

SEQ ID NO: 968446 - RNA, 19 nt, Artificial Sequence
  Description of Artificial Sequence: Synthetic oligonucleotide
cauucucaugcugucucag

SEQ ID NO: 968447 - RNA, 19 nt, Artificial Sequence
  Description of Artificial Sequence: Synthetic oligonucleotide
accagucgcaacaugggca

SEQ ID NO: 968448 - RNA, 19 nt, Artificial Sequence
  Description of Artificial Sequence: Synthetic oligonucleotide
auuuaucguugacgcgcag

SEQ ID NO: 968449 - RNA, 19 nt, Artificial Sequence
  Description of Artificial Sequence: Synthetic oligonucleotide
gcgugguacgcguugaggc

SEQ ID NO: 968450 - RNA, 19 nt, Artificial Sequence
  Description of Artificial Sequence: Synthetic oligonucleotide
aagacguugcggcgcgcgu

SEQ ID NO: 968451 - RNA, 19 nt, Artificial Sequence
  Description of Artificial Sequence: Synthetic oligonucleotide
ucaggcucgcuauccggac

SEQ ID NO: 968452 - RNA, 19 nt, Artificial Sequence
  Description of Artificial Sequence: Synthetic oligonucleotide
agugacacguagauuccca

SEQ ID NO: 968453 - RNA, 19 nt, Artificial Sequence
  Description of Artificial Sequence: Synthetic oligonucleotide
gauugggaccccgagggaa

SEQ ID NO: 968454 - RNA, 19 nt, Artificial Sequence
  Description of Artificial Sequence: Synthetic oligonucleotide
gugacacguagauucccac

SEQ ID NO: 968455 - RNA, 19 nt, Artificial Sequence
  Description of Artificial Sequence: Synthetic oligonucleotide
gccgggaugacuugagcag

SEQ ID NO: 968456 - RNA, 19 nt, Artificial Sequence
  Description of Artificial Sequence: Synthetic oligonucleotide
gucgaagacguugcggcgc

SEQ ID NO: 968457 - RNA, 19 nt, Artificial Sequence
  Description of Artificial Sequence: Synthetic oligonucleotide
gagcccgaacuucauucac

SEQ ID NO: 968458 - RNA, 19 nt, Artificial Sequence
  Description of Artificial Sequence: Synthetic oligonucleotide
ucggccguauacuggucga

SEQ ID NO: 968459 - RNA, 19 nt, Artificial Sequence
  Description of Artificial Sequence: Synthetic oligonucleotide
aaacccugcugagcuggag

SEQ ID NO: 968460 - RNA, 19 nt, Artificial Sequence
  Description of Artificial Sequence: Synthetic oligonucleotide
gucucuccggcauccacac

SEQ ID NO: 968461 - RNA, 19 nt, Artificial Sequence
  Description of Artificial Sequence: Synthetic oligonucleotide
ccagguguagaugugguug

SEQ ID NO: 968462 - RNA, 19 nt, Artificial Sequence
  Description of Artificial Sequence: Synthetic oligonucleotide
gagcuaauucaaacaguga

SEQ ID NO: 968463 - RNA, 19 nt, Artificial Sequence
  Description of Artificial Sequence: Synthetic oligonucleotide
acuucgucugguccacggu

SEQ ID NO: 968464 - RNA, 19 nt, Artificial Sequence
  Description of Artificial Sequence: Synthetic oligonucleotide
agcuccgcccauucaccuc

SEQ ID NO: 968465 - RNA, 19 nt, Artificial Sequence
  Description of Artificial Sequence: Synthetic oligonucleotide
gauucccacgccgucguuc

SEQ ID NO: 968466 - RNA, 19 nt, Artificial Sequence
  Description of Artificial Sequence: Synthetic oligonucleotide
ucggaucgugagacccagg

SEQ ID NO: 968467 - RNA, 19 nt, Artificial Sequence
  Description of Artificial Sequence: Synthetic oligonucleotide
cagcagacgccgcuugacc

SEQ ID NO: 968468 - RNA, 19 nt, Artificial Sequence
  Description of Artificial Sequence: Synthetic oligonucleotide
ggggauugggaccccgagg

SEQ ID NO: 968469 - RNA, 19 nt, Artificial Sequence
  Description of Artificial Sequence: Synthetic oligonucleotide
auccgggaacuggcaaucc

SEQ ID NO: 968470 - RNA, 19 nt, Artificial Sequence
  Description of Artificial Sequence: Synthetic oligonucleotide
ccagucgcaacaugggcag

SEQ ID NO: 968471 - RNA, 19 nt, Artificial Sequence
  Description of Artificial Sequence: Synthetic oligonucleotide
gagucugcccacugucuga

SEQ ID NO: 968472 - RNA, 19 nt, Artificial Sequence
  Description of Artificial Sequence: Synthetic oligonucleotide
cuucaccgccucgucaugc

SEQ ID NO: 968473 - RNA, 19 nt, Artificial Sequence
  Description of Artificial Sequence: Synthetic oligonucleotide
guuaaccaggggccaggug

SEQ ID NO: 968474 - RNA, 19 nt, Artificial Sequence
  Description of Artificial Sequence: Synthetic oligonucleotide
ucacccgggcuagagauuu

SEQ ID NO: 968475 - RNA, 19 nt, Artificial Sequence
  Description of Artificial Sequence: Synthetic oligonucleotide
caggcucgcuauccggacg

SEQ ID NO: 968476 - RNA, 19 nt, Artificial Sequence
  Description of Artificial Sequence: Synthetic oligonucleotide
ucgaccugaggugcuggcc

SEQ ID NO: 968477 - RNA, 19 nt, Artificial Sequence
  Description of Artificial Sequence: Synthetic oligonucleotide
ugacgcgcagaaucugguc

SEQ ID NO: 968478 - RNA, 19 nt, Artificial Sequence
  Description of Artificial Sequence: Synthetic oligonucleotide
gugcacgugucugauuccc

SEQ ID NO: 968479 - RNA, 19 nt, Artificial Sequence
  Description of Artificial Sequence: Synthetic oligonucleotide
ucuccggcauccacaccac

SEQ ID NO: 968480 - RNA, 19 nt, Artificial Sequence
  Description of Artificial Sequence: Synthetic oligonucleotide
agggauacgcccagcugag

SEQ ID NO: 968481 - RNA, 19 nt, Artificial Sequence
  Description of Artificial Sequence: Synthetic oligonucleotide
cuugaccgggcuguccagc

SEQ ID NO: 968482 - RNA, 19 nt, Artificial Sequence
  Description of Artificial Sequence: Synthetic oligonucleotide
auacgcccagcugaguaca

SEQ ID NO: 968483 - RNA, 19 nt, Artificial Sequence
  Description of Artificial Sequence: Synthetic oligonucleotide
gcuagagauuuaucguuga

SEQ ID NO: 968484 - RNA, 19 nt, Artificial Sequence
  Description of Artificial Sequence: Synthetic oligonucleotide
cucggaucgugagacccag

SEQ ID NO: 968485 - RNA, 19 nt, Artificial Sequence
  Description of Artificial Sequence: Synthetic oligonucleotide
ggccuuuguaaauccuggc

SEQ ID NO: 968486 - RNA, 19 nt, Artificial Sequence
  Description of Artificial Sequence: Synthetic oligonucleotide
uauccggacgguguaccuc

SEQ ID NO: 968487 - RNA, 19 nt, Artificial Sequence
  Description of Artificial Sequence: Synthetic oligonucleotide
uccuucggucauucucaug

SEQ ID NO: 968488 - RNA, 19 nt, Artificial Sequence
  Description of Artificial Sequence: Synthetic oligonucleotide
gcagacgccgcuugaccgg

SEQ ID NO: 968489 - RNA, 19 nt, Artificial Sequence
  Description of Artificial Sequence: Synthetic oligonucleotide
uccacuucgucugguccac

SEQ ID NO: 968490 - RNA, 19 nt, Artificial Sequence
  Description of Artificial Sequence: Synthetic oligonucleotide
cuuccgagaccugggguug

SEQ ID NO: 968491 - RNA, 19 nt, Artificial Sequence
  Description of Artificial Sequence: Synthetic oligonucleotide
cugccucgaccugaggugc

SEQ ID NO: 968492 - RNA, 19 nt, Artificial Sequence
  Description of Artificial Sequence: Synthetic oligonucleotide
ccucacuuagagucugccc

SEQ ID NO: 968493 - RNA, 19 nt, Artificial Sequence
  Description of Artificial Sequence: Synthetic oligonucleotide
gcguuuuccccaauccggg

SEQ ID NO: 968494 - RNA, 19 nt, Artificial Sequence
  Description of Artificial Sequence: Synthetic oligonucleotide
uccccgacccguaacccuu

SEQ ID NO: 968495 - RNA, 19 nt, Artificial Sequence
  Description of Artificial Sequence: Synthetic oligonucleotide
acgagcguggggcagccuu

SEQ ID NO: 968496 - RNA, 19 nt, Artificial Sequence
  Description of Artificial Sequence: Synthetic oligonucleotide
uuccgagaccugggguugg

SEQ ID NO: 968497 - RNA, 19 nt, Artificial Sequence
  Description of Artificial Sequence: Synthetic oligonucleotide
guacaucaugguggcacgc

SEQ ID NO: 968498 - RNA, 19 nt, Artificial Sequence
  Description of Artificial Sequence: Synthetic oligonucleotide
uuguaaauccuggcuuguu

SEQ ID NO: 968499 - RNA, 19 nt, Artificial Sequence
  Description of Artificial Sequence: Synthetic oligonucleotide
cggaucgugagacccaggg

SEQ ID NO: 968500 - RNA, 19 nt, Artificial Sequence
  Description of Artificial Sequence: Synthetic oligonucleotide
ugguacgagcguggggcag

SEQ ID NO: 968501 - RNA, 19 nt, Artificial Sequence
  Description of Artificial Sequence: Synthetic oligonucleotide
ugguacgcguugaggcagu

SEQ ID NO: 968502 - RNA, 19 nt, Artificial Sequence
  Description of Artificial Sequence: Synthetic oligonucleotide
ucgcuauccggacggugua

SEQ ID NO: 968503 - RNA, 19 nt, Artificial Sequence
  Description of Artificial Sequence: Synthetic oligonucleotide
uggucggagcgcgggauga

SEQ ID NO: 968504 - RNA, 19 nt, Artificial Sequence
  Description of Artificial Sequence: Synthetic oligonucleotide
acguagauucccacgccgu

SEQ ID NO: 968505 - RNA, 19 nt, Artificial Sequence
  Description of Artificial Sequence: Synthetic oligonucleotide
acggugguacgagcguggg

SEQ ID NO: 968506 - RNA, 19 nt, Artificial Sequence
  Description of Artificial Sequence: Synthetic oligonucleotide
cguauacuggucgaagagc

SEQ ID NO: 968507 - RNA, 19 nt, Artificial Sequence
  Description of Artificial Sequence: Synthetic oligonucleotide
aaggccguacucagcucca

SEQ ID NO: 968508 - RNA, 19 nt, Artificial Sequence
  Description of Artificial Sequence: Synthetic oligonucleotide
uccccaaccuugagcccac

SEQ ID NO: 968509 - RNA, 19 nt, Artificial Sequence
  Description of Artificial Sequence: Synthetic oligonucleotide
agcccgaacuucauucaca

SEQ ID NO: 968510 - RNA, 19 nt, Artificial Sequence
  Description of Artificial Sequence: Synthetic oligonucleotide
cucgcuauccggacggugu

SEQ ID NO: 968511 - RNA, 19 nt, Artificial Sequence
  Description of Artificial Sequence: Synthetic oligonucleotide
gaggugccgggaugacuug

SEQ ID NO: 968512 - RNA, 19 nt, Artificial Sequence
  Description of Artificial Sequence: Synthetic oligonucleotide
  modified_base (9)..(9): a, c, u, g, unknown or other
uucaggugngguggggauu

SEQ ID NO: 968513 - RNA, 19 nt, Artificial Sequence
  Description of Artificial Sequence: Synthetic oligonucleotide
ggauacgcccagcugagua

SEQ ID NO: 968514 - RNA, 19 nt, Artificial Sequence
  Description of Artificial Sequence: Synthetic oligonucleotide
cuguggguccacccaggug

SEQ ID NO: 968515 - RNA, 19 nt, Artificial Sequence
  Description of Artificial Sequence: Synthetic oligonucleotide
agaagacaacuuggcgugu

SEQ ID NO: 968516 - RNA, 19 nt, Artificial Sequence
  Description of Artificial Sequence: Synthetic oligonucleotide
gaccauagaccagggaccu

SEQ ID NO: 968517 - RNA, 19 nt, Artificial Sequence
  Description of Artificial Sequence: Synthetic oligonucleotide
agacguugcggcgcgcgug

SEQ ID NO: 968518 - RNA, 19 nt, Artificial Sequence
  Description of Artificial Sequence: Synthetic oligonucleotide
ggacaaagugcugguuugc

SEQ ID NO: 968519 - RNA, 19 nt, Artificial Sequence
  Description of Artificial Sequence: Synthetic oligonucleotide
ggcuucgauuccguggugc

SEQ ID NO: 968520 - RNA, 19 nt, Artificial Sequence
  Description of Artificial Sequence: Synthetic oligonucleotide
  modified_base (5)..(5): a, c, u, g, unknown or other
ggugngguggggauuggga

SEQ ID NO: 968521 - RNA, 19 nt, Artificial Sequence
  Description of Artificial Sequence: Synthetic oligonucleotide
gccguauacuggucgaaga

SEQ ID NO: 968522 - RNA, 19 nt, Artificial Sequence
  Description of Artificial Sequence: Synthetic oligonucleotide
gucgcaacaugggcagcag

SEQ ID NO: 968523 - RNA, 19 nt, Artificial Sequence
  Description of Artificial Sequence: Synthetic oligonucleotide
cagacgccgcuugaccggg

SEQ ID NO: 968524 - RNA, 19 nt, Artificial Sequence
  Description of Artificial Sequence: Synthetic oligonucleotide
ccgggaacuggcaauccac

SEQ ID NO: 968525 - RNA, 19 nt, Artificial Sequence
  Description of Artificial Sequence: Synthetic oligonucleotide
gcuuggucauccagaagug

SEQ ID NO: 968526 - RNA, 19 nt, Artificial Sequence
  Description of Artificial Sequence: Synthetic oligonucleotide
uaucguugacgcgcagaau

SEQ ID NO: 968527 - RNA, 19 nt, Artificial Sequence
  Description of Artificial Sequence: Synthetic oligonucleotide
gcuauccggacgguguacc

SEQ ID NO: 968528 - RNA, 19 nt, Artificial Sequence
  Description of Artificial Sequence: Synthetic oligonucleotide
agacaacuuggcgugugua

SEQ ID NO: 968529 - RNA, 19 nt, Artificial Sequence
  Description of Artificial Sequence: Synthetic oligonucleotide
ggaggcguuuuccccaauc

SEQ ID NO: 968530 - RNA, 19 nt, Artificial Sequence
  Description of Artificial Sequence: Synthetic oligonucleotide
cccguaacccuucccuucc

SEQ ID NO: 968531 - RNA, 19 nt, Artificial Sequence
  Description of Artificial Sequence: Synthetic oligonucleotide
accauagaccagggaccuc

SEQ ID NO: 968532 - RNA, 19 nt, Artificial Sequence
  Description of Artificial Sequence: Synthetic oligonucleotide
ugccucgaccugaggugcu

SEQ ID NO: 968533 - RNA, 19 nt, Artificial Sequence
  Description of Artificial Sequence: Synthetic oligonucleotide
ggccguauacuggucgaag

SEQ ID NO: 968534 - RNA, 19 nt, Artificial Sequence
  Description of Artificial Sequence: Synthetic oligonucleotide
cccgcggaugcugaaaccc

SEQ ID NO: 968535 - RNA, 19 nt, Artificial Sequence
  Description of Artificial Sequence: Synthetic oligonucleotide
cugguccccgacccguaac

SEQ ID NO: 968536 - RNA, 19 nt, Artificial Sequence
  Description of Artificial Sequence: Synthetic oligonucleotide
gguacgagcguggggcagc

SEQ ID NO: 968537 - RNA, 19 nt, Artificial Sequence
  Description of Artificial Sequence: Synthetic oligonucleotide
ggcguaaaugggagaggag

SEQ ID NO: 968538 - RNA, 19 nt, Artificial Sequence
  Description of Artificial Sequence: Synthetic oligonucleotide
uccgagaccugggguuggc

SEQ ID NO: 968539 - RNA, 19 nt, Artificial Sequence
  Description of Artificial Sequence: Synthetic oligonucleotide
uccggacgguguaccucca

SEQ ID NO: 968540 - RNA, 19 nt, Artificial Sequence
  Description of Artificial Sequence: Synthetic oligonucleotide
ugcgugucuggggcagagc

SEQ ID NO: 968541 - RNA, 19 nt, Artificial Sequence
  Description of Artificial Sequence: Synthetic oligonucleotide
gugccgggcuuggucaucc

SEQ ID NO: 968542 - RNA, 19 nt, Artificial Sequence
  Description of Artificial Sequence: Synthetic oligonucleotide
ccagaaucugguccccaac

SEQ ID NO: 968543 - RNA, 19 nt, Artificial Sequence
  Description of Artificial Sequence: Synthetic oligonucleotide
ggugccgggaugacuugag

SEQ ID NO: 968544 - RNA, 19 nt, Artificial Sequence
  Description of Artificial Sequence: Synthetic oligonucleotide
agcuggucggagcgcggga

SEQ ID NO: 968545 - RNA, 19 nt, Artificial Sequence
  Description of Artificial Sequence: Synthetic oligonucleotide
gguccacggugguacgagc

SEQ ID NO: 968546 - RNA, 19 nt, Artificial Sequence
  Description of Artificial Sequence: Synthetic oligonucleotide
ccaacguccuucacuguca

SEQ ID NO: 968547 - RNA, 19 nt, Artificial Sequence
  Description of Artificial Sequence: Synthetic oligonucleotide
agcgccgugagcgccuggu

SEQ ID NO: 968548 - RNA, 19 nt, Artificial Sequence
  Description of Artificial Sequence: Synthetic oligonucleotide
gugguacgagcguggggca

SEQ ID NO: 968549 - RNA, 19 nt, Artificial Sequence
  Description of Artificial Sequence: Synthetic oligonucleotide
ggcccucggccguauacug

SEQ ID NO: 968550 - RNA, 19 nt, Artificial Sequence
  Description of Artificial Sequence: Synthetic oligonucleotide
ugcggcgcgcgugguacgc

SEQ ID NO: 968551 - RNA, 19 nt, Artificial Sequence
  Description of Artificial Sequence: Synthetic oligonucleotide
caauccgggaacuggcaau

SEQ ID NO: 968552 - RNA, 19 nt, Artificial Sequence
  Description of Artificial Sequence: Synthetic oligonucleotide
guacgagcguggggcagcc

SEQ ID NO: 968553 - RNA, 19 nt, Artificial Sequence
  Description of Artificial Sequence: Synthetic oligonucleotide
gguggggauugggaccccg

SEQ ID NO: 968554 - RNA, 19 nt, Artificial Sequence
  Description of Artificial Sequence: Synthetic oligonucleotide
cuggguuaaccaggggcca

SEQ ID NO: 968555 - RNA, 19 nt, Artificial Sequence
  Description of Artificial Sequence: Synthetic oligonucleotide
gucaugcaagaugcugaga

SEQ ID NO: 968556 - RNA, 19 nt, Artificial Sequence
  Description of Artificial Sequence: Synthetic oligonucleotide
acccgggcuagagauuuau

SEQ ID NO: 968557 - RNA, 19 nt, Artificial Sequence
  Description of Artificial Sequence: Synthetic oligonucleotide
gcgcgggaugaccagucgc

SEQ ID NO: 968558 - RNA, 19 nt, Artificial Sequence
  Description of Artificial Sequence: Synthetic oligonucleotide
aggugccgggaugacuuga

SEQ ID NO: 968559 - RNA, 19 nt, Artificial Sequence
  Description of Artificial Sequence: Synthetic oligonucleotide
cuggcgcacguuggcagac

SEQ ID NO: 968560 - RNA, 19 nt, Artificial Sequence
  Description of Artificial Sequence: Synthetic oligonucleotide
ccgggaugacuugagcagc

SEQ ID NO: 968561 - RNA, 19 nt, Artificial Sequence
  Description of Artificial Sequence: Synthetic oligonucleotide
cuccacucugcaggaggug

SEQ ID NO: 968562 - RNA, 19 nt, Artificial Sequence
  Description of Artificial Sequence: Synthetic oligonucleotide
gcuugaccgggcuguccag

SEQ ID NO: 968563 - RNA, 19 nt, Artificial Sequence
  Description of Artificial Sequence: Synthetic oligonucleotide
gccgugagcgccuggugca

SEQ ID NO: 968564 - RNA, 19 nt, Artificial Sequence
  Description of Artificial Sequence: Synthetic oligonucleotide
cuucggucauucucaugcu

SEQ ID NO: 968565 - RNA, 19 nt, Artificial Sequence
  Description of Artificial Sequence: Synthetic oligonucleotide
guaguacaucaugguggca

SEQ ID NO: 968566 - RNA, 19 nt, Artificial Sequence
  Description of Artificial Sequence: Synthetic oligonucleotide
ucgugggccuuggcgcgcc

SEQ ID NO: 968567 - RNA, 19 nt, Artificial Sequence
  Description of Artificial Sequence: Synthetic oligonucleotide
cggacgguguaccuccacc

SEQ ID NO: 968568 - RNA, 19 nt, Artificial Sequence
  Description of Artificial Sequence: Synthetic oligonucleotide
cuggaggcguuuuccccaa

SEQ ID NO: 968569 - RNA, 19 nt, Artificial Sequence
  Description of Artificial Sequence: Synthetic oligonucleotide
cuugagcccacugcuuucu

SEQ ID NO: 968570 - RNA, 19 nt, Artificial Sequence
  Description of Artificial Sequence: Synthetic oligonucleotide
acgcccagcugaguacaca

SEQ ID NO: 968571 - RNA, 19 nt, Artificial Sequence
  Description of Artificial Sequence: Synthetic oligonucleotide
gacccguaacccuucccuu

SEQ ID NO: 968572 - RNA, 19 nt, Artificial Sequence
  Description of Artificial Sequence: Synthetic oligonucleotide
cgccucgucaugcaagaug

SEQ ID NO: 968573 - RNA, 19 nt, Artificial Sequence
  Description of Artificial Sequence: Synthetic oligonucleotide
cuauccggacgguguaccu

SEQ ID NO: 968574 - RNA, 19 nt, Artificial Sequence
  Description of Artificial Sequence: Synthetic oligonucleotide
uggcgcacguuggcagaca

SEQ ID NO: 968575 - RNA, 19 nt, Artificial Sequence
  Description of Artificial Sequence: Synthetic oligonucleotide
agacgccgcuugaccgggc

SEQ ID NO: 968576 - RNA, 19 nt, Artificial Sequence
  Description of Artificial Sequence: Synthetic oligonucleotide
gacgccgcuugaccgggcu

SEQ ID NO: 968577 - RNA, 19 nt, Artificial Sequence
  Description of Artificial Sequence: Synthetic oligonucleotide
gguccccgacccguaaccc

SEQ ID NO: 968578 - RNA, 19 nt, Artificial Sequence
  Description of Artificial Sequence: Synthetic oligonucleotide
guacgcguugaggcaguga

SEQ ID NO: 968579 - RNA, 19 nt, Artificial Sequence
  Description of Artificial Sequence: Synthetic oligonucleotide
ggacgcccggcuccacuag

SEQ ID NO: 968580 - RNA, 19 nt, Artificial Sequence
  Description of Artificial Sequence: Synthetic oligonucleotide
uggaggcguuuuccccaau

SEQ ID NO: 968581 - RNA, 19 nt, Artificial Sequence
  Description of Artificial Sequence: Synthetic oligonucleotide
cucgugggccuuggcgcgc

SEQ ID NO: 968582 - RNA, 19 nt, Artificial Sequence
  Description of Artificial Sequence: Synthetic oligonucleotide
acgcguugaggcagugagu

SEQ ID NO: 968583 - RNA, 19 nt, Artificial Sequence
  Description of Artificial Sequence: Synthetic oligonucleotide
gcccggcuccacuagugac

SEQ ID NO: 968584 - RNA, 19 nt, Artificial Sequence
  Description of Artificial Sequence: Synthetic oligonucleotide
cacuguccucacuuagagu

SEQ ID NO: 968585 - RNA, 19 nt, Artificial Sequence
  Description of Artificial Sequence: Synthetic oligonucleotide
cugggccuuuguaaauccu

SEQ ID NO: 968586 - RNA, 19 nt, Artificial Sequence
  Description of Artificial Sequence: Synthetic oligonucleotide
gcccucggccguauacugg

SEQ ID NO: 968587 - RNA, 19 nt, Artificial Sequence
  Description of Artificial Sequence: Synthetic oligonucleotide
ggugcgcaccaggucgaag

SEQ ID NO: 968588 - RNA, 19 nt, Artificial Sequence
  Description of Artificial Sequence: Synthetic oligonucleotide
ccggcuccacuagugacac

SEQ ID NO: 968589 - RNA, 19 nt, Artificial Sequence
  Description of Artificial Sequence: Synthetic oligonucleotide
cccggcuccacuagugaca

SEQ ID NO: 968590 - RNA, 19 nt, Artificial Sequence
  Description of Artificial Sequence: Synthetic oligonucleotide
guccccgacccguaacccu

SEQ ID NO: 968591 - RNA, 19 nt, Artificial Sequence
  Description of Artificial Sequence: Synthetic oligonucleotide
gcuggcgcacguuggcaga

SEQ ID NO: 968592 - RNA, 19 nt, Artificial Sequence
  Description of Artificial Sequence: Synthetic oligonucleotide
cgugguacgcguugaggca

SEQ ID NO: 968593 - RNA, 19 nt, Artificial Sequence
  Description of Artificial Sequence: Synthetic oligonucleotide
gacgcccggcuccacuagu

SEQ ID NO: 968594 - RNA, 19 nt, Artificial Sequence
  Description of Artificial Sequence: Synthetic oligonucleotide
ccguacucagcuccaccuc

SEQ ID NO: 968595 - RNA, 19 nt, Artificial Sequence
  Description of Artificial Sequence: Synthetic oligonucleotide
ccucgaccugaggugcugg

SEQ ID NO: 968596 - RNA, 19 nt, Artificial Sequence
  Description of Artificial Sequence: Synthetic oligonucleotide
ccaauccgggaacuggcaa

SEQ ID NO: 968597 - RNA, 19 nt, Artificial Sequence
  Description of Artificial Sequence: Synthetic oligonucleotide
gcucgcuauccggacggug

SEQ ID NO: 968598 - RNA, 19 nt, Artificial Sequence
  Description of Artificial Sequence: Synthetic oligonucleotide
cccaauccgggaacuggca

SEQ ID NO: 968599 - RNA, 19 nt, Artificial Sequence
  Description of Artificial Sequence: Synthetic oligonucleotide
gguacgcguugaggcagug

SEQ ID NO: 968600 - RNA, 19 nt, Artificial Sequence
  Description of Artificial Sequence: Synthetic oligonucleotide
ccacggugguacgagcgug

SEQ ID NO: 968601 - RNA, 19 nt, Artificial Sequence
  Description of Artificial Sequence: Synthetic oligonucleotide
gcgugggucacccgggcua

SEQ ID NO: 968602 - RNA, 19 nt, Artificial Sequence
  Description of Artificial Sequence: Synthetic oligonucleotide
cgcgugguacgcguugagg

SEQ ID NO: 968603 - RNA, 19 nt, Artificial Sequence
  Description of Artificial Sequence: Synthetic oligonucleotide
cgcgggaugaccagucgca

SEQ ID NO: 968604 - RNA, 19 nt, Artificial Sequence
  Description of Artificial Sequence: Synthetic oligonucleotide
ccccgcggaugcugaaacc

SEQ ID NO: 968605 - RNA, 19 nt, Artificial Sequence
  Description of Artificial Sequence: Synthetic oligonucleotide
ccaaggccguacucagcuc

SEQ ID NO: 968606 - RNA, 19 nt, Artificial Sequence
  Description of Artificial Sequence: Synthetic oligonucleotide
ccgacccguaacccuuccc

SEQ ID NO: 968607 - RNA, 19 nt, Artificial Sequence
  Description of Artificial Sequence: Synthetic oligonucleotide
gcgcgugguacgcguugag

SEQ ID NO: 968608 - RNA, 19 nt, Artificial Sequence
  Description of Artificial Sequence: Synthetic oligonucleotide
gcgcgcgugguacgcguug

SEQ ID NO: 968609 - RNA, 19 nt, Artificial Sequence
  Description of Artificial Sequence: Synthetic oligonucleotide
ggcuuccgagaccuggggu

SEQ ID NO: 968610 - RNA, 19 nt, Artificial Sequence
  Description of Artificial Sequence: Synthetic oligonucleotide
uacgagcguggggcagccu

SEQ ID NO: 968611 - RNA, 19 nt, Artificial Sequence
  Description of Artificial Sequence: Synthetic oligonucleotide
cccgggcuagagauuuauc

SEQ ID NO: 968612 - RNA, 19 nt, Artificial Sequence
  Description of Artificial Sequence: Synthetic oligonucleotide
ccucggaucgugagaccca

SEQ ID NO: 968613 - RNA, 19 nt, Artificial Sequence
  Description of Artificial Sequence: Synthetic oligonucleotide
gguccacccagguguagau

SEQ ID NO: 968614 - RNA, 19 nt, Artificial Sequence
  Description of Artificial Sequence: Synthetic oligonucleotide
cgggcuagagauuuaucgu

SEQ ID NO: 968615 - RNA, 19 nt, Artificial Sequence
  Description of Artificial Sequence: Synthetic oligonucleotide
gggacgcccggcuccacua

SEQ ID NO: 968616 - RNA, 19 nt, Artificial Sequence
  Description of Artificial Sequence: Synthetic oligonucleotide
gagguccccuggaaacccu

SEQ ID NO: 968617 - RNA, 19 nt, Artificial Sequence
  Description of Artificial Sequence: Synthetic oligonucleotide
ccgcggaugcugaaaccca

SEQ ID NO: 968618 - RNA, 19 nt, Artificial Sequence
  Description of Artificial Sequence: Synthetic oligonucleotide
cacuuagagucugcccacu

SEQ ID NO: 968619 - RNA, 19 nt, Artificial Sequence
  Description of Artificial Sequence: Synthetic oligonucleotide
cguugacgcgcagaaucug

SEQ ID NO: 968620 - RNA, 19 nt, Artificial Sequence
  Description of Artificial Sequence: Synthetic oligonucleotide
cuccuucggucauucucau

SEQ ID NO: 968621 - RNA, 19 nt, Artificial Sequence
  Description of Artificial Sequence: Synthetic oligonucleotide
guagaggcccucggccgua

SEQ ID NO: 968622 - RNA, 19 nt, Artificial Sequence
  Description of Artificial Sequence: Synthetic oligonucleotide
cccgacccguaacccuucc

SEQ ID NO: 968623 - RNA, 19 nt, Artificial Sequence
  Description of Artificial Sequence: Synthetic oligonucleotide
gccucgaccugaggugcug

SEQ ID NO: 968624 - RNA, 19 nt, Artificial Sequence
  Description of Artificial Sequence: Synthetic oligonucleotide
cacuagugacacguagauu

SEQ ID NO: 968625 - RNA, 19 nt, Artificial Sequence
  Description of Artificial Sequence: Synthetic oligonucleotide
cgugggucacccgggcuag

SEQ ID NO: 968626 - RNA, 19 nt, Artificial Sequence
  Description of Artificial Sequence: Synthetic oligonucleotide
cagccuccgcgugggucac

SEQ ID NO: 968627 - RNA, 19 nt, Artificial Sequence
  Description of Artificial Sequence: Synthetic oligonucleotide
gcgcacguuggcagacagc

SEQ ID NO: 968628 - RNA, 19 nt, Artificial Sequence
  Description of Artificial Sequence: Synthetic oligonucleotide
ggucggagcgcgggaugac

SEQ ID NO: 968629 - RNA, 19 nt, Artificial Sequence
  Description of Artificial Sequence: Synthetic oligonucleotide
cccucggccguauacuggu

SEQ ID NO: 968630 - RNA, 19 nt, Artificial Sequence
  Description of Artificial Sequence: Synthetic oligonucleotide
gcgccgugagcgccuggug

SEQ ID NO: 968631 - RNA, 19 nt, Artificial Sequence
  Description of Artificial Sequence: Synthetic oligonucleotide
cgacccguaacccuucccu

SEQ ID NO: 968632 - RNA, 19 nt, Artificial Sequence
  Description of Artificial Sequence: Synthetic oligonucleotide
ccacuucgucugguccacg

SEQ ID NO: 968633 - RNA, 19 nt, Artificial Sequence
  Description of Artificial Sequence: Synthetic oligonucleotide
ccggacgguguaccuccac

SEQ ID NO: 968634 - RNA, 19 nt, Artificial Sequence
  Description of Artificial Sequence: Synthetic oligonucleotide
gcaauccacuucgucuggu

SEQ ID NO: 968635 - RNA, 19 nt, Artificial Sequence
  Description of Artificial Sequence: Synthetic oligonucleotide
ccucggccguauacugguc

SEQ ID NO: 968636 - RNA, 19 nt, Artificial Sequence
  Description of Artificial Sequence: Synthetic oligonucleotide
ccgcgugggucacccgggc

SEQ ID NO: 968637 - RNA, 19 nt, Artificial Sequence
  Description of Artificial Sequence: Synthetic oligonucleotide
ccgucgggagcagcccagg

SEQ ID NO: 968638 - RNA, 19 nt, Artificial Sequence
  Description of Artificial Sequence: Synthetic oligonucleotide
gcgggaugaccagucgcaa

SEQ ID NO: 968639 - RNA, 19 nt, Artificial Sequence
  Description of Artificial Sequence: Synthetic oligonucleotide
gcgcgccgcaggcucacga

SEQ ID NO: 968640 - RNA, 19 nt, Artificial Sequence
  Description of Artificial Sequence: Synthetic oligonucleotide
ccgcuugaccgggcugucc

SEQ ID NO: 968641 - RNA, 19 nt, Artificial Sequence
  Description of Artificial Sequence: Synthetic oligonucleotide
ccccgacccguaacccuuc

SEQ ID NO: 968642 - RNA, 19 nt, Artificial Sequence
  Description of Artificial Sequence: Synthetic oligonucleotide
cgcuauccggacgguguac

SEQ ID NO: 968643 - RNA, 19 nt, Artificial Sequence
  Description of Artificial Sequence: Synthetic oligonucleotide
gugggucacccgggcuaga

SEQ ID NO: 968644 - RNA, 19 nt, Artificial Sequence
  Description of Artificial Sequence: Synthetic oligonucleotide
gucacccgggcuagagauu

SEQ ID NO: 968645 - RNA, 19 nt, Artificial Sequence
  Description of Artificial Sequence: Synthetic oligonucleotide
gcuccacuagugacacgua

SEQ ID NO: 968646 - RNA, 19 nt, Artificial Sequence
  Description of Artificial Sequence: Synthetic oligonucleotide
ccacgccgucguuccgaac

SEQ ID NO: 968647 - RNA, 19 nt, Artificial Sequence
  Description of Artificial Sequence: Synthetic oligonucleotide
gcuggucggagcgcgggau

SEQ ID NO: 968648 - RNA, 19 nt, Artificial Sequence
  Description of Artificial Sequence: Synthetic oligonucleotide
ggcagagcccgaacuucau

SEQ ID NO: 968649 - RNA, 19 nt, Artificial Sequence
  Description of Artificial Sequence: Synthetic oligonucleotide
cgaagacguugcggcgcgc

SEQ ID NO: 968650 - RNA, 19 nt, Artificial Sequence
  Description of Artificial Sequence: Synthetic oligonucleotide
gggauacgcccagcugagu

SEQ ID NO: 968651 - RNA, 19 nt, Artificial Sequence
  Description of Artificial Sequence: Synthetic oligonucleotide
ccgagaccugggguuggca

SEQ ID NO: 968652 - RNA, 19 nt, Artificial Sequence
  Description of Artificial Sequence: Synthetic oligonucleotide
gcccaggcgggcugccuau

SEQ ID NO: 968653 - RNA, 19 nt, Artificial Sequence
  Description of Artificial Sequence: Synthetic oligonucleotide
cgcgcgugguacgcguuga

SEQ ID NO: 968654 - RNA, 19 nt, Artificial Sequence
  Description of Artificial Sequence: Synthetic oligonucleotide
ggcucgcuauccggacggu

SEQ ID NO: 968655 - RNA, 19 nt, Artificial Sequence
  Description of Artificial Sequence: Synthetic oligonucleotide
cggccguauacuggucgaa

SEQ ID NO: 968656 - RNA, 19 nt, Artificial Sequence
  Description of Artificial Sequence: Synthetic oligonucleotide
ccgccucgucaugcaagau

SEQ ID NO: 968657 - RNA, 19 nt, Artificial Sequence
  Description of Artificial Sequence: Synthetic oligonucleotide
auaauugaccuuuagauac

SEQ ID NO: 968658 - RNA, 19 nt, Artificial Sequence
  Description of Artificial Sequence: Synthetic oligonucleotide
aauguagagauucacuccc

SEQ ID NO: 968659 - RNA, 19 nt, Artificial Sequence
  Description of Artificial Sequence: Synthetic oligonucleotide
uuuagauacaaaaugaccu

SEQ ID NO: 968660 - RNA, 19 nt, Artificial Sequence
  Description of Artificial Sequence: Synthetic oligonucleotide
agcauuaccaguuggagcc

SEQ ID NO: 968661 - RNA, 19 nt, Artificial Sequence
  Description of Artificial Sequence: Synthetic oligonucleotide
uuuuaauucagccuggcgc

SEQ ID NO: 968662 - RNA, 19 nt, Artificial Sequence
  Description of Artificial Sequence: Synthetic oligonucleotide
agaguugucaauuuccagc

SEQ ID NO: 968663 - RNA, 19 nt, Artificial Sequence
  Description of Artificial Sequence: Synthetic oligonucleotide
uuuauugagaaacucaagu

SEQ ID NO: 968664 - RNA, 19 nt, Artificial Sequence
  Description of Artificial Sequence: Synthetic oligonucleotide
uuaaaguuuuaccaaacug

SEQ ID NO: 968665 - RNA, 19 nt, Artificial Sequence
  Description of Artificial Sequence: Synthetic oligonucleotide
cauuguuuggauaaguggg

SEQ ID NO: 968666 - RNA, 19 nt, Artificial Sequence
  Description of Artificial Sequence: Synthetic oligonucleotide
uaauuucucaucaucaaug

SEQ ID NO: 968667 - RNA, 19 nt, Artificial Sequence
  Description of Artificial Sequence: Synthetic oligonucleotide
aaacucaagucuugggugc

SEQ ID NO: 968668 - RNA, 19 nt, Artificial Sequence
  Description of Artificial Sequence: Synthetic oligonucleotide
accaguuggagccagaugg

SEQ ID NO: 968669 - RNA, 19 nt, Artificial Sequence
  Description of Artificial Sequence: Synthetic oligonucleotide
ucauaauugaccuuuagau

SEQ ID NO: 968670 - RNA, 19 nt, Artificial Sequence
  Description of Artificial Sequence: Synthetic oligonucleotide
uuucguaacuuacaaagcc

SEQ ID NO: 968671 - RNA, 19 nt, Artificial Sequence
  Description of Artificial Sequence: Synthetic oligonucleotide
uccguuuuaauucagccug

SEQ ID NO: 968672 - RNA, 19 nt, Artificial Sequence
  Description of Artificial Sequence: Synthetic oligonucleotide
aucaccuugacacuuaaag

SEQ ID NO: 968673 - RNA, 19 nt, Artificial Sequence
  Description of Artificial Sequence: Synthetic oligonucleotide
gacacuuaaaguuuuacca

SEQ ID NO: 968674 - RNA, 19 nt, Artificial Sequence
  Description of Artificial Sequence: Synthetic oligonucleotide
gauaagugggaacaaacgc

SEQ ID NO: 968675 - RNA, 19 nt, Artificial Sequence
  Description of Artificial Sequence: Synthetic oligonucleotide
acgaauauugcuuucccac

SEQ ID NO: 968676 - RNA, 19 nt, Artificial Sequence
  Description of Artificial Sequence: Synthetic oligonucleotide
cuuuagauacaaaaugacc

SEQ ID NO: 968677 - RNA, 19 nt, Artificial Sequence
  Description of Artificial Sequence: Synthetic oligonucleotide
uuaauguagagauucacuc

SEQ ID NO: 968678 - RNA, 19 nt, Artificial Sequence
  Description of Artificial Sequence: Synthetic oligonucleotide
uuagaacccacauauauaa

SEQ ID NO: 968679 - RNA, 19 nt, Artificial Sequence
  Description of Artificial Sequence: Synthetic oligonucleotide
ugauugauccaaaaggaga

SEQ ID NO: 968680 - RNA, 19 nt, Artificial Sequence
  Description of Artificial Sequence: Synthetic oligonucleotide
ucucaugccagccacacgc

SEQ ID NO: 968681 - RNA, 19 nt, Artificial Sequence
  Description of Artificial Sequence: Synthetic oligonucleotide
aauucuaggugccucauaa

SEQ ID NO: 968682 - RNA, 19 nt, Artificial Sequence
  Description of Artificial Sequence: Synthetic oligonucleotide
acuaauucgcuccugcuuc

SEQ ID NO: 968683 - RNA, 19 nt, Artificial Sequence
  Description of Artificial Sequence: Synthetic oligonucleotide
gaccuuuagauacaaaaug

SEQ ID NO: 968684 - RNA, 19 nt, Artificial Sequence
  Description of Artificial Sequence: Synthetic oligonucleotide
aauccuuccguucaucuca

SEQ ID NO: 968685 - RNA, 19 nt, Artificial Sequence
  Description of Artificial Sequence: Synthetic oligonucleotide
uauacucuuauauaaucga

SEQ ID NO: 968686 - RNA, 19 nt, Artificial Sequence
  Description of Artificial Sequence: Synthetic oligonucleotide
auuuguauggagccacagc

SEQ ID NO: 968687 - RNA, 19 nt, Artificial Sequence
  Description of Artificial Sequence: Synthetic oligonucleotide
uauugaauuugcaacuugu

SEQ ID NO: 968688 - RNA, 19 nt, Artificial Sequence
  Description of Artificial Sequence: Synthetic oligonucleotide
cugguaacgacuaauucgc

SEQ ID NO: 968689 - RNA, 19 nt, Artificial Sequence
  Description of Artificial Sequence: Synthetic oligonucleotide
uaggcguguaauauggagg

SEQ ID NO: 968690 - RNA, 19 nt, Artificial Sequence
  Description of Artificial Sequence: Synthetic oligonucleotide
uuuaauucagccuggcgcu

SEQ ID NO: 968691 - RNA, 19 nt, Artificial Sequence
  Description of Artificial Sequence: Synthetic oligonucleotide
guaacgacuaauucgcucc

SEQ ID NO: 968692 - RNA, 19 nt, Artificial Sequence
  Description of Artificial Sequence: Synthetic oligonucleotide
uuauugagaaacucaaguc

SEQ ID NO: 968693 - RNA, 19 nt, Artificial Sequence
  Description of Artificial Sequence: Synthetic oligonucleotide
ugagaagcagacaaagcca

SEQ ID NO: 968694 - RNA, 19 nt, Artificial Sequence
  Description of Artificial Sequence: Synthetic oligonucleotide
gaccuauugaauuugcaac

SEQ ID NO: 968695 - RNA, 19 nt, Artificial Sequence
  Description of Artificial Sequence: Synthetic oligonucleotide
aacaaccugggccauagca

SEQ ID NO: 968696 - RNA, 19 nt, Artificial Sequence
  Description of Artificial Sequence: Synthetic oligonucleotide
uuuucguaacuuacaaagc

SEQ ID NO: 968697 - RNA, 19 nt, Artificial Sequence
  Description of Artificial Sequence: Synthetic oligonucleotide
ucuaagagguagcagcagc

SEQ ID NO: 968698 - RNA, 19 nt, Artificial Sequence
  Description of Artificial Sequence: Synthetic oligonucleotide
agucaggugagccuuccgc

SEQ ID NO: 968699 - RNA, 19 nt, Artificial Sequence
  Description of Artificial Sequence: Synthetic oligonucleotide
guuugaaugcauuguuugg

SEQ ID NO: 968700 - RNA, 19 nt, Artificial Sequence
  Description of Artificial Sequence: Synthetic oligonucleotide
agugggaacaaacgcuccc

SEQ ID NO: 968701 - RNA, 19 nt, Artificial Sequence
  Description of Artificial Sequence: Synthetic oligonucleotide
cuuggcauuccuuggaagc

SEQ ID NO: 968702 - RNA, 19 nt, Artificial Sequence
  Description of Artificial Sequence: Synthetic oligonucleotide
ugcauuguuuggauaagug

SEQ ID NO: 968703 - RNA, 19 nt, Artificial Sequence
  Description of Artificial Sequence: Synthetic oligonucleotide
acgacuaauucgcuccugc

SEQ ID NO: 968704 - RNA, 19 nt, Artificial Sequence
  Description of Artificial Sequence: Synthetic oligonucleotide
uguggcacgaggugcaagg

SEQ ID NO: 968705 - RNA, 19 nt, Artificial Sequence
  Description of Artificial Sequence: Synthetic oligonucleotide
uacucuuauauaaucgaaa

SEQ ID NO: 968706 - RNA, 19 nt, Artificial Sequence
  Description of Artificial Sequence: Synthetic oligonucleotide
aauauugcuuucccacuca

SEQ ID NO: 968707 - RNA, 19 nt, Artificial Sequence
  Description of Artificial Sequence: Synthetic oligonucleotide
gauggcgaagagcuggacg

SEQ ID NO: 968708 - RNA, 19 nt, Artificial Sequence
  Description of Artificial Sequence: Synthetic oligonucleotide
auugccguauagcacuugg

SEQ ID NO: 968709 - RNA, 19 nt, Artificial Sequence
  Description of Artificial Sequence: Synthetic oligonucleotide
ucagauuaucaucauccac

SEQ ID NO: 968710 - RNA, 19 nt, Artificial Sequence
  Description of Artificial Sequence: Synthetic oligonucleotide
aacucuuuccuuaauuucu

SEQ ID NO: 968711 - RNA, 19 nt, Artificial Sequence
  Description of Artificial Sequence: Synthetic oligonucleotide
uguaauauggaggccuucc

SEQ ID NO: 968712 - RNA, 19 nt, Artificial Sequence
  Description of Artificial Sequence: Synthetic oligonucleotide
acguacagcggcuucgagc

SEQ ID NO: 968713 - RNA, 19 nt, Artificial Sequence
  Description of Artificial Sequence: Synthetic oligonucleotide
caucgaggcaguuaguggc

SEQ ID NO: 968714 - RNA, 19 nt, Artificial Sequence
  Description of Artificial Sequence: Synthetic oligonucleotide
uggauuaggccucaucugu

SEQ ID NO: 968715 - RNA, 19 nt, Artificial Sequence
  Description of Artificial Sequence: Synthetic oligonucleotide
aaguccauagccaagcggu

SEQ ID NO: 968716 - RNA, 19 nt, Artificial Sequence
  Description of Artificial Sequence: Synthetic oligonucleotide
guucuuaauguagagauuc

SEQ ID NO: 968717 - RNA, 19 nt, Artificial Sequence
  Description of Artificial Sequence: Synthetic oligonucleotide
uuagauacaaaaugaccua

SEQ ID NO: 968718 - RNA, 19 nt, Artificial Sequence
  Description of Artificial Sequence: Synthetic oligonucleotide
ugaccuuuagauacaaaau

SEQ ID NO: 968719 - RNA, 19 nt, Artificial Sequence
  Description of Artificial Sequence: Synthetic oligonucleotide
gagaaacucaagucuuggg

SEQ ID NO: 968720 - RNA, 19 nt, Artificial Sequence
  Description of Artificial Sequence: Synthetic oligonucleotide
ugaccuauugaauuugcaa

SEQ ID NO: 968721 - RNA, 19 nt, Artificial Sequence
  Description of Artificial Sequence: Synthetic oligonucleotide
accuauugaauuugcaacu

SEQ ID NO: 968722 - RNA, 19 nt, Artificial Sequence
  Description of Artificial Sequence: Synthetic oligonucleotide
uguaaucuuuccagccagg

SEQ ID NO: 968723 - RNA, 19 nt, Artificial Sequence
  Description of Artificial Sequence: Synthetic oligonucleotide
uuaacaaccugggccauag

SEQ ID NO: 968724 - RNA, 19 nt, Artificial Sequence
  Description of Artificial Sequence: Synthetic oligonucleotide
ugccguauagcacuuggca

SEQ ID NO: 968725 - RNA, 19 nt, Artificial Sequence
  Description of Artificial Sequence: Synthetic oligonucleotide
uccuuaauuucucaucauc

SEQ ID NO: 968726 - RNA, 19 nt, Artificial Sequence
  Description of Artificial Sequence: Synthetic oligonucleotide
uaauauggaggccuucccu

SEQ ID NO: 968727 - RNA, 19 nt, Artificial Sequence
  Description of Artificial Sequence: Synthetic oligonucleotide
guagagauucacucccugg

SEQ ID NO: 968728 - RNA, 19 nt, Artificial Sequence
  Description of Artificial Sequence: Synthetic oligonucleotide
acugcggacacuugcggcg

SEQ ID NO: 968729 - RNA, 19 nt, Artificial Sequence
  Description of Artificial Sequence: Synthetic oligonucleotide
gaguugucaauuuccagca

SEQ ID NO: 968730 - RNA, 19 nt, Artificial Sequence
  Description of Artificial Sequence: Synthetic oligonucleotide
ugacuuaagauggcauugg

SEQ ID NO: 968731 - RNA, 19 nt, Artificial Sequence
  Description of Artificial Sequence: Synthetic oligonucleotide
ucaccuugacacuuaaagu

SEQ ID NO: 968732 - RNA, 19 nt, Artificial Sequence
  Description of Artificial Sequence: Synthetic oligonucleotide
agauucacucccugguaac

SEQ ID NO: 968733 - RNA, 19 nt, Artificial Sequence
  Description of Artificial Sequence: Synthetic oligonucleotide
gaauagcucuuucagauua

SEQ ID NO: 968734 - RNA, 19 nt, Artificial Sequence
  Description of Artificial Sequence: Synthetic oligonucleotide
ucagacccgacucucugag

SEQ ID NO: 968735 - RNA, 19 nt, Artificial Sequence
  Description of Artificial Sequence: Synthetic oligonucleotide
gcauuguuuggauaagugg

SEQ ID NO: 968736 - RNA, 19 nt, Artificial Sequence
  Description of Artificial Sequence: Synthetic oligonucleotide
gaauauugcuuucccacuc

SEQ ID NO: 968737 - RNA, 19 nt, Artificial Sequence
  Description of Artificial Sequence: Synthetic oligonucleotide
uuccguucaucucagugac

SEQ ID NO: 968738 - RNA, 19 nt, Artificial Sequence
  Description of Artificial Sequence: Synthetic oligonucleotide
gauuaggccucaucugugc

SEQ ID NO: 968739 - RNA, 19 nt, Artificial Sequence
  Description of Artificial Sequence: Synthetic oligonucleotide
aaugcauuguuuggauaag

SEQ ID NO: 968740 - RNA, 19 nt, Artificial Sequence
  Description of Artificial Sequence: Synthetic oligonucleotide
uucagauuaucaucaucca

SEQ ID NO: 968741 - RNA, 19 nt, Artificial Sequence
  Description of Artificial Sequence: Synthetic oligonucleotide
auuuccguuuuaauucagc

SEQ ID NO: 968742 - RNA, 19 nt, Artificial Sequence
  Description of Artificial Sequence: Synthetic oligonucleotide
gagcauuaccaguuggagc

SEQ ID NO: 968743 - RNA, 19 nt, Artificial Sequence
  Description of Artificial Sequence: Synthetic oligonucleotide
aacaucaccuuagcacugg

SEQ ID NO: 968744 - RNA, 19 nt, Artificial Sequence
  Description of Artificial Sequence: Synthetic oligonucleotide
ucuuaauguagagauucac

SEQ ID NO: 968745 - RNA, 19 nt, Artificial Sequence
  Description of Artificial Sequence: Synthetic oligonucleotide
aucuaaguucuuaauguag

SEQ ID NO: 968746 - RNA, 19 nt, Artificial Sequence
  Description of Artificial Sequence: Synthetic oligonucleotide
uucuuaauguagagauuca

SEQ ID NO: 968747 - RNA, 19 nt, Artificial Sequence
  Description of Artificial Sequence: Synthetic oligonucleotide
uauagcacuuggcauuccu

SEQ ID NO: 968748 - RNA, 19 nt, Artificial Sequence
  Description of Artificial Sequence: Synthetic oligonucleotide
gaacggagagacucagggg

SEQ ID NO: 968749 - RNA, 19 nt, Artificial Sequence
  Description of Artificial Sequence: Synthetic oligonucleotide
uuguauggagccacagccc

SEQ ID NO: 968750 - RNA, 19 nt, Artificial Sequence
  Description of Artificial Sequence: Synthetic oligonucleotide
uuccguuuuaauucagccu

SEQ ID NO: 968751 - RNA, 19 nt, Artificial Sequence
  Description of Artificial Sequence: Synthetic oligonucleotide
accuuuagauacaaaauga

SEQ ID NO: 968752 - RNA, 19 nt, Artificial Sequence
  Description of Artificial Sequence: Synthetic oligonucleotide
gguuaggcguguaauaugg

SEQ ID NO: 968753 - RNA, 19 nt, Artificial Sequence
  Description of Artificial Sequence: Synthetic oligonucleotide
ucgaaguucauggugucca

SEQ ID NO: 968754 - RNA, 19 nt, Artificial Sequence
  Description of Artificial Sequence: Synthetic oligonucleotide
uagcucuuucagauuauca

SEQ ID NO: 968755 - RNA, 19 nt, Artificial Sequence
  Description of Artificial Sequence: Synthetic oligonucleotide
guuuggauaagugggaaca

SEQ ID NO: 968756 - RNA, 19 nt, Artificial Sequence
  Description of Artificial Sequence: Synthetic oligonucleotide
uucagaccuuagcugaaug

SEQ ID NO: 968757 - RNA, 19 nt, Artificial Sequence
  Description of Artificial Sequence: Synthetic oligonucleotide
uacgaauauugcuuuccca

SEQ ID NO: 968758 - RNA, 19 nt, Artificial Sequence
  Description of Artificial Sequence: Synthetic oligonucleotide
uauuuguauggagccacag

SEQ ID NO: 968759 - RNA, 19 nt, Artificial Sequence
  Description of Artificial Sequence: Synthetic oligonucleotide
cuacgaauauugcuuuccc

SEQ ID NO: 968760 - RNA, 19 nt, Artificial Sequence
  Description of Artificial Sequence: Synthetic oligonucleotide
gauucacucccugguaacg

SEQ ID NO: 968761 - RNA, 19 nt, Artificial Sequence
  Description of Artificial Sequence: Synthetic oligonucleotide
uuauuuggcuuuugacucu

SEQ ID NO: 968762 - RNA, 19 nt, Artificial Sequence
  Description of Artificial Sequence: Synthetic oligonucleotide
cuugcggcguauuuguaug

SEQ ID NO: 968763 - RNA, 19 nt, Artificial Sequence
  Description of Artificial Sequence: Synthetic oligonucleotide
ggauaagugggaacaaacg

SEQ ID NO: 968764 - RNA, 19 nt, Artificial Sequence
  Description of Artificial Sequence: Synthetic oligonucleotide
auucgcuccugcuucagcu

SEQ ID NO: 968765 - RNA, 19 nt, Artificial Sequence
  Description of Artificial Sequence: Synthetic oligonucleotide
uugguguggagguccacag

SEQ ID NO: 968766 - RNA, 19 nt, Artificial Sequence
  Description of Artificial Sequence: Synthetic oligonucleotide
agugguaguaggaaggcca

SEQ ID NO: 968767 - RNA, 19 nt, Artificial Sequence
  Description of Artificial Sequence: Synthetic oligonucleotide
cagaccuuagcugaaugcc

SEQ ID NO: 968768 - RNA, 19 nt, Artificial Sequence
  Description of Artificial Sequence: Synthetic oligonucleotide
uguuuggauaagugggaac

SEQ ID NO: 968769 - RNA, 19 nt, Artificial Sequence
  Description of Artificial Sequence: Synthetic oligonucleotide
guaauauggaggccuuccc

SEQ ID NO: 968770 - RNA, 19 nt, Artificial Sequence
  Description of Artificial Sequence: Synthetic oligonucleotide
aagucuugggugcaucaaa

SEQ ID NO: 968771 - RNA, 19 nt, Artificial Sequence
  Description of Artificial Sequence: Synthetic oligonucleotide
ucccacucauuucuuuucc

SEQ ID NO: 968772 - RNA, 19 nt, Artificial Sequence
  Description of Artificial Sequence: Synthetic oligonucleotide
cauaauugaccuuuagaua

SEQ ID NO: 968773 - RNA, 19 nt, Artificial Sequence
  Description of Artificial Sequence: Synthetic oligonucleotide
acugacuuaagauggcauu

SEQ ID NO: 968774 - RNA, 19 nt, Artificial Sequence
  Description of Artificial Sequence: Synthetic oligonucleotide
uuauuugcauccucguguu

SEQ ID NO: 968775 - RNA, 19 nt, Artificial Sequence
  Description of Artificial Sequence: Synthetic oligonucleotide
ggcguauuuguauggagcc

SEQ ID NO: 968776 - RNA, 19 nt, Artificial Sequence
  Description of Artificial Sequence: Synthetic oligonucleotide
agauuaucaucauccacuu

SEQ ID NO: 968777 - RNA, 19 nt, Artificial Sequence
  Description of Artificial Sequence: Synthetic oligonucleotide
aaccaauuucugggaaggg

SEQ ID NO: 968778 - RNA, 19 nt, Artificial Sequence
  Description of Artificial Sequence: Synthetic oligonucleotide
cugacuuaagauggcauug

SEQ ID NO: 968779 - RNA, 19 nt, Artificial Sequence
  Description of Artificial Sequence: Synthetic oligonucleotide
ugguuaggcguguaauaug

SEQ ID NO: 968780 - RNA, 19 nt, Artificial Sequence
  Description of Artificial Sequence: Synthetic oligonucleotide
ugagugguaguaggaaggc

SEQ ID NO: 968781 - RNA, 19 nt, Artificial Sequence
  Description of Artificial Sequence: Synthetic oligonucleotide
cuaggugccucauaauuga

SEQ ID NO: 968782 - RNA, 19 nt, Artificial Sequence
  Description of Artificial Sequence: Synthetic oligonucleotide
aauuuccguuuuaauucag

SEQ ID NO: 968783 - RNA, 19 nt, Artificial Sequence
  Description of Artificial Sequence: Synthetic oligonucleotide
cuuaauguagagauucacu

SEQ ID NO: 968784 - RNA, 19 nt, Artificial Sequence
  Description of Artificial Sequence: Synthetic oligonucleotide
ccuuuagauacaaaaugac

SEQ ID NO: 968785 - RNA, 19 nt, Artificial Sequence
  Description of Artificial Sequence: Synthetic oligonucleotide
uugggugcaucaaaaccaa

SEQ ID NO: 968786 - RNA, 19 nt, Artificial Sequence
  Description of Artificial Sequence: Synthetic oligonucleotide
cuuagcugaaugccaugag

SEQ ID NO: 968787 - RNA, 19 nt, Artificial Sequence
  Description of Artificial Sequence: Synthetic oligonucleotide
cuuccucugagccagggca

SEQ ID NO: 968788 - RNA, 19 nt, Artificial Sequence
  Description of Artificial Sequence: Synthetic oligonucleotide
uaggccucaucugugcuag

SEQ ID NO: 968789 - RNA, 19 nt, Artificial Sequence
  Description of Artificial Sequence: Synthetic oligonucleotide
acggccuacgaauauugcu

SEQ ID NO: 968790 - RNA, 19 nt, Artificial Sequence
  Description of Artificial Sequence: Synthetic oligonucleotide
guuuuaccaaacuggcuga

SEQ ID NO: 968791 - RNA, 19 nt, Artificial Sequence
  Description of Artificial Sequence: Synthetic oligonucleotide
auugagaaacucaagucuu

SEQ ID NO: 968792 - RNA, 19 nt, Artificial Sequence
  Description of Artificial Sequence: Synthetic oligonucleotide
cuaagagguagcagcagca

SEQ ID NO: 968793 - RNA, 19 nt, Artificial Sequence
  Description of Artificial Sequence: Synthetic oligonucleotide
uggaacggagagacucagg

SEQ ID NO: 968794 - RNA, 19 nt, Artificial Sequence
  Description of Artificial Sequence: Synthetic oligonucleotide
uccagccagguuugaaugc

SEQ ID NO: 968795 - RNA, 19 nt, Artificial Sequence
  Description of Artificial Sequence: Synthetic oligonucleotide
guggauuaggccucaucug

SEQ ID NO: 968796 - RNA, 19 nt, Artificial Sequence
  Description of Artificial Sequence: Synthetic oligonucleotide
agcaucgaggcaguuagug

SEQ ID NO: 968797 - RNA, 19 nt, Artificial Sequence
  Description of Artificial Sequence: Synthetic oligonucleotide
gagauucacucccugguaa

SEQ ID NO: 968798 - RNA, 19 nt, Artificial Sequence
  Description of Artificial Sequence: Synthetic oligonucleotide
auuguuuggauaaguggga

SEQ ID NO: 968799 - RNA, 19 nt, Artificial Sequence
  Description of Artificial Sequence: Synthetic oligonucleotide
ugggccauagcagaaccca

SEQ ID NO: 968800 - RNA, 19 nt, Artificial Sequence
  Description of Artificial Sequence: Synthetic oligonucleotide
uugcggcguauuuguaugg

SEQ ID NO: 968801 - RNA, 19 nt, Artificial Sequence
  Description of Artificial Sequence: Synthetic oligonucleotide
ugagggguuauuuggcuuu

SEQ ID NO: 968802 - RNA, 19 nt, Artificial Sequence
  Description of Artificial Sequence: Synthetic oligonucleotide
gauauaaacauuggugaau

SEQ ID NO: 968803 - RNA, 19 nt, Artificial Sequence
  Description of Artificial Sequence: Synthetic oligonucleotide
uaacgacuaauucgcuccu

SEQ ID NO: 968804 - RNA, 19 nt, Artificial Sequence
  Description of Artificial Sequence: Synthetic oligonucleotide
gacucaggggacuccaaca

SEQ ID NO: 968805 - RNA, 19 nt, Artificial Sequence
  Description of Artificial Sequence: Synthetic oligonucleotide
uucgagccuacaauccuuc

SEQ ID NO: 968806 - RNA, 19 nt, Artificial Sequence
  Description of Artificial Sequence: Synthetic oligonucleotide
uugccguauagcacuuggc

SEQ ID NO: 968807 - RNA, 19 nt, Artificial Sequence
  Description of Artificial Sequence: Synthetic oligonucleotide
agacaaacaaggaagucuu

SEQ ID NO: 968808 - RNA, 19 nt, Artificial Sequence
  Description of Artificial Sequence: Synthetic oligonucleotide
aagcgguccgggcacucag

SEQ ID NO: 968809 - RNA, 19 nt, Artificial Sequence
  Description of Artificial Sequence: Synthetic oligonucleotide
auuaggccucaucugugcu

SEQ ID NO: 968810 - RNA, 19 nt, Artificial Sequence
  Description of Artificial Sequence: Synthetic oligonucleotide
agugacugcuuugguugcc

SEQ ID NO: 968811 - RNA, 19 nt, Artificial Sequence
  Description of Artificial Sequence: Synthetic oligonucleotide
acuugcggcguauuuguau

SEQ ID NO: 968812 - RNA, 19 nt, Artificial Sequence
  Description of Artificial Sequence: Synthetic oligonucleotide
aacguacagcggcuucgag

SEQ ID NO: 968813 - RNA, 19 nt, Artificial Sequence
  Description of Artificial Sequence: Synthetic oligonucleotide
agugcucucaugccagcca

SEQ ID NO: 968814 - RNA, 19 nt, Artificial Sequence
  Description of Artificial Sequence: Synthetic oligonucleotide
gcagggagugcucucaugc

SEQ ID NO: 968815 - RNA, 19 nt, Artificial Sequence
  Description of Artificial Sequence: Synthetic oligonucleotide
auuagaacccacauauaua

SEQ ID NO: 968816 - RNA, 19 nt, Artificial Sequence
  Description of Artificial Sequence: Synthetic oligonucleotide
agggagugcucucaugcca

SEQ ID NO: 968817 - RNA, 19 nt, Artificial Sequence
  Description of Artificial Sequence: Synthetic oligonucleotide
aacugacuuaagauggcau

SEQ ID NO: 968818 - RNA, 19 nt, Artificial Sequence
  Description of Artificial Sequence: Synthetic oligonucleotide
gacccgacucucugagugg

SEQ ID NO: 968819 - RNA, 19 nt, Artificial Sequence
  Description of Artificial Sequence: Synthetic oligonucleotide
ccagcaucgaggcaguuag

SEQ ID NO: 968820 - RNA, 19 nt, Artificial Sequence
  Description of Artificial Sequence: Synthetic oligonucleotide
acucagacccgacucucug

SEQ ID NO: 968821 - RNA, 19 nt, Artificial Sequence
  Description of Artificial Sequence: Synthetic oligonucleotide
gaauuugcaacuugugguu

SEQ ID NO: 968822 - RNA, 19 nt, Artificial Sequence
  Description of Artificial Sequence: Synthetic oligonucleotide
uggcugaauggcaggguga

SEQ ID NO: 968823 - RNA, 19 nt, Artificial Sequence
  Description of Artificial Sequence: Synthetic oligonucleotide
agaaaacucuuuccuuaau

SEQ ID NO: 968824 - RNA, 19 nt, Artificial Sequence
  Description of Artificial Sequence: Synthetic oligonucleotide
uuguuuggauaagugggaa

SEQ ID NO: 968825 - RNA, 19 nt, Artificial Sequence
  Description of Artificial Sequence: Synthetic oligonucleotide
uuggauaagugggaacaaa

SEQ ID NO: 968826 - RNA, 19 nt, Artificial Sequence
  Description of Artificial Sequence: Synthetic oligonucleotide
aguagccgccagcugcagg

SEQ ID NO: 968827 - RNA, 19 nt, Artificial Sequence
  Description of Artificial Sequence: Synthetic oligonucleotide
gguaacgacuaauucgcuc

SEQ ID NO: 968828 - RNA, 19 nt, Artificial Sequence
  Description of Artificial Sequence: Synthetic oligonucleotide
cagauugccguauagcacu

SEQ ID NO: 968829 - RNA, 19 nt, Artificial Sequence
  Description of Artificial Sequence: Synthetic oligonucleotide
auacucuuauauaaucgaa

SEQ ID NO: 968830 - RNA, 19 nt, Artificial Sequence
  Description of Artificial Sequence: Synthetic oligonucleotide
uucugggcggcuucuuucu

SEQ ID NO: 968831 - RNA, 19 nt, Artificial Sequence
  Description of Artificial Sequence: Synthetic oligonucleotide
ucacucccugguaacgacu

SEQ ID NO: 968832 - RNA, 19 nt, Artificial Sequence
  Description of Artificial Sequence: Synthetic oligonucleotide
gaacugacuuaagauggca

SEQ ID NO: 968833 - RNA, 19 nt, Artificial Sequence
  Description of Artificial Sequence: Synthetic oligonucleotide
ugguugccucuucaggaga

SEQ ID NO: 968834 - RNA, 19 nt, Artificial Sequence
  Description of Artificial Sequence: Synthetic oligonucleotide
gagccuacaauccuuccgu

SEQ ID NO: 968835 - RNA, 19 nt, Artificial Sequence
  Description of Artificial Sequence: Synthetic oligonucleotide
aggacugcggacacuugcg

SEQ ID NO: 968836 - RNA, 19 nt, Artificial Sequence
  Description of Artificial Sequence: Synthetic oligonucleotide
ggagcauuaccaguuggag

SEQ ID NO: 968837 - RNA, 19 nt, Artificial Sequence
  Description of Artificial Sequence: Synthetic oligonucleotide
aaugccaugagggguuauu

SEQ ID NO: 968838 - RNA, 19 nt, Artificial Sequence
  Description of Artificial Sequence: Synthetic oligonucleotide
agagauucacucccuggua

SEQ ID NO: 968839 - RNA, 19 nt, Artificial Sequence
  Description of Artificial Sequence: Synthetic oligonucleotide
ucccugguaacgacuaauu

SEQ ID NO: 968840 - RNA, 19 nt, Artificial Sequence
  Description of Artificial Sequence: Synthetic oligonucleotide
uauugcuuucccacucauu

SEQ ID NO: 968841 - RNA, 19 nt, Artificial Sequence
  Description of Artificial Sequence: Synthetic oligonucleotide
uuaggccucaucugugcua

SEQ ID NO: 968842 - RNA, 19 nt, Artificial Sequence
  Description of Artificial Sequence: Synthetic oligonucleotide
uggcaugaugagccugcag

SEQ ID NO: 968843 - RNA, 19 nt, Artificial Sequence
  Description of Artificial Sequence: Synthetic oligonucleotide
agaacccagagaauauacu

SEQ ID NO: 968844 - RNA, 19 nt, Artificial Sequence
  Description of Artificial Sequence: Synthetic oligonucleotide
aauagcucuuucagauuau

SEQ ID NO: 968845 - RNA, 19 nt, Artificial Sequence
  Description of Artificial Sequence: Synthetic oligonucleotide
uggcacgaggugcaaggcu

SEQ ID NO: 968846 - RNA, 19 nt, Artificial Sequence
  Description of Artificial Sequence: Synthetic oligonucleotide
aacgacuaauucgcuccug

SEQ ID NO: 968847 - RNA, 19 nt, Artificial Sequence
  Description of Artificial Sequence: Synthetic oligonucleotide
caucuaaguucuuaaugua

SEQ ID NO: 968848 - RNA, 19 nt, Artificial Sequence
  Description of Artificial Sequence: Synthetic oligonucleotide
ugguaguaggaaggccacg

SEQ ID NO: 968849 - RNA, 19 nt, Artificial Sequence
  Description of Artificial Sequence: Synthetic oligonucleotide
caguuggagccagauggcg

SEQ ID NO: 968850 - RNA, 19 nt, Artificial Sequence
  Description of Artificial Sequence: Synthetic oligonucleotide
ugguaacgacuaauucgcu

SEQ ID NO: 968851 - RNA, 19 nt, Artificial Sequence
  Description of Artificial Sequence: Synthetic oligonucleotide
cuggcacaaaguagccgcc

SEQ ID NO: 968852 - RNA, 19 nt, Artificial Sequence
  Description of Artificial Sequence: Synthetic oligonucleotide
cuuggaacggagagacuca

SEQ ID NO: 968853 - RNA, 19 nt, Artificial Sequence
  Description of Artificial Sequence: Synthetic oligonucleotide
cagugacugcuuugguugc

SEQ ID NO: 968854 - RNA, 19 nt, Artificial Sequence
  Description of Artificial Sequence: Synthetic oligonucleotide
uaggugccucauaauugac

SEQ ID NO: 968855 - RNA, 19 nt, Artificial Sequence
  Description of Artificial Sequence: Synthetic oligonucleotide
ucgagccuacaauccuucc

SEQ ID NO: 968856 - RNA, 19 nt, Artificial Sequence
  Description of Artificial Sequence: Synthetic oligonucleotide
cagacaaacaaggaagucu

SEQ ID NO: 968857 - RNA, 19 nt, Artificial Sequence
  Description of Artificial Sequence: Synthetic oligonucleotide
ccuacgaauauugcuuucc

SEQ ID NO: 968858 - RNA, 19 nt, Artificial Sequence
  Description of Artificial Sequence: Synthetic oligonucleotide
uuaccaguuggagccagau

SEQ ID NO: 968859 - RNA, 19 nt, Artificial Sequence
  Description of Artificial Sequence: Synthetic oligonucleotide
caucgaaguucaugguguc

SEQ ID NO: 968860 - RNA, 19 nt, Artificial Sequence
  Description of Artificial Sequence: Synthetic oligonucleotide
gcaacuguggcacgaggug

SEQ ID NO: 968861 - RNA, 19 nt, Artificial Sequence
  Description of Artificial Sequence: Synthetic oligonucleotide
augagggguuauuuggcuu

SEQ ID NO: 968862 - RNA, 19 nt, Artificial Sequence
  Description of Artificial Sequence: Synthetic oligonucleotide
agaccuuagcugaaugcca

SEQ ID NO: 968863 - RNA, 19 nt, Artificial Sequence
  Description of Artificial Sequence: Synthetic oligonucleotide
auucuaggugccucauaau

SEQ ID NO: 968864 - RNA, 19 nt, Artificial Sequence
  Description of Artificial Sequence: Synthetic oligonucleotide
agcuggacgaggcccagau

SEQ ID NO: 968865 - RNA, 19 nt, Artificial Sequence
  Description of Artificial Sequence: Synthetic oligonucleotide
ugcaggacugccacagcuu

SEQ ID NO: 968866 - RNA, 19 nt, Artificial Sequence
  Description of Artificial Sequence: Synthetic oligonucleotide
cacggccuacgaauauugc

SEQ ID NO: 968867 - RNA, 19 nt, Artificial Sequence
  Description of Artificial Sequence: Synthetic oligonucleotide
agcucagaguugucaauuu

SEQ ID NO: 968868 - RNA, 19 nt, Artificial Sequence
  Description of Artificial Sequence: Synthetic oligonucleotide
ccaugagggguuauuuggc

SEQ ID NO: 968869 - RNA, 19 nt, Artificial Sequence
  Description of Artificial Sequence: Synthetic oligonucleotide
aguuggagccagauggcga

SEQ ID NO: 968870 - RNA, 19 nt, Artificial Sequence
  Description of Artificial Sequence: Synthetic oligonucleotide
ccagauugccguauagcac

SEQ ID NO: 968871 - RNA, 19 nt, Artificial Sequence
  Description of Artificial Sequence: Synthetic oligonucleotide
gcaacguacagcggcuucg

SEQ ID NO: 968872 - RNA, 19 nt, Artificial Sequence
  Description of Artificial Sequence: Synthetic oligonucleotide
ccuuggaacggagagacuc

SEQ ID NO: 968873 - RNA, 19 nt, Artificial Sequence
  Description of Artificial Sequence: Synthetic oligonucleotide
aguccauagccaagcgguc

SEQ ID NO: 968874 - RNA, 19 nt, Artificial Sequence
  Description of Artificial Sequence: Synthetic oligonucleotide
cauuaccaguuggagccag

SEQ ID NO: 968875 - RNA, 19 nt, Artificial Sequence
  Description of Artificial Sequence: Synthetic oligonucleotide
cauccaccuuggaacggag

SEQ ID NO: 968876 - RNA, 19 nt, Artificial Sequence
  Description of Artificial Sequence: Synthetic oligonucleotide
accuugacacuuaaaguuu

SEQ ID NO: 968877 - RNA, 19 nt, Artificial Sequence
  Description of Artificial Sequence: Synthetic oligonucleotide
uaacaaccugggccauagc

SEQ ID NO: 968878 - RNA, 19 nt, Artificial Sequence
  Description of Artificial Sequence: Synthetic oligonucleotide
augaccuauugaauuugca

SEQ ID NO: 968879 - RNA, 19 nt, Artificial Sequence
  Description of Artificial Sequence: Synthetic oligonucleotide
cuaauucgcuccugcuuca

SEQ ID NO: 968880 - RNA, 19 nt, Artificial Sequence
  Description of Artificial Sequence: Synthetic oligonucleotide
ugcggcguauuuguaugga

SEQ ID NO: 968881 - RNA, 19 nt, Artificial Sequence
  Description of Artificial Sequence: Synthetic oligonucleotide
gacuaauucgcuccugcuu

SEQ ID NO: 968882 - RNA, 19 nt, Artificial Sequence
  Description of Artificial Sequence: Synthetic oligonucleotide
cucucaugccagccacacg

SEQ ID NO: 968883 - RNA, 19 nt, Artificial Sequence
  Description of Artificial Sequence: Synthetic oligonucleotide
ggacugcggacacuugcgg

SEQ ID NO: 968884 - RNA, 19 nt, Artificial Sequence
  Description of Artificial Sequence: Synthetic oligonucleotide
agcggcuucgagccuacaa

SEQ ID NO: 968885 - RNA, 19 nt, Artificial Sequence
  Description of Artificial Sequence: Synthetic oligonucleotide
ggcaguuaguggcuccugc

SEQ ID NO: 968886 - RNA, 19 nt, Artificial Sequence
  Description of Artificial Sequence: Synthetic oligonucleotide
uuaauucagccuggcgcuc

SEQ ID NO: 968887 - RNA, 19 nt, Artificial Sequence
  Description of Artificial Sequence: Synthetic oligonucleotide
uacaauccuuccguucauc

SEQ ID NO: 968888 - RNA, 19 nt, Artificial Sequence
  Description of Artificial Sequence: Synthetic oligonucleotide
guucaucucagugacugcu

SEQ ID NO: 968889 - RNA, 19 nt, Artificial Sequence
  Description of Artificial Sequence: Synthetic oligonucleotide
gauggcauuggcagggagu

SEQ ID NO: 968890 - RNA, 19 nt, Artificial Sequence
  Description of Artificial Sequence: Synthetic oligonucleotide
uugcaacuugugguucuug

SEQ ID NO: 968891 - RNA, 19 nt, Artificial Sequence
  Description of Artificial Sequence: Synthetic oligonucleotide
gacaaacaaggaagucuuc

SEQ ID NO: 968892 - RNA, 19 nt, Artificial Sequence
  Description of Artificial Sequence: Synthetic oligonucleotide
agcugguuaggcguguaau

SEQ ID NO: 968893 - RNA, 19 nt, Artificial Sequence
  Description of Artificial Sequence: Synthetic oligonucleotide
ccguucaucucagugacug

SEQ ID NO: 968894 - RNA, 19 nt, Artificial Sequence
  Description of Artificial Sequence: Synthetic oligonucleotide
ggugcaucaaaaccaauuu

SEQ ID NO: 968895 - RNA, 19 nt, Artificial Sequence
  Description of Artificial Sequence: Synthetic oligonucleotide
ccguuuuaauucagccugg

SEQ ID NO: 968896 - RNA, 19 nt, Artificial Sequence
  Description of Artificial Sequence: Synthetic oligonucleotide
gcugccagcguggauuagg

SEQ ID NO: 968897 - RNA, 19 nt, Artificial Sequence
  Description of Artificial Sequence: Synthetic oligonucleotide
gugguaguaggaaggccac

SEQ ID NO: 968898 - RNA, 19 nt, Artificial Sequence
  Description of Artificial Sequence: Synthetic oligonucleotide
gggguuauuuggcuuuuga

SEQ ID NO: 968899 - RNA, 19 nt, Artificial Sequence
  Description of Artificial Sequence: Synthetic oligonucleotide
ggcugaauggcagggugag

SEQ ID NO: 968900 - RNA, 19 nt, Artificial Sequence
  Description of Artificial Sequence: Synthetic oligonucleotide
gauugccguauagcacuug

SEQ ID NO: 968901 - RNA, 19 nt, Artificial Sequence
  Description of Artificial Sequence: Synthetic oligonucleotide
ccccgagcucaucacaucg

SEQ ID NO: 968902 - RNA, 19 nt, Artificial Sequence
  Description of Artificial Sequence: Synthetic oligonucleotide
cguauuuguauggagccac

SEQ ID NO: 968903 - RNA, 19 nt, Artificial Sequence
  Description of Artificial Sequence: Synthetic oligonucleotide
uuugcaacuugugguucuu

SEQ ID NO: 968904 - RNA, 19 nt, Artificial Sequence
  Description of Artificial Sequence: Synthetic oligonucleotide
cgagccuacaauccuuccg

SEQ ID NO: 968905 - RNA, 19 nt, Artificial Sequence
  Description of Artificial Sequence: Synthetic oligonucleotide
acgcugcauauacugguua

SEQ ID NO: 968906 - RNA, 19 nt, Artificial Sequence
  Description of Artificial Sequence: Synthetic oligonucleotide
uuaguggcuccugccccug

SEQ ID NO: 968907 - RNA, 19 nt, Artificial Sequence
  Description of Artificial Sequence: Synthetic oligonucleotide
ggcuucgagccuacaaucc

SEQ ID NO: 968908 - RNA, 19 nt, Artificial Sequence
  Description of Artificial Sequence: Synthetic oligonucleotide
cggcguauuuguauggagc

SEQ ID NO: 968909 - RNA, 19 nt, Artificial Sequence
  Description of Artificial Sequence: Synthetic oligonucleotide
uacagcggcuucgagccua

SEQ ID NO: 968910 - RNA, 19 nt, Artificial Sequence
  Description of Artificial Sequence: Synthetic oligonucleotide
ggauuaggccucaucugug

SEQ ID NO: 968911 - RNA, 19 nt, Artificial Sequence
  Description of Artificial Sequence: Synthetic oligonucleotide
guaaucuuuccagccaggu

SEQ ID NO: 968912 - RNA, 19 nt, Artificial Sequence
  Description of Artificial Sequence: Synthetic oligonucleotide
caugagggguuauuuggcu

SEQ ID NO: 968913 - RNA, 19 nt, Artificial Sequence
  Description of Artificial Sequence: Synthetic oligonucleotide
auagcagaacccagagaau

SEQ ID NO: 968914 - RNA, 19 nt, Artificial Sequence
  Description of Artificial Sequence: Synthetic oligonucleotide
gcggcguauuuguauggag

SEQ ID NO: 968915 - RNA, 19 nt, Artificial Sequence
  Description of Artificial Sequence: Synthetic oligonucleotide
auguagagauucacucccu

SEQ ID NO: 968916 - RNA, 19 nt, Artificial Sequence
  Description of Artificial Sequence: Synthetic oligonucleotide
aucgaggcaguuaguggcu

SEQ ID NO: 968917 - RNA, 19 nt, Artificial Sequence
  Description of Artificial Sequence: Synthetic oligonucleotide
ccuguaaucuuuccagcca

SEQ ID NO: 968918 - RNA, 19 nt, Artificial Sequence
  Description of Artificial Sequence: Synthetic oligonucleotide
cacgaggugcaaggcuugg

SEQ ID NO: 968919 - RNA, 19 nt, Artificial Sequence
  Description of Artificial Sequence: Synthetic oligonucleotide
ugcacggccuacgaauauu

SEQ ID NO: 968920 - RNA, 19 nt, Artificial Sequence
  Description of Artificial Sequence: Synthetic oligonucleotide
cucagacccgacucucuga

SEQ ID NO: 968921 - RNA, 19 nt, Artificial Sequence
  Description of Artificial Sequence: Synthetic oligonucleotide
cugugcacggccuacgaau

SEQ ID NO: 968922 - RNA, 19 nt, Artificial Sequence
  Description of Artificial Sequence: Synthetic oligonucleotide
acauguggagcagcucaga

SEQ ID NO: 968923 - RNA, 19 nt, Artificial Sequence
  Description of Artificial Sequence: Synthetic oligonucleotide
aggccucaucugugcuagc

SEQ ID NO: 968924 - RNA, 19 nt, Artificial Sequence
  Description of Artificial Sequence: Synthetic oligonucleotide
augccaugagggguuauuu

SEQ ID NO: 968925 - RNA, 19 nt, Artificial Sequence
  Description of Artificial Sequence: Synthetic oligonucleotide
cauuggugaauuccuuggu

SEQ ID NO: 968926 - RNA, 19 nt, Artificial Sequence
  Description of Artificial Sequence: Synthetic oligonucleotide
guuaggcguguaauaugga

SEQ ID NO: 968927 - RNA, 19 nt, Artificial Sequence
  Description of Artificial Sequence: Synthetic oligonucleotide
cagucagcccuugcugggc

SEQ ID NO: 968928 - RNA, 19 nt, Artificial Sequence
  Description of Artificial Sequence: Synthetic oligonucleotide
guuaguggcuccugccccu

SEQ ID NO: 968929 - RNA, 19 nt, Artificial Sequence
  Description of Artificial Sequence: Synthetic oligonucleotide
agggcaacguacagcggcu

SEQ ID NO: 968930 - RNA, 19 nt, Artificial Sequence
  Description of Artificial Sequence: Synthetic oligonucleotide
cuuagcacuggugauugau

SEQ ID NO: 968931 - RNA, 19 nt, Artificial Sequence
  Description of Artificial Sequence: Synthetic oligonucleotide
cugaaugccaugagggguu

SEQ ID NO: 968932 - RNA, 19 nt, Artificial Sequence
  Description of Artificial Sequence: Synthetic oligonucleotide
cacugggaucucucaucac

SEQ ID NO: 968933 - RNA, 19 nt, Artificial Sequence
  Description of Artificial Sequence: Synthetic oligonucleotide
agcggcaacuguggcacga

SEQ ID NO: 968934 - RNA, 19 nt, Artificial Sequence
  Description of Artificial Sequence: Synthetic oligonucleotide
acccgacucucugaguggu

SEQ ID NO: 968935 - RNA, 19 nt, Artificial Sequence
  Description of Artificial Sequence: Synthetic oligonucleotide
cucaucaccuugacacuua

SEQ ID NO: 968936 - RNA, 19 nt, Artificial Sequence
  Description of Artificial Sequence: Synthetic oligonucleotide
ugaaugccaugagggguua

SEQ ID NO: 968937 - RNA, 19 nt, Artificial Sequence
  Description of Artificial Sequence: Synthetic oligonucleotide
auuaccaguuggagccaga

SEQ ID NO: 968938 - RNA, 19 nt, Artificial Sequence
  Description of Artificial Sequence: Synthetic oligonucleotide
aguuaacaaccugggccau

SEQ ID NO: 968939 - RNA, 19 nt, Artificial Sequence
  Description of Artificial Sequence: Synthetic oligonucleotide
agccuacaauccuuccguu

SEQ ID NO: 968940 - RNA, 19 nt, Artificial Sequence
  Description of Artificial Sequence: Synthetic oligonucleotide
cacucccugguaacgacua

SEQ ID NO: 968941 - RNA, 19 nt, Artificial Sequence
  Description of Artificial Sequence: Synthetic oligonucleotide
ucgaggcaguuaguggcuc

SEQ ID NO: 968942 - RNA, 19 nt, Artificial Sequence
  Description of Artificial Sequence: Synthetic oligonucleotide
gcugguuaggcguguaaua

SEQ ID NO: 968943 - RNA, 19 nt, Artificial Sequence
  Description of Artificial Sequence: Synthetic oligonucleotide
gcacggccuacgaauauug

SEQ ID NO: 968944 - RNA, 19 nt, Artificial Sequence
  Description of Artificial Sequence: Synthetic oligonucleotide
acagcggcuucgagccuac

SEQ ID NO: 968945 - RNA, 19 nt, Artificial Sequence
  Description of Artificial Sequence: Synthetic oligonucleotide
cucagugacugcuuugguu

SEQ ID NO: 968946 - RNA, 19 nt, Artificial Sequence
  Description of Artificial Sequence: Synthetic oligonucleotide
cccugguaacgacuaauuc

SEQ ID NO: 968947 - RNA, 19 nt, Artificial Sequence
  Description of Artificial Sequence: Synthetic oligonucleotide
cccacugggaucucucauc

SEQ ID NO: 968948 - RNA, 19 nt, Artificial Sequence
  Description of Artificial Sequence: Synthetic oligonucleotide
cugguuaggcguguaauau

SEQ ID NO: 968949 - RNA, 19 nt, Artificial Sequence
  Description of Artificial Sequence: Synthetic oligonucleotide
ccagcguggauuaggccuc

SEQ ID NO: 968950 - RNA, 19 nt, Artificial Sequence
  Description of Artificial Sequence: Synthetic oligonucleotide
guguaauauggaggccuuc

SEQ ID NO: 968951 - RNA, 19 nt, Artificial Sequence
  Description of Artificial Sequence: Synthetic oligonucleotide
ggagugcucucaugccagc

SEQ ID NO: 968952 - RNA, 19 nt, Artificial Sequence
  Description of Artificial Sequence: Synthetic oligonucleotide
agggguuauuuggcuuuug

SEQ ID NO: 968953 - RNA, 19 nt, Artificial Sequence
  Description of Artificial Sequence: Synthetic oligonucleotide
ccgacucucugagugguag

SEQ ID NO: 968954 - RNA, 19 nt, Artificial Sequence
  Description of Artificial Sequence: Synthetic oligonucleotide
cuguggcacgaggugcaag

SEQ ID NO: 968955 - RNA, 19 nt, Artificial Sequence
  Description of Artificial Sequence: Synthetic oligonucleotide
ggccacgagaggccggagc

SEQ ID NO: 968956 - RNA, 19 nt, Artificial Sequence
  Description of Artificial Sequence: Synthetic oligonucleotide
caagucuugggugcaucaa

SEQ ID NO: 968957 - RNA, 19 nt, Artificial Sequence
  Description of Artificial Sequence: Synthetic oligonucleotide
ggacuccaacauguggagc

SEQ ID NO: 968958 - RNA, 19 nt, Artificial Sequence
  Description of Artificial Sequence: Synthetic oligonucleotide
gcugaaugccaugaggggu

SEQ ID NO: 968959 - RNA, 19 nt, Artificial Sequence
  Description of Artificial Sequence: Synthetic oligonucleotide
cguggauuaggccucaucu

SEQ ID NO: 968960 - RNA, 19 nt, Artificial Sequence
  Description of Artificial Sequence: Synthetic oligonucleotide
caucaccuugacacuuaaa

SEQ ID NO: 968961 - RNA, 19 nt, Artificial Sequence
  Description of Artificial Sequence: Synthetic oligonucleotide
ggcaacguacagcggcuuc

SEQ ID NO: 968962 - RNA, 19 nt, Artificial Sequence
  Description of Artificial Sequence: Synthetic oligonucleotide
uccuuccguucaucucagu

SEQ ID NO: 968963 - RNA, 19 nt, Artificial Sequence
  Description of Artificial Sequence: Synthetic oligonucleotide
gcguguaauauggaggccu

SEQ ID NO: 968964 - RNA, 19 nt, Artificial Sequence
  Description of Artificial Sequence: Synthetic oligonucleotide
uggaagccuugaggucucc

SEQ ID NO: 968965 - RNA, 19 nt, Artificial Sequence
  Description of Artificial Sequence: Synthetic oligonucleotide
gcugaauggcagggugagg

SEQ ID NO: 968966 - RNA, 19 nt, Artificial Sequence
  Description of Artificial Sequence: Synthetic oligonucleotide
guuaacaaccugggccaua

SEQ ID NO: 968967 - RNA, 19 nt, Artificial Sequence
  Description of Artificial Sequence: Synthetic oligonucleotide
gcuucgagccuacaauccu

SEQ ID NO: 968968 - RNA, 19 nt, Artificial Sequence
  Description of Artificial Sequence: Synthetic oligonucleotide
cuucgagccuacaauccuu

SEQ ID NO: 968969 - RNA, 19 nt, Artificial Sequence
  Description of Artificial Sequence: Synthetic oligonucleotide
caacguacagcggcuucga

SEQ ID NO: 968970 - RNA, 19 nt, Artificial Sequence
  Description of Artificial Sequence: Synthetic oligonucleotide
ggcguguaauauggaggcc

SEQ ID NO: 968971 - RNA, 19 nt, Artificial Sequence
  Description of Artificial Sequence: Synthetic oligonucleotide
ggaacgccuccagacuggc

SEQ ID NO: 968972 - RNA, 19 nt, Artificial Sequence
  Description of Artificial Sequence: Synthetic oligonucleotide
gccuacgaauauugcuuuc

SEQ ID NO: 968973 - RNA, 19 nt, Artificial Sequence
  Description of Artificial Sequence: Synthetic oligonucleotide
gccguauagcacuuggcau

SEQ ID NO: 968974 - RNA, 19 nt, Artificial Sequence
  Description of Artificial Sequence: Synthetic oligonucleotide
agauugccguauagcacuu

SEQ ID NO: 968975 - RNA, 19 nt, Artificial Sequence
  Description of Artificial Sequence: Synthetic oligonucleotide
cguucaucucagugacugc

SEQ ID NO: 968976 - RNA, 19 nt, Artificial Sequence
  Description of Artificial Sequence: Synthetic oligonucleotide
cguauagcacuuggcauuc

SEQ ID NO: 968977 - RNA, 19 nt, Artificial Sequence
  Description of Artificial Sequence: Synthetic oligonucleotide
cagcggcaacuguggcacg

SEQ ID NO: 968978 - RNA, 19 nt, Artificial Sequence
  Description of Artificial Sequence: Synthetic oligonucleotide
agccaguuuuauacagauu

SEQ ID NO: 968979 - RNA, 19 nt, Artificial Sequence
  Description of Artificial Sequence: Synthetic oligonucleotide
ugcugccagcguggauuag

SEQ ID NO: 968980 - RNA, 19 nt, Artificial Sequence
  Description of Artificial Sequence: Synthetic oligonucleotide
cacuuccuccccaaaguuu

SEQ ID NO: 968981 - RNA, 19 nt, Artificial Sequence
  Description of Artificial Sequence: Synthetic oligonucleotide
gggugcaucaaaaccaauu

SEQ ID NO: 968982 - RNA, 19 nt, Artificial Sequence
  Description of Artificial Sequence: Synthetic oligonucleotide
gcguauuuguauggagcca

SEQ ID NO: 968983 - RNA, 19 nt, Artificial Sequence
  Description of Artificial Sequence: Synthetic oligonucleotide
ugcggacacuugcggcgua

SEQ ID NO: 968984 - RNA, 19 nt, Artificial Sequence
  Description of Artificial Sequence: Synthetic oligonucleotide
guccgggcacucagacccg

SEQ ID NO: 968985 - RNA, 19 nt, Artificial Sequence
  Description of Artificial Sequence: Synthetic oligonucleotide
cggcuucgagccuacaauc

SEQ ID NO: 968986 - RNA, 19 nt, Artificial Sequence
  Description of Artificial Sequence: Synthetic oligonucleotide
gccuuauuugcauccucgu

SEQ ID NO: 968987 - RNA, 19 nt, Artificial Sequence
  Description of Artificial Sequence: Synthetic oligonucleotide
ggcaacuguggcacgaggu

SEQ ID NO: 968988 - RNA, 19 nt, Artificial Sequence
  Description of Artificial Sequence: Synthetic oligonucleotide
cgaggcaguuaguggcucc

SEQ ID NO: 968989 - RNA, 19 nt, Artificial Sequence
  Description of Artificial Sequence: Synthetic oligonucleotide
gugacugcuuugguugccu

SEQ ID NO: 968990 - RNA, 19 nt, Artificial Sequence
  Description of Artificial Sequence: Synthetic oligonucleotide
cggagcauuaccaguugga

SEQ ID NO: 968991 - RNA, 19 nt, Artificial Sequence
  Description of Artificial Sequence: Synthetic oligonucleotide
acuguggcacgaggugcaa

SEQ ID NO: 968992 - RNA, 19 nt, Artificial Sequence
  Description of Artificial Sequence: Synthetic oligonucleotide
cuacaauccuuccguucau

SEQ ID NO: 968993 - RNA, 19 nt, Artificial Sequence
  Description of Artificial Sequence: Synthetic oligonucleotide
cacucagacccgacucucu

SEQ ID NO: 968994 - RNA, 19 nt, Artificial Sequence
  Description of Artificial Sequence: Synthetic oligonucleotide
gcggcuucgagccuacaau

SEQ ID NO: 968995 - RNA, 19 nt, Artificial Sequence
  Description of Artificial Sequence: Synthetic oligonucleotide
accuuggaacggagagacu

SEQ ID NO: 968996 - RNA, 19 nt, Artificial Sequence
  Description of Artificial Sequence: Synthetic oligonucleotide
cacgcugcauauacugguu

SEQ ID NO: 968997 - RNA, 19 nt, Artificial Sequence
  Description of Artificial Sequence: Synthetic oligonucleotide
cgaauauugcuuucccacu

SEQ ID NO: 968998 - RNA, 19 nt, Artificial Sequence
  Description of Artificial Sequence: Synthetic oligonucleotide
ggccuacgaauauugcuuu

SEQ ID NO: 968999 - RNA, 19 nt, Artificial Sequence
  Description of Artificial Sequence: Synthetic oligonucleotide
acgagaggccggagcauua

SEQ ID NO: 969000 - RNA, 19 nt, Artificial Sequence
  Description of Artificial Sequence: Synthetic oligonucleotide
cuucagaccuuagcugaau

SEQ ID NO: 969001 - RNA, 19 nt, Artificial Sequence
  Description of Artificial Sequence: Synthetic oligonucleotide
gcggcaacuguggcacgag

SEQ ID NO: 969002 - RNA, 19 nt, Artificial Sequence
  Description of Artificial Sequence: Synthetic oligonucleotide
ccacucauuucuuuuccau

SEQ ID NO: 969003 - RNA, 19 nt, Artificial Sequence
  Description of Artificial Sequence: Synthetic oligonucleotide
ggcacgaggugcaaggcuu

SEQ ID NO: 969004 - RNA, 19 nt, Artificial Sequence
  Description of Artificial Sequence: Synthetic oligonucleotide
cggcaacuguggcacgagg

SEQ ID NO: 969005 - RNA, 19 nt, Artificial Sequence
  Description of Artificial Sequence: Synthetic oligonucleotide
ccuugacacuuaaaguuuu

SEQ ID NO: 969006 - RNA, 19 nt, Artificial Sequence
  Description of Artificial Sequence: Synthetic oligonucleotide
gugcacggccuacgaauau

SEQ ID NO: 969007 - RNA, 19 nt, Artificial Sequence
  Description of Artificial Sequence: Synthetic oligonucleotide
gccccgagcucaucacauc

SEQ ID NO: 969008 - RNA, 19 nt, Artificial Sequence
  Description of Artificial Sequence: Synthetic oligonucleotide
ccaccuuggaacggagaga

SEQ ID NO: 969009 - RNA, 19 nt, Artificial Sequence
  Description of Artificial Sequence: Synthetic oligonucleotide
agcguggauuaggccucau

SEQ ID NO: 969010 - RNA, 19 nt, Artificial Sequence
  Description of Artificial Sequence: Synthetic oligonucleotide
cggccuacgaauauugcuu

SEQ ID NO: 969011 - RNA, 19 nt, Artificial Sequence
  Description of Artificial Sequence: Synthetic oligonucleotide
cgagaggccggagcauuac

SEQ ID NO: 969012 - RNA, 19 nt, Artificial Sequence
  Description of Artificial Sequence: Synthetic oligonucleotide
ccuugcugggcggcaccag

SEQ ID NO: 969013 - RNA, 19 nt, Artificial Sequence
  Description of Artificial Sequence: Synthetic oligonucleotide
cagcguggauuaggccuca

SEQ ID NO: 969014 - RNA, 19 nt, Artificial Sequence
  Description of Artificial Sequence: Synthetic oligonucleotide
cagcaucgaggcaguuagu

SEQ ID NO: 969015 - RNA, 19 nt, Artificial Sequence
  Description of Artificial Sequence: Synthetic oligonucleotide
cugcggacacuugcggcgu

SEQ ID NO: 969016 - RNA, 19 nt, Artificial Sequence
  Description of Artificial Sequence: Synthetic oligonucleotide
cgacuaauucgcuccugcu

SEQ ID NO: 969017 - RNA, 19 nt, Artificial Sequence
  Description of Artificial Sequence: Synthetic oligonucleotide
ggccccgagcucaucacau

SEQ ID NO: 969018 - RNA, 19 nt, Artificial Sequence
  Description of Artificial Sequence: Synthetic oligonucleotide
cguguaauauggaggccuu

SEQ ID NO: 969019 - RNA, 19 nt, Artificial Sequence
  Description of Artificial Sequence: Synthetic oligonucleotide
cagccacacgcugcauaua

SEQ ID NO: 969020 - RNA, 19 nt, Artificial Sequence
  Description of Artificial Sequence: Synthetic oligonucleotide
gcuggacgaggcccagauu

SEQ ID NO: 969021 - RNA, 19 nt, Artificial Sequence
  Description of Artificial Sequence: Synthetic oligonucleotide
cccgacucucugaguggua

SEQ ID NO: 969022 - RNA, 19 nt, Artificial Sequence
  Description of Artificial Sequence: Synthetic oligonucleotide
cgacucucugagugguagu

SEQ ID NO: 969023 - RNA, 19 nt, Artificial Sequence
  Description of Artificial Sequence: Synthetic oligonucleotide
cagcggcuucgagccuaca

SEQ ID NO: 969024 - RNA, 19 nt, Artificial Sequence
  Description of Artificial Sequence: Synthetic oligonucleotide
gcggacacuugcggcguau

SEQ ID NO: 969025 - RNA, 19 nt, Artificial Sequence
  Description of Artificial Sequence: Synthetic oligonucleotide
gggcaacguacagcggcuu

SEQ ID NO: 969026 - RNA, 19 nt, Artificial Sequence
  Description of Artificial Sequence: Synthetic oligonucleotide
gccaagcgguccgggcacu

SEQ ID NO: 969027 - RNA, 19 nt, Artificial Sequence
  Description of Artificial Sequence: Synthetic oligonucleotide
acacuuuaaagacagaccc

SEQ ID NO: 969028 - RNA, 19 nt, Artificial Sequence
  Description of Artificial Sequence: Synthetic oligonucleotide
uaaagacagacccacaacg

SEQ ID NO: 969029 - RNA, 19 nt, Artificial Sequence
  Description of Artificial Sequence: Synthetic oligonucleotide
aaaccuauccugcaugggc

SEQ ID NO: 969030 - RNA, 19 nt, Artificial Sequence
  Description of Artificial Sequence: Synthetic oligonucleotide
aagacagacccacaacgcc

SEQ ID NO: 969031 - RNA, 19 nt, Artificial Sequence
  Description of Artificial Sequence: Synthetic oligonucleotide
aauaaaccuaccuuugaga

SEQ ID NO: 969032 - RNA, 19 nt, Artificial Sequence
  Description of Artificial Sequence: Synthetic oligonucleotide
agaucuguucacuucaaac

SEQ ID NO: 969033 - RNA, 19 nt, Artificial Sequence
  Description of Artificial Sequence: Synthetic oligonucleotide
aaguagaaagguuggugac

SEQ ID NO: 969034 - RNA, 19 nt, Artificial Sequence
  Description of Artificial Sequence: Synthetic oligonucleotide
uuuaaagacagacccacaa

SEQ ID NO: 969035 - RNA, 19 nt, Artificial Sequence
  Description of Artificial Sequence: Synthetic oligonucleotide
aaccuagaggccgaaaccc

SEQ ID NO: 969036 - RNA, 19 nt, Artificial Sequence
  Description of Artificial Sequence: Synthetic oligonucleotide
acuuuaaagacagacccac

SEQ ID NO: 969037 - RNA, 19 nt, Artificial Sequence
  Description of Artificial Sequence: Synthetic oligonucleotide
agaucacacacucacccgc

SEQ ID NO: 969038 - RNA, 19 nt, Artificial Sequence
  Description of Artificial Sequence: Synthetic oligonucleotide
caugccggcaauuuggacc

SEQ ID NO: 969039 - RNA, 19 nt, Artificial Sequence
  Description of Artificial Sequence: Synthetic oligonucleotide
caucaugccggcaauuugg

SEQ ID NO: 969040 - RNA, 19 nt, Artificial Sequence
  Description of Artificial Sequence: Synthetic oligonucleotide
uccgguagugcccaaagug

SEQ ID NO: 969041 - RNA, 19 nt, Artificial Sequence
  Description of Artificial Sequence: Synthetic oligonucleotide
uaaaccuaccuuugagagg

SEQ ID NO: 969042 - RNA, 19 nt, Artificial Sequence
  Description of Artificial Sequence: Synthetic oligonucleotide
ugauagaugcacaggcaag

SEQ ID NO: 969043 - RNA, 19 nt, Artificial Sequence
  Description of Artificial Sequence: Synthetic oligonucleotide
auagaggucaauucauucu

SEQ ID NO: 969044 - RNA, 19 nt, Artificial Sequence
  Description of Artificial Sequence: Synthetic oligonucleotide
ugcgagcugaaccaccugg

SEQ ID NO: 969045 - RNA, 19 nt, Artificial Sequence
  Description of Artificial Sequence: Synthetic oligonucleotide
uuaaagacagacccacaac

SEQ ID NO: 969046 - RNA, 19 nt, Artificial Sequence
  Description of Artificial Sequence: Synthetic oligonucleotide
aagucagucgugcuccauc

SEQ ID NO: 969047 - RNA, 19 nt, Artificial Sequence
  Description of Artificial Sequence: Synthetic oligonucleotide
aagacauggcuaugcuugg

SEQ ID NO: 969048 - RNA, 19 nt, Artificial Sequence
  Description of Artificial Sequence: Synthetic oligonucleotide
aaugucccugauuugccug

SEQ ID NO: 969049 - RNA, 19 nt, Artificial Sequence
  Description of Artificial Sequence: Synthetic oligonucleotide
gauagaggucaauucauuc

SEQ ID NO: 969050 - RNA, 19 nt, Artificial Sequence
  Description of Artificial Sequence: Synthetic oligonucleotide
auacagaaaccuauccugc

SEQ ID NO: 969051 - RNA, 19 nt, Artificial Sequence
  Description of Artificial Sequence: Synthetic oligonucleotide
acaagaucuguucacuuca

SEQ ID NO: 969052 - RNA, 19 nt, Artificial Sequence
  Description of Artificial Sequence: Synthetic oligonucleotide
ugagcauagguggaguccg

SEQ ID NO: 969053 - RNA, 19 nt, Artificial Sequence
  Description of Artificial Sequence: Synthetic oligonucleotide
gaaggauagaggucaauuc

SEQ ID NO: 969054 - RNA, 19 nt, Artificial Sequence
  Description of Artificial Sequence: Synthetic oligonucleotide
cuccugguaaccauugccg

SEQ ID NO: 969055 - RNA, 19 nt, Artificial Sequence
  Description of Artificial Sequence: Synthetic oligonucleotide
gaagucagugcagaagggg

SEQ ID NO: 969056 - RNA, 19 nt, Artificial Sequence
  Description of Artificial Sequence: Synthetic oligonucleotide
ugggcauuuacuuggaaua

SEQ ID NO: 969057 - RNA, 19 nt, Artificial Sequence
  Description of Artificial Sequence: Synthetic oligonucleotide
cucaucggaagccacagac

SEQ ID NO: 969058 - RNA, 19 nt, Artificial Sequence
  Description of Artificial Sequence: Synthetic oligonucleotide
cugucaucgguagagaccc

SEQ ID NO: 969059 - RNA, 19 nt, Artificial Sequence
  Description of Artificial Sequence: Synthetic oligonucleotide
cacuugaaaccacugugcg

SEQ ID NO: 969060 - RNA, 19 nt, Artificial Sequence
  Description of Artificial Sequence: Synthetic oligonucleotide
ucaagggaggaccauuuuc

SEQ ID NO: 969061 - RNA, 19 nt, Artificial Sequence
  Description of Artificial Sequence: Synthetic oligonucleotide
ugcucagacacauuauaaa

SEQ ID NO: 969062 - RNA, 19 nt, Artificial Sequence
  Description of Artificial Sequence: Synthetic oligonucleotide
uccugugugggucggaaga

SEQ ID NO: 969063 - RNA, 19 nt, Artificial Sequence
  Description of Artificial Sequence: Synthetic oligonucleotide
agguacagcaucccgucuc

SEQ ID NO: 969064 - RNA, 19 nt, Artificial Sequence
  Description of Artificial Sequence: Synthetic oligonucleotide
gcaaucuguaaacaucacg

SEQ ID NO: 969065 - RNA, 19 nt, Artificial Sequence
  Description of Artificial Sequence: Synthetic oligonucleotide
uagaggucaauucauucuu

SEQ ID NO: 969066 - RNA, 19 nt, Artificial Sequence
  Description of Artificial Sequence: Synthetic oligonucleotide
gacaccgucagcuggucug

SEQ ID NO: 969067 - RNA, 19 nt, Artificial Sequence
  Description of Artificial Sequence: Synthetic oligonucleotide
gucuaugcagcuuuuguga

SEQ ID NO: 969068 - RNA, 19 nt, Artificial Sequence
  Description of Artificial Sequence: Synthetic oligonucleotide
acacccaaaucucccaaag

SEQ ID NO: 969069 - RNA, 19 nt, Artificial Sequence
  Description of Artificial Sequence: Synthetic oligonucleotide
acccaaaucucccaaagua

SEQ ID NO: 969070 - RNA, 19 nt, Artificial Sequence
  Description of Artificial Sequence: Synthetic oligonucleotide
caucacgagggaaaacacc

SEQ ID NO: 969071 - RNA, 19 nt, Artificial Sequence
  Description of Artificial Sequence: Synthetic oligonucleotide
uaccauaucaaaacaccuu

SEQ ID NO: 969072 - RNA, 19 nt, Artificial Sequence
  Description of Artificial Sequence: Synthetic oligonucleotide
auuugccugacaccgucag

SEQ ID NO: 969073 - RNA, 19 nt, Artificial Sequence
  Description of Artificial Sequence: Synthetic oligonucleotide
ugauuugccugacaccguc

SEQ ID NO: 969074 - RNA, 19 nt, Artificial Sequence
  Description of Artificial Sequence: Synthetic oligonucleotide
agccccauagccccgccgc

SEQ ID NO: 969075 - RNA, 19 nt, Artificial Sequence
  Description of Artificial Sequence: Synthetic oligonucleotide
agggaaaacaccagucgac

SEQ ID NO: 969076 - RNA, 19 nt, Artificial Sequence
  Description of Artificial Sequence: Synthetic oligonucleotide
uagaugcacaggcaaggca

SEQ ID NO: 969077 - RNA, 19 nt, Artificial Sequence
  Description of Artificial Sequence: Synthetic oligonucleotide
caucauuguaggagaggcg

SEQ ID NO: 969078 - RNA, 19 nt, Artificial Sequence
  Description of Artificial Sequence: Synthetic oligonucleotide
uugccugacaccgucagcu

SEQ ID NO: 969079 - RNA, 19 nt, Artificial Sequence
  Description of Artificial Sequence: Synthetic oligonucleotide
agugcuagcggugaagaca

SEQ ID NO: 969080 - RNA, 19 nt, Artificial Sequence
  Description of Artificial Sequence: Synthetic oligonucleotide
accgagcugaccgagcggc

SEQ ID NO: 969081 - RNA, 19 nt, Artificial Sequence
  Description of Artificial Sequence: Synthetic oligonucleotide
acaccagucgacacuagac

SEQ ID NO: 969082 - RNA, 19 nt, Artificial Sequence
  Description of Artificial Sequence: Synthetic oligonucleotide
ccugauuugccugacaccg

SEQ ID NO: 969083 - RNA, 19 nt, Artificial Sequence
  Description of Artificial Sequence: Synthetic oligonucleotide
aacucagcucuguccagug

SEQ ID NO: 969084 - RNA, 19 nt, Artificial Sequence
  Description of Artificial Sequence: Synthetic oligonucleotide
ucacccgcaucuuuaguca

SEQ ID NO: 969085 - RNA, 19 nt, Artificial Sequence
  Description of Artificial Sequence: Synthetic oligonucleotide
ugugcgagcugaaccaccu

SEQ ID NO: 969086 - RNA, 19 nt, Artificial Sequence
  Description of Artificial Sequence: Synthetic oligonucleotide
guagaaagguuggugacac

SEQ ID NO: 969087 - RNA, 19 nt, Artificial Sequence
  Description of Artificial Sequence: Synthetic oligonucleotide
ugugggucggaagaaguca

SEQ ID NO: 969088 - RNA, 19 nt, Artificial Sequence
  Description of Artificial Sequence: Synthetic oligonucleotide
uaaagugcauuuccaucuc

SEQ ID NO: 969089 - RNA, 19 nt, Artificial Sequence
  Description of Artificial Sequence: Synthetic oligonucleotide
cuuagagcaaauggggcac

SEQ ID NO: 969090 - RNA, 19 nt, Artificial Sequence
  Description of Artificial Sequence: Synthetic oligonucleotide
cuagcggugaagacauggc

SEQ ID NO: 969091 - RNA, 19 nt, Artificial Sequence
  Description of Artificial Sequence: Synthetic oligonucleotide
ugagucgccggucccgcgg

SEQ ID NO: 969092 - RNA, 19 nt, Artificial Sequence
  Description of Artificial Sequence: Synthetic oligonucleotide
acugaguggguguuagcug

SEQ ID NO: 969093 - RNA, 19 nt, Artificial Sequence
  Description of Artificial Sequence: Synthetic oligonucleotide
uguuagcugggcagcaaac

SEQ ID NO: 969094 - RNA, 19 nt, Artificial Sequence
  Description of Artificial Sequence: Synthetic oligonucleotide
gagcugaaccaccugggug

SEQ ID NO: 969095 - RNA, 19 nt, Artificial Sequence
  Description of Artificial Sequence: Synthetic oligonucleotide
cucacccgcaucuuuaguc

SEQ ID NO: 969096 - RNA, 19 nt, Artificial Sequence
  Description of Artificial Sequence: Synthetic oligonucleotide
uccucucagaacagggcug

SEQ ID NO: 969097 - RNA, 19 nt, Artificial Sequence
  Description of Artificial Sequence: Synthetic oligonucleotide
auaccauaucaaaacaccu

SEQ ID NO: 969098 - RNA, 19 nt, Artificial Sequence
  Description of Artificial Sequence: Synthetic oligonucleotide
ucuauggugaccgccgccu

SEQ ID NO: 969099 - RNA, 19 nt, Artificial Sequence
  Description of Artificial Sequence: Synthetic oligonucleotide
uagcggugaagacauggcu

SEQ ID NO: 969100 - RNA, 19 nt, Artificial Sequence
  Description of Artificial Sequence: Synthetic oligonucleotide
ucuaugcagcuuuugugau

SEQ ID NO: 969101 - RNA, 19 nt, Artificial Sequence
  Description of Artificial Sequence: Synthetic oligonucleotide
gaaaccuauccugcauggg

SEQ ID NO: 969102 - RNA, 19 nt, Artificial Sequence
  Description of Artificial Sequence: Synthetic oligonucleotide
augccggcaauuuggaccu

SEQ ID NO: 969103 - RNA, 19 nt, Artificial Sequence
  Description of Artificial Sequence: Synthetic oligonucleotide
acuugaaaccacugugcga

SEQ ID NO: 969104 - RNA, 19 nt, Artificial Sequence
  Description of Artificial Sequence: Synthetic oligonucleotide
agucagucgugcuccaucu

SEQ ID NO: 969105 - RNA, 19 nt, Artificial Sequence
  Description of Artificial Sequence: Synthetic oligonucleotide
aaccuauccugcaugggcu

SEQ ID NO: 969106 - RNA, 19 nt, Artificial Sequence
  Description of Artificial Sequence: Synthetic oligonucleotide
gucucuauggugaccgccg

SEQ ID NO: 969107 - RNA, 19 nt, Artificial Sequence
  Description of Artificial Sequence: Synthetic oligonucleotide
uggggcguugggcaaagga

SEQ ID NO: 969108 - RNA, 19 nt, Artificial Sequence
  Description of Artificial Sequence: Synthetic oligonucleotide
aacacccaaaucucccaaa

SEQ ID NO: 969109 - RNA, 19 nt, Artificial Sequence
  Description of Artificial Sequence: Synthetic oligonucleotide
gugauagaugcacaggcaa

SEQ ID NO: 969110 - RNA, 19 nt, Artificial Sequence
  Description of Artificial Sequence: Synthetic oligonucleotide
acgagggaaaacaccaguc

SEQ ID NO: 969111 - RNA, 19 nt, Artificial Sequence
  Description of Artificial Sequence: Synthetic oligonucleotide
gaagugaccgugugcccgc

SEQ ID NO: 969112 - RNA, 19 nt, Artificial Sequence
  Description of Artificial Sequence: Synthetic oligonucleotide
agaggccgaaacccucccc

SEQ ID NO: 969113 - RNA, 19 nt, Artificial Sequence
  Description of Artificial Sequence: Synthetic oligonucleotide
ugcagcuuuugugauagau

SEQ ID NO: 969114 - RNA, 19 nt, Artificial Sequence
  Description of Artificial Sequence: Synthetic oligonucleotide
uccugguaaccauugccgu

SEQ ID NO: 969115 - RNA, 19 nt, Artificial Sequence
  Description of Artificial Sequence: Synthetic oligonucleotide
ucuccccuugucaucagau

SEQ ID NO: 969116 - RNA, 19 nt, Artificial Sequence
  Description of Artificial Sequence: Synthetic oligonucleotide
uuuggaccugcauucugaa

SEQ ID NO: 969117 - RNA, 19 nt, Artificial Sequence
  Description of Artificial Sequence: Synthetic oligonucleotide
agcaaaugucccugauuug

SEQ ID NO: 969118 - RNA, 19 nt, Artificial Sequence
  Description of Artificial Sequence: Synthetic oligonucleotide
agcuuugaacaauuuuaaa

SEQ ID NO: 969119 - RNA, 19 nt, Artificial Sequence
  Description of Artificial Sequence: Synthetic oligonucleotide
ucucuauggugaccgccgc

SEQ ID NO: 969120 - RNA, 19 nt, Artificial Sequence
  Description of Artificial Sequence: Synthetic oligonucleotide
uuugccugacaccgucagc

SEQ ID NO: 969121 - RNA, 19 nt, Artificial Sequence
  Description of Artificial Sequence: Synthetic oligonucleotide
cugcaucucaccguggcag

SEQ ID NO: 969122 - RNA, 19 nt, Artificial Sequence
  Description of Artificial Sequence: Synthetic oligonucleotide
aucucaucggaagccacag

SEQ ID NO: 969123 - RNA, 19 nt, Artificial Sequence
  Description of Artificial Sequence: Synthetic oligonucleotide
agacccacaacgccuuuca

SEQ ID NO: 969124 - RNA, 19 nt, Artificial Sequence
  Description of Artificial Sequence: Synthetic oligonucleotide
ggaaggggccccgagagcg

SEQ ID NO: 969125 - RNA, 19 nt, Artificial Sequence
  Description of Artificial Sequence: Synthetic oligonucleotide
accgucagcuggucugggc

SEQ ID NO: 969126 - RNA, 19 nt, Artificial Sequence
  Description of Artificial Sequence: Synthetic oligonucleotide
ggugaagacauggcuaugc

SEQ ID NO: 969127 - RNA, 19 nt, Artificial Sequence
  Description of Artificial Sequence: Synthetic oligonucleotide
ugcgaugugcagagguaga

SEQ ID NO: 969128 - RNA, 19 nt, Artificial Sequence
  Description of Artificial Sequence: Synthetic oligonucleotide
accagucgacacuagacuu

SEQ ID NO: 969129 - RNA, 19 nt, Artificial Sequence
  Description of Artificial Sequence: Synthetic oligonucleotide
guagugcccaaaguggggc

SEQ ID NO: 969130 - RNA, 19 nt, Artificial Sequence
  Description of Artificial Sequence: Synthetic oligonucleotide
uccgacguggacucuccgc

SEQ ID NO: 969131 - RNA, 19 nt, Artificial Sequence
  Description of Artificial Sequence: Synthetic oligonucleotide
aaccaacuggggcguuggg

SEQ ID NO: 969132 - RNA, 19 nt, Artificial Sequence
  Description of Artificial Sequence: Synthetic oligonucleotide
ucgugcuccaucuggccga

SEQ ID NO: 969133 - RNA, 19 nt, Artificial Sequence
  Description of Artificial Sequence: Synthetic oligonucleotide
gagcuuugaacaauuuuaa

SEQ ID NO: 969134 - RNA, 19 nt, Artificial Sequence
  Description of Artificial Sequence: Synthetic oligonucleotide
agaggucaauucauucuuc

SEQ ID NO: 969135 - RNA, 19 nt, Artificial Sequence
  Description of Artificial Sequence: Synthetic oligonucleotide
uggggcacuugaaaccacu

SEQ ID NO: 969136 - RNA, 19 nt, Artificial Sequence
  Description of Artificial Sequence: Synthetic oligonucleotide
agaggcgagguuugcucag

SEQ ID NO: 969137 - RNA, 19 nt, Artificial Sequence
  Description of Artificial Sequence: Synthetic oligonucleotide
gcuagcggugaagacaugg

SEQ ID NO: 969138 - RNA, 19 nt, Artificial Sequence
  Description of Artificial Sequence: Synthetic oligonucleotide
ggaagugaccgugugcccg

SEQ ID NO: 969139 - RNA, 19 nt, Artificial Sequence
  Description of Artificial Sequence: Synthetic oligonucleotide
accauugccgugagcauag

SEQ ID NO: 969140 - RNA, 19 nt, Artificial Sequence
  Description of Artificial Sequence: Synthetic oligonucleotide
acccacaacgccuuucaaa

SEQ ID NO: 969141 - RNA, 19 nt, Artificial Sequence
  Description of Artificial Sequence: Synthetic oligonucleotide
ugcaucucaccguggcagc

SEQ ID NO: 969142 - RNA, 19 nt, Artificial Sequence
  Description of Artificial Sequence: Synthetic oligonucleotide
agcauagguggaguccgac

SEQ ID NO: 969143 - RNA, 19 nt, Artificial Sequence
  Description of Artificial Sequence: Synthetic oligonucleotide
cccacuacucagaagccgg

SEQ ID NO: 969144 - RNA, 19 nt, Artificial Sequence
  Description of Artificial Sequence: Synthetic oligonucleotide
caccguggcagcagugugg

SEQ ID NO: 969145 - RNA, 19 nt, Artificial Sequence
  Description of Artificial Sequence: Synthetic oligonucleotide
agcaaucuguaaacaucac

SEQ ID NO: 969146 - RNA, 19 nt, Artificial Sequence
  Description of Artificial Sequence: Synthetic oligonucleotide
gugagcauagguggagucc

SEQ ID NO: 969147 - RNA, 19 nt, Artificial Sequence
  Description of Artificial Sequence: Synthetic oligonucleotide
uggagggcugggcaaacau

SEQ ID NO: 969148 - RNA, 19 nt, Artificial Sequence
  Description of Artificial Sequence: Synthetic oligonucleotide
uuguuguuguaaacacuuu

SEQ ID NO: 969149 - RNA, 19 nt, Artificial Sequence
  Description of Artificial Sequence: Synthetic oligonucleotide
auagccccgccgccugucc

SEQ ID NO: 969150 - RNA, 19 nt, Artificial Sequence
  Description of Artificial Sequence: Synthetic oligonucleotide
cagucgugcuccaucuggc

SEQ ID NO: 969151 - RNA, 19 nt, Artificial Sequence
  Description of Artificial Sequence: Synthetic oligonucleotide
gguuugcucagacacauua

SEQ ID NO: 969152 - RNA, 19 nt, Artificial Sequence
  Description of Artificial Sequence: Synthetic oligonucleotide
aaccaccugggugcgaugu

SEQ ID NO: 969153 - RNA, 19 nt, Artificial Sequence
  Description of Artificial Sequence: Synthetic oligonucleotide
aggcgagguuugcucagac

SEQ ID NO: 969154 - RNA, 19 nt, Artificial Sequence
  Description of Artificial Sequence: Synthetic oligonucleotide
ucagaagccgguggagggc

SEQ ID NO: 969155 - RNA, 19 nt, Artificial Sequence
  Description of Artificial Sequence: Synthetic oligonucleotide
ucagaacagggcugucugu

SEQ ID NO: 969156 - RNA, 19 nt, Artificial Sequence
  Description of Artificial Sequence: Synthetic oligonucleotide
gacguggacucuccgccgc

SEQ ID NO: 969157 - RNA, 19 nt, Artificial Sequence
  Description of Artificial Sequence: Synthetic oligonucleotide
cacugugcgagcugaacca

SEQ ID NO: 969158 - RNA, 19 nt, Artificial Sequence
  Description of Artificial Sequence: Synthetic oligonucleotide
cuuuaaagacagacccaca

SEQ ID NO: 969159 - RNA, 19 nt, Artificial Sequence
  Description of Artificial Sequence: Synthetic oligonucleotide
caaucccucugccucacuc

SEQ ID NO: 969160 - RNA, 19 nt, Artificial Sequence
  Description of Artificial Sequence: Synthetic oligonucleotide
aaccauugccgugagcaua

SEQ ID NO: 969161 - RNA, 19 nt, Artificial Sequence
  Description of Artificial Sequence: Synthetic oligonucleotide
ugguaaccauugccgugag

SEQ ID NO: 969162 - RNA, 19 nt, Artificial Sequence
  Description of Artificial Sequence: Synthetic oligonucleotide
aggauagaggucaauucau

SEQ ID NO: 969163 - RNA, 19 nt, Artificial Sequence
  Description of Artificial Sequence: Synthetic oligonucleotide
acuucaaaccaggagucua

SEQ ID NO: 969164 - RNA, 19 nt, Artificial Sequence
  Description of Artificial Sequence: Synthetic oligonucleotide
cuggguugagggugagggg

SEQ ID NO: 969165 - RNA, 19 nt, Artificial Sequence
  Description of Artificial Sequence: Synthetic oligonucleotide
ucucccgagcuuugaacaa

SEQ ID NO: 969166 - RNA, 19 nt, Artificial Sequence
  Description of Artificial Sequence: Synthetic oligonucleotide
ucuucucucaagggaggac

SEQ ID NO: 969167 - RNA, 19 nt, Artificial Sequence
  Description of Artificial Sequence: Synthetic oligonucleotide
accuauccugcaugggcug

SEQ ID NO: 969168 - RNA, 19 nt, Artificial Sequence
  Description of Artificial Sequence: Synthetic oligonucleotide
ucucaucggaagccacaga

SEQ ID NO: 969169 - RNA, 19 nt, Artificial Sequence
  Description of Artificial Sequence: Synthetic oligonucleotide
ggcaaaggaagugaccgug

SEQ ID NO: 969170 - RNA, 19 nt, Artificial Sequence
  Description of Artificial Sequence: Synthetic oligonucleotide
uaaccauugccgugagcau

SEQ ID NO: 969171 - RNA, 19 nt, Artificial Sequence
  Description of Artificial Sequence: Synthetic oligonucleotide
acguggacucuccgccgcc

SEQ ID NO: 969172 - RNA, 19 nt, Artificial Sequence
  Description of Artificial Sequence: Synthetic oligonucleotide
cacucacccgcaucuuuag

SEQ ID NO: 969173 - RNA, 19 nt, Artificial Sequence
  Description of Artificial Sequence: Synthetic oligonucleotide
acggcgcugucaucgguag

SEQ ID NO: 969174 - RNA, 19 nt, Artificial Sequence
  Description of Artificial Sequence: Synthetic oligonucleotide
ggagucagcaagccagccc

SEQ ID NO: 969175 - RNA, 19 nt, Artificial Sequence
  Description of Artificial Sequence: Synthetic oligonucleotide
ggcgcugucaucgguagag

SEQ ID NO: 969176 - RNA, 19 nt, Artificial Sequence
  Description of Artificial Sequence: Synthetic oligonucleotide
agugcagaaggggugcccu

SEQ ID NO: 969177 - RNA, 19 nt, Artificial Sequence
  Description of Artificial Sequence: Synthetic oligonucleotide
aguccgacguggacucucc

SEQ ID NO: 969178 - RNA, 19 nt, Artificial Sequence
  Description of Artificial Sequence: Synthetic oligonucleotide
guuagcugggcagcaaaca

SEQ ID NO: 969179 - RNA, 19 nt, Artificial Sequence
  Description of Artificial Sequence: Synthetic oligonucleotide
gcagagguagagcauccgc

SEQ ID NO: 969180 - RNA, 19 nt, Artificial Sequence
  Description of Artificial Sequence: Synthetic oligonucleotide
cuaccuuugagaggaguca

SEQ ID NO: 969181 - RNA, 19 nt, Artificial Sequence
  Description of Artificial Sequence: Synthetic oligonucleotide
cccgccaccgagcugaccg

SEQ ID NO: 969182 - RNA, 19 nt, Artificial Sequence
  Description of Artificial Sequence: Synthetic oligonucleotide
ugccgugagcauaggugga

SEQ ID NO: 969183 - RNA, 19 nt, Artificial Sequence
  Description of Artificial Sequence: Synthetic oligonucleotide
ucaugccggcaauuuggac

SEQ ID NO: 969184 - RNA, 19 nt, Artificial Sequence
  Description of Artificial Sequence: Synthetic oligonucleotide
aaggggccccgagagcggg

SEQ ID NO: 969185 - RNA, 19 nt, Artificial Sequence
  Description of Artificial Sequence: Synthetic oligonucleotide
cucuauggugaccgccgcc

SEQ ID NO: 969186 - RNA, 19 nt, Artificial Sequence
  Description of Artificial Sequence: Synthetic oligonucleotide
cacaacgccuuucaaaggu

SEQ ID NO: 969187 - RNA, 19 nt, Artificial Sequence
  Description of Artificial Sequence: Synthetic oligonucleotide
ucacugaguggguguuagc

SEQ ID NO: 969188 - RNA, 19 nt, Artificial Sequence
  Description of Artificial Sequence: Synthetic oligonucleotide
guaggagaggcgagguuug

SEQ ID NO: 969189 - RNA, 19 nt, Artificial Sequence
  Description of Artificial Sequence: Synthetic oligonucleotide
caacgccuuucaaagguga

SEQ ID NO: 969190 - RNA, 19 nt, Artificial Sequence
  Description of Artificial Sequence: Synthetic oligonucleotide
ucugagucgccggucccgc

SEQ ID NO: 969191 - RNA, 19 nt, Artificial Sequence
  Description of Artificial Sequence: Synthetic oligonucleotide
uagaaagguuggugacaca

SEQ ID NO: 969192 - RNA, 19 nt, Artificial Sequence
  Description of Artificial Sequence: Synthetic oligonucleotide
acccgcaucuuuagucagc

SEQ ID NO: 969193 - RNA, 19 nt, Artificial Sequence
  Description of Artificial Sequence: Synthetic oligonucleotide
auggugaccgccgccuguc

SEQ ID NO: 969194 - RNA, 19 nt, Artificial Sequence
  Description of Artificial Sequence: Synthetic oligonucleotide
gagucgccggucccgcggg

SEQ ID NO: 969195 - RNA, 19 nt, Artificial Sequence
  Description of Artificial Sequence: Synthetic oligonucleotide
uggggcgcuccucccggcg

SEQ ID NO: 969196 - RNA, 19 nt, Artificial Sequence
  Description of Artificial Sequence: Synthetic oligonucleotide
agcaucccgucucuauggu

SEQ ID NO: 969197 - RNA, 19 nt, Artificial Sequence
  Description of Artificial Sequence: Synthetic oligonucleotide
acaacgccuuucaaaggug

SEQ ID NO: 969198 - RNA, 19 nt, Artificial Sequence
  Description of Artificial Sequence: Synthetic oligonucleotide
ucccgagcuuugaacaauu

SEQ ID NO: 969199 - RNA, 19 nt, Artificial Sequence
  Description of Artificial Sequence: Synthetic oligonucleotide
gcugucaucgguagagacc

SEQ ID NO: 969200 - RNA, 19 nt, Artificial Sequence
  Description of Artificial Sequence: Synthetic oligonucleotide
ugugcccgcccgcuugccc

SEQ ID NO: 969201 - RNA, 19 nt, Artificial Sequence
  Description of Artificial Sequence: Synthetic oligonucleotide
agaaccaacuggggcguug

SEQ ID NO: 969202 - RNA, 19 nt, Artificial Sequence
  Description of Artificial Sequence: Synthetic oligonucleotide
cacccgcaucuuuagucag

SEQ ID NO: 969203 - RNA, 19 nt, Artificial Sequence
  Description of Artificial Sequence: Synthetic oligonucleotide
cucugagucgccggucccg

SEQ ID NO: 969204 - RNA, 19 nt, Artificial Sequence
  Description of Artificial Sequence: Synthetic oligonucleotide
uuguaggagaggcgagguu

SEQ ID NO: 969205 - RNA, 19 nt, Artificial Sequence
  Description of Artificial Sequence: Synthetic oligonucleotide
cauccgccagcgaggcucg

SEQ ID NO: 969206 - RNA, 19 nt, Artificial Sequence
  Description of Artificial Sequence: Synthetic oligonucleotide
aaggggugcccuguucccu

SEQ ID NO: 969207 - RNA, 19 nt, Artificial Sequence
  Description of Artificial Sequence: Synthetic oligonucleotide
ccggaagccaaacaucaug

SEQ ID NO: 969208 - RNA, 19 nt, Artificial Sequence
  Description of Artificial Sequence: Synthetic oligonucleotide
cgagcuuugaacaauuuua

SEQ ID NO: 969209 - RNA, 19 nt, Artificial Sequence
  Description of Artificial Sequence: Synthetic oligonucleotide
aacgccuuucaaaggugaa

SEQ ID NO: 969210 - RNA, 19 nt, Artificial Sequence
  Description of Artificial Sequence: Synthetic oligonucleotide
gacucuccgccgcccggcg

SEQ ID NO: 969211 - RNA, 19 nt, Artificial Sequence
  Description of Artificial Sequence: Synthetic oligonucleotide
agcggugaagacauggcua

SEQ ID NO: 969212 - RNA, 19 nt, Artificial Sequence
  Description of Artificial Sequence: Synthetic oligonucleotide
cuuugagaggagucagcaa

SEQ ID NO: 969213 - RNA, 19 nt, Artificial Sequence
  Description of Artificial Sequence: Synthetic oligonucleotide
ugucaucgguagagacccc

SEQ ID NO: 969214 - RNA, 19 nt, Artificial Sequence
  Description of Artificial Sequence: Synthetic oligonucleotide
cugugugggucggaagaag

SEQ ID NO: 969215 - RNA, 19 nt, Artificial Sequence
  Description of Artificial Sequence: Synthetic oligonucleotide
gauuugccugacaccguca

SEQ ID NO: 969216 - RNA, 19 nt, Artificial Sequence
  Description of Artificial Sequence: Synthetic oligonucleotide
acucacccgcaucuuuagu

SEQ ID NO: 969217 - RNA, 19 nt, Artificial Sequence
  Description of Artificial Sequence: Synthetic oligonucleotide
ccgacguggacucuccgcc

SEQ ID NO: 969218 - RNA, 19 nt, Artificial Sequence
  Description of Artificial Sequence: Synthetic oligonucleotide
cagugcuagcggugaagac

SEQ ID NO: 969219 - RNA, 19 nt, Artificial Sequence
  Description of Artificial Sequence: Synthetic oligonucleotide
cuugguucugucacugagu

SEQ ID NO: 969220 - RNA, 19 nt, Artificial Sequence
  Description of Artificial Sequence: Synthetic oligonucleotide
caugcuagcccgggccccg

SEQ ID NO: 969221 - RNA, 19 nt, Artificial Sequence
  Description of Artificial Sequence: Synthetic oligonucleotide
ccaaacaucaugccggcaa

SEQ ID NO: 969222 - RNA, 19 nt, Artificial Sequence
  Description of Artificial Sequence: Synthetic oligonucleotide
agccuccucucagaacagg

SEQ ID NO: 969223 - RNA, 19 nt, Artificial Sequence
  Description of Artificial Sequence: Synthetic oligonucleotide
accgagcggcugcgcagcc

SEQ ID NO: 969224 - RNA, 19 nt, Artificial Sequence
  Description of Artificial Sequence: Synthetic oligonucleotide
aucaugccggcaauuugga

SEQ ID NO: 969225 - RNA, 19 nt, Artificial Sequence
  Description of Artificial Sequence: Synthetic oligonucleotide
caucucaccguggcagcag

SEQ ID NO: 969226 - RNA, 19 nt, Artificial Sequence
  Description of Artificial Sequence: Synthetic oligonucleotide
caugggcugaugccacgug

SEQ ID NO: 969227 - RNA, 19 nt, Artificial Sequence
  Description of Artificial Sequence: Synthetic oligonucleotide
ccaacuggggcguugggca

SEQ ID NO: 969228 - RNA, 19 nt, Artificial Sequence
  Description of Artificial Sequence: Synthetic oligonucleotide
gugcagagguagagcaucc

SEQ ID NO: 969229 - RNA, 19 nt, Artificial Sequence
  Description of Artificial Sequence: Synthetic oligonucleotide
gaguggguguuagcugggc

SEQ ID NO: 969230 - RNA, 19 nt, Artificial Sequence
  Description of Artificial Sequence: Synthetic oligonucleotide
ccaccgagcugaccgagcg

SEQ ID NO: 969231 - RNA, 19 nt, Artificial Sequence
  Description of Artificial Sequence: Synthetic oligonucleotide
uccgccagcgaggcucggg

SEQ ID NO: 969232 - RNA, 19 nt, Artificial Sequence
  Description of Artificial Sequence: Synthetic oligonucleotide
cuauggugaccgccgccug

SEQ ID NO: 969233 - RNA, 19 nt, Artificial Sequence
  Description of Artificial Sequence: Synthetic oligonucleotide
aggccaaagggcaccccuc

SEQ ID NO: 969234 - RNA, 19 nt, Artificial Sequence
  Description of Artificial Sequence: Synthetic oligonucleotide
ggugcccuguucccucugg

SEQ ID NO: 969235 - RNA, 19 nt, Artificial Sequence
  Description of Artificial Sequence: Synthetic oligonucleotide
accuaccuuugagaggagu

SEQ ID NO: 969236 - RNA, 19 nt, Artificial Sequence
  Description of Artificial Sequence: Synthetic oligonucleotide
gacauggcuaugcuugguu

SEQ ID NO: 969237 - RNA, 19 nt, Artificial Sequence
  Description of Artificial Sequence: Synthetic oligonucleotide
gaguccaaucccucugccu

SEQ ID NO: 969238 - RNA, 19 nt, Artificial Sequence
  Description of Artificial Sequence: Synthetic oligonucleotide
acgccuuucaaaggugaaa

SEQ ID NO: 969239 - RNA, 19 nt, Artificial Sequence
  Description of Artificial Sequence: Synthetic oligonucleotide
gcuaugcuugguucuguca

SEQ ID NO: 969240 - RNA, 19 nt, Artificial Sequence
  Description of Artificial Sequence: Synthetic oligonucleotide
gaaccaccugggugcgaug

SEQ ID NO: 969241 - RNA, 19 nt, Artificial Sequence
  Description of Artificial Sequence: Synthetic oligonucleotide
ggugucccaaacucagcuc

SEQ ID NO: 969242 - RNA, 19 nt, Artificial Sequence
  Description of Artificial Sequence: Synthetic oligonucleotide
ccauaucaaaacaccuuga

SEQ ID NO: 969243 - RNA, 19 nt, Artificial Sequence
  Description of Artificial Sequence: Synthetic oligonucleotide
cccugauuugccugacacc

SEQ ID NO: 969244 - RNA, 19 nt, Artificial Sequence
  Description of Artificial Sequence: Synthetic oligonucleotide
gcgaugugcagagguagag

SEQ ID NO: 969245 - RNA, 19 nt, Artificial Sequence
  Description of Artificial Sequence: Synthetic oligonucleotide
caccgagcugaccgagcgg

SEQ ID NO: 969246 - RNA, 19 nt, Artificial Sequence
  Description of Artificial Sequence: Synthetic oligonucleotide
caggaugcucuggacaaga

SEQ ID NO: 969247 - RNA, 19 nt, Artificial Sequence
  Description of Artificial Sequence: Synthetic oligonucleotide
guccgacguggacucuccg

SEQ ID NO: 969248 - RNA, 19 nt, Artificial Sequence
  Description of Artificial Sequence: Synthetic oligonucleotide
gugugggucggaagaaguc

SEQ ID NO: 969249 - RNA, 19 nt, Artificial Sequence
  Description of Artificial Sequence: Synthetic oligonucleotide
gcgagcugaaccaccuggg

SEQ ID NO: 969250 - RNA, 19 nt, Artificial Sequence
  Description of Artificial Sequence: Synthetic oligonucleotide
cacugaguggguguuagcu

SEQ ID NO: 969251 - RNA, 19 nt, Artificial Sequence
  Description of Artificial Sequence: Synthetic oligonucleotide
caccagucgacacuagacu

SEQ ID NO: 969252 - RNA, 19 nt, Artificial Sequence
  Description of Artificial Sequence: Synthetic oligonucleotide
uggcuaugcuugguucugu

SEQ ID NO: 969253 - RNA, 19 nt, Artificial Sequence
  Description of Artificial Sequence: Synthetic oligonucleotide
cugagucgccggucccgcg

SEQ ID NO: 969254 - RNA, 19 nt, Artificial Sequence
  Description of Artificial Sequence: Synthetic oligonucleotide
ccgccuguccgguagugcc

SEQ ID NO: 969255 - RNA, 19 nt, Artificial Sequence
  Description of Artificial Sequence: Synthetic oligonucleotide
cagugcagaaggggugccc

SEQ ID NO: 969256 - RNA, 19 nt, Artificial Sequence
  Description of Artificial Sequence: Synthetic oligonucleotide
ggagucuaugcagcuuuug

SEQ ID NO: 969257 - RNA, 19 nt, Artificial Sequence
  Description of Artificial Sequence: Synthetic oligonucleotide
ucucucaagggaggaccau

SEQ ID NO: 969258 - RNA, 19 nt, Artificial Sequence
  Description of Artificial Sequence: Synthetic oligonucleotide
agcugaccgagcggcugcg

SEQ ID NO: 969259 - RNA, 19 nt, Artificial Sequence
  Description of Artificial Sequence: Synthetic oligonucleotide
gguaaccauugccgugagc

SEQ ID NO: 969260 - RNA, 19 nt, Artificial Sequence
  Description of Artificial Sequence: Synthetic oligonucleotide
acacucacccgcaucuuua

SEQ ID NO: 969261 - RNA, 19 nt, Artificial Sequence
  Description of Artificial Sequence: Synthetic oligonucleotide
guggaguccgacguggacu

SEQ ID NO: 969262 - RNA, 19 nt, Artificial Sequence
  Description of Artificial Sequence: Synthetic oligonucleotide
uguuccugugugggucgga

SEQ ID NO: 969263 - RNA, 19 nt, Artificial Sequence
  Description of Artificial Sequence: Synthetic oligonucleotide
ccccggaagccaaacauca

SEQ ID NO: 969264 - RNA, 19 nt, Artificial Sequence
  Description of Artificial Sequence: Synthetic oligonucleotide
aaccuaccuuugagaggag

SEQ ID NO: 969265 - RNA, 19 nt, Artificial Sequence
  Description of Artificial Sequence: Synthetic oligonucleotide
ggcuaugcuugguucuguc

SEQ ID NO: 969266 - RNA, 19 nt, Artificial Sequence
  Description of Artificial Sequence: Synthetic oligonucleotide
ggcauuuacuuggaauaaa

SEQ ID NO: 969267 - RNA, 19 nt, Artificial Sequence
  Description of Artificial Sequence: Synthetic oligonucleotide
gugcuagcggugaagacau

SEQ ID NO: 969268 - RNA, 19 nt, Artificial Sequence
  Description of Artificial Sequence: Synthetic oligonucleotide
ugggugcgaugugcagagg

SEQ ID NO: 969269 - RNA, 19 nt, Artificial Sequence
  Description of Artificial Sequence: Synthetic oligonucleotide
ggaaggauagaggucaauu

SEQ ID NO: 969270 - RNA, 19 nt, Artificial Sequence
  Description of Artificial Sequence: Synthetic oligonucleotide
ggcacggcgcugucaucgg

SEQ ID NO: 969271 - RNA, 19 nt, Artificial Sequence
  Description of Artificial Sequence: Synthetic oligonucleotide
caaacaucaugccggcaau

SEQ ID NO: 969272 - RNA, 19 nt, Artificial Sequence
  Description of Artificial Sequence: Synthetic oligonucleotide
ccccacuacucagaagccg

SEQ ID NO: 969273 - RNA, 19 nt, Artificial Sequence
  Description of Artificial Sequence: Synthetic oligonucleotide
gaccugcauucugaagcca

SEQ ID NO: 969274 - RNA, 19 nt, Artificial Sequence
  Description of Artificial Sequence: Synthetic oligonucleotide
gaggcgagguuugcucaga

SEQ ID NO: 969275 - RNA, 19 nt, Artificial Sequence
  Description of Artificial Sequence: Synthetic oligonucleotide
gguacagcaucccgucucu

SEQ ID NO: 969276 - RNA, 19 nt, Artificial Sequence
  Description of Artificial Sequence: Synthetic oligonucleotide
ggggcguugggcaaaggaa

SEQ ID NO: 969277 - RNA, 19 nt, Artificial Sequence
  Description of Artificial Sequence: Synthetic oligonucleotide
gggcauuuacuuggaauaa

SEQ ID NO: 969278 - RNA, 19 nt, Artificial Sequence
  Description of Artificial Sequence: Synthetic oligonucleotide
aucuggccgagagcugcug

SEQ ID NO: 969279 - RNA, 19 nt, Artificial Sequence
  Description of Artificial Sequence: Synthetic oligonucleotide
ggcgagguuugcucagaca

SEQ ID NO: 969280 - RNA, 19 nt, Artificial Sequence
  Description of Artificial Sequence: Synthetic oligonucleotide
cauugccgugagcauaggu

SEQ ID NO: 969281 - RNA, 19 nt, Artificial Sequence
  Description of Artificial Sequence: Synthetic oligonucleotide
cuguucccucugguguccc

SEQ ID NO: 969282 - RNA, 19 nt, Artificial Sequence
  Description of Artificial Sequence: Synthetic oligonucleotide
gcccucucugagucgccgg

SEQ ID NO: 969283 - RNA, 19 nt, Artificial Sequence
  Description of Artificial Sequence: Synthetic oligonucleotide
agcgaggcucgggagccca

SEQ ID NO: 969284 - RNA, 19 nt, Artificial Sequence
  Description of Artificial Sequence: Synthetic oligonucleotide
caccccuccggccgugcug

SEQ ID NO: 969285 - RNA, 19 nt, Artificial Sequence
  Description of Artificial Sequence: Synthetic oligonucleotide
gagcauagguggaguccga

SEQ ID NO: 969286 - RNA, 19 nt, Artificial Sequence
  Description of Artificial Sequence: Synthetic oligonucleotide
cacggcgcugucaucggua

SEQ ID NO: 969287 - RNA, 19 nt, Artificial Sequence
  Description of Artificial Sequence: Synthetic oligonucleotide
ugcuagcccgggccccggu

SEQ ID NO: 969288 - RNA, 19 nt, Artificial Sequence
  Description of Artificial Sequence: Synthetic oligonucleotide
cgaugugcagagguagagc

SEQ ID NO: 969289 - RNA, 19 nt, Artificial Sequence
  Description of Artificial Sequence: Synthetic oligonucleotide
cauagccccgccgccuguc

SEQ ID NO: 969290 - RNA, 19 nt, Artificial Sequence
  Description of Artificial Sequence: Synthetic oligonucleotide
gucugggcauuuacuugga

SEQ ID NO: 969291 - RNA, 19 nt, Artificial Sequence
  Description of Artificial Sequence: Synthetic oligonucleotide
cgugagcauagguggaguc

SEQ ID NO: 969292 - RNA, 19 nt, Artificial Sequence
  Description of Artificial Sequence: Synthetic oligonucleotide
caugcccgccaccgagcug

SEQ ID NO: 969293 - RNA, 19 nt, Artificial Sequence
  Description of Artificial Sequence: Synthetic oligonucleotide
ccgccugucuccugguaac

SEQ ID NO: 969294 - RNA, 19 nt, Artificial Sequence
  Description of Artificial Sequence: Synthetic oligonucleotide
gacagacccacaacgccuu

SEQ ID NO: 969295 - RNA, 19 nt, Artificial Sequence
  Description of Artificial Sequence: Synthetic oligonucleotide
caauuuggaccugcauucu

SEQ ID NO: 969296 - RNA, 19 nt, Artificial Sequence
  Description of Artificial Sequence: Synthetic oligonucleotide
cugauuugccugacaccgu

SEQ ID NO: 969297 - RNA, 19 nt, Artificial Sequence
  Description of Artificial Sequence: Synthetic oligonucleotide
agggcaccccuccggccgu

SEQ ID NO: 969298 - RNA, 19 nt, Artificial Sequence
  Description of Artificial Sequence: Synthetic oligonucleotide
ggugaccgccgccugucuc

SEQ ID NO: 969299 - RNA, 19 nt, Artificial Sequence
  Description of Artificial Sequence: Synthetic oligonucleotide
cccuugucaucagauugug

SEQ ID NO: 969300 - RNA, 19 nt, Artificial Sequence
  Description of Artificial Sequence: Synthetic oligonucleotide
agcauccgccagcgaggcu

SEQ ID NO: 969301 - RNA, 19 nt, Artificial Sequence
  Description of Artificial Sequence: Synthetic oligonucleotide
ccgucagcuggucugggca

SEQ ID NO: 969302 - RNA, 19 nt, Artificial Sequence
  Description of Artificial Sequence: Synthetic oligonucleotide
cuggccgagagcugcugcu

SEQ ID NO: 969303 - RNA, 19 nt, Artificial Sequence
  Description of Artificial Sequence: Synthetic oligonucleotide
augcuagcccgggccccgg

SEQ ID NO: 969304 - RNA, 19 nt, Artificial Sequence
  Description of Artificial Sequence: Synthetic oligonucleotide
ccuugucaucagauuguga

SEQ ID NO: 969305 - RNA, 19 nt, Artificial Sequence
  Description of Artificial Sequence: Synthetic oligonucleotide
guccgguagugcccaaagu

SEQ ID NO: 969306 - RNA, 19 nt, Artificial Sequence
  Description of Artificial Sequence: Synthetic oligonucleotide
gagcgggccgccgugcucu

SEQ ID NO: 969307 - RNA, 19 nt, Artificial Sequence
  Description of Artificial Sequence: Synthetic oligonucleotide
cgacguggacucuccgccg

SEQ ID NO: 969308 - RNA, 19 nt, Artificial Sequence
  Description of Artificial Sequence: Synthetic oligonucleotide
aggagucuaugcagcuuuu

SEQ ID NO: 969309 - RNA, 19 nt, Artificial Sequence
  Description of Artificial Sequence: Synthetic oligonucleotide
agaagccgguggagggcug

SEQ ID NO: 969310 - RNA, 19 nt, Artificial Sequence
  Description of Artificial Sequence: Synthetic oligonucleotide
cucucagaacagggcuguc

SEQ ID NO: 969311 - RNA, 19 nt, Artificial Sequence
  Description of Artificial Sequence: Synthetic oligonucleotide
ggacucuccgccgcccggc

SEQ ID NO: 969312 - RNA, 19 nt, Artificial Sequence
  Description of Artificial Sequence: Synthetic oligonucleotide
ccggcgcccucucugaguc

SEQ ID NO: 969313 - RNA, 19 nt, Artificial Sequence
  Description of Artificial Sequence: Synthetic oligonucleotide
agggcugggcaaacauaaa

SEQ ID NO: 969314 - RNA, 19 nt, Artificial Sequence
  Description of Artificial Sequence: Synthetic oligonucleotide
gcuagcccgggccccggug

SEQ ID NO: 969315 - RNA, 19 nt, Artificial Sequence
  Description of Artificial Sequence: Synthetic oligonucleotide
agucgccggucccgcggga

SEQ ID NO: 969316 - RNA, 19 nt, Artificial Sequence
  Description of Artificial Sequence: Synthetic oligonucleotide
ggauagaggucaauucauu

SEQ ID NO: 969317 - RNA, 19 nt, Artificial Sequence
  Description of Artificial Sequence: Synthetic oligonucleotide
cccgcaucuuuagucagca

SEQ ID NO: 969318 - RNA, 19 nt, Artificial Sequence
  Description of Artificial Sequence: Synthetic oligonucleotide
gguguuagcugggcagcaa

SEQ ID NO: 969319 - RNA, 19 nt, Artificial Sequence
  Description of Artificial Sequence: Synthetic oligonucleotide
gccgagagcugcugcugca

SEQ ID NO: 969320 - RNA, 19 nt, Artificial Sequence
  Description of Artificial Sequence: Synthetic oligonucleotide
cacacucacccgcaucuuu

SEQ ID NO: 969321 - RNA, 19 nt, Artificial Sequence
  Description of Artificial Sequence: Synthetic oligonucleotide
cuccggccgugcugggguc

SEQ ID NO: 969322 - RNA, 19 nt, Artificial Sequence
  Description of Artificial Sequence: Synthetic oligonucleotide
ccaugcuagcccgggcccc

SEQ ID NO: 969323 - RNA, 19 nt, Artificial Sequence
  Description of Artificial Sequence: Synthetic oligonucleotide
cuggggcguugggcaaagg

SEQ ID NO: 969324 - RNA, 19 nt, Artificial Sequence
  Description of Artificial Sequence: Synthetic oligonucleotide
ggguguuagcugggcagca

SEQ ID NO: 969325 - RNA, 19 nt, Artificial Sequence
  Description of Artificial Sequence: Synthetic oligonucleotide
ccgugcugggguccaugcc

SEQ ID NO: 969326 - RNA, 19 nt, Artificial Sequence
  Description of Artificial Sequence: Synthetic oligonucleotide
gccugucuccugguaacca

SEQ ID NO: 969327 - RNA, 19 nt, Artificial Sequence
  Description of Artificial Sequence: Synthetic oligonucleotide
cucucaagggaggaccauu

SEQ ID NO: 969328 - RNA, 19 nt, Artificial Sequence
  Description of Artificial Sequence: Synthetic oligonucleotide
gaccgccgccugucuccug

SEQ ID NO: 969329 - RNA, 19 nt, Artificial Sequence
  Description of Artificial Sequence: Synthetic oligonucleotide
ugcccgccaccgagcugac

SEQ ID NO: 969330 - RNA, 19 nt, Artificial Sequence
  Description of Artificial Sequence: Synthetic oligonucleotide
ccccuugucaucagauugu

SEQ ID NO: 969331 - RNA, 19 nt, Artificial Sequence
  Description of Artificial Sequence: Synthetic oligonucleotide
agguuugcucagacacauu

SEQ ID NO: 969332 - RNA, 19 nt, Artificial Sequence
  Description of Artificial Sequence: Synthetic oligonucleotide
ccugacaccgucagcuggu

SEQ ID NO: 969333 - RNA, 19 nt, Artificial Sequence
  Description of Artificial Sequence: Synthetic oligonucleotide
gguggggcgggaaccuaga

SEQ ID NO: 969334 - RNA, 19 nt, Artificial Sequence
  Description of Artificial Sequence: Synthetic oligonucleotide
cgguggggcgggaaccuag

SEQ ID NO: 969335 - RNA, 19 nt, Artificial Sequence
  Description of Artificial Sequence: Synthetic oligonucleotide
cgccuguccgguagugccc

SEQ ID NO: 969336 - RNA, 19 nt, Artificial Sequence
  Description of Artificial Sequence: Synthetic oligonucleotide
ggguugagggugaggggaa

SEQ ID NO: 969337 - RNA, 19 nt, Artificial Sequence
  Description of Artificial Sequence: Synthetic oligonucleotide
cagcgaggcucgggagccc

SEQ ID NO: 969338 - RNA, 19 nt, Artificial Sequence
  Description of Artificial Sequence: Synthetic oligonucleotide
cuguccgguagugcccaaa

SEQ ID NO: 969339 - RNA, 19 nt, Artificial Sequence
  Description of Artificial Sequence: Synthetic oligonucleotide
gaccgugugcccgcccgcu

SEQ ID NO: 969340 - RNA, 19 nt, Artificial Sequence
  Description of Artificial Sequence: Synthetic oligonucleotide
gggcgggaaccuagaggcc

SEQ ID NO: 969341 - RNA, 19 nt, Artificial Sequence
  Description of Artificial Sequence: Synthetic oligonucleotide
ccgcaucuuuagucagcac

SEQ ID NO: 969342 - RNA, 19 nt, Artificial Sequence
  Description of Artificial Sequence: Synthetic oligonucleotide
gugugcccgcccgcuugcc

SEQ ID NO: 969343 - RNA, 19 nt, Artificial Sequence
  Description of Artificial Sequence: Synthetic oligonucleotide
gggugcccuguucccucug

SEQ ID NO: 969344 - RNA, 19 nt, Artificial Sequence
  Description of Artificial Sequence: Synthetic oligonucleotide
cucccgagcuuugaacaau

SEQ ID NO: 969345 - RNA, 19 nt, Artificial Sequence
  Description of Artificial Sequence: Synthetic oligonucleotide
gcccuuucccuccuggguu

SEQ ID NO: 969346 - RNA, 19 nt, Artificial Sequence
  Description of Artificial Sequence: Synthetic oligonucleotide
cgcuugcccgcugucagug

SEQ ID NO: 969347 - RNA, 19 nt, Artificial Sequence
  Description of Artificial Sequence: Synthetic oligonucleotide
guacagcaucccgucucua

SEQ ID NO: 969348 - RNA, 19 nt, Artificial Sequence
  Description of Artificial Sequence: Synthetic oligonucleotide
auccgccagcgaggcucgg

SEQ ID NO: 969349 - RNA, 19 nt, Artificial Sequence
  Description of Artificial Sequence: Synthetic oligonucleotide
cccgggaaggggccccgag

SEQ ID NO: 969350 - RNA, 19 nt, Artificial Sequence
  Description of Artificial Sequence: Synthetic oligonucleotide
cgugugcccgcccgcuugc

SEQ ID NO: 969351 - RNA, 19 nt, Artificial Sequence
  Description of Artificial Sequence: Synthetic oligonucleotide
ccagucgacacuagacuuu

SEQ ID NO: 969352 - RNA, 19 nt, Artificial Sequence
  Description of Artificial Sequence: Synthetic oligonucleotide
ggucccgcgggaggcggug

SEQ ID NO: 969353 - RNA, 19 nt, Artificial Sequence
  Description of Artificial Sequence: Synthetic oligonucleotide
ccauugccgugagcauagg

SEQ ID NO: 969354 - RNA, 19 nt, Artificial Sequence
  Description of Artificial Sequence: Synthetic oligonucleotide
ccuauccugcaugggcuga

SEQ ID NO: 969355 - RNA, 19 nt, Artificial Sequence
  Description of Artificial Sequence: Synthetic oligonucleotide
gccaaacaucaugccggca

SEQ ID NO: 969356 - RNA, 19 nt, Artificial Sequence
  Description of Artificial Sequence: Synthetic oligonucleotide
ccugugugggucggaagaa

SEQ ID NO: 969357 - RNA, 19 nt, Artificial Sequence
  Description of Artificial Sequence: Synthetic oligonucleotide
gcgggaaccuagaggccga

SEQ ID NO: 969358 - RNA, 19 nt, Artificial Sequence
  Description of Artificial Sequence: Synthetic oligonucleotide
ccccgguggggcgggaacc

SEQ ID NO: 969359 - RNA, 19 nt, Artificial Sequence
  Description of Artificial Sequence: Synthetic oligonucleotide
cugaaccaccugggugcga

SEQ ID NO: 969360 - RNA, 19 nt, Artificial Sequence
  Description of Artificial Sequence: Synthetic oligonucleotide
cguggacucuccgccgccc

SEQ ID NO: 969361 - RNA, 19 nt, Artificial Sequence
  Description of Artificial Sequence: Synthetic oligonucleotide
ccgccagcgaggcucggga

SEQ ID NO: 969362 - RNA, 19 nt, Artificial Sequence
  Description of Artificial Sequence: Synthetic oligonucleotide
ggggaaggauagaggucaa

SEQ ID NO: 969363 - RNA, 19 nt, Artificial Sequence
  Description of Artificial Sequence: Synthetic oligonucleotide
cgcccucucugagucgccg

SEQ ID NO: 969364 - RNA, 19 nt, Artificial Sequence
  Description of Artificial Sequence: Synthetic oligonucleotide
gggaaccuagaggccgaaa

SEQ ID NO: 969365 - RNA, 19 nt, Artificial Sequence
  Description of Artificial Sequence: Synthetic oligonucleotide
ccacuacucagaagccggu

SEQ ID NO: 969366 - RNA, 19 nt, Artificial Sequence
  Description of Artificial Sequence: Synthetic oligonucleotide
ccggucccgcgggaggcgg

SEQ ID NO: 969367 - RNA, 19 nt, Artificial Sequence
  Description of Artificial Sequence: Synthetic oligonucleotide
ccacagacuuagagcaaau

SEQ ID NO: 969368 - RNA, 19 nt, Artificial Sequence
  Description of Artificial Sequence: Synthetic oligonucleotide
gggaaggauagaggucaau

SEQ ID NO: 969369 - RNA, 19 nt, Artificial Sequence
  Description of Artificial Sequence: Synthetic oligonucleotide
gcccgcuugcccgcuguca

SEQ ID NO: 969370 - RNA, 19 nt, Artificial Sequence
  Description of Artificial Sequence: Synthetic oligonucleotide
gcgaggcucgggagcccag

SEQ ID NO: 969371 - RNA, 19 nt, Artificial Sequence
  Description of Artificial Sequence: Synthetic oligonucleotide
cccgggccccgguggggcg

SEQ ID NO: 969372 - RNA, 19 nt, Artificial Sequence
  Description of Artificial Sequence: Synthetic oligonucleotide
ggcaccccuccggccgugc

SEQ ID NO: 969373 - RNA, 19 nt, Artificial Sequence
  Description of Artificial Sequence: Synthetic oligonucleotide
ccgccgugcucugcuugcc

SEQ ID NO: 969374 - RNA, 19 nt, Artificial Sequence
  Description of Artificial Sequence: Synthetic oligonucleotide
cccaaaguggggcgcuccu

SEQ ID NO: 969375 - RNA, 19 nt, Artificial Sequence
  Description of Artificial Sequence: Synthetic oligonucleotide
cgagcugaaccaccugggu

SEQ ID NO: 969376 - RNA, 19 nt, Artificial Sequence
  Description of Artificial Sequence: Synthetic oligonucleotide
cgccaccgagcugaccgag

SEQ ID NO: 969377 - RNA, 19 nt, Artificial Sequence
  Description of Artificial Sequence: Synthetic oligonucleotide
ccaugcccgccaccgagcu

SEQ ID NO: 969378 - RNA, 19 nt, Artificial Sequence
  Description of Artificial Sequence: Synthetic oligonucleotide
gcacggcgcugucaucggu

SEQ ID NO: 969379 - RNA, 19 nt, Artificial Sequence
  Description of Artificial Sequence: Synthetic oligonucleotide
ccgggccccgguggggcgg

SEQ ID NO: 969380 - RNA, 19 nt, Artificial Sequence
  Description of Artificial Sequence: Synthetic oligonucleotide
ccgccaccgagcugaccga

SEQ ID NO: 969381 - RNA, 19 nt, Artificial Sequence
  Description of Artificial Sequence: Synthetic oligonucleotide
cggcgcccucucugagucg

SEQ ID NO: 969382 - RNA, 19 nt, Artificial Sequence
  Description of Artificial Sequence: Synthetic oligonucleotide
gcgcccucucugagucgcc

SEQ ID NO: 969383 - RNA, 19 nt, Artificial Sequence
  Description of Artificial Sequence: Synthetic oligonucleotide
cccggaagccaaacaucau

SEQ ID NO: 969384 - RNA, 19 nt, Artificial Sequence
  Description of Artificial Sequence: Synthetic oligonucleotide
cccgagcuuugaacaauuu

SEQ ID NO: 969385 - RNA, 19 nt, Artificial Sequence
  Description of Artificial Sequence: Synthetic oligonucleotide
gggcaccccuccggccgug

SEQ ID NO: 969386 - RNA, 19 nt, Artificial Sequence
  Description of Artificial Sequence: Synthetic oligonucleotide
gcaccccuccggccgugcu

SEQ ID NO: 969387 - RNA, 19 nt, Artificial Sequence
  Description of Artificial Sequence: Synthetic oligonucleotide
gcccgccaccgagcugacc

SEQ ID NO: 969388 - RNA, 19 nt, Artificial Sequence
  Description of Artificial Sequence: Synthetic oligonucleotide
ccuguccgguagugcccaa

SEQ ID NO: 969389 - RNA, 19 nt, Artificial Sequence
  Description of Artificial Sequence: Synthetic oligonucleotide
cgcccggcgcccucucuga

SEQ ID NO: 969390 - RNA, 19 nt, Artificial Sequence
  Description of Artificial Sequence: Synthetic oligonucleotide
ccgcuugcccgcugucagu

SEQ ID NO: 969391 - RNA, 19 nt, Artificial Sequence
  Description of Artificial Sequence: Synthetic oligonucleotide
ccaaucccucugccucacu

SEQ ID NO: 969392 - RNA, 19 nt, Artificial Sequence
  Description of Artificial Sequence: Synthetic oligonucleotide
ccggccgugcuggggucca

SEQ ID NO: 969393 - RNA, 19 nt, Artificial Sequence
  Description of Artificial Sequence: Synthetic oligonucleotide
cgcccgcuugcccgcuguc

SEQ ID NO: 969394 - RNA, 19 nt, Artificial Sequence
  Description of Artificial Sequence: Synthetic oligonucleotide
cggcgcugucaucgguaga

SEQ ID NO: 969395 - RNA, 19 nt, Artificial Sequence
  Description of Artificial Sequence: Synthetic oligonucleotide
cccgguggggcgggaaccu

SEQ ID NO: 969396 - RNA, 19 nt, Artificial Sequence
  Description of Artificial Sequence: Synthetic oligonucleotide
cgggccccgguggggcggg

SEQ ID NO: 969397 - RNA, 19 nt, Artificial Sequence
  Description of Artificial Sequence: Synthetic oligonucleotide
cgggaaccuagaggccgaa

SEQ ID NO: 969398 - RNA, 19 nt, Artificial Sequence
  Description of Artificial Sequence: Synthetic oligonucleotide
ccgcccgcuugcccgcugu

SEQ ID NO: 969399 - RNA, 19 nt, Artificial Sequence
  Description of Artificial Sequence: Synthetic oligonucleotide
ccgguggggcgggaaccua

SEQ ID NO: 969400 - RNA, 19 nt, Artificial Sequence
  Description of Artificial Sequence: Synthetic oligonucleotide
ccgccgccugucuccuggu

SEQ ID NO: 969401 - RNA, 19 nt, Artificial Sequence
  Description of Artificial Sequence: Synthetic oligonucleotide
ccccgggaaggggccccga

SEQ ID NO: 969402 - RNA, 19 nt, Artificial Sequence
  Description of Artificial Sequence: Synthetic oligonucleotide
cgccgcccggcgcccucuc

SEQ ID NO: 969403 - RNA, 19 nt, Artificial Sequence
  Description of Artificial Sequence: Synthetic oligonucleotide
ccccgccgccuguccggua

SEQ ID NO: 969404 - RNA, 19 nt, Artificial Sequence
  Description of Artificial Sequence: Synthetic oligonucleotide
ucuuaaacaauucaacugc

SEQ ID NO: 969405 - RNA, 19 nt, Artificial Sequence
  Description of Artificial Sequence: Synthetic oligonucleotide
aauagcuggaucuucggag

SEQ ID NO: 969406 - RNA, 19 nt, Artificial Sequence
  Description of Artificial Sequence: Synthetic oligonucleotide
aauuaaccacuccauggcc

SEQ ID NO: 969407 - RNA, 19 nt, Artificial Sequence
  Description of Artificial Sequence: Synthetic oligonucleotide
cauguauuaacuuauggug

SEQ ID NO: 969408 - RNA, 19 nt, Artificial Sequence
  Description of Artificial Sequence: Synthetic oligonucleotide
uguucaauuaaccacucca

SEQ ID NO: 969409 - RNA, 19 nt, Artificial Sequence
  Description of Artificial Sequence: Synthetic oligonucleotide
ugugauccaggcaagaucc

SEQ ID NO: 969410 - RNA, 19 nt, Artificial Sequence
  Description of Artificial Sequence: Synthetic oligonucleotide
aaugagagacaccaagauc

SEQ ID NO: 969411 - RNA, 19 nt, Artificial Sequence
  Description of Artificial Sequence: Synthetic oligonucleotide
gaaagagagggcuauuugg

SEQ ID NO: 969412 - RNA, 19 nt, Artificial Sequence
  Description of Artificial Sequence: Synthetic oligonucleotide
aggguuuauuuauuaaagc

SEQ ID NO: 969413 - RNA, 19 nt, Artificial Sequence
  Description of Artificial Sequence: Synthetic oligonucleotide
acaagcaaacaccuuaggg

SEQ ID NO: 969414 - RNA, 19 nt, Artificial Sequence
  Description of Artificial Sequence: Synthetic oligonucleotide
gaaguugauaagcaguaag

SEQ ID NO: 969415 - RNA, 19 nt, Artificial Sequence
  Description of Artificial Sequence: Synthetic oligonucleotide
uguauuaacuuauggugag

SEQ ID NO: 969416 - RNA, 19 nt, Artificial Sequence
  Description of Artificial Sequence: Synthetic oligonucleotide
aggacugcggcuuucaaac

SEQ ID NO: 969417 - RNA, 19 nt, Artificial Sequence
  Description of Artificial Sequence: Synthetic oligonucleotide
acaagcugcauucugcugg

SEQ ID NO: 969418 - RNA, 19 nt, Artificial Sequence
  Description of Artificial Sequence: Synthetic oligonucleotide
agugcuaacagcuucugug

SEQ ID NO: 969419 - RNA, 19 nt, Artificial Sequence
  Description of Artificial Sequence: Synthetic oligonucleotide
uuguuguucacucggagug

SEQ ID NO: 969420 - RNA, 19 nt, Artificial Sequence
  Description of Artificial Sequence: Synthetic oligonucleotide
cuuauggugagucacacuc

SEQ ID NO: 969421 - RNA, 19 nt, Artificial Sequence
  Description of Artificial Sequence: Synthetic oligonucleotide
ugugucaauagcuggaucu

SEQ ID NO: 969422 - RNA, 19 nt, Artificial Sequence
  Description of Artificial Sequence: Synthetic oligonucleotide
gagagggcuauuuggaucg

SEQ ID NO: 969423 - RNA, 19 nt, Artificial Sequence
  Description of Artificial Sequence: Synthetic oligonucleotide
guaaacaccuggcagaagc

SEQ ID NO: 969424 - RNA, 19 nt, Artificial Sequence
  Description of Artificial Sequence: Synthetic oligonucleotide
uuaaaauacagugggcucc

SEQ ID NO: 969425 - RNA, 19 nt, Artificial Sequence
  Description of Artificial Sequence: Synthetic oligonucleotide
ucuucaaaugcuagcaaug

SEQ ID NO: 969426 - RNA, 19 nt, Artificial Sequence
  Description of Artificial Sequence: Synthetic oligonucleotide
ucugguuaaauuagcacac

SEQ ID NO: 969427 - RNA, 19 nt, Artificial Sequence
  Description of Artificial Sequence: Synthetic oligonucleotide
guaggcaccaccuacgugc

SEQ ID NO: 969428 - RNA, 19 nt, Artificial Sequence
  Description of Artificial Sequence: Synthetic oligonucleotide
ugagacaucagccaucuua

SEQ ID NO: 969429 - RNA, 19 nt, Artificial Sequence
  Description of Artificial Sequence: Synthetic oligonucleotide
aguaaggucaagaaagggg

SEQ ID NO: 969430 - RNA, 19 nt, Artificial Sequence
  Description of Artificial Sequence: Synthetic oligonucleotide
ugacaugugguucagccga

SEQ ID NO: 969431 - RNA, 19 nt, Artificial Sequence
  Description of Artificial Sequence: Synthetic oligonucleotide
ugucaaacccaauugcacc

SEQ ID NO: 969432 - RNA, 19 nt, Artificial Sequence
  Description of Artificial Sequence: Synthetic oligonucleotide
gacauaacaccuuggauca

SEQ ID NO: 969433 - RNA, 19 nt, Artificial Sequence
  Description of Artificial Sequence: Synthetic oligonucleotide
uucaaguagcacuucagga

SEQ ID NO: 969434 - RNA, 19 nt, Artificial Sequence
  Description of Artificial Sequence: Synthetic oligonucleotide
uuuaaaauacagugggcuc

SEQ ID NO: 969435 - RNA, 19 nt, Artificial Sequence
  Description of Artificial Sequence: Synthetic oligonucleotide
cuuaggguuugucaaaccc

SEQ ID NO: 969436 - RNA, 19 nt, Artificial Sequence
  Description of Artificial Sequence: Synthetic oligonucleotide
aacccaauugcaccacugg

SEQ ID NO: 969437 - RNA, 19 nt, Artificial Sequence
  Description of Artificial Sequence: Synthetic oligonucleotide
uuaacuuauggugagucac

SEQ ID NO: 969438 - RNA, 19 nt, Artificial Sequence
  Description of Artificial Sequence: Synthetic oligonucleotide
auagccacuuccuguaaac

SEQ ID NO: 969439 - RNA, 19 nt, Artificial Sequence
  Description of Artificial Sequence: Synthetic oligonucleotide
cucaaugagagacaccaag

SEQ ID NO: 969440 - RNA, 19 nt, Artificial Sequence
  Description of Artificial Sequence: Synthetic oligonucleotide
aacuuauggugagucacac

SEQ ID NO: 969441 - RNA, 19 nt, Artificial Sequence
  Description of Artificial Sequence: Synthetic oligonucleotide
uguuaaguggguucuccag

SEQ ID NO: 969442 - RNA, 19 nt, Artificial Sequence
  Description of Artificial Sequence: Synthetic oligonucleotide
uuucaaaccacguggcaga

SEQ ID NO: 969443 - RNA, 19 nt, Artificial Sequence
  Description of Artificial Sequence: Synthetic oligonucleotide
gauaguuuuggugucacuc

SEQ ID NO: 969444 - RNA, 19 nt, Artificial Sequence
  Description of Artificial Sequence: Synthetic oligonucleotide
uccacaagcaaacaccuua

SEQ ID NO: 969445 - RNA, 19 nt, Artificial Sequence
  Description of Artificial Sequence: Synthetic oligonucleotide
uccagcauagcauuugccu

SEQ ID NO: 969446 - RNA, 19 nt, Artificial Sequence
  Description of Artificial Sequence: Synthetic oligonucleotide
aagauaguuuuggugucac

SEQ ID NO: 969447 - RNA, 19 nt, Artificial Sequence
  Description of Artificial Sequence: Synthetic oligonucleotide
uuccaagauaguuuuggug

SEQ ID NO: 969448 - RNA, 19 nt, Artificial Sequence
  Description of Artificial Sequence: Synthetic oligonucleotide
gaagaggugugucaauagc

SEQ ID NO: 969449 - RNA, 19 nt, Artificial Sequence
  Description of Artificial Sequence: Synthetic oligonucleotide
aggauucagugcuaacagc

SEQ ID NO: 969450 - RNA, 19 nt, Artificial Sequence
  Description of Artificial Sequence: Synthetic oligonucleotide
aaugacagcccgagcaucg

SEQ ID NO: 969451 - RNA, 19 nt, Artificial Sequence
  Description of Artificial Sequence: Synthetic oligonucleotide
uuaaguggguucuccagca

SEQ ID NO: 969452 - RNA, 19 nt, Artificial Sequence
  Description of Artificial Sequence: Synthetic oligonucleotide
uuaucaguaacaagacauc

SEQ ID NO: 969453 - RNA, 19 nt, Artificial Sequence
  Description of Artificial Sequence: Synthetic oligonucleotide
auagcauuugccuucuuaa

SEQ ID NO: 969454 - RNA, 19 nt, Artificial Sequence
  Description of Artificial Sequence: Synthetic oligonucleotide
ucaauagcuggaucuucgg

SEQ ID NO: 969455 - RNA, 19 nt, Artificial Sequence
  Description of Artificial Sequence: Synthetic oligonucleotide
aauugcaccacuggguugu

SEQ ID NO: 969456 - RNA, 19 nt, Artificial Sequence
  Description of Artificial Sequence: Synthetic oligonucleotide
ucaggauucagugcuaaca

SEQ ID NO: 969457 - RNA, 19 nt, Artificial Sequence
  Description of Artificial Sequence: Synthetic oligonucleotide
guugauaagcaguaagguc

SEQ ID NO: 969458 - RNA, 19 nt, Artificial Sequence
  Description of Artificial Sequence: Synthetic oligonucleotide
acgaacaucgcgccgccgc

SEQ ID NO: 969459 - RNA, 19 nt, Artificial Sequence
  Description of Artificial Sequence: Synthetic oligonucleotide
cucugguuaaauuagcaca

SEQ ID NO: 969460 - RNA, 19 nt, Artificial Sequence
  Description of Artificial Sequence: Synthetic oligonucleotide
ucuagagaucugcagcaug

SEQ ID NO: 969461 - RNA, 19 nt, Artificial Sequence
  Description of Artificial Sequence: Synthetic oligonucleotide
ugcuagcaaugucuuaggg

SEQ ID NO: 969462 - RNA, 19 nt, Artificial Sequence
  Description of Artificial Sequence: Synthetic oligonucleotide
agugaaaugacagcccgag

SEQ ID NO: 969463 - RNA, 19 nt, Artificial Sequence
  Description of Artificial Sequence: Synthetic oligonucleotide
cuugaggcaacucuccuug

SEQ ID NO: 969464 - RNA, 19 nt, Artificial Sequence
  Description of Artificial Sequence: Synthetic oligonucleotide
gaacccgugaaggucaccg

SEQ ID NO: 969465 - RNA, 19 nt, Artificial Sequence
  Description of Artificial Sequence: Synthetic oligonucleotide
ugugguucagccgaagggc

SEQ ID NO: 969466 - RNA, 19 nt, Artificial Sequence
  Description of Artificial Sequence: Synthetic oligonucleotide
auaguuuuggugucacuca

SEQ ID NO: 969467 - RNA, 19 nt, Artificial Sequence
  Description of Artificial Sequence: Synthetic oligonucleotide
guuaaguggguucuccagc

SEQ ID NO: 969468 - RNA, 19 nt, Artificial Sequence
  Description of Artificial Sequence: Synthetic oligonucleotide
acugcaguccggucugugc

SEQ ID NO: 969469 - RNA, 19 nt, Artificial Sequence
  Description of Artificial Sequence: Synthetic oligonucleotide
ucggaguguucaauuaacc

SEQ ID NO: 969470 - RNA, 19 nt, Artificial Sequence
  Description of Artificial Sequence: Synthetic oligonucleotide
cagucguucaccuucccag

SEQ ID NO: 969471 - RNA, 19 nt, Artificial Sequence
  Description of Artificial Sequence: Synthetic oligonucleotide
auuaacuuauggugaguca

SEQ ID NO: 969472 - RNA, 19 nt, Artificial Sequence
  Description of Artificial Sequence: Synthetic oligonucleotide
ucggagugcaucaaucacu

SEQ ID NO: 969473 - RNA, 19 nt, Artificial Sequence
  Description of Artificial Sequence: Synthetic oligonucleotide
uaacuuauggugagucaca

SEQ ID NO: 969474 - RNA, 19 nt, Artificial Sequence
  Description of Artificial Sequence: Synthetic oligonucleotide
uucggaguguucaauuaac

SEQ ID NO: 969475 - RNA, 19 nt, Artificial Sequence
  Description of Artificial Sequence: Synthetic oligonucleotide
aaaugacagcccgagcauc

SEQ ID NO: 969476 - RNA, 19 nt, Artificial Sequence
  Description of Artificial Sequence: Synthetic oligonucleotide
aguugauaagcaguaaggu

SEQ ID NO: 969477 - RNA, 19 nt, Artificial Sequence
  Description of Artificial Sequence: Synthetic oligonucleotide
caggauucagugcuaacag

SEQ ID NO: 969478 - RNA, 19 nt, Artificial Sequence
  Description of Artificial Sequence: Synthetic oligonucleotide
guaaggucaagaaagggga

SEQ ID NO: 969479 - RNA, 19 nt, Artificial Sequence
  Description of Artificial Sequence: Synthetic oligonucleotide
guaacaagacaucuugguc

SEQ ID NO: 969480 - RNA, 19 nt, Artificial Sequence
  Description of Artificial Sequence: Synthetic oligonucleotide
agucacucugguuaaauua

SEQ ID NO: 969481 - RNA, 19 nt, Artificial Sequence
  Description of Artificial Sequence: Synthetic oligonucleotide
auuuggaucgaugcccugg

SEQ ID NO: 969482 - RNA, 19 nt, Artificial Sequence
  Description of Artificial Sequence: Synthetic oligonucleotide
ugugagcucaucccggacu

SEQ ID NO: 969483 - RNA, 19 nt, Artificial Sequence
  Description of Artificial Sequence: Synthetic oligonucleotide
uuaaccacuccauggccug

SEQ ID NO: 969484 - RNA, 19 nt, Artificial Sequence
  Description of Artificial Sequence: Synthetic oligonucleotide
agcgcuaguucccacagca

SEQ ID NO: 969485 - RNA, 19 nt, Artificial Sequence
  Description of Artificial Sequence: Synthetic oligonucleotide
ugaggcaacucuccuugag

SEQ ID NO: 969486 - RNA, 19 nt, Artificial Sequence
  Description of Artificial Sequence: Synthetic oligonucleotide
accgacguguccucggucg

SEQ ID NO: 969487 - RNA, 19 nt, Artificial Sequence
  Description of Artificial Sequence: Synthetic oligonucleotide
gguuugucaaacccaauug

SEQ ID NO: 969488 - RNA, 19 nt, Artificial Sequence
  Description of Artificial Sequence: Synthetic oligonucleotide
cugugcuacaagcaggcag

SEQ ID NO: 969489 - RNA, 19 nt, Artificial Sequence
  Description of Artificial Sequence: Synthetic oligonucleotide
auaagcaguaaggucaaga

SEQ ID NO: 969490 - RNA, 19 nt, Artificial Sequence
  Description of Artificial Sequence: Synthetic oligonucleotide
aacaccuggcagaagcuag

SEQ ID NO: 969491 - RNA, 19 nt, Artificial Sequence
  Description of Artificial Sequence: Synthetic oligonucleotide
uggaucuucggaguguuca

SEQ ID NO: 969492 - RNA, 19 nt, Artificial Sequence
  Description of Artificial Sequence: Synthetic oligonucleotide
agguaaaaggguuuauuua

SEQ ID NO: 969493 - RNA, 19 nt, Artificial Sequence
  Description of Artificial Sequence: Synthetic oligonucleotide
accuacgugcgauucaaug

SEQ ID NO: 969494 - RNA, 19 nt, Artificial Sequence
  Description of Artificial Sequence: Synthetic oligonucleotide
cuugacauaacaccuugga

SEQ ID NO: 969495 - RNA, 19 nt, Artificial Sequence
  Description of Artificial Sequence: Synthetic oligonucleotide
gcacacuugacauaacacc

SEQ ID NO: 969496 - RNA, 19 nt, Artificial Sequence
  Description of Artificial Sequence: Synthetic oligonucleotide
auagcuggaucuucggagu

SEQ ID NO: 969497 - RNA, 19 nt, Artificial Sequence
  Description of Artificial Sequence: Synthetic oligonucleotide
agucucauccacucgcuca

SEQ ID NO: 969498 - RNA, 19 nt, Artificial Sequence
  Description of Artificial Sequence: Synthetic oligonucleotide
uuuggaucgaugcccuggu

SEQ ID NO: 969499 - RNA, 19 nt, Artificial Sequence
  Description of Artificial Sequence: Synthetic oligonucleotide
aacugcaucaggauucagu

SEQ ID NO: 969500 - RNA, 19 nt, Artificial Sequence
  Description of Artificial Sequence: Synthetic oligonucleotide
aauucccuuuuccuucgga

SEQ ID NO: 969501 - RNA, 19 nt, Artificial Sequence
  Description of Artificial Sequence: Synthetic oligonucleotide
ugguuaaauuagcacacuu

SEQ ID NO: 969502 - RNA, 19 nt, Artificial Sequence
  Description of Artificial Sequence: Synthetic oligonucleotide
aauuagcacacuugacaua

SEQ ID NO: 969503 - RNA, 19 nt, Artificial Sequence
  Description of Artificial Sequence: Synthetic oligonucleotide
aagagagggcuauuuggau

SEQ ID NO: 969504 - RNA, 19 nt, Artificial Sequence
  Description of Artificial Sequence: Synthetic oligonucleotide
cugacaugugguucagccg

SEQ ID NO: 969505 - RNA, 19 nt, Artificial Sequence
  Description of Artificial Sequence: Synthetic oligonucleotide
cuacgugcgauucaauguc

SEQ ID NO: 969506 - RNA, 19 nt, Artificial Sequence
  Description of Artificial Sequence: Synthetic oligonucleotide
gauccaggcaagaucccgg

SEQ ID NO: 969507 - RNA, 19 nt, Artificial Sequence
  Description of Artificial Sequence: Synthetic oligonucleotide
ugcaccacuggguugucca

SEQ ID NO: 969508 - RNA, 19 nt, Artificial Sequence
  Description of Artificial Sequence: Synthetic oligonucleotide
aggucaagaaaggggaguc

SEQ ID NO: 969509 - RNA, 19 nt, Artificial Sequence
  Description of Artificial Sequence: Synthetic oligonucleotide
gcuauuuggaucgaugccc

SEQ ID NO: 969510 - RNA, 19 nt, Artificial Sequence
  Description of Artificial Sequence: Synthetic oligonucleotide
ugcgauucaaugucuggaa

SEQ ID NO: 969511 - RNA, 19 nt, Artificial Sequence
  Description of Artificial Sequence: Synthetic oligonucleotide
uauggugagucacacucuu

SEQ ID NO: 969512 - RNA, 19 nt, Artificial Sequence
  Description of Artificial Sequence: Synthetic oligonucleotide
ucuuaggguuugucaaacc

SEQ ID NO: 969513 - RNA, 19 nt, Artificial Sequence
  Description of Artificial Sequence: Synthetic oligonucleotide
acucuuggggucuucuaug

SEQ ID NO: 969514 - RNA, 19 nt, Artificial Sequence
  Description of Artificial Sequence: Synthetic oligonucleotide
augcuagcaaugucuuagg

SEQ ID NO: 969515 - RNA, 19 nt, Artificial Sequence
  Description of Artificial Sequence: Synthetic oligonucleotide
aacccgugaaggucaccgg

SEQ ID NO: 969516 - RNA, 19 nt, Artificial Sequence
  Description of Artificial Sequence: Synthetic oligonucleotide
uggaucagaacaugccuuc

SEQ ID NO: 969517 - RNA, 19 nt, Artificial Sequence
  Description of Artificial Sequence: Synthetic oligonucleotide
uaaggcagucucauccacu

SEQ ID NO: 969518 - RNA, 19 nt, Artificial Sequence
  Description of Artificial Sequence: Synthetic oligonucleotide
auuucugugagcugccgua

SEQ ID NO: 969519 - RNA, 19 nt, Artificial Sequence
  Description of Artificial Sequence: Synthetic oligonucleotide
cacccgucacugaagaggc

SEQ ID NO: 969520 - RNA, 19 nt, Artificial Sequence
  Description of Artificial Sequence: Synthetic oligonucleotide
agcugcauguauuaacuua

SEQ ID NO: 969521 - RNA, 19 nt, Artificial Sequence
  Description of Artificial Sequence: Synthetic oligonucleotide
aguagcacuucaggagccc

SEQ ID NO: 969522 - RNA, 19 nt, Artificial Sequence
  Description of Artificial Sequence: Synthetic oligonucleotide
acccgugaaggucaccggg

SEQ ID NO: 969523 - RNA, 19 nt, Artificial Sequence
  Description of Artificial Sequence: Synthetic oligonucleotide
acucggagugcaucaauca

SEQ ID NO: 969524 - RNA, 19 nt, Artificial Sequence
  Description of Artificial Sequence: Synthetic oligonucleotide
ugugagucacucugguuaa

SEQ ID NO: 969525 - RNA, 19 nt, Artificial Sequence
  Description of Artificial Sequence: Synthetic oligonucleotide
agaagcuaggacugcggcu

SEQ ID NO: 969526 - RNA, 19 nt, Artificial Sequence
  Description of Artificial Sequence: Synthetic oligonucleotide
aaacccaauugcaccacug

SEQ ID NO: 969527 - RNA, 19 nt, Artificial Sequence
  Description of Artificial Sequence: Synthetic oligonucleotide
ugcaucggaagcugcugag

SEQ ID NO: 969528 - RNA, 19 nt, Artificial Sequence
  Description of Artificial Sequence: Synthetic oligonucleotide
caguaaggucaagaaaggg

SEQ ID NO: 969529 - RNA, 19 nt, Artificial Sequence
  Description of Artificial Sequence: Synthetic oligonucleotide
aguucggucuggaagucuc

SEQ ID NO: 969530 - RNA, 19 nt, Artificial Sequence
  Description of Artificial Sequence: Synthetic oligonucleotide
auuaaccacuccauggccu

SEQ ID NO: 969531 - RNA, 19 nt, Artificial Sequence
  Description of Artificial Sequence: Synthetic oligonucleotide
cugugagucacucugguua

SEQ ID NO: 969532 - RNA, 19 nt, Artificial Sequence
  Description of Artificial Sequence: Synthetic oligonucleotide
cagaagcuaggacugcggc

SEQ ID NO: 969533 - RNA, 19 nt, Artificial Sequence
  Description of Artificial Sequence: Synthetic oligonucleotide
gguaaaaggguuuauuuau

SEQ ID NO: 969534 - RNA, 19 nt, Artificial Sequence
  Description of Artificial Sequence: Synthetic oligonucleotide
gggcuauuuggaucgaugc

SEQ ID NO: 969535 - RNA, 19 nt, Artificial Sequence
  Description of Artificial Sequence: Synthetic oligonucleotide
uagcacuucaggagcccag

SEQ ID NO: 969536 - RNA, 19 nt, Artificial Sequence
  Description of Artificial Sequence: Synthetic oligonucleotide
gaagcugcauguauuaacu

SEQ ID NO: 969537 - RNA, 19 nt, Artificial Sequence
  Description of Artificial Sequence: Synthetic oligonucleotide
ggaagaggugugucaauag

SEQ ID NO: 969538 - RNA, 19 nt, Artificial Sequence
  Description of Artificial Sequence: Synthetic oligonucleotide
ccguaaggcagucucaucc

SEQ ID NO: 969539 - RNA, 19 nt, Artificial Sequence
  Description of Artificial Sequence: Synthetic oligonucleotide
gaaaggggagucacugcag

SEQ ID NO: 969540 - RNA, 19 nt, Artificial Sequence
  Description of Artificial Sequence: Synthetic oligonucleotide
uagcauuugccuucuuaaa

SEQ ID NO: 969541 - RNA, 19 nt, Artificial Sequence
  Description of Artificial Sequence: Synthetic oligonucleotide
gggucguucauccacugug

SEQ ID NO: 969542 - RNA, 19 nt, Artificial Sequence
  Description of Artificial Sequence: Synthetic oligonucleotide
uguuguucacucggagugc

SEQ ID NO: 969543 - RNA, 19 nt, Artificial Sequence
  Description of Artificial Sequence: Synthetic oligonucleotide
acguggcagaaguugauaa

SEQ ID NO: 969544 - RNA, 19 nt, Artificial Sequence
  Description of Artificial Sequence: Synthetic oligonucleotide
acucggcgccgucagcugc

SEQ ID NO: 969545 - RNA, 19 nt, Artificial Sequence
  Description of Artificial Sequence: Synthetic oligonucleotide
cucggagugcaucaaucac

SEQ ID NO: 969546 - RNA, 19 nt, Artificial Sequence
  Description of Artificial Sequence: Synthetic oligonucleotide
cacacuugacauaacaccu

SEQ ID NO: 969547 - RNA, 19 nt, Artificial Sequence
  Description of Artificial Sequence: Synthetic oligonucleotide
uccaccgacguguccucgg

SEQ ID NO: 969548 - RNA, 19 nt, Artificial Sequence
  Description of Artificial Sequence: Synthetic oligonucleotide
uccgaagcugcauguauua

SEQ ID NO: 969549 - RNA, 19 nt, Artificial Sequence
  Description of Artificial Sequence: Synthetic oligonucleotide
ugguuguuguucacucgga

SEQ ID NO: 969550 - RNA, 19 nt, Artificial Sequence
  Description of Artificial Sequence: Synthetic oligonucleotide
ugcuugaggcaacucuccu

SEQ ID NO: 969551 - RNA, 19 nt, Artificial Sequence
  Description of Artificial Sequence: Synthetic oligonucleotide
ucggucgccuccuccagcc

SEQ ID NO: 969552 - RNA, 19 nt, Artificial Sequence
  Description of Artificial Sequence: Synthetic oligonucleotide
uggggaaggagcacgcuuu

SEQ ID NO: 969553 - RNA, 19 nt, Artificial Sequence
  Description of Artificial Sequence: Synthetic oligonucleotide
agcuccugucggcuuggcc

SEQ ID NO: 969554 - RNA, 19 nt, Artificial Sequence
  Description of Artificial Sequence: Synthetic oligonucleotide
gaauucccuuuuccuucgg

SEQ ID NO: 969555 - RNA, 19 nt, Artificial Sequence
  Description of Artificial Sequence: Synthetic oligonucleotide
auccagcauagcauuugcc

SEQ ID NO: 969556 - RNA, 19 nt, Artificial Sequence
  Description of Artificial Sequence: Synthetic oligonucleotide
uagcuggaucuucggagug

SEQ ID NO: 969557 - RNA, 19 nt, Artificial Sequence
  Description of Artificial Sequence: Synthetic oligonucleotide
cugcaucaggauucagugc

SEQ ID NO: 969558 - RNA, 19 nt, Artificial Sequence
  Description of Artificial Sequence: Synthetic oligonucleotide
ugcggcuuucaaaccacgu

SEQ ID NO: 969559 - RNA, 19 nt, Artificial Sequence
  Description of Artificial Sequence: Synthetic oligonucleotide
acugcggcuuucaaaccac

SEQ ID NO: 969560 - RNA, 19 nt, Artificial Sequence
  Description of Artificial Sequence: Synthetic oligonucleotide
acuuauggugagucacacu

SEQ ID NO: 969561 - RNA, 19 nt, Artificial Sequence
  Description of Artificial Sequence: Synthetic oligonucleotide
aagcugcauguauuaacuu

SEQ ID NO: 969562 - RNA, 19 nt, Artificial Sequence
  Description of Artificial Sequence: Synthetic oligonucleotide
cacucugguuaaauuagca

SEQ ID NO: 969563 - RNA, 19 nt, Artificial Sequence
  Description of Artificial Sequence: Synthetic oligonucleotide
ggcuauuuggaucgaugcc

SEQ ID NO: 969564 - RNA, 19 nt, Artificial Sequence
  Description of Artificial Sequence: Synthetic oligonucleotide
guguucaauuaaccacucc

SEQ ID NO: 969565 - RNA, 19 nt, Artificial Sequence
  Description of Artificial Sequence: Synthetic oligonucleotide
ugcccggaggauagcaucu

SEQ ID NO: 969566 - RNA, 19 nt, Artificial Sequence
  Description of Artificial Sequence: Synthetic oligonucleotide
cacucggagugcaucaauc

SEQ ID NO: 969567 - RNA, 19 nt, Artificial Sequence
  Description of Artificial Sequence: Synthetic oligonucleotide
guucacucggagugcauca

SEQ ID NO: 969568 - RNA, 19 nt, Artificial Sequence
  Description of Artificial Sequence: Synthetic oligonucleotide
uccagcgcuaguucccaca

SEQ ID NO: 969569 - RNA, 19 nt, Artificial Sequence
  Description of Artificial Sequence: Synthetic oligonucleotide
cucucauggugguuugaac

SEQ ID NO: 969570 - RNA, 19 nt, Artificial Sequence
  Description of Artificial Sequence: Synthetic oligonucleotide
uguucacucggagugcauc

SEQ ID NO: 969571 - RNA, 19 nt, Artificial Sequence
  Description of Artificial Sequence: Synthetic oligonucleotide
ggcuccacaagcaaacacc

SEQ ID NO: 969572 - RNA, 19 nt, Artificial Sequence
  Description of Artificial Sequence: Synthetic oligonucleotide
aguaggcaccaccuacgug

SEQ ID NO: 969573 - RNA, 19 nt, Artificial Sequence
  Description of Artificial Sequence: Synthetic oligonucleotide
ucggucuggaagucucuca

SEQ ID NO: 969574 - RNA, 19 nt, Artificial Sequence
  Description of Artificial Sequence: Synthetic oligonucleotide
cauccacucgcucauccuc

SEQ ID NO: 969575 - RNA, 19 nt, Artificial Sequence
  Description of Artificial Sequence: Synthetic oligonucleotide
cugcauguauuaacuuaug

SEQ ID NO: 969576 - RNA, 19 nt, Artificial Sequence
  Description of Artificial Sequence: Synthetic oligonucleotide
ugacagcccgagcaucggc

SEQ ID NO: 969577 - RNA, 19 nt, Artificial Sequence
  Description of Artificial Sequence: Synthetic oligonucleotide
uauuuggaucgaugcccug

SEQ ID NO: 969578 - RNA, 19 nt, Artificial Sequence
  Description of Artificial Sequence: Synthetic oligonucleotide
gauucaaugucuggaagau

SEQ ID NO: 969579 - RNA, 19 nt, Artificial Sequence
  Description of Artificial Sequence: Synthetic oligonucleotide
cuuggaucagaacaugccu

SEQ ID NO: 969580 - RNA, 19 nt, Artificial Sequence
  Description of Artificial Sequence: Synthetic oligonucleotide
uguaaacaccuggcagaag

SEQ ID NO: 969581 - RNA, 19 nt, Artificial Sequence
  Description of Artificial Sequence: Synthetic oligonucleotide
ucccagugcaauagccacu

SEQ ID NO: 969582 - RNA, 19 nt, Artificial Sequence
  Description of Artificial Sequence: Synthetic oligonucleotide
aaggucaccggggcuggag

SEQ ID NO: 969583 - RNA, 19 nt, Artificial Sequence
  Description of Artificial Sequence: Synthetic oligonucleotide
gugcaauagccacuuccug

SEQ ID NO: 969584 - RNA, 19 nt, Artificial Sequence
  Description of Artificial Sequence: Synthetic oligonucleotide
guuguuguucacucggagu

SEQ ID NO: 969585 - RNA, 19 nt, Artificial Sequence
  Description of Artificial Sequence: Synthetic oligonucleotide
ugugcccacugcaucggaa

SEQ ID NO: 969586 - RNA, 19 nt, Artificial Sequence
  Description of Artificial Sequence: Synthetic oligonucleotide
gucuuaggguuugucaaac

SEQ ID NO: 969587 - RNA, 19 nt, Artificial Sequence
  Description of Artificial Sequence: Synthetic oligonucleotide
cuccugcacgaacaucgcg

SEQ ID NO: 969588 - RNA, 19 nt, Artificial Sequence
  Description of Artificial Sequence: Synthetic oligonucleotide
aggcagucucauccacucg

SEQ ID NO: 969589 - RNA, 19 nt, Artificial Sequence
  Description of Artificial Sequence: Synthetic oligonucleotide
gaaaugacagcccgagcau

SEQ ID NO: 969590 - RNA, 19 nt, Artificial Sequence
  Description of Artificial Sequence: Synthetic oligonucleotide
cagccgaagggccuuugag

SEQ ID NO: 969591 - RNA, 19 nt, Artificial Sequence
  Description of Artificial Sequence: Synthetic oligonucleotide
agggcuauuuggaucgaug

SEQ ID NO: 969592 - RNA, 19 nt, Artificial Sequence
  Description of Artificial Sequence: Synthetic oligonucleotide
cggcuuucaaaccacgugg

SEQ ID NO: 969593 - RNA, 19 nt, Artificial Sequence
  Description of Artificial Sequence: Synthetic oligonucleotide
gcgauucaaugucuggaag

SEQ ID NO: 969594 - RNA, 19 nt, Artificial Sequence
  Description of Artificial Sequence: Synthetic oligonucleotide
gcaagaucccggcugggcc

SEQ ID NO: 969595 - RNA, 19 nt, Artificial Sequence
  Description of Artificial Sequence: Synthetic oligonucleotide
gucguucaccuucccagug

SEQ ID NO: 969596 - RNA, 19 nt, Artificial Sequence
  Description of Artificial Sequence: Synthetic oligonucleotide
ccuguaaacaccuggcaga

SEQ ID NO: 969597 - RNA, 19 nt, Artificial Sequence
  Description of Artificial Sequence: Synthetic oligonucleotide
ggcacugacaugugguuca

SEQ ID NO: 969598 - RNA, 19 nt, Artificial Sequence
  Description of Artificial Sequence: Synthetic oligonucleotide
ucaaaccacguggcagaag

SEQ ID NO: 969599 - RNA, 19 nt, Artificial Sequence
  Description of Artificial Sequence: Synthetic oligonucleotide
caccuuagggucaauucaa

SEQ ID NO: 969600 - RNA, 19 nt, Artificial Sequence
  Description of Artificial Sequence: Synthetic oligonucleotide
caauagcuggaucuucgga

SEQ ID NO: 969601 - RNA, 19 nt, Artificial Sequence
  Description of Artificial Sequence: Synthetic oligonucleotide
acugcaucggaagcugcug

SEQ ID NO: 969602 - RNA, 19 nt, Artificial Sequence
  Description of Artificial Sequence: Synthetic oligonucleotide
ucacucggagugcaucaau

SEQ ID NO: 969603 - RNA, 19 nt, Artificial Sequence
  Description of Artificial Sequence: Synthetic oligonucleotide
ccacaagcaaacaccuuag

SEQ ID NO: 969604 - RNA, 19 nt, Artificial Sequence
  Description of Artificial Sequence: Synthetic oligonucleotide
ucugugagucacucugguu

SEQ ID NO: 969605 - RNA, 19 nt, Artificial Sequence
  Description of Artificial Sequence: Synthetic oligonucleotide
gagucacacucuugggguc

SEQ ID NO: 969606 - RNA, 19 nt, Artificial Sequence
  Description of Artificial Sequence: Synthetic oligonucleotide
cuguuaaguggguucucca

SEQ ID NO: 969607 - RNA, 19 nt, Artificial Sequence
  Description of Artificial Sequence: Synthetic oligonucleotide
gugcgauucaaugucugga

SEQ ID NO: 969608 - RNA, 19 nt, Artificial Sequence
  Description of Artificial Sequence: Synthetic oligonucleotide
ccacccgucacugaagagg

SEQ ID NO: 969609 - RNA, 19 nt, Artificial Sequence
  Description of Artificial Sequence: Synthetic oligonucleotide
cugcggcuuucaaaccacg

SEQ ID NO: 969610 - RNA, 19 nt, Artificial Sequence
  Description of Artificial Sequence: Synthetic oligonucleotide
gcugccguaaggcagucuc

SEQ ID NO: 969611 - RNA, 19 nt, Artificial Sequence
  Description of Artificial Sequence: Synthetic oligonucleotide
aggugugucaauagcugga

SEQ ID NO: 969612 - RNA, 19 nt, Artificial Sequence
  Description of Artificial Sequence: Synthetic oligonucleotide
gugguucagccgaagggcc

SEQ ID NO: 969613 - RNA, 19 nt, Artificial Sequence
  Description of Artificial Sequence: Synthetic oligonucleotide
cagguuggcuguugcccgg

SEQ ID NO: 969614 - RNA, 19 nt, Artificial Sequence
  Description of Artificial Sequence: Synthetic oligonucleotide
accaccuacgugcgauuca

SEQ ID NO: 969615 - RNA, 19 nt, Artificial Sequence
  Description of Artificial Sequence: Synthetic oligonucleotide
ugucggcuuggccacccgu

SEQ ID NO: 969616 - RNA, 19 nt, Artificial Sequence
  Description of Artificial Sequence: Synthetic oligonucleotide
gcggcuuucaaaccacgug

SEQ ID NO: 969617 - RNA, 19 nt, Artificial Sequence
  Description of Artificial Sequence: Synthetic oligonucleotide
ugcucccaugagcaccgug

SEQ ID NO: 969618 - RNA, 19 nt, Artificial Sequence
  Description of Artificial Sequence: Synthetic oligonucleotide
guuguucacucggagugca

SEQ ID NO: 969619 - RNA, 19 nt, Artificial Sequence
  Description of Artificial Sequence: Synthetic oligonucleotide
gaagcuaggacugcggcuu

SEQ ID NO: 969620 - RNA, 19 nt, Artificial Sequence
  Description of Artificial Sequence: Synthetic oligonucleotide
cucaucccggacuuccuca

SEQ ID NO: 969621 - RNA, 19 nt, Artificial Sequence
  Description of Artificial Sequence: Synthetic oligonucleotide
ggcagguuggcuguugccc

SEQ ID NO: 969622 - RNA, 19 nt, Artificial Sequence
  Description of Artificial Sequence: Synthetic oligonucleotide
cuauuuggaucgaugcccu

SEQ ID NO: 969623 - RNA, 19 nt, Artificial Sequence
  Description of Artificial Sequence: Synthetic oligonucleotide
aucggcucggaauucccuu

SEQ ID NO: 969624 - RNA, 19 nt, Artificial Sequence
  Description of Artificial Sequence: Synthetic oligonucleotide
gcuguuaaguggguucucc

SEQ ID NO: 969625 - RNA, 19 nt, Artificial Sequence
  Description of Artificial Sequence: Synthetic oligonucleotide
cucggcgccgucagcugcg

SEQ ID NO: 969626 - RNA, 19 nt, Artificial Sequence
  Description of Artificial Sequence: Synthetic oligonucleotide
ucuccagcgcuaguuccca

SEQ ID NO: 969627 - RNA, 19 nt, Artificial Sequence
  Description of Artificial Sequence: Synthetic oligonucleotide
auaacaccuuggaucagaa

SEQ ID NO: 969628 - RNA, 19 nt, Artificial Sequence
  Description of Artificial Sequence: Synthetic oligonucleotide
gugcuugaggcaacucucc

SEQ ID NO: 969629 - RNA, 19 nt, Artificial Sequence
  Description of Artificial Sequence: Synthetic oligonucleotide
caaugucuuaggguuuguc

SEQ ID NO: 969630 - RNA, 19 nt, Artificial Sequence
  Description of Artificial Sequence: Synthetic oligonucleotide
augacagcccgagcaucgg

SEQ ID NO: 969631 - RNA, 19 nt, Artificial Sequence
  Description of Artificial Sequence: Synthetic oligonucleotide
ugccguaaggcagucucau

SEQ ID NO: 969632 - RNA, 19 nt, Artificial Sequence
  Description of Artificial Sequence: Synthetic oligonucleotide
agcaaacaccuuaggguca

SEQ ID NO: 969633 - RNA, 19 nt, Artificial Sequence
  Description of Artificial Sequence: Synthetic oligonucleotide
cacucgcucauccucaucu

SEQ ID NO: 969634 - RNA, 19 nt, Artificial Sequence
  Description of Artificial Sequence: Synthetic oligonucleotide
agccacucggcgccgucag

SEQ ID NO: 969635 - RNA, 19 nt, Artificial Sequence
  Description of Artificial Sequence: Synthetic oligonucleotide
ccaagauaguuuugguguc

SEQ ID NO: 969636 - RNA, 19 nt, Artificial Sequence
  Description of Artificial Sequence: Synthetic oligonucleotide
uucaaaccacguggcagaa

SEQ ID NO: 969637 - RNA, 19 nt, Artificial Sequence
  Description of Artificial Sequence: Synthetic oligonucleotide
ggucaccggggcuggaggg

SEQ ID NO: 969638 - RNA, 19 nt, Artificial Sequence
  Description of Artificial Sequence: Synthetic oligonucleotide
gcuagcaaugucuuagggu

SEQ ID NO: 969639 - RNA, 19 nt, Artificial Sequence
  Description of Artificial Sequence: Synthetic oligonucleotide
ggcuuucaaaccacguggc

SEQ ID NO: 969640 - RNA, 19 nt, Artificial Sequence
  Description of Artificial Sequence: Synthetic oligonucleotide
uucggucuggaagucucuc

SEQ ID NO: 969641 - RNA, 19 nt, Artificial Sequence
  Description of Artificial Sequence: Synthetic oligonucleotide
ucugugcuacaagcaggca

SEQ ID NO: 969642 - RNA, 19 nt, Artificial Sequence
  Description of Artificial Sequence: Synthetic oligonucleotide
aagaucccggcugggcccu

SEQ ID NO: 969643 - RNA, 19 nt, Artificial Sequence
  Description of Artificial Sequence: Synthetic oligonucleotide
ggggucguggccuggaaga

SEQ ID NO: 969644 - RNA, 19 nt, Artificial Sequence
  Description of Artificial Sequence: Synthetic oligonucleotide
uucacucggagugcaucaa

SEQ ID NO: 969645 - RNA, 19 nt, Artificial Sequence
  Description of Artificial Sequence: Synthetic oligonucleotide
uggggucuucuaugcuccc

SEQ ID NO: 969646 - RNA, 19 nt, Artificial Sequence
  Description of Artificial Sequence: Synthetic oligonucleotide
acauaacaccuuggaucag

SEQ ID NO: 969647 - RNA, 19 nt, Artificial Sequence
  Description of Artificial Sequence: Synthetic oligonucleotide
caugacagggccugucucu

SEQ ID NO: 969648 - RNA, 19 nt, Artificial Sequence
  Description of Artificial Sequence: Synthetic oligonucleotide
cugggucguucauccacug

SEQ ID NO: 969649 - RNA, 19 nt, Artificial Sequence
  Description of Artificial Sequence: Synthetic oligonucleotide
ucggcucggaauucccuuu

SEQ ID NO: 969650 - RNA, 19 nt, Artificial Sequence
  Description of Artificial Sequence: Synthetic oligonucleotide
gaacaucgcgccgccgccc

SEQ ID NO: 969651 - RNA, 19 nt, Artificial Sequence
  Description of Artificial Sequence: Synthetic oligonucleotide
uuguucacucggagugcau

SEQ ID NO: 969652 - RNA, 19 nt, Artificial Sequence
  Description of Artificial Sequence: Synthetic oligonucleotide
cccgugaaggucaccgggg

SEQ ID NO: 969653 - RNA, 19 nt, Artificial Sequence
  Description of Artificial Sequence: Synthetic oligonucleotide
gcagaaguugauaagcagu

SEQ ID NO: 969654 - RNA, 19 nt, Artificial Sequence
  Description of Artificial Sequence: Synthetic oligonucleotide
guccggucugugcuacaag

SEQ ID NO: 969655 - RNA, 19 nt, Artificial Sequence
  Description of Artificial Sequence: Synthetic oligonucleotide
cuguaaacaccuggcagaa

SEQ ID NO: 969656 - RNA, 19 nt, Artificial Sequence
  Description of Artificial Sequence: Synthetic oligonucleotide
ugcaguccggucugugcua

SEQ ID NO: 969657 - RNA, 19 nt, Artificial Sequence
  Description of Artificial Sequence: Synthetic oligonucleotide
ccggaggauagcaucuuug

SEQ ID NO: 969658 - RNA, 19 nt, Artificial Sequence
  Description of Artificial Sequence: Synthetic oligonucleotide
cgugcgauucaaugucugg

SEQ ID NO: 969659 - RNA, 19 nt, Artificial Sequence
  Description of Artificial Sequence: Synthetic oligonucleotide
acacuugacauaacaccuu

SEQ ID NO: 969660 - RNA, 19 nt, Artificial Sequence
  Description of Artificial Sequence: Synthetic oligonucleotide
acgugcgauucaaugucug

SEQ ID NO: 969661 - RNA, 19 nt, Artificial Sequence
  Description of Artificial Sequence: Synthetic oligonucleotide
ucuccaccgacguguccuc

SEQ ID NO: 969662 - RNA, 19 nt, Artificial Sequence
  Description of Artificial Sequence: Synthetic oligonucleotide
gggcuccacaagcaaacac

SEQ ID NO: 969663 - RNA, 19 nt, Artificial Sequence
  Description of Artificial Sequence: Synthetic oligonucleotide
cacuuccuguaaacaccug

SEQ ID NO: 969664 - RNA, 19 nt, Artificial Sequence
  Description of Artificial Sequence: Synthetic oligonucleotide
cugaggcugcacagccaag

SEQ ID NO: 969665 - RNA, 19 nt, Artificial Sequence
  Description of Artificial Sequence: Synthetic oligonucleotide
cgugcuugaggcaacucuc

SEQ ID NO: 969666 - RNA, 19 nt, Artificial Sequence
  Description of Artificial Sequence: Synthetic oligonucleotide
agcuaggacugcggcuuuc

SEQ ID NO: 969667 - RNA, 19 nt, Artificial Sequence
  Description of Artificial Sequence: Synthetic oligonucleotide
cagucucauccacucgcuc

SEQ ID NO: 969668 - RNA, 19 nt, Artificial Sequence
  Description of Artificial Sequence: Synthetic oligonucleotide
cugugccaccucaaugaga

SEQ ID NO: 969669 - RNA, 19 nt, Artificial Sequence
  Description of Artificial Sequence: Synthetic oligonucleotide
ccaucuuaggaagugggga

SEQ ID NO: 969670 - RNA, 19 nt, Artificial Sequence
  Description of Artificial Sequence: Synthetic oligonucleotide
aguccggucugugcuacaa

SEQ ID NO: 969671 - RNA, 19 nt, Artificial Sequence
  Description of Artificial Sequence: Synthetic oligonucleotide
ggucguggccuggaagagg

SEQ ID NO: 969672 - RNA, 19 nt, Artificial Sequence
  Description of Artificial Sequence: Synthetic oligonucleotide
agcugugauccaggcaaga

SEQ ID NO: 969673 - RNA, 19 nt, Artificial Sequence
  Description of Artificial Sequence: Synthetic oligonucleotide
ccagcgcuaguucccacag

SEQ ID NO: 969674 - RNA, 19 nt, Artificial Sequence
  Description of Artificial Sequence: Synthetic oligonucleotide
cuggaucuucggaguguuc

SEQ ID NO: 969675 - RNA, 19 nt, Artificial Sequence
  Description of Artificial Sequence: Synthetic oligonucleotide
accgugcuugaggcaacuc

SEQ ID NO: 969676 - RNA, 19 nt, Artificial Sequence
  Description of Artificial Sequence: Synthetic oligonucleotide
aaaccacguggcagaaguu

SEQ ID NO: 969677 - RNA, 19 nt, Artificial Sequence
  Description of Artificial Sequence: Synthetic oligonucleotide
ugcuguuaaguggguucuc

SEQ ID NO: 969678 - RNA, 19 nt, Artificial Sequence
  Description of Artificial Sequence: Synthetic oligonucleotide
gaagcaccuugcccgcgaa

SEQ ID NO: 969679 - RNA, 19 nt, Artificial Sequence
  Description of Artificial Sequence: Synthetic oligonucleotide
ggacugcggcuuucaaacc

SEQ ID NO: 969680 - RNA, 19 nt, Artificial Sequence
  Description of Artificial Sequence: Synthetic oligonucleotide
cuuugaggcucugcucuca

SEQ ID NO: 969681 - RNA, 19 nt, Artificial Sequence
  Description of Artificial Sequence: Synthetic oligonucleotide
gcccgcgaagaucuucucc

SEQ ID NO: 969682 - RNA, 19 nt, Artificial Sequence
  Description of Artificial Sequence: Synthetic oligonucleotide
acguguccucggucgccuc

SEQ ID NO: 969683 - RNA, 19 nt, Artificial Sequence
  Description of Artificial Sequence: Synthetic oligonucleotide
ggcaagaucccggcugggc

SEQ ID NO: 969684 - RNA, 19 nt, Artificial Sequence
  Description of Artificial Sequence: Synthetic oligonucleotide
caucaggauucagugcuaa

SEQ ID NO: 969685 - RNA, 19 nt, Artificial Sequence
  Description of Artificial Sequence: Synthetic oligonucleotide
cagcgcuaguucccacagc

SEQ ID NO: 969686 - RNA, 19 nt, Artificial Sequence
  Description of Artificial Sequence: Synthetic oligonucleotide
gcugcauguauuaacuuau

SEQ ID NO: 969687 - RNA, 19 nt, Artificial Sequence
  Description of Artificial Sequence: Synthetic oligonucleotide
caugagcaccgugcuugag

SEQ ID NO: 969688 - RNA, 19 nt, Artificial Sequence
  Description of Artificial Sequence: Synthetic oligonucleotide
ccuacgugcgauucaaugu

SEQ ID NO: 969689 - RNA, 19 nt, Artificial Sequence
  Description of Artificial Sequence: Synthetic oligonucleotide
ggaucuucggaguguucaa

SEQ ID NO: 969690 - RNA, 19 nt, Artificial Sequence
  Description of Artificial Sequence: Synthetic oligonucleotide
gcaugacagggccugucuc

SEQ ID NO: 969691 - RNA, 19 nt, Artificial Sequence
  Description of Artificial Sequence: Synthetic oligonucleotide
cugccguaaggcagucuca

SEQ ID NO: 969692 - RNA, 19 nt, Artificial Sequence
  Description of Artificial Sequence: Synthetic oligonucleotide
caccaccuacgugcgauuc

SEQ ID NO: 969693 - RNA, 19 nt, Artificial Sequence
  Description of Artificial Sequence: Synthetic oligonucleotide
ggucgccuccuccagccac

SEQ ID NO: 969694 - RNA, 19 nt, Artificial Sequence
  Description of Artificial Sequence: Synthetic oligonucleotide
uuccggaguucggucugga

SEQ ID NO: 969695 - RNA, 19 nt, Artificial Sequence
  Description of Artificial Sequence: Synthetic oligonucleotide
cugcaguccggucugugcu

SEQ ID NO: 969696 - RNA, 19 nt, Artificial Sequence
  Description of Artificial Sequence: Synthetic oligonucleotide
aggcaagaucccggcuggg

SEQ ID NO: 969697 - RNA, 19 nt, Artificial Sequence
  Description of Artificial Sequence: Synthetic oligonucleotide
ccgugaaggucaccggggc

SEQ ID NO: 969698 - RNA, 19 nt, Artificial Sequence
  Description of Artificial Sequence: Synthetic oligonucleotide
caccugccccugcuugggg

SEQ ID NO: 969699 - RNA, 19 nt, Artificial Sequence
  Description of Artificial Sequence: Synthetic oligonucleotide
cugucggcuuggccacccg

SEQ ID NO: 969700 - RNA, 19 nt, Artificial Sequence
  Description of Artificial Sequence: Synthetic oligonucleotide
gugcuguuaaguggguucu

SEQ ID NO: 969701 - RNA, 19 nt, Artificial Sequence
  Description of Artificial Sequence: Synthetic oligonucleotide
ccaacuccucaggggaugg

SEQ ID NO: 969702 - RNA, 19 nt, Artificial Sequence
  Description of Artificial Sequence: Synthetic oligonucleotide
cuccaccgacguguccucg

SEQ ID NO: 969703 - RNA, 19 nt, Artificial Sequence
  Description of Artificial Sequence: Synthetic oligonucleotide
ggucaagaaaggggaguca

SEQ ID NO: 969704 - RNA, 19 nt, Artificial Sequence
  Description of Artificial Sequence: Synthetic oligonucleotide
caacugcaucaggauucag

SEQ ID NO: 969705 - RNA, 19 nt, Artificial Sequence
  Description of Artificial Sequence: Synthetic oligonucleotide
cacugcaucggaagcugcu

SEQ ID NO: 969706 - RNA, 19 nt, Artificial Sequence
  Description of Artificial Sequence: Synthetic oligonucleotide
cccgaacccgugaagguca

SEQ ID NO: 969707 - RNA, 19 nt, Artificial Sequence
  Description of Artificial Sequence: Synthetic oligonucleotide
cacgaacaucgcgccgccg

SEQ ID NO: 969708 - RNA, 19 nt, Artificial Sequence
  Description of Artificial Sequence: Synthetic oligonucleotide
ugcccgcgaagaucuucuc

SEQ ID NO: 969709 - RNA, 19 nt, Artificial Sequence
  Description of Artificial Sequence: Synthetic oligonucleotide
ccuccugcacgaacaucgc

SEQ ID NO: 969710 - RNA, 19 nt, Artificial Sequence
  Description of Artificial Sequence: Synthetic oligonucleotide
cuccagcgcuaguucccac

SEQ ID NO: 969711 - RNA, 19 nt, Artificial Sequence
  Description of Artificial Sequence: Synthetic oligonucleotide
ccgcccgaacccgugaagg

SEQ ID NO: 969712 - RNA, 19 nt, Artificial Sequence
  Description of Artificial Sequence: Synthetic oligonucleotide
gcauucugcugguuguugu

SEQ ID NO: 969713 - RNA, 19 nt, Artificial Sequence
  Description of Artificial Sequence: Synthetic oligonucleotide
cccaauugcaccacugggu

SEQ ID NO: 969714 - RNA, 19 nt, Artificial Sequence
  Description of Artificial Sequence: Synthetic oligonucleotide
gcuaguucccacagcagcu

SEQ ID NO: 969715 - RNA, 19 nt, Artificial Sequence
  Description of Artificial Sequence: Synthetic oligonucleotide
cuaggacugcggcuuucaa

SEQ ID NO: 969716 - RNA, 19 nt, Artificial Sequence
  Description of Artificial Sequence: Synthetic oligonucleotide
cugcugagacaucagccau

SEQ ID NO: 969717 - RNA, 19 nt, Artificial Sequence
  Description of Artificial Sequence: Synthetic oligonucleotide
gcacgaacaucgcgccgcc

SEQ ID NO: 969718 - RNA, 19 nt, Artificial Sequence
  Description of Artificial Sequence: Synthetic oligonucleotide
agagggcuauuuggaucga

SEQ ID NO: 969719 - RNA, 19 nt, Artificial Sequence
  Description of Artificial Sequence: Synthetic oligonucleotide
gcuccacaagcaaacaccu

SEQ ID NO: 969720 - RNA, 19 nt, Artificial Sequence
  Description of Artificial Sequence: Synthetic oligonucleotide
guggggaaggagcacgcuu

SEQ ID NO: 969721 - RNA, 19 nt, Artificial Sequence
  Description of Artificial Sequence: Synthetic oligonucleotide
caccgacguguccucgguc

SEQ ID NO: 969722 - RNA, 19 nt, Artificial Sequence
  Description of Artificial Sequence: Synthetic oligonucleotide
gggucguggccuggaagag

SEQ ID NO: 969723 - RNA, 19 nt, Artificial Sequence
  Description of Artificial Sequence: Synthetic oligonucleotide
gcaaacaccuuagggucaa

SEQ ID NO: 969724 - RNA, 19 nt, Artificial Sequence
  Description of Artificial Sequence: Synthetic oligonucleotide
gccacccgucacugaagag

SEQ ID NO: 969725 - RNA, 19 nt, Artificial Sequence
  Description of Artificial Sequence: Synthetic oligonucleotide
ggcucggaauucccuuuuc

SEQ ID NO: 969726 - RNA, 19 nt, Artificial Sequence
  Description of Artificial Sequence: Synthetic oligonucleotide
caucggcucggaauucccu

SEQ ID NO: 969727 - RNA, 19 nt, Artificial Sequence
  Description of Artificial Sequence: Synthetic oligonucleotide
gacguguccucggucgccu

SEQ ID NO: 969728 - RNA, 19 nt, Artificial Sequence
  Description of Artificial Sequence: Synthetic oligonucleotide
gaguucggucuggaagucu

SEQ ID NO: 969729 - RNA, 19 nt, Artificial Sequence
  Description of Artificial Sequence: Synthetic oligonucleotide
ccggucugugcuacaagca

SEQ ID NO: 969730 - RNA, 19 nt, Artificial Sequence
  Description of Artificial Sequence: Synthetic oligonucleotide
gugucaauagcuggaucuu

SEQ ID NO: 969731 - RNA, 19 nt, Artificial Sequence
  Description of Artificial Sequence: Synthetic oligonucleotide
ggaguucggucuggaaguc

SEQ ID NO: 969732 - RNA, 19 nt, Artificial Sequence
  Description of Artificial Sequence: Synthetic oligonucleotide
cgaacaucgcgccgccgcc

SEQ ID NO: 969733 - RNA, 19 nt, Artificial Sequence
  Description of Artificial Sequence: Synthetic oligonucleotide
ccacuuccuguaaacaccu

SEQ ID NO: 969734 - RNA, 19 nt, Artificial Sequence
  Description of Artificial Sequence: Synthetic oligonucleotide
caccaagaucuuccggagu

SEQ ID NO: 969735 - RNA, 19 nt, Artificial Sequence
  Description of Artificial Sequence: Synthetic oligonucleotide
aggcaccaccuacgugcga

SEQ ID NO: 969736 - RNA, 19 nt, Artificial Sequence
  Description of Artificial Sequence: Synthetic oligonucleotide
ccgucagcugcgcagaugu

SEQ ID NO: 969737 - RNA, 19 nt, Artificial Sequence
  Description of Artificial Sequence: Synthetic oligonucleotide
acccucuccgaagcugcau

SEQ ID NO: 969738 - RNA, 19 nt, Artificial Sequence
  Description of Artificial Sequence: Synthetic oligonucleotide
gccguaaggcagucucauc

SEQ ID NO: 969739 - RNA, 19 nt, Artificial Sequence
  Description of Artificial Sequence: Synthetic oligonucleotide
ggugugucaauagcuggau

SEQ ID NO: 969740 - RNA, 19 nt, Artificial Sequence
  Description of Artificial Sequence: Synthetic oligonucleotide
gccgcccgaacccgugaag

SEQ ID NO: 969741 - RNA, 19 nt, Artificial Sequence
  Description of Artificial Sequence: Synthetic oligonucleotide
ggucguucauccacugugu

SEQ ID NO: 969742 - RNA, 19 nt, Artificial Sequence
  Description of Artificial Sequence: Synthetic oligonucleotide
gcgcuaguucccacagcag

SEQ ID NO: 969743 - RNA, 19 nt, Artificial Sequence
  Description of Artificial Sequence: Synthetic oligonucleotide
ucggcgccgucagcugcgc

SEQ ID NO: 969744 - RNA, 19 nt, Artificial Sequence
  Description of Artificial Sequence: Synthetic oligonucleotide
ccgacguguccucggucgc

SEQ ID NO: 969745 - RNA, 19 nt, Artificial Sequence
  Description of Artificial Sequence: Synthetic oligonucleotide
agcugccguaaggcagucu

SEQ ID NO: 969746 - RNA, 19 nt, Artificial Sequence
  Description of Artificial Sequence: Synthetic oligonucleotide
gcccgaacccgugaagguc

SEQ ID NO: 969747 - RNA, 19 nt, Artificial Sequence
  Description of Artificial Sequence: Synthetic oligonucleotide
cggaguucggucuggaagu

SEQ ID NO: 969748 - RNA, 19 nt, Artificial Sequence
  Description of Artificial Sequence: Synthetic oligonucleotide
ggcuguugcccggaggaua

SEQ ID NO: 969749 - RNA, 19 nt, Artificial Sequence
  Description of Artificial Sequence: Synthetic oligonucleotide
ccgcgaagaucuucuccuc

SEQ ID NO: 969750 - RNA, 19 nt, Artificial Sequence
  Description of Artificial Sequence: Synthetic oligonucleotide
gccgcgcgcuccuucgcug

SEQ ID NO: 969751 - RNA, 19 nt, Artificial Sequence
  Description of Artificial Sequence: Synthetic oligonucleotide
cugcugguuguuguucacu

SEQ ID NO: 969752 - RNA, 19 nt, Artificial Sequence
  Description of Artificial Sequence: Synthetic oligonucleotide
guucggucuggaagucucu

SEQ ID NO: 969753 - RNA, 19 nt, Artificial Sequence
  Description of Artificial Sequence: Synthetic oligonucleotide
gagggcuauuuggaucgau

SEQ ID NO: 969754 - RNA, 19 nt, Artificial Sequence
  Description of Artificial Sequence: Synthetic oligonucleotide
ggcaccaccuacgugcgau

SEQ ID NO: 969755 - RNA, 19 nt, Artificial Sequence
  Description of Artificial Sequence: Synthetic oligonucleotide
guugcccggaggauagcau

SEQ ID NO: 969756 - RNA, 19 nt, Artificial Sequence
  Description of Artificial Sequence: Synthetic oligonucleotide
ccgugcuugaggcaacucu

SEQ ID NO: 969757 - RNA, 19 nt, Artificial Sequence
  Description of Artificial Sequence: Synthetic oligonucleotide
ccgagcaucggcucggaau

SEQ ID NO: 969758 - RNA, 19 nt, Artificial Sequence
  Description of Artificial Sequence: Synthetic oligonucleotide
ccaccuacgugcgauucaa

SEQ ID NO: 969759 - RNA, 19 nt, Artificial Sequence
  Description of Artificial Sequence: Synthetic oligonucleotide
ccgaacccgugaaggucac

SEQ ID NO: 969760 - RNA, 19 nt, Artificial Sequence
  Description of Artificial Sequence: Synthetic oligonucleotide
gccgucagcugcgcagaug

SEQ ID NO: 969761 - RNA, 19 nt, Artificial Sequence
  Description of Artificial Sequence: Synthetic oligonucleotide
cagcuccugucggcuuggc

SEQ ID NO: 969762 - RNA, 19 nt, Artificial Sequence
  Description of Artificial Sequence: Synthetic oligonucleotide
cagccacucggcgccguca

SEQ ID NO: 969763 - RNA, 19 nt, Artificial Sequence
  Description of Artificial Sequence: Synthetic oligonucleotide
ccgccccagcuccugucgg

SEQ ID NO: 969764 - RNA, 19 nt, Artificial Sequence
  Description of Artificial Sequence: Synthetic oligonucleotide
gcagucucauccacucgcu

SEQ ID NO: 969765 - RNA, 19 nt, Artificial Sequence
  Description of Artificial Sequence: Synthetic oligonucleotide
gcaccgugcuugaggcaac

SEQ ID NO: 969766 - RNA, 19 nt, Artificial Sequence
  Description of Artificial Sequence: Synthetic oligonucleotide
cgagcaucggcucggaauu

SEQ ID NO: 969767 - RNA, 19 nt, Artificial Sequence
  Description of Artificial Sequence: Synthetic oligonucleotide
cgacguguccucggucgcc

SEQ ID NO: 969768 - RNA, 19 nt, Artificial Sequence
  Description of Artificial Sequence: Synthetic oligonucleotide
ccgaagcugcauguauuaa

SEQ ID NO: 969769 - RNA, 19 nt, Artificial Sequence
  Description of Artificial Sequence: Synthetic oligonucleotide
caccuacgugcgauucaau

SEQ ID NO: 969770 - RNA, 19 nt, Artificial Sequence
  Description of Artificial Sequence: Synthetic oligonucleotide
cugcgcccgccgcccgaac

SEQ ID NO: 969771 - RNA, 19 nt, Artificial Sequence
  Description of Artificial Sequence: Synthetic oligonucleotide
caccgugcuugaggcaacu

SEQ ID NO: 969772 - RNA, 19 nt, Artificial Sequence
  Description of Artificial Sequence: Synthetic oligonucleotide
cggcuuggccacccgucac

SEQ ID NO: 969773 - RNA, 19 nt, Artificial Sequence
  Description of Artificial Sequence: Synthetic oligonucleotide
cccagugcaauagccacuu

SEQ ID NO: 969774 - RNA, 19 nt, Artificial Sequence
  Description of Artificial Sequence: Synthetic oligonucleotide
caaacaccuuagggucaau

SEQ ID NO: 969775 - RNA, 19 nt, Artificial Sequence
  Description of Artificial Sequence: Synthetic oligonucleotide
cgugaaggucaccggggcu

SEQ ID NO: 969776 - RNA, 19 nt, Artificial Sequence
  Description of Artificial Sequence: Synthetic oligonucleotide
ccaccgacguguccucggu

SEQ ID NO: 969777 - RNA, 19 nt, Artificial Sequence
  Description of Artificial Sequence: Synthetic oligonucleotide
ccuucucaucaaagcccau

SEQ ID NO: 969778 - RNA, 19 nt, Artificial Sequence
  Description of Artificial Sequence: Synthetic oligonucleotide
cccggaggauagcaucuuu

SEQ ID NO: 969779 - RNA, 19 nt, Artificial Sequence
  Description of Artificial Sequence: Synthetic oligonucleotide
cgcccgaacccgugaaggu

SEQ ID NO: 969780 - RNA, 19 nt, Artificial Sequence
  Description of Artificial Sequence: Synthetic oligonucleotide
gcccgagcaucggcucgga

SEQ ID NO: 969781 - RNA, 19 nt, Artificial Sequence
  Description of Artificial Sequence: Synthetic oligonucleotide
cccgagcaucggcucggaa

SEQ ID NO: 969782 - RNA, 19 nt, Artificial Sequence
  Description of Artificial Sequence: Synthetic oligonucleotide
ccgccgcccgaacccguga

SEQ ID NO: 969783 - RNA, 19 nt, Artificial Sequence
  Description of Artificial Sequence: Synthetic oligonucleotide
gcccggaggauagcaucuu

SEQ ID NO: 969784 - RNA, 19 nt, Artificial Sequence
  Description of Artificial Sequence: Synthetic oligonucleotide
cgccgcccgaacccgugaa

SEQ ID NO: 969785 - RNA, 19 nt, Artificial Sequence
  Description of Artificial Sequence: Synthetic oligonucleotide
cgccgucagcugcgcagau

SEQ ID NO: 969786 - RNA, 19 nt, Artificial Sequence
  Description of Artificial Sequence: Synthetic oligonucleotide
acaauaaacauacaauccc

SEQ ID NO: 969787 - RNA, 19 nt, Artificial Sequence
  Description of Artificial Sequence: Synthetic oligonucleotide
auuaaaacacaauuugugc

SEQ ID NO: 969788 - RNA, 19 nt, Artificial Sequence
  Description of Artificial Sequence: Synthetic oligonucleotide
aaacauacaaucccauucc

SEQ ID NO: 969789 - RNA, 19 nt, Artificial Sequence
  Description of Artificial Sequence: Synthetic oligonucleotide
acuaguaauagguacauuc

SEQ ID NO: 969790 - RNA, 19 nt, Artificial Sequence
  Description of Artificial Sequence: Synthetic oligonucleotide
uuuauaaugcaaauuagga

SEQ ID NO: 969791 - RNA, 19 nt, Artificial Sequence
  Description of Artificial Sequence: Synthetic oligonucleotide
uuaaauagaaacaaucccu

SEQ ID NO: 969792 - RNA, 19 nt, Artificial Sequence
  Description of Artificial Sequence: Synthetic oligonucleotide
uaagugaccgauuaaauag

SEQ ID NO: 969793 - RNA, 19 nt, Artificial Sequence
  Description of Artificial Sequence: Synthetic oligonucleotide
aaaccaauuaucuaaaguu

SEQ ID NO: 969794 - RNA, 19 nt, Artificial Sequence
  Description of Artificial Sequence: Synthetic oligonucleotide
aaauucaccaacuaguaau

SEQ ID NO: 969795 - RNA, 19 nt, Artificial Sequence
  Description of Artificial Sequence: Synthetic oligonucleotide
ugggcuaaaauucauaucu

SEQ ID NO: 969796 - RNA, 19 nt, Artificial Sequence
  Description of Artificial Sequence: Synthetic oligonucleotide
aaauaaaguaagacaaccc

SEQ ID NO: 969797 - RNA, 19 nt, Artificial Sequence
  Description of Artificial Sequence: Synthetic oligonucleotide
auuaguuaugcauuggauc

SEQ ID NO: 969798 - RNA, 19 nt, Artificial Sequence
  Description of Artificial Sequence: Synthetic oligonucleotide
ucauaguuuaacaaugcag

SEQ ID NO: 969799 - RNA, 19 nt, Artificial Sequence
  Description of Artificial Sequence: Synthetic oligonucleotide
uguauuguaaauuaauaaa

SEQ ID NO: 969800 - RNA, 19 nt, Artificial Sequence
  Description of Artificial Sequence: Synthetic oligonucleotide
gagaguuucaccuauagga

SEQ ID NO: 969801 - RNA, 19 nt, Artificial Sequence
  Description of Artificial Sequence: Synthetic oligonucleotide
aaaguaagacaacccaaac

SEQ ID NO: 969802 - RNA, 19 nt, Artificial Sequence
  Description of Artificial Sequence: Synthetic oligonucleotide
uuagguuugucucagaaaa

SEQ ID NO: 969803 - RNA, 19 nt, Artificial Sequence
  Description of Artificial Sequence: Synthetic oligonucleotide
ugaccgauuaaauagaaac

SEQ ID NO: 969804 - RNA, 19 nt, Artificial Sequence
  Description of Artificial Sequence: Synthetic oligonucleotide
agaaacauaacacaaaguu

SEQ ID NO: 969805 - RNA, 19 nt, Artificial Sequence
  Description of Artificial Sequence: Synthetic oligonucleotide
  modified_base (11)..(11): a, c, u, g, unknown or other
uauuaugguanccauugag

SEQ ID NO: 969806 - RNA, 19 nt, Artificial Sequence
  Description of Artificial Sequence: Synthetic oligonucleotide
aauagucuauuuugugagc

SEQ ID NO: 969807 - RNA, 19 nt, Artificial Sequence
  Description of Artificial Sequence: Synthetic oligonucleotide
uauauaauugaguugccug

SEQ ID NO: 969808 - RNA, 19 nt, Artificial Sequence
  Description of Artificial Sequence: Synthetic oligonucleotide
uuaguuaugcauuggaucu

SEQ ID NO: 969809 - RNA, 19 nt, Artificial Sequence
  Description of Artificial Sequence: Synthetic oligonucleotide
uuaaaacacaauuugugca

SEQ ID NO: 969810 - RNA, 19 nt, Artificial Sequence
  Description of Artificial Sequence: Synthetic oligonucleotide
  modified_base (9)..(9): a, c, u, g, unknown or other
uuaugguanccauugagag

SEQ ID NO: 969811 - RNA, 19 nt, Artificial Sequence
  Description of Artificial Sequence: Synthetic oligonucleotide
uaagagaaccguuacaccc

SEQ ID NO: 969812 - RNA, 19 nt, Artificial Sequence
  Description of Artificial Sequence: Synthetic oligonucleotide
aaguuaaagacugucgggg

SEQ ID NO: 969813 - RNA, 19 nt, Artificial Sequence
  Description of Artificial Sequence: Synthetic oligonucleotide
uauuuaugccuuuauguag

SEQ ID NO: 969814 - RNA, 19 nt, Artificial Sequence
  Description of Artificial Sequence: Synthetic oligonucleotide
uguccuuuauaaaacaucu

SEQ ID NO: 969815 - RNA, 19 nt, Artificial Sequence
  Description of Artificial Sequence: Synthetic oligonucleotide
acuaaugcaaauguggcac

SEQ ID NO: 969816 - RNA, 19 nt, Artificial Sequence
  Description of Artificial Sequence: Synthetic oligonucleotide
uaugagacuacugugaaga

SEQ ID NO: 969817 - RNA, 19 nt, Artificial Sequence
  Description of Artificial Sequence: Synthetic oligonucleotide
uuaggacauacaaugaucu

SEQ ID NO: 969818 - RNA, 19 nt, Artificial Sequence
  Description of Artificial Sequence: Synthetic oligonucleotide
acaaauuucgaccccuucg

SEQ ID NO: 969819 - RNA, 19 nt, Artificial Sequence
  Description of Artificial Sequence: Synthetic oligonucleotide
aaagugguauucuaaguga

SEQ ID NO: 969820 - RNA, 19 nt, Artificial Sequence
  Description of Artificial Sequence: Synthetic oligonucleotide
aauugaguugccuguguuc

SEQ ID NO: 969821 - RNA, 19 nt, Artificial Sequence
  Description of Artificial Sequence: Synthetic oligonucleotide
ugaauagucuauuuuguga

SEQ ID NO: 969822 - RNA, 19 nt, Artificial Sequence
  Description of Artificial Sequence: Synthetic oligonucleotide
aaaguagggucacaugguc

SEQ ID NO: 969823 - RNA, 19 nt, Artificial Sequence
  Description of Artificial Sequence: Synthetic oligonucleotide
uguucugaguaucugaggu

SEQ ID NO: 969824 - RNA, 19 nt, Artificial Sequence
  Description of Artificial Sequence: Synthetic oligonucleotide
aaccguuacacccugaaaa

SEQ ID NO: 969825 - RNA, 19 nt, Artificial Sequence
  Description of Artificial Sequence: Synthetic oligonucleotide
aauuaggacauacaaugau

SEQ ID NO: 969826 - RNA, 19 nt, Artificial Sequence
  Description of Artificial Sequence: Synthetic oligonucleotide
aaguugcuauauuuaugcc

SEQ ID NO: 969827 - RNA, 19 nt, Artificial Sequence
  Description of Artificial Sequence: Synthetic oligonucleotide
  modified_base (3)..(3): a, c, u, g, unknown or other
uanccauugagagaugggg

SEQ ID NO: 969828 - RNA, 19 nt, Artificial Sequence
  Description of Artificial Sequence: Synthetic oligonucleotide
  modified_base (16)..(16): a, c, u, g, unknown or other
uagauuauuaugguancca

SEQ ID NO: 969829 - RNA, 19 nt, Artificial Sequence
  Description of Artificial Sequence: Synthetic oligonucleotide
aaguaagacaacccaaaca

SEQ ID NO: 969830 - RNA, 19 nt, Artificial Sequence
  Description of Artificial Sequence: Synthetic oligonucleotide
ucucauauacaauuuggca

SEQ ID NO: 969831 - RNA, 19 nt, Artificial Sequence
  Description of Artificial Sequence: Synthetic oligonucleotide
uguaagagaaccguuacac

SEQ ID NO: 969832 - RNA, 19 nt, Artificial Sequence
  Description of Artificial Sequence: Synthetic oligonucleotide
augugugccaauaagaauc

SEQ ID NO: 969833 - RNA, 19 nt, Artificial Sequence
  Description of Artificial Sequence: Synthetic oligonucleotide
cuguuagaaaauaacaguc

SEQ ID NO: 969834 - RNA, 19 nt, Artificial Sequence
  Description of Artificial Sequence: Synthetic oligonucleotide
auaacagucaguuccaaau

SEQ ID NO: 969835 - RNA, 19 nt, Artificial Sequence
  Description of Artificial Sequence: Synthetic oligonucleotide
acaauuugugcauaguaca

SEQ ID NO: 969836 - RNA, 19 nt, Artificial Sequence
  Description of Artificial Sequence: Synthetic oligonucleotide
aaacugucgucuucauccc

SEQ ID NO: 969837 - RNA, 19 nt, Artificial Sequence
  Description of Artificial Sequence: Synthetic oligonucleotide
uaaaguaagacaacccaaa

SEQ ID NO: 969838 - RNA, 19 nt, Artificial Sequence
  Description of Artificial Sequence: Synthetic oligonucleotide
auuuucguacaccaguuug

SEQ ID NO: 969839 - RNA, 19 nt, Artificial Sequence
  Description of Artificial Sequence: Synthetic oligonucleotide
uauaggaugcuguaagaga

SEQ ID NO: 969840 - RNA, 19 nt, Artificial Sequence
  Description of Artificial Sequence: Synthetic oligonucleotide
uacuauugacaccagcuug

SEQ ID NO: 969841 - RNA, 19 nt, Artificial Sequence
  Description of Artificial Sequence: Synthetic oligonucleotide
auauaauugaguugccugu

SEQ ID NO: 969842 - RNA, 19 nt, Artificial Sequence
  Description of Artificial Sequence: Synthetic oligonucleotide
aacaaauuucgaccccuuc

SEQ ID NO: 969843 - RNA, 19 nt, Artificial Sequence
  Description of Artificial Sequence: Synthetic oligonucleotide
ucucacuccaaaauucacc

SEQ ID NO: 969844 - RNA, 19 nt, Artificial Sequence
  Description of Artificial Sequence: Synthetic oligonucleotide
uuauauuuucguacaccag

SEQ ID NO: 969845 - RNA, 19 nt, Artificial Sequence
  Description of Artificial Sequence: Synthetic oligonucleotide
aguugcuauauuuaugccu

SEQ ID NO: 969846 - RNA, 19 nt, Artificial Sequence
  Description of Artificial Sequence: Synthetic oligonucleotide
agggauuauacuuucaaau

SEQ ID NO: 969847 - RNA, 19 nt, Artificial Sequence
  Description of Artificial Sequence: Synthetic oligonucleotide
caaauagaccuucaagacc

SEQ ID NO: 969848 - RNA, 19 nt, Artificial Sequence
  Description of Artificial Sequence: Synthetic oligonucleotide
aacccuguuagaaaauaac

SEQ ID NO: 969849 - RNA, 19 nt, Artificial Sequence
  Description of Artificial Sequence: Synthetic oligonucleotide
caaauuucgaccccuucgg

SEQ ID NO: 969850 - RNA, 19 nt, Artificial Sequence
  Description of Artificial Sequence: Synthetic oligonucleotide
aagaccauaacuugacaaa

SEQ ID NO: 969851 - RNA, 19 nt, Artificial Sequence
  Description of Artificial Sequence: Synthetic oligonucleotide
aguaucacaucauucauua

SEQ ID NO: 969852 - RNA, 19 nt, Artificial Sequence
  Description of Artificial Sequence: Synthetic oligonucleotide
aacuaaugcaaauguggca

SEQ ID NO: 969853 - RNA, 19 nt, Artificial Sequence
  Description of Artificial Sequence: Synthetic oligonucleotide
auaagcuaccuuuauacaa

SEQ ID NO: 969854 - RNA, 19 nt, Artificial Sequence
  Description of Artificial Sequence: Synthetic oligonucleotide
uucggguuucagaagaacc

SEQ ID NO: 969855 - RNA, 19 nt, Artificial Sequence
  Description of Artificial Sequence: Synthetic oligonucleotide
uagcccauuuauauuuucg

SEQ ID NO: 969856 - RNA, 19 nt, Artificial Sequence
  Description of Artificial Sequence: Synthetic oligonucleotide
aaauuucgaccccuucggg

SEQ ID NO: 969857 - RNA, 19 nt, Artificial Sequence
  Description of Artificial Sequence: Synthetic oligonucleotide
aucucauauacaauuuggc

SEQ ID NO: 969858 - RNA, 19 nt, Artificial Sequence
  Description of Artificial Sequence: Synthetic oligonucleotide
aaucccgacgccuugaaua

SEQ ID NO: 969859 - RNA, 19 nt, Artificial Sequence
  Description of Artificial Sequence: Synthetic oligonucleotide
  modified_base (7)..(7): a, c, u, g, unknown or other
augguanccauugagagau

SEQ ID NO: 969860 - RNA, 19 nt, Artificial Sequence
  Description of Artificial Sequence: Synthetic oligonucleotide
agcucucauguuuaagagc

SEQ ID NO: 969861 - RNA, 19 nt, Artificial Sequence
  Description of Artificial Sequence: Synthetic oligonucleotide
accuauaggaugcuguaag

SEQ ID NO: 969862 - RNA, 19 nt, Artificial Sequence
  Description of Artificial Sequence: Synthetic oligonucleotide
uuuguuaacagaggggaca

SEQ ID NO: 969863 - RNA, 19 nt, Artificial Sequence
  Description of Artificial Sequence: Synthetic oligonucleotide
aauuucgaccccuucgggu

SEQ ID NO: 969864 - RNA, 19 nt, Artificial Sequence
  Description of Artificial Sequence: Synthetic oligonucleotide
aaaacaaauuucgaccccu

SEQ ID NO: 969865 - RNA, 19 nt, Artificial Sequence
  Description of Artificial Sequence: Synthetic oligonucleotide
aguuuguuaacagagggga

SEQ ID NO: 969866 - RNA, 19 nt, Artificial Sequence
  Description of Artificial Sequence: Synthetic oligonucleotide
cacaauuugugcauaguac

SEQ ID NO: 969867 - RNA, 19 nt, Artificial Sequence
  Description of Artificial Sequence: Synthetic oligonucleotide
ucguacaccaguuuguuaa

SEQ ID NO: 969868 - RNA, 19 nt, Artificial Sequence
  Description of Artificial Sequence: Synthetic oligonucleotide
uuugugagcacuugcuggc

SEQ ID NO: 969869 - RNA, 19 nt, Artificial Sequence
  Description of Artificial Sequence: Synthetic oligonucleotide
uaagcuaccuuuauacaaa

SEQ ID NO: 969870 - RNA, 19 nt, Artificial Sequence
  Description of Artificial Sequence: Synthetic oligonucleotide
aguuuguccuuuauaaaac

SEQ ID NO: 969871 - RNA, 19 nt, Artificial Sequence
  Description of Artificial Sequence: Synthetic oligonucleotide
uucaagaccauaacuugac

SEQ ID NO: 969872 - RNA, 19 nt, Artificial Sequence
  Description of Artificial Sequence: Synthetic oligonucleotide
auuaggacauacaaugauc

SEQ ID NO: 969873 - RNA, 19 nt, Artificial Sequence
  Description of Artificial Sequence: Synthetic oligonucleotide
auauuuaugccuuuaugua

SEQ ID NO: 969874 - RNA, 19 nt, Artificial Sequence
  Description of Artificial Sequence: Synthetic oligonucleotide
  modified_base (10)..(10): a, c, u, g, unknown or other
auuaugguanccauugaga

SEQ ID NO: 969875 - RNA, 19 nt, Artificial Sequence
  Description of Artificial Sequence: Synthetic oligonucleotide
uucucggcuacuaaagaca

SEQ ID NO: 969876 - RNA, 19 nt, Artificial Sequence
  Description of Artificial Sequence: Synthetic oligonucleotide
accguuacacccugaaaac

SEQ ID NO: 969877 - RNA, 19 nt, Artificial Sequence
  Description of Artificial Sequence: Synthetic oligonucleotide
uaugcauuggaucuagauu

SEQ ID NO: 969878 - RNA, 19 nt, Artificial Sequence
  Description of Artificial Sequence: Synthetic oligonucleotide
uuuucguacaccaguuugu

SEQ ID NO: 969879 - RNA, 19 nt, Artificial Sequence
  Description of Artificial Sequence: Synthetic oligonucleotide
accuguauauaauugaguu

SEQ ID NO: 969880 - RNA, 19 nt, Artificial Sequence
  Description of Artificial Sequence: Synthetic oligonucleotide
acuagggauagauagccca

SEQ ID NO: 969881 - RNA, 19 nt, Artificial Sequence
  Description of Artificial Sequence: Synthetic oligonucleotide
acugucgggguacaauccc

SEQ ID NO: 969882 - RNA, 19 nt, Artificial Sequence
  Description of Artificial Sequence: Synthetic oligonucleotide
acauacaaugaucuuacau

SEQ ID NO: 969883 - RNA, 19 nt, Artificial Sequence
  Description of Artificial Sequence: Synthetic oligonucleotide
aacauuaguuaugcauugg

SEQ ID NO: 969884 - RNA, 19 nt, Artificial Sequence
  Description of Artificial Sequence: Synthetic oligonucleotide
uucaccuauaggaugcugu

SEQ ID NO: 969885 - RNA, 19 nt, Artificial Sequence
  Description of Artificial Sequence: Synthetic oligonucleotide
caauuugugcauaguacag

SEQ ID NO: 969886 - RNA, 19 nt, Artificial Sequence
  Description of Artificial Sequence: Synthetic oligonucleotide
auaagaaucucacuccaaa

SEQ ID NO: 969887 - RNA, 19 nt, Artificial Sequence
  Description of Artificial Sequence: Synthetic oligonucleotide
aggaugcuguaagagaacc

SEQ ID NO: 969888 - RNA, 19 nt, Artificial Sequence
  Description of Artificial Sequence: Synthetic oligonucleotide
  modified_base (8)..(8): a, c, u, g, unknown or other
uaugguanccauugagaga

SEQ ID NO: 969889 - RNA, 19 nt, Artificial Sequence
  Description of Artificial Sequence: Synthetic oligonucleotide
ucuaauaagcuaccuuuau

SEQ ID NO: 969890 - RNA, 19 nt, Artificial Sequence
  Description of Artificial Sequence: Synthetic oligonucleotide
uagaaacauaacacaaagu

SEQ ID NO: 969891 - RNA, 19 nt, Artificial Sequence
  Description of Artificial Sequence: Synthetic oligonucleotide
uguauauaauugaguugcc

SEQ ID NO: 969892 - RNA, 19 nt, Artificial Sequence
  Description of Artificial Sequence: Synthetic oligonucleotide
ucggguuucagaagaaccu

SEQ ID NO: 969893 - RNA, 19 nt, Artificial Sequence
  Description of Artificial Sequence: Synthetic oligonucleotide
agguuugucucagaaaauc

SEQ ID NO: 969894 - RNA, 19 nt, Artificial Sequence
  Description of Artificial Sequence: Synthetic oligonucleotide
uuaugcauuggaucuagau

SEQ ID NO: 969895 - RNA, 19 nt, Artificial Sequence
  Description of Artificial Sequence: Synthetic oligonucleotide
aauuugugcauaguacagu

SEQ ID NO: 969896 - RNA, 19 nt, Artificial Sequence
  Description of Artificial Sequence: Synthetic oligonucleotide
aagggauuauacuuucaaa

SEQ ID NO: 969897 - RNA, 19 nt, Artificial Sequence
  Description of Artificial Sequence: Synthetic oligonucleotide
agucauauggccacaaaug

SEQ ID NO: 969898 - RNA, 19 nt, Artificial Sequence
  Description of Artificial Sequence: Synthetic oligonucleotide
uuauacuuucaaauccaaa

SEQ ID NO: 969899 - RNA, 19 nt, Artificial Sequence
  Description of Artificial Sequence: Synthetic oligonucleotide
caaaugugugccaauaaga

SEQ ID NO: 969900 - RNA, 19 nt, Artificial Sequence
  Description of Artificial Sequence: Synthetic oligonucleotide
ucacauggucuaaucaaca

SEQ ID NO: 969901 - RNA, 19 nt, Artificial Sequence
  Description of Artificial Sequence: Synthetic oligonucleotide
uucugaguaucugagguac

SEQ ID NO: 969902 - RNA, 19 nt, Artificial Sequence
  Description of Artificial Sequence: Synthetic oligonucleotide
uauaauugaguugccugug

SEQ ID NO: 969903 - RNA, 19 nt, Artificial Sequence
  Description of Artificial Sequence: Synthetic oligonucleotide
cagucaguuccaaauagac

SEQ ID NO: 969904 - RNA, 19 nt, Artificial Sequence
  Description of Artificial Sequence: Synthetic oligonucleotide
aaauuaggacauacaauga

SEQ ID NO: 969905 - RNA, 19 nt, Artificial Sequence
  Description of Artificial Sequence: Synthetic oligonucleotide
  modified_base (12)..(12): a, c, u, g, unknown or other
uuauuaugguanccauuga

SEQ ID NO: 969906 - RNA, 19 nt, Artificial Sequence
  Description of Artificial Sequence: Synthetic oligonucleotide
ucgggguacaaucccgacg

SEQ ID NO: 969907 - RNA, 19 nt, Artificial Sequence
  Description of Artificial Sequence: Synthetic oligonucleotide
agacgaccucuccugaccc

SEQ ID NO: 969908 - RNA, 19 nt, Artificial Sequence
  Description of Artificial Sequence: Synthetic oligonucleotide
gaaucucacuccaaaauuc

SEQ ID NO: 969909 - RNA, 19 nt, Artificial Sequence
  Description of Artificial Sequence: Synthetic oligonucleotide
agugguauucuaagugacc

SEQ ID NO: 969910 - RNA, 19 nt, Artificial Sequence
  Description of Artificial Sequence: Synthetic oligonucleotide
ugugugccaauaagaaucu

SEQ ID NO: 969911 - RNA, 19 nt, Artificial Sequence
  Description of Artificial Sequence: Synthetic oligonucleotide
cuauaggaugcuguaagag

SEQ ID NO: 969912 - RNA, 19 nt, Artificial Sequence
  Description of Artificial Sequence: Synthetic oligonucleotide
acuguagacaacuuuuaua

SEQ ID NO: 969913 - RNA, 19 nt, Artificial Sequence
  Description of Artificial Sequence: Synthetic oligonucleotide
accgauuaaauagaaacaa

SEQ ID NO: 969914 - RNA, 19 nt, Artificial Sequence
  Description of Artificial Sequence: Synthetic oligonucleotide
aaaguaaacagcagauaaa

SEQ ID NO: 969915 - RNA, 19 nt, Artificial Sequence
  Description of Artificial Sequence: Synthetic oligonucleotide
auagucuauuuugugagca

SEQ ID NO: 969916 - RNA, 19 nt, Artificial Sequence
  Description of Artificial Sequence: Synthetic oligonucleotide
uuacauucucuguauuaac

SEQ ID NO: 969917 - RNA, 19 nt, Artificial Sequence
  Description of Artificial Sequence: Synthetic oligonucleotide
aaucucacuccaaaauuca

SEQ ID NO: 969918 - RNA, 19 nt, Artificial Sequence
  Description of Artificial Sequence: Synthetic oligonucleotide
agaaaaucugagucauaug

SEQ ID NO: 969919 - RNA, 19 nt, Artificial Sequence
  Description of Artificial Sequence: Synthetic oligonucleotide
  modified_base (15)..(15): a, c, u, g, unknown or other
agauuauuaugguanccau

SEQ ID NO: 969920 - RNA, 19 nt, Artificial Sequence
  Description of Artificial Sequence: Synthetic oligonucleotide
gagugguaggcguuuuggg

SEQ ID NO: 969921 - RNA, 19 nt, Artificial Sequence
  Description of Artificial Sequence: Synthetic oligonucleotide
aguaugagacuacugugaa

SEQ ID NO: 969922 - RNA, 19 nt, Artificial Sequence
  Description of Artificial Sequence: Synthetic oligonucleotide
cauuccaugcuguuugcac

SEQ ID NO: 969923 - RNA, 19 nt, Artificial Sequence
  Description of Artificial Sequence: Synthetic oligonucleotide
guaagagaaccguuacacc

SEQ ID NO: 969924 - RNA, 19 nt, Artificial Sequence
  Description of Artificial Sequence: Synthetic oligonucleotide
ucuauuuugugagcacuug

SEQ ID NO: 969925 - RNA, 19 nt, Artificial Sequence
  Description of Artificial Sequence: Synthetic oligonucleotide
ucccuacuuagcuuucggg

SEQ ID NO: 969926 - RNA, 19 nt, Artificial Sequence
  Description of Artificial Sequence: Synthetic oligonucleotide
uucaucccuacuuagcuuu

SEQ ID NO: 969927 - RNA, 19 nt, Artificial Sequence
  Description of Artificial Sequence: Synthetic oligonucleotide
uaguaauagguacauucuu

SEQ ID NO: 969928 - RNA, 19 nt, Artificial Sequence
  Description of Artificial Sequence: Synthetic oligonucleotide
aaccaauuaucuaaaguua

SEQ ID NO: 969929 - RNA, 19 nt, Artificial Sequence
  Description of Artificial Sequence: Synthetic oligonucleotide
aguuaaagacugucggggu

SEQ ID NO: 969930 - RNA, 19 nt, Artificial Sequence
  Description of Artificial Sequence: Synthetic oligonucleotide
cuuggucucuuccaaguug

SEQ ID NO: 969931 - RNA, 19 nt, Artificial Sequence
  Description of Artificial Sequence: Synthetic oligonucleotide
acauaacacaaaguuuguc

SEQ ID NO: 969932 - RNA, 19 nt, Artificial Sequence
  Description of Artificial Sequence: Synthetic oligonucleotide
agcccauuuauauuuucgu

SEQ ID NO: 969933 - RNA, 19 nt, Artificial Sequence
  Description of Artificial Sequence: Synthetic oligonucleotide
aucaccucuggacacaaau

SEQ ID NO: 969934 - RNA, 19 nt, Artificial Sequence
  Description of Artificial Sequence: Synthetic oligonucleotide
ccugaugucaaaguuaaag

SEQ ID NO: 969935 - RNA, 19 nt, Artificial Sequence
  Description of Artificial Sequence: Synthetic oligonucleotide
auacuggacaagggcaacc

SEQ ID NO: 969936 - RNA, 19 nt, Artificial Sequence
  Description of Artificial Sequence: Synthetic oligonucleotide
cccuguuagaaaauaacag

SEQ ID NO: 969937 - RNA, 19 nt, Artificial Sequence
  Description of Artificial Sequence: Synthetic oligonucleotide
cauauggccacaaaugugu

SEQ ID NO: 969938 - RNA, 19 nt, Artificial Sequence
  Description of Artificial Sequence: Synthetic oligonucleotide
  modified_base (5)..(5): a, c, u, g, unknown or other
gguanccauugagagaugg

SEQ ID NO: 969939 - RNA, 19 nt, Artificial Sequence
  Description of Artificial Sequence: Synthetic oligonucleotide
  modified_base (2)..(2): a, c, u, g, unknown or other
anccauugagagauggggu

SEQ ID NO: 969940 - RNA, 19 nt, Artificial Sequence
  Description of Artificial Sequence: Synthetic oligonucleotide
gugacuacuguacuauuga

SEQ ID NO: 969941 - RNA, 19 nt, Artificial Sequence
  Description of Artificial Sequence: Synthetic oligonucleotide
  modified_base (4)..(4): a, c, u, g, unknown or other
guanccauugagagauggg

SEQ ID NO: 969942 - RNA, 19 nt, Artificial Sequence
  Description of Artificial Sequence: Synthetic oligonucleotide
cauacaaugaucuuacauu

SEQ ID NO: 969943 - RNA, 19 nt, Artificial Sequence
  Description of Artificial Sequence: Synthetic oligonucleotide
gggauuauacuuucaaauc

SEQ ID NO: 969944 - RNA, 19 nt, Artificial Sequence
  Description of Artificial Sequence: Synthetic oligonucleotide
aacauaacacaaaguuugu

SEQ ID NO: 969945 - RNA, 19 nt, Artificial Sequence
  Description of Artificial Sequence: Synthetic oligonucleotide
ccaaauagaccuucaagac

SEQ ID NO: 969946 - RNA, 19 nt, Artificial Sequence
  Description of Artificial Sequence: Synthetic oligonucleotide
aucccgacgccuugaauag

SEQ ID NO: 969947 - RNA, 19 nt, Artificial Sequence
  Description of Artificial Sequence: Synthetic oligonucleotide
gaugucagacgaccucucc

SEQ ID NO: 969948 - RNA, 19 nt, Artificial Sequence
  Description of Artificial Sequence: Synthetic oligonucleotide
caagaccauaacuugacaa

SEQ ID NO: 969949 - RNA, 19 nt, Artificial Sequence
  Description of Artificial Sequence: Synthetic oligonucleotide
uagaugucagacgaccucu

SEQ ID NO: 969950 - RNA, 19 nt, Artificial Sequence
  Description of Artificial Sequence: Synthetic oligonucleotide
gaccgauuaaauagaaaca

SEQ ID NO: 969951 - RNA, 19 nt, Artificial Sequence
  Description of Artificial Sequence: Synthetic oligonucleotide
aagagaaccguuacacccu

SEQ ID NO: 969952 - RNA, 19 nt, Artificial Sequence
  Description of Artificial Sequence: Synthetic oligonucleotide
ucucggcuacuaaagacau

SEQ ID NO: 969953 - RNA, 19 nt, Artificial Sequence
  Description of Artificial Sequence: Synthetic oligonucleotide
cuucaagaccauaacuuga

SEQ ID NO: 969954 - RNA, 19 nt, Artificial Sequence
  Description of Artificial Sequence: Synthetic oligonucleotide
acuauugacaccagcuugu

SEQ ID NO: 969955 - RNA, 19 nt, Artificial Sequence
  Description of Artificial Sequence: Synthetic oligonucleotide
aucccuacuuagcuuucgg

SEQ ID NO: 969956 - RNA, 19 nt, Artificial Sequence
  Description of Artificial Sequence: Synthetic oligonucleotide
uacaaugaucuuacauuau

SEQ ID NO: 969957 - RNA, 19 nt, Artificial Sequence
  Description of Artificial Sequence: Synthetic oligonucleotide
uuguagucccacuguagac

SEQ ID NO: 969958 - RNA, 19 nt, Artificial Sequence
  Description of Artificial Sequence: Synthetic oligonucleotide
ucuccgcucaucacuguca

SEQ ID NO: 969959 - RNA, 19 nt, Artificial Sequence
  Description of Artificial Sequence: Synthetic oligonucleotide
ggcuacuaaagacaucacc

SEQ ID NO: 969960 - RNA, 19 nt, Artificial Sequence
  Description of Artificial Sequence: Synthetic oligonucleotide
aagugaccgauuaaauaga

SEQ ID NO: 969961 - RNA, 19 nt, Artificial Sequence
  Description of Artificial Sequence: Synthetic oligonucleotide
cuaagugaccgauuaaaua

SEQ ID NO: 969962 - RNA, 19 nt, Artificial Sequence
  Description of Artificial Sequence: Synthetic oligonucleotide
aaugcccaguaugagacua

SEQ ID NO: 969963 - RNA, 19 nt, Artificial Sequence
  Description of Artificial Sequence: Synthetic oligonucleotide
cauuggaucuagauuauua

SEQ ID NO: 969964 - RNA, 19 nt, Artificial Sequence
  Description of Artificial Sequence: Synthetic oligonucleotide
auuucgaccccuucggguu

SEQ ID NO: 969965 - RNA, 19 nt, Artificial Sequence
  Description of Artificial Sequence: Synthetic oligonucleotide
uuaacagaggggacaucuc

SEQ ID NO: 969966 - RNA, 19 nt, Artificial Sequence
  Description of Artificial Sequence: Synthetic oligonucleotide
agucuauuuugugagcacu

SEQ ID NO: 969967 - RNA, 19 nt, Artificial Sequence
  Description of Artificial Sequence: Synthetic oligonucleotide
augucagacgaccucuccu

SEQ ID NO: 969968 - RNA, 19 nt, Artificial Sequence
  Description of Artificial Sequence: Synthetic oligonucleotide
acccuguuagaaaauaaca

SEQ ID NO: 969969 - RNA, 19 nt, Artificial Sequence
  Description of Artificial Sequence: Synthetic oligonucleotide
uagucuauuuugugagcac

SEQ ID NO: 969970 - RNA, 19 nt, Artificial Sequence
  Description of Artificial Sequence: Synthetic oligonucleotide
uauuuucguacaccaguuu

SEQ ID NO: 969971 - RNA, 19 nt, Artificial Sequence
  Description of Artificial Sequence: Synthetic oligonucleotide
ugguauucuaagugaccga

SEQ ID NO: 969972 - RNA, 19 nt, Artificial Sequence
  Description of Artificial Sequence: Synthetic oligonucleotide
agaaccguuacacccugaa

SEQ ID NO: 969973 - RNA, 19 nt, Artificial Sequence
  Description of Artificial Sequence: Synthetic oligonucleotide
gugccaauaagaaucucac

SEQ ID NO: 969974 - RNA, 19 nt, Artificial Sequence
  Description of Artificial Sequence: Synthetic oligonucleotide
gucauauggccacaaaugu

SEQ ID NO: 969975 - RNA, 19 nt, Artificial Sequence
  Description of Artificial Sequence: Synthetic oligonucleotide
cuaguaauagguacauucu

SEQ ID NO: 969976 - RNA, 19 nt, Artificial Sequence
  Description of Artificial Sequence: Synthetic oligonucleotide
aucucacuccaaaauucac

SEQ ID NO: 969977 - RNA, 19 nt, Artificial Sequence
  Description of Artificial Sequence: Synthetic oligonucleotide
agcuuaaugcccaguauga

SEQ ID NO: 969978 - RNA, 19 nt, Artificial Sequence
  Description of Artificial Sequence: Synthetic oligonucleotide
agagaaccguuacacccug

SEQ ID NO: 969979 - RNA, 19 nt, Artificial Sequence
  Description of Artificial Sequence: Synthetic oligonucleotide
caccucuggacacaaauga

SEQ ID NO: 969980 - RNA, 19 nt, Artificial Sequence
  Description of Artificial Sequence: Synthetic oligonucleotide
ucaccuauaggaugcugua

SEQ ID NO: 969981 - RNA, 19 nt, Artificial Sequence
  Description of Artificial Sequence: Synthetic oligonucleotide
ugucgggguacaaucccga

SEQ ID NO: 969982 - RNA, 19 nt, Artificial Sequence
  Description of Artificial Sequence: Synthetic oligonucleotide
cugucgggguacaaucccg

SEQ ID NO: 969983 - RNA, 19 nt, Artificial Sequence
  Description of Artificial Sequence: Synthetic oligonucleotide
gcauuaacuaaugcaaaug

SEQ ID NO: 969984 - RNA, 19 nt, Artificial Sequence
  Description of Artificial Sequence: Synthetic oligonucleotide
agaccauaacuugacaaaa

SEQ ID NO: 969985 - RNA, 19 nt, Artificial Sequence
  Description of Artificial Sequence: Synthetic oligonucleotide
cagacgaccucuccugacc

SEQ ID NO: 969986 - RNA, 19 nt, Artificial Sequence
  Description of Artificial Sequence: Synthetic oligonucleotide
uguucuaagcuggggcgcc

SEQ ID NO: 969987 - RNA, 19 nt, Artificial Sequence
  Description of Artificial Sequence: Synthetic oligonucleotide
ucauuaggggaauguggaa

SEQ ID NO: 969988 - RNA, 19 nt, Artificial Sequence
  Description of Artificial Sequence: Synthetic oligonucleotide
guuaacagaggggacaucu

SEQ ID NO: 969989 - RNA, 19 nt, Artificial Sequence
  Description of Artificial Sequence: Synthetic oligonucleotide
agguagcaagggauuauac

SEQ ID NO: 969990 - RNA, 19 nt, Artificial Sequence
  Description of Artificial Sequence: Synthetic oligonucleotide
ucugaguaucugagguacu

SEQ ID NO: 969991 - RNA, 19 nt, Artificial Sequence
  Description of Artificial Sequence: Synthetic oligonucleotide
uggcacaguuacauucucu

SEQ ID NO: 969992 - RNA, 19 nt, Artificial Sequence
  Description of Artificial Sequence: Synthetic oligonucleotide
aagacugucgggguacaau

SEQ ID NO: 969993 - RNA, 19 nt, Artificial Sequence
  Description of Artificial Sequence: Synthetic oligonucleotide
gucacauggucuaaucaac

SEQ ID NO: 969994 - RNA, 19 nt, Artificial Sequence
  Description of Artificial Sequence: Synthetic oligonucleotide
ggucuaaucaacaaaccaa

SEQ ID NO: 969995 - RNA, 19 nt, Artificial Sequence
  Description of Artificial Sequence: Synthetic oligonucleotide
cccuacuuagcuuucgggc

SEQ ID NO: 969996 - RNA, 19 nt, Artificial Sequence
  Description of Artificial Sequence: Synthetic oligonucleotide
cuaauaagcuaccuuuaua

SEQ ID NO: 969997 - RNA, 19 nt, Artificial Sequence
  Description of Artificial Sequence: Synthetic oligonucleotide
ugagucauauggccacaaa

SEQ ID NO: 969998 - RNA, 19 nt, Artificial Sequence
  Description of Artificial Sequence: Synthetic oligonucleotide
uagguuugucucagaaaau

SEQ ID NO: 969999 - RNA, 19 nt, Artificial Sequence
  Description of Artificial Sequence: Synthetic oligonucleotide
gagucauauggccacaaau

SEQ ID NO: 970000 - RNA, 19 nt, Artificial Sequence
  Description of Artificial Sequence: Synthetic oligonucleotide
cugacauggaacagcauua

SEQ ID NO: 970001 - RNA, 19 nt, Artificial Sequence
  Description of Artificial Sequence: Synthetic oligonucleotide
ugaguugccuguguucuaa

SEQ ID NO: 970002 - RNA, 19 nt, Artificial Sequence
  Description of Artificial Sequence: Synthetic oligonucleotide
aacaucuacuuugcauuaa

SEQ ID NO: 970003 - RNA, 19 nt, Artificial Sequence
  Description of Artificial Sequence: Synthetic oligonucleotide
ggucacauggucuaaucaa

SEQ ID NO: 970004 - RNA, 19 nt, Artificial Sequence
  Description of Artificial Sequence: Synthetic oligonucleotide
uccaacugcaagagaguuu

SEQ ID NO: 970005 - RNA, 19 nt, Artificial Sequence
  Description of Artificial Sequence: Synthetic oligonucleotide
gaguaucugagguacuggu

SEQ ID NO: 970006 - RNA, 19 nt, Artificial Sequence
  Description of Artificial Sequence: Synthetic oligonucleotide
auauuuucguacaccaguu

SEQ ID NO: 970007 - RNA, 19 nt, Artificial Sequence
  Description of Artificial Sequence: Synthetic oligonucleotide
cugcaagagaguuucaccu

SEQ ID NO: 970008 - RNA, 19 nt, Artificial Sequence
  Description of Artificial Sequence: Synthetic oligonucleotide
ucagacgaccucuccugac

SEQ ID NO: 970009 - RNA, 19 nt, Artificial Sequence
  Description of Artificial Sequence: Synthetic oligonucleotide
ccaguaugagacuacugug

SEQ ID NO: 970010 - RNA, 19 nt, Artificial Sequence
  Description of Artificial Sequence: Synthetic oligonucleotide
gacugucgggguacaaucc

SEQ ID NO: 970011 - RNA, 19 nt, Artificial Sequence
  Description of Artificial Sequence: Synthetic oligonucleotide
ggugacuacuguacuauug

SEQ ID NO: 970012 - RNA, 19 nt, Artificial Sequence
  Description of Artificial Sequence: Synthetic oligonucleotide
ugacauggaacagcauuaa

SEQ ID NO: 970013 - RNA, 19 nt, Artificial Sequence
  Description of Artificial Sequence: Synthetic oligonucleotide
uuucaccuauaggaugcug

SEQ ID NO: 970014 - RNA, 19 nt, Artificial Sequence
  Description of Artificial Sequence: Synthetic oligonucleotide
aauguggcaccuggugacu

SEQ ID NO: 970015 - RNA, 19 nt, Artificial Sequence
  Description of Artificial Sequence: Synthetic oligonucleotide
agggcaacccuguuagaaa

SEQ ID NO: 970016 - RNA, 19 nt, Artificial Sequence
  Description of Artificial Sequence: Synthetic oligonucleotide
ucuaagcuggggcgccuga

SEQ ID NO: 970017 - RNA, 19 nt, Artificial Sequence
  Description of Artificial Sequence: Synthetic oligonucleotide
ggauagauagcccauuuau

SEQ ID NO: 970018 - RNA, 19 nt, Artificial Sequence
  Description of Artificial Sequence: Synthetic oligonucleotide
uuucguacaccaguuuguu

SEQ ID NO: 970019 - RNA, 19 nt, Artificial Sequence
  Description of Artificial Sequence: Synthetic oligonucleotide
guugcuauauuuaugccuu

SEQ ID NO: 970020 - RNA, 19 nt, Artificial Sequence
  Description of Artificial Sequence: Synthetic oligonucleotide
ccaacuaguaauagguaca

SEQ ID NO: 970021 - RNA, 19 nt, Artificial Sequence
  Description of Artificial Sequence: Synthetic oligonucleotide
guuacacccugaaaacuga

SEQ ID NO: 970022 - RNA, 19 nt, Artificial Sequence
  Description of Artificial Sequence: Synthetic oligonucleotide
gacauggaacagcauuaaa

SEQ ID NO: 970023 - RNA, 19 nt, Artificial Sequence
  Description of Artificial Sequence: Synthetic oligonucleotide
gacauacaaugaucuuaca

SEQ ID NO: 970024 - RNA, 19 nt, Artificial Sequence
  Description of Artificial Sequence: Synthetic oligonucleotide
cguuacacccugaaaacug

SEQ ID NO: 970025 - RNA, 19 nt, Artificial Sequence
  Description of Artificial Sequence: Synthetic oligonucleotide
uucguacaccaguuuguua

SEQ ID NO: 970026 - RNA, 19 nt, Artificial Sequence
  Description of Artificial Sequence: Synthetic oligonucleotide
gaugcgcccacagggagga

SEQ ID NO: 970027 - RNA, 19 nt, Artificial Sequence
  Description of Artificial Sequence: Synthetic oligonucleotide
ggaugcuguaagagaaccg

SEQ ID NO: 970028 - RNA, 19 nt, Artificial Sequence
  Description of Artificial Sequence: Synthetic oligonucleotide
caccaccuccacuaacuug

SEQ ID NO: 970029 - RNA, 19 nt, Artificial Sequence
  Description of Artificial Sequence: Synthetic oligonucleotide
cauuaguuaugcauuggau

SEQ ID NO: 970030 - RNA, 19 nt, Artificial Sequence
  Description of Artificial Sequence: Synthetic oligonucleotide
aaacaaauuucgaccccuu

SEQ ID NO: 970031 - RNA, 19 nt, Artificial Sequence
  Description of Artificial Sequence: Synthetic oligonucleotide
caucccuacuuagcuuucg

SEQ ID NO: 970032 - RNA, 19 nt, Artificial Sequence
  Description of Artificial Sequence: Synthetic oligonucleotide
augccuuuauguaggaaaa

SEQ ID NO: 970033 - RNA, 19 nt, Artificial Sequence
  Description of Artificial Sequence: Synthetic oligonucleotide
agugaccgauuaaauagaa

SEQ ID NO: 970034 - RNA, 19 nt, Artificial Sequence
  Description of Artificial Sequence: Synthetic oligonucleotide
aucuaauaagcuaccuuua

SEQ ID NO: 970035 - RNA, 19 nt, Artificial Sequence
  Description of Artificial Sequence: Synthetic oligonucleotide
guacaaucccgacgccuug

SEQ ID NO: 970036 - RNA, 19 nt, Artificial Sequence
  Description of Artificial Sequence: Synthetic oligonucleotide
cagaaaaucugagucauau

SEQ ID NO: 970037 - RNA, 19 nt, Artificial Sequence
  Description of Artificial Sequence: Synthetic oligonucleotide
agaugucagacgaccucuc

SEQ ID NO: 970038 - RNA, 19 nt, Artificial Sequence
  Description of Artificial Sequence: Synthetic oligonucleotide
uuaugccuuuauguaggaa

SEQ ID NO: 970039 - RNA, 19 nt, Artificial Sequence
  Description of Artificial Sequence: Synthetic oligonucleotide
gacgaccucuccugacccc

SEQ ID NO: 970040 - RNA, 19 nt, Artificial Sequence
  Description of Artificial Sequence: Synthetic oligonucleotide
cgggguacaaucccgacgc

SEQ ID NO: 970041 - RNA, 19 nt, Artificial Sequence
  Description of Artificial Sequence: Synthetic oligonucleotide
guguucuaagcuggggcgc

SEQ ID NO: 970042 - RNA, 19 nt, Artificial Sequence
  Description of Artificial Sequence: Synthetic oligonucleotide
aacuaguaauagguacauu

SEQ ID NO: 970043 - RNA, 19 nt, Artificial Sequence
  Description of Artificial Sequence: Synthetic oligonucleotide
  modified_base (6)..(6): a, c, u, g, unknown or other
ugguanccauugagagaug

SEQ ID NO: 970044 - RNA, 19 nt, Artificial Sequence
  Description of Artificial Sequence: Synthetic oligonucleotide
gaaccguuacacccugaaa

SEQ ID NO: 970045 - RNA, 19 nt, Artificial Sequence
  Description of Artificial Sequence: Synthetic oligonucleotide
caauuguagucccacugua

SEQ ID NO: 970046 - RNA, 19 nt, Artificial Sequence
  Description of Artificial Sequence: Synthetic oligonucleotide
cuuucgggcuucccaaaca

SEQ ID NO: 970047 - RNA, 19 nt, Artificial Sequence
  Description of Artificial Sequence: Synthetic oligonucleotide
cugucgucuucaucccuac

SEQ ID NO: 970048 - RNA, 19 nt, Artificial Sequence
  Description of Artificial Sequence: Synthetic oligonucleotide
ggaucuagauuauuauggu

SEQ ID NO: 970049 - RNA, 19 nt, Artificial Sequence
  Description of Artificial Sequence: Synthetic oligonucleotide
uaguuaugcauuggaucua

SEQ ID NO: 970050 - RNA, 19 nt, Artificial Sequence
  Description of Artificial Sequence: Synthetic oligonucleotide
ccugcuaaagugcugggga

SEQ ID NO: 970051 - RNA, 19 nt, Artificial Sequence
  Description of Artificial Sequence: Synthetic oligonucleotide
ggcacuagggauagauagc

SEQ ID NO: 970052 - RNA, 19 nt, Artificial Sequence
  Description of Artificial Sequence: Synthetic oligonucleotide
augcccaguaugagacuac

SEQ ID NO: 970053 - RNA, 19 nt, Artificial Sequence
  Description of Artificial Sequence: Synthetic oligonucleotide
uucuaagcuggggcgccug

SEQ ID NO: 970054 - RNA, 19 nt, Artificial Sequence
  Description of Artificial Sequence: Synthetic oligonucleotide
uuucgaccccuucggguuu

SEQ ID NO: 970055 - RNA, 19 nt, Artificial Sequence
  Description of Artificial Sequence: Synthetic oligonucleotide
acaaucccgacgccuugaa

SEQ ID NO: 970056 - RNA, 19 nt, Artificial Sequence
  Description of Artificial Sequence: Synthetic oligonucleotide
caaguugcuccagucucuc

SEQ ID NO: 970057 - RNA, 19 nt, Artificial Sequence
  Description of Artificial Sequence: Synthetic oligonucleotide
guacaccaguuuguuaaca

SEQ ID NO: 970058 - RNA, 19 nt, Artificial Sequence
  Description of Artificial Sequence: Synthetic oligonucleotide
gggucacauggucuaauca

SEQ ID NO: 970059 - RNA, 19 nt, Artificial Sequence
  Description of Artificial Sequence: Synthetic oligonucleotide
uugcuauauuuaugccuuu

SEQ ID NO: 970060 - RNA, 19 nt, Artificial Sequence
  Description of Artificial Sequence: Synthetic oligonucleotide
gggaugcgcccacagggag

SEQ ID NO: 970061 - RNA, 19 nt, Artificial Sequence
  Description of Artificial Sequence: Synthetic oligonucleotide
gcugacauggaacagcauu

SEQ ID NO: 970062 - RNA, 19 nt, Artificial Sequence
  Description of Artificial Sequence: Synthetic oligonucleotide
acuguacuauugacaccag

SEQ ID NO: 970063 - RNA, 19 nt, Artificial Sequence
  Description of Artificial Sequence: Synthetic oligonucleotide
gucagacgaccucuccuga

SEQ ID NO: 970064 - RNA, 19 nt, Artificial Sequence
  Description of Artificial Sequence: Synthetic oligonucleotide
cauuaggggaauguggaau

SEQ ID NO: 970065 - RNA, 19 nt, Artificial Sequence
  Description of Artificial Sequence: Synthetic oligonucleotide
acgaccucuccugaccccu

SEQ ID NO: 970066 - RNA, 19 nt, Artificial Sequence
  Description of Artificial Sequence: Synthetic oligonucleotide
agcuaccuuuauacaaagu

SEQ ID NO: 970067 - RNA, 19 nt, Artificial Sequence
  Description of Artificial Sequence: Synthetic oligonucleotide
gucgggguacaaucccgac

SEQ ID NO: 970068 - RNA, 19 nt, Artificial Sequence
  Description of Artificial Sequence: Synthetic oligonucleotide
accucuggacacaaaugaa

SEQ ID NO: 970069 - RNA, 19 nt, Artificial Sequence
  Description of Artificial Sequence: Synthetic oligonucleotide
ccucuggacacaaaugaaa

SEQ ID NO: 970070 - RNA, 19 nt, Artificial Sequence
  Description of Artificial Sequence: Synthetic oligonucleotide
gacgccuugaauagucuau

SEQ ID NO: 970071 - RNA, 19 nt, Artificial Sequence
  Description of Artificial Sequence: Synthetic oligonucleotide
gguauucuaagugaccgau

SEQ ID NO: 970072 - RNA, 19 nt, Artificial Sequence
  Description of Artificial Sequence: Synthetic oligonucleotide
ugaacaggggucgguccua

SEQ ID NO: 970073 - RNA, 19 nt, Artificial Sequence
  Description of Artificial Sequence: Synthetic oligonucleotide
ccuauaggaugcuguaaga

SEQ ID NO: 970074 - RNA, 19 nt, Artificial Sequence
  Description of Artificial Sequence: Synthetic oligonucleotide
cuagggauagauagcccau

SEQ ID NO: 970075 - RNA, 19 nt, Artificial Sequence
  Description of Artificial Sequence: Synthetic oligonucleotide
ggaugcgcccacagggagg

SEQ ID NO: 970076 - RNA, 19 nt, Artificial Sequence
  Description of Artificial Sequence: Synthetic oligonucleotide
gcuuucgggcuucccaaac

SEQ ID NO: 970077 - RNA, 19 nt, Artificial Sequence
  Description of Artificial Sequence: Synthetic oligonucleotide
cccgacgccuugaauaguc

SEQ ID NO: 970078 - RNA, 19 nt, Artificial Sequence
  Description of Artificial Sequence: Synthetic oligonucleotide
gaccucuccugaccccuga

SEQ ID NO: 970079 - RNA, 19 nt, Artificial Sequence
  Description of Artificial Sequence: Synthetic oligonucleotide
guuaugcauuggaucuaga

SEQ ID NO: 970080 - RNA, 19 nt, Artificial Sequence
  Description of Artificial Sequence: Synthetic oligonucleotide
guccuuuauaaaacaucua

SEQ ID NO: 970081 - RNA, 19 nt, Artificial Sequence
  Description of Artificial Sequence: Synthetic oligonucleotide
caacuaguaauagguacau

SEQ ID NO: 970082 - RNA, 19 nt, Artificial Sequence
  Description of Artificial Sequence: Synthetic oligonucleotide
gggagcucucauguuuaag

SEQ ID NO: 970083 - RNA, 19 nt, Artificial Sequence
  Description of Artificial Sequence: Synthetic oligonucleotide
gggauagauagcccauuua

SEQ ID NO: 970084 - RNA, 19 nt, Artificial Sequence
  Description of Artificial Sequence: Synthetic oligonucleotide
gcaagagaguuucaccuau

SEQ ID NO: 970085 - RNA, 19 nt, Artificial Sequence
  Description of Artificial Sequence: Synthetic oligonucleotide
cccuucggguuucagaaga

SEQ ID NO: 970086 - RNA, 19 nt, Artificial Sequence
  Description of Artificial Sequence: Synthetic oligonucleotide
cuggugacuacuguacuau

SEQ ID NO: 970087 - RNA, 19 nt, Artificial Sequence
  Description of Artificial Sequence: Synthetic oligonucleotide
cccaaacaccaaagguuug

SEQ ID NO: 970088 - RNA, 19 nt, Artificial Sequence
  Description of Artificial Sequence: Synthetic oligonucleotide
cuucaucccuacuuagcuu

SEQ ID NO: 970089 - RNA, 19 nt, Artificial Sequence
  Description of Artificial Sequence: Synthetic oligonucleotide
uucgaccccuucggguuuc

SEQ ID NO: 970090 - RNA, 19 nt, Artificial Sequence
  Description of Artificial Sequence: Synthetic oligonucleotide
cguacaccaguuuguuaac

SEQ ID NO: 970091 - RNA, 19 nt, Artificial Sequence
  Description of Artificial Sequence: Synthetic oligonucleotide
uggggcgccugaugucaaa

SEQ ID NO: 970092 - RNA, 19 nt, Artificial Sequence
  Description of Artificial Sequence: Synthetic oligonucleotide
caccuauaggaugcuguaa

SEQ ID NO: 970093 - RNA, 19 nt, Artificial Sequence
  Description of Artificial Sequence: Synthetic oligonucleotide
ggggcgccugaugucaaag

SEQ ID NO: 970094 - RNA, 19 nt, Artificial Sequence
  Description of Artificial Sequence: Synthetic oligonucleotide
gcaacccuguuagaaaaua

SEQ ID NO: 970095 - RNA, 19 nt, Artificial Sequence
  Description of Artificial Sequence: Synthetic oligonucleotide
gagaaccguuacacccuga

SEQ ID NO: 970096 - RNA, 19 nt, Artificial Sequence
  Description of Artificial Sequence: Synthetic oligonucleotide
cugagucauauggccacaa

SEQ ID NO: 970097 - RNA, 19 nt, Artificial Sequence
  Description of Artificial Sequence: Synthetic oligonucleotide
ucccgacgccuugaauagu

SEQ ID NO: 970098 - RNA, 19 nt, Artificial Sequence
  Description of Artificial Sequence: Synthetic oligonucleotide
gcaagggauuauacuuuca

SEQ ID NO: 970099 - RNA, 19 nt, Artificial Sequence
  Description of Artificial Sequence: Synthetic oligonucleotide
ccgauuaaauagaaacaau

SEQ ID NO: 970100 - RNA, 19 nt, Artificial Sequence
  Description of Artificial Sequence: Synthetic oligonucleotide
ggucgguccuaaaacaaau

SEQ ID NO: 970101 - RNA, 19 nt, Artificial Sequence
  Description of Artificial Sequence: Synthetic oligonucleotide
ggggucgguccuaaaacaa

SEQ ID NO: 970102 - RNA, 19 nt, Artificial Sequence
  Description of Artificial Sequence: Synthetic oligonucleotide
gggguacaaucccgacgcc

SEQ ID NO: 970103 - RNA, 19 nt, Artificial Sequence
  Description of Artificial Sequence: Synthetic oligonucleotide
ccuggugacuacuguacua

SEQ ID NO: 970104 - RNA, 19 nt, Artificial Sequence
  Description of Artificial Sequence: Synthetic oligonucleotide
gggucgguccuaaaacaaa

SEQ ID NO: 970105 - RNA, 19 nt, Artificial Sequence
  Description of Artificial Sequence: Synthetic oligonucleotide
ggcgccugaugucaaaguu

SEQ ID NO: 970106 - RNA, 19 nt, Artificial Sequence
  Description of Artificial Sequence: Synthetic oligonucleotide
gguccuaaacugucgucuu

SEQ ID NO: 970107 - RNA, 19 nt, Artificial Sequence
  Description of Artificial Sequence: Synthetic oligonucleotide
gucgguccuaaaacaaauu

SEQ ID NO: 970108 - RNA, 19 nt, Artificial Sequence
  Description of Artificial Sequence: Synthetic oligonucleotide
gcgccugaugucaaaguua

SEQ ID NO: 970109 - RNA, 19 nt, Artificial Sequence
  Description of Artificial Sequence: Synthetic oligonucleotide
ggggagcucucauguuuaa

SEQ ID NO: 970110 - RNA, 19 nt, Artificial Sequence
  Description of Artificial Sequence: Synthetic oligonucleotide
gagcugaguuguugauguu

SEQ ID NO: 970111 - RNA, 19 nt, Artificial Sequence
  Description of Artificial Sequence: Synthetic oligonucleotide
ccuucggguuucagaagaa

SEQ ID NO: 970112 - RNA, 19 nt, Artificial Sequence
  Description of Artificial Sequence: Synthetic oligonucleotide
guaggcguuuugggagucu

SEQ ID NO: 970113 - RNA, 19 nt, Artificial Sequence
  Description of Artificial Sequence: Synthetic oligonucleotide
guucuaagcuggggcgccu

SEQ ID NO: 970114 - RNA, 19 nt, Artificial Sequence
  Description of Artificial Sequence: Synthetic oligonucleotide
gucccauuccaugcuguuu

SEQ ID NO: 970115 - RNA, 19 nt, Artificial Sequence
  Description of Artificial Sequence: Synthetic oligonucleotide
caaucccgacgccuugaau

SEQ ID NO: 970116 - RNA, 19 nt, Artificial Sequence
  Description of Artificial Sequence: Synthetic oligonucleotide
gggcgccugaugucaaagu

SEQ ID NO: 970117 - RNA, 19 nt, Artificial Sequence
  Description of Artificial Sequence: Synthetic oligonucleotide
cuaagcuggggcgccugau

SEQ ID NO: 970118 - RNA, 19 nt, Artificial Sequence
  Description of Artificial Sequence: Synthetic oligonucleotide
ccguuacacccugaaaacu

SEQ ID NO: 970119 - RNA, 19 nt, Artificial Sequence
  Description of Artificial Sequence: Synthetic oligonucleotide
cgacgccuugaauagucua

SEQ ID NO: 970120 - RNA, 19 nt, Artificial Sequence
  Description of Artificial Sequence: Synthetic oligonucleotide
ccgacgccuugaauagucu

SEQ ID NO: 970121 - RNA, 19 nt, Artificial Sequence
  Description of Artificial Sequence: Synthetic oligonucleotide
ggggagugguaggcguuuu

SEQ ID NO: 970122 - RNA, 19 nt, Artificial Sequence
  Description of Artificial Sequence: Synthetic oligonucleotide
uauccuauagcucagaagc

SEQ ID NO: 970123 - RNA, 19 nt, Artificial Sequence
  Description of Artificial Sequence: Synthetic oligonucleotide
aaaacgcacucucaaaagc

SEQ ID NO: 970124 - RNA, 19 nt, Artificial Sequence
  Description of Artificial Sequence: Synthetic oligonucleotide
ucuacuuuuaacaaucgca

SEQ ID NO: 970125 - RNA, 19 nt, Artificial Sequence
  Description of Artificial Sequence: Synthetic oligonucleotide
auaguguuaugccugaugg

SEQ ID NO: 970126 - RNA, 19 nt, Artificial Sequence
  Description of Artificial Sequence: Synthetic oligonucleotide
uuuaacaaucgcauggacc

SEQ ID NO: 970127 - RNA, 19 nt, Artificial Sequence
  Description of Artificial Sequence: Synthetic oligonucleotide
acuuaaauuggcuuuguag

SEQ ID NO: 970128 - RNA, 19 nt, Artificial Sequence
  Description of Artificial Sequence: Synthetic oligonucleotide
ggaugcauaacacugaggg

SEQ ID NO: 970129 - RNA, 19 nt, Artificial Sequence
  Description of Artificial Sequence: Synthetic oligonucleotide
aaagacuccuuacagucag

SEQ ID NO: 970130 - RNA, 19 nt, Artificial Sequence
  Description of Artificial Sequence: Synthetic oligonucleotide
uuucauaaacaauuugagc

SEQ ID NO: 970131 - RNA, 19 nt, Artificial Sequence
  Description of Artificial Sequence: Synthetic oligonucleotide
uaaucauauuucauaaaca

SEQ ID NO: 970132 - RNA, 19 nt, Artificial Sequence
  Description of Artificial Sequence: Synthetic oligonucleotide
aaguaaagacagcuaacag

SEQ ID NO: 970133 - RNA, 19 nt, Artificial Sequence
  Description of Artificial Sequence: Synthetic oligonucleotide
cuaacauugguuguguugg

SEQ ID NO: 970134 - RNA, 19 nt, Artificial Sequence
  Description of Artificial Sequence: Synthetic oligonucleotide
aaagacgggguauugguca

SEQ ID NO: 970135 - RNA, 19 nt, Artificial Sequence
  Description of Artificial Sequence: Synthetic oligonucleotide
acucagauaacucaaggga

SEQ ID NO: 970136 - RNA, 19 nt, Artificial Sequence
  Description of Artificial Sequence: Synthetic oligonucleotide
aacugagauacaagaaccc

SEQ ID NO: 970137 - RNA, 19 nt, Artificial Sequence
  Description of Artificial Sequence: Synthetic oligonucleotide
ucuaacauugguuguguug

SEQ ID NO: 970138 - RNA, 19 nt, Artificial Sequence
  Description of Artificial Sequence: Synthetic oligonucleotide
uagcuuacaaaacuaagau

SEQ ID NO: 970139 - RNA, 19 nt, Artificial Sequence
  Description of Artificial Sequence: Synthetic oligonucleotide
uaaaacgcacucucaaaag

SEQ ID NO: 970140 - RNA, 19 nt, Artificial Sequence
  Description of Artificial Sequence: Synthetic oligonucleotide
auacugccaacuaugaagc

SEQ ID NO: 970141 - RNA, 19 nt, Artificial Sequence
  Description of Artificial Sequence: Synthetic oligonucleotide
uuucauaaggugacaauuc

SEQ ID NO: 970142 - RNA, 19 nt, Artificial Sequence
  Description of Artificial Sequence: Synthetic oligonucleotide
caacuaaguuuuaaagacg

SEQ ID NO: 970143 - RNA, 19 nt, Artificial Sequence
  Description of Artificial Sequence: Synthetic oligonucleotide
acugagauacaagaacccc

SEQ ID NO: 970144 - RNA, 19 nt, Artificial Sequence
  Description of Artificial Sequence: Synthetic oligonucleotide
acgaacaguagcuucacug

SEQ ID NO: 970145 - RNA, 19 nt, Artificial Sequence
  Description of Artificial Sequence: Synthetic oligonucleotide
agugacaaauguccauccc

SEQ ID NO: 970146 - RNA, 19 nt, Artificial Sequence
  Description of Artificial Sequence: Synthetic oligonucleotide
uggaguuaccuccagccag

SEQ ID NO: 970147 - RNA, 19 nt, Artificial Sequence
  Description of Artificial Sequence: Synthetic oligonucleotide
uucauaaggugacaauucu

SEQ ID NO: 970148 - RNA, 19 nt, Artificial Sequence
  Description of Artificial Sequence: Synthetic oligonucleotide
ugggugagaaguaaagaca

SEQ ID NO: 970149 - RNA, 19 nt, Artificial Sequence
  Description of Artificial Sequence: Synthetic oligonucleotide
caagacaguccccagaaag

SEQ ID NO: 970150 - RNA, 19 nt, Artificial Sequence
  Description of Artificial Sequence: Synthetic oligonucleotide
acucuuagcuuacaaaacu

SEQ ID NO: 970151 - RNA, 19 nt, Artificial Sequence
  Description of Artificial Sequence: Synthetic oligonucleotide
auauaccccaucuucacca

SEQ ID NO: 970152 - RNA, 19 nt, Artificial Sequence
  Description of Artificial Sequence: Synthetic oligonucleotide
acgugaacaucccuuaauc

SEQ ID NO: 970153 - RNA, 19 nt, Artificial Sequence
  Description of Artificial Sequence: Synthetic oligonucleotide
guuaccuccagccaggaca

SEQ ID NO: 970154 - RNA, 19 nt, Artificial Sequence
  Description of Artificial Sequence: Synthetic oligonucleotide
ucgcaaugugccaucauag

SEQ ID NO: 970155 - RNA, 19 nt, Artificial Sequence
  Description of Artificial Sequence: Synthetic oligonucleotide
ucauaaggugacaauucug

SEQ ID NO: 970156 - RNA, 19 nt, Artificial Sequence
  Description of Artificial Sequence: Synthetic oligonucleotide
uaguccuagaauuuggaaa

SEQ ID NO: 970157 - RNA, 19 nt, Artificial Sequence
  Description of Artificial Sequence: Synthetic oligonucleotide
ugcaccucacaucauaaac

SEQ ID NO: 970158 - RNA, 19 nt, Artificial Sequence
  Description of Artificial Sequence: Synthetic oligonucleotide
cuucuuuaucauuccacgg

SEQ ID NO: 970159 - RNA, 19 nt, Artificial Sequence
  Description of Artificial Sequence: Synthetic oligonucleotide
acauguaaccucccgcugg

SEQ ID NO: 970160 - RNA, 19 nt, Artificial Sequence
  Description of Artificial Sequence: Synthetic oligonucleotide
aagacuuccacccgccgug

SEQ ID NO: 970161 - RNA, 19 nt, Artificial Sequence
  Description of Artificial Sequence: Synthetic oligonucleotide
ucauuacuugucuugcuca

SEQ ID NO: 970162 - RNA, 19 nt, Artificial Sequence
  Description of Artificial Sequence: Synthetic oligonucleotide
gauaguguuaugccugaug

SEQ ID NO: 970163 - RNA, 19 nt, Artificial Sequence
  Description of Artificial Sequence: Synthetic oligonucleotide
cauaaggugacaauucuga

SEQ ID NO: 970164 - RNA, 19 nt, Artificial Sequence
  Description of Artificial Sequence: Synthetic oligonucleotide
gaaguaaagacagcuaaca

SEQ ID NO: 970165 - RNA, 19 nt, Artificial Sequence
  Description of Artificial Sequence: Synthetic oligonucleotide
agauacaagaaccccaaaa

SEQ ID NO: 970166 - RNA, 19 nt, Artificial Sequence
  Description of Artificial Sequence: Synthetic oligonucleotide
auagcucagugacaguagg

SEQ ID NO: 970167 - RNA, 19 nt, Artificial Sequence
  Description of Artificial Sequence: Synthetic oligonucleotide
uggaauacuugccuaacau

SEQ ID NO: 970168 - RNA, 19 nt, Artificial Sequence
  Description of Artificial Sequence: Synthetic oligonucleotide
gacauaacgggugggaugc

SEQ ID NO: 970169 - RNA, 19 nt, Artificial Sequence
  Description of Artificial Sequence: Synthetic oligonucleotide
uucguuucuguacaccucu

SEQ ID NO: 970170 - RNA, 19 nt, Artificial Sequence
  Description of Artificial Sequence: Synthetic oligonucleotide
gaguuacagaguaaaacgc

SEQ ID NO: 970171 - RNA, 19 nt, Artificial Sequence
  Description of Artificial Sequence: Synthetic oligonucleotide
uaugccugaugguaguaag

SEQ ID NO: 970172 - RNA, 19 nt, Artificial Sequence
  Description of Artificial Sequence: Synthetic oligonucleotide
acuaaagcucaagggaagc

SEQ ID NO: 970173 - RNA, 19 nt, Artificial Sequence
  Description of Artificial Sequence: Synthetic oligonucleotide
ucgacauccgaucucauuu

SEQ ID NO: 970174 - RNA, 19 nt, Artificial Sequence
  Description of Artificial Sequence: Synthetic oligonucleotide
aacaaucgcauggaccuuc

SEQ ID NO: 970175 - RNA, 19 nt, Artificial Sequence
  Description of Artificial Sequence: Synthetic oligonucleotide
uuuaaggaaaacugagaua

SEQ ID NO: 970176 - RNA, 19 nt, Artificial Sequence
  Description of Artificial Sequence: Synthetic oligonucleotide
aacuaugaagcaaucuucu

SEQ ID NO: 970177 - RNA, 19 nt, Artificial Sequence
  Description of Artificial Sequence: Synthetic oligonucleotide
augaccauaccacuuaaau

SEQ ID NO: 970178 - RNA, 19 nt, Artificial Sequence
  Description of Artificial Sequence: Synthetic oligonucleotide
cuaggucuaaucauauuuc

SEQ ID NO: 970179 - RNA, 19 nt, Artificial Sequence
  Description of Artificial Sequence: Synthetic oligonucleotide
aacauauaccccaucuuca

SEQ ID NO: 970180 - RNA, 19 nt, Artificial Sequence
  Description of Artificial Sequence: Synthetic oligonucleotide
uugccuaacaugugacagg

SEQ ID NO: 970181 - RNA, 19 nt, Artificial Sequence
  Description of Artificial Sequence: Synthetic oligonucleotide
ggcaaugaaacucccagag

SEQ ID NO: 970182 - RNA, 19 nt, Artificial Sequence
  Description of Artificial Sequence: Synthetic oligonucleotide
cuuguuuagggucccacac

SEQ ID NO: 970183 - RNA, 19 nt, Artificial Sequence
  Description of Artificial Sequence: Synthetic oligonucleotide
ugaaucuauccuauagcuc

SEQ ID NO: 970184 - RNA, 19 nt, Artificial Sequence
  Description of Artificial Sequence: Synthetic oligonucleotide
auguccaucccaguguccc

SEQ ID NO: 970185 - RNA, 19 nt, Artificial Sequence
  Description of Artificial Sequence: Synthetic oligonucleotide
caacuaugaagcaaucuuc

SEQ ID NO: 970186 - RNA, 19 nt, Artificial Sequence
  Description of Artificial Sequence: Synthetic oligonucleotide
uguuacccguaacagguga

SEQ ID NO: 970187 - RNA, 19 nt, Artificial Sequence
  Description of Artificial Sequence: Synthetic oligonucleotide
aguacacaccaauaguccu

SEQ ID NO: 970188 - RNA, 19 nt, Artificial Sequence
  Description of Artificial Sequence: Synthetic oligonucleotide
ucaugugaaguuccaggug

SEQ ID NO: 970189 - RNA, 19 nt, Artificial Sequence
  Description of Artificial Sequence: Synthetic oligonucleotide
cuugccuaacaugugacag

SEQ ID NO: 970190 - RNA, 19 nt, Artificial Sequence
  Description of Artificial Sequence: Synthetic oligonucleotide
uacuuuuaacaaucgcaug

SEQ ID NO: 970191 - RNA, 19 nt, Artificial Sequence
  Description of Artificial Sequence: Synthetic oligonucleotide
aacauguaaccucccgcug

SEQ ID NO: 970192 - RNA, 19 nt, Artificial Sequence
  Description of Artificial Sequence: Synthetic oligonucleotide
agugauaguguuaugccug

SEQ ID NO: 970193 - RNA, 19 nt, Artificial Sequence
  Description of Artificial Sequence: Synthetic oligonucleotide
augcauaacacugagggaa

SEQ ID NO: 970194 - RNA, 19 nt, Artificial Sequence
  Description of Artificial Sequence: Synthetic oligonucleotide
cuauccuauagcucagaag

SEQ ID NO: 970195 - RNA, 19 nt, Artificial Sequence
  Description of Artificial Sequence: Synthetic oligonucleotide
aacuaaagcucaagggaag

SEQ ID NO: 970196 - RNA, 19 nt, Artificial Sequence
  Description of Artificial Sequence: Synthetic oligonucleotide
auacuugccuaacauguga

SEQ ID NO: 970197 - RNA, 19 nt, Artificial Sequence
  Description of Artificial Sequence: Synthetic oligonucleotide
ucuaaucauauuucauaaa

SEQ ID NO: 970198 - RNA, 19 nt, Artificial Sequence
  Description of Artificial Sequence: Synthetic oligonucleotide
ugauucaggaggcugucuc

SEQ ID NO: 970199 - RNA, 19 nt, Artificial Sequence
  Description of Artificial Sequence: Synthetic oligonucleotide
aacgugaacaucccuuaau

SEQ ID NO: 970200 - RNA, 19 nt, Artificial Sequence
  Description of Artificial Sequence: Synthetic oligonucleotide
guaaaacgcacucucaaaa

SEQ ID NO: 970201 - RNA, 19 nt, Artificial Sequence
  Description of Artificial Sequence: Synthetic oligonucleotide
agcagaacaacuaaguuuu

SEQ ID NO: 970202 - RNA, 19 nt, Artificial Sequence
  Description of Artificial Sequence: Synthetic oligonucleotide
agaucauaggcuggcuucc

SEQ ID NO: 970203 - RNA, 19 nt, Artificial Sequence
  Description of Artificial Sequence: Synthetic oligonucleotide
gucuaaucauauuucauaa

SEQ ID NO: 970204 - RNA, 19 nt, Artificial Sequence
  Description of Artificial Sequence: Synthetic oligonucleotide
cucuguuacccguaacagg

SEQ ID NO: 970205 - RNA, 19 nt, Artificial Sequence
  Description of Artificial Sequence: Synthetic oligonucleotide
aauaguccuagaauuugga

SEQ ID NO: 970206 - RNA, 19 nt, Artificial Sequence
  Description of Artificial Sequence: Synthetic oligonucleotide
cuuacgaacaguagcuuca

SEQ ID NO: 970207 - RNA, 19 nt, Artificial Sequence
  Description of Artificial Sequence: Synthetic oligonucleotide
uguccgucuaucuaccagu

SEQ ID NO: 970208 - RNA, 19 nt, Artificial Sequence
  Description of Artificial Sequence: Synthetic oligonucleotide
uugguucucucauuacuug

SEQ ID NO: 970209 - RNA, 19 nt, Artificial Sequence
  Description of Artificial Sequence: Synthetic oligonucleotide
cacccuuacgaacaguagc

SEQ ID NO: 970210 - RNA, 19 nt, Artificial Sequence
  Description of Artificial Sequence: Synthetic oligonucleotide
ucuauccuauagcucagaa

SEQ ID NO: 970211 - RNA, 19 nt, Artificial Sequence
  Description of Artificial Sequence: Synthetic oligonucleotide
ucuggcuagacaugguagu

SEQ ID NO: 970212 - RNA, 19 nt, Artificial Sequence
  Description of Artificial Sequence: Synthetic oligonucleotide
uaaacgugaacaucccuua

SEQ ID NO: 970213 - RNA, 19 nt, Artificial Sequence
  Description of Artificial Sequence: Synthetic oligonucleotide
ugccuaacaugugacaggc

SEQ ID NO: 970214 - RNA, 19 nt, Artificial Sequence
  Description of Artificial Sequence: Synthetic oligonucleotide
aacuaagaucuggcuagac

SEQ ID NO: 970215 - RNA, 19 nt, Artificial Sequence
  Description of Artificial Sequence: Synthetic oligonucleotide
aguaaaacgcacucucaaa

SEQ ID NO: 970216 - RNA, 19 nt, Artificial Sequence
  Description of Artificial Sequence: Synthetic oligonucleotide
ugaccauaccacuuaaauu

SEQ ID NO: 970217 - RNA, 19 nt, Artificial Sequence
  Description of Artificial Sequence: Synthetic oligonucleotide
guuacagaguaaaacgcac

SEQ ID NO: 970218 - RNA, 19 nt, Artificial Sequence
  Description of Artificial Sequence: Synthetic oligonucleotide
uccgauuugcccagacuug

SEQ ID NO: 970219 - RNA, 19 nt, Artificial Sequence
  Description of Artificial Sequence: Synthetic oligonucleotide
ucauagcucagugacagua

SEQ ID NO: 970220 - RNA, 19 nt, Artificial Sequence
  Description of Artificial Sequence: Synthetic oligonucleotide
ucacccuuacgaacaguag

SEQ ID NO: 970221 - RNA, 19 nt, Artificial Sequence
  Description of Artificial Sequence: Synthetic oligonucleotide
cauagcucagugacaguag

SEQ ID NO: 970222 - RNA, 19 nt, Artificial Sequence
  Description of Artificial Sequence: Synthetic oligonucleotide
ccuagaauuuggaaaagug

SEQ ID NO: 970223 - RNA, 19 nt, Artificial Sequence
  Description of Artificial Sequence: Synthetic oligonucleotide
ucucccgucucauggaaga

SEQ ID NO: 970224 - RNA, 19 nt, Artificial Sequence
  Description of Artificial Sequence: Synthetic oligonucleotide
ugcauaacacugagggaac

SEQ ID NO: 970225 - RNA, 19 nt, Artificial Sequence
  Description of Artificial Sequence: Synthetic oligonucleotide
cauauaccccaucuucacc

SEQ ID NO: 970226 - RNA, 19 nt, Artificial Sequence
  Description of Artificial Sequence: Synthetic oligonucleotide
caguaggugggcuggauug

SEQ ID NO: 970227 - RNA, 19 nt, Artificial Sequence
  Description of Artificial Sequence: Synthetic oligonucleotide
uguuaugccugaugguagu

SEQ ID NO: 970228 - RNA, 19 nt, Artificial Sequence
  Description of Artificial Sequence: Synthetic oligonucleotide
acgggugggaugcauaaca

SEQ ID NO: 970229 - RNA, 19 nt, Artificial Sequence
  Description of Artificial Sequence: Synthetic oligonucleotide
uaaagacgggguauugguc

SEQ ID NO: 970230 - RNA, 19 nt, Artificial Sequence
  Description of Artificial Sequence: Synthetic oligonucleotide
ugcuagauagcccuuccuu

SEQ ID NO: 970231 - RNA, 19 nt, Artificial Sequence
  Description of Artificial Sequence: Synthetic oligonucleotide
uggaccuucgacauccgau

SEQ ID NO: 970232 - RNA, 19 nt, Artificial Sequence
  Description of Artificial Sequence: Synthetic oligonucleotide
gauaacucaagggaagcaa

SEQ ID NO: 970233 - RNA, 19 nt, Artificial Sequence
  Description of Artificial Sequence: Synthetic oligonucleotide
gccaucauagcucagugac

SEQ ID NO: 970234 - RNA, 19 nt, Artificial Sequence
  Description of Artificial Sequence: Synthetic oligonucleotide
auaccacuuaaauuggcuu

SEQ ID NO: 970235 - RNA, 19 nt, Artificial Sequence
  Description of Artificial Sequence: Synthetic oligonucleotide
ggaaucauuucuaaggguc

SEQ ID NO: 970236 - RNA, 19 nt, Artificial Sequence
  Description of Artificial Sequence: Synthetic oligonucleotide
aguguuaugccugauggua

SEQ ID NO: 970237 - RNA, 19 nt, Artificial Sequence
  Description of Artificial Sequence: Synthetic oligonucleotide
acucuguuacccguaacag

SEQ ID NO: 970238 - RNA, 19 nt, Artificial Sequence
  Description of Artificial Sequence: Synthetic oligonucleotide
cacacagcuuggaaccucg

SEQ ID NO: 970239 - RNA, 19 nt, Artificial Sequence
  Description of Artificial Sequence: Synthetic oligonucleotide
uacagucagcacauguggu

SEQ ID NO: 970240 - RNA, 19 nt, Artificial Sequence
  Description of Artificial Sequence: Synthetic oligonucleotide
cagcuuggaaccucguuag

SEQ ID NO: 970241 - RNA, 19 nt, Artificial Sequence
  Description of Artificial Sequence: Synthetic oligonucleotide
auaguccuagaauuuggaa

SEQ ID NO: 970242 - RNA, 19 nt, Artificial Sequence
  Description of Artificial Sequence: Synthetic oligonucleotide
uaccacuuaaauuggcuuu

SEQ ID NO: 970243 - RNA, 19 nt, Artificial Sequence
  Description of Artificial Sequence: Synthetic oligonucleotide
uucucacuucugauggaug

SEQ ID NO: 970244 - RNA, 19 nt, Artificial Sequence
  Description of Artificial Sequence: Synthetic oligonucleotide
gucaccacucuguuacccg

SEQ ID NO: 970245 - RNA, 19 nt, Artificial Sequence
  Description of Artificial Sequence: Synthetic oligonucleotide
cuaaagcucaagggaagcc

SEQ ID NO: 970246 - RNA, 19 nt, Artificial Sequence
  Description of Artificial Sequence: Synthetic oligonucleotide
ugugccaucauagcucagu

SEQ ID NO: 970247 - RNA, 19 nt, Artificial Sequence
  Description of Artificial Sequence: Synthetic oligonucleotide
cucagauaacucaagggaa

SEQ ID NO: 970248 - RNA, 19 nt, Artificial Sequence
  Description of Artificial Sequence: Synthetic oligonucleotide
guauuggucaauauuggaa

SEQ ID NO: 970249 - RNA, 19 nt, Artificial Sequence
  Description of Artificial Sequence: Synthetic oligonucleotide
gacucuuagcuuacaaaac

SEQ ID NO: 970250 - RNA, 19 nt, Artificial Sequence
  Description of Artificial Sequence: Synthetic oligonucleotide
agaucgcgccucuugucac

SEQ ID NO: 970251 - RNA, 19 nt, Artificial Sequence
  Description of Artificial Sequence: Synthetic oligonucleotide
ugguucucucauuacuugu

SEQ ID NO: 970252 - RNA, 19 nt, Artificial Sequence
  Description of Artificial Sequence: Synthetic oligonucleotide
gggugagaaguaaagacag

SEQ ID NO: 970253 - RNA, 19 nt, Artificial Sequence
  Description of Artificial Sequence: Synthetic oligonucleotide
auaaacgugaacaucccuu

SEQ ID NO: 970254 - RNA, 19 nt, Artificial Sequence
  Description of Artificial Sequence: Synthetic oligonucleotide
ggacucuuagcuuacaaaa

SEQ ID NO: 970255 - RNA, 19 nt, Artificial Sequence
  Description of Artificial Sequence: Synthetic oligonucleotide
cugacucagauaacucaag

SEQ ID NO: 970256 - RNA, 19 nt, Artificial Sequence
  Description of Artificial Sequence: Synthetic oligonucleotide
auaaggugacaauucugaa

SEQ ID NO: 970257 - RNA, 19 nt, Artificial Sequence
  Description of Artificial Sequence: Synthetic oligonucleotide
uggaguguucagccaaaga

SEQ ID NO: 970258 - RNA, 19 nt, Artificial Sequence
  Description of Artificial Sequence: Synthetic oligonucleotide
aaacgugaacaucccuuaa

SEQ ID NO: 970259 - RNA, 19 nt, Artificial Sequence
  Description of Artificial Sequence: Synthetic oligonucleotide
aaugcaccucacaucauaa

SEQ ID NO: 970260 - RNA, 19 nt, Artificial Sequence
  Description of Artificial Sequence: Synthetic oligonucleotide
aauccccacaucgcaaugu

SEQ ID NO: 970261 - RNA, 19 nt, Artificial Sequence
  Description of Artificial Sequence: Synthetic oligonucleotide
uccuagaauuuggaaaagu

SEQ ID NO: 970262 - RNA, 19 nt, Artificial Sequence
  Description of Artificial Sequence: Synthetic oligonucleotide
uuaccuccagccaggacau

SEQ ID NO: 970263 - RNA, 19 nt, Artificial Sequence
  Description of Artificial Sequence: Synthetic oligonucleotide
uguagcuuuugaugcuaga

SEQ ID NO: 970264 - RNA, 19 nt, Artificial Sequence
  Description of Artificial Sequence: Synthetic oligonucleotide
cuuaauccugcagugauaa

SEQ ID NO: 970265 - RNA, 19 nt, Artificial Sequence
  Description of Artificial Sequence: Synthetic oligonucleotide
aucgcaaugugccaucaua

SEQ ID NO: 970266 - RNA, 19 nt, Artificial Sequence
  Description of Artificial Sequence: Synthetic oligonucleotide
aguguucagccaaagagau

SEQ ID NO: 970267 - RNA, 19 nt, Artificial Sequence
  Description of Artificial Sequence: Synthetic oligonucleotide
auuguugaaucuauccuau

SEQ ID NO: 970268 - RNA, 19 nt, Artificial Sequence
  Description of Artificial Sequence: Synthetic oligonucleotide
agcuuggaaccucguuagc

SEQ ID NO: 970269 - RNA, 19 nt, Artificial Sequence
  Description of Artificial Sequence: Synthetic oligonucleotide
cuacuuuuaacaaucgcau

SEQ ID NO: 970270 - RNA, 19 nt, Artificial Sequence
  Description of Artificial Sequence: Synthetic oligonucleotide
gagaucgcgccucuuguca

SEQ ID NO: 970271 - RNA, 19 nt, Artificial Sequence
  Description of Artificial Sequence: Synthetic oligonucleotide
aagugaggcaggaaaacua

SEQ ID NO: 970272 - RNA, 19 nt, Artificial Sequence
  Description of Artificial Sequence: Synthetic oligonucleotide
uggcaaugaaacucccaga

SEQ ID NO: 970273 - RNA, 19 nt, Artificial Sequence
  Description of Artificial Sequence: Synthetic oligonucleotide
ucguuagccaucucccagu

SEQ ID NO: 970274 - RNA, 19 nt, Artificial Sequence
  Description of Artificial Sequence: Synthetic oligonucleotide
gcuagauagcccuuccuug

SEQ ID NO: 970275 - RNA, 19 nt, Artificial Sequence
  Description of Artificial Sequence: Synthetic oligonucleotide
uaacgggugggaugcauaa

SEQ ID NO: 970276 - RNA, 19 nt, Artificial Sequence
  Description of Artificial Sequence: Synthetic oligonucleotide
aagacuccuuacagucagc

SEQ ID NO: 970277 - RNA, 19 nt, Artificial Sequence
  Description of Artificial Sequence: Synthetic oligonucleotide
ccagugauaguguuaugcc

SEQ ID NO: 970278 - RNA, 19 nt, Artificial Sequence
  Description of Artificial Sequence: Synthetic oligonucleotide
uacucaugugaaguuccag

SEQ ID NO: 970279 - RNA, 19 nt, Artificial Sequence
  Description of Artificial Sequence: Synthetic oligonucleotide
uagauagcccuuccuuggu

SEQ ID NO: 970280 - RNA, 19 nt, Artificial Sequence
  Description of Artificial Sequence: Synthetic oligonucleotide
gaaugcaccucacaucaua

SEQ ID NO: 970281 - RNA, 19 nt, Artificial Sequence
  Description of Artificial Sequence: Synthetic oligonucleotide
uaaauuggcuuuguagcuu

SEQ ID NO: 970282 - RNA, 19 nt, Artificial Sequence
  Description of Artificial Sequence: Synthetic oligonucleotide
guguuaugccugaugguag

SEQ ID NO: 970283 - RNA, 19 nt, Artificial Sequence
  Description of Artificial Sequence: Synthetic oligonucleotide
accuucgacauccgaucuc

SEQ ID NO: 970284 - RNA, 19 nt, Artificial Sequence
  Description of Artificial Sequence: Synthetic oligonucleotide
aguuaccuccagccaggac

SEQ ID NO: 970285 - RNA, 19 nt, Artificial Sequence
  Description of Artificial Sequence: Synthetic oligonucleotide
ugguaguaaggagaggaau

SEQ ID NO: 970286 - RNA, 19 nt, Artificial Sequence
  Description of Artificial Sequence: Synthetic oligonucleotide
guguccgucuaucuaccag

SEQ ID NO: 970287 - RNA, 19 nt, Artificial Sequence
  Description of Artificial Sequence: Synthetic oligonucleotide
aacgggugggaugcauaac

SEQ ID NO: 970288 - RNA, 19 nt, Artificial Sequence
  Description of Artificial Sequence: Synthetic oligonucleotide
aguaggugggcuggauugg

SEQ ID NO: 970289 - RNA, 19 nt, Artificial Sequence
  Description of Artificial Sequence: Synthetic oligonucleotide
acaggcccuaggucuaauc

SEQ ID NO: 970290 - RNA, 19 nt, Artificial Sequence
  Description of Artificial Sequence: Synthetic oligonucleotide
acccuuacgaacaguagcu

SEQ ID NO: 970291 - RNA, 19 nt, Artificial Sequence
  Description of Artificial Sequence: Synthetic oligonucleotide
aaacuaagaucuggcuaga

SEQ ID NO: 970292 - RNA, 19 nt, Artificial Sequence
  Description of Artificial Sequence: Synthetic oligonucleotide
gcucuuggaguguucagcc

SEQ ID NO: 970293 - RNA, 19 nt, Artificial Sequence
  Description of Artificial Sequence: Synthetic oligonucleotide
cuucguuucuguacaccuc

SEQ ID NO: 970294 - RNA, 19 nt, Artificial Sequence
  Description of Artificial Sequence: Synthetic oligonucleotide
accagugacaaauguccau

SEQ ID NO: 970295 - RNA, 19 nt, Artificial Sequence
  Description of Artificial Sequence: Synthetic oligonucleotide
uuaugccugaugguaguaa

SEQ ID NO: 970296 - RNA, 19 nt, Artificial Sequence
  Description of Artificial Sequence: Synthetic oligonucleotide
gguauuggucaauauugga

SEQ ID NO: 970297 - RNA, 19 nt, Artificial Sequence
  Description of Artificial Sequence: Synthetic oligonucleotide
aggagaucgcgccucuugu

SEQ ID NO: 970298 - RNA, 19 nt, Artificial Sequence
  Description of Artificial Sequence: Synthetic oligonucleotide
ugccaucauagcucaguga

SEQ ID NO: 970299 - RNA, 19 nt, Artificial Sequence
  Description of Artificial Sequence: Synthetic oligonucleotide
auaacucaagggaagcaaa

SEQ ID NO: 970300 - RNA, 19 nt, Artificial Sequence
  Description of Artificial Sequence: Synthetic oligonucleotide
ucuaucuaccagugacaaa

SEQ ID NO: 970301 - RNA, 19 nt, Artificial Sequence
  Description of Artificial Sequence: Synthetic oligonucleotide
ggacauaacgggugggaug

SEQ ID NO: 970302 - RNA, 19 nt, Artificial Sequence
  Description of Artificial Sequence: Synthetic oligonucleotide
ucgcauggaccuucgacau

SEQ ID NO: 970303 - RNA, 19 nt, Artificial Sequence
  Description of Artificial Sequence: Synthetic oligonucleotide
uccuauagcucagaagcuu

SEQ ID NO: 970304 - RNA, 19 nt, Artificial Sequence
  Description of Artificial Sequence: Synthetic oligonucleotide
ccgucuaucuaccagugac

SEQ ID NO: 970305 - RNA, 19 nt, Artificial Sequence
  Description of Artificial Sequence: Synthetic oligonucleotide
auagcccuuccuugguucu

SEQ ID NO: 970306 - RNA, 19 nt, Artificial Sequence
  Description of Artificial Sequence: Synthetic oligonucleotide
ccccacaucgcaaugugcc

SEQ ID NO: 970307 - RNA, 19 nt, Artificial Sequence
  Description of Artificial Sequence: Synthetic oligonucleotide
cauaccacuuaaauuggcu

SEQ ID NO: 970308 - RNA, 19 nt, Artificial Sequence
  Description of Artificial Sequence: Synthetic oligonucleotide
uuacgaacaguagcuucac

SEQ ID NO: 970309 - RNA, 19 nt, Artificial Sequence
  Description of Artificial Sequence: Synthetic oligonucleotide
uccccacaucgcaaugugc

SEQ ID NO: 970310 - RNA, 19 nt, Artificial Sequence
  Description of Artificial Sequence: Synthetic oligonucleotide
uuggaguguucagccaaag

SEQ ID NO: 970311 - RNA, 19 nt, Artificial Sequence
  Description of Artificial Sequence: Synthetic oligonucleotide
agguguccgucuaucuacc

SEQ ID NO: 970312 - RNA, 19 nt, Artificial Sequence
  Description of Artificial Sequence: Synthetic oligonucleotide
uggcuagacaugguaguac

SEQ ID NO: 970313 - RNA, 19 nt, Artificial Sequence
  Description of Artificial Sequence: Synthetic oligonucleotide
ggauacuggauggacauga

SEQ ID NO: 970314 - RNA, 19 nt, Artificial Sequence
  Description of Artificial Sequence: Synthetic oligonucleotide
caaagacuccuuacaguca

SEQ ID NO: 970315 - RNA, 19 nt, Artificial Sequence
  Description of Artificial Sequence: Synthetic oligonucleotide
aguccgauuugcccagacu

SEQ ID NO: 970316 - RNA, 19 nt, Artificial Sequence
  Description of Artificial Sequence: Synthetic oligonucleotide
uccgucuaucuaccaguga

SEQ ID NO: 970317 - RNA, 19 nt, Artificial Sequence
  Description of Artificial Sequence: Synthetic oligonucleotide
ugcucaugucugcccaugu

SEQ ID NO: 970318 - RNA, 19 nt, Artificial Sequence
  Description of Artificial Sequence: Synthetic oligonucleotide
gacaugaacaguucuuauu

SEQ ID NO: 970319 - RNA, 19 nt, Artificial Sequence
  Description of Artificial Sequence: Synthetic oligonucleotide
uacgaacaguagcuucacu

SEQ ID NO: 970320 - RNA, 19 nt, Artificial Sequence
  Description of Artificial Sequence: Synthetic oligonucleotide
aucgcgccucuugucaccc

SEQ ID NO: 970321 - RNA, 19 nt, Artificial Sequence
  Description of Artificial Sequence: Synthetic oligonucleotide
cacaagacaguccccagaa

SEQ ID NO: 970322 - RNA, 19 nt, Artificial Sequence
  Description of Artificial Sequence: Synthetic oligonucleotide
uauaccccaucuucaccaa

SEQ ID NO: 970323 - RNA, 19 nt, Artificial Sequence
  Description of Artificial Sequence: Synthetic oligonucleotide
aaccucccgcuggaguuac

SEQ ID NO: 970324 - RNA, 19 nt, Artificial Sequence
  Description of Artificial Sequence: Synthetic oligonucleotide
gaucgcgccucuugucacc

SEQ ID NO: 970325 - RNA, 19 nt, Artificial Sequence
  Description of Artificial Sequence: Synthetic oligonucleotide
gugauaguguuaugccuga

SEQ ID NO: 970326 - RNA, 19 nt, Artificial Sequence
  Description of Artificial Sequence: Synthetic oligonucleotide
uucgacauccgaucucauu

SEQ ID NO: 970327 - RNA, 19 nt, Artificial Sequence
  Description of Artificial Sequence: Synthetic oligonucleotide
caucccuuaauccugcagu

SEQ ID NO: 970328 - RNA, 19 nt, Artificial Sequence
  Description of Artificial Sequence: Synthetic oligonucleotide
uuacccguaacaggugaaa

SEQ ID NO: 970329 - RNA, 19 nt, Artificial Sequence
  Description of Artificial Sequence: Synthetic oligonucleotide
guaguaaggagaggaaucu

SEQ ID NO: 970330 - RNA, 19 nt, Artificial Sequence
  Description of Artificial Sequence: Synthetic oligonucleotide
cagacacaagacagucccc

SEQ ID NO: 970331 - RNA, 19 nt, Artificial Sequence
  Description of Artificial Sequence: Synthetic oligonucleotide
aaaggacucuuagcuuaca

SEQ ID NO: 970332 - RNA, 19 nt, Artificial Sequence
  Description of Artificial Sequence: Synthetic oligonucleotide
gguaguacacaccaauagu

SEQ ID NO: 970333 - RNA, 19 nt, Artificial Sequence
  Description of Artificial Sequence: Synthetic oligonucleotide
gcuuggaaccucguuagcc

SEQ ID NO: 970334 - RNA, 19 nt, Artificial Sequence
  Description of Artificial Sequence: Synthetic oligonucleotide
cgugaacaucccuuaaucc

SEQ ID NO: 970335 - RNA, 19 nt, Artificial Sequence
  Description of Artificial Sequence: Synthetic oligonucleotide
aagcaacaaagcagaacaa

SEQ ID NO: 970336 - RNA, 19 nt, Artificial Sequence
  Description of Artificial Sequence: Synthetic oligonucleotide
acaaucgcauggaccuucg

SEQ ID NO: 970337 - RNA, 19 nt, Artificial Sequence
  Description of Artificial Sequence: Synthetic oligonucleotide
augcuagauagcccuuccu

SEQ ID NO: 970338 - RNA, 19 nt, Artificial Sequence
  Description of Artificial Sequence: Synthetic oligonucleotide
aggcccuaggucuaaucau

SEQ ID NO: 970339 - RNA, 19 nt, Artificial Sequence
  Description of Artificial Sequence: Synthetic oligonucleotide
caugguaguacacaccaau

SEQ ID NO: 970340 - RNA, 19 nt, Artificial Sequence
  Description of Artificial Sequence: Synthetic oligonucleotide
ucccuuaauccugcaguga

SEQ ID NO: 970341 - RNA, 19 nt, Artificial Sequence
  Description of Artificial Sequence: Synthetic oligonucleotide
gucuaucuaccagugacaa

SEQ ID NO: 970342 - RNA, 19 nt, Artificial Sequence
  Description of Artificial Sequence: Synthetic oligonucleotide
uuguugaaucuauccuaua

SEQ ID NO: 970343 - RNA, 19 nt, Artificial Sequence
  Description of Artificial Sequence: Synthetic oligonucleotide
ggcuagacaugguaguaca

SEQ ID NO: 970344 - RNA, 19 nt, Artificial Sequence
  Description of Artificial Sequence: Synthetic oligonucleotide
ggaccuucgacauccgauc

SEQ ID NO: 970345 - RNA, 19 nt, Artificial Sequence
  Description of Artificial Sequence: Synthetic oligonucleotide
uacccguaacaggugaaaa

SEQ ID NO: 970346 - RNA, 19 nt, Artificial Sequence
  Description of Artificial Sequence: Synthetic oligonucleotide
acuuccacccgccgugggu

SEQ ID NO: 970347 - RNA, 19 nt, Artificial Sequence
  Description of Artificial Sequence: Synthetic oligonucleotide
cauguggucaccacucugu

SEQ ID NO: 970348 - RNA, 19 nt, Artificial Sequence
  Description of Artificial Sequence: Synthetic oligonucleotide
acaguaggugggcuggauu

SEQ ID NO: 970349 - RNA, 19 nt, Artificial Sequence
  Description of Artificial Sequence: Synthetic oligonucleotide
ggccauacugccaacuaug

SEQ ID NO: 970350 - RNA, 19 nt, Artificial Sequence
  Description of Artificial Sequence: Synthetic oligonucleotide
guccuagaauuuggaaaag

SEQ ID NO: 970351 - RNA, 19 nt, Artificial Sequence
  Description of Artificial Sequence: Synthetic oligonucleotide
ccuuacgaacaguagcuuc

SEQ ID NO: 970352 - RNA, 19 nt, Artificial Sequence
  Description of Artificial Sequence: Synthetic oligonucleotide
ccaucucccagugauagug

SEQ ID NO: 970353 - RNA, 19 nt, Artificial Sequence
  Description of Artificial Sequence: Synthetic oligonucleotide
ugcuaccaagguucucacu

SEQ ID NO: 970354 - RNA, 19 nt, Artificial Sequence
  Description of Artificial Sequence: Synthetic oligonucleotide
uugauucaggaggcugucu

SEQ ID NO: 970355 - RNA, 19 nt, Artificial Sequence
  Description of Artificial Sequence: Synthetic oligonucleotide
gacuuccacccgccguggg

SEQ ID NO: 970356 - RNA, 19 nt, Artificial Sequence
  Description of Artificial Sequence: Synthetic oligonucleotide
guccgauuugcccagacuu

SEQ ID NO: 970357 - RNA, 19 nt, Artificial Sequence
  Description of Artificial Sequence: Synthetic oligonucleotide
cugcuaccaagguucucac

SEQ ID NO: 970358 - RNA, 19 nt, Artificial Sequence
  Description of Artificial Sequence: Synthetic oligonucleotide
gcugcuaccaagguucuca

SEQ ID NO: 970359 - RNA, 19 nt, Artificial Sequence
  Description of Artificial Sequence: Synthetic oligonucleotide
acauccgaucucauuuucu

SEQ ID NO: 970360 - RNA, 19 nt, Artificial Sequence
  Description of Artificial Sequence: Synthetic oligonucleotide
uggauacuggauggacaug

SEQ ID NO: 970361 - RNA, 19 nt, Artificial Sequence
  Description of Artificial Sequence: Synthetic oligonucleotide
uuccacccgccgugggugg

SEQ ID NO: 970362 - RNA, 19 nt, Artificial Sequence
  Description of Artificial Sequence: Synthetic oligonucleotide
ccacuagcagaguggaagc

SEQ ID NO: 970363 - RNA, 19 nt, Artificial Sequence
  Description of Artificial Sequence: Synthetic oligonucleotide
gcaaugugccaucauagcu

SEQ ID NO: 970364 - RNA, 19 nt, Artificial Sequence
  Description of Artificial Sequence: Synthetic oligonucleotide
augcaccucacaucauaaa

SEQ ID NO: 970365 - RNA, 19 nt, Artificial Sequence
  Description of Artificial Sequence: Synthetic oligonucleotide
gucacccuuacgaacagua

SEQ ID NO: 970366 - RNA, 19 nt, Artificial Sequence
  Description of Artificial Sequence: Synthetic oligonucleotide
agauagcccuuccuugguu

SEQ ID NO: 970367 - RNA, 19 nt, Artificial Sequence
  Description of Artificial Sequence: Synthetic oligonucleotide
cagugauaguguuaugccu

SEQ ID NO: 970368 - RNA, 19 nt, Artificial Sequence
  Description of Artificial Sequence: Synthetic oligonucleotide
gcaacaaagcagaacaacu

SEQ ID NO: 970369 - RNA, 19 nt, Artificial Sequence
  Description of Artificial Sequence: Synthetic oligonucleotide
auggaccuucgacauccga

SEQ ID NO: 970370 - RNA, 19 nt, Artificial Sequence
  Description of Artificial Sequence: Synthetic oligonucleotide
guagcuuuugaugcuagau

SEQ ID NO: 970371 - RNA, 19 nt, Artificial Sequence
  Description of Artificial Sequence: Synthetic oligonucleotide
cucuugucacccuuacgaa

SEQ ID NO: 970372 - RNA, 19 nt, Artificial Sequence
  Description of Artificial Sequence: Synthetic oligonucleotide
aggacauaacgggugggau

SEQ ID NO: 970373 - RNA, 19 nt, Artificial Sequence
  Description of Artificial Sequence: Synthetic oligonucleotide
gaugaccauaccacuuaaa

SEQ ID NO: 970374 - RNA, 19 nt, Artificial Sequence
  Description of Artificial Sequence: Synthetic oligonucleotide
caaagaagcucugaacagu

SEQ ID NO: 970375 - RNA, 19 nt, Artificial Sequence
  Description of Artificial Sequence: Synthetic oligonucleotide
cuggaguuaccuccagcca

SEQ ID NO: 970376 - RNA, 19 nt, Artificial Sequence
  Description of Artificial Sequence: Synthetic oligonucleotide
cauuccacggagccuugca

SEQ ID NO: 970377 - RNA, 19 nt, Artificial Sequence
  Description of Artificial Sequence: Synthetic oligonucleotide
agcuucacugaugaccaua

SEQ ID NO: 970378 - RNA, 19 nt, Artificial Sequence
  Description of Artificial Sequence: Synthetic oligonucleotide
guccgucuaucuaccagug

SEQ ID NO: 970379 - RNA, 19 nt, Artificial Sequence
  Description of Artificial Sequence: Synthetic oligonucleotide
cacugagggaacacacaga

SEQ ID NO: 970380 - RNA, 19 nt, Artificial Sequence
  Description of Artificial Sequence: Synthetic oligonucleotide
cauaaacgugaacaucccu

SEQ ID NO: 970381 - RNA, 19 nt, Artificial Sequence
  Description of Artificial Sequence: Synthetic oligonucleotide
ccaagaagucaaaggagga

SEQ ID NO: 970382 - RNA, 19 nt, Artificial Sequence
  Description of Artificial Sequence: Synthetic oligonucleotide
augguaguaaggagaggaa

SEQ ID NO: 970383 - RNA, 19 nt, Artificial Sequence
  Description of Artificial Sequence: Synthetic oligonucleotide
gggaugcauaacacugagg

SEQ ID NO: 970384 - RNA, 19 nt, Artificial Sequence
  Description of Artificial Sequence: Synthetic oligonucleotide
acgggguauuggucaauau

SEQ ID NO: 970385 - RNA, 19 nt, Artificial Sequence
  Description of Artificial Sequence: Synthetic oligonucleotide
aaaguccgauuugcccaga

SEQ ID NO: 970386 - RNA, 19 nt, Artificial Sequence
  Description of Artificial Sequence: Synthetic oligonucleotide
gaccuucgacauccgaucu

SEQ ID NO: 970387 - RNA, 19 nt, Artificial Sequence
  Description of Artificial Sequence: Synthetic oligonucleotide
accaaaucccaaaguccga

SEQ ID NO: 970388 - RNA, 19 nt, Artificial Sequence
  Description of Artificial Sequence: Synthetic oligonucleotide
gauuggugggugagaagua

SEQ ID NO: 970389 - RNA, 19 nt, Artificial Sequence
  Description of Artificial Sequence: Synthetic oligonucleotide
gucccacuagcagagugga

SEQ ID NO: 970390 - RNA, 19 nt, Artificial Sequence
  Description of Artificial Sequence: Synthetic oligonucleotide
auaacgggugggaugcaua

SEQ ID NO: 970391 - RNA, 19 nt, Artificial Sequence
  Description of Artificial Sequence: Synthetic oligonucleotide
ccuaggucuaaucauauuu

SEQ ID NO: 970392 - RNA, 19 nt, Artificial Sequence
  Description of Artificial Sequence: Synthetic oligonucleotide
cauuacuugucuugcucau

SEQ ID NO: 970393 - RNA, 19 nt, Artificial Sequence
  Description of Artificial Sequence: Synthetic oligonucleotide
ucccacuagcagaguggaa

SEQ ID NO: 970394 - RNA, 19 nt, Artificial Sequence
  Description of Artificial Sequence: Synthetic oligonucleotide
gacgggguauuggucaaua

SEQ ID NO: 970395 - RNA, 19 nt, Artificial Sequence
  Description of Artificial Sequence: Synthetic oligonucleotide
gccugaguuacagaguaaa

SEQ ID NO: 970396 - RNA, 19 nt, Artificial Sequence
  Description of Artificial Sequence: Synthetic oligonucleotide
uaaccucccgcuggaguua

SEQ ID NO: 970397 - RNA, 19 nt, Artificial Sequence
  Description of Artificial Sequence: Synthetic oligonucleotide
agcugcuaccaagguucuc

SEQ ID NO: 970398 - RNA, 19 nt, Artificial Sequence
  Description of Artificial Sequence: Synthetic oligonucleotide
ggagaucgcgccucuuguc

SEQ ID NO: 970399 - RNA, 19 nt, Artificial Sequence
  Description of Artificial Sequence: Synthetic oligonucleotide
cacuagcagaguggaagca

SEQ ID NO: 970400 - RNA, 19 nt, Artificial Sequence
  Description of Artificial Sequence: Synthetic oligonucleotide
guguucagccaaagagauc

SEQ ID NO: 970401 - RNA, 19 nt, Artificial Sequence
  Description of Artificial Sequence: Synthetic oligonucleotide
gcucaugucugcccauguc

SEQ ID NO: 970402 - RNA, 19 nt, Artificial Sequence
  Description of Artificial Sequence: Synthetic oligonucleotide
guuaugccugaugguagua

SEQ ID NO: 970403 - RNA, 19 nt, Artificial Sequence
  Description of Artificial Sequence: Synthetic oligonucleotide
uggcuuccccuggaaugca

SEQ ID NO: 970404 - RNA, 19 nt, Artificial Sequence
  Description of Artificial Sequence: Synthetic oligonucleotide
gcuaacaggcuggcgugug

SEQ ID NO: 970405 - RNA, 19 nt, Artificial Sequence
  Description of Artificial Sequence: Synthetic oligonucleotide
cucccgucucauggaagac

SEQ ID NO: 970406 - RNA, 19 nt, Artificial Sequence
  Description of Artificial Sequence: Synthetic oligonucleotide
gccauacugccaacuauga

SEQ ID NO: 970407 - RNA, 19 nt, Artificial Sequence
  Description of Artificial Sequence: Synthetic oligonucleotide
ccaucauagcucagugaca

SEQ ID NO: 970408 - RNA, 19 nt, Artificial Sequence
  Description of Artificial Sequence: Synthetic oligonucleotide
gguguccgucuaucuacca

SEQ ID NO: 970409 - RNA, 19 nt, Artificial Sequence
  Description of Artificial Sequence: Synthetic oligonucleotide
caucucccagugauagugu

SEQ ID NO: 970410 - RNA, 19 nt, Artificial Sequence
  Description of Artificial Sequence: Synthetic oligonucleotide
cuggcguguggggauaaaa

SEQ ID NO: 970411 - RNA, 19 nt, Artificial Sequence
  Description of Artificial Sequence: Synthetic oligonucleotide
cccagaaagagagcgcaca

SEQ ID NO: 970412 - RNA, 19 nt, Artificial Sequence
  Description of Artificial Sequence: Synthetic oligonucleotide
acauaacgggugggaugca

SEQ ID NO: 970413 - RNA, 19 nt, Artificial Sequence
  Description of Artificial Sequence: Synthetic oligonucleotide
cgucuaucuaccagugaca

SEQ ID NO: 970414 - RNA, 19 nt, Artificial Sequence
  Description of Artificial Sequence: Synthetic oligonucleotide
gcuggcaaugaaacuccca

SEQ ID NO: 970415 - RNA, 19 nt, Artificial Sequence
  Description of Artificial Sequence: Synthetic oligonucleotide
cgggugggaugcauaacac

SEQ ID NO: 970416 - RNA, 19 nt, Artificial Sequence
  Description of Artificial Sequence: Synthetic oligonucleotide
ggcccuaggucuaaucaua

SEQ ID NO: 970417 - RNA, 19 nt, Artificial Sequence
  Description of Artificial Sequence: Synthetic oligonucleotide
cguuagccaucucccagug

SEQ ID NO: 970418 - RNA, 19 nt, Artificial Sequence
  Description of Artificial Sequence: Synthetic oligonucleotide
guaggugggcuggauuggu

SEQ ID NO: 970419 - RNA, 19 nt, Artificial Sequence
  Description of Artificial Sequence: Synthetic oligonucleotide
agacgggguauuggucaau

SEQ ID NO: 970420 - RNA, 19 nt, Artificial Sequence
  Description of Artificial Sequence: Synthetic oligonucleotide
ccuuaauccugcagugaua

SEQ ID NO: 970421 - RNA, 19 nt, Artificial Sequence
  Description of Artificial Sequence: Synthetic oligonucleotide
cccacaucgcaaugugcca

SEQ ID NO: 970422 - RNA, 19 nt, Artificial Sequence
  Description of Artificial Sequence: Synthetic oligonucleotide
ucgcgccucuugucacccu

SEQ ID NO: 970423 - RNA, 19 nt, Artificial Sequence
  Description of Artificial Sequence: Synthetic oligonucleotide
gaggggcuauuuccuucgu

SEQ ID NO: 970424 - RNA, 19 nt, Artificial Sequence
  Description of Artificial Sequence: Synthetic oligonucleotide
ccauacugccaacuaugaa

SEQ ID NO: 970425 - RNA, 19 nt, Artificial Sequence
  Description of Artificial Sequence: Synthetic oligonucleotide
gcuggauuggugggugaga

SEQ ID NO: 970426 - RNA, 19 nt, Artificial Sequence
  Description of Artificial Sequence: Synthetic oligonucleotide
ccacucuguuacccguaac

SEQ ID NO: 970427 - RNA, 19 nt, Artificial Sequence
  Description of Artificial Sequence: Synthetic oligonucleotide
cauaacgggugggaugcau

SEQ ID NO: 970428 - RNA, 19 nt, Artificial Sequence
  Description of Artificial Sequence: Synthetic oligonucleotide
cccuuaauccugcagugau

SEQ ID NO: 970429 - RNA, 19 nt, Artificial Sequence
  Description of Artificial Sequence: Synthetic oligonucleotide
cucccagagggucuacuuu

SEQ ID NO: 970430 - RNA, 19 nt, Artificial Sequence
  Description of Artificial Sequence: Synthetic oligonucleotide
gccuaacaugugacaggcc

SEQ ID NO: 970431 - RNA, 19 nt, Artificial Sequence
  Description of Artificial Sequence: Synthetic oligonucleotide
cacccgccgugggugggcc

SEQ ID NO: 970432 - RNA, 19 nt, Artificial Sequence
  Description of Artificial Sequence: Synthetic oligonucleotide
ggcuuccccuggaaugcac

SEQ ID NO: 970433 - RNA, 19 nt, Artificial Sequence
  Description of Artificial Sequence: Synthetic oligonucleotide
cccgcuggaguuaccucca

SEQ ID NO: 970434 - RNA, 19 nt, Artificial Sequence
  Description of Artificial Sequence: Synthetic oligonucleotide
cagaggagaucgcgccucu

SEQ ID NO: 970435 - RNA, 19 nt, Artificial Sequence
  Description of Artificial Sequence: Synthetic oligonucleotide
cagcugcuaccaagguucu

SEQ ID NO: 970436 - RNA, 19 nt, Artificial Sequence
  Description of Artificial Sequence: Synthetic oligonucleotide
caucgcaaugugccaucau

SEQ ID NO: 970437 - RNA, 19 nt, Artificial Sequence
  Description of Artificial Sequence: Synthetic oligonucleotide
ccgucucauggaagacuuc

SEQ ID NO: 970438 - RNA, 19 nt, Artificial Sequence
  Description of Artificial Sequence: Synthetic oligonucleotide
gggcuacagaggagaucgc

SEQ ID NO: 970439 - RNA, 19 nt, Artificial Sequence
  Description of Artificial Sequence: Synthetic oligonucleotide
cuucgacauccgaucucau

SEQ ID NO: 970440 - RNA, 19 nt, Artificial Sequence
  Description of Artificial Sequence: Synthetic oligonucleotide
ccaaaucccaaaguccgau

SEQ ID NO: 970441 - RNA, 19 nt, Artificial Sequence
  Description of Artificial Sequence: Synthetic oligonucleotide
acccgccgugggugggcca

SEQ ID NO: 970442 - RNA, 19 nt, Artificial Sequence
  Description of Artificial Sequence: Synthetic oligonucleotide
aggcuggcguguggggaua

SEQ ID NO: 970443 - RNA, 19 nt, Artificial Sequence
  Description of Artificial Sequence: Synthetic oligonucleotide
gccaucucccagugauagu

SEQ ID NO: 970444 - RNA, 19 nt, Artificial Sequence
  Description of Artificial Sequence: Synthetic oligonucleotide
gcccuaggucuaaucauau

SEQ ID NO: 970445 - RNA, 19 nt, Artificial Sequence
  Description of Artificial Sequence: Synthetic oligonucleotide
cgggguauuggucaauauu

SEQ ID NO: 970446 - RNA, 19 nt, Artificial Sequence
  Description of Artificial Sequence: Synthetic oligonucleotide
ggaaugcaccucacaucau

SEQ ID NO: 970447 - RNA, 19 nt, Artificial Sequence
  Description of Artificial Sequence: Synthetic oligonucleotide
ccaucccagugucccacua

SEQ ID NO: 970448 - RNA, 19 nt, Artificial Sequence
  Description of Artificial Sequence: Synthetic oligonucleotide
cccuaggucuaaucauauu

SEQ ID NO: 970449 - RNA, 19 nt, Artificial Sequence
  Description of Artificial Sequence: Synthetic oligonucleotide
gcuggcguguggggauaaa

SEQ ID NO: 970450 - RNA, 19 nt, Artificial Sequence
  Description of Artificial Sequence: Synthetic oligonucleotide
gcgccucuugucacccuua

SEQ ID NO: 970451 - RNA, 19 nt, Artificial Sequence
  Description of Artificial Sequence: Synthetic oligonucleotide
cccuuacgaacaguagcuu

SEQ ID NO: 970452 - RNA, 19 nt, Artificial Sequence
  Description of Artificial Sequence: Synthetic oligonucleotide
cgcgccucuugucacccuu

SEQ ID NO: 970453 - RNA, 19 nt, Artificial Sequence
  Description of Artificial Sequence: Synthetic oligonucleotide
cccgccgugggugggccau

SEQ ID NO: 970454 - RNA, 19 nt, Artificial Sequence
  Description of Artificial Sequence: Synthetic oligonucleotide
ccgccgugggugggccaua

SEQ ID NO: 970455 - RNA, 19 nt, Artificial Sequence
  Description of Artificial Sequence: Synthetic oligonucleotide
aaucauaccaaggaaaucc

SEQ ID NO: 970456 - RNA, 19 nt, Artificial Sequence
  Description of Artificial Sequence: Synthetic oligonucleotide
auaaauuuauucuauggac

SEQ ID NO: 970457 - RNA, 19 nt, Artificial Sequence
  Description of Artificial Sequence: Synthetic oligonucleotide
agugaaauaaaacacuacg

SEQ ID NO: 970458 - RNA, 19 nt, Artificial Sequence
  Description of Artificial Sequence: Synthetic oligonucleotide
uauucuauggacauuuucc

SEQ ID NO: 970459 - RNA, 19 nt, Artificial Sequence
  Description of Artificial Sequence: Synthetic oligonucleotide
uggucuaucaaacauauac

SEQ ID NO: 970460 - RNA, 19 nt, Artificial Sequence
  Description of Artificial Sequence: Synthetic oligonucleotide
uucacaguaagcuugaaca

SEQ ID NO: 970461 - RNA, 19 nt, Artificial Sequence
  Description of Artificial Sequence: Synthetic oligonucleotide
aaagauacgaaucuagaaa

SEQ ID NO: 970462 - RNA, 19 nt, Artificial Sequence
  Description of Artificial Sequence: Synthetic oligonucleotide
auugcauuguguuagauga

SEQ ID NO: 970463 - RNA, 19 nt, Artificial Sequence
  Description of Artificial Sequence: Synthetic oligonucleotide
aauggaaguuuccagguag

SEQ ID NO: 970464 - RNA, 19 nt, Artificial Sequence
  Description of Artificial Sequence: Synthetic oligonucleotide
uggggaaucaaccacauga

SEQ ID NO: 970465 - RNA, 19 nt, Artificial Sequence
  Description of Artificial Sequence: Synthetic oligonucleotide
ugugguaugagucugucca

SEQ ID NO: 970466 - RNA, 19 nt, Artificial Sequence
  Description of Artificial Sequence: Synthetic oligonucleotide
agaaauggaaguuuccagg

SEQ ID NO: 970467 - RNA, 19 nt, Artificial Sequence
  Description of Artificial Sequence: Synthetic oligonucleotide
aaggcauuuacaucugggg

SEQ ID NO: 970468 - RNA, 19 nt, Artificial Sequence
  Description of Artificial Sequence: Synthetic oligonucleotide
aaucaccccacacaguacg

SEQ ID NO: 970469 - RNA, 19 nt, Artificial Sequence
  Description of Artificial Sequence: Synthetic oligonucleotide
aagauacgaaucuagaaaa

SEQ ID NO: 970470 - RNA, 19 nt, Artificial Sequence
  Description of Artificial Sequence: Synthetic oligonucleotide
auuguguuagaugauacac

SEQ ID NO: 970471 - RNA, 19 nt, Artificial Sequence
  Description of Artificial Sequence: Synthetic oligonucleotide
uguguuagaugauacacca

SEQ ID NO: 970472 - RNA, 19 nt, Artificial Sequence
  Description of Artificial Sequence: Synthetic oligonucleotide
aaguguucggcucgguucc

SEQ ID NO: 970473 - RNA, 19 nt, Artificial Sequence
  Description of Artificial Sequence: Synthetic oligonucleotide
uguaguccaauuuugucag

SEQ ID NO: 970474 - RNA, 19 nt, Artificial Sequence
  Description of Artificial Sequence: Synthetic oligonucleotide
aacaguuugcuccuuccgg

SEQ ID NO: 970475 - RNA, 19 nt, Artificial Sequence
  Description of Artificial Sequence: Synthetic oligonucleotide
uuugauuguaaccacugac

SEQ ID NO: 970476 - RNA, 19 nt, Artificial Sequence
  Description of Artificial Sequence: Synthetic oligonucleotide
aacacuacgaacagcaguc

SEQ ID NO: 970477 - RNA, 19 nt, Artificial Sequence
  Description of Artificial Sequence: Synthetic oligonucleotide
uagauuaaaacacaucaau

SEQ ID NO: 970478 - RNA, 19 nt, Artificial Sequence
  Description of Artificial Sequence: Synthetic oligonucleotide
aaaacgaugaguacggaug

SEQ ID NO: 970479 - RNA, 19 nt, Artificial Sequence
  Description of Artificial Sequence: Synthetic oligonucleotide
ucaacuauguaugucagug

SEQ ID NO: 970480 - RNA, 19 nt, Artificial Sequence
  Description of Artificial Sequence: Synthetic oligonucleotide
ugauuguaaccacugaccc

SEQ ID NO: 970481 - RNA, 19 nt, Artificial Sequence
  Description of Artificial Sequence: Synthetic oligonucleotide
uccguuuggaagaacaaag

SEQ ID NO: 970482 - RNA, 19 nt, Artificial Sequence
  Description of Artificial Sequence: Synthetic oligonucleotide
ucaaccacaugaaucaccc

SEQ ID NO: 970483 - RNA, 19 nt, Artificial Sequence
  Description of Artificial Sequence: Synthetic oligonucleotide
aacuauguaugucaguggu

SEQ ID NO: 970484 - RNA, 19 nt, Artificial Sequence
  Description of Artificial Sequence: Synthetic oligonucleotide
ucuauggacauuuuccuca

SEQ ID NO: 970485 - RNA, 19 nt, Artificial Sequence
  Description of Artificial Sequence: Synthetic oligonucleotide
aagaaaacgcuucacagua

SEQ ID NO: 970486 - RNA, 19 nt, Artificial Sequence
  Description of Artificial Sequence: Synthetic oligonucleotide
uaaccacugacccagaagu

SEQ ID NO: 970487 - RNA, 19 nt, Artificial Sequence
  Description of Artificial Sequence: Synthetic oligonucleotide
uucucaacuauguauguca

SEQ ID NO: 970488 - RNA, 19 nt, Artificial Sequence
  Description of Artificial Sequence: Synthetic oligonucleotide
aggugagugaaauaaaaca

SEQ ID NO: 970489 - RNA, 19 nt, Artificial Sequence
  Description of Artificial Sequence: Synthetic oligonucleotide
uguauggucuaucaaacau

SEQ ID NO: 970490 - RNA, 19 nt, Artificial Sequence
  Description of Artificial Sequence: Synthetic oligonucleotide
gguuacacuauucaaaagc

SEQ ID NO: 970491 - RNA, 19 nt, Artificial Sequence
  Description of Artificial Sequence: Synthetic oligonucleotide
ucuuuaacagucagguacc

SEQ ID NO: 970492 - RNA, 19 nt, Artificial Sequence
  Description of Artificial Sequence: Synthetic oligonucleotide
uauaagagcaggacuguca

SEQ ID NO: 970493 - RNA, 19 nt, Artificial Sequence
  Description of Artificial Sequence: Synthetic oligonucleotide
gaaaacgcuucacaguaag

SEQ ID NO: 970494 - RNA, 19 nt, Artificial Sequence
  Description of Artificial Sequence: Synthetic oligonucleotide
agaaaacgguuucucaagg

SEQ ID NO: 970495 - RNA, 19 nt, Artificial Sequence
  Description of Artificial Sequence: Synthetic oligonucleotide
aaacgcuucacaguaagcu

SEQ ID NO: 970496 - RNA, 19 nt, Artificial Sequence
  Description of Artificial Sequence: Synthetic oligonucleotide
agaccaaggagcaacuucc

SEQ ID NO: 970497 - RNA, 19 nt, Artificial Sequence
  Description of Artificial Sequence: Synthetic oligonucleotide
uauggucuaucaaacauau

SEQ ID NO: 970498 - RNA, 19 nt, Artificial Sequence
  Description of Artificial Sequence: Synthetic oligonucleotide
ucuacuguauggucuauca

SEQ ID NO: 970499 - RNA, 19 nt, Artificial Sequence
  Description of Artificial Sequence: Synthetic oligonucleotide
uuguguuagaugauacacc

SEQ ID NO: 970500 - RNA, 19 nt, Artificial Sequence
  Description of Artificial Sequence: Synthetic oligonucleotide
uuucucaaggcacacugca

SEQ ID NO: 970501 - RNA, 19 nt, Artificial Sequence
  Description of Artificial Sequence: Synthetic oligonucleotide
guuacugggaguccuacag

SEQ ID NO: 970502 - RNA, 19 nt, Artificial Sequence
  Description of Artificial Sequence: Synthetic oligonucleotide
uuacacuauucaaaagccc

SEQ ID NO: 970503 - RNA, 19 nt, Artificial Sequence
  Description of Artificial Sequence: Synthetic oligonucleotide
uacguuuguagguaaacac

SEQ ID NO: 970504 - RNA, 19 nt, Artificial Sequence
  Description of Artificial Sequence: Synthetic oligonucleotide
aaaauagauuaaaacacau

SEQ ID NO: 970505 - RNA, 19 nt, Artificial Sequence
  Description of Artificial Sequence: Synthetic oligonucleotide
ggauguauucuucauagcc

SEQ ID NO: 970506 - RNA, 19 nt, Artificial Sequence
  Description of Artificial Sequence: Synthetic oligonucleotide
gauugcauuguguuagaug

SEQ ID NO: 970507 - RNA, 19 nt, Artificial Sequence
  Description of Artificial Sequence: Synthetic oligonucleotide
ugugucgacagccauucug

SEQ ID NO: 970508 - RNA, 19 nt, Artificial Sequence
  Description of Artificial Sequence: Synthetic oligonucleotide
uacuguauggucuaucaaa

SEQ ID NO: 970509 - RNA, 19 nt, Artificial Sequence
  Description of Artificial Sequence: Synthetic oligonucleotide
aaacgguuucucaaggcac

SEQ ID NO: 970510 - RNA, 19 nt, Artificial Sequence
  Description of Artificial Sequence: Synthetic oligonucleotide
guuacacuauucaaaagcc

SEQ ID NO: 970511 - RNA, 19 nt, Artificial Sequence
  Description of Artificial Sequence: Synthetic oligonucleotide
aaacgaugaguacggaugu

SEQ ID NO: 970512 - RNA, 19 nt, Artificial Sequence
  Description of Artificial Sequence: Synthetic oligonucleotide
ucuuacauccacacaugcc

SEQ ID NO: 970513 - RNA, 19 nt, Artificial Sequence
  Description of Artificial Sequence: Synthetic oligonucleotide
ugauacaccacuucuuuaa

SEQ ID NO: 970514 - RNA, 19 nt, Artificial Sequence
  Description of Artificial Sequence: Synthetic oligonucleotide
uaagugagccacacuagcc

SEQ ID NO: 970515 - RNA, 19 nt, Artificial Sequence
  Description of Artificial Sequence: Synthetic oligonucleotide
agcgcuugccaccauuucc

SEQ ID NO: 970516 - RNA, 19 nt, Artificial Sequence
  Description of Artificial Sequence: Synthetic oligonucleotide
aaaucauaccaaggaaauc

SEQ ID NO: 970517 - RNA, 19 nt, Artificial Sequence
  Description of Artificial Sequence: Synthetic oligonucleotide
caugacuugaccuuaauua

SEQ ID NO: 970518 - RNA, 19 nt, Artificial Sequence
  Description of Artificial Sequence: Synthetic oligonucleotide
aacagcccaaaucauugug

SEQ ID NO: 970519 - RNA, 19 nt, Artificial Sequence
  Description of Artificial Sequence: Synthetic oligonucleotide
auuuccuuaugccccugcc

SEQ ID NO: 970520 - RNA, 19 nt, Artificial Sequence
  Description of Artificial Sequence: Synthetic oligonucleotide
aagugagccacacuagccu

SEQ ID NO: 970521 - RNA, 19 nt, Artificial Sequence
  Description of Artificial Sequence: Synthetic oligonucleotide
aauuuugagccaucuguaa

SEQ ID NO: 970522 - RNA, 19 nt, Artificial Sequence
  Description of Artificial Sequence: Synthetic oligonucleotide
ucauacauuuuauuucaac

SEQ ID NO: 970523 - RNA, 19 nt, Artificial Sequence
  Description of Artificial Sequence: Synthetic oligonucleotide
acuguauggucuaucaaac

SEQ ID NO: 970524 - RNA, 19 nt, Artificial Sequence
  Description of Artificial Sequence: Synthetic oligonucleotide
ugggcaauuacagaccucc

SEQ ID NO: 970525 - RNA, 19 nt, Artificial Sequence
  Description of Artificial Sequence: Synthetic oligonucleotide
uaagcuugaacagcagccg

SEQ ID NO: 970526 - RNA, 19 nt, Artificial Sequence
  Description of Artificial Sequence: Synthetic oligonucleotide
auuacagaccucccgaagu

SEQ ID NO: 970527 - RNA, 19 nt, Artificial Sequence
  Description of Artificial Sequence: Synthetic oligonucleotide
acguuuguagguaaacacc

SEQ ID NO: 970528 - RNA, 19 nt, Artificial Sequence
  Description of Artificial Sequence: Synthetic oligonucleotide
uguguuagguccccaaccu

SEQ ID NO: 970529 - RNA, 19 nt, Artificial Sequence
  Description of Artificial Sequence: Synthetic oligonucleotide
uuauucuauggacauuuuc

SEQ ID NO: 970530 - RNA, 19 nt, Artificial Sequence
  Description of Artificial Sequence: Synthetic oligonucleotide
ucgacagccauucuggcaa

SEQ ID NO: 970531 - RNA, 19 nt, Artificial Sequence
  Description of Artificial Sequence: Synthetic oligonucleotide
gaaaagaaucaccccacac

SEQ ID NO: 970532 - RNA, 19 nt, Artificial Sequence
  Description of Artificial Sequence: Synthetic oligonucleotide
ugucagugguaucuguucc

SEQ ID NO: 970533 - RNA, 19 nt, Artificial Sequence
  Description of Artificial Sequence: Synthetic oligonucleotide
ucucaaggcacacugcagu

SEQ ID NO: 970534 - RNA, 19 nt, Artificial Sequence
  Description of Artificial Sequence: Synthetic oligonucleotide
gugaguaucgguuacacua

SEQ ID NO: 970535 - RNA, 19 nt, Artificial Sequence
  Description of Artificial Sequence: Synthetic oligonucleotide
aggguaaccgugaagacuc

SEQ ID NO: 970536 - RNA, 19 nt, Artificial Sequence
  Description of Artificial Sequence: Synthetic oligonucleotide
uaggacaugggguuauaag

SEQ ID NO: 970537 - RNA, 19 nt, Artificial Sequence
  Description of Artificial Sequence: Synthetic oligonucleotide
uuguccguuuggaagaaca

SEQ ID NO: 970538 - RNA, 19 nt, Artificial Sequence
  Description of Artificial Sequence: Synthetic oligonucleotide
uugaccuuaauuaucccuu

SEQ ID NO: 970539 - RNA, 19 nt, Artificial Sequence
  Description of Artificial Sequence: Synthetic oligonucleotide
ucgguuacacuauucaaaa

SEQ ID NO: 970540 - RNA, 19 nt, Artificial Sequence
  Description of Artificial Sequence: Synthetic oligonucleotide
gaugaguacggauguauuc

SEQ ID NO: 970541 - RNA, 19 nt, Artificial Sequence
  Description of Artificial Sequence: Synthetic oligonucleotide
acuauucaaaagcccagug

SEQ ID NO: 970542 - RNA, 19 nt, Artificial Sequence
  Description of Artificial Sequence: Synthetic oligonucleotide
gucucauacauuuuauuuc

SEQ ID NO: 970543 - RNA, 19 nt, Artificial Sequence
  Description of Artificial Sequence: Synthetic oligonucleotide
guaguaaggucaccgaaug

SEQ ID NO: 970544 - RNA, 19 nt, Artificial Sequence
  Description of Artificial Sequence: Synthetic oligonucleotide
gaagaacaaaggcauuuac

SEQ ID NO: 970545 - RNA, 19 nt, Artificial Sequence
  Description of Artificial Sequence: Synthetic oligonucleotide
uuuugagccaucuguaaua

SEQ ID NO: 970546 - RNA, 19 nt, Artificial Sequence
  Description of Artificial Sequence: Synthetic oligonucleotide
accgugaagacucucagaa

SEQ ID NO: 970547 - RNA, 19 nt, Artificial Sequence
  Description of Artificial Sequence: Synthetic oligonucleotide
cuuaggguaaccgugaaga

SEQ ID NO: 970548 - RNA, 19 nt, Artificial Sequence
  Description of Artificial Sequence: Synthetic oligonucleotide
gguuauaagagcaggacug

SEQ ID NO: 970549 - RNA, 19 nt, Artificial Sequence
  Description of Artificial Sequence: Synthetic oligonucleotide
ucuugauauuuuguuacug

SEQ ID NO: 970550 - RNA, 19 nt, Artificial Sequence
  Description of Artificial Sequence: Synthetic oligonucleotide
ucauaccaaggaaauccag

SEQ ID NO: 970551 - RNA, 19 nt, Artificial Sequence
  Description of Artificial Sequence: Synthetic oligonucleotide
aguacguuuguagguaaac

SEQ ID NO: 970552 - RNA, 19 nt, Artificial Sequence
  Description of Artificial Sequence: Synthetic oligonucleotide
aaucaaccacaugaaucac

SEQ ID NO: 970553 - RNA, 19 nt, Artificial Sequence
  Description of Artificial Sequence: Synthetic oligonucleotide
acuguguuagguccccaac

SEQ ID NO: 970554 - RNA, 19 nt, Artificial Sequence
  Description of Artificial Sequence: Synthetic oligonucleotide
ugaaguguuccuuccccag

SEQ ID NO: 970555 - RNA, 19 nt, Artificial Sequence
  Description of Artificial Sequence: Synthetic oligonucleotide
acuugaccuuaauuauccc

SEQ ID NO: 970556 - RNA, 19 nt, Artificial Sequence
  Description of Artificial Sequence: Synthetic oligonucleotide
accucccgaaguuugagag

SEQ ID NO: 970557 - RNA, 19 nt, Artificial Sequence
  Description of Artificial Sequence: Synthetic oligonucleotide
caguccuucgcacuugugg

SEQ ID NO: 970558 - RNA, 19 nt, Artificial Sequence
  Description of Artificial Sequence: Synthetic oligonucleotide
aucaaccacaugaaucacc

SEQ ID NO: 970559 - RNA, 19 nt, Artificial Sequence
  Description of Artificial Sequence: Synthetic oligonucleotide
gcaagauugggauuggggc

SEQ ID NO: 970560 - RNA, 19 nt, Artificial Sequence
  Description of Artificial Sequence: Synthetic oligonucleotide
aaccgguggagaugugugg

SEQ ID NO: 970561 - RNA, 19 nt, Artificial Sequence
  Description of Artificial Sequence: Synthetic oligonucleotide
gaucucagagaucccuggg

SEQ ID NO: 970562 - RNA, 19 nt, Artificial Sequence
  Description of Artificial Sequence: Synthetic oligonucleotide
cuguaguccaauuuuguca

SEQ ID NO: 970563 - RNA, 19 nt, Artificial Sequence
  Description of Artificial Sequence: Synthetic oligonucleotide
cucgguucccgugagaagg

SEQ ID NO: 970564 - RNA, 19 nt, Artificial Sequence
  Description of Artificial Sequence: Synthetic oligonucleotide
aagauugggauuggggcug

SEQ ID NO: 970565 - RNA, 19 nt, Artificial Sequence
  Description of Artificial Sequence: Synthetic oligonucleotide
gucucguggacaaacagcc

SEQ ID NO: 970566 - RNA, 19 nt, Artificial Sequence
  Description of Artificial Sequence: Synthetic oligonucleotide
agugguaucuguuccugcu

SEQ ID NO: 970567 - RNA, 19 nt, Artificial Sequence
  Description of Artificial Sequence: Synthetic oligonucleotide
agcaucuugauauuuuguu

SEQ ID NO: 970568 - RNA, 19 nt, Artificial Sequence
  Description of Artificial Sequence: Synthetic oligonucleotide
uccucaagaaaacgcuuca

SEQ ID NO: 970569 - RNA, 19 nt, Artificial Sequence
  Description of Artificial Sequence: Synthetic oligonucleotide
aggcauuuacaucugggga

SEQ ID NO: 970570 - RNA, 19 nt, Artificial Sequence
  Description of Artificial Sequence: Synthetic oligonucleotide
uucucaaggcacacugcag

SEQ ID NO: 970571 - RNA, 19 nt, Artificial Sequence
  Description of Artificial Sequence: Synthetic oligonucleotide
aacacuuguccguuuggaa

SEQ ID NO: 970572 - RNA, 19 nt, Artificial Sequence
  Description of Artificial Sequence: Synthetic oligonucleotide
guaucgguuacacuauuca

SEQ ID NO: 970573 - RNA, 19 nt, Artificial Sequence
  Description of Artificial Sequence: Synthetic oligonucleotide
aaacagcccaaaucauugu

SEQ ID NO: 970574 - RNA, 19 nt, Artificial Sequence
  Description of Artificial Sequence: Synthetic oligonucleotide
gagaagggugugucgacag

SEQ ID NO: 970575 - RNA, 19 nt, Artificial Sequence
  Description of Artificial Sequence: Synthetic oligonucleotide
uccacacaugccuuugcag

SEQ ID NO: 970576 - RNA, 19 nt, Artificial Sequence
  Description of Artificial Sequence: Synthetic oligonucleotide
guaugagucuguccaagug

SEQ ID NO: 970577 - RNA, 19 nt, Artificial Sequence
  Description of Artificial Sequence: Synthetic oligonucleotide
gaauucacuccagagagaa

SEQ ID NO: 970578 - RNA, 19 nt, Artificial Sequence
  Description of Artificial Sequence: Synthetic oligonucleotide
caaguguucggcucgguuc

SEQ ID NO: 970579 - RNA, 19 nt, Artificial Sequence
  Description of Artificial Sequence: Synthetic oligonucleotide
agcaagauugggauugggg

SEQ ID NO: 970580 - RNA, 19 nt, Artificial Sequence
  Description of Artificial Sequence: Synthetic oligonucleotide
uuuuguuacugggaguccu

SEQ ID NO: 970581 - RNA, 19 nt, Artificial Sequence
  Description of Artificial Sequence: Synthetic oligonucleotide
cuguguuagguccccaacc

SEQ ID NO: 970582 - RNA, 19 nt, Artificial Sequence
  Description of Artificial Sequence: Synthetic oligonucleotide
auacugagcuggcucuuac

SEQ ID NO: 970583 - RNA, 19 nt, Artificial Sequence
  Description of Artificial Sequence: Synthetic oligonucleotide
ugcaguccauaaaggaagc

SEQ ID NO: 970584 - RNA, 19 nt, Artificial Sequence
  Description of Artificial Sequence: Synthetic oligonucleotide
aguccauaaaggaagcuca

SEQ ID NO: 970585 - RNA, 19 nt, Artificial Sequence
  Description of Artificial Sequence: Synthetic oligonucleotide
aacgcuucacaguaagcuu

SEQ ID NO: 970586 - RNA, 19 nt, Artificial Sequence
  Description of Artificial Sequence: Synthetic oligonucleotide
cagggaauucacuccagag

SEQ ID NO: 970587 - RNA, 19 nt, Artificial Sequence
  Description of Artificial Sequence: Synthetic oligonucleotide
ugggguuauaagagcagga

SEQ ID NO: 970588 - RNA, 19 nt, Artificial Sequence
  Description of Artificial Sequence: Synthetic oligonucleotide
uaucgguuacacuauucaa

SEQ ID NO: 970589 - RNA, 19 nt, Artificial Sequence
  Description of Artificial Sequence: Synthetic oligonucleotide
ccaauguucuacuguaugg

SEQ ID NO: 970590 - RNA, 19 nt, Artificial Sequence
  Description of Artificial Sequence: Synthetic oligonucleotide
gauacaccacuucuuuaac

SEQ ID NO: 970591 - RNA, 19 nt, Artificial Sequence
  Description of Artificial Sequence: Synthetic oligonucleotide
ugaguaucgguuacacuau

SEQ ID NO: 970592 - RNA, 19 nt, Artificial Sequence
  Description of Artificial Sequence: Synthetic oligonucleotide
ggcaauuacagaccucccg

SEQ ID NO: 970593 - RNA, 19 nt, Artificial Sequence
  Description of Artificial Sequence: Synthetic oligonucleotide
gaaauggaaguuuccaggu

SEQ ID NO: 970594 - RNA, 19 nt, Artificial Sequence
  Description of Artificial Sequence: Synthetic oligonucleotide
augaguacggauguauucu

SEQ ID NO: 970595 - RNA, 19 nt, Artificial Sequence
  Description of Artificial Sequence: Synthetic oligonucleotide
uguuuccuaacgguggugu

SEQ ID NO: 970596 - RNA, 19 nt, Artificial Sequence
  Description of Artificial Sequence: Synthetic oligonucleotide
gugucgacagccauucugg

SEQ ID NO: 970597 - RNA, 19 nt, Artificial Sequence
  Description of Artificial Sequence: Synthetic oligonucleotide
uagcccacgucucauacau

SEQ ID NO: 970598 - RNA, 19 nt, Artificial Sequence
  Description of Artificial Sequence: Synthetic oligonucleotide
acaguaagcuugaacagca

SEQ ID NO: 970599 - RNA, 19 nt, Artificial Sequence
  Description of Artificial Sequence: Synthetic oligonucleotide
aacuuugauuguaaccacu

SEQ ID NO: 970600 - RNA, 19 nt, Artificial Sequence
  Description of Artificial Sequence: Synthetic oligonucleotide
cuuguuaggaggaagcgcu

SEQ ID NO: 970601 - RNA, 19 nt, Artificial Sequence
  Description of Artificial Sequence: Synthetic oligonucleotide
cuugaacagcagccgaggg

SEQ ID NO: 970602 - RNA, 19 nt, Artificial Sequence
  Description of Artificial Sequence: Synthetic oligonucleotide
uauacaugacuugaccuua

SEQ ID NO: 970603 - RNA, 19 nt, Artificial Sequence
  Description of Artificial Sequence: Synthetic oligonucleotide
uucuauggacauuuuccuc

SEQ ID NO: 970604 - RNA, 19 nt, Artificial Sequence
  Description of Artificial Sequence: Synthetic oligonucleotide
cagcccaaaucauugugag

SEQ ID NO: 970605 - RNA, 19 nt, Artificial Sequence
  Description of Artificial Sequence: Synthetic oligonucleotide
ugggaguccuacagaaaug

SEQ ID NO: 970606 - RNA, 19 nt, Artificial Sequence
  Description of Artificial Sequence: Synthetic oligonucleotide
cagaagucugaaguguucc

SEQ ID NO: 970607 - RNA, 19 nt, Artificial Sequence
  Description of Artificial Sequence: Synthetic oligonucleotide
gagugaaauaaaacacuac

SEQ ID NO: 970608 - RNA, 19 nt, Artificial Sequence
  Description of Artificial Sequence: Synthetic oligonucleotide
caacaguuugcuccuuccg

SEQ ID NO: 970609 - RNA, 19 nt, Artificial Sequence
  Description of Artificial Sequence: Synthetic oligonucleotide
uaguccaauuuugucagcu

SEQ ID NO: 970610 - RNA, 19 nt, Artificial Sequence
  Description of Artificial Sequence: Synthetic oligonucleotide
ugacccagaagugccaagc

SEQ ID NO: 970611 - RNA, 19 nt, Artificial Sequence
  Description of Artificial Sequence: Synthetic oligonucleotide
aagcgcuugccaccauuuc

SEQ ID NO: 970612 - RNA, 19 nt, Artificial Sequence
  Description of Artificial Sequence: Synthetic oligonucleotide
acuacgaacagcaguccag

SEQ ID NO: 970613 - RNA, 19 nt, Artificial Sequence
  Description of Artificial Sequence: Synthetic oligonucleotide
uuacugggaguccuacaga

SEQ ID NO: 970614 - RNA, 19 nt, Artificial Sequence
  Description of Artificial Sequence: Synthetic oligonucleotide
gaagacucucagaaaacuc

SEQ ID NO: 970615 - RNA, 19 nt, Artificial Sequence
  Description of Artificial Sequence: Synthetic oligonucleotide
uggcaacuuaggguaaccg

SEQ ID NO: 970616 - RNA, 19 nt, Artificial Sequence
  Description of Artificial Sequence: Synthetic oligonucleotide
uacggauguauucuucaua

SEQ ID NO: 970617 - RNA, 19 nt, Artificial Sequence
  Description of Artificial Sequence: Synthetic oligonucleotide
aguaagugagccacacuag

SEQ ID NO: 970618 - RNA, 19 nt, Artificial Sequence
  Description of Artificial Sequence: Synthetic oligonucleotide
uaggguaaccgugaagacu

SEQ ID NO: 970619 - RNA, 19 nt, Artificial Sequence
  Description of Artificial Sequence: Synthetic oligonucleotide
caacuuugauuguaaccac

SEQ ID NO: 970620 - RNA, 19 nt, Artificial Sequence
  Description of Artificial Sequence: Synthetic oligonucleotide
cguuuguagguaaacaccc

SEQ ID NO: 970621 - RNA, 19 nt, Artificial Sequence
  Description of Artificial Sequence: Synthetic oligonucleotide
cacugacugacuguguuag

SEQ ID NO: 970622 - RNA, 19 nt, Artificial Sequence
  Description of Artificial Sequence: Synthetic oligonucleotide
ucaccgaaugacacugacu

SEQ ID NO: 970623 - RNA, 19 nt, Artificial Sequence
  Description of Artificial Sequence: Synthetic oligonucleotide
ucgguucccgugagaaggg

SEQ ID NO: 970624 - RNA, 19 nt, Artificial Sequence
  Description of Artificial Sequence: Synthetic oligonucleotide
caguaagugagccacacua

SEQ ID NO: 970625 - RNA, 19 nt, Artificial Sequence
  Description of Artificial Sequence: Synthetic oligonucleotide
agagcuggugaguaucggu

SEQ ID NO: 970626 - RNA, 19 nt, Artificial Sequence
  Description of Artificial Sequence: Synthetic oligonucleotide
uuacagaccucccgaaguu

SEQ ID NO: 970627 - RNA, 19 nt, Artificial Sequence
  Description of Artificial Sequence: Synthetic oligonucleotide
uucgcacuuguggacagcc

SEQ ID NO: 970628 - RNA, 19 nt, Artificial Sequence
  Description of Artificial Sequence: Synthetic oligonucleotide
uguggaaacucagggcagc

SEQ ID NO: 970629 - RNA, 19 nt, Artificial Sequence
  Description of Artificial Sequence: Synthetic oligonucleotide
uguccguuuggaagaacaa

SEQ ID NO: 970630 - RNA, 19 nt, Artificial Sequence
  Description of Artificial Sequence: Synthetic oligonucleotide
ucacagggcucacuuccag

SEQ ID NO: 970631 - RNA, 19 nt, Artificial Sequence
  Description of Artificial Sequence: Synthetic oligonucleotide
uuugagccaucuguaauau

SEQ ID NO: 970632 - RNA, 19 nt, Artificial Sequence
  Description of Artificial Sequence: Synthetic oligonucleotide
ugcauuguguuagaugaua

SEQ ID NO: 970633 - RNA, 19 nt, Artificial Sequence
  Description of Artificial Sequence: Synthetic oligonucleotide
caaacauauacuccugcaa

SEQ ID NO: 970634 - RNA, 19 nt, Artificial Sequence
  Description of Artificial Sequence: Synthetic oligonucleotide
uguuacugggaguccuaca

SEQ ID NO: 970635 - RNA, 19 nt, Artificial Sequence
  Description of Artificial Sequence: Synthetic oligonucleotide
gaugauacaccacuucuuu

SEQ ID NO: 970636 - RNA, 19 nt, Artificial Sequence
  Description of Artificial Sequence: Synthetic oligonucleotide
uuuauucuauggacauuuu

SEQ ID NO: 970637 - RNA, 19 nt, Artificial Sequence
  Description of Artificial Sequence: Synthetic oligonucleotide
cauuguguuagaugauaca

SEQ ID NO: 970638 - RNA, 19 nt, Artificial Sequence
  Description of Artificial Sequence: Synthetic oligonucleotide
auuucaugaaagauacgaa

SEQ ID NO: 970639 - RNA, 19 nt, Artificial Sequence
  Description of Artificial Sequence: Synthetic oligonucleotide
aucgguuacacuauucaaa

SEQ ID NO: 970640 - RNA, 19 nt, Artificial Sequence
  Description of Artificial Sequence: Synthetic oligonucleotide
acaugacuugaccuuaauu

SEQ ID NO: 970641 - RNA, 19 nt, Artificial Sequence
  Description of Artificial Sequence: Synthetic oligonucleotide
aauggggagagcugccguu

SEQ ID NO: 970642 - RNA, 19 nt, Artificial Sequence
  Description of Artificial Sequence: Synthetic oligonucleotide
acacuacgaacagcagucc

SEQ ID NO: 970643 - RNA, 19 nt, Artificial Sequence
  Description of Artificial Sequence: Synthetic oligonucleotide
cgcaugugcaaucucaugg

SEQ ID NO: 970644 - RNA, 19 nt, Artificial Sequence
  Description of Artificial Sequence: Synthetic oligonucleotide
uccucauuguaaguauugu

SEQ ID NO: 970645 - RNA, 19 nt, Artificial Sequence
  Description of Artificial Sequence: Synthetic oligonucleotide
aacuuaggguaaccgugaa

SEQ ID NO: 970646 - RNA, 19 nt, Artificial Sequence
  Description of Artificial Sequence: Synthetic oligonucleotide
cccaguaacaacaguuugc

SEQ ID NO: 970647 - RNA, 19 nt, Artificial Sequence
  Description of Artificial Sequence: Synthetic oligonucleotide
agguaguaaggucaccgaa

SEQ ID NO: 970648 - RNA, 19 nt, Artificial Sequence
  Description of Artificial Sequence: Synthetic oligonucleotide
ucaggcagcaugucguuuu

SEQ ID NO: 970649 - RNA, 19 nt, Artificial Sequence
  Description of Artificial Sequence: Synthetic oligonucleotide
cuaacggugguguuuaggu

SEQ ID NO: 970650 - RNA, 19 nt, Artificial Sequence
  Description of Artificial Sequence: Synthetic oligonucleotide
acugacugacuguguuagg

SEQ ID NO: 970651 - RNA, 19 nt, Artificial Sequence
  Description of Artificial Sequence: Synthetic oligonucleotide
uccgccuccaauguucuac

SEQ ID NO: 970652 - RNA, 19 nt, Artificial Sequence
  Description of Artificial Sequence: Synthetic oligonucleotide
cauucuggcaacuuagggu

SEQ ID NO: 970653 - RNA, 19 nt, Artificial Sequence
  Description of Artificial Sequence: Synthetic oligonucleotide
caguccauaaaggaagcuc

SEQ ID NO: 970654 - RNA, 19 nt, Artificial Sequence
  Description of Artificial Sequence: Synthetic oligonucleotide
uuauaagagcaggacuguc

SEQ ID NO: 970655 - RNA, 19 nt, Artificial Sequence
  Description of Artificial Sequence: Synthetic oligonucleotide
uucggcucgguucccguga

SEQ ID NO: 970656 - RNA, 19 nt, Artificial Sequence
  Description of Artificial Sequence: Synthetic oligonucleotide
gcaauuacagaccucccga

SEQ ID NO: 970657 - RNA, 19 nt, Artificial Sequence
  Description of Artificial Sequence: Synthetic oligonucleotide
agccauucuggcaacuuag

SEQ ID NO: 970658 - RNA, 19 nt, Artificial Sequence
  Description of Artificial Sequence: Synthetic oligonucleotide
gcaacuuaggguaaccgug

SEQ ID NO: 970659 - RNA, 19 nt, Artificial Sequence
  Description of Artificial Sequence: Synthetic oligonucleotide
caucuguaauauacaugac

SEQ ID NO: 970660 - RNA, 19 nt, Artificial Sequence
  Description of Artificial Sequence: Synthetic oligonucleotide
cacuuguccguuuggaaga

SEQ ID NO: 970661 - RNA, 19 nt, Artificial Sequence
  Description of Artificial Sequence: Synthetic oligonucleotide
guuuguagguaaacacccc

SEQ ID NO: 970662 - RNA, 19 nt, Artificial Sequence
  Description of Artificial Sequence: Synthetic oligonucleotide
ucaccacuccaguccuucg

SEQ ID NO: 970663 - RNA, 19 nt, Artificial Sequence
  Description of Artificial Sequence: Synthetic oligonucleotide
cucacuuccaggugaguga

SEQ ID NO: 970664 - RNA, 19 nt, Artificial Sequence
  Description of Artificial Sequence: Synthetic oligonucleotide
ugguguuuagguccucuuu

SEQ ID NO: 970665 - RNA, 19 nt, Artificial Sequence
  Description of Artificial Sequence: Synthetic oligonucleotide
cauaccaaggaaauccagu

SEQ ID NO: 970666 - RNA, 19 nt, Artificial Sequence
  Description of Artificial Sequence: Synthetic oligonucleotide
ugaguacggauguauucuu

SEQ ID NO: 970667 - RNA, 19 nt, Artificial Sequence
  Description of Artificial Sequence: Synthetic oligonucleotide
caaccugcauucaccacuc

SEQ ID NO: 970668 - RNA, 19 nt, Artificial Sequence
  Description of Artificial Sequence: Synthetic oligonucleotide
ugucgacagccauucuggc

SEQ ID NO: 970669 - RNA, 19 nt, Artificial Sequence
  Description of Artificial Sequence: Synthetic oligonucleotide
cuugaccuuaauuaucccu

SEQ ID NO: 970670 - RNA, 19 nt, Artificial Sequence
  Description of Artificial Sequence: Synthetic oligonucleotide
cugaauggggagagcugcc

SEQ ID NO: 970671 - RNA, 19 nt, Artificial Sequence
  Description of Artificial Sequence: Synthetic oligonucleotide
cuuucaggcagcaugucgu

SEQ ID NO: 970672 - RNA, 19 nt, Artificial Sequence
  Description of Artificial Sequence: Synthetic oligonucleotide
uggugaguaucgguuacac

SEQ ID NO: 970673 - RNA, 19 nt, Artificial Sequence
  Description of Artificial Sequence: Synthetic oligonucleotide
uauguaugucagugguauc

SEQ ID NO: 970674 - RNA, 19 nt, Artificial Sequence
  Description of Artificial Sequence: Synthetic oligonucleotide
caacuuaggguaaccguga

SEQ ID NO: 970675 - RNA, 19 nt, Artificial Sequence
  Description of Artificial Sequence: Synthetic oligonucleotide
uaacggugguguuuagguc

SEQ ID NO: 970676 - RNA, 19 nt, Artificial Sequence
  Description of Artificial Sequence: Synthetic oligonucleotide
uuauuucaacuuguaguuu

SEQ ID NO: 970677 - RNA, 19 nt, Artificial Sequence
  Description of Artificial Sequence: Synthetic oligonucleotide
agagcggugggcaauuaca

SEQ ID NO: 970678 - RNA, 19 nt, Artificial Sequence
  Description of Artificial Sequence: Synthetic oligonucleotide
uccuacagaaauggaaguu

SEQ ID NO: 970679 - RNA, 19 nt, Artificial Sequence
  Description of Artificial Sequence: Synthetic oligonucleotide
ccagguaguaaggucaccg

SEQ ID NO: 970680 - RNA, 19 nt, Artificial Sequence
  Description of Artificial Sequence: Synthetic oligonucleotide
uccauaaaggaagcucauc

SEQ ID NO: 970681 - RNA, 19 nt, Artificial Sequence
  Description of Artificial Sequence: Synthetic oligonucleotide
acaguacguuuguagguaa

SEQ ID NO: 970682 - RNA, 19 nt, Artificial Sequence
  Description of Artificial Sequence: Synthetic oligonucleotide
gucaccgaaugacacugac

SEQ ID NO: 970683 - RNA, 19 nt, Artificial Sequence
  Description of Artificial Sequence: Synthetic oligonucleotide
ugagaagcaucuugauauu

SEQ ID NO: 970684 - RNA, 19 nt, Artificial Sequence
  Description of Artificial Sequence: Synthetic oligonucleotide
guaaccgugaagacucuca

SEQ ID NO: 970685 - RNA, 19 nt, Artificial Sequence
  Description of Artificial Sequence: Synthetic oligonucleotide
gcccaaaucauugugagaa

SEQ ID NO: 970686 - RNA, 19 nt, Artificial Sequence
  Description of Artificial Sequence: Synthetic oligonucleotide
aucauaccaaggaaaucca

SEQ ID NO: 970687 - RNA, 19 nt, Artificial Sequence
  Description of Artificial Sequence: Synthetic oligonucleotide
ugaccuuaauuaucccuuu

SEQ ID NO: 970688 - RNA, 19 nt, Artificial Sequence
  Description of Artificial Sequence: Synthetic oligonucleotide
gugagugaaauaaaacacu

SEQ ID NO: 970689 - RNA, 19 nt, Artificial Sequence
  Description of Artificial Sequence: Synthetic oligonucleotide
acagcccaaaucauuguga

SEQ ID NO: 970690 - RNA, 19 nt, Artificial Sequence
  Description of Artificial Sequence: Synthetic oligonucleotide
uccuucgcacuuguggaca

SEQ ID NO: 970691 - RNA, 19 nt, Artificial Sequence
  Description of Artificial Sequence: Synthetic oligonucleotide
uacaugacuugaccuuaau

SEQ ID NO: 970692 - RNA, 19 nt, Artificial Sequence
  Description of Artificial Sequence: Synthetic oligonucleotide
augauacaccacuucuuua

SEQ ID NO: 970693 - RNA, 19 nt, Artificial Sequence
  Description of Artificial Sequence: Synthetic oligonucleotide
guaaggucaccgaaugaca

SEQ ID NO: 970694 - RNA, 19 nt, Artificial Sequence
  Description of Artificial Sequence: Synthetic oligonucleotide
acgaugaguacggauguau

SEQ ID NO: 970695 - RNA, 19 nt, Artificial Sequence
  Description of Artificial Sequence: Synthetic oligonucleotide
uuccuaacggugguguuua

SEQ ID NO: 970696 - RNA, 19 nt, Artificial Sequence
  Description of Artificial Sequence: Synthetic oligonucleotide
uuguuacugggaguccuac

SEQ ID NO: 970697 - RNA, 19 nt, Artificial Sequence
  Description of Artificial Sequence: Synthetic oligonucleotide
acgguuucucaaggcacac

SEQ ID NO: 970698 - RNA, 19 nt, Artificial Sequence
  Description of Artificial Sequence: Synthetic oligonucleotide
agauugggauuggggcugc

SEQ ID NO: 970699 - RNA, 19 nt, Artificial Sequence
  Description of Artificial Sequence: Synthetic oligonucleotide
aauacugagcuggcucuua

SEQ ID NO: 970700 - RNA, 19 nt, Artificial Sequence
  Description of Artificial Sequence: Synthetic oligonucleotide
ggcucuuacauccacacau

SEQ ID NO: 970701 - RNA, 19 nt, Artificial Sequence
  Description of Artificial Sequence: Synthetic oligonucleotide
uugcauuguguuagaugau

SEQ ID NO: 970702 - RNA, 19 nt, Artificial Sequence
  Description of Artificial Sequence: Synthetic oligonucleotide
cuguauggucuaucaaaca

SEQ ID NO: 970703 - RNA, 19 nt, Artificial Sequence
  Description of Artificial Sequence: Synthetic oligonucleotide
gaucccugggacauccuga

SEQ ID NO: 970704 - RNA, 19 nt, Artificial Sequence
  Description of Artificial Sequence: Synthetic oligonucleotide
agcccaaaucauugugaga

SEQ ID NO: 970705 - RNA, 19 nt, Artificial Sequence
  Description of Artificial Sequence: Synthetic oligonucleotide
aguccaauuuugucagcuu

SEQ ID NO: 970706 - RNA, 19 nt, Artificial Sequence
  Description of Artificial Sequence: Synthetic oligonucleotide
guauggucuaucaaacaua

SEQ ID NO: 970707 - RNA, 19 nt, Artificial Sequence
  Description of Artificial Sequence: Synthetic oligonucleotide
agcggugggcaauuacaga

SEQ ID NO: 970708 - RNA, 19 nt, Artificial Sequence
  Description of Artificial Sequence: Synthetic oligonucleotide
agaugauacaccacuucuu

SEQ ID NO: 970709 - RNA, 19 nt, Artificial Sequence
  Description of Artificial Sequence: Synthetic oligonucleotide
guaguccaauuuugucagc

SEQ ID NO: 970710 - RNA, 19 nt, Artificial Sequence
  Description of Artificial Sequence: Synthetic oligonucleotide
uccugcaacuuugauugua

SEQ ID NO: 970711 - RNA, 19 nt, Artificial Sequence
  Description of Artificial Sequence: Synthetic oligonucleotide
gaaucaccccacacaguac

SEQ ID NO: 970712 - RNA, 19 nt, Artificial Sequence
  Description of Artificial Sequence: Synthetic oligonucleotide
gucgacagccauucuggca

SEQ ID NO: 970713 - RNA, 19 nt, Artificial Sequence
  Description of Artificial Sequence: Synthetic oligonucleotide
gccacacuagccuuuucug

SEQ ID NO: 970714 - RNA, 19 nt, Artificial Sequence
  Description of Artificial Sequence: Synthetic oligonucleotide
gugagaagggugugucgac

SEQ ID NO: 970715 - RNA, 19 nt, Artificial Sequence
  Description of Artificial Sequence: Synthetic oligonucleotide
gacuguguuagguccccaa

SEQ ID NO: 970716 - RNA, 19 nt, Artificial Sequence
  Description of Artificial Sequence: Synthetic oligonucleotide
gggguuauaagagcaggac

SEQ ID NO: 970717 - RNA, 19 nt, Artificial Sequence
  Description of Artificial Sequence: Synthetic oligonucleotide
cuggcaacuuaggguaacc

SEQ ID NO: 970718 - RNA, 19 nt, Artificial Sequence
  Description of Artificial Sequence: Synthetic oligonucleotide
ucaccgaagggcagcucau

SEQ ID NO: 970719 - RNA, 19 nt, Artificial Sequence
  Description of Artificial Sequence: Synthetic oligonucleotide
ucacccaguugaucucaga

SEQ ID NO: 970720 - RNA, 19 nt, Artificial Sequence
  Description of Artificial Sequence: Synthetic oligonucleotide
caauuacagaccucccgaa

SEQ ID NO: 970721 - RNA, 19 nt, Artificial Sequence
  Description of Artificial Sequence: Synthetic oligonucleotide
ucggcucgguucccgugag

SEQ ID NO: 970722 - RNA, 19 nt, Artificial Sequence
  Description of Artificial Sequence: Synthetic oligonucleotide
caguaacaacaguuugcuc

SEQ ID NO: 970723 - RNA, 19 nt, Artificial Sequence
  Description of Artificial Sequence: Synthetic oligonucleotide
ggugugucgacagccauuc

SEQ ID NO: 970724 - RNA, 19 nt, Artificial Sequence
  Description of Artificial Sequence: Synthetic oligonucleotide
ggagauguguggaaacuca

SEQ ID NO: 970725 - RNA, 19 nt, Artificial Sequence
  Description of Artificial Sequence: Synthetic oligonucleotide
gcauuguguuagaugauac

SEQ ID NO: 970726 - RNA, 19 nt, Artificial Sequence
  Description of Artificial Sequence: Synthetic oligonucleotide
aagugccaagcugucucgu

SEQ ID NO: 970727 - RNA, 19 nt, Artificial Sequence
  Description of Artificial Sequence: Synthetic oligonucleotide
gaccucccgaaguuugaga

SEQ ID NO: 970728 - RNA, 19 nt, Artificial Sequence
  Description of Artificial Sequence: Synthetic oligonucleotide
accgguggagaugugugga

SEQ ID NO: 970729 - RNA, 19 nt, Artificial Sequence
  Description of Artificial Sequence: Synthetic oligonucleotide
cagguaguaaggucaccga

SEQ ID NO: 970730 - RNA, 19 nt, Artificial Sequence
  Description of Artificial Sequence: Synthetic oligonucleotide
cuacgaacagcaguccaga

SEQ ID NO: 970731 - RNA, 19 nt, Artificial Sequence
  Description of Artificial Sequence: Synthetic oligonucleotide
gcucacuuccaggugagug

SEQ ID NO: 970732 - RNA, 19 nt, Artificial Sequence
  Description of Artificial Sequence: Synthetic oligonucleotide
cacuacgaacagcagucca

SEQ ID NO: 970733 - RNA, 19 nt, Artificial Sequence
  Description of Artificial Sequence: Synthetic oligonucleotide
guccuucgcacuuguggac

SEQ ID NO: 970734 - RNA, 19 nt, Artificial Sequence
  Description of Artificial Sequence: Synthetic oligonucleotide
guuauaagagcaggacugu

SEQ ID NO: 970735 - RNA, 19 nt, Artificial Sequence
  Description of Artificial Sequence: Synthetic oligonucleotide
cucauacauuuuauuucaa

SEQ ID NO: 970736 - RNA, 19 nt, Artificial Sequence
  Description of Artificial Sequence: Synthetic oligonucleotide
ggguuauaagagcaggacu

SEQ ID NO: 970737 - RNA, 19 nt, Artificial Sequence
  Description of Artificial Sequence: Synthetic oligonucleotide
uccagguaguaaggucacc

SEQ ID NO: 970738 - RNA, 19 nt, Artificial Sequence
  Description of Artificial Sequence: Synthetic oligonucleotide
uccuaacggugguguuuag

SEQ ID NO: 970739 - RNA, 19 nt, Artificial Sequence
  Description of Artificial Sequence: Synthetic oligonucleotide
cauaaaggaagcucaucuu

SEQ ID NO: 970740 - RNA, 19 nt, Artificial Sequence
  Description of Artificial Sequence: Synthetic oligonucleotide
guguuagaugauacaccac

SEQ ID NO: 970741 - RNA, 19 nt, Artificial Sequence
  Description of Artificial Sequence: Synthetic oligonucleotide
cuacuguauggucuaucaa

SEQ ID NO: 970742 - RNA, 19 nt, Artificial Sequence
  Description of Artificial Sequence: Synthetic oligonucleotide
aacgaugaguacggaugua

SEQ ID NO: 970743 - RNA, 19 nt, Artificial Sequence
  Description of Artificial Sequence: Synthetic oligonucleotide
cagcaagauugggauuggg

SEQ ID NO: 970744 - RNA, 19 nt, Artificial Sequence
  Description of Artificial Sequence: Synthetic oligonucleotide
ccugggacauccugauugc

SEQ ID NO: 970745 - RNA, 19 nt, Artificial Sequence
  Description of Artificial Sequence: Synthetic oligonucleotide
gcuggugaguaucgguuac

SEQ ID NO: 970746 - RNA, 19 nt, Artificial Sequence
  Description of Artificial Sequence: Synthetic oligonucleotide
ggucuaucaaacauauacu

SEQ ID NO: 970747 - RNA, 19 nt, Artificial Sequence
  Description of Artificial Sequence: Synthetic oligonucleotide
guuagguccccaaccugca

SEQ ID NO: 970748 - RNA, 19 nt, Artificial Sequence
  Description of Artificial Sequence: Synthetic oligonucleotide
gcagcgugccccaggaccg

SEQ ID NO: 970749 - RNA, 19 nt, Artificial Sequence
  Description of Artificial Sequence: Synthetic oligonucleotide
uugagccaucuguaauaua

SEQ ID NO: 970750 - RNA, 19 nt, Artificial Sequence
  Description of Artificial Sequence: Synthetic oligonucleotide
cacaguacguuuguaggua

SEQ ID NO: 970751 - RNA, 19 nt, Artificial Sequence
  Description of Artificial Sequence: Synthetic oligonucleotide
guccguuuggaagaacaaa

SEQ ID NO: 970752 - RNA, 19 nt, Artificial Sequence
  Description of Artificial Sequence: Synthetic oligonucleotide
agaaaacgcuucacaguaa

SEQ ID NO: 970753 - RNA, 19 nt, Artificial Sequence
  Description of Artificial Sequence: Synthetic oligonucleotide
guuugagagccugugguau

SEQ ID NO: 970754 - RNA, 19 nt, Artificial Sequence
  Description of Artificial Sequence: Synthetic oligonucleotide
guucggcucgguucccgug

SEQ ID NO: 970755 - RNA, 19 nt, Artificial Sequence
  Description of Artificial Sequence: Synthetic oligonucleotide
cugacugacuguguuaggu

SEQ ID NO: 970756 - RNA, 19 nt, Artificial Sequence
  Description of Artificial Sequence: Synthetic oligonucleotide
caggaccgcaugugcaauc

SEQ ID NO: 970757 - RNA, 19 nt, Artificial Sequence
  Description of Artificial Sequence: Synthetic oligonucleotide
ccuaacggugguguuuagg

SEQ ID NO: 970758 - RNA, 19 nt, Artificial Sequence
  Description of Artificial Sequence: Synthetic oligonucleotide
ggcaacuuaggguaaccgu

SEQ ID NO: 970759 - RNA, 19 nt, Artificial Sequence
  Description of Artificial Sequence: Synthetic oligonucleotide
uucccgugagaagggugug

SEQ ID NO: 970760 - RNA, 19 nt, Artificial Sequence
  Description of Artificial Sequence: Synthetic oligonucleotide
guccaaguguucggcucgg

SEQ ID NO: 970761 - RNA, 19 nt, Artificial Sequence
  Description of Artificial Sequence: Synthetic oligonucleotide
acugacccagaagugccaa

SEQ ID NO: 970762 - RNA, 19 nt, Artificial Sequence
  Description of Artificial Sequence: Synthetic oligonucleotide
cuggggaaucaaccacaug

SEQ ID NO: 970763 - RNA, 19 nt, Artificial Sequence
  Description of Artificial Sequence: Synthetic oligonucleotide
gucagugguaucuguuccu

SEQ ID NO: 970764 - RNA, 19 nt, Artificial Sequence
  Description of Artificial Sequence: Synthetic oligonucleotide
auacaugacuugaccuuaa

SEQ ID NO: 970765 - RNA, 19 nt, Artificial Sequence
  Description of Artificial Sequence: Synthetic oligonucleotide
ccccaguaacaacaguuug

SEQ ID NO: 970766 - RNA, 19 nt, Artificial Sequence
  Description of Artificial Sequence: Synthetic oligonucleotide
cuguuuccuaacgguggug

SEQ ID NO: 970767 - RNA, 19 nt, Artificial Sequence
  Description of Artificial Sequence: Synthetic oligonucleotide
ggugggcaauuacagaccu

SEQ ID NO: 970768 - RNA, 19 nt, Artificial Sequence
  Description of Artificial Sequence: Synthetic oligonucleotide
ucccgugagaagggugugu

SEQ ID NO: 970769 - RNA, 19 nt, Artificial Sequence
  Description of Artificial Sequence: Synthetic oligonucleotide
gcuuccgccuccaauguuc

SEQ ID NO: 970770 - RNA, 19 nt, Artificial Sequence
  Description of Artificial Sequence: Synthetic oligonucleotide
guucccgugagaagggugu

SEQ ID NO: 970771 - RNA, 19 nt, Artificial Sequence
  Description of Artificial Sequence: Synthetic oligonucleotide
ccguuuucuguuuccuaac

SEQ ID NO: 970772 - RNA, 19 nt, Artificial Sequence
  Description of Artificial Sequence: Synthetic oligonucleotide
caguccagaggcacucaga

SEQ ID NO: 970773 - RNA, 19 nt, Artificial Sequence
  Description of Artificial Sequence: Synthetic oligonucleotide
ugauggcaaggagcuucug

SEQ ID NO: 970774 - RNA, 19 nt, Artificial Sequence
  Description of Artificial Sequence: Synthetic oligonucleotide
gacagaagucugaaguguu

SEQ ID NO: 970775 - RNA, 19 nt, Artificial Sequence
  Description of Artificial Sequence: Synthetic oligonucleotide
uggggagagcugccguuuu

SEQ ID NO: 970776 - RNA, 19 nt, Artificial Sequence
  Description of Artificial Sequence: Synthetic oligonucleotide
cuucgcacuuguggacagc

SEQ ID NO: 970777 - RNA, 19 nt, Artificial Sequence
  Description of Artificial Sequence: Synthetic oligonucleotide
acuuguccguuuggaagaa

SEQ ID NO: 970778 - RNA, 19 nt, Artificial Sequence
  Description of Artificial Sequence: Synthetic oligonucleotide
cuuguccguuuggaagaac

SEQ ID NO: 970779 - RNA, 19 nt, Artificial Sequence
  Description of Artificial Sequence: Synthetic oligonucleotide
cagaccucccgaaguuuga

SEQ ID NO: 970780 - RNA, 19 nt, Artificial Sequence
  Description of Artificial Sequence: Synthetic oligonucleotide
caguacguuuguagguaaa

SEQ ID NO: 970781 - RNA, 19 nt, Artificial Sequence
  Description of Artificial Sequence: Synthetic oligonucleotide
ccuggcuuugggaauuuga

SEQ ID NO: 970782 - RNA, 19 nt, Artificial Sequence
  Description of Artificial Sequence: Synthetic oligonucleotide
gaccuuaauuaucccuuuu

SEQ ID NO: 970783 - RNA, 19 nt, Artificial Sequence
  Description of Artificial Sequence: Synthetic oligonucleotide
caugaaucacccaguugau

SEQ ID NO: 970784 - RNA, 19 nt, Artificial Sequence
  Description of Artificial Sequence: Synthetic oligonucleotide
gcagcaagauugggauugg

SEQ ID NO: 970785 - RNA, 19 nt, Artificial Sequence
  Description of Artificial Sequence: Synthetic oligonucleotide
ccgugagaagggugugucg

SEQ ID NO: 970786 - RNA, 19 nt, Artificial Sequence
  Description of Artificial Sequence: Synthetic oligonucleotide
gguccagagagcggugggc

SEQ ID NO: 970787 - RNA, 19 nt, Artificial Sequence
  Description of Artificial Sequence: Synthetic oligonucleotide
gguaguaaggucaccgaau

SEQ ID NO: 970788 - RNA, 19 nt, Artificial Sequence
  Description of Artificial Sequence: Synthetic oligonucleotide
cacgucucauacauuuuau

SEQ ID NO: 970789 - RNA, 19 nt, Artificial Sequence
  Description of Artificial Sequence: Synthetic oligonucleotide
ccuucgcacuuguggacag

SEQ ID NO: 970790 - RNA, 19 nt, Artificial Sequence
  Description of Artificial Sequence: Synthetic oligonucleotide
ggggaaucaaccacaugaa

SEQ ID NO: 970791 - RNA, 19 nt, Artificial Sequence
  Description of Artificial Sequence: Synthetic oligonucleotide
cagccgagggucuggucca

SEQ ID NO: 970792 - RNA, 19 nt, Artificial Sequence
  Description of Artificial Sequence: Synthetic oligonucleotide
ccucaagaaaacgcuucac

SEQ ID NO: 970793 - RNA, 19 nt, Artificial Sequence
  Description of Artificial Sequence: Synthetic oligonucleotide
cuuaugccccugcccacaa

SEQ ID NO: 970794 - RNA, 19 nt, Artificial Sequence
  Description of Artificial Sequence: Synthetic oligonucleotide
cgguuacacuauucaaaag

SEQ ID NO: 970795 - RNA, 19 nt, Artificial Sequence
  Description of Artificial Sequence: Synthetic oligonucleotide
auggggagagcugccguuu

SEQ ID NO: 970796 - RNA, 19 nt, Artificial Sequence
  Description of Artificial Sequence: Synthetic oligonucleotide
cuggugaguaucgguuaca

SEQ ID NO: 970797 - RNA, 19 nt, Artificial Sequence
  Description of Artificial Sequence: Synthetic oligonucleotide
uccaaguguucggcucggu

SEQ ID NO: 970798 - RNA, 19 nt, Artificial Sequence
  Description of Artificial Sequence: Synthetic oligonucleotide
gaagcgcuugccaccauuu

SEQ ID NO: 970799 - RNA, 19 nt, Artificial Sequence
  Description of Artificial Sequence: Synthetic oligonucleotide
gaguaucgguuacacuauu

SEQ ID NO: 970800 - RNA, 19 nt, Artificial Sequence
  Description of Artificial Sequence: Synthetic oligonucleotide
gguaaccgugaagacucuc

SEQ ID NO: 970801 - RNA, 19 nt, Artificial Sequence
  Description of Artificial Sequence: Synthetic oligonucleotide
ucccugggacauccugauu

SEQ ID NO: 970802 - RNA, 19 nt, Artificial Sequence
  Description of Artificial Sequence: Synthetic oligonucleotide
gccuccaauguucuacugu

SEQ ID NO: 970803 - RNA, 19 nt, Artificial Sequence
  Description of Artificial Sequence: Synthetic oligonucleotide
cuuccgccuccaauguucu

SEQ ID NO: 970804 - RNA, 19 nt, Artificial Sequence
  Description of Artificial Sequence: Synthetic oligonucleotide
gggcaauuacagaccuccc

SEQ ID NO: 970805 - RNA, 19 nt, Artificial Sequence
  Description of Artificial Sequence: Synthetic oligonucleotide
cugaaccgguggagaugug

SEQ ID NO: 970806 - RNA, 19 nt, Artificial Sequence
  Description of Artificial Sequence: Synthetic oligonucleotide
ccacgucucauacauuuua

SEQ ID NO: 970807 - RNA, 19 nt, Artificial Sequence
  Description of Artificial Sequence: Synthetic oligonucleotide
gcccacgucucauacauuu

SEQ ID NO: 970808 - RNA, 19 nt, Artificial Sequence
  Description of Artificial Sequence: Synthetic oligonucleotide
guuuccuaacggugguguu

SEQ ID NO: 970809 - RNA, 19 nt, Artificial Sequence
  Description of Artificial Sequence: Synthetic oligonucleotide
gcugucucguggacaaaca

SEQ ID NO: 970810 - RNA, 19 nt, Artificial Sequence
  Description of Artificial Sequence: Synthetic oligonucleotide
cugggacauccugauugca

SEQ ID NO: 970811 - RNA, 19 nt, Artificial Sequence
  Description of Artificial Sequence: Synthetic oligonucleotide
ucucaccgaagggcagcuc

SEQ ID NO: 970812 - RNA, 19 nt, Artificial Sequence
  Description of Artificial Sequence: Synthetic oligonucleotide
gccugaaccgguggagaug

SEQ ID NO: 970813 - RNA, 19 nt, Artificial Sequence
  Description of Artificial Sequence: Synthetic oligonucleotide
gugguaucuguuccugcuu

SEQ ID NO: 970814 - RNA, 19 nt, Artificial Sequence
  Description of Artificial Sequence: Synthetic oligonucleotide
gcuucugaauggggagagc

SEQ ID NO: 970815 - RNA, 19 nt, Artificial Sequence
  Description of Artificial Sequence: Synthetic oligonucleotide
cgugagaagggugugucga

SEQ ID NO: 970816 - RNA, 19 nt, Artificial Sequence
  Description of Artificial Sequence: Synthetic oligonucleotide
ggauuggggcugccugaac

SEQ ID NO: 970817 - RNA, 19 nt, Artificial Sequence
  Description of Artificial Sequence: Synthetic oligonucleotide
uuccgccuccaauguucua

SEQ ID NO: 970818 - RNA, 19 nt, Artificial Sequence
  Description of Artificial Sequence: Synthetic oligonucleotide
cccgugagaaggguguguc

SEQ ID NO: 970819 - RNA, 19 nt, Artificial Sequence
  Description of Artificial Sequence: Synthetic oligonucleotide
ggggagagcugccguuuuc

SEQ ID NO: 970820 - RNA, 19 nt, Artificial Sequence
  Description of Artificial Sequence: Synthetic oligonucleotide
gccagggaauucacuccag

SEQ ID NO: 970821 - RNA, 19 nt, Artificial Sequence
  Description of Artificial Sequence: Synthetic oligonucleotide
guccauaaaggaagcucau

SEQ ID NO: 970822 - RNA, 19 nt, Artificial Sequence
  Description of Artificial Sequence: Synthetic oligonucleotide
ggggcugccugaaccggug

SEQ ID NO: 970823 - RNA, 19 nt, Artificial Sequence
  Description of Artificial Sequence: Synthetic oligonucleotide
ccuacagaaauggaaguuu

SEQ ID NO: 970824 - RNA, 19 nt, Artificial Sequence
  Description of Artificial Sequence: Synthetic oligonucleotide
agccgagggucugguccag

SEQ ID NO: 970825 - RNA, 19 nt, Artificial Sequence
  Description of Artificial Sequence: Synthetic oligonucleotide
cccaaaucauugugagaaa

SEQ ID NO: 970826 - RNA, 19 nt, Artificial Sequence
  Description of Artificial Sequence: Synthetic oligonucleotide
gaacagcagccgagggucu

SEQ ID NO: 970827 - RNA, 19 nt, Artificial Sequence
  Description of Artificial Sequence: Synthetic oligonucleotide
cuccagugggccagggaau

SEQ ID NO: 970828 - RNA, 19 nt, Artificial Sequence
  Description of Artificial Sequence: Synthetic oligonucleotide
ccugaaccgguggagaugu

SEQ ID NO: 970829 - RNA, 19 nt, Artificial Sequence
  Description of Artificial Sequence: Synthetic oligonucleotide
cagcgugccccaggaccgc

SEQ ID NO: 970830 - RNA, 19 nt, Artificial Sequence
  Description of Artificial Sequence: Synthetic oligonucleotide
gcgcuugccaccauuuccu

SEQ ID NO: 970831 - RNA, 19 nt, Artificial Sequence
  Description of Artificial Sequence: Synthetic oligonucleotide
ggucaccgaaugacacuga

SEQ ID NO: 970832 - RNA, 19 nt, Artificial Sequence
  Description of Artificial Sequence: Synthetic oligonucleotide
ccgugaagacucucagaaa

SEQ ID NO: 970833 - RNA, 19 nt, Artificial Sequence
  Description of Artificial Sequence: Synthetic oligonucleotide
cucucaccgaagggcagcu

SEQ ID NO: 970834 - RNA, 19 nt, Artificial Sequence
  Description of Artificial Sequence: Synthetic oligonucleotide
gcaguccauaaaggaagcu

SEQ ID NO: 970835 - RNA, 19 nt, Artificial Sequence
  Description of Artificial Sequence: Synthetic oligonucleotide
gugugucgacagccauucu

SEQ ID NO: 970836 - RNA, 19 nt, Artificial Sequence
  Description of Artificial Sequence: Synthetic oligonucleotide
cgccuccaauguucuacug

SEQ ID NO: 970837 - RNA, 19 nt, Artificial Sequence
  Description of Artificial Sequence: Synthetic oligonucleotide
gacagccggccaguggcuu

SEQ ID NO: 970838 - RNA, 19 nt, Artificial Sequence
  Description of Artificial Sequence: Synthetic oligonucleotide
ccacaugaaucacccaguu

SEQ ID NO: 970839 - RNA, 19 nt, Artificial Sequence
  Description of Artificial Sequence: Synthetic oligonucleotide
ccaguaagugagccacacu

SEQ ID NO: 970840 - RNA, 19 nt, Artificial Sequence
  Description of Artificial Sequence: Synthetic oligonucleotide
ccaaguguucggcucgguu

SEQ ID NO: 970841 - RNA, 19 nt, Artificial Sequence
  Description of Artificial Sequence: Synthetic oligonucleotide
cgaugaguacggauguauu

SEQ ID NO: 970842 - RNA, 19 nt, Artificial Sequence
  Description of Artificial Sequence: Synthetic oligonucleotide
ccgccuccaauguucuacu

SEQ ID NO: 970843 - RNA, 19 nt, Artificial Sequence
  Description of Artificial Sequence: Synthetic oligonucleotide
gggugugucgacagccauu

SEQ ID NO: 970844 - RNA, 19 nt, Artificial Sequence
  Description of Artificial Sequence: Synthetic oligonucleotide
ggguaaccgugaagacucu

SEQ ID NO: 970845 - RNA, 19 nt, Artificial Sequence
  Description of Artificial Sequence: Synthetic oligonucleotide
ggacagccggccaguggcu

SEQ ID NO: 970846 - RNA, 19 nt, Artificial Sequence
  Description of Artificial Sequence: Synthetic oligonucleotide
cccacgucucauacauuuu

SEQ ID NO: 970847 - RNA, 19 nt, Artificial Sequence
  Description of Artificial Sequence: Synthetic oligonucleotide
cgguuucucaaggcacacu

SEQ ID NO: 970848 - RNA, 19 nt, Artificial Sequence
  Description of Artificial Sequence: Synthetic oligonucleotide
cgcuugccaccauuuccuu

SEQ ID NO: 970849 - RNA, 19 nt, Artificial Sequence
  Description of Artificial Sequence: Synthetic oligonucleotide
ucaucgacgggucagaagg

SEQ ID NO: 970850 - RNA, 19 nt, Artificial Sequence
  Description of Artificial Sequence: Synthetic oligonucleotide
uaggacuacaggaugaagg

SEQ ID NO: 970851 - RNA, 19 nt, Artificial Sequence
  Description of Artificial Sequence: Synthetic oligonucleotide
uguccaucagugaagauag

SEQ ID NO: 970852 - RNA, 19 nt, Artificial Sequence
  Description of Artificial Sequence: Synthetic oligonucleotide
uauccuuucagauuggcug

SEQ ID NO: 970853 - RNA, 19 nt, Artificial Sequence
  Description of Artificial Sequence: Synthetic oligonucleotide
uguuacacagcacacgugc

SEQ ID NO: 970854 - RNA, 19 nt, Artificial Sequence
  Description of Artificial Sequence: Synthetic oligonucleotide
aauggugaccuuucgagug

SEQ ID NO: 970855 - RNA, 19 nt, Artificial Sequence
  Description of Artificial Sequence: Synthetic oligonucleotide
uuuacuuuauucaaauaau

SEQ ID NO: 970856 - RNA, 19 nt, Artificial Sequence
  Description of Artificial Sequence: Synthetic oligonucleotide
aauuccuaaguuucugaag

SEQ ID NO: 970857 - RNA, 19 nt, Artificial Sequence
  Description of Artificial Sequence: Synthetic oligonucleotide
aauugauuucuuuucucug

SEQ ID NO: 970858 - RNA, 19 nt, Artificial Sequence
  Description of Artificial Sequence: Synthetic oligonucleotide
ugaaggacagcccauauau

SEQ ID NO: 970859 - RNA, 19 nt, Artificial Sequence
  Description of Artificial Sequence: Synthetic oligonucleotide
uuucgagugaucauggagu

SEQ ID NO: 970860 - RNA, 19 nt, Artificial Sequence
  Description of Artificial Sequence: Synthetic oligonucleotide
ugugaaacugaguaggacu

SEQ ID NO: 970861 - RNA, 19 nt, Artificial Sequence
  Description of Artificial Sequence: Synthetic oligonucleotide
cuuaguaagacagucucgg

SEQ ID NO: 970862 - RNA, 19 nt, Artificial Sequence
  Description of Artificial Sequence: Synthetic oligonucleotide
uuugaguccguuuccacag

SEQ ID NO: 970863 - RNA, 19 nt, Artificial Sequence
  Description of Artificial Sequence: Synthetic oligonucleotide
ucgaucuuggacaaggaga

SEQ ID NO: 970864 - RNA, 19 nt, Artificial Sequence
  Description of Artificial Sequence: Synthetic oligonucleotide
agagcaaucaaugugcuug

SEQ ID NO: 970865 - RNA, 19 nt, Artificial Sequence
  Description of Artificial Sequence: Synthetic oligonucleotide
aucuuggacaaggagacgc

SEQ ID NO: 970866 - RNA, 19 nt, Artificial Sequence
  Description of Artificial Sequence: Synthetic oligonucleotide
uagacggaggacuugagug

SEQ ID NO: 970867 - RNA, 19 nt, Artificial Sequence
  Description of Artificial Sequence: Synthetic oligonucleotide
gagaccgaaaaucaggaac

SEQ ID NO: 970868 - RNA, 19 nt, Artificial Sequence
  Description of Artificial Sequence: Synthetic oligonucleotide
uauucaaauaauugauuuc

SEQ ID NO: 970869 - RNA, 19 nt, Artificial Sequence
  Description of Artificial Sequence: Synthetic oligonucleotide
aggcuugccaaugaggucc

SEQ ID NO: 970870 - RNA, 19 nt, Artificial Sequence
  Description of Artificial Sequence: Synthetic oligonucleotide
agguacgccacccacaaag

SEQ ID NO: 970871 - RNA, 19 nt, Artificial Sequence
  Description of Artificial Sequence: Synthetic oligonucleotide
guagcgauacuccaccugg

SEQ ID NO: 970872 - RNA, 19 nt, Artificial Sequence
  Description of Artificial Sequence: Synthetic oligonucleotide
ucuugucccggaaaugagg

SEQ ID NO: 970873 - RNA, 19 nt, Artificial Sequence
  Description of Artificial Sequence: Synthetic oligonucleotide
aaauuccuaaguuucugaa

SEQ ID NO: 970874 - RNA, 19 nt, Artificial Sequence
  Description of Artificial Sequence: Synthetic oligonucleotide
aggcgugccagguagacgg

SEQ ID NO: 970875 - RNA, 19 nt, Artificial Sequence
  Description of Artificial Sequence: Synthetic oligonucleotide
uucgcuugccccaagcacc

SEQ ID NO: 970876 - RNA, 19 nt, Artificial Sequence
  Description of Artificial Sequence: Synthetic oligonucleotide
uccguuuccacagagacaa

SEQ ID NO: 970877 - RNA, 19 nt, Artificial Sequence
  Description of Artificial Sequence: Synthetic oligonucleotide
gaugaugcgugucuccucc

SEQ ID NO: 970878 - RNA, 19 nt, Artificial Sequence
  Description of Artificial Sequence: Synthetic oligonucleotide
ugugcaucuccccagggcu

SEQ ID NO: 970879 - RNA, 19 nt, Artificial Sequence
  Description of Artificial Sequence: Synthetic oligonucleotide
uuuugaguccguuuccaca

SEQ ID NO: 970880 - RNA, 19 nt, Artificial Sequence
  Description of Artificial Sequence: Synthetic oligonucleotide
aaucggaacccgcgcagac

SEQ ID NO: 970881 - RNA, 19 nt, Artificial Sequence
  Description of Artificial Sequence: Synthetic oligonucleotide
uuuuauagucuccuuucaa

SEQ ID NO: 970882 - RNA, 19 nt, Artificial Sequence
  Description of Artificial Sequence: Synthetic oligonucleotide
cuugucccggaaaugaggc

SEQ ID NO: 970883 - RNA, 19 nt, Artificial Sequence
  Description of Artificial Sequence: Synthetic oligonucleotide
guuguugaugacaaucggg

SEQ ID NO: 970884 - RNA, 19 nt, Artificial Sequence
  Description of Artificial Sequence: Synthetic oligonucleotide
uuagcaggaauuuggaguu

SEQ ID NO: 970885 - RNA, 19 nt, Artificial Sequence
  Description of Artificial Sequence: Synthetic oligonucleotide
agauagcaaauucaauucu

SEQ ID NO: 970886 - RNA, 19 nt, Artificial Sequence
  Description of Artificial Sequence: Synthetic oligonucleotide
gagguuuugaguccguuuc

SEQ ID NO: 970887 - RNA, 19 nt, Artificial Sequence
  Description of Artificial Sequence: Synthetic oligonucleotide
gaucauggagugcacggag

SEQ ID NO: 970888 - RNA, 19 nt, Artificial Sequence
  Description of Artificial Sequence: Synthetic oligonucleotide
uguuccacuuaguaagaca

SEQ ID NO: 970889 - RNA, 19 nt, Artificial Sequence
  Description of Artificial Sequence: Synthetic oligonucleotide
agguuuugaguccguuucc

SEQ ID NO: 970890 - RNA, 19 nt, Artificial Sequence
  Description of Artificial Sequence: Synthetic oligonucleotide
gaacaggcgugccagguag

SEQ ID NO: 970891 - RNA, 19 nt, Artificial Sequence
  Description of Artificial Sequence: Synthetic oligonucleotide
ggucagaaggucuaccugg

SEQ ID NO: 970892 - RNA, 19 nt, Artificial Sequence
  Description of Artificial Sequence: Synthetic oligonucleotide
uacgccacccacaaagaug

SEQ ID NO: 970893 - RNA, 19 nt, Artificial Sequence
  Description of Artificial Sequence: Synthetic oligonucleotide
cuugccguagcgauacucc

SEQ ID NO: 970894 - RNA, 19 nt, Artificial Sequence
  Description of Artificial Sequence: Synthetic oligonucleotide
cacuuaguaagacagucuc

SEQ ID NO: 970895 - RNA, 19 nt, Artificial Sequence
  Description of Artificial Sequence: Synthetic oligonucleotide
cagacuuugaccaggccug

SEQ ID NO: 970896 - RNA, 19 nt, Artificial Sequence
  Description of Artificial Sequence: Synthetic oligonucleotide
aaucaggaacuucccaggu

SEQ ID NO: 970897 - RNA, 19 nt, Artificial Sequence
  Description of Artificial Sequence: Synthetic oligonucleotide
ccgaaaaucaggaacuucc

SEQ ID NO: 970898 - RNA, 19 nt, Artificial Sequence
  Description of Artificial Sequence: Synthetic oligonucleotide
augcguuugagugagcguc

SEQ ID NO: 970899 - RNA, 19 nt, Artificial Sequence
  Description of Artificial Sequence: Synthetic oligonucleotide
aggacuacaggaugaagga

SEQ ID NO: 970900 - RNA, 19 nt, Artificial Sequence
  Description of Artificial Sequence: Synthetic oligonucleotide
ucgguagcuacugagguca

SEQ ID NO: 970901 - RNA, 19 nt, Artificial Sequence
  Description of Artificial Sequence: Synthetic oligonucleotide
agacagucucgguagcuac

SEQ ID NO: 970902 - RNA, 19 nt, Artificial Sequence
  Description of Artificial Sequence: Synthetic oligonucleotide
ugacaaucgggucaggguu

SEQ ID NO: 970903 - RNA, 19 nt, Artificial Sequence
  Description of Artificial Sequence: Synthetic oligonucleotide
agaggaacuggucacgggu

SEQ ID NO: 970904 - RNA, 19 nt, Artificial Sequence
  Description of Artificial Sequence: Synthetic oligonucleotide
acaccuugcgcaccgacag

SEQ ID NO: 970905 - RNA, 19 nt, Artificial Sequence
  Description of Artificial Sequence: Synthetic oligonucleotide
ucucgguagcuacugaggu

SEQ ID NO: 970906 - RNA, 19 nt, Artificial Sequence
  Description of Artificial Sequence: Synthetic oligonucleotide
cagcccauauauuaaacuc

SEQ ID NO: 970907 - RNA, 19 nt, Artificial Sequence
  Description of Artificial Sequence: Synthetic oligonucleotide
uucgagugaucauggagug

SEQ ID NO: 970908 - RNA, 19 nt, Artificial Sequence
  Description of Artificial Sequence: Synthetic oligonucleotide
acuguucugguucaccuga

SEQ ID NO: 970909 - RNA, 19 nt, Artificial Sequence
  Description of Artificial Sequence: Synthetic oligonucleotide
acagcccauauauuaaacu

SEQ ID NO: 970910 - RNA, 19 nt, Artificial Sequence
  Description of Artificial Sequence: Synthetic oligonucleotide
gcaauggugaccuuucgag

SEQ ID NO: 970911 - RNA, 19 nt, Artificial Sequence
  Description of Artificial Sequence: Synthetic oligonucleotide
ucuguggaccgcucgaucu

SEQ ID NO: 970912 - RNA, 19 nt, Artificial Sequence
  Description of Artificial Sequence: Synthetic oligonucleotide
uuucaaaacccggugugug

SEQ ID NO: 970913 - RNA, 19 nt, Artificial Sequence
  Description of Artificial Sequence: Synthetic oligonucleotide
aaacugaguaggacuacag

SEQ ID NO: 970914 - RNA, 19 nt, Artificial Sequence
  Description of Artificial Sequence: Synthetic oligonucleotide
auacaucaccucgauggcc

SEQ ID NO: 970915 - RNA, 19 nt, Artificial Sequence
  Description of Artificial Sequence: Synthetic oligonucleotide
cauuagcaggaauuuggag

SEQ ID NO: 970916 - RNA, 19 nt, Artificial Sequence
  Description of Artificial Sequence: Synthetic oligonucleotide
ugcaauggugaccuuucga

SEQ ID NO: 970917 - RNA, 19 nt, Artificial Sequence
  Description of Artificial Sequence: Synthetic oligonucleotide
uccuuucaaaacccggugu

SEQ ID NO: 970918 - RNA, 19 nt, Artificial Sequence
  Description of Artificial Sequence: Synthetic oligonucleotide
accugccucguccagucgc

SEQ ID NO: 970919 - RNA, 19 nt, Artificial Sequence
  Description of Artificial Sequence: Synthetic oligonucleotide
accaacuguucauaguaca

SEQ ID NO: 970920 - RNA, 19 nt, Artificial Sequence
  Description of Artificial Sequence: Synthetic oligonucleotide
uacuucagggugcgcaucc

SEQ ID NO: 970921 - RNA, 19 nt, Artificial Sequence
  Description of Artificial Sequence: Synthetic oligonucleotide
uucacggguuugaugaccu

SEQ ID NO: 970922 - RNA, 19 nt, Artificial Sequence
  Description of Artificial Sequence: Synthetic oligonucleotide
ucugguucaccugaaaaua

SEQ ID NO: 970923 - RNA, 19 nt, Artificial Sequence
  Description of Artificial Sequence: Synthetic oligonucleotide
auaguacacaggcaggcau

SEQ ID NO: 970924 - RNA, 19 nt, Artificial Sequence
  Description of Artificial Sequence: Synthetic oligonucleotide
aacugagaagagcaaucaa

SEQ ID NO: 970925 - RNA, 19 nt, Artificial Sequence
  Description of Artificial Sequence: Synthetic oligonucleotide
ugaguucagaguccggguc

SEQ ID NO: 970926 - RNA, 19 nt, Artificial Sequence
  Description of Artificial Sequence: Synthetic oligonucleotide
ucuguguacacaugacauc

SEQ ID NO: 970927 - RNA, 19 nt, Artificial Sequence
  Description of Artificial Sequence: Synthetic oligonucleotide
acuuaguaagacagucucg

SEQ ID NO: 970928 - RNA, 19 nt, Artificial Sequence
  Description of Artificial Sequence: Synthetic oligonucleotide
accuugcgcaccgacaggc

SEQ ID NO: 970929 - RNA, 19 nt, Artificial Sequence
  Description of Artificial Sequence: Synthetic oligonucleotide
cacagcguacuucagggug

SEQ ID NO: 970930 - RNA, 19 nt, Artificial Sequence
  Description of Artificial Sequence: Synthetic oligonucleotide
agaccgaaaaucaggaacu

SEQ ID NO: 970931 - RNA, 19 nt, Artificial Sequence
  Description of Artificial Sequence: Synthetic oligonucleotide
ugugcuuggguuaguccga

SEQ ID NO: 970932 - RNA, 19 nt, Artificial Sequence
  Description of Artificial Sequence: Synthetic oligonucleotide
gaccgcucgaucuuggaca

SEQ ID NO: 970933 - RNA, 19 nt, Artificial Sequence
  Description of Artificial Sequence: Synthetic oligonucleotide
uguagucgucuccuccucc

SEQ ID NO: 970934 - RNA, 19 nt, Artificial Sequence
  Description of Artificial Sequence: Synthetic oligonucleotide
agcgauacuccaccugguc

SEQ ID NO: 970935 - RNA, 19 nt, Artificial Sequence
  Description of Artificial Sequence: Synthetic oligonucleotide
aucaaugugcuuggguuag

SEQ ID NO: 970936 - RNA, 19 nt, Artificial Sequence
  Description of Artificial Sequence: Synthetic oligonucleotide
acagcguacuucagggugc

SEQ ID NO: 970937 - RNA, 19 nt, Artificial Sequence
  Description of Artificial Sequence: Synthetic oligonucleotide
ucgcgcaccauuagcagga

SEQ ID NO: 970938 - RNA, 19 nt, Artificial Sequence
  Description of Artificial Sequence: Synthetic oligonucleotide
acugcgagguacgccaccc

SEQ ID NO: 970939 - RNA, 19 nt, Artificial Sequence
  Description of Artificial Sequence: Synthetic oligonucleotide
ucgcuugccccaagcaccg

SEQ ID NO: 970940 - RNA, 19 nt, Artificial Sequence
  Description of Artificial Sequence: Synthetic oligonucleotide
cucgaucuuggacaaggag

SEQ ID NO: 970941 - RNA, 19 nt, Artificial Sequence
  Description of Artificial Sequence: Synthetic oligonucleotide
ucaaggagaggaacugguc

SEQ ID NO: 970942 - RNA, 19 nt, Artificial Sequence
  Description of Artificial Sequence: Synthetic oligonucleotide
uggccaguccacuuggaga

SEQ ID NO: 970943 - RNA, 19 nt, Artificial Sequence
  Description of Artificial Sequence: Synthetic oligonucleotide
ggagguacuguucugguuc

SEQ ID NO: 970944 - RNA, 19 nt, Artificial Sequence
  Description of Artificial Sequence: Synthetic oligonucleotide
caccucugcagaccaaugg

SEQ ID NO: 970945 - RNA, 19 nt, Artificial Sequence
  Description of Artificial Sequence: Synthetic oligonucleotide
agggguccuuguuacacag

SEQ ID NO: 970946 - RNA, 19 nt, Artificial Sequence
  Description of Artificial Sequence: Synthetic oligonucleotide
acagagacaaaggcuccac

SEQ ID NO: 970947 - RNA, 19 nt, Artificial Sequence
  Description of Artificial Sequence: Synthetic oligonucleotide
aguuggguggguuugcaua

SEQ ID NO: 970948 - RNA, 19 nt, Artificial Sequence
  Description of Artificial Sequence: Synthetic oligonucleotide
ucggaacccgcgcagacuc

SEQ ID NO: 970949 - RNA, 19 nt, Artificial Sequence
  Description of Artificial Sequence: Synthetic oligonucleotide
gguuaguccgacuucugug

SEQ ID NO: 970950 - RNA, 19 nt, Artificial Sequence
  Description of Artificial Sequence: Synthetic oligonucleotide
ugaugcgugucuccucccc

SEQ ID NO: 970951 - RNA, 19 nt, Artificial Sequence
  Description of Artificial Sequence: Synthetic oligonucleotide
ugcauacaucaccucgaug

SEQ ID NO: 970952 - RNA, 19 nt, Artificial Sequence
  Description of Artificial Sequence: Synthetic oligonucleotide
aagggguccuuguuacaca

SEQ ID NO: 970953 - RNA, 19 nt, Artificial Sequence
  Description of Artificial Sequence: Synthetic oligonucleotide
cuuugaccaggccugccgc

SEQ ID NO: 970954 - RNA, 19 nt, Artificial Sequence
  Description of Artificial Sequence: Synthetic oligonucleotide
acaaucgggucaggguucc

SEQ ID NO: 970955 - RNA, 19 nt, Artificial Sequence
  Description of Artificial Sequence: Synthetic oligonucleotide
uggguuugcauagggguca

SEQ ID NO: 970956 - RNA, 19 nt, Artificial Sequence
  Description of Artificial Sequence: Synthetic oligonucleotide
uuggguuaguccgacuucu

SEQ ID NO: 970957 - RNA, 19 nt, Artificial Sequence
  Description of Artificial Sequence: Synthetic oligonucleotide
gucgcgcaccauuagcagg

SEQ ID NO: 970958 - RNA, 19 nt, Artificial Sequence
  Description of Artificial Sequence: Synthetic oligonucleotide
gaauuuggaguuggggaac

SEQ ID NO: 970959 - RNA, 19 nt, Artificial Sequence
  Description of Artificial Sequence: Synthetic oligonucleotide
cauggcacgcaugagggug

SEQ ID NO: 970960 - RNA, 19 nt, Artificial Sequence
  Description of Artificial Sequence: Synthetic oligonucleotide
uuucagauuggcuggcguu

SEQ ID NO: 970961 - RNA, 19 nt, Artificial Sequence
  Description of Artificial Sequence: Synthetic oligonucleotide
auccgucacaccugccucg

SEQ ID NO: 970962 - RNA, 19 nt, Artificial Sequence
  Description of Artificial Sequence: Synthetic oligonucleotide
agcccauauauuaaacucu

SEQ ID NO: 970963 - RNA, 19 nt, Artificial Sequence
  Description of Artificial Sequence: Synthetic oligonucleotide
uggcuggcguuuuauaguc

SEQ ID NO: 970964 - RNA, 19 nt, Artificial Sequence
  Description of Artificial Sequence: Synthetic oligonucleotide
ucgacgggucagaaggucu

SEQ ID NO: 970965 - RNA, 19 nt, Artificial Sequence
  Description of Artificial Sequence: Synthetic oligonucleotide
accgaaaaucaggaacuuc

SEQ ID NO: 970966 - RNA, 19 nt, Artificial Sequence
  Description of Artificial Sequence: Synthetic oligonucleotide
acaguccgugcccgaaucg

SEQ ID NO: 970967 - RNA, 19 nt, Artificial Sequence
  Description of Artificial Sequence: Synthetic oligonucleotide
agugcacggaggcccugcc

SEQ ID NO: 970968 - RNA, 19 nt, Artificial Sequence
  Description of Artificial Sequence: Synthetic oligonucleotide
cacggguuugaugaccugg

SEQ ID NO: 970969 - RNA, 19 nt, Artificial Sequence
  Description of Artificial Sequence: Synthetic oligonucleotide
caggaugcguuugagugag

SEQ ID NO: 970970 - RNA, 19 nt, Artificial Sequence
  Description of Artificial Sequence: Synthetic oligonucleotide
caccugaaaauauccuuuc

SEQ ID NO: 970971 - RNA, 19 nt, Artificial Sequence
  Description of Artificial Sequence: Synthetic oligonucleotide
aaaacccgguguguguugu

SEQ ID NO: 970972 - RNA, 19 nt, Artificial Sequence
  Description of Artificial Sequence: Synthetic oligonucleotide
gguucccauaguugggugg

SEQ ID NO: 970973 - RNA, 19 nt, Artificial Sequence
  Description of Artificial Sequence: Synthetic oligonucleotide
augaugcgugucuccuccc

SEQ ID NO: 970974 - RNA, 19 nt, Artificial Sequence
  Description of Artificial Sequence: Synthetic oligonucleotide
ggaugcguuugagugagcg

SEQ ID NO: 970975 - RNA, 19 nt, Artificial Sequence
  Description of Artificial Sequence: Synthetic oligonucleotide
accuuucgagugaucaugg

SEQ ID NO: 970976 - RNA, 19 nt, Artificial Sequence
  Description of Artificial Sequence: Synthetic oligonucleotide
gcgauacuccaccuggucg

SEQ ID NO: 970977 - RNA, 19 nt, Artificial Sequence
  Description of Artificial Sequence: Synthetic oligonucleotide
agcaccaacuguucauagu

SEQ ID NO: 970978 - RNA, 19 nt, Artificial Sequence
  Description of Artificial Sequence: Synthetic oligonucleotide
cagaguccgggucaaggag

SEQ ID NO: 970979 - RNA, 19 nt, Artificial Sequence
  Description of Artificial Sequence: Synthetic oligonucleotide
uugagugugaagggguccu

SEQ ID NO: 970980 - RNA, 19 nt, Artificial Sequence
  Description of Artificial Sequence: Synthetic oligonucleotide
uuggggaacaggcgugcca

SEQ ID NO: 970981 - RNA, 19 nt, Artificial Sequence
  Description of Artificial Sequence: Synthetic oligonucleotide
ugcgagguacgccacccac

SEQ ID NO: 970982 - RNA, 19 nt, Artificial Sequence
  Description of Artificial Sequence: Synthetic oligonucleotide
cuugcgcaccgacaggcgc

SEQ ID NO: 970983 - RNA, 19 nt, Artificial Sequence
  Description of Artificial Sequence: Synthetic oligonucleotide
acgccacccacaaagauga

SEQ ID NO: 970984 - RNA, 19 nt, Artificial Sequence
  Description of Artificial Sequence: Synthetic oligonucleotide
cuggcguuuuauagucucc

SEQ ID NO: 970985 - RNA, 19 nt, Artificial Sequence
  Description of Artificial Sequence: Synthetic oligonucleotide
uggucggcaccaagcauca

SEQ ID NO: 970986 - RNA, 19 nt, Artificial Sequence
  Description of Artificial Sequence: Synthetic oligonucleotide
cugcagagaccgaaaauca

SEQ ID NO: 970987 - RNA, 19 nt, Artificial Sequence
  Description of Artificial Sequence: Synthetic oligonucleotide
ggcagaacugagaagagca

SEQ ID NO: 970988 - RNA, 19 nt, Artificial Sequence
  Description of Artificial Sequence: Synthetic oligonucleotide
agggugcgcauccagcaug

SEQ ID NO: 970989 - RNA, 19 nt, Artificial Sequence
  Description of Artificial Sequence: Synthetic oligonucleotide
acuccaccuggucggcacc

SEQ ID NO: 970990 - RNA, 19 nt, Artificial Sequence
  Description of Artificial Sequence: Synthetic oligonucleotide
uggcucgccaugcuuggca

SEQ ID NO: 970991 - RNA, 19 nt, Artificial Sequence
  Description of Artificial Sequence: Synthetic oligonucleotide
caccuggucggcaccaagc

SEQ ID NO: 970992 - RNA, 19 nt, Artificial Sequence
  Description of Artificial Sequence: Synthetic oligonucleotide
cagcacacgugcuggcucg

SEQ ID NO: 970993 - RNA, 19 nt, Artificial Sequence
  Description of Artificial Sequence: Synthetic oligonucleotide
auguccacucugaagcauc

SEQ ID NO: 970994 - RNA, 19 nt, Artificial Sequence
  Description of Artificial Sequence: Synthetic oligonucleotide
uugccguagcgauacucca

SEQ ID NO: 970995 - RNA, 19 nt, Artificial Sequence
  Description of Artificial Sequence: Synthetic oligonucleotide
uggcguuuuauagucuccu

SEQ ID NO: 970996 - RNA, 19 nt, Artificial Sequence
  Description of Artificial Sequence: Synthetic oligonucleotide
guuaguccgacuucugugu

SEQ ID NO: 970997 - RNA, 19 nt, Artificial Sequence
  Description of Artificial Sequence: Synthetic oligonucleotide
cagagacaaaggcuccacc

SEQ ID NO: 970998 - RNA, 19 nt, Artificial Sequence
  Description of Artificial Sequence: Synthetic oligonucleotide
cucaucgacgggucagaag

SEQ ID NO: 970999 - RNA, 19 nt, Artificial Sequence
  Description of Artificial Sequence: Synthetic oligonucleotide
aacaccuugcgcaccgaca

SEQ ID NO: 971000 - RNA, 19 nt, Artificial Sequence
  Description of Artificial Sequence: Synthetic oligonucleotide
cuuggguuaguccgacuuc

SEQ ID NO: 971001 - RNA, 19 nt, Artificial Sequence
  Description of Artificial Sequence: Synthetic oligonucleotide
agacuuugaccaggccugc

SEQ ID NO: 971002 - RNA, 19 nt, Artificial Sequence
  Description of Artificial Sequence: Synthetic oligonucleotide
uugcgcaccgacaggcgca

SEQ ID NO: 971003 - RNA, 19 nt, Artificial Sequence
  Description of Artificial Sequence: Synthetic oligonucleotide
auagccaagccgagccagc

SEQ ID NO: 971004 - RNA, 19 nt, Artificial Sequence
  Description of Artificial Sequence: Synthetic oligonucleotide
uuaguccgacuucugugua

SEQ ID NO: 971005 - RNA, 19 nt, Artificial Sequence
  Description of Artificial Sequence: Synthetic oligonucleotide
gugugcaucuccccagggc

SEQ ID NO: 971006 - RNA, 19 nt, Artificial Sequence
  Description of Artificial Sequence: Synthetic oligonucleotide
caaucaaugugcuuggguu

SEQ ID NO: 971007 - RNA, 19 nt, Artificial Sequence
  Description of Artificial Sequence: Synthetic oligonucleotide
uacuccaccuggucggcac

SEQ ID NO: 971008 - RNA, 19 nt, Artificial Sequence
  Description of Artificial Sequence: Synthetic oligonucleotide
acugaggucaaagccugca

SEQ ID NO: 971009 - RNA, 19 nt, Artificial Sequence
  Description of Artificial Sequence: Synthetic oligonucleotide
cgaucuuggacaaggagac

SEQ ID NO: 971010 - RNA, 19 nt, Artificial Sequence
  Description of Artificial Sequence: Synthetic oligonucleotide
ugaccuuucgagugaucau

SEQ ID NO: 971011 - RNA, 19 nt, Artificial Sequence
  Description of Artificial Sequence: Synthetic oligonucleotide
acgggucagaaggucuacc

SEQ ID NO: 971012 - RNA, 19 nt, Artificial Sequence
  Description of Artificial Sequence: Synthetic oligonucleotide
gacaggcgcaugcccagcc

SEQ ID NO: 971013 - RNA, 19 nt, Artificial Sequence
  Description of Artificial Sequence: Synthetic oligonucleotide
acaggcgugccagguagac

SEQ ID NO: 971014 - RNA, 19 nt, Artificial Sequence
  Description of Artificial Sequence: Synthetic oligonucleotide
acagucucgguagcuacug

SEQ ID NO: 971015 - RNA, 19 nt, Artificial Sequence
  Description of Artificial Sequence: Synthetic oligonucleotide
aucgacgggucagaagguc

SEQ ID NO: 971016 - RNA, 19 nt, Artificial Sequence
  Description of Artificial Sequence: Synthetic oligonucleotide
cugugaaacugaguaggac

SEQ ID NO: 971017 - RNA, 19 nt, Artificial Sequence
  Description of Artificial Sequence: Synthetic oligonucleotide
augagcggcauggccuugc

SEQ ID NO: 971018 - RNA, 19 nt, Artificial Sequence
  Description of Artificial Sequence: Synthetic oligonucleotide
ggcucccucauuuccaagc

SEQ ID NO: 971019 - RNA, 19 nt, Artificial Sequence
  Description of Artificial Sequence: Synthetic oligonucleotide
ccaacuguucauaguacac

SEQ ID NO: 971020 - RNA, 19 nt, Artificial Sequence
  Description of Artificial Sequence: Synthetic oligonucleotide
uaguccgacuucuguguac

SEQ ID NO: 971021 - RNA, 19 nt, Artificial Sequence
  Description of Artificial Sequence: Synthetic oligonucleotide
agucuccuuucaaaacccg

SEQ ID NO: 971022 - RNA, 19 nt, Artificial Sequence
  Description of Artificial Sequence: Synthetic oligonucleotide
ccuuucaaaacccggugug

SEQ ID NO: 971023 - RNA, 19 nt, Artificial Sequence
  Description of Artificial Sequence: Synthetic oligonucleotide
uggguuaguccgacuucug

SEQ ID NO: 971024 - RNA, 19 nt, Artificial Sequence
  Description of Artificial Sequence: Synthetic oligonucleotide
ucgauggccuuguuccacu

SEQ ID NO: 971025 - RNA, 19 nt, Artificial Sequence
  Description of Artificial Sequence: Synthetic oligonucleotide
gaguccgggucaaggagag

SEQ ID NO: 971026 - RNA, 19 nt, Artificial Sequence
  Description of Artificial Sequence: Synthetic oligonucleotide
uugccccaagcaccgcccg

SEQ ID NO: 971027 - RNA, 19 nt, Artificial Sequence
  Description of Artificial Sequence: Synthetic oligonucleotide
gaaggucuaccuggugugc

SEQ ID NO: 971028 - RNA, 19 nt, Artificial Sequence
  Description of Artificial Sequence: Synthetic oligonucleotide
uucagauuggcuggcguuu

SEQ ID NO: 971029 - RNA, 19 nt, Artificial Sequence
  Description of Artificial Sequence: Synthetic oligonucleotide
gagguacuguucugguuca

SEQ ID NO: 971030 - RNA, 19 nt, Artificial Sequence
  Description of Artificial Sequence: Synthetic oligonucleotide
augaaggacagcccauaua

SEQ ID NO: 971031 - RNA, 19 nt, Artificial Sequence
  Description of Artificial Sequence: Synthetic oligonucleotide
agagaccgaaaaucaggaa

SEQ ID NO: 971032 - RNA, 19 nt, Artificial Sequence
  Description of Artificial Sequence: Synthetic oligonucleotide
ugaagggguccuuguuaca

SEQ ID NO: 971033 - RNA, 19 nt, Artificial Sequence
  Description of Artificial Sequence: Synthetic oligonucleotide
uuguuccacuuaguaagac

SEQ ID NO: 971034 - RNA, 19 nt, Artificial Sequence
  Description of Artificial Sequence: Synthetic oligonucleotide
aguccgacuucuguguaca

SEQ ID NO: 971035 - RNA, 19 nt, Artificial Sequence
  Description of Artificial Sequence: Synthetic oligonucleotide
gcuugcucagcacagcuuc

SEQ ID NO: 971036 - RNA, 19 nt, Artificial Sequence
  Description of Artificial Sequence: Synthetic oligonucleotide
cuucagggugcgcauccag

SEQ ID NO: 971037 - RNA, 19 nt, Artificial Sequence
  Description of Artificial Sequence: Synthetic oligonucleotide
cacgcaugaggguggugcc

SEQ ID NO: 971038 - RNA, 19 nt, Artificial Sequence
  Description of Artificial Sequence: Synthetic oligonucleotide
caaaacccgguguguguug

SEQ ID NO: 971039 - RNA, 19 nt, Artificial Sequence
  Description of Artificial Sequence: Synthetic oligonucleotide
ucguggugcaggacugugu

SEQ ID NO: 971040 - RNA, 19 nt, Artificial Sequence
  Description of Artificial Sequence: Synthetic oligonucleotide
guaggacuacaggaugaag

SEQ ID NO: 971041 - RNA, 19 nt, Artificial Sequence
  Description of Artificial Sequence: Synthetic oligonucleotide
uguggaccgcucgaucuug

SEQ ID NO: 971042 - RNA, 19 nt, Artificial Sequence
  Description of Artificial Sequence: Synthetic oligonucleotide
gaugcgugucuccucccca

SEQ ID NO: 971043 - RNA, 19 nt, Artificial Sequence
  Description of Artificial Sequence: Synthetic oligonucleotide
ugcccgaaucggaacccgc

SEQ ID NO: 971044 - RNA, 19 nt, Artificial Sequence
  Description of Artificial Sequence: Synthetic oligonucleotide
uacugaggucaaagccugc

SEQ ID NO: 971045 - RNA, 19 nt, Artificial Sequence
  Description of Artificial Sequence: Synthetic oligonucleotide
cucgguagcuacugagguc

SEQ ID NO: 971046 - RNA, 19 nt, Artificial Sequence
  Description of Artificial Sequence: Synthetic oligonucleotide
guagucgucuccuccucca

SEQ ID NO: 971047 - RNA, 19 nt, Artificial Sequence
  Description of Artificial Sequence: Synthetic oligonucleotide
caaagaugagcggcauggc

SEQ ID NO: 971048 - RNA, 19 nt, Artificial Sequence
  Description of Artificial Sequence: Synthetic oligonucleotide
uagcgauacuccaccuggu

SEQ ID NO: 971049 - RNA, 19 nt, Artificial Sequence
  Description of Artificial Sequence: Synthetic oligonucleotide
guccgggucaaggagagga

SEQ ID NO: 971050 - RNA, 19 nt, Artificial Sequence
  Description of Artificial Sequence: Synthetic oligonucleotide
gguggguuugcauaggggu

SEQ ID NO: 971051 - RNA, 19 nt, Artificial Sequence
  Description of Artificial Sequence: Synthetic oligonucleotide
agguagacggaggacuuga

SEQ ID NO: 971052 - RNA, 19 nt, Artificial Sequence
  Description of Artificial Sequence: Synthetic oligonucleotide
gacaaucgggucaggguuc

SEQ ID NO: 971053 - RNA, 19 nt, Artificial Sequence
  Description of Artificial Sequence: Synthetic oligonucleotide
caguccgugcccgaaucgg

SEQ ID NO: 971054 - RNA, 19 nt, Artificial Sequence
  Description of Artificial Sequence: Synthetic oligonucleotide
cuaaguuucugaagcugua

SEQ ID NO: 971055 - RNA, 19 nt, Artificial Sequence
  Description of Artificial Sequence: Synthetic oligonucleotide
ugccccaagcaccgcccgg

SEQ ID NO: 971056 - RNA, 19 nt, Artificial Sequence
  Description of Artificial Sequence: Synthetic oligonucleotide
ccuuguuacacagcacacg

SEQ ID NO: 971057 - RNA, 19 nt, Artificial Sequence
  Description of Artificial Sequence: Synthetic oligonucleotide
ugugucacuccaggcgaug

SEQ ID NO: 971058 - RNA, 19 nt, Artificial Sequence
  Description of Artificial Sequence: Synthetic oligonucleotide
ugagcggcauggccuugcc

SEQ ID NO: 971059 - RNA, 19 nt, Artificial Sequence
  Description of Artificial Sequence: Synthetic oligonucleotide
gccguagcgauacuccacc

SEQ ID NO: 971060 - RNA, 19 nt, Artificial Sequence
  Description of Artificial Sequence: Synthetic oligonucleotide
cagcacacgagggaugaug

SEQ ID NO: 971061 - RNA, 19 nt, Artificial Sequence
  Description of Artificial Sequence: Synthetic oligonucleotide
gaggaacuggucacggguc

SEQ ID NO: 971062 - RNA, 19 nt, Artificial Sequence
  Description of Artificial Sequence: Synthetic oligonucleotide
agaguccgggucaaggaga

SEQ ID NO: 971063 - RNA, 19 nt, Artificial Sequence
  Description of Artificial Sequence: Synthetic oligonucleotide
aggguucccauaguugggu

SEQ ID NO: 971064 - RNA, 19 nt, Artificial Sequence
  Description of Artificial Sequence: Synthetic oligonucleotide
gcacgcaugaggguggugc

SEQ ID NO: 971065 - RNA, 19 nt, Artificial Sequence
  Description of Artificial Sequence: Synthetic oligonucleotide
uccgugcccgaaucggaac

SEQ ID NO: 971066 - RNA, 19 nt, Artificial Sequence
  Description of Artificial Sequence: Synthetic oligonucleotide
aggacagcccauauauuaa

SEQ ID NO: 971067 - RNA, 19 nt, Artificial Sequence
  Description of Artificial Sequence: Synthetic oligonucleotide
uccccacaguccgugcccg

SEQ ID NO: 971068 - RNA, 19 nt, Artificial Sequence
  Description of Artificial Sequence: Synthetic oligonucleotide
ugacaucaacucagacauc

SEQ ID NO: 971069 - RNA, 19 nt, Artificial Sequence
  Description of Artificial Sequence: Synthetic oligonucleotide
auaguuggguggguuugca

SEQ ID NO: 971070 - RNA, 19 nt, Artificial Sequence
  Description of Artificial Sequence: Synthetic oligonucleotide
gaugcguuugagugagcgu

SEQ ID NO: 971071 - RNA, 19 nt, Artificial Sequence
  Description of Artificial Sequence: Synthetic oligonucleotide
gccuguuuacuuuauucaa

SEQ ID NO: 971072 - RNA, 19 nt, Artificial Sequence
  Description of Artificial Sequence: Synthetic oligonucleotide
cucccucauuuccaagcac

SEQ ID NO: 971073 - RNA, 19 nt, Artificial Sequence
  Description of Artificial Sequence: Synthetic oligonucleotide
acguccccagggauguggc

SEQ ID NO: 971074 - RNA, 19 nt, Artificial Sequence
  Description of Artificial Sequence: Synthetic oligonucleotide
ucacggguuugaugaccug

SEQ ID NO: 971075 - RNA, 19 nt, Artificial Sequence
  Description of Artificial Sequence: Synthetic oligonucleotide
acaucaacucagacaucug

SEQ ID NO: 971076 - RNA, 19 nt, Artificial Sequence
  Description of Artificial Sequence: Synthetic oligonucleotide
caucccaagacagagguuu

SEQ ID NO: 971077 - RNA, 19 nt, Artificial Sequence
  Description of Artificial Sequence: Synthetic oligonucleotide
agauuggcuggcguuuuau

SEQ ID NO: 971078 - RNA, 19 nt, Artificial Sequence
  Description of Artificial Sequence: Synthetic oligonucleotide
acggguuugaugaccuggu

SEQ ID NO: 971079 - RNA, 19 nt, Artificial Sequence
  Description of Artificial Sequence: Synthetic oligonucleotide
gggcccgccucaucgacgg

SEQ ID NO: 971080 - RNA, 19 nt, Artificial Sequence
  Description of Artificial Sequence: Synthetic oligonucleotide
guagacggaggacuugagu

SEQ ID NO: 971081 - RNA, 19 nt, Artificial Sequence
  Description of Artificial Sequence: Synthetic oligonucleotide
acacgugcuggcucgccau

SEQ ID NO: 971082 - RNA, 19 nt, Artificial Sequence
  Description of Artificial Sequence: Synthetic oligonucleotide
cagcguacuucagggugcg

SEQ ID NO: 971083 - RNA, 19 nt, Artificial Sequence
  Description of Artificial Sequence: Synthetic oligonucleotide
gugcacggaggcccugccg

SEQ ID NO: 971084 - RNA, 19 nt, Artificial Sequence
  Description of Artificial Sequence: Synthetic oligonucleotide
ucacgggucuugucccgga

SEQ ID NO: 971085 - RNA, 19 nt, Artificial Sequence
  Description of Artificial Sequence: Synthetic oligonucleotide
cucgggcuugcucagcaca

SEQ ID NO: 971086 - RNA, 19 nt, Artificial Sequence
  Description of Artificial Sequence: Synthetic oligonucleotide
gaaucggaacccgcgcaga

SEQ ID NO: 971087 - RNA, 19 nt, Artificial Sequence
  Description of Artificial Sequence: Synthetic oligonucleotide
caccaagcaucaccaguuc

SEQ ID NO: 971088 - RNA, 19 nt, Artificial Sequence
  Description of Artificial Sequence: Synthetic oligonucleotide
cagucgcagcuucucccgg

SEQ ID NO: 971089 - RNA, 19 nt, Artificial Sequence
  Description of Artificial Sequence: Synthetic oligonucleotide
gcuggcucgccaugcuugg

SEQ ID NO: 971090 - RNA, 19 nt, Artificial Sequence
  Description of Artificial Sequence: Synthetic oligonucleotide
ucagauuggcuggcguuuu

SEQ ID NO: 971091 - RNA, 19 nt, Artificial Sequence
  Description of Artificial Sequence: Synthetic oligonucleotide
ucuaccuggugugcaucuc

SEQ ID NO: 971092 - RNA, 19 nt, Artificial Sequence
  Description of Artificial Sequence: Synthetic oligonucleotide
ggaacccgcgcagacuccg

SEQ ID NO: 971093 - RNA, 19 nt, Artificial Sequence
  Description of Artificial Sequence: Synthetic oligonucleotide
agcacacgugcuggcucgc

SEQ ID NO: 971094 - RNA, 19 nt, Artificial Sequence
  Description of Artificial Sequence: Synthetic oligonucleotide
gucaaggagaggaacuggu

SEQ ID NO: 971095 - RNA, 19 nt, Artificial Sequence
  Description of Artificial Sequence: Synthetic oligonucleotide
ggacagcccauauauuaaa

SEQ ID NO: 971096 - RNA, 19 nt, Artificial Sequence
  Description of Artificial Sequence: Synthetic oligonucleotide
agcaccaguccucgggcuu

SEQ ID NO: 971097 - RNA, 19 nt, Artificial Sequence
  Description of Artificial Sequence: Synthetic oligonucleotide
gagugcacggaggcccugc

SEQ ID NO: 971098 - RNA, 19 nt, Artificial Sequence
  Description of Artificial Sequence: Synthetic oligonucleotide
gcaggcauuugucccugcc

SEQ ID NO: 971099 - RNA, 19 nt, Artificial Sequence
  Description of Artificial Sequence: Synthetic oligonucleotide
aaacccgguguguguuguu

SEQ ID NO: 971100 - RNA, 19 nt, Artificial Sequence
  Description of Artificial Sequence: Synthetic oligonucleotide
acgggucuugucccggaaa

SEQ ID NO: 971101 - RNA, 19 nt, Artificial Sequence
  Description of Artificial Sequence: Synthetic oligonucleotide
gcauaggggucauagccaa

SEQ ID NO: 971102 - RNA, 19 nt, Artificial Sequence
  Description of Artificial Sequence: Synthetic oligonucleotide
ggaccgcucgaucuuggac

SEQ ID NO: 971103 - RNA, 19 nt, Artificial Sequence
  Description of Artificial Sequence: Synthetic oligonucleotide
gaacccgcgcagacuccgg

SEQ ID NO: 971104 - RNA, 19 nt, Artificial Sequence
  Description of Artificial Sequence: Synthetic oligonucleotide
cuccgugcgcuucgcuugc

SEQ ID NO: 971105 - RNA, 19 nt, Artificial Sequence
  Description of Artificial Sequence: Synthetic oligonucleotide
uugaccaggccugccgcau

SEQ ID NO: 971106 - RNA, 19 nt, Artificial Sequence
  Description of Artificial Sequence: Synthetic oligonucleotide
caggcgugccagguagacg

SEQ ID NO: 971107 - RNA, 19 nt, Artificial Sequence
  Description of Artificial Sequence: Synthetic oligonucleotide
aucggaacccgcgcagacu

SEQ ID NO: 971108 - RNA, 19 nt, Artificial Sequence
  Description of Artificial Sequence: Synthetic oligonucleotide
ugcuuggguuaguccgacu

SEQ ID NO: 971109 - RNA, 19 nt, Artificial Sequence
  Description of Artificial Sequence: Synthetic oligonucleotide
uccgucacaccugccucgu

SEQ ID NO: 971110 - RNA, 19 nt, Artificial Sequence
  Description of Artificial Sequence: Synthetic oligonucleotide
gacgggucagaaggucuac

SEQ ID NO: 971111 - RNA, 19 nt, Artificial Sequence
  Description of Artificial Sequence: Synthetic oligonucleotide
cacggaggcccugccgucg

SEQ ID NO: 971112 - RNA, 19 nt, Artificial Sequence
  Description of Artificial Sequence: Synthetic oligonucleotide
ggacuacaggaugaaggac

SEQ ID NO: 971113 - RNA, 19 nt, Artificial Sequence
  Description of Artificial Sequence: Synthetic oligonucleotide
aacaggcgugccagguaga

SEQ ID NO: 971114 - RNA, 19 nt, Artificial Sequence
  Description of Artificial Sequence: Synthetic oligonucleotide
gggugcgcauccagcaugg

SEQ ID NO: 971115 - RNA, 19 nt, Artificial Sequence
  Description of Artificial Sequence: Synthetic oligonucleotide
ucccauaguuggguggguu

SEQ ID NO: 971116 - RNA, 19 nt, Artificial Sequence
  Description of Artificial Sequence: Synthetic oligonucleotide
aggcccugccgucgcgcac

SEQ ID NO: 971117 - RNA, 19 nt, Artificial Sequence
  Description of Artificial Sequence: Synthetic oligonucleotide
cccggccagacuuugacca

SEQ ID NO: 971118 - RNA, 19 nt, Artificial Sequence
  Description of Artificial Sequence: Synthetic oligonucleotide
agcguacuucagggugcgc

SEQ ID NO: 971119 - RNA, 19 nt, Artificial Sequence
  Description of Artificial Sequence: Synthetic oligonucleotide
gcucccucauuuccaagca

SEQ ID NO: 971120 - RNA, 19 nt, Artificial Sequence
  Description of Artificial Sequence: Synthetic oligonucleotide
uggugaccuuucgagugau

SEQ ID NO: 971121 - RNA, 19 nt, Artificial Sequence
  Description of Artificial Sequence: Synthetic oligonucleotide
cgagugaucauggagugca

SEQ ID NO: 971122 - RNA, 19 nt, Artificial Sequence
  Description of Artificial Sequence: Synthetic oligonucleotide
ccauaguuggguggguuug

SEQ ID NO: 971123 - RNA, 19 nt, Artificial Sequence
  Description of Artificial Sequence: Synthetic oligonucleotide
gugcgcuucgcuugcccca

SEQ ID NO: 971124 - RNA, 19 nt, Artificial Sequence
  Description of Artificial Sequence: Synthetic oligonucleotide
aguccgugcccgaaucgga

SEQ ID NO: 971125 - RNA, 19 nt, Artificial Sequence
  Description of Artificial Sequence: Synthetic oligonucleotide
ccuccgugcgcuucgcuug

SEQ ID NO: 971126 - RNA, 19 nt, Artificial Sequence
  Description of Artificial Sequence: Synthetic oligonucleotide
gucuaccuggugugcaucu

SEQ ID NO: 971127 - RNA, 19 nt, Artificial Sequence
  Description of Artificial Sequence: Synthetic oligonucleotide
cacacgagggaugaugcgu

SEQ ID NO: 971128 - RNA, 19 nt, Artificial Sequence
  Description of Artificial Sequence: Synthetic oligonucleotide
gcccgaaucggaacccgcg

SEQ ID NO: 971129 - RNA, 19 nt, Artificial Sequence
  Description of Artificial Sequence: Synthetic oligonucleotide
gaugagcggcauggccuug

SEQ ID NO: 971130 - RNA, 19 nt, Artificial Sequence
  Description of Artificial Sequence: Synthetic oligonucleotide
accgcccggcacuccaaca

SEQ ID NO: 971131 - RNA, 19 nt, Artificial Sequence
  Description of Artificial Sequence: Synthetic oligonucleotide
ugcgcuucgcuugccccaa

SEQ ID NO: 971132 - RNA, 19 nt, Artificial Sequence
  Description of Artificial Sequence: Synthetic oligonucleotide
aggcaggcauuugucccug

SEQ ID NO: 971133 - RNA, 19 nt, Artificial Sequence
  Description of Artificial Sequence: Synthetic oligonucleotide
guuacacagcacacgugcu

SEQ ID NO: 971134 - RNA, 19 nt, Artificial Sequence
  Description of Artificial Sequence: Synthetic oligonucleotide
uucccauaguugggugggu

SEQ ID NO: 971135 - RNA, 19 nt, Artificial Sequence
  Description of Artificial Sequence: Synthetic oligonucleotide
gcguacuucagggugcgca

SEQ ID NO: 971136 - RNA, 19 nt, Artificial Sequence
  Description of Artificial Sequence: Synthetic oligonucleotide
cccgaaucggaacccgcgc

SEQ ID NO: 971137 - RNA, 19 nt, Artificial Sequence
  Description of Artificial Sequence: Synthetic oligonucleotide
ccggcacuccaacacuugc

SEQ ID NO: 971138 - RNA, 19 nt, Artificial Sequence
  Description of Artificial Sequence: Synthetic oligonucleotide
ccgugcccgaaucggaacc

SEQ ID NO: 971139 - RNA, 19 nt, Artificial Sequence
  Description of Artificial Sequence: Synthetic oligonucleotide
aggaugcguuugagugagc

SEQ ID NO: 971140 - RNA, 19 nt, Artificial Sequence
  Description of Artificial Sequence: Synthetic oligonucleotide
guacuucagggugcgcauc

SEQ ID NO: 971141 - RNA, 19 nt, Artificial Sequence
  Description of Artificial Sequence: Synthetic oligonucleotide
cgaaucggaacccgcgcag

SEQ ID NO: 971142 - RNA, 19 nt, Artificial Sequence
  Description of Artificial Sequence: Synthetic oligonucleotide
ucccggaaaugaggccacc

SEQ ID NO: 971143 - RNA, 19 nt, Artificial Sequence
  Description of Artificial Sequence: Synthetic oligonucleotide
ccuugcgcaccgacaggcg

SEQ ID NO: 971144 - RNA, 19 nt, Artificial Sequence
  Description of Artificial Sequence: Synthetic oligonucleotide
gacagucucgguagcuacu

SEQ ID NO: 971145 - RNA, 19 nt, Artificial Sequence
  Description of Artificial Sequence: Synthetic oligonucleotide
gaggcccugccgucgcgca

SEQ ID NO: 971146 - RNA, 19 nt, Artificial Sequence
  Description of Artificial Sequence: Synthetic oligonucleotide
gcguuugagugagcgucgg

SEQ ID NO: 971147 - RNA, 19 nt, Artificial Sequence
  Description of Artificial Sequence: Synthetic oligonucleotide
caccugccucguccagucg

SEQ ID NO: 971148 - RNA, 19 nt, Artificial Sequence
  Description of Artificial Sequence: Synthetic oligonucleotide
guacgccacccacaaagau

SEQ ID NO: 971149 - RNA, 19 nt, Artificial Sequence
  Description of Artificial Sequence: Synthetic oligonucleotide
gcuucucccggccagacuu

SEQ ID NO: 971150 - RNA, 19 nt, Artificial Sequence
  Description of Artificial Sequence: Synthetic oligonucleotide
gugcuuggguuaguccgac

SEQ ID NO: 971151 - RNA, 19 nt, Artificial Sequence
  Description of Artificial Sequence: Synthetic oligonucleotide
cguagcgauacuccaccug

SEQ ID NO: 971152 - RNA, 19 nt, Artificial Sequence
  Description of Artificial Sequence: Synthetic oligonucleotide
acagagguuuugaguccgu

SEQ ID NO: 971153 - RNA, 19 nt, Artificial Sequence
  Description of Artificial Sequence: Synthetic oligonucleotide
gguacgccacccacaaaga

SEQ ID NO: 971154 - RNA, 19 nt, Artificial Sequence
  Description of Artificial Sequence: Synthetic oligonucleotide
auccuccgugcgcuucgcu

SEQ ID NO: 971155 - RNA, 19 nt, Artificial Sequence
  Description of Artificial Sequence: Synthetic oligonucleotide
gcguuuuauagucuccuuu

SEQ ID NO: 971156 - RNA, 19 nt, Artificial Sequence
  Description of Artificial Sequence: Synthetic oligonucleotide
gggucuugucccggaaaug

SEQ ID NO: 971157 - RNA, 19 nt, Artificial Sequence
  Description of Artificial Sequence: Synthetic oligonucleotide
ccgucgcgcaccauuagca

SEQ ID NO: 971158 - RNA, 19 nt, Artificial Sequence
  Description of Artificial Sequence: Synthetic oligonucleotide
cauccuccgugcgcuucgc

SEQ ID NO: 971159 - RNA, 19 nt, Artificial Sequence
  Description of Artificial Sequence: Synthetic oligonucleotide
cugccgcauggccagcaca

SEQ ID NO: 971160 - RNA, 19 nt, Artificial Sequence
  Description of Artificial Sequence: Synthetic oligonucleotide
cgugcgcuucgcuugcccc

SEQ ID NO: 971161 - RNA, 19 nt, Artificial Sequence
  Description of Artificial Sequence: Synthetic oligonucleotide
cuggcucgccaugcuuggc

SEQ ID NO: 971162 - RNA, 19 nt, Artificial Sequence
  Description of Artificial Sequence: Synthetic oligonucleotide
ccgacuucuguguacacau

SEQ ID NO: 971163 - RNA, 19 nt, Artificial Sequence
  Description of Artificial Sequence: Synthetic oligonucleotide
cgucgcgcaccauuagcag

SEQ ID NO: 971164 - RNA, 19 nt, Artificial Sequence
  Description of Artificial Sequence: Synthetic oligonucleotide
acggaggacuugaguguga

SEQ ID NO: 971165 - RNA, 19 nt, Artificial Sequence
  Description of Artificial Sequence: Synthetic oligonucleotide
caccgcccggcacuccaac

SEQ ID NO: 971166 - RNA, 19 nt, Artificial Sequence
  Description of Artificial Sequence: Synthetic oligonucleotide
ccuugccguagcgauacuc

SEQ ID NO: 971167 - RNA, 19 nt, Artificial Sequence
  Description of Artificial Sequence: Synthetic oligonucleotide
ggaacaggcgugccaggua

SEQ ID NO: 971168 - RNA, 19 nt, Artificial Sequence
  Description of Artificial Sequence: Synthetic oligonucleotide
gagguacgccacccacaaa

SEQ ID NO: 971169 - RNA, 19 nt, Artificial Sequence
  Description of Artificial Sequence: Synthetic oligonucleotide
gggcucccucauuuccaag

SEQ ID NO: 971170 - RNA, 19 nt, Artificial Sequence
  Description of Artificial Sequence: Synthetic oligonucleotide
cguuugagugagcgucggg

SEQ ID NO: 971171 - RNA, 19 nt, Artificial Sequence
  Description of Artificial Sequence: Synthetic oligonucleotide
gaccgaaaaucaggaacuu

SEQ ID NO: 971172 - RNA, 19 nt, Artificial Sequence
  Description of Artificial Sequence: Synthetic oligonucleotide
caaucgggucaggguuccc

SEQ ID NO: 971173 - RNA, 19 nt, Artificial Sequence
  Description of Artificial Sequence: Synthetic oligonucleotide
uccgugcgcuucgcuugcc

SEQ ID NO: 971174 - RNA, 19 nt, Artificial Sequence
  Description of Artificial Sequence: Synthetic oligonucleotide
ccacuuaguaagacagucu

SEQ ID NO: 971175 - RNA, 19 nt, Artificial Sequence
  Description of Artificial Sequence: Synthetic oligonucleotide
guccgugcccgaaucggaa

SEQ ID NO: 971176 - RNA, 19 nt, Artificial Sequence
  Description of Artificial Sequence: Synthetic oligonucleotide
ggucaggguucccauaguu

SEQ ID NO: 971177 - RNA, 19 nt, Artificial Sequence
  Description of Artificial Sequence: Synthetic oligonucleotide
caucgacgggucagaaggu

SEQ ID NO: 971178 - RNA, 19 nt, Artificial Sequence
  Description of Artificial Sequence: Synthetic oligonucleotide
cagcguccagcaccucauc

SEQ ID NO: 971179 - RNA, 19 nt, Artificial Sequence
  Description of Artificial Sequence: Synthetic oligonucleotide
cccagguguggggagguac

SEQ ID NO: 971180 - RNA, 19 nt, Artificial Sequence
  Description of Artificial Sequence: Synthetic oligonucleotide
ccggccagacuuugaccag

SEQ ID NO: 971181 - RNA, 19 nt, Artificial Sequence
  Description of Artificial Sequence: Synthetic oligonucleotide
ccgcccggcacuccaacac

SEQ ID NO: 971182 - RNA, 19 nt, Artificial Sequence
  Description of Artificial Sequence: Synthetic oligonucleotide
ccgaaucggaacccgcgca

SEQ ID NO: 971183 - RNA, 19 nt, Artificial Sequence
  Description of Artificial Sequence: Synthetic oligonucleotide
ggcccugccgucgcgcacc

SEQ ID NO: 971184 - RNA, 19 nt, Artificial Sequence
  Description of Artificial Sequence: Synthetic oligonucleotide
ccuuucgagugaucaugga

SEQ ID NO: 971185 - RNA, 19 nt, Artificial Sequence
  Description of Artificial Sequence: Synthetic oligonucleotide
cccggcacuccaacacuug

SEQ ID NO: 971186 - RNA, 19 nt, Artificial Sequence
  Description of Artificial Sequence: Synthetic oligonucleotide
gccgcauggccagcacacg

SEQ ID NO: 971187 - RNA, 19 nt, Artificial Sequence
  Description of Artificial Sequence: Synthetic oligonucleotide
ggcaggcauuugucccugc

SEQ ID NO: 971188 - RNA, 19 nt, Artificial Sequence
  Description of Artificial Sequence: Synthetic oligonucleotide
gcgugccagguagacggag

SEQ ID NO: 971189 - RNA, 19 nt, Artificial Sequence
  Description of Artificial Sequence: Synthetic oligonucleotide
ccggaaaugaggccaccaa

SEQ ID NO: 971190 - RNA, 19 nt, Artificial Sequence
  Description of Artificial Sequence: Synthetic oligonucleotide
cugcgagguacgccaccca

SEQ ID NO: 971191 - RNA, 19 nt, Artificial Sequence
  Description of Artificial Sequence: Synthetic oligonucleotide
cagauuggcuggcguuuua

SEQ ID NO: 971192 - RNA, 19 nt, Artificial Sequence
  Description of Artificial Sequence: Synthetic oligonucleotide
gcccauauauuaaacucuu

SEQ ID NO: 971193 - RNA, 19 nt, Artificial Sequence
  Description of Artificial Sequence: Synthetic oligonucleotide
cgcaccauuagcaggaauu

SEQ ID NO: 971194 - RNA, 19 nt, Artificial Sequence
  Description of Artificial Sequence: Synthetic oligonucleotide
gcucgaucuuggacaagga

SEQ ID NO: 971195 - RNA, 19 nt, Artificial Sequence
  Description of Artificial Sequence: Synthetic oligonucleotide
cgagguacgccacccacaa

SEQ ID NO: 971196 - RNA, 19 nt, Artificial Sequence
  Description of Artificial Sequence: Synthetic oligonucleotide
cccgccucaucgacggguc

SEQ ID NO: 971197 - RNA, 19 nt, Artificial Sequence
  Description of Artificial Sequence: Synthetic oligonucleotide
cggccagacuuugaccagg

SEQ ID NO: 971198 - RNA, 19 nt, Artificial Sequence
  Description of Artificial Sequence: Synthetic oligonucleotide
ccgugcgcuucgcuugccc

SEQ ID NO: 971199 - RNA, 19 nt, Artificial Sequence
  Description of Artificial Sequence: Synthetic oligonucleotide
cacagcacacgugcuggcu

SEQ ID NO: 971200 - RNA, 19 nt, Artificial Sequence
  Description of Artificial Sequence: Synthetic oligonucleotide
gcaccauuagcaggaauuu

SEQ ID NO: 971201 - RNA, 19 nt, Artificial Sequence
  Description of Artificial Sequence: Synthetic oligonucleotide
ggccagugugcagccagca

SEQ ID NO: 971202 - RNA, 19 nt, Artificial Sequence
  Description of Artificial Sequence: Synthetic oligonucleotide
ggcguuuuauagucuccuu

SEQ ID NO: 971203 - RNA, 19 nt, Artificial Sequence
  Description of Artificial Sequence: Synthetic oligonucleotide
cugugucacuccaggcgau

SEQ ID NO: 971204 - RNA, 19 nt, Artificial Sequence
  Description of Artificial Sequence: Synthetic oligonucleotide
ccgcgcagacuccggcucc

SEQ ID NO: 971205 - RNA, 19 nt, Artificial Sequence
  Description of Artificial Sequence: Synthetic oligonucleotide
gcuuccaaguucacggguu

SEQ ID NO: 971206 - RNA, 19 nt, Artificial Sequence
  Description of Artificial Sequence: Synthetic oligonucleotide
cuguggaccgcucgaucuu

SEQ ID NO: 971207 - RNA, 19 nt, Artificial Sequence
  Description of Artificial Sequence: Synthetic oligonucleotide
ggugcgcauccagcauggc

SEQ ID NO: 971208 - RNA, 19 nt, Artificial Sequence
  Description of Artificial Sequence: Synthetic oligonucleotide
gccucaucgacgggucaga

SEQ ID NO: 971209 - RNA, 19 nt, Artificial Sequence
  Description of Artificial Sequence: Synthetic oligonucleotide
cgccucaucgacgggucag

SEQ ID NO: 971210 - RNA, 19 nt, Artificial Sequence
  Description of Artificial Sequence: Synthetic oligonucleotide
gggagguacuguucugguu

SEQ ID NO: 971211 - RNA, 19 nt, Artificial Sequence
  Description of Artificial Sequence: Synthetic oligonucleotide
cccggaaaugaggccacca

SEQ ID NO: 971212 - RNA, 19 nt, Artificial Sequence
  Description of Artificial Sequence: Synthetic oligonucleotide
ggagugcacggaggcccug

SEQ ID NO: 971213 - RNA, 19 nt, Artificial Sequence
  Description of Artificial Sequence: Synthetic oligonucleotide
cagggugcgcauccagcau

SEQ ID NO: 971214 - RNA, 19 nt, Artificial Sequence
  Description of Artificial Sequence: Synthetic oligonucleotide
gggauguggccaguccacu

SEQ ID NO: 971215 - RNA, 19 nt, Artificial Sequence
  Description of Artificial Sequence: Synthetic oligonucleotide
gcauggcacgcaugagggu

SEQ ID NO: 971216 - RNA, 19 nt, Artificial Sequence
  Description of Artificial Sequence: Synthetic oligonucleotide
cagagguuuugaguccguu

SEQ ID NO: 971217 - RNA, 19 nt, Artificial Sequence
  Description of Artificial Sequence: Synthetic oligonucleotide
cuucucccggccagacuuu

SEQ ID NO: 971218 - RNA, 19 nt, Artificial Sequence
  Description of Artificial Sequence: Synthetic oligonucleotide
cggaacccgcgcagacucc

SEQ ID NO: 971219 - RNA, 19 nt, Artificial Sequence
  Description of Artificial Sequence: Synthetic oligonucleotide
ccagguagacggaggacuu

SEQ ID NO: 971220 - RNA, 19 nt, Artificial Sequence
  Description of Artificial Sequence: Synthetic oligonucleotide
ggcacgcaugaggguggug

SEQ ID NO: 971221 - RNA, 19 nt, Artificial Sequence
  Description of Artificial Sequence: Synthetic oligonucleotide
cggcaccaagcaucaccag

SEQ ID NO: 971222 - RNA, 19 nt, Artificial Sequence
  Description of Artificial Sequence: Synthetic oligonucleotide
gcgcuucgcuugccccaag

SEQ ID NO: 971223 - RNA, 19 nt, Artificial Sequence
  Description of Artificial Sequence: Synthetic oligonucleotide
ccugccgucgcgcaccauu

SEQ ID NO: 971224 - RNA, 19 nt, Artificial Sequence
  Description of Artificial Sequence: Synthetic oligonucleotide
ggcuggcguuuuauagucu

SEQ ID NO: 971225 - RNA, 19 nt, Artificial Sequence
  Description of Artificial Sequence: Synthetic oligonucleotide
cggcauggccuugccguag

SEQ ID NO: 971226 - RNA, 19 nt, Artificial Sequence
  Description of Artificial Sequence: Synthetic oligonucleotide
ggcgugccagguagacgga

SEQ ID NO: 971227 - RNA, 19 nt, Artificial Sequence
  Description of Artificial Sequence: Synthetic oligonucleotide
gcccgccucaucgacgggu

SEQ ID NO: 971228 - RNA, 19 nt, Artificial Sequence
  Description of Artificial Sequence: Synthetic oligonucleotide
ggcuugcucagcacagcuu

SEQ ID NO: 971229 - RNA, 19 nt, Artificial Sequence
  Description of Artificial Sequence: Synthetic oligonucleotide
ccucaucgacgggucagaa

SEQ ID NO: 971230 - RNA, 19 nt, Artificial Sequence
  Description of Artificial Sequence: Synthetic oligonucleotide
cgggucuugucccggaaau

SEQ ID NO: 971231 - RNA, 19 nt, Artificial Sequence
  Description of Artificial Sequence: Synthetic oligonucleotide
ccuggucggcaccaagcau

SEQ ID NO: 971232 - RNA, 19 nt, Artificial Sequence
  Description of Artificial Sequence: Synthetic oligonucleotide
ccguagcgauacuccaccu

SEQ ID NO: 971233 - RNA, 19 nt, Artificial Sequence
  Description of Artificial Sequence: Synthetic oligonucleotide
gcgcaccauuagcaggaau

SEQ ID NO: 971234 - RNA, 19 nt, Artificial Sequence
  Description of Artificial Sequence: Synthetic oligonucleotide
ccgucacaccugccucguc

SEQ ID NO: 971235 - RNA, 19 nt, Artificial Sequence
  Description of Artificial Sequence: Synthetic oligonucleotide
ccgccucaucgacggguca

SEQ ID NO: 971236 - RNA, 19 nt, Artificial Sequence
  Description of Artificial Sequence: Synthetic oligonucleotide
ggccugccgcauggccagc

SEQ ID NO: 971237 - RNA, 19 nt, Artificial Sequence
  Description of Artificial Sequence: Synthetic oligonucleotide
gcccggcacuccaacacuu

SEQ ID NO: 971238 - RNA, 19 nt, Artificial Sequence
  Description of Artificial Sequence: Synthetic oligonucleotide
gcaccgcccggcacuccaa

SEQ ID NO: 971239 - RNA, 19 nt, Artificial Sequence
  Description of Artificial Sequence: Synthetic oligonucleotide
ccacguccccagggaugug

SEQ ID NO: 971240 - RNA, 19 nt, Artificial Sequence
  Description of Artificial Sequence: Synthetic oligonucleotide
cgguagcuacugaggucaa

SEQ ID NO: 971241 - RNA, 19 nt, Artificial Sequence
  Description of Artificial Sequence: Synthetic oligonucleotide
cgcuugccccaagcaccgc

SEQ ID NO: 971242 - RNA, 19 nt, Artificial Sequence
  Description of Artificial Sequence: Synthetic oligonucleotide
cgcgcaccauuagcaggaa

SEQ ID NO: 971243 - RNA, 19 nt, Artificial Sequence
  Description of Artificial Sequence: Synthetic oligonucleotide
aaacauaacauagacagcc

SEQ ID NO: 971244 - RNA, 19 nt, Artificial Sequence
  Description of Artificial Sequence: Synthetic oligonucleotide
aauauuaccaguaaaagga

SEQ ID NO: 971245 - RNA, 19 nt, Artificial Sequence
  Description of Artificial Sequence: Synthetic oligonucleotide
uuaaagaggagcaugaaca

SEQ ID NO: 971246 - RNA, 19 nt, Artificial Sequence
  Description of Artificial Sequence: Synthetic oligonucleotide
ggaaacauaacauagacag

SEQ ID NO: 971247 - RNA, 19 nt, Artificial Sequence
  Description of Artificial Sequence: Synthetic oligonucleotide
aaagacuacauucagcgug

SEQ ID NO: 971248 - RNA, 19 nt, Artificial Sequence
  Description of Artificial Sequence: Synthetic oligonucleotide
uauaaauugaccaaauaaa

SEQ ID NO: 971249 - RNA, 19 nt, Artificial Sequence
  Description of Artificial Sequence: Synthetic oligonucleotide
aauuacaucguauaacgca

SEQ ID NO: 971250 - RNA, 19 nt, Artificial Sequence
  Description of Artificial Sequence: Synthetic oligonucleotide
acuguuagggcccauuucc

SEQ ID NO: 971251 - RNA, 19 nt, Artificial Sequence
  Description of Artificial Sequence: Synthetic oligonucleotide
guaaucacgaugcaaaucc

SEQ ID NO: 971252 - RNA, 19 nt, Artificial Sequence
  Description of Artificial Sequence: Synthetic oligonucleotide
uguaucauacaaauuaaac

SEQ ID NO: 971253 - RNA, 19 nt, Artificial Sequence
  Description of Artificial Sequence: Synthetic oligonucleotide
aaugauauaguugaaucca

SEQ ID NO: 971254 - RNA, 19 nt, Artificial Sequence
  Description of Artificial Sequence: Synthetic oligonucleotide
aguguauacaugcaugacg

SEQ ID NO: 971255 - RNA, 19 nt, Artificial Sequence
  Description of Artificial Sequence: Synthetic oligonucleotide
aacacacguuaucacagcc

SEQ ID NO: 971256 - RNA, 19 nt, Artificial Sequence
  Description of Artificial Sequence: Synthetic oligonucleotide
aaaugagucgguuuuaaaa

SEQ ID NO: 971257 - RNA, 19 nt, Artificial Sequence
  Description of Artificial Sequence: Synthetic oligonucleotide
aaugagucgguuuuaaaau

SEQ ID NO: 971258 - RNA, 19 nt, Artificial Sequence
  Description of Artificial Sequence: Synthetic oligonucleotide
uaaaucguguuccaaacca

SEQ ID NO: 971259 - RNA, 19 nt, Artificial Sequence
  Description of Artificial Sequence: Synthetic oligonucleotide
agcaugaacaaauagucug

SEQ ID NO: 971260 - RNA, 19 nt, Artificial Sequence
  Description of Artificial Sequence: Synthetic oligonucleotide
acggaaacauaacauagac

SEQ ID NO: 971261 - RNA, 19 nt, Artificial Sequence
  Description of Artificial Sequence: Synthetic oligonucleotide
ugaccaaauaaagaaaucc

SEQ ID NO: 971262 - RNA, 19 nt, Artificial Sequence
  Description of Artificial Sequence: Synthetic oligonucleotide
agacaagucauacuguuag

SEQ ID NO: 971263 - RNA, 19 nt, Artificial Sequence
  Description of Artificial Sequence: Synthetic oligonucleotide
aagucggacgcccuggccc

SEQ ID NO: 971264 - RNA, 19 nt, Artificial Sequence
  Description of Artificial Sequence: Synthetic oligonucleotide
aacucaugaaaccgaacuc

SEQ ID NO: 971265 - RNA, 19 nt, Artificial Sequence
  Description of Artificial Sequence: Synthetic oligonucleotide
aguauagcggccaugacac

SEQ ID NO: 971266 - RNA, 19 nt, Artificial Sequence
  Description of Artificial Sequence: Synthetic oligonucleotide
aaggcuucgggccagagga

SEQ ID NO: 971267 - RNA, 19 nt, Artificial Sequence
  Description of Artificial Sequence: Synthetic oligonucleotide
aaacacacguuaucacagc

SEQ ID NO: 971268 - RNA, 19 nt, Artificial Sequence
  Description of Artificial Sequence: Synthetic oligonucleotide
aaaacgacacaaucacguc

SEQ ID NO: 971269 - RNA, 19 nt, Artificial Sequence
  Description of Artificial Sequence: Synthetic oligonucleotide
aagcccguaaucacgaugc

SEQ ID NO: 971270 - RNA, 19 nt, Artificial Sequence
  Description of Artificial Sequence: Synthetic oligonucleotide
aaguauagcggccaugaca

SEQ ID NO: 971271 - RNA, 19 nt, Artificial Sequence
  Description of Artificial Sequence: Synthetic oligonucleotide
gaguguaucauacaaauua

SEQ ID NO: 971272 - RNA, 19 nt, Artificial Sequence
  Description of Artificial Sequence: Synthetic oligonucleotide
auauccauugcuaagcccg

SEQ ID NO: 971273 - RNA, 19 nt, Artificial Sequence
  Description of Artificial Sequence: Synthetic oligonucleotide
aaauuacaucguauaacgc

SEQ ID NO: 971274 - RNA, 19 nt, Artificial Sequence
  Description of Artificial Sequence: Synthetic oligonucleotide
uggagaucacauaaaacug

SEQ ID NO: 971275 - RNA, 19 nt, Artificial Sequence
  Description of Artificial Sequence: Synthetic oligonucleotide
uuauuuagugaugagcuga

SEQ ID NO: 971276 - RNA, 19 nt, Artificial Sequence
  Description of Artificial Sequence: Synthetic oligonucleotide
augaaaccgaacucuuucc

SEQ ID NO: 971277 - RNA, 19 nt, Artificial Sequence
  Description of Artificial Sequence: Synthetic oligonucleotide
aaacgacacaaucacgucu

SEQ ID NO: 971278 - RNA, 19 nt, Artificial Sequence
  Description of Artificial Sequence: Synthetic oligonucleotide
uauacaugcaugacgggac

SEQ ID NO: 971279 - RNA, 19 nt, Artificial Sequence
  Description of Artificial Sequence: Synthetic oligonucleotide
aggggagugggucugauuc

SEQ ID NO: 971280 - RNA, 19 nt, Artificial Sequence
  Description of Artificial Sequence: Synthetic oligonucleotide
ugauauaguugaauccaag

SEQ ID NO: 971281 - RNA, 19 nt, Artificial Sequence
  Description of Artificial Sequence: Synthetic oligonucleotide
gauagaggaaggcuucggg

SEQ ID NO: 971282 - RNA, 19 nt, Artificial Sequence
  Description of Artificial Sequence: Synthetic oligonucleotide
uuaaaucguguuccaaacc

SEQ ID NO: 971283 - RNA, 19 nt, Artificial Sequence
  Description of Artificial Sequence: Synthetic oligonucleotide
cuuaaaucguguuccaaac

SEQ ID NO: 971284 - RNA, 19 nt, Artificial Sequence
  Description of Artificial Sequence: Synthetic oligonucleotide
ccagccauuauucagacgg

SEQ ID NO: 971285 - RNA, 19 nt, Artificial Sequence
  Description of Artificial Sequence: Synthetic oligonucleotide
aacgagguucccaaugagc

SEQ ID NO: 971286 - RNA, 19 nt, Artificial Sequence
  Description of Artificial Sequence: Synthetic oligonucleotide
aacuuuauuuagugaugag

SEQ ID NO: 971287 - RNA, 19 nt, Artificial Sequence
  Description of Artificial Sequence: Synthetic oligonucleotide
ugcuaagcccguaaucacg

SEQ ID NO: 971288 - RNA, 19 nt, Artificial Sequence
  Description of Artificial Sequence: Synthetic oligonucleotide
uaugaacaacaauacauau

SEQ ID NO: 971289 - RNA, 19 nt, Artificial Sequence
  Description of Artificial Sequence: Synthetic oligonucleotide
aacgacacaaucacgucuc

SEQ ID NO: 971290 - RNA, 19 nt, Artificial Sequence
  Description of Artificial Sequence: Synthetic oligonucleotide
auuaaacauggagaggcac

SEQ ID NO: 971291 - RNA, 19 nt, Artificial Sequence
  Description of Artificial Sequence: Synthetic oligonucleotide
uuucaagccgugcagagua

SEQ ID NO: 971292 - RNA, 19 nt, Artificial Sequence
  Description of Artificial Sequence: Synthetic oligonucleotide
ugagucgguuuuaaaaucu

SEQ ID NO: 971293 - RNA, 19 nt, Artificial Sequence
  Description of Artificial Sequence: Synthetic oligonucleotide
aaguugcacauuuuaauuu

SEQ ID NO: 971294 - RNA, 19 nt, Artificial Sequence
  Description of Artificial Sequence: Synthetic oligonucleotide
auuacaucguauaacgcag

SEQ ID NO: 971295 - RNA, 19 nt, Artificial Sequence
  Description of Artificial Sequence: Synthetic oligonucleotide
aacgcagcacagcagaggu

SEQ ID NO: 971296 - RNA, 19 nt, Artificial Sequence
  Description of Artificial Sequence: Synthetic oligonucleotide
augagucgguuuuaaaauc

SEQ ID NO: 971297 - RNA, 19 nt, Artificial Sequence
  Description of Artificial Sequence: Synthetic oligonucleotide
uugaaugggaagcaugaaa

SEQ ID NO: 971298 - RNA, 19 nt, Artificial Sequence
  Description of Artificial Sequence: Synthetic oligonucleotide
auugcuaagcccguaauca

SEQ ID NO: 971299 - RNA, 19 nt, Artificial Sequence
  Description of Artificial Sequence: Synthetic oligonucleotide
aaccaguagcgcgugaugg

SEQ ID NO: 971300 - RNA, 19 nt, Artificial Sequence
  Description of Artificial Sequence: Synthetic oligonucleotide
uaaaacugauccagugaag

SEQ ID NO: 971301 - RNA, 19 nt, Artificial Sequence
  Description of Artificial Sequence: Synthetic oligonucleotide
cuaacaacccacuuggcca

SEQ ID NO: 971302 - RNA, 19 nt, Artificial Sequence
  Description of Artificial Sequence: Synthetic oligonucleotide
ucgguuuuaaaaucugcac

SEQ ID NO: 971303 - RNA, 19 nt, Artificial Sequence
  Description of Artificial Sequence: Synthetic oligonucleotide
agucauacuguuagggccc

SEQ ID NO: 971304 - RNA, 19 nt, Artificial Sequence
  Description of Artificial Sequence: Synthetic oligonucleotide
agcacggacaugaugaggg

SEQ ID NO: 971305 - RNA, 19 nt, Artificial Sequence
  Description of Artificial Sequence: Synthetic oligonucleotide
agcaugaaacuugagcaac

SEQ ID NO: 971306 - RNA, 19 nt, Artificial Sequence
  Description of Artificial Sequence: Synthetic oligonucleotide
ugaaaccgaacucuuucca

SEQ ID NO: 971307 - RNA, 19 nt, Artificial Sequence
  Description of Artificial Sequence: Synthetic oligonucleotide
uacggaaacauaacauaga

SEQ ID NO: 971308 - RNA, 19 nt, Artificial Sequence
  Description of Artificial Sequence: Synthetic oligonucleotide
ucguguuccaaaccaaaac

SEQ ID NO: 971309 - RNA, 19 nt, Artificial Sequence
  Description of Artificial Sequence: Synthetic oligonucleotide
cauucaaaguauagcggcc

SEQ ID NO: 971310 - RNA, 19 nt, Artificial Sequence
  Description of Artificial Sequence: Synthetic oligonucleotide
guacggaaacauaacauag

SEQ ID NO: 971311 - RNA, 19 nt, Artificial Sequence
  Description of Artificial Sequence: Synthetic oligonucleotide
cauaacauagacagccuuc

SEQ ID NO: 971312 - RNA, 19 nt, Artificial Sequence
  Description of Artificial Sequence: Synthetic oligonucleotide
auuaagcgggccuggcagc

SEQ ID NO: 971313 - RNA, 19 nt, Artificial Sequence
  Description of Artificial Sequence: Synthetic oligonucleotide
cauuaagcgggccuggcag

SEQ ID NO: 971314 - RNA, 19 nt, Artificial Sequence
  Description of Artificial Sequence: Synthetic oligonucleotide
uccccgauguccgacaugg

SEQ ID NO: 971315 - RNA, 19 nt, Artificial Sequence
  Description of Artificial Sequence: Synthetic oligonucleotide
ucacauaaauuacaucgua

SEQ ID NO: 971316 - RNA, 19 nt, Artificial Sequence
  Description of Artificial Sequence: Synthetic oligonucleotide
caucguauaacgcagcaca

SEQ ID NO: 971317 - RNA, 19 nt, Artificial Sequence
  Description of Artificial Sequence: Synthetic oligonucleotide
aauccaaggauaacccaag

SEQ ID NO: 971318 - RNA, 19 nt, Artificial Sequence
  Description of Artificial Sequence: Synthetic oligonucleotide
uccaaggauaacccaaggu

SEQ ID NO: 971319 - RNA, 19 nt, Artificial Sequence
  Description of Artificial Sequence: Synthetic oligonucleotide
ucagacggaaaggaggaag

SEQ ID NO: 971320 - RNA, 19 nt, Artificial Sequence
  Description of Artificial Sequence: Synthetic oligonucleotide
caucacaguuuuaaugcgc

SEQ ID NO: 971321 - RNA, 19 nt, Artificial Sequence
  Description of Artificial Sequence: Synthetic oligonucleotide
gacaagucauacuguuagg

SEQ ID NO: 971322 - RNA, 19 nt, Artificial Sequence
  Description of Artificial Sequence: Synthetic oligonucleotide
uguauacaugcaugacggg

SEQ ID NO: 971323 - RNA, 19 nt, Artificial Sequence
  Description of Artificial Sequence: Synthetic oligonucleotide
uacaucguauaacgcagca

SEQ ID NO: 971324 - RNA, 19 nt, Artificial Sequence
  Description of Artificial Sequence: Synthetic oligonucleotide
aagcaugaaacuugagcaa

SEQ ID NO: 971325 - RNA, 19 nt, Artificial Sequence
  Description of Artificial Sequence: Synthetic oligonucleotide
uaacaacccacuuggccag

SEQ ID NO: 971326 - RNA, 19 nt, Artificial Sequence
  Description of Artificial Sequence: Synthetic oligonucleotide
auacaugcaugacgggacg

SEQ ID NO: 971327 - RNA, 19 nt, Artificial Sequence
  Description of Artificial Sequence: Synthetic oligonucleotide
uaagcccguaaucacgaug

SEQ ID NO: 971328 - RNA, 19 nt, Artificial Sequence
  Description of Artificial Sequence: Synthetic oligonucleotide
gaaacuugagcaacacuug

SEQ ID NO: 971329 - RNA, 19 nt, Artificial Sequence
  Description of Artificial Sequence: Synthetic oligonucleotide
ugaauccaaggauaaccca

SEQ ID NO: 971330 - RNA, 19 nt, Artificial Sequence
  Description of Artificial Sequence: Synthetic oligonucleotide
accaguagcgcgugauggc

SEQ ID NO: 971331 - RNA, 19 nt, Artificial Sequence
  Description of Artificial Sequence: Synthetic oligonucleotide
agucgguuuuaaaaucugc

SEQ ID NO: 971332 - RNA, 19 nt, Artificial Sequence
  Description of Artificial Sequence: Synthetic oligonucleotide
uauagcggccaugacacug

SEQ ID NO: 971333 - RNA, 19 nt, Artificial Sequence
  Description of Artificial Sequence: Synthetic oligonucleotide
cucgccucaugcuagcagg

SEQ ID NO: 971334 - RNA, 19 nt, Artificial Sequence
  Description of Artificial Sequence: Synthetic oligonucleotide
uuacaucguauaacgcagc

SEQ ID NO: 971335 - RNA, 19 nt, Artificial Sequence
  Description of Artificial Sequence: Synthetic oligonucleotide
gagcuugccgaucgaaggg

SEQ ID NO: 971336 - RNA, 19 nt, Artificial Sequence
  Description of Artificial Sequence: Synthetic oligonucleotide
acucaugaaaccgaacucu

SEQ ID NO: 971337 - RNA, 19 nt, Artificial Sequence
  Description of Artificial Sequence: Synthetic oligonucleotide
auaacauagacagccuuca

SEQ ID NO: 971338 - RNA, 19 nt, Artificial Sequence
  Description of Artificial Sequence: Synthetic oligonucleotide
ucguugaucaccgagccuc

SEQ ID NO: 971339 - RNA, 19 nt, Artificial Sequence
  Description of Artificial Sequence: Synthetic oligonucleotide
aguugcacauuuuaauuua

SEQ ID NO: 971340 - RNA, 19 nt, Artificial Sequence
  Description of Artificial Sequence: Synthetic oligonucleotide
ucagguccgagcacggcag

SEQ ID NO: 971341 - RNA, 19 nt, Artificial Sequence
  Description of Artificial Sequence: Synthetic oligonucleotide
aaaccaguagcgcgugaug

SEQ ID NO: 971342 - RNA, 19 nt, Artificial Sequence
  Description of Artificial Sequence: Synthetic oligonucleotide
gagguacggaaacauaaca

SEQ ID NO: 971343 - RNA, 19 nt, Artificial Sequence
  Description of Artificial Sequence: Synthetic oligonucleotide
caaaacgacacaaucacgu

SEQ ID NO: 971344 - RNA, 19 nt, Artificial Sequence
  Description of Artificial Sequence: Synthetic oligonucleotide
uaucacagccucaggucag

SEQ ID NO: 971345 - RNA, 19 nt, Artificial Sequence
  Description of Artificial Sequence: Synthetic oligonucleotide
gaaccaguccccgaugucc

SEQ ID NO: 971346 - RNA, 19 nt, Artificial Sequence
  Description of Artificial Sequence: Synthetic oligonucleotide
uccugcaaggaaccaacca

SEQ ID NO: 971347 - RNA, 19 nt, Artificial Sequence
  Description of Artificial Sequence: Synthetic oligonucleotide
auuaccaguaaaaggauua

SEQ ID NO: 971348 - RNA, 19 nt, Artificial Sequence
  Description of Artificial Sequence: Synthetic oligonucleotide
ugcuucgcacggcuggugg

SEQ ID NO: 971349 - RNA, 19 nt, Artificial Sequence
  Description of Artificial Sequence: Synthetic oligonucleotide
uccucccaaguccauuggg

SEQ ID NO: 971350 - RNA, 19 nt, Artificial Sequence
  Description of Artificial Sequence: Synthetic oligonucleotide
agcucguugaucaccgagc

SEQ ID NO: 971351 - RNA, 19 nt, Artificial Sequence
  Description of Artificial Sequence: Synthetic oligonucleotide
caaggauaacccaagguaa

SEQ ID NO: 971352 - RNA, 19 nt, Artificial Sequence
  Description of Artificial Sequence: Synthetic oligonucleotide
uaaucacgaugcaaaucca

SEQ ID NO: 971353 - RNA, 19 nt, Artificial Sequence
  Description of Artificial Sequence: Synthetic oligonucleotide
gaaggcuucgggccagagg

SEQ ID NO: 971354 - RNA, 19 nt, Artificial Sequence
  Description of Artificial Sequence: Synthetic oligonucleotide
agagguacggaaacauaac

SEQ ID NO: 971355 - RNA, 19 nt, Artificial Sequence
  Description of Artificial Sequence: Synthetic oligonucleotide
uuggccauuaagcgggccu

SEQ ID NO: 971356 - RNA, 19 nt, Artificial Sequence
  Description of Artificial Sequence: Synthetic oligonucleotide
acccaagaguguaucauac

SEQ ID NO: 971357 - RNA, 19 nt, Artificial Sequence
  Description of Artificial Sequence: Synthetic oligonucleotide
auccaaggauaacccaagg

SEQ ID NO: 971358 - RNA, 19 nt, Artificial Sequence
  Description of Artificial Sequence: Synthetic oligonucleotide
cacggcagcaaaaccuugg

SEQ ID NO: 971359 - RNA, 19 nt, Artificial Sequence
  Description of Artificial Sequence: Synthetic oligonucleotide
agucggacgcccuggcccc

SEQ ID NO: 971360 - RNA, 19 nt, Artificial Sequence
  Description of Artificial Sequence: Synthetic oligonucleotide
cuggccucccgucaaaagc

SEQ ID NO: 971361 - RNA, 19 nt, Artificial Sequence
  Description of Artificial Sequence: Synthetic oligonucleotide
gcuaacaacccacuuggcc

SEQ ID NO: 971362 - RNA, 19 nt, Artificial Sequence
  Description of Artificial Sequence: Synthetic oligonucleotide
auaugaacaacaauacaua

SEQ ID NO: 971363 - RNA, 19 nt, Artificial Sequence
  Description of Artificial Sequence: Synthetic oligonucleotide
cacacguuaucacagccuc

SEQ ID NO: 971364 - RNA, 19 nt, Artificial Sequence
  Description of Artificial Sequence: Synthetic oligonucleotide
acgaugcaaauccaguuaa

SEQ ID NO: 971365 - RNA, 19 nt, Artificial Sequence
  Description of Artificial Sequence: Synthetic oligonucleotide
gacuugaaugggaagcaug

SEQ ID NO: 971366 - RNA, 19 nt, Artificial Sequence
  Description of Artificial Sequence: Synthetic oligonucleotide
ucgaaggggaccgcggacg

SEQ ID NO: 971367 - RNA, 19 nt, Artificial Sequence
  Description of Artificial Sequence: Synthetic oligonucleotide
gaauccaaggauaacccaa

SEQ ID NO: 971368 - RNA, 19 nt, Artificial Sequence
  Description of Artificial Sequence: Synthetic oligonucleotide
accgaacucuuuccaacuc

SEQ ID NO: 971369 - RNA, 19 nt, Artificial Sequence
  Description of Artificial Sequence: Synthetic oligonucleotide
augccgagcuugccgaucg

SEQ ID NO: 971370 - RNA, 19 nt, Artificial Sequence
  Description of Artificial Sequence: Synthetic oligonucleotide
cacguuaucacagccucag

SEQ ID NO: 971371 - RNA, 19 nt, Artificial Sequence
  Description of Artificial Sequence: Synthetic oligonucleotide
acaucguauaacgcagcac

SEQ ID NO: 971372 - RNA, 19 nt, Artificial Sequence
  Description of Artificial Sequence: Synthetic oligonucleotide
cguguuccaaaccaaaacg

SEQ ID NO: 971373 - RNA, 19 nt, Artificial Sequence
  Description of Artificial Sequence: Synthetic oligonucleotide
uuaagcgggccuggcagcg

SEQ ID NO: 971374 - RNA, 19 nt, Artificial Sequence
  Description of Artificial Sequence: Synthetic oligonucleotide
accaguaaaaggauuaguu

SEQ ID NO: 971375 - RNA, 19 nt, Artificial Sequence
  Description of Artificial Sequence: Synthetic oligonucleotide
ucacgaugcaaauccaguu

SEQ ID NO: 971376 - RNA, 19 nt, Artificial Sequence
  Description of Artificial Sequence: Synthetic oligonucleotide
ugccaucugcuucgcacgg

SEQ ID NO: 971377 - RNA, 19 nt, Artificial Sequence
  Description of Artificial Sequence: Synthetic oligonucleotide
agacguagagcacggacau

SEQ ID NO: 971378 - RNA, 19 nt, Artificial Sequence
  Description of Artificial Sequence: Synthetic oligonucleotide
auucagacggaaaggagga

SEQ ID NO: 971379 - RNA, 19 nt, Artificial Sequence
  Description of Artificial Sequence: Synthetic oligonucleotide
cacaaucacgucucuguug

SEQ ID NO: 971380 - RNA, 19 nt, Artificial Sequence
  Description of Artificial Sequence: Synthetic oligonucleotide
augaugccgagcuugccga

SEQ ID NO: 971381 - RNA, 19 nt, Artificial Sequence
  Description of Artificial Sequence: Synthetic oligonucleotide
acgagguucccaaugagcu

SEQ ID NO: 971382 - RNA, 19 nt, Artificial Sequence
  Description of Artificial Sequence: Synthetic oligonucleotide
cagagguacggaaacauaa

SEQ ID NO: 971383 - RNA, 19 nt, Artificial Sequence
  Description of Artificial Sequence: Synthetic oligonucleotide
ucguauaacgcagcacagc

SEQ ID NO: 971384 - RNA, 19 nt, Artificial Sequence
  Description of Artificial Sequence: Synthetic oligonucleotide
aguguaucauacaaauuaa

SEQ ID NO: 971385 - RNA, 19 nt, Artificial Sequence
  Description of Artificial Sequence: Synthetic oligonucleotide
ugcaugacgggacgugugu

SEQ ID NO: 971386 - RNA, 19 nt, Artificial Sequence
  Description of Artificial Sequence: Synthetic oligonucleotide
aacuaacuggagaucacau

SEQ ID NO: 971387 - RNA, 19 nt, Artificial Sequence
  Description of Artificial Sequence: Synthetic oligonucleotide
aucgaaggggaccgcggac

SEQ ID NO: 971388 - RNA, 19 nt, Artificial Sequence
  Description of Artificial Sequence: Synthetic oligonucleotide
cccaagguaaauagcaggc

SEQ ID NO: 971389 - RNA, 19 nt, Artificial Sequence
  Description of Artificial Sequence: Synthetic oligonucleotide
cauugcuaagcccguaauc

SEQ ID NO: 971390 - RNA, 19 nt, Artificial Sequence
  Description of Artificial Sequence: Synthetic oligonucleotide
ugccgaucgaaggggaccg

SEQ ID NO: 971391 - RNA, 19 nt, Artificial Sequence
  Description of Artificial Sequence: Synthetic oligonucleotide
guagagcacggacaugaug

SEQ ID NO: 971392 - RNA, 19 nt, Artificial Sequence
  Description of Artificial Sequence: Synthetic oligonucleotide
uugcuaagcccguaaucac

SEQ ID NO: 971393 - RNA, 19 nt, Artificial Sequence
  Description of Artificial Sequence: Synthetic oligonucleotide
ucgccucaugcuagcaggg

SEQ ID NO: 971394 - RNA, 19 nt, Artificial Sequence
  Description of Artificial Sequence: Synthetic oligonucleotide
uucaaaguauagcggccau

SEQ ID NO: 971395 - RNA, 19 nt, Artificial Sequence
  Description of Artificial Sequence: Synthetic oligonucleotide
gaucaccgagccuccaaug

SEQ ID NO: 971396 - RNA, 19 nt, Artificial Sequence
  Description of Artificial Sequence: Synthetic oligonucleotide
aaucguguuccaaaccaaa

SEQ ID NO: 971397 - RNA, 19 nt, Artificial Sequence
  Description of Artificial Sequence: Synthetic oligonucleotide
auuggguaucugaacauga

SEQ ID NO: 971398 - RNA, 19 nt, Artificial Sequence
  Description of Artificial Sequence: Synthetic oligonucleotide
uacuguuagggcccauuuc

SEQ ID NO: 971399 - RNA, 19 nt, Artificial Sequence
  Description of Artificial Sequence: Synthetic oligonucleotide
aaggauaacccaagguaaa

SEQ ID NO: 971400 - RNA, 19 nt, Artificial Sequence
  Description of Artificial Sequence: Synthetic oligonucleotide
agcgauagaggaaggcuuc

SEQ ID NO: 971401 - RNA, 19 nt, Artificial Sequence
  Description of Artificial Sequence: Synthetic oligonucleotide
gucgguuuuaaaaucugca

SEQ ID NO: 971402 - RNA, 19 nt, Artificial Sequence
  Description of Artificial Sequence: Synthetic oligonucleotide
uauccauugcuaagcccgu

SEQ ID NO: 971403 - RNA, 19 nt, Artificial Sequence
  Description of Artificial Sequence: Synthetic oligonucleotide
ugaucaccgagccuccaau

SEQ ID NO: 971404 - RNA, 19 nt, Artificial Sequence
  Description of Artificial Sequence: Synthetic oligonucleotide
acuaacuggagaucacaua

SEQ ID NO: 971405 - RNA, 19 nt, Artificial Sequence
  Description of Artificial Sequence: Synthetic oligonucleotide
guaaagacuugaaugggaa

SEQ ID NO: 971406 - RNA, 19 nt, Artificial Sequence
  Description of Artificial Sequence: Synthetic oligonucleotide
cuacauucagcguggguca

SEQ ID NO: 971407 - RNA, 19 nt, Artificial Sequence
  Description of Artificial Sequence: Synthetic oligonucleotide
agguucagccucucuccac

SEQ ID NO: 971408 - RNA, 19 nt, Artificial Sequence
  Description of Artificial Sequence: Synthetic oligonucleotide
aaggggaccgcggacggug

SEQ ID NO: 971409 - RNA, 19 nt, Artificial Sequence
  Description of Artificial Sequence: Synthetic oligonucleotide
gggucugauucacaaagug

SEQ ID NO: 971410 - RNA, 19 nt, Artificial Sequence
  Description of Artificial Sequence: Synthetic oligonucleotide
cuuguacucaaagacuaca

SEQ ID NO: 971411 - RNA, 19 nt, Artificial Sequence
  Description of Artificial Sequence: Synthetic oligonucleotide
aaaucguguuccaaaccaa

SEQ ID NO: 971412 - RNA, 19 nt, Artificial Sequence
  Description of Artificial Sequence: Synthetic oligonucleotide
uaccaguaaaaggauuagu

SEQ ID NO: 971413 - RNA, 19 nt, Artificial Sequence
  Description of Artificial Sequence: Synthetic oligonucleotide
gguacggaaacauaacaua

SEQ ID NO: 971414 - RNA, 19 nt, Artificial Sequence
  Description of Artificial Sequence: Synthetic oligonucleotide
aagcgauagaggaaggcuu

SEQ ID NO: 971415 - RNA, 19 nt, Artificial Sequence
  Description of Artificial Sequence: Synthetic oligonucleotide
aacaacccacuuggccagc

SEQ ID NO: 971416 - RNA, 19 nt, Artificial Sequence
  Description of Artificial Sequence: Synthetic oligonucleotide
agcuugccgaucgaagggg

SEQ ID NO: 971417 - RNA, 19 nt, Artificial Sequence
  Description of Artificial Sequence: Synthetic oligonucleotide
gagucgguuuuaaaaucug

SEQ ID NO: 971418 - RNA, 19 nt, Artificial Sequence
  Description of Artificial Sequence: Synthetic oligonucleotide
gccgggaugcuccugaacc

SEQ ID NO: 971419 - RNA, 19 nt, Artificial Sequence
  Description of Artificial Sequence: Synthetic oligonucleotide
uguuggguagccagcggua

SEQ ID NO: 971420 - RNA, 19 nt, Artificial Sequence
  Description of Artificial Sequence: Synthetic oligonucleotide
auacuguuagggcccauuu

SEQ ID NO: 971421 - RNA, 19 nt, Artificial Sequence
  Description of Artificial Sequence: Synthetic oligonucleotide
uugccgaucgaaggggacc

SEQ ID NO: 971422 - RNA, 19 nt, Artificial Sequence
  Description of Artificial Sequence: Synthetic oligonucleotide
auauuaccaguaaaaggau

SEQ ID NO: 971423 - RNA, 19 nt, Artificial Sequence
  Description of Artificial Sequence: Synthetic oligonucleotide
aucguauaacgcagcacag

SEQ ID NO: 971424 - RNA, 19 nt, Artificial Sequence
  Description of Artificial Sequence: Synthetic oligonucleotide
guauaacgcagcacagcag

SEQ ID NO: 971425 - RNA, 19 nt, Artificial Sequence
  Description of Artificial Sequence: Synthetic oligonucleotide
guggcggcgaaaccaguag

SEQ ID NO: 971426 - RNA, 19 nt, Artificial Sequence
  Description of Artificial Sequence: Synthetic oligonucleotide
ggccagaggaagaaguagg

SEQ ID NO: 971427 - RNA, 19 nt, Artificial Sequence
  Description of Artificial Sequence: Synthetic oligonucleotide
gaagcgauagaggaaggcu

SEQ ID NO: 971428 - RNA, 19 nt, Artificial Sequence
  Description of Artificial Sequence: Synthetic oligonucleotide
gacggaaaggaggaagaga

SEQ ID NO: 971429 - RNA, 19 nt, Artificial Sequence
  Description of Artificial Sequence: Synthetic oligonucleotide
agguacggaaacauaacau

SEQ ID NO: 971430 - RNA, 19 nt, Artificial Sequence
  Description of Artificial Sequence: Synthetic oligonucleotide
gcaugaacaaauagucugc

SEQ ID NO: 971431 - RNA, 19 nt, Artificial Sequence
  Description of Artificial Sequence: Synthetic oligonucleotide
caaacccggacaccccucc

SEQ ID NO: 971432 - RNA, 19 nt, Artificial Sequence
  Description of Artificial Sequence: Synthetic oligonucleotide
ccaucacaguuuuaaugcg

SEQ ID NO: 971433 - RNA, 19 nt, Artificial Sequence
  Description of Artificial Sequence: Synthetic oligonucleotide
acguuaucacagccucagg

SEQ ID NO: 971434 - RNA, 19 nt, Artificial Sequence
  Description of Artificial Sequence: Synthetic oligonucleotide
cuaauauaugaacaacaau

SEQ ID NO: 971435 - RNA, 19 nt, Artificial Sequence
  Description of Artificial Sequence: Synthetic oligonucleotide
cagacggaaaggaggaaga

SEQ ID NO: 971436 - RNA, 19 nt, Artificial Sequence
  Description of Artificial Sequence: Synthetic oligonucleotide
agacggaaaggaggaagag

SEQ ID NO: 971437 - RNA, 19 nt, Artificial Sequence
  Description of Artificial Sequence: Synthetic oligonucleotide
aagacaagucauacuguua

SEQ ID NO: 971438 - RNA, 19 nt, Artificial Sequence
  Description of Artificial Sequence: Synthetic oligonucleotide
gaucgaaggggaccgcgga

SEQ ID NO: 971439 - RNA, 19 nt, Artificial Sequence
  Description of Artificial Sequence: Synthetic oligonucleotide
uccauaucuggaagcgaua

SEQ ID NO: 971440 - RNA, 19 nt, Artificial Sequence
  Description of Artificial Sequence: Synthetic oligonucleotide
caagccgugcagaguacug

SEQ ID NO: 971441 - RNA, 19 nt, Artificial Sequence
  Description of Artificial Sequence: Synthetic oligonucleotide
gugauggccgggaugcucc

SEQ ID NO: 971442 - RNA, 19 nt, Artificial Sequence
  Description of Artificial Sequence: Synthetic oligonucleotide
guccauuggguaucugaac

SEQ ID NO: 971443 - RNA, 19 nt, Artificial Sequence
  Description of Artificial Sequence: Synthetic oligonucleotide
ugacugcauucaaaguaua

SEQ ID NO: 971444 - RNA, 19 nt, Artificial Sequence
  Description of Artificial Sequence: Synthetic oligonucleotide
ucccgucaaaagcuccugu

SEQ ID NO: 971445 - RNA, 19 nt, Artificial Sequence
  Description of Artificial Sequence: Synthetic oligonucleotide
ucugaacaugaggaagaaa

SEQ ID NO: 971446 - RNA, 19 nt, Artificial Sequence
  Description of Artificial Sequence: Synthetic oligonucleotide
gacgggacgugugugagaa

SEQ ID NO: 971447 - RNA, 19 nt, Artificial Sequence
  Description of Artificial Sequence: Synthetic oligonucleotide
gucagguccgagcacggca

SEQ ID NO: 971448 - RNA, 19 nt, Artificial Sequence
  Description of Artificial Sequence: Synthetic oligonucleotide
auaacgcagcacagcagag

SEQ ID NO: 971449 - RNA, 19 nt, Artificial Sequence
  Description of Artificial Sequence: Synthetic oligonucleotide
uucaagccgugcagaguac

SEQ ID NO: 971450 - RNA, 19 nt, Artificial Sequence
  Description of Artificial Sequence: Synthetic oligonucleotide
cuugccgaucgaaggggac

SEQ ID NO: 971451 - RNA, 19 nt, Artificial Sequence
  Description of Artificial Sequence: Synthetic oligonucleotide
acccacggggaaauaaaag

SEQ ID NO: 971452 - RNA, 19 nt, Artificial Sequence
  Description of Artificial Sequence: Synthetic oligonucleotide
ucaagccgugcagaguacu

SEQ ID NO: 971453 - RNA, 19 nt, Artificial Sequence
  Description of Artificial Sequence: Synthetic oligonucleotide
cacauaaauuacaucguau

SEQ ID NO: 971454 - RNA, 19 nt, Artificial Sequence
  Description of Artificial Sequence: Synthetic oligonucleotide
gcucguugaucaccgagcc

SEQ ID NO: 971455 - RNA, 19 nt, Artificial Sequence
  Description of Artificial Sequence: Synthetic oligonucleotide
aaacccggacaccccuccu

SEQ ID NO: 971456 - RNA, 19 nt, Artificial Sequence
  Description of Artificial Sequence: Synthetic oligonucleotide
uacauucagcgugggucag

SEQ ID NO: 971457 - RNA, 19 nt, Artificial Sequence
  Description of Artificial Sequence: Synthetic oligonucleotide
ccuguuucaagccgugcag

SEQ ID NO: 971458 - RNA, 19 nt, Artificial Sequence
  Description of Artificial Sequence: Synthetic oligonucleotide
ggcggcgaaaccaguagcg

SEQ ID NO: 971459 - RNA, 19 nt, Artificial Sequence
  Description of Artificial Sequence: Synthetic oligonucleotide
ccauaucuggaagcgauag

SEQ ID NO: 971460 - RNA, 19 nt, Artificial Sequence
  Description of Artificial Sequence: Synthetic oligonucleotide
aggauaacccaagguaaau

SEQ ID NO: 971461 - RNA, 19 nt, Artificial Sequence
  Description of Artificial Sequence: Synthetic oligonucleotide
acacacguuaucacagccu

SEQ ID NO: 971462 - RNA, 19 nt, Artificial Sequence
  Description of Artificial Sequence: Synthetic oligonucleotide
gacgcccuggccccaguug

SEQ ID NO: 971463 - RNA, 19 nt, Artificial Sequence
  Description of Artificial Sequence: Synthetic oligonucleotide
cauaucuggaagcgauaga

SEQ ID NO: 971464 - RNA, 19 nt, Artificial Sequence
  Description of Artificial Sequence: Synthetic oligonucleotide
uacaugcaugacgggacgu

SEQ ID NO: 971465 - RNA, 19 nt, Artificial Sequence
  Description of Artificial Sequence: Synthetic oligonucleotide
caaugagcucguugaucac

SEQ ID NO: 971466 - RNA, 19 nt, Artificial Sequence
  Description of Artificial Sequence: Synthetic oligonucleotide
uggacccacggggaaauaa

SEQ ID NO: 971467 - RNA, 19 nt, Artificial Sequence
  Description of Artificial Sequence: Synthetic oligonucleotide
gagcacggcagcaaaaccu

SEQ ID NO: 971468 - RNA, 19 nt, Artificial Sequence
  Description of Artificial Sequence: Synthetic oligonucleotide
agccgugcagaguacugau

SEQ ID NO: 971469 - RNA, 19 nt, Artificial Sequence
  Description of Artificial Sequence: Synthetic oligonucleotide
cgaacucuuuccaacuccc

SEQ ID NO: 971470 - RNA, 19 nt, Artificial Sequence
  Description of Artificial Sequence: Synthetic oligonucleotide
ggcccagacguagagcacg

SEQ ID NO: 971471 - RNA, 19 nt, Artificial Sequence
  Description of Artificial Sequence: Synthetic oligonucleotide
ggaagcgauagaggaaggc

SEQ ID NO: 971472 - RNA, 19 nt, Artificial Sequence
  Description of Artificial Sequence: Synthetic oligonucleotide
cuuggccagccauuauuca

SEQ ID NO: 971473 - RNA, 19 nt, Artificial Sequence
  Description of Artificial Sequence: Synthetic oligonucleotide
uccgagcacggcagcaaaa

SEQ ID NO: 971474 - RNA, 19 nt, Artificial Sequence
  Description of Artificial Sequence: Synthetic oligonucleotide
gcuguguccugcuaauaca

SEQ ID NO: 971475 - RNA, 19 nt, Artificial Sequence
  Description of Artificial Sequence: Synthetic oligonucleotide
aucguguuccaaaccaaaa

SEQ ID NO: 971476 - RNA, 19 nt, Artificial Sequence
  Description of Artificial Sequence: Synthetic oligonucleotide
caagucggacgcccuggcc

SEQ ID NO: 971477 - RNA, 19 nt, Artificial Sequence
  Description of Artificial Sequence: Synthetic oligonucleotide
cuucgcacggcuggugggc

SEQ ID NO: 971478 - RNA, 19 nt, Artificial Sequence
  Description of Artificial Sequence: Synthetic oligonucleotide
uucgggccagaggaagaag

SEQ ID NO: 971479 - RNA, 19 nt, Artificial Sequence
  Description of Artificial Sequence: Synthetic oligonucleotide
ccaguaaaaggauuaguua

SEQ ID NO: 971480 - RNA, 19 nt, Artificial Sequence
  Description of Artificial Sequence: Synthetic oligonucleotide
cccguaaucacgaugcaaa

SEQ ID NO: 971481 - RNA, 19 nt, Artificial Sequence
  Description of Artificial Sequence: Synthetic oligonucleotide
ggggaaauaaaagguggca

SEQ ID NO: 971482 - RNA, 19 nt, Artificial Sequence
  Description of Artificial Sequence: Synthetic oligonucleotide
cguauaacgcagcacagca

SEQ ID NO: 971483 - RNA, 19 nt, Artificial Sequence
  Description of Artificial Sequence: Synthetic oligonucleotide
ugacgggacgugugugaga

SEQ ID NO: 971484 - RNA, 19 nt, Artificial Sequence
  Description of Artificial Sequence: Synthetic oligonucleotide
cuccauaucuggaagcgau

SEQ ID NO: 971485 - RNA, 19 nt, Artificial Sequence
  Description of Artificial Sequence: Synthetic oligonucleotide
gagcaugaacaaauagucu

SEQ ID NO: 971486 - RNA, 19 nt, Artificial Sequence
  Description of Artificial Sequence: Synthetic oligonucleotide
ccagacguagagcacggac

SEQ ID NO: 971487 - RNA, 19 nt, Artificial Sequence
  Description of Artificial Sequence: Synthetic oligonucleotide
ucugcuucgcacggcuggu

SEQ ID NO: 971488 - RNA, 19 nt, Artificial Sequence
  Description of Artificial Sequence: Synthetic oligonucleotide
agcacagcagagguacgga

SEQ ID NO: 971489 - RNA, 19 nt, Artificial Sequence
  Description of Artificial Sequence: Synthetic oligonucleotide
uuccuggacccacggggaa

SEQ ID NO: 971490 - RNA, 19 nt, Artificial Sequence
  Description of Artificial Sequence: Synthetic oligonucleotide
ugucucccgccuccauucu

SEQ ID NO: 971491 - RNA, 19 nt, Artificial Sequence
  Description of Artificial Sequence: Synthetic oligonucleotide
acgacacaaucacgucucu

SEQ ID NO: 971492 - RNA, 19 nt, Artificial Sequence
  Description of Artificial Sequence: Synthetic oligonucleotide
gaaaccaguagcgcgugau

SEQ ID NO: 971493 - RNA, 19 nt, Artificial Sequence
  Description of Artificial Sequence: Synthetic oligonucleotide
uaagcgggccuggcagcgg

SEQ ID NO: 971494 - RNA, 19 nt, Artificial Sequence
  Description of Artificial Sequence: Synthetic oligonucleotide
ggaaccaaccaaaguguca

SEQ ID NO: 971495 - RNA, 19 nt, Artificial Sequence
  Description of Artificial Sequence: Synthetic oligonucleotide
uucagacggaaaggaggaa

SEQ ID NO: 971496 - RNA, 19 nt, Artificial Sequence
  Description of Artificial Sequence: Synthetic oligonucleotide
gcuaagcccguaaucacga

SEQ ID NO: 971497 - RNA, 19 nt, Artificial Sequence
  Description of Artificial Sequence: Synthetic oligonucleotide
augcaugacgggacgugug

SEQ ID NO: 971498 - RNA, 19 nt, Artificial Sequence
  Description of Artificial Sequence: Synthetic oligonucleotide
gaaguaggccgggcugaug

SEQ ID NO: 971499 - RNA, 19 nt, Artificial Sequence
  Description of Artificial Sequence: Synthetic oligonucleotide
gacccacggggaaauaaaa

SEQ ID NO: 971500 - RNA, 19 nt, Artificial Sequence
  Description of Artificial Sequence: Synthetic oligonucleotide
gcuucgcacggcugguggg

SEQ ID NO: 971501 - RNA, 19 nt, Artificial Sequence
  Description of Artificial Sequence: Synthetic oligonucleotide
gccucucuccacccaagag

SEQ ID NO: 971502 - RNA, 19 nt, Artificial Sequence
  Description of Artificial Sequence: Synthetic oligonucleotide
caugaacaaauagucugcu

SEQ ID NO: 971503 - RNA, 19 nt, Artificial Sequence
  Description of Artificial Sequence: Synthetic oligonucleotide
agcacggcagcaaaaccuu

SEQ ID NO: 971504 - RNA, 19 nt, Artificial Sequence
  Description of Artificial Sequence: Synthetic oligonucleotide
cacccaagaguguaucaua

SEQ ID NO: 971505 - RNA, 19 nt, Artificial Sequence
  Description of Artificial Sequence: Synthetic oligonucleotide
gacguagagcacggacaug

SEQ ID NO: 971506 - RNA, 19 nt, Artificial Sequence
  Description of Artificial Sequence: Synthetic oligonucleotide
agcaaaugagucgguuuua

SEQ ID NO: 971507 - RNA, 19 nt, Artificial Sequence
  Description of Artificial Sequence: Synthetic oligonucleotide
gcgauagaggaaggcuucg

SEQ ID NO: 971508 - RNA, 19 nt, Artificial Sequence
  Description of Artificial Sequence: Synthetic oligonucleotide
aguccccgauguccgacau

SEQ ID NO: 971509 - RNA, 19 nt, Artificial Sequence
  Description of Artificial Sequence: Synthetic oligonucleotide
cggcgaaaccaguagcgcg

SEQ ID NO: 971510 - RNA, 19 nt, Artificial Sequence
  Description of Artificial Sequence: Synthetic oligonucleotide
ccaguagcgcgugauggcc

SEQ ID NO: 971511 - RNA, 19 nt, Artificial Sequence
  Description of Artificial Sequence: Synthetic oligonucleotide
agcccguaaucacgaugca

SEQ ID NO: 971512 - RNA, 19 nt, Artificial Sequence
  Description of Artificial Sequence: Synthetic oligonucleotide
gguagccagcgguacaaaa

SEQ ID NO: 971513 - RNA, 19 nt, Artificial Sequence
  Description of Artificial Sequence: Synthetic oligonucleotide
gacuacauucagcgugggu

SEQ ID NO: 971514 - RNA, 19 nt, Artificial Sequence
  Description of Artificial Sequence: Synthetic oligonucleotide
uucgcacggcuggugggca

SEQ ID NO: 971515 - RNA, 19 nt, Artificial Sequence
  Description of Artificial Sequence: Synthetic oligonucleotide
cagcucgccucaugcuagc

SEQ ID NO: 971516 - RNA, 19 nt, Artificial Sequence
  Description of Artificial Sequence: Synthetic oligonucleotide
gcagcucgccucaugcuag

SEQ ID NO: 971517 - RNA, 19 nt, Artificial Sequence
  Description of Artificial Sequence: Synthetic oligonucleotide
cccaguugugucucccgcc

SEQ ID NO: 971518 - RNA, 19 nt, Artificial Sequence
  Description of Artificial Sequence: Synthetic oligonucleotide
cagcaaaugagucgguuuu

SEQ ID NO: 971519 - RNA, 19 nt, Artificial Sequence
  Description of Artificial Sequence: Synthetic oligonucleotide
cagccuucaaguugcacau

SEQ ID NO: 971520 - RNA, 19 nt, Artificial Sequence
  Description of Artificial Sequence: Synthetic oligonucleotide
ccaacgagguucccaauga

SEQ ID NO: 971521 - RNA, 19 nt, Artificial Sequence
  Description of Artificial Sequence: Synthetic oligonucleotide
cuguuggguagccagcggu

SEQ ID NO: 971522 - RNA, 19 nt, Artificial Sequence
  Description of Artificial Sequence: Synthetic oligonucleotide
caguuuuaaugcgcagaca

SEQ ID NO: 971523 - RNA, 19 nt, Artificial Sequence
  Description of Artificial Sequence: Synthetic oligonucleotide
cucccgucaaaagcuccug

SEQ ID NO: 971524 - RNA, 19 nt, Artificial Sequence
  Description of Artificial Sequence: Synthetic oligonucleotide
ugggugggcuuggcuaaca

SEQ ID NO: 971525 - RNA, 19 nt, Artificial Sequence
  Description of Artificial Sequence: Synthetic oligonucleotide
uggcagugaauggccucca

SEQ ID NO: 971526 - RNA, 19 nt, Artificial Sequence
  Description of Artificial Sequence: Synthetic oligonucleotide
caccgagccuccaaugaua

SEQ ID NO: 971527 - RNA, 19 nt, Artificial Sequence
  Description of Artificial Sequence: Synthetic oligonucleotide
gggacgugugugagaagag

SEQ ID NO: 971528 - RNA, 19 nt, Artificial Sequence
  Description of Artificial Sequence: Synthetic oligonucleotide
agcaggccuuaaaucgugu

SEQ ID NO: 971529 - RNA, 19 nt, Artificial Sequence
  Description of Artificial Sequence: Synthetic oligonucleotide
cgaucgaaggggaccgcgg

SEQ ID NO: 971530 - RNA, 19 nt, Artificial Sequence
  Description of Artificial Sequence: Synthetic oligonucleotide
gcgugggucagguccgagc

SEQ ID NO: 971531 - RNA, 19 nt, Artificial Sequence
  Description of Artificial Sequence: Synthetic oligonucleotide
acgggacgugugugagaag

SEQ ID NO: 971532 - RNA, 19 nt, Artificial Sequence
  Description of Artificial Sequence: Synthetic oligonucleotide
caguugugucucccgccuc

SEQ ID NO: 971533 - RNA, 19 nt, Artificial Sequence
  Description of Artificial Sequence: Synthetic oligonucleotide
ugccgagcuugccgaucga

SEQ ID NO: 971534 - RNA, 19 nt, Artificial Sequence
  Description of Artificial Sequence: Synthetic oligonucleotide
ggccgggcugaugaugccg

SEQ ID NO: 971535 - RNA, 19 nt, Artificial Sequence
  Description of Artificial Sequence: Synthetic oligonucleotide
ggccuuaaaucguguucca

SEQ ID NO: 971536 - RNA, 19 nt, Artificial Sequence
  Description of Artificial Sequence: Synthetic oligonucleotide
gcgcagacaaagacaaguc

SEQ ID NO: 971537 - RNA, 19 nt, Artificial Sequence
  Description of Artificial Sequence: Synthetic oligonucleotide
guccccgauguccgacaug

SEQ ID NO: 971538 - RNA, 19 nt, Artificial Sequence
  Description of Artificial Sequence: Synthetic oligonucleotide
gguaaauagcaggccuuaa

SEQ ID NO: 971539 - RNA, 19 nt, Artificial Sequence
  Description of Artificial Sequence: Synthetic oligonucleotide
cauucagcgugggucaggu

SEQ ID NO: 971540 - RNA, 19 nt, Artificial Sequence
  Description of Artificial Sequence: Synthetic oligonucleotide
cuucgggccagaggaagaa

SEQ ID NO: 971541 - RNA, 19 nt, Artificial Sequence
  Description of Artificial Sequence: Synthetic oligonucleotide
guccgagcacggcagcaaa

SEQ ID NO: 971542 - RNA, 19 nt, Artificial Sequence
  Description of Artificial Sequence: Synthetic oligonucleotide
gcggcgaaaccaguagcgc

SEQ ID NO: 971543 - RNA, 19 nt, Artificial Sequence
  Description of Artificial Sequence: Synthetic oligonucleotide
ccccaguugugucucccgc

SEQ ID NO: 971544 - RNA, 19 nt, Artificial Sequence
  Description of Artificial Sequence: Synthetic oligonucleotide
ccgaucgaaggggaccgcg

SEQ ID NO: 971545 - RNA, 19 nt, Artificial Sequence
  Description of Artificial Sequence: Synthetic oligonucleotide
cgauagaggaaggcuucgg

SEQ ID NO: 971546 - RNA, 19 nt, Artificial Sequence
  Description of Artificial Sequence: Synthetic oligonucleotide
cguugaucaccgagccucc

SEQ ID NO: 971547 - RNA, 19 nt, Artificial Sequence
  Description of Artificial Sequence: Synthetic oligonucleotide
gcccagacguagagcacgg

SEQ ID NO: 971548 - RNA, 19 nt, Artificial Sequence
  Description of Artificial Sequence: Synthetic oligonucleotide
cuuggcuaacaacccacuu

SEQ ID NO: 971549 - RNA, 19 nt, Artificial Sequence
  Description of Artificial Sequence: Synthetic oligonucleotide
caguccccgauguccgaca

SEQ ID NO: 971550 - RNA, 19 nt, Artificial Sequence
  Description of Artificial Sequence: Synthetic oligonucleotide
caugcaugacgggacgugu

SEQ ID NO: 971551 - RNA, 19 nt, Artificial Sequence
  Description of Artificial Sequence: Synthetic oligonucleotide
gaccgcggacgguggcggc

SEQ ID NO: 971552 - RNA, 19 nt, Artificial Sequence
  Description of Artificial Sequence: Synthetic oligonucleotide
ggcgaaaccaguagcgcgu

SEQ ID NO: 971553 - RNA, 19 nt, Artificial Sequence
  Description of Artificial Sequence: Synthetic oligonucleotide
agcgugggucagguccgag

SEQ ID NO: 971554 - RNA, 19 nt, Artificial Sequence
  Description of Artificial Sequence: Synthetic oligonucleotide
guggcccgucagguggccg

SEQ ID NO: 971555 - RNA, 19 nt, Artificial Sequence
  Description of Artificial Sequence: Synthetic oligonucleotide
ggacccacggggaaauaaa

SEQ ID NO: 971556 - RNA, 19 nt, Artificial Sequence
  Description of Artificial Sequence: Synthetic oligonucleotide
gggucagguccgagcacgg

SEQ ID NO: 971557 - RNA, 19 nt, Artificial Sequence
  Description of Artificial Sequence: Synthetic oligonucleotide
gccauuaagcgggccuggc

SEQ ID NO: 971558 - RNA, 19 nt, Artificial Sequence
  Description of Artificial Sequence: Synthetic oligonucleotide
ucggacgcccuggccccag

SEQ ID NO: 971559 - RNA, 19 nt, Artificial Sequence
  Description of Artificial Sequence: Synthetic oligonucleotide
gccagaagcccacccguaa

SEQ ID NO: 971560 - RNA, 19 nt, Artificial Sequence
  Description of Artificial Sequence: Synthetic oligonucleotide
ccauuaagcgggccuggca

SEQ ID NO: 971561 - RNA, 19 nt, Artificial Sequence
  Description of Artificial Sequence: Synthetic oligonucleotide
gcuccuguuucaagccgug

SEQ ID NO: 971562 - RNA, 19 nt, Artificial Sequence
  Description of Artificial Sequence: Synthetic oligonucleotide
cugcuucgcacggcuggug

SEQ ID NO: 971563 - RNA, 19 nt, Artificial Sequence
  Description of Artificial Sequence: Synthetic oligonucleotide
auccauugcuaagcccgua

SEQ ID NO: 971564 - RNA, 19 nt, Artificial Sequence
  Description of Artificial Sequence: Synthetic oligonucleotide
aacucccaucacaguuuua

SEQ ID NO: 971565 - RNA, 19 nt, Artificial Sequence
  Description of Artificial Sequence: Synthetic oligonucleotide
ggaaggcuucgggccagag

SEQ ID NO: 971566 - RNA, 19 nt, Artificial Sequence
  Description of Artificial Sequence: Synthetic oligonucleotide
gcgaaaccaguagcgcgug

SEQ ID NO: 971567 - RNA, 19 nt, Artificial Sequence
  Description of Artificial Sequence: Synthetic oligonucleotide
ccaaacccggacaccccuc

SEQ ID NO: 971568 - RNA, 19 nt, Artificial Sequence
  Description of Artificial Sequence: Synthetic oligonucleotide
ggucagguccgagcacggc

SEQ ID NO: 971569 - RNA, 19 nt, Artificial Sequence
  Description of Artificial Sequence: Synthetic oligonucleotide
ccuuggccauuaagcgggc

SEQ ID NO: 971570 - RNA, 19 nt, Artificial Sequence
  Description of Artificial Sequence: Synthetic oligonucleotide
cauacuguuagggcccauu

SEQ ID NO: 971571 - RNA, 19 nt, Artificial Sequence
  Description of Artificial Sequence: Synthetic oligonucleotide
gccucccgucaaaagcucc

SEQ ID NO: 971572 - RNA, 19 nt, Artificial Sequence
  Description of Artificial Sequence: Synthetic oligonucleotide
cagcgggagggcacugcca

SEQ ID NO: 971573 - RNA, 19 nt, Artificial Sequence
  Description of Artificial Sequence: Synthetic oligonucleotide
ccgugcagaguacugauau

SEQ ID NO: 971574 - RNA, 19 nt, Artificial Sequence
  Description of Artificial Sequence: Synthetic oligonucleotide
cucguugaucaccgagccu

SEQ ID NO: 971575 - RNA, 19 nt, Artificial Sequence
  Description of Artificial Sequence: Synthetic oligonucleotide
guauagcggccaugacacu

SEQ ID NO: 971576 - RNA, 19 nt, Artificial Sequence
  Description of Artificial Sequence: Synthetic oligonucleotide
cgggacgugugugagaaga

SEQ ID NO: 971577 - RNA, 19 nt, Artificial Sequence
  Description of Artificial Sequence: Synthetic oligonucleotide
ccgggaugcuccugaacca

SEQ ID NO: 971578 - RNA, 19 nt, Artificial Sequence
  Description of Artificial Sequence: Synthetic oligonucleotide
ggagagccggagaguucag

SEQ ID NO: 971579 - RNA, 19 nt, Artificial Sequence
  Description of Artificial Sequence: Synthetic oligonucleotide
ccgucagguggccggcugc

SEQ ID NO: 971580 - RNA, 19 nt, Artificial Sequence
  Description of Artificial Sequence: Synthetic oligonucleotide
agccagaagcccacccgua

SEQ ID NO: 971581 - RNA, 19 nt, Artificial Sequence
  Description of Artificial Sequence: Synthetic oligonucleotide
gguggcggcgaaaccagua

SEQ ID NO: 971582 - RNA, 19 nt, Artificial Sequence
  Description of Artificial Sequence: Synthetic oligonucleotide
gcacggcagcaaaaccuug

SEQ ID NO: 971583 - RNA, 19 nt, Artificial Sequence
  Description of Artificial Sequence: Synthetic oligonucleotide
gcuucgggccagaggaaga

SEQ ID NO: 971584 - RNA, 19 nt, Artificial Sequence
  Description of Artificial Sequence: Synthetic oligonucleotide
gugagaagagaagggccuu

SEQ ID NO: 971585 - RNA, 19 nt, Artificial Sequence
  Description of Artificial Sequence: Synthetic oligonucleotide
cuaagcccguaaucacgau

SEQ ID NO: 971586 - RNA, 19 nt, Artificial Sequence
  Description of Artificial Sequence: Synthetic oligonucleotide
ccagcaaaugagucgguuu

SEQ ID NO: 971587 - RNA, 19 nt, Artificial Sequence
  Description of Artificial Sequence: Synthetic oligonucleotide
ggacuugcuguguccugcu

SEQ ID NO: 971588 - RNA, 19 nt, Artificial Sequence
  Description of Artificial Sequence: Synthetic oligonucleotide
gcccguaaucacgaugcaa

SEQ ID NO: 971589 - RNA, 19 nt, Artificial Sequence
  Description of Artificial Sequence: Synthetic oligonucleotide
ccaacucccaucacaguuu

SEQ ID NO: 971590 - RNA, 19 nt, Artificial Sequence
  Description of Artificial Sequence: Synthetic oligonucleotide
cggacgguggcggcgaaac

SEQ ID NO: 971591 - RNA, 19 nt, Artificial Sequence
  Description of Artificial Sequence: Synthetic oligonucleotide
ccaguugugucucccgccu

SEQ ID NO: 971592 - RNA, 19 nt, Artificial Sequence
  Description of Artificial Sequence: Synthetic oligonucleotide
gguccgagcacggcagcaa

SEQ ID NO: 971593 - RNA, 19 nt, Artificial Sequence
  Description of Artificial Sequence: Synthetic oligonucleotide
ccgggcugaugaugccgag

SEQ ID NO: 971594 - RNA, 19 nt, Artificial Sequence
  Description of Artificial Sequence: Synthetic oligonucleotide
ccucccgucaaaagcuccu

SEQ ID NO: 971595 - RNA, 19 nt, Artificial Sequence
  Description of Artificial Sequence: Synthetic oligonucleotide
cgggcugaugaugccgagc

SEQ ID NO: 971596 - RNA, 19 nt, Artificial Sequence
  Description of Artificial Sequence: Synthetic oligonucleotide
ccguaaucacgaugcaaau

SEQ ID NO: 971597 - RNA, 19 nt, Artificial Sequence
  Description of Artificial Sequence: Synthetic oligonucleotide
ccauugcuaagcccguaau

SEQ ID NO: 971598 - RNA, 19 nt, Artificial Sequence
  Description of Artificial Sequence: Synthetic oligonucleotide
ggcccgucagguggccggc

SEQ ID NO: 971599 - RNA, 19 nt, Artificial Sequence
  Description of Artificial Sequence: Synthetic oligonucleotide
cccgucaaaagcuccuguu

SEQ ID NO: 971600 - RNA, 19 nt, Artificial Sequence
  Description of Artificial Sequence: Synthetic oligonucleotide
cgcacggcuggugggcagg

SEQ ID NO: 971601 - RNA, 19 nt, Artificial Sequence
  Description of Artificial Sequence: Synthetic oligonucleotide
gccgaucgaaggggaccgc

SEQ ID NO: 971602 - RNA, 19 nt, Artificial Sequence
  Description of Artificial Sequence: Synthetic oligonucleotide
ggcagugaauggccuccau

SEQ ID NO: 971603 - RNA, 19 nt, Artificial Sequence
  Description of Artificial Sequence: Synthetic oligonucleotide
cccggacaccccuccucuc

SEQ ID NO: 971604 - RNA, 19 nt, Artificial Sequence
  Description of Artificial Sequence: Synthetic oligonucleotide
gccgugcagaguacugaua

SEQ ID NO: 971605 - RNA, 19 nt, Artificial Sequence
  Description of Artificial Sequence: Synthetic oligonucleotide
gucggacgcccuggcccca

SEQ ID NO: 971606 - RNA, 19 nt, Artificial Sequence
  Description of Artificial Sequence: Synthetic oligonucleotide
cgaaaccaguagcgcguga

SEQ ID NO: 971607 - RNA, 19 nt, Artificial Sequence
  Description of Artificial Sequence: Synthetic oligonucleotide
ccgagccuccaaugauaua

SEQ ID NO: 971608 - RNA, 19 nt, Artificial Sequence
  Description of Artificial Sequence: Synthetic oligonucleotide
cccagacguagagcacgga

SEQ ID NO: 971609 - RNA, 19 nt, Artificial Sequence
  Description of Artificial Sequence: Synthetic oligonucleotide
ggacgcccuggccccaguu

SEQ ID NO: 971610 - RNA, 19 nt, Artificial Sequence
  Description of Artificial Sequence: Synthetic oligonucleotide
gcggacgguggcggcgaaa

SEQ ID NO: 971611 - RNA, 19 nt, Artificial Sequence
  Description of Artificial Sequence: Synthetic oligonucleotide
gcgugauggccgggaugcu

SEQ ID NO: 971612 - RNA, 19 nt, Artificial Sequence
  Description of Artificial Sequence: Synthetic oligonucleotide
ccccgauguccgacauggu

SEQ ID NO: 971613 - RNA, 19 nt, Artificial Sequence
  Description of Artificial Sequence: Synthetic oligonucleotide
cgguggcggcgaaaccagu

SEQ ID NO: 971614 - RNA, 19 nt, Artificial Sequence
  Description of Artificial Sequence: Synthetic oligonucleotide
cggacgcccuggccccagu

SEQ ID NO: 971615 - RNA, 19 nt, Artificial Sequence
  Description of Artificial Sequence: Synthetic oligonucleotide
aagaauauggacuccagcu

SEQ ID NO: 971616 - RNA, 19 nt, Artificial Sequence
  Description of Artificial Sequence: Synthetic oligonucleotide
aucauaacaggccagaaag

SEQ ID NO: 971617 - RNA, 19 nt, Artificial Sequence
  Description of Artificial Sequence: Synthetic oligonucleotide
aaugaagugacgacugucc

SEQ ID NO: 971618 - RNA, 19 nt, Artificial Sequence
  Description of Artificial Sequence: Synthetic oligonucleotide
uauuauuucagcccagccc

SEQ ID NO: 971619 - RNA, 19 nt, Artificial Sequence
  Description of Artificial Sequence: Synthetic oligonucleotide
uauaaaagaugagugggcg

SEQ ID NO: 971620 - RNA, 19 nt, Artificial Sequence
  Description of Artificial Sequence: Synthetic oligonucleotide
auuauuucagcccagcccu

SEQ ID NO: 971621 - RNA, 19 nt, Artificial Sequence
  Description of Artificial Sequence: Synthetic oligonucleotide
uuuagcaccgauuuagaga

SEQ ID NO: 971622 - RNA, 19 nt, Artificial Sequence
  Description of Artificial Sequence: Synthetic oligonucleotide
aauuagacuuuuauuugcg

SEQ ID NO: 971623 - RNA, 19 nt, Artificial Sequence
  Description of Artificial Sequence: Synthetic oligonucleotide
uuagcaccgauuuagagau

SEQ ID NO: 971624 - RNA, 19 nt, Artificial Sequence
  Description of Artificial Sequence: Synthetic oligonucleotide
agaugaaugaagugacgac

SEQ ID NO: 971625 - RNA, 19 nt, Artificial Sequence
  Description of Artificial Sequence: Synthetic oligonucleotide
uagacuuuuauuugcguca

SEQ ID NO: 971626 - RNA, 19 nt, Artificial Sequence
  Description of Artificial Sequence: Synthetic oligonucleotide
uuaaguucacagucuagcc

SEQ ID NO: 971627 - RNA, 19 nt, Artificial Sequence
  Description of Artificial Sequence: Synthetic oligonucleotide
uuucccgccaccaccaggg

SEQ ID NO: 971628 - RNA, 19 nt, Artificial Sequence
  Description of Artificial Sequence: Synthetic oligonucleotide
caaauaaaaugcucccugg

SEQ ID NO: 971629 - RNA, 19 nt, Artificial Sequence
  Description of Artificial Sequence: Synthetic oligonucleotide
accgauuuagagauggugc

SEQ ID NO: 971630 - RNA, 19 nt, Artificial Sequence
  Description of Artificial Sequence: Synthetic oligonucleotide
aucgauuugcugcacauug

SEQ ID NO: 971631 - RNA, 19 nt, Artificial Sequence
  Description of Artificial Sequence: Synthetic oligonucleotide
uucacacacagacacacac

SEQ ID NO: 971632 - RNA, 19 nt, Artificial Sequence
  Description of Artificial Sequence: Synthetic oligonucleotide
auaaaagaugagugggcgg

SEQ ID NO: 971633 - RNA, 19 nt, Artificial Sequence
  Description of Artificial Sequence: Synthetic oligonucleotide
aaccccauauaaaagauga

SEQ ID NO: 971634 - RNA, 19 nt, Artificial Sequence
  Description of Artificial Sequence: Synthetic oligonucleotide
uaaaagaugagugggcggc

SEQ ID NO: 971635 - RNA, 19 nt, Artificial Sequence
  Description of Artificial Sequence: Synthetic oligonucleotide
auagauggauccucuuccc

SEQ ID NO: 971636 - RNA, 19 nt, Artificial Sequence
  Description of Artificial Sequence: Synthetic oligonucleotide
cacacagacacacacacac

SEQ ID NO: 971637 - RNA, 19 nt, Artificial Sequence
  Description of Artificial Sequence: Synthetic oligonucleotide
gacacacacacacacagac

SEQ ID NO: 971638 - RNA, 19 nt, Artificial Sequence
  Description of Artificial Sequence: Synthetic oligonucleotide
uguccagcuauuaacaaau

SEQ ID NO: 971639 - RNA, 19 nt, Artificial Sequence
  Description of Artificial Sequence: Synthetic oligonucleotide
cacagucuagccaaggugc

SEQ ID NO: 971640 - RNA, 19 nt, Artificial Sequence
  Description of Artificial Sequence: Synthetic oligonucleotide
ugugcauugcaguagggcu

SEQ ID NO: 971641 - RNA, 19 nt, Artificial Sequence
  Description of Artificial Sequence: Synthetic oligonucleotide
cuuguguccagcuauuaac

SEQ ID NO: 971642 - RNA, 19 nt, Artificial Sequence
  Description of Artificial Sequence: Synthetic oligonucleotide
gacacacacacacacacac

SEQ ID NO: 971643 - RNA, 19 nt, Artificial Sequence
  Description of Artificial Sequence: Synthetic oligonucleotide
cacgcugaagccuuuaccc

SEQ ID NO: 971644 - RNA, 19 nt, Artificial Sequence
  Description of Artificial Sequence: Synthetic oligonucleotide
uuagacuuuuauuugcguc

SEQ ID NO: 971645 - RNA, 19 nt, Artificial Sequence
  Description of Artificial Sequence: Synthetic oligonucleotide
aaucauaacaggccagaaa

SEQ ID NO: 971646 - RNA, 19 nt, Artificial Sequence
  Description of Artificial Sequence: Synthetic oligonucleotide
cacacacacacacagacac

SEQ ID NO: 971647 - RNA, 19 nt, Artificial Sequence
  Description of Artificial Sequence: Synthetic oligonucleotide
agugacgacugucccaggc

SEQ ID NO: 971648 - RNA, 19 nt, Artificial Sequence
  Description of Artificial Sequence: Synthetic oligonucleotide
ugcugcacauugacgaugg

SEQ ID NO: 971649 - RNA, 19 nt, Artificial Sequence
  Description of Artificial Sequence: Synthetic oligonucleotide
ucaaucagucgguuggucc

SEQ ID NO: 971650 - RNA, 19 nt, Artificial Sequence
  Description of Artificial Sequence: Synthetic oligonucleotide
cacacacacacacacauac

SEQ ID NO: 971651 - RNA, 19 nt, Artificial Sequence
  Description of Artificial Sequence: Synthetic oligonucleotide
aaaugcucccuggagggac

SEQ ID NO: 971652 - RNA, 19 nt, Artificial Sequence
  Description of Artificial Sequence: Synthetic oligonucleotide
cuuuacaaaggaagagacc

SEQ ID NO: 971653 - RNA, 19 nt, Artificial Sequence
  Description of Artificial Sequence: Synthetic oligonucleotide
ugacaaccccauauaaaag

SEQ ID NO: 971654 - RNA, 19 nt, Artificial Sequence
  Description of Artificial Sequence: Synthetic oligonucleotide
ggauacacgaucuugccgc

SEQ ID NO: 971655 - RNA, 19 nt, Artificial Sequence
  Description of Artificial Sequence: Synthetic oligonucleotide
cagacacacacacacacag

SEQ ID NO: 971656 - RNA, 19 nt, Artificial Sequence
  Description of Artificial Sequence: Synthetic oligonucleotide
uuauccagacaguucaccu

SEQ ID NO: 971657 - RNA, 19 nt, Artificial Sequence
  Description of Artificial Sequence: Synthetic oligonucleotide
gacgugaugccauggaaug

SEQ ID NO: 971658 - RNA, 19 nt, Artificial Sequence
  Description of Artificial Sequence: Synthetic oligonucleotide
gaagugacgacugucccag

SEQ ID NO: 971659 - RNA, 19 nt, Artificial Sequence
  Description of Artificial Sequence: Synthetic oligonucleotide
uuaggguucaugguuccgg

SEQ ID NO: 971660 - RNA, 19 nt, Artificial Sequence
  Description of Artificial Sequence: Synthetic oligonucleotide
uguugcuugaggcggaggu

SEQ ID NO: 971661 - RNA, 19 nt, Artificial Sequence
  Description of Artificial Sequence: Synthetic oligonucleotide
gauuuagagauggugccgc

SEQ ID NO: 971662 - RNA, 19 nt, Artificial Sequence
  Description of Artificial Sequence: Synthetic oligonucleotide
auugaagacaguggguggg

SEQ ID NO: 971663 - RNA, 19 nt, Artificial Sequence
  Description of Artificial Sequence: Synthetic oligonucleotide
agcaccgauuuagagaugg

SEQ ID NO: 971664 - RNA, 19 nt, Artificial Sequence
  Description of Artificial Sequence: Synthetic oligonucleotide
auuuagagauggugccgcc

SEQ ID NO: 971665 - RNA, 19 nt, Artificial Sequence
  Description of Artificial Sequence: Synthetic oligonucleotide
aaagauucacuuugugguu

SEQ ID NO: 971666 - RNA, 19 nt, Artificial Sequence
  Description of Artificial Sequence: Synthetic oligonucleotide
guagucauacacugcgcgg

SEQ ID NO: 971667 - RNA, 19 nt, Artificial Sequence
  Description of Artificial Sequence: Synthetic oligonucleotide
cacacacagacacacacac

SEQ ID NO: 971668 - RNA, 19 nt, Artificial Sequence
  Description of Artificial Sequence: Synthetic oligonucleotide
gugaaagcaugcuuugugc

SEQ ID NO: 971669 - RNA, 19 nt, Artificial Sequence
  Description of Artificial Sequence: Synthetic oligonucleotide
ggaaccugaguuuagcacc

SEQ ID NO: 971670 - RNA, 19 nt, Artificial Sequence
  Description of Artificial Sequence: Synthetic oligonucleotide
cagacacacacacacacac

SEQ ID NO: 971671 - RNA, 19 nt, Artificial Sequence
  Description of Artificial Sequence: Synthetic oligonucleotide
aguggcggaucuuaaaaga

SEQ ID NO: 971672 - RNA, 19 nt, Artificial Sequence
  Description of Artificial Sequence: Synthetic oligonucleotide
gaauaucagacagaggcga

SEQ ID NO: 971673 - RNA, 19 nt, Artificial Sequence
  Description of Artificial Sequence: Synthetic oligonucleotide
acauaccacacacacagau

SEQ ID NO: 971674 - RNA, 19 nt, Artificial Sequence
  Description of Artificial Sequence: Synthetic oligonucleotide
cauugaagacagugggugg

SEQ ID NO: 971675 - RNA, 19 nt, Artificial Sequence
  Description of Artificial Sequence: Synthetic oligonucleotide
uugucuuguguccagcuau

SEQ ID NO: 971676 - RNA, 19 nt, Artificial Sequence
  Description of Artificial Sequence: Synthetic oligonucleotide
cacagacacacacacacac

SEQ ID NO: 971677 - RNA, 19 nt, Artificial Sequence
  Description of Artificial Sequence: Synthetic oligonucleotide
cagcacggggcucagaugg

SEQ ID NO: 971678 - RNA, 19 nt, Artificial Sequence
  Description of Artificial Sequence: Synthetic oligonucleotide
acagaccaaagaaagauga

SEQ ID NO: 971679 - RNA, 19 nt, Artificial Sequence
  Description of Artificial Sequence: Synthetic oligonucleotide
guuuagcaccgauuuagag

SEQ ID NO: 971680 - RNA, 19 nt, Artificial Sequence
  Description of Artificial Sequence: Synthetic oligonucleotide
agggcgggaaaacaggaag

SEQ ID NO: 971681 - RNA, 19 nt, Artificial Sequence
  Description of Artificial Sequence: Synthetic oligonucleotide
aauauggacuccagcuggg

SEQ ID NO: 971682 - RNA, 19 nt, Artificial Sequence
  Description of Artificial Sequence: Synthetic oligonucleotide
aggauuggcccacaaaagu

SEQ ID NO: 971683 - RNA, 19 nt, Artificial Sequence
  Description of Artificial Sequence: Synthetic oligonucleotide
aagaugagugggcggcuuc

SEQ ID NO: 971684 - RNA, 19 nt, Artificial Sequence
  Description of Artificial Sequence: Synthetic oligonucleotide
cccauauaaaagaugagug

SEQ ID NO: 971685 - RNA, 19 nt, Artificial Sequence
  Description of Artificial Sequence: Synthetic oligonucleotide
cacacacacagacacacac

SEQ ID NO: 971686 - RNA, 19 nt, Artificial Sequence
  Description of Artificial Sequence: Synthetic oligonucleotide
uacacgaucuugccgcacc

SEQ ID NO: 971687 - RNA, 19 nt, Artificial Sequence
  Description of Artificial Sequence: Synthetic oligonucleotide
ggccagaaagaacugaucc

SEQ ID NO: 971688 - RNA, 19 nt, Artificial Sequence
  Description of Artificial Sequence: Synthetic oligonucleotide
ugacgacugucccaggccc

SEQ ID NO: 971689 - RNA, 19 nt, Artificial Sequence
  Description of Artificial Sequence: Synthetic oligonucleotide
uugguccaagggaaaaccc

SEQ ID NO: 971690 - RNA, 19 nt, Artificial Sequence
  Description of Artificial Sequence: Synthetic oligonucleotide
ucauacacugcgcgguacc

SEQ ID NO: 971691 - RNA, 19 nt, Artificial Sequence
  Description of Artificial Sequence: Synthetic oligonucleotide
cacucuguugcuugaggcg

SEQ ID NO: 971692 - RNA, 19 nt, Artificial Sequence
  Description of Artificial Sequence: Synthetic oligonucleotide
uggcggaucuuaaaagaca

SEQ ID NO: 971693 - RNA, 19 nt, Artificial Sequence
  Description of Artificial Sequence: Synthetic oligonucleotide
gcuguauggagacaggggc

SEQ ID NO: 971694 - RNA, 19 nt, Artificial Sequence
  Description of Artificial Sequence: Synthetic oligonucleotide
ucuugcauugcaggauugg

SEQ ID NO: 971695 - RNA, 19 nt, Artificial Sequence
  Description of Artificial Sequence: Synthetic oligonucleotide
ggugucaagaaaacuacag

SEQ ID NO: 971696 - RNA, 19 nt, Artificial Sequence
  Description of Artificial Sequence: Synthetic oligonucleotide
ucuuguguccagcuauuaa

SEQ ID NO: 971697 - RNA, 19 nt, Artificial Sequence
  Description of Artificial Sequence: Synthetic oligonucleotide
auuugcgucaccaggauaa

SEQ ID NO: 971698 - RNA, 19 nt, Artificial Sequence
  Description of Artificial Sequence: Synthetic oligonucleotide
gaggugucaagaaaacuac

SEQ ID NO: 971699 - RNA, 19 nt, Artificial Sequence
  Description of Artificial Sequence: Synthetic oligonucleotide
ucaucuugcaggucucgca

SEQ ID NO: 971700 - RNA, 19 nt, Artificial Sequence
  Description of Artificial Sequence: Synthetic oligonucleotide
acgaucuugccgcaccggg

SEQ ID NO: 971701 - RNA, 19 nt, Artificial Sequence
  Description of Artificial Sequence: Synthetic oligonucleotide
ucacacacagacacacaca

SEQ ID NO: 971702 - RNA, 19 nt, Artificial Sequence
  Description of Artificial Sequence: Synthetic oligonucleotide
ugggauacacgaucuugcc

SEQ ID NO: 971703 - RNA, 19 nt, Artificial Sequence
  Description of Artificial Sequence: Synthetic oligonucleotide
cacacacacacacauacca

SEQ ID NO: 971704 - RNA, 19 nt, Artificial Sequence
  Description of Artificial Sequence: Synthetic oligonucleotide
agaggugucaagaaaacua

SEQ ID NO: 971705 - RNA, 19 nt, Artificial Sequence
  Description of Artificial Sequence: Synthetic oligonucleotide
agucgguugguccaaggga

SEQ ID NO: 971706 - RNA, 19 nt, Artificial Sequence
  Description of Artificial Sequence: Synthetic oligonucleotide
cuuauccagacaguucacc

SEQ ID NO: 971707 - RNA, 19 nt, Artificial Sequence
  Description of Artificial Sequence: Synthetic oligonucleotide
cucaucucuuuaauggguc

SEQ ID NO: 971708 - RNA, 19 nt, Artificial Sequence
  Description of Artificial Sequence: Synthetic oligonucleotide
guugguccaagggaaaacc

SEQ ID NO: 971709 - RNA, 19 nt, Artificial Sequence
  Description of Artificial Sequence: Synthetic oligonucleotide
cuugggguagugugcauug

SEQ ID NO: 971710 - RNA, 19 nt, Artificial Sequence
  Description of Artificial Sequence: Synthetic oligonucleotide
uccuauuauuucagcccag

SEQ ID NO: 971711 - RNA, 19 nt, Artificial Sequence
  Description of Artificial Sequence: Synthetic oligonucleotide
cacacacacacagacacac

SEQ ID NO: 971712 - RNA, 19 nt, Artificial Sequence
  Description of Artificial Sequence: Synthetic oligonucleotide
agaaucauaacaggccaga

SEQ ID NO: 971713 - RNA, 19 nt, Artificial Sequence
  Description of Artificial Sequence: Synthetic oligonucleotide
ucaucucuuuaaugggucu

SEQ ID NO: 971714 - RNA, 19 nt, Artificial Sequence
  Description of Artificial Sequence: Synthetic oligonucleotide
caggauuggcccacaaaag

SEQ ID NO: 971715 - RNA, 19 nt, Artificial Sequence
  Description of Artificial Sequence: Synthetic oligonucleotide
auaccccucaccacggggc

SEQ ID NO: 971716 - RNA, 19 nt, Artificial Sequence
  Description of Artificial Sequence: Synthetic oligonucleotide
agaacugaucccgagugca

SEQ ID NO: 971717 - RNA, 19 nt, Artificial Sequence
  Description of Artificial Sequence: Synthetic oligonucleotide
uuauuugcgucaccaggau

SEQ ID NO: 971718 - RNA, 19 nt, Artificial Sequence
  Description of Artificial Sequence: Synthetic oligonucleotide
gagaauucauaccccucac

SEQ ID NO: 971719 - RNA, 19 nt, Artificial Sequence
  Description of Artificial Sequence: Synthetic oligonucleotide
ucgauuugcugcacauuga

SEQ ID NO: 971720 - RNA, 19 nt, Artificial Sequence
  Description of Artificial Sequence: Synthetic oligonucleotide
uacgcuguauggagacagg

SEQ ID NO: 971721 - RNA, 19 nt, Artificial Sequence
  Description of Artificial Sequence: Synthetic oligonucleotide
ggcacuacgcuguauggag

SEQ ID NO: 971722 - RNA, 19 nt, Artificial Sequence
  Description of Artificial Sequence: Synthetic oligonucleotide
ugugucgccagugcgcucc

SEQ ID NO: 971723 - RNA, 19 nt, Artificial Sequence
  Description of Artificial Sequence: Synthetic oligonucleotide
ucaucgauuugcugcacau

SEQ ID NO: 971724 - RNA, 19 nt, Artificial Sequence
  Description of Artificial Sequence: Synthetic oligonucleotide
cuacgcuguauggagacag

SEQ ID NO: 971725 - RNA, 19 nt, Artificial Sequence
  Description of Artificial Sequence: Synthetic oligonucleotide
aaaacccgccagaggaagg

SEQ ID NO: 971726 - RNA, 19 nt, Artificial Sequence
  Description of Artificial Sequence: Synthetic oligonucleotide
ugcgcgguaccguuucccg

SEQ ID NO: 971727 - RNA, 19 nt, Artificial Sequence
  Description of Artificial Sequence: Synthetic oligonucleotide
aggggcacuacgcuguaug

SEQ ID NO: 971728 - RNA, 19 nt, Artificial Sequence
  Description of Artificial Sequence: Synthetic oligonucleotide
uugugccagaacuuaucca

SEQ ID NO: 971729 - RNA, 19 nt, Artificial Sequence
  Description of Artificial Sequence: Synthetic oligonucleotide
caguggcggaucuuaaaag

SEQ ID NO: 971730 - RNA, 19 nt, Artificial Sequence
  Description of Artificial Sequence: Synthetic oligonucleotide
uuugucuuguguccagcua

SEQ ID NO: 971731 - RNA, 19 nt, Artificial Sequence
  Description of Artificial Sequence: Synthetic oligonucleotide
gaaugaagugacgacuguc

SEQ ID NO: 971732 - RNA, 19 nt, Artificial Sequence
  Description of Artificial Sequence: Synthetic oligonucleotide
guagugugcauugcaguag

SEQ ID NO: 971733 - RNA, 19 nt, Artificial Sequence
  Description of Artificial Sequence: Synthetic oligonucleotide
ucagucgguugguccaagg

SEQ ID NO: 971734 - RNA, 19 nt, Artificial Sequence
  Description of Artificial Sequence: Synthetic oligonucleotide
acacacacacacauaccac

SEQ ID NO: 971735 - RNA, 19 nt, Artificial Sequence
  Description of Artificial Sequence: Synthetic oligonucleotide
cacacacacacauaccaca

SEQ ID NO: 971736 - RNA, 19 nt, Artificial Sequence
  Description of Artificial Sequence: Synthetic oligonucleotide
ucgccagugcgcuccacgg

SEQ ID NO: 971737 - RNA, 19 nt, Artificial Sequence
  Description of Artificial Sequence: Synthetic oligonucleotide
cccacaaaaguuaaguuca

SEQ ID NO: 971738 - RNA, 19 nt, Artificial Sequence
  Description of Artificial Sequence: Synthetic oligonucleotide
gugggauacacgaucuugc

SEQ ID NO: 971739 - RNA, 19 nt, Artificial Sequence
  Description of Artificial Sequence: Synthetic oligonucleotide
ggagaauucauaccccuca

SEQ ID NO: 971740 - RNA, 19 nt, Artificial Sequence
  Description of Artificial Sequence: Synthetic oligonucleotide
cacuacgcuguauggagac

SEQ ID NO: 971741 - RNA, 19 nt, Artificial Sequence
  Description of Artificial Sequence: Synthetic oligonucleotide
uguagcgcaccugacucug

SEQ ID NO: 971742 - RNA, 19 nt, Artificial Sequence
  Description of Artificial Sequence: Synthetic oligonucleotide
acacacacacacacauacc

SEQ ID NO: 971743 - RNA, 19 nt, Artificial Sequence
  Description of Artificial Sequence: Synthetic oligonucleotide
cagucgguugguccaaggg

SEQ ID NO: 971744 - RNA, 19 nt, Artificial Sequence
  Description of Artificial Sequence: Synthetic oligonucleotide
acacgaucuugccgcaccg

SEQ ID NO: 971745 - RNA, 19 nt, Artificial Sequence
  Description of Artificial Sequence: Synthetic oligonucleotide
ccucagcaccaauagaugg

SEQ ID NO: 971746 - RNA, 19 nt, Artificial Sequence
  Description of Artificial Sequence: Synthetic oligonucleotide
ugaguuuagcaccgauuua

SEQ ID NO: 971747 - RNA, 19 nt, Artificial Sequence
  Description of Artificial Sequence: Synthetic oligonucleotide
acgugaugccauggaaugc

SEQ ID NO: 971748 - RNA, 19 nt, Artificial Sequence
  Description of Artificial Sequence: Synthetic oligonucleotide
gaacuuauccagacaguuc

SEQ ID NO: 971749 - RNA, 19 nt, Artificial Sequence
  Description of Artificial Sequence: Synthetic oligonucleotide
cuguagucauacacugcgc

SEQ ID NO: 971750 - RNA, 19 nt, Artificial Sequence
  Description of Artificial Sequence: Synthetic oligonucleotide
gcgcaguuaggguucaugg

SEQ ID NO: 971751 - RNA, 19 nt, Artificial Sequence
  Description of Artificial Sequence: Synthetic oligonucleotide
caaucagucgguuggucca

SEQ ID NO: 971752 - RNA, 19 nt, Artificial Sequence
  Description of Artificial Sequence: Synthetic oligonucleotide
aaacccgccagaggaagga

SEQ ID NO: 971753 - RNA, 19 nt, Artificial Sequence
  Description of Artificial Sequence: Synthetic oligonucleotide
ccgauuuagagauggugcc

SEQ ID NO: 971754 - RNA, 19 nt, Artificial Sequence
  Description of Artificial Sequence: Synthetic oligonucleotide
acgcuguauggagacaggg

SEQ ID NO: 971755 - RNA, 19 nt, Artificial Sequence
  Description of Artificial Sequence: Synthetic oligonucleotide
uauuugcgucaccaggaua

SEQ ID NO: 971756 - RNA, 19 nt, Artificial Sequence
  Description of Artificial Sequence: Synthetic oligonucleotide
gugacgacugucccaggcc

SEQ ID NO: 971757 - RNA, 19 nt, Artificial Sequence
  Description of Artificial Sequence: Synthetic oligonucleotide
aggucucgcagugaaagca

SEQ ID NO: 971758 - RNA, 19 nt, Artificial Sequence
  Description of Artificial Sequence: Synthetic oligonucleotide
aggguucaugguuccgggg

SEQ ID NO: 971759 - RNA, 19 nt, Artificial Sequence
  Description of Artificial Sequence: Synthetic oligonucleotide
cauacacugcgcgguaccg

SEQ ID NO: 971760 - RNA, 19 nt, Artificial Sequence
  Description of Artificial Sequence: Synthetic oligonucleotide
gacuuuuauuugcgucacc

SEQ ID NO: 971761 - RNA, 19 nt, Artificial Sequence
  Description of Artificial Sequence: Synthetic oligonucleotide
ggugaaggacugcuugggg

SEQ ID NO: 971762 - RNA, 19 nt, Artificial Sequence
  Description of Artificial Sequence: Synthetic oligonucleotide
ucaccacggggcuucuugc

SEQ ID NO: 971763 - RNA, 19 nt, Artificial Sequence
  Description of Artificial Sequence: Synthetic oligonucleotide
caccgauuuagagauggug

SEQ ID NO: 971764 - RNA, 19 nt, Artificial Sequence
  Description of Artificial Sequence: Synthetic oligonucleotide
cuggguuuugauuggcuga

SEQ ID NO: 971765 - RNA, 19 nt, Artificial Sequence
  Description of Artificial Sequence: Synthetic oligonucleotide
uucuagggguggaugcuuc

SEQ ID NO: 971766 - RNA, 19 nt, Artificial Sequence
  Description of Artificial Sequence: Synthetic oligonucleotide
guuucccgccaccaccagg

SEQ ID NO: 971767 - RNA, 19 nt, Artificial Sequence
  Description of Artificial Sequence: Synthetic oligonucleotide
cagaggcgaauuucacagg

SEQ ID NO: 971768 - RNA, 19 nt, Artificial Sequence
  Description of Artificial Sequence: Synthetic oligonucleotide
aaaaugcucccuggaggga

SEQ ID NO: 971769 - RNA, 19 nt, Artificial Sequence
  Description of Artificial Sequence: Synthetic oligonucleotide
gauuggcccacaaaaguua

SEQ ID NO: 971770 - RNA, 19 nt, Artificial Sequence
  Description of Artificial Sequence: Synthetic oligonucleotide
gucgccagugcgcuccacg

SEQ ID NO: 971771 - RNA, 19 nt, Artificial Sequence
  Description of Artificial Sequence: Synthetic oligonucleotide
gugcggggagaauucauac

SEQ ID NO: 971772 - RNA, 19 nt, Artificial Sequence
  Description of Artificial Sequence: Synthetic oligonucleotide
gaggcggagguuuuccgga

SEQ ID NO: 971773 - RNA, 19 nt, Artificial Sequence
  Description of Artificial Sequence: Synthetic oligonucleotide
gauggauccucuucccucu

SEQ ID NO: 971774 - RNA, 19 nt, Artificial Sequence
  Description of Artificial Sequence: Synthetic oligonucleotide
acaaccccauauaaaagau

SEQ ID NO: 971775 - RNA, 19 nt, Artificial Sequence
  Description of Artificial Sequence: Synthetic oligonucleotide
ugcuuugugccagaacuua

SEQ ID NO: 971776 - RNA, 19 nt, Artificial Sequence
  Description of Artificial Sequence: Synthetic oligonucleotide
gccaccauaggacugaucu

SEQ ID NO: 971777 - RNA, 19 nt, Artificial Sequence
  Description of Artificial Sequence: Synthetic oligonucleotide
gauacacgaucuugccgca

SEQ ID NO: 971778 - RNA, 19 nt, Artificial Sequence
  Description of Artificial Sequence: Synthetic oligonucleotide
aagugacgacugucccagg

SEQ ID NO: 971779 - RNA, 19 nt, Artificial Sequence
  Description of Artificial Sequence: Synthetic oligonucleotide
ucuagggguggaugcuucu

SEQ ID NO: 971780 - RNA, 19 nt, Artificial Sequence
  Description of Artificial Sequence: Synthetic oligonucleotide
ucgcagugaaagcaugcuu

SEQ ID NO: 971781 - RNA, 19 nt, Artificial Sequence
  Description of Artificial Sequence: Synthetic oligonucleotide
acugcgcgguaccguuucc

SEQ ID NO: 971782 - RNA, 19 nt, Artificial Sequence
  Description of Artificial Sequence: Synthetic oligonucleotide
guggcggaucuuaaaagac

SEQ ID NO: 971783 - RNA, 19 nt, Artificial Sequence
  Description of Artificial Sequence: Synthetic oligonucleotide
uugcgucaccaggauaaag

SEQ ID NO: 971784 - RNA, 19 nt, Artificial Sequence
  Description of Artificial Sequence: Synthetic oligonucleotide
ucgggugugucugccacca

SEQ ID NO: 971785 - RNA, 19 nt, Artificial Sequence
  Description of Artificial Sequence: Synthetic oligonucleotide
ucucuuuaaugggucuccu

SEQ ID NO: 971786 - RNA, 19 nt, Artificial Sequence
  Description of Artificial Sequence: Synthetic oligonucleotide
gcagugaaagcaugcuuug

SEQ ID NO: 971787 - RNA, 19 nt, Artificial Sequence
  Description of Artificial Sequence: Synthetic oligonucleotide
uacacugcgcgguaccguu

SEQ ID NO: 971788 - RNA, 19 nt, Artificial Sequence
  Description of Artificial Sequence: Synthetic oligonucleotide
cugaguuuagcaccgauuu

SEQ ID NO: 971789 - RNA, 19 nt, Artificial Sequence
  Description of Artificial Sequence: Synthetic oligonucleotide
aaagaugagugggcggcuu

SEQ ID NO: 971790 - RNA, 19 nt, Artificial Sequence
  Description of Artificial Sequence: Synthetic oligonucleotide
gguccaagggaaaacccgc

SEQ ID NO: 971791 - RNA, 19 nt, Artificial Sequence
  Description of Artificial Sequence: Synthetic oligonucleotide
ggcucagauggccuccacg

SEQ ID NO: 971792 - RNA, 19 nt, Artificial Sequence
  Description of Artificial Sequence: Synthetic oligonucleotide
aggccagaaagaacugauc

SEQ ID NO: 971793 - RNA, 19 nt, Artificial Sequence
  Description of Artificial Sequence: Synthetic oligonucleotide
uuccggagugucagccacc

SEQ ID NO: 971794 - RNA, 19 nt, Artificial Sequence
  Description of Artificial Sequence: Synthetic oligonucleotide
gguagugugcauugcagua

SEQ ID NO: 971795 - RNA, 19 nt, Artificial Sequence
  Description of Artificial Sequence: Synthetic oligonucleotide
auacacgaucuugccgcac

SEQ ID NO: 971796 - RNA, 19 nt, Artificial Sequence
  Description of Artificial Sequence: Synthetic oligonucleotide
ggacugaucugguccuggg

SEQ ID NO: 971797 - RNA, 19 nt, Artificial Sequence
  Description of Artificial Sequence: Synthetic oligonucleotide
gaaagaugacaaccccaua

SEQ ID NO: 971798 - RNA, 19 nt, Artificial Sequence
  Description of Artificial Sequence: Synthetic oligonucleotide
cauugcaggauuggcccac

SEQ ID NO: 971799 - RNA, 19 nt, Artificial Sequence
  Description of Artificial Sequence: Synthetic oligonucleotide
cuuuuccuugggcgagcgg

SEQ ID NO: 971800 - RNA, 19 nt, Artificial Sequence
  Description of Artificial Sequence: Synthetic oligonucleotide
agugugcauugcaguaggg

SEQ ID NO: 971801 - RNA, 19 nt, Artificial Sequence
  Description of Artificial Sequence: Synthetic oligonucleotide
gcgaauuucacagggucac

SEQ ID NO: 971802 - RNA, 19 nt, Artificial Sequence
  Description of Artificial Sequence: Synthetic oligonucleotide
cacacacacacacacacau

SEQ ID NO: 971803 - RNA, 19 nt, Artificial Sequence
  Description of Artificial Sequence: Synthetic oligonucleotide
ucgguugguccaagggaaa

SEQ ID NO: 971804 - RNA, 19 nt, Artificial Sequence
  Description of Artificial Sequence: Synthetic oligonucleotide
agcgcaccugacucugcag

SEQ ID NO: 971805 - RNA, 19 nt, Artificial Sequence
  Description of Artificial Sequence: Synthetic oligonucleotide
agcaguggcggaucuuaaa

SEQ ID NO: 971806 - RNA, 19 nt, Artificial Sequence
  Description of Artificial Sequence: Synthetic oligonucleotide
acagacacacacacacaca

SEQ ID NO: 971807 - RNA, 19 nt, Artificial Sequence
  Description of Artificial Sequence: Synthetic oligonucleotide
aacccgccagaggaaggag

SEQ ID NO: 971808 - RNA, 19 nt, Artificial Sequence
  Description of Artificial Sequence: Synthetic oligonucleotide
gucgguugguccaagggaa

SEQ ID NO: 971809 - RNA, 19 nt, Artificial Sequence
  Description of Artificial Sequence: Synthetic oligonucleotide
agccuguuccauccagaga

SEQ ID NO: 971810 - RNA, 19 nt, Artificial Sequence
  Description of Artificial Sequence: Synthetic oligonucleotide
gguggaugcuucuggaaaa

SEQ ID NO: 971811 - RNA, 19 nt, Artificial Sequence
  Description of Artificial Sequence: Synthetic oligonucleotide
acacacacagacacacaca

SEQ ID NO: 971812 - RNA, 19 nt, Artificial Sequence
  Description of Artificial Sequence: Synthetic oligonucleotide
ugggugugugagcgucucc

SEQ ID NO: 971813 - RNA, 19 nt, Artificial Sequence
  Description of Artificial Sequence: Synthetic oligonucleotide
aggugucaagaaaacuaca

SEQ ID NO: 971814 - RNA, 19 nt, Artificial Sequence
  Description of Artificial Sequence: Synthetic oligonucleotide
agucaauguucagaaucau

SEQ ID NO: 971815 - RNA, 19 nt, Artificial Sequence
  Description of Artificial Sequence: Synthetic oligonucleotide
accgggcgcaguuaggguu

SEQ ID NO: 971816 - RNA, 19 nt, Artificial Sequence
  Description of Artificial Sequence: Synthetic oligonucleotide
accugaguuuagcaccgau

SEQ ID NO: 971817 - RNA, 19 nt, Artificial Sequence
  Description of Artificial Sequence: Synthetic oligonucleotide
agcaucccugugucgccag

SEQ ID NO: 971818 - RNA, 19 nt, Artificial Sequence
  Description of Artificial Sequence: Synthetic oligonucleotide
gagugggcggcuucacaca

SEQ ID NO: 971819 - RNA, 19 nt, Artificial Sequence
  Description of Artificial Sequence: Synthetic oligonucleotide
auuggcccacaaaaguuaa

SEQ ID NO: 971820 - RNA, 19 nt, Artificial Sequence
  Description of Artificial Sequence: Synthetic oligonucleotide
gcuuggguuggcaaaagga

SEQ ID NO: 971821 - RNA, 19 nt, Artificial Sequence
  Description of Artificial Sequence: Synthetic oligonucleotide
agucauacacugcgcggua

SEQ ID NO: 971822 - RNA, 19 nt, Artificial Sequence
  Description of Artificial Sequence: Synthetic oligonucleotide
aggacagacgugaugccau

SEQ ID NO: 971823 - RNA, 19 nt, Artificial Sequence
  Description of Artificial Sequence: Synthetic oligonucleotide
acggucccauacauccagc

SEQ ID NO: 971824 - RNA, 19 nt, Artificial Sequence
  Description of Artificial Sequence: Synthetic oligonucleotide
gcaguggcggaucuuaaaa

SEQ ID NO: 971825 - RNA, 19 nt, Artificial Sequence
  Description of Artificial Sequence: Synthetic oligonucleotide
acacacacacacacagaca

SEQ ID NO: 971826 - RNA, 19 nt, Artificial Sequence
  Description of Artificial Sequence: Synthetic oligonucleotide
cucgggugugucugccacc

SEQ ID NO: 971827 - RNA, 19 nt, Artificial Sequence
  Description of Artificial Sequence: Synthetic oligonucleotide
gaugagugggcggcuucac

SEQ ID NO: 971828 - RNA, 19 nt, Artificial Sequence
  Description of Artificial Sequence: Synthetic oligonucleotide
uuugcgucaccaggauaaa

SEQ ID NO: 971829 - RNA, 19 nt, Artificial Sequence
  Description of Artificial Sequence: Synthetic oligonucleotide
gacgacugucccaggcccc

SEQ ID NO: 971830 - RNA, 19 nt, Artificial Sequence
  Description of Artificial Sequence: Synthetic oligonucleotide
agacacacacacacacaca

SEQ ID NO: 971831 - RNA, 19 nt, Artificial Sequence
  Description of Artificial Sequence: Synthetic oligonucleotide
aggaggaaccugaguuuag

SEQ ID NO: 971832 - RNA, 19 nt, Artificial Sequence
  Description of Artificial Sequence: Synthetic oligonucleotide
cacgaucuugccgcaccgg

SEQ ID NO: 971833 - RNA, 19 nt, Artificial Sequence
  Description of Artificial Sequence: Synthetic oligonucleotide
auacacugcgcgguaccgu

SEQ ID NO: 971834 - RNA, 19 nt, Artificial Sequence
  Description of Artificial Sequence: Synthetic oligonucleotide
agacacacacacacacaga

SEQ ID NO: 971835 - RNA, 19 nt, Artificial Sequence
  Description of Artificial Sequence: Synthetic oligonucleotide
cagacgugaugccauggaa

SEQ ID NO: 971836 - RNA, 19 nt, Artificial Sequence
  Description of Artificial Sequence: Synthetic oligonucleotide
uugcaggauuggcccacaa

SEQ ID NO: 971837 - RNA, 19 nt, Artificial Sequence
  Description of Artificial Sequence: Synthetic oligonucleotide
acacacacacacacacaca

SEQ ID NO: 971838 - RNA, 19 nt, Artificial Sequence
  Description of Artificial Sequence: Synthetic oligonucleotide
acacagacacacacacaca

SEQ ID NO: 971839 - RNA, 19 nt, Artificial Sequence
  Description of Artificial Sequence: Synthetic oligonucleotide
ccacgcugaagccuuuacc

SEQ ID NO: 971840 - RNA, 19 nt, Artificial Sequence
  Description of Artificial Sequence: Synthetic oligonucleotide
agugcggggagaauucaua

SEQ ID NO: 971841 - RNA, 19 nt, Artificial Sequence
  Description of Artificial Sequence: Synthetic oligonucleotide
caucccugugucgccagug

SEQ ID NO: 971842 - RNA, 19 nt, Artificial Sequence
  Description of Artificial Sequence: Synthetic oligonucleotide
cacugcgcgguaccguuuc

SEQ ID NO: 971843 - RNA, 19 nt, Artificial Sequence
  Description of Artificial Sequence: Synthetic oligonucleotide
caccugacucugcagcuca

SEQ ID NO: 971844 - RNA, 19 nt, Artificial Sequence
  Description of Artificial Sequence: Synthetic oligonucleotide
gcucagauggccuccacgu

SEQ ID NO: 971845 - RNA, 19 nt, Artificial Sequence
  Description of Artificial Sequence: Synthetic oligonucleotide
gggcgggaaaacaggaagc

SEQ ID NO: 971846 - RNA, 19 nt, Artificial Sequence
  Description of Artificial Sequence: Synthetic oligonucleotide
acuacgcuguauggagaca

SEQ ID NO: 971847 - RNA, 19 nt, Artificial Sequence
  Description of Artificial Sequence: Synthetic oligonucleotide
ggacgcccgagcucgcgcg

SEQ ID NO: 971848 - RNA, 19 nt, Artificial Sequence
  Description of Artificial Sequence: Synthetic oligonucleotide
cgauuuagagauggugccg

SEQ ID NO: 971849 - RNA, 19 nt, Artificial Sequence
  Description of Artificial Sequence: Synthetic oligonucleotide
gaacugaucccgagugcaa

SEQ ID NO: 971850 - RNA, 19 nt, Artificial Sequence
  Description of Artificial Sequence: Synthetic oligonucleotide
gcgcguucccuuuuccuug

SEQ ID NO: 971851 - RNA, 19 nt, Artificial Sequence
  Description of Artificial Sequence: Synthetic oligonucleotide
acacacacacacagacaca

SEQ ID NO: 971852 - RNA, 19 nt, Artificial Sequence
  Description of Artificial Sequence: Synthetic oligonucleotide
acacacagacacacacaca

SEQ ID NO: 971853 - RNA, 19 nt, Artificial Sequence
  Description of Artificial Sequence: Synthetic oligonucleotide
aaccugaguuuagcaccga

SEQ ID NO: 971854 - RNA, 19 nt, Artificial Sequence
  Description of Artificial Sequence: Synthetic oligonucleotide
cugcgcgguaccguuuccc

SEQ ID NO: 971855 - RNA, 19 nt, Artificial Sequence
  Description of Artificial Sequence: Synthetic oligonucleotide
cccugugucgccagugcgc

SEQ ID NO: 971856 - RNA, 19 nt, Artificial Sequence
  Description of Artificial Sequence: Synthetic oligonucleotide
guaccguuucccgccacca

SEQ ID NO: 971857 - RNA, 19 nt, Artificial Sequence
  Description of Artificial Sequence: Synthetic oligonucleotide
caggccagaaagaacugau

SEQ ID NO: 971858 - RNA, 19 nt, Artificial Sequence
  Description of Artificial Sequence: Synthetic oligonucleotide
gccagaacuuauccagaca

SEQ ID NO: 971859 - RNA, 19 nt, Artificial Sequence
  Description of Artificial Sequence: Synthetic oligonucleotide
gacgcccgagcucgcgcgc

SEQ ID NO: 971860 - RNA, 19 nt, Artificial Sequence
  Description of Artificial Sequence: Synthetic oligonucleotide
acggggcuucuugcauugc

SEQ ID NO: 971861 - RNA, 19 nt, Artificial Sequence
  Description of Artificial Sequence: Synthetic oligonucleotide
ccaggauaaagauucacuu

SEQ ID NO: 971862 - RNA, 19 nt, Artificial Sequence
  Description of Artificial Sequence: Synthetic oligonucleotide
gguucaugguuccggggaa

SEQ ID NO: 971863 - RNA, 19 nt, Artificial Sequence
  Description of Artificial Sequence: Synthetic oligonucleotide
ggcgcaguuaggguucaug

SEQ ID NO: 971864 - RNA, 19 nt, Artificial Sequence
  Description of Artificial Sequence: Synthetic oligonucleotide
gugccagaacuuauccaga

SEQ ID NO: 971865 - RNA, 19 nt, Artificial Sequence
  Description of Artificial Sequence: Synthetic oligonucleotide
acacacacacagacacaca

SEQ ID NO: 971866 - RNA, 19 nt, Artificial Sequence
  Description of Artificial Sequence: Synthetic oligonucleotide
acgacugucccaggcccca

SEQ ID NO: 971867 - RNA, 19 nt, Artificial Sequence
  Description of Artificial Sequence: Synthetic oligonucleotide
gcucgggugugucugccac

SEQ ID NO: 971868 - RNA, 19 nt, Artificial Sequence
  Description of Artificial Sequence: Synthetic oligonucleotide
cgcgguaccguuucccgcc

SEQ ID NO: 971869 - RNA, 19 nt, Artificial Sequence
  Description of Artificial Sequence: Synthetic oligonucleotide
gagggcgggaaaacaggaa

SEQ ID NO: 971870 - RNA, 19 nt, Artificial Sequence
  Description of Artificial Sequence: Synthetic oligonucleotide
ggaaagacuggggcgggga

SEQ ID NO: 971871 - RNA, 19 nt, Artificial Sequence
  Description of Artificial Sequence: Synthetic oligonucleotide
ccgagugcaaggccaggag

SEQ ID NO: 971872 - RNA, 19 nt, Artificial Sequence
  Description of Artificial Sequence: Synthetic oligonucleotide
gggagaauucauaccccuc

SEQ ID NO: 971873 - RNA, 19 nt, Artificial Sequence
  Description of Artificial Sequence: Synthetic oligonucleotide
ugucugccaccacgcugaa

SEQ ID NO: 971874 - RNA, 19 nt, Artificial Sequence
  Description of Artificial Sequence: Synthetic oligonucleotide
ccagugcgcuccacggucc

SEQ ID NO: 971875 - RNA, 19 nt, Artificial Sequence
  Description of Artificial Sequence: Synthetic oligonucleotide
caccacggggcuucuugca

SEQ ID NO: 971876 - RNA, 19 nt, Artificial Sequence
  Description of Artificial Sequence: Synthetic oligonucleotide
ccccauauaaaagaugagu

SEQ ID NO: 971877 - RNA, 19 nt, Artificial Sequence
  Description of Artificial Sequence: Synthetic oligonucleotide
acacacacacacacacaua

SEQ ID NO: 971878 - RNA, 19 nt, Artificial Sequence
  Description of Artificial Sequence: Synthetic oligonucleotide
ucgcgcgcguucccuuuuc

SEQ ID NO: 971879 - RNA, 19 nt, Artificial Sequence
  Description of Artificial Sequence: Synthetic oligonucleotide
cucagauggccuccacgua

SEQ ID NO: 971880 - RNA, 19 nt, Artificial Sequence
  Description of Artificial Sequence: Synthetic oligonucleotide
ggauuggcccacaaaaguu

SEQ ID NO: 971881 - RNA, 19 nt, Artificial Sequence
  Description of Artificial Sequence: Synthetic oligonucleotide
gggcacuacgcuguaugga

SEQ ID NO: 971882 - RNA, 19 nt, Artificial Sequence
  Description of Artificial Sequence: Synthetic oligonucleotide
gcgcgguaccguuucccgc

SEQ ID NO: 971883 - RNA, 19 nt, Artificial Sequence
  Description of Artificial Sequence: Synthetic oligonucleotide
cacugaaguguggaugggu

SEQ ID NO: 971884 - RNA, 19 nt, Artificial Sequence
  Description of Artificial Sequence: Synthetic oligonucleotide
gcgucaccaggauaaagau

SEQ ID NO: 971885 - RNA, 19 nt, Artificial Sequence
  Description of Artificial Sequence: Synthetic oligonucleotide
gcgagcggcugggaggcgg

SEQ ID NO: 971886 - RNA, 19 nt, Artificial Sequence
  Description of Artificial Sequence: Synthetic oligonucleotide
gugcauugcaguagggcuu

SEQ ID NO: 971887 - RNA, 19 nt, Artificial Sequence
  Description of Artificial Sequence: Synthetic oligonucleotide
ccgggcgcaguuaggguuc

SEQ ID NO: 971888 - RNA, 19 nt, Artificial Sequence
  Description of Artificial Sequence: Synthetic oligonucleotide
cagugaaagcaugcuuugu

SEQ ID NO: 971889 - RNA, 19 nt, Artificial Sequence
  Description of Artificial Sequence: Synthetic oligonucleotide
gcacuacgcuguauggaga

SEQ ID NO: 971890 - RNA, 19 nt, Artificial Sequence
  Description of Artificial Sequence: Synthetic oligonucleotide
cacggggcucagauggccu

SEQ ID NO: 971891 - RNA, 19 nt, Artificial Sequence
  Description of Artificial Sequence: Synthetic oligonucleotide
gugugucugccaccacgcu

SEQ ID NO: 971892 - RNA, 19 nt, Artificial Sequence
  Description of Artificial Sequence: Synthetic oligonucleotide
guugcuugaggcggagguu

SEQ ID NO: 971893 - RNA, 19 nt, Artificial Sequence
  Description of Artificial Sequence: Synthetic oligonucleotide
cgcagugaaagcaugcuuu

SEQ ID NO: 971894 - RNA, 19 nt, Artificial Sequence
  Description of Artificial Sequence: Synthetic oligonucleotide
ugucgccagugcgcuccac

SEQ ID NO: 971895 - RNA, 19 nt, Artificial Sequence
  Description of Artificial Sequence: Synthetic oligonucleotide
gcagugcggggagaauuca

SEQ ID NO: 971896 - RNA, 19 nt, Artificial Sequence
  Description of Artificial Sequence: Synthetic oligonucleotide
cagugcggggagaauucau

SEQ ID NO: 971897 - RNA, 19 nt, Artificial Sequence
  Description of Artificial Sequence: Synthetic oligonucleotide
ccgagcucgcgcgcguucc

SEQ ID NO: 971898 - RNA, 19 nt, Artificial Sequence
  Description of Artificial Sequence: Synthetic oligonucleotide
gugucgccagugcgcucca

SEQ ID NO: 971899 - RNA, 19 nt, Artificial Sequence
  Description of Artificial Sequence: Synthetic oligonucleotide
acacugcgcgguaccguuu

SEQ ID NO: 971900 - RNA, 19 nt, Artificial Sequence
  Description of Artificial Sequence: Synthetic oligonucleotide
ggcggagguuuuccggagu

SEQ ID NO: 971901 - RNA, 19 nt, Artificial Sequence
  Description of Artificial Sequence: Synthetic oligonucleotide
caccgggcgcaguuagggu

SEQ ID NO: 971902 - RNA, 19 nt, Artificial Sequence
  Description of Artificial Sequence: Synthetic oligonucleotide
gcgguaccguuucccgcca

SEQ ID NO: 971903 - RNA, 19 nt, Artificial Sequence
  Description of Artificial Sequence: Synthetic oligonucleotide
gcuugggguagugugcauu

SEQ ID NO: 971904 - RNA, 19 nt, Artificial Sequence
  Description of Artificial Sequence: Synthetic oligonucleotide
cauugcaguagggcuucuu

SEQ ID NO: 971905 - RNA, 19 nt, Artificial Sequence
  Description of Artificial Sequence: Synthetic oligonucleotide
accccucaccacggggcuu

SEQ ID NO: 971906 - RNA, 19 nt, Artificial Sequence
  Description of Artificial Sequence: Synthetic oligonucleotide
cguuucccgccaccaccag

SEQ ID NO: 971907 - RNA, 19 nt, Artificial Sequence
  Description of Artificial Sequence: Synthetic oligonucleotide
cauagcccuuguaguucuu

SEQ ID NO: 971908 - RNA, 19 nt, Artificial Sequence
  Description of Artificial Sequence: Synthetic oligonucleotide
cgcgcgcguucccuuuucc

SEQ ID NO: 971909 - RNA, 19 nt, Artificial Sequence
  Description of Artificial Sequence: Synthetic oligonucleotide
cgagcucgcgcgcguuccc

SEQ ID NO: 971910 - RNA, 19 nt, Artificial Sequence
  Description of Artificial Sequence: Synthetic oligonucleotide
guccugcccuccccagagu

SEQ ID NO: 971911 - RNA, 19 nt, Artificial Sequence
  Description of Artificial Sequence: Synthetic oligonucleotide
gcgcgcguucccuuuuccu

SEQ ID NO: 971912 - RNA, 19 nt, Artificial Sequence
  Description of Artificial Sequence: Synthetic oligonucleotide
cccgagcucgcgcgcguuc

SEQ ID NO: 971913 - RNA, 19 nt, Artificial Sequence
  Description of Artificial Sequence: Synthetic oligonucleotide
gcaccgauuuagagauggu

SEQ ID NO: 971914 - RNA, 19 nt, Artificial Sequence
  Description of Artificial Sequence: Synthetic oligonucleotide
cucgcgcgcguucccuuuu

SEQ ID NO: 971915 - RNA, 19 nt, Artificial Sequence
  Description of Artificial Sequence: Synthetic oligonucleotide
cgcgcguucccuuuuccuu

SEQ ID NO: 971916 - RNA, 19 nt, Artificial Sequence
  Description of Artificial Sequence: Synthetic oligonucleotide
ccgugggauacacgaucuu

SEQ ID NO: 971917 - RNA, 19 nt, Artificial Sequence
  Description of Artificial Sequence: Synthetic oligonucleotide
gggcgcaguuaggguucau

SEQ ID NO: 971918 - RNA, 19 nt, Artificial Sequence
  Description of Artificial Sequence: Synthetic oligonucleotide
gcccgagcucgcgcgcguu

SEQ ID NO: 971919 - RNA, 19 nt, Artificial Sequence
  Description of Artificial Sequence: Synthetic oligonucleotide
cgcccgagcucgcgcgcgu

SEQ ID NO: 971920 - RNA, 19 nt, Artificial Sequence
  Description of Artificial Sequence: Synthetic oligonucleotide
agaaacauagcuuucugcc

SEQ ID NO: 971921 - RNA, 19 nt, Artificial Sequence
  Description of Artificial Sequence: Synthetic oligonucleotide
aaugaaggccaccacaucg

SEQ ID NO: 971922 - RNA, 19 nt, Artificial Sequence
  Description of Artificial Sequence: Synthetic oligonucleotide
aagaccacggcuucugugc

SEQ ID NO: 971923 - RNA, 19 nt, Artificial Sequence
  Description of Artificial Sequence: Synthetic oligonucleotide
ugugaaagagccaucaaug

SEQ ID NO: 971924 - RNA, 19 nt, Artificial Sequence
  Description of Artificial Sequence: Synthetic oligonucleotide
uguuccuggaccaucacgg

SEQ ID NO: 971925 - RNA, 19 nt, Artificial Sequence
  Description of Artificial Sequence: Synthetic oligonucleotide
aacguagacauccaccuuc

SEQ ID NO: 971926 - RNA, 19 nt, Artificial Sequence
  Description of Artificial Sequence: Synthetic oligonucleotide
gaaacuucugauaacgugg

SEQ ID NO: 971927 - RNA, 19 nt, Artificial Sequence
  Description of Artificial Sequence: Synthetic oligonucleotide
gauaacgugguacagccag

SEQ ID NO: 971928 - RNA, 19 nt, Artificial Sequence
  Description of Artificial Sequence: Synthetic oligonucleotide
aaugguccauacaugaagc

SEQ ID NO: 971929 - RNA, 19 nt, Artificial Sequence
  Description of Artificial Sequence: Synthetic oligonucleotide
ugucauaacguagacaucc

SEQ ID NO: 971930 - RNA, 19 nt, Artificial Sequence
  Description of Artificial Sequence: Synthetic oligonucleotide
gaagcuugcgcacagcacg

SEQ ID NO: 971931 - RNA, 19 nt, Artificial Sequence
  Description of Artificial Sequence: Synthetic oligonucleotide
gauacuucgggucuugccc

SEQ ID NO: 971932 - RNA, 19 nt, Artificial Sequence
  Description of Artificial Sequence: Synthetic oligonucleotide
aaggagacaacaccauggg

SEQ ID NO: 971933 - RNA, 19 nt, Artificial Sequence
  Description of Artificial Sequence: Synthetic oligonucleotide
cacgguuuugcguagagcc

SEQ ID NO: 971934 - RNA, 19 nt, Artificial Sequence
  Description of Artificial Sequence: Synthetic oligonucleotide
auaacguagacauccaccu

SEQ ID NO: 971935 - RNA, 19 nt, Artificial Sequence
  Description of Artificial Sequence: Synthetic oligonucleotide
acuucugauaacgugguac

SEQ ID NO: 971936 - RNA, 19 nt, Artificial Sequence
  Description of Artificial Sequence: Synthetic oligonucleotide
cauaacguagacauccacc

SEQ ID NO: 971937 - RNA, 19 nt, Artificial Sequence
  Description of Artificial Sequence: Synthetic oligonucleotide
cugauaacgugguacagcc

SEQ ID NO: 971938 - RNA, 19 nt, Artificial Sequence
  Description of Artificial Sequence: Synthetic oligonucleotide
augcgcacaggguagacgc

SEQ ID NO: 971939 - RNA, 19 nt, Artificial Sequence
  Description of Artificial Sequence: Synthetic oligonucleotide
aauggccuggaacuugggg

SEQ ID NO: 971940 - RNA, 19 nt, Artificial Sequence
  Description of Artificial Sequence: Synthetic oligonucleotide
aaguuguguugugacagcc

SEQ ID NO: 971941 - RNA, 19 nt, Artificial Sequence
  Description of Artificial Sequence: Synthetic oligonucleotide
acaauguaggucuggcucg

SEQ ID NO: 971942 - RNA, 19 nt, Artificial Sequence
  Description of Artificial Sequence: Synthetic oligonucleotide
uccaacuggcccaaguggg

SEQ ID NO: 971943 - RNA, 19 nt, Artificial Sequence
  Description of Artificial Sequence: Synthetic oligonucleotide
agucgauccgcuugguucc

SEQ ID NO: 971944 - RNA, 19 nt, Artificial Sequence
  Description of Artificial Sequence: Synthetic oligonucleotide
aguggauccacuuuccuga

SEQ ID NO: 971945 - RNA, 19 nt, Artificial Sequence
  Description of Artificial Sequence: Synthetic oligonucleotide
aggccggccaguuacauac

SEQ ID NO: 971946 - RNA, 19 nt, Artificial Sequence
  Description of Artificial Sequence: Synthetic oligonucleotide
ugaaagagccaucaaugcu

SEQ ID NO: 971947 - RNA, 19 nt, Artificial Sequence
  Description of Artificial Sequence: Synthetic oligonucleotide
uccaaugguccauacauga

SEQ ID NO: 971948 - RNA, 19 nt, Artificial Sequence
  Description of Artificial Sequence: Synthetic oligonucleotide
aguuacauacacaaucagg

SEQ ID NO: 971949 - RNA, 19 nt, Artificial Sequence
  Description of Artificial Sequence: Synthetic oligonucleotide
acauacacaaucagguagc

SEQ ID NO: 971950 - RNA, 19 nt, Artificial Sequence
  Description of Artificial Sequence: Synthetic oligonucleotide
ugucgcagaaugaaggcca

SEQ ID NO: 971951 - RNA, 19 nt, Artificial Sequence
  Description of Artificial Sequence: Synthetic oligonucleotide
uacagugaguagucgaucc

SEQ ID NO: 971952 - RNA, 19 nt, Artificial Sequence
  Description of Artificial Sequence: Synthetic oligonucleotide
augauagagacgcuggcug

SEQ ID NO: 971953 - RNA, 19 nt, Artificial Sequence
  Description of Artificial Sequence: Synthetic oligonucleotide
auacuucgggucuugcccc

SEQ ID NO: 971954 - RNA, 19 nt, Artificial Sequence
  Description of Artificial Sequence: Synthetic oligonucleotide
uguguugugacagccacgc

SEQ ID NO: 971955 - RNA, 19 nt, Artificial Sequence
  Description of Artificial Sequence: Synthetic oligonucleotide
ugugccugaagcuugcgca

SEQ ID NO: 971956 - RNA, 19 nt, Artificial Sequence
  Description of Artificial Sequence: Synthetic oligonucleotide
acgauguucaguucuaccu

SEQ ID NO: 971957 - RNA, 19 nt, Artificial Sequence
  Description of Artificial Sequence: Synthetic oligonucleotide
ucuccagugagcgugacca

SEQ ID NO: 971958 - RNA, 19 nt, Artificial Sequence
  Description of Artificial Sequence: Synthetic oligonucleotide
ucuccuaggggaaacuucu

SEQ ID NO: 971959 - RNA, 19 nt, Artificial Sequence
  Description of Artificial Sequence: Synthetic oligonucleotide
uguugugacagccacgcua

SEQ ID NO: 971960 - RNA, 19 nt, Artificial Sequence
  Description of Artificial Sequence: Synthetic oligonucleotide
gaagccugagaccuugaag

SEQ ID NO: 971961 - RNA, 19 nt, Artificial Sequence
  Description of Artificial Sequence: Synthetic oligonucleotide
ugcaacaucuuuuggggac

SEQ ID NO: 971962 - RNA, 19 nt, Artificial Sequence
  Description of Artificial Sequence: Synthetic oligonucleotide
cacaauguaggucuggcuc

SEQ ID NO: 971963 - RNA, 19 nt, Artificial Sequence
  Description of Artificial Sequence: Synthetic oligonucleotide
ucugauaacgugguacagc

SEQ ID NO: 971964 - RNA, 19 nt, Artificial Sequence
  Description of Artificial Sequence: Synthetic oligonucleotide
caugaagcgcccauugagc

SEQ ID NO: 971965 - RNA, 19 nt, Artificial Sequence
  Description of Artificial Sequence: Synthetic oligonucleotide
auacaugaagcgcccauug

SEQ ID NO: 971966 - RNA, 19 nt, Artificial Sequence
  Description of Artificial Sequence: Synthetic oligonucleotide
cauuaguggggccaucagg

SEQ ID NO: 971967 - RNA, 19 nt, Artificial Sequence
  Description of Artificial Sequence: Synthetic oligonucleotide
uagucgauccgcuugguuc

SEQ ID NO: 971968 - RNA, 19 nt, Artificial Sequence
  Description of Artificial Sequence: Synthetic oligonucleotide
aggguagacgccaaugccc

SEQ ID NO: 971969 - RNA, 19 nt, Artificial Sequence
  Description of Artificial Sequence: Synthetic oligonucleotide
cacagcacggcccacaaug

SEQ ID NO: 971970 - RNA, 19 nt, Artificial Sequence
  Description of Artificial Sequence: Synthetic oligonucleotide
gaguagucgauccgcuugg

SEQ ID NO: 971971 - RNA, 19 nt, Artificial Sequence
  Description of Artificial Sequence: Synthetic oligonucleotide
agugccugaccacauccac

SEQ ID NO: 971972 - RNA, 19 nt, Artificial Sequence
  Description of Artificial Sequence: Synthetic oligonucleotide
aagcaguuggcucugcuua

SEQ ID NO: 971973 - RNA, 19 nt, Artificial Sequence
  Description of Artificial Sequence: Synthetic oligonucleotide
ucggcugauucccaguagc

SEQ ID NO: 971974 - RNA, 19 nt, Artificial Sequence
  Description of Artificial Sequence: Synthetic oligonucleotide
uagacgccaaugcccagcg

SEQ ID NO: 971975 - RNA, 19 nt, Artificial Sequence
  Description of Artificial Sequence: Synthetic oligonucleotide
auuaguggggccaucagga

SEQ ID NO: 971976 - RNA, 19 nt, Artificial Sequence
  Description of Artificial Sequence: Synthetic oligonucleotide
auccacuuuccugacagcg

SEQ ID NO: 971977 - RNA, 19 nt, Artificial Sequence
  Description of Artificial Sequence: Synthetic oligonucleotide
acuuguguucguuuucucu

SEQ ID NO: 971978 - RNA, 19 nt, Artificial Sequence
  Description of Artificial Sequence: Synthetic oligonucleotide
gaguaucaauaaauaaccc

SEQ ID NO: 971979 - RNA, 19 nt, Artificial Sequence
  Description of Artificial Sequence: Synthetic oligonucleotide
ugauacuucgggucuugcc

SEQ ID NO: 971980 - RNA, 19 nt, Artificial Sequence
  Description of Artificial Sequence: Synthetic oligonucleotide
augguccauacaugaagcg

SEQ ID NO: 971981 - RNA, 19 nt, Artificial Sequence
  Description of Artificial Sequence: Synthetic oligonucleotide
acagugaguagucgauccg

SEQ ID NO: 971982 - RNA, 19 nt, Artificial Sequence
  Description of Artificial Sequence: Synthetic oligonucleotide
gugaccgugggaaaggcgg

SEQ ID NO: 971983 - RNA, 19 nt, Artificial Sequence
  Description of Artificial Sequence: Synthetic oligonucleotide
guuguguugugacagccac

SEQ ID NO: 971984 - RNA, 19 nt, Artificial Sequence
  Description of Artificial Sequence: Synthetic oligonucleotide
caguucuaccucuuguacc

SEQ ID NO: 971985 - RNA, 19 nt, Artificial Sequence
  Description of Artificial Sequence: Synthetic oligonucleotide
ucauaacguagacauccac

SEQ ID NO: 971986 - RNA, 19 nt, Artificial Sequence
  Description of Artificial Sequence: Synthetic oligonucleotide
accccugaccaccaugcgc

SEQ ID NO: 971987 - RNA, 19 nt, Artificial Sequence
  Description of Artificial Sequence: Synthetic oligonucleotide
agugccaaaguggauccac

SEQ ID NO: 971988 - RNA, 19 nt, Artificial Sequence
  Description of Artificial Sequence: Synthetic oligonucleotide
gaggcugauacuucggguc

SEQ ID NO: 971989 - RNA, 19 nt, Artificial Sequence
  Description of Artificial Sequence: Synthetic oligonucleotide
ugaccacauccaauggucc

SEQ ID NO: 971990 - RNA, 19 nt, Artificial Sequence
  Description of Artificial Sequence: Synthetic oligonucleotide
ugggucaugggugaggcca

SEQ ID NO: 971991 - RNA, 19 nt, Artificial Sequence
  Description of Artificial Sequence: Synthetic oligonucleotide
agccauagccugcucacuc

SEQ ID NO: 971992 - RNA, 19 nt, Artificial Sequence
  Description of Artificial Sequence: Synthetic oligonucleotide
cacacagucucugaagacc

SEQ ID NO: 971993 - RNA, 19 nt, Artificial Sequence
  Description of Artificial Sequence: Synthetic oligonucleotide
uuguguugugacagccacg

SEQ ID NO: 971994 - RNA, 19 nt, Artificial Sequence
  Description of Artificial Sequence: Synthetic oligonucleotide
uuguguucguuuucucugc

SEQ ID NO: 971995 - RNA, 19 nt, Artificial Sequence
  Description of Artificial Sequence: Synthetic oligonucleotide
aaacuucugauaacguggu

SEQ ID NO: 971996 - RNA, 19 nt, Artificial Sequence
  Description of Artificial Sequence: Synthetic oligonucleotide
gaaguuguguugugacagc

SEQ ID NO: 971997 - RNA, 19 nt, Artificial Sequence
  Description of Artificial Sequence: Synthetic oligonucleotide
aggggaaacuucugauaac

SEQ ID NO: 971998 - RNA, 19 nt, Artificial Sequence
  Description of Artificial Sequence: Synthetic oligonucleotide
ugguccauacaugaagcgc

SEQ ID NO: 971999 - RNA, 19 nt, Artificial Sequence
  Description of Artificial Sequence: Synthetic oligonucleotide
gaagcgcccauugagcacc

SEQ ID NO: 972000 - RNA, 19 nt, Artificial Sequence
  Description of Artificial Sequence: Synthetic oligonucleotide
ucagccauagccugcucac

SEQ ID NO: 972001 - RNA, 19 nt, Artificial Sequence
  Description of Artificial Sequence: Synthetic oligonucleotide
accugucgcagaaugaagg

SEQ ID NO: 972002 - RNA, 19 nt, Artificial Sequence
  Description of Artificial Sequence: Synthetic oligonucleotide
gacgccaaugcccagcgca

SEQ ID NO: 972003 - RNA, 19 nt, Artificial Sequence
  Description of Artificial Sequence: Synthetic oligonucleotide
agaccacggcuucugugcc

SEQ ID NO: 972004 - RNA, 19 nt, Artificial Sequence
  Description of Artificial Sequence: Synthetic oligonucleotide
agcggcauggaagagguug

SEQ ID NO: 972005 - RNA, 19 nt, Artificial Sequence
  Description of Artificial Sequence: Synthetic oligonucleotide
cuuaaugggucauggguga

SEQ ID NO: 972006 - RNA, 19 nt, Artificial Sequence
  Description of Artificial Sequence: Synthetic oligonucleotide
uaaugggucaugggugagg

SEQ ID NO: 972007 - RNA, 19 nt, Artificial Sequence
  Description of Artificial Sequence: Synthetic oligonucleotide
acauuccggaucuugacuu

SEQ ID NO: 972008 - RNA, 19 nt, Artificial Sequence
  Description of Artificial Sequence: Synthetic oligonucleotide
ucuggcucggagacagucc

SEQ ID NO: 972009 - RNA, 19 nt, Artificial Sequence
  Description of Artificial Sequence: Synthetic oligonucleotide
ugacauuccggaucuugac

SEQ ID NO: 972010 - RNA, 19 nt, Artificial Sequence
  Description of Artificial Sequence: Synthetic oligonucleotide
ugccuuaaugggucauggg

SEQ ID NO: 972011 - RNA, 19 nt, Artificial Sequence
  Description of Artificial Sequence: Synthetic oligonucleotide
cuucugauaacgugguaca

SEQ ID NO: 972012 - RNA, 19 nt, Artificial Sequence
  Description of Artificial Sequence: Synthetic oligonucleotide
cacgauguucaguucuacc

SEQ ID NO: 972013 - RNA, 19 nt, Artificial Sequence
  Description of Artificial Sequence: Synthetic oligonucleotide
ugaagcuugcgcacagcac

SEQ ID NO: 972014 - RNA, 19 nt, Artificial Sequence
  Description of Artificial Sequence: Synthetic oligonucleotide
caguggggagccaaagagg

SEQ ID NO: 972015 - RNA, 19 nt, Artificial Sequence
  Description of Artificial Sequence: Synthetic oligonucleotide
ugauagagacgcuggcugu

SEQ ID NO: 972016 - RNA, 19 nt, Artificial Sequence
  Description of Artificial Sequence: Synthetic oligonucleotide
ggaucuugacuuguguucg

SEQ ID NO: 972017 - RNA, 19 nt, Artificial Sequence
  Description of Artificial Sequence: Synthetic oligonucleotide
aaagagccaucaaugcuga

SEQ ID NO: 972018 - RNA, 19 nt, Artificial Sequence
  Description of Artificial Sequence: Synthetic oligonucleotide
agugugaccgugggaaagg

SEQ ID NO: 972019 - RNA, 19 nt, Artificial Sequence
  Description of Artificial Sequence: Synthetic oligonucleotide
uuaguggggccaucaggag

SEQ ID NO: 972020 - RNA, 19 nt, Artificial Sequence
  Description of Artificial Sequence: Synthetic oligonucleotide
ugaggcugauacuucgggu

SEQ ID NO: 972021 - RNA, 19 nt, Artificial Sequence
  Description of Artificial Sequence: Synthetic oligonucleotide
uugccccuagccagggugg

SEQ ID NO: 972022 - RNA, 19 nt, Artificial Sequence
  Description of Artificial Sequence: Synthetic oligonucleotide
ugacagccacgcuaccacg

SEQ ID NO: 972023 - RNA, 19 nt, Artificial Sequence
  Description of Artificial Sequence: Synthetic oligonucleotide
agccacgauguucaguucu

SEQ ID NO: 972024 - RNA, 19 nt, Artificial Sequence
  Description of Artificial Sequence: Synthetic oligonucleotide
uugacuuguguucguuuuc

SEQ ID NO: 972025 - RNA, 19 nt, Artificial Sequence
  Description of Artificial Sequence: Synthetic oligonucleotide
gguccauacaugaagcgcc

SEQ ID NO: 972026 - RNA, 19 nt, Artificial Sequence
  Description of Artificial Sequence: Synthetic oligonucleotide
ggagccucagaacuggcag

SEQ ID NO: 972027 - RNA, 19 nt, Artificial Sequence
  Description of Artificial Sequence: Synthetic oligonucleotide
cucgagugggucugcaaag

SEQ ID NO: 972028 - RNA, 19 nt, Artificial Sequence
  Description of Artificial Sequence: Synthetic oligonucleotide
guugugacagccacgcuac

SEQ ID NO: 972029 - RNA, 19 nt, Artificial Sequence
  Description of Artificial Sequence: Synthetic oligonucleotide
cugcuuacggaggaagucc

SEQ ID NO: 972030 - RNA, 19 nt, Artificial Sequence
  Description of Artificial Sequence: Synthetic oligonucleotide
uccgcuugguuccccacca

SEQ ID NO: 972031 - RNA, 19 nt, Artificial Sequence
  Description of Artificial Sequence: Synthetic oligonucleotide
aucacgguuuugcguagag

SEQ ID NO: 972032 - RNA, 19 nt, Artificial Sequence
  Description of Artificial Sequence: Synthetic oligonucleotide
ccuuaaugggucaugggug

SEQ ID NO: 972033 - RNA, 19 nt, Artificial Sequence
  Description of Artificial Sequence: Synthetic oligonucleotide
gauguucaguucuaccucu

SEQ ID NO: 972034 - RNA, 19 nt, Artificial Sequence
  Description of Artificial Sequence: Synthetic oligonucleotide
ggcuggacgcaucugagcc

SEQ ID NO: 972035 - RNA, 19 nt, Artificial Sequence
  Description of Artificial Sequence: Synthetic oligonucleotide
ugagcgugaccacauccaa

SEQ ID NO: 972036 - RNA, 19 nt, Artificial Sequence
  Description of Artificial Sequence: Synthetic oligonucleotide
gauagagacgcuggcugug

SEQ ID NO: 972037 - RNA, 19 nt, Artificial Sequence
  Description of Artificial Sequence: Synthetic oligonucleotide
uccggaucuugacuugugu

SEQ ID NO: 972038 - RNA, 19 nt, Artificial Sequence
  Description of Artificial Sequence: Synthetic oligonucleotide
ggaacuggcacugugccug

SEQ ID NO: 972039 - RNA, 19 nt, Artificial Sequence
  Description of Artificial Sequence: Synthetic oligonucleotide
cuccaaugcgggcaucacg

SEQ ID NO: 972040 - RNA, 19 nt, Artificial Sequence
  Description of Artificial Sequence: Synthetic oligonucleotide
gacccuugaguaucaauaa

SEQ ID NO: 972041 - RNA, 19 nt, Artificial Sequence
  Description of Artificial Sequence: Synthetic oligonucleotide
agacccuugaguaucaaua

SEQ ID NO: 972042 - RNA, 19 nt, Artificial Sequence
  Description of Artificial Sequence: Synthetic oligonucleotide
acauccaaugguccauaca

SEQ ID NO: 972043 - RNA, 19 nt, Artificial Sequence
  Description of Artificial Sequence: Synthetic oligonucleotide
ccaagugggcaacauagcc

SEQ ID NO: 972044 - RNA, 19 nt, Artificial Sequence
  Description of Artificial Sequence: Synthetic oligonucleotide
ugauaacgugguacagcca

SEQ ID NO: 972045 - RNA, 19 nt, Artificial Sequence
  Description of Artificial Sequence: Synthetic oligonucleotide
cugccuuaaugggucaugg

SEQ ID NO: 972046 - RNA, 19 nt, Artificial Sequence
  Description of Artificial Sequence: Synthetic oligonucleotide
acggcccucacauaccacu

SEQ ID NO: 972047 - RNA, 19 nt, Artificial Sequence
  Description of Artificial Sequence: Synthetic oligonucleotide
cauccaaugguccauacau

SEQ ID NO: 972048 - RNA, 19 nt, Artificial Sequence
  Description of Artificial Sequence: Synthetic oligonucleotide
cauacacaaucagguagcc

SEQ ID NO: 972049 - RNA, 19 nt, Artificial Sequence
  Description of Artificial Sequence: Synthetic oligonucleotide
aucuccuaggggaaacuuc

SEQ ID NO: 972050 - RNA, 19 nt, Artificial Sequence
  Description of Artificial Sequence: Synthetic oligonucleotide
uuaaugggucaugggugag

SEQ ID NO: 972051 - RNA, 19 nt, Artificial Sequence
  Description of Artificial Sequence: Synthetic oligonucleotide
uuuccugacagcggcugug

SEQ ID NO: 972052 - RNA, 19 nt, Artificial Sequence
  Description of Artificial Sequence: Synthetic oligonucleotide
ucugccuuaaugggucaug

SEQ ID NO: 972053 - RNA, 19 nt, Artificial Sequence
  Description of Artificial Sequence: Synthetic oligonucleotide
cauugagcaccuggggacg

SEQ ID NO: 972054 - RNA, 19 nt, Artificial Sequence
  Description of Artificial Sequence: Synthetic oligonucleotide
uucguuuucucugccacuu

SEQ ID NO: 972055 - RNA, 19 nt, Artificial Sequence
  Description of Artificial Sequence: Synthetic oligonucleotide
aggcugauacuucgggucu

SEQ ID NO: 972056 - RNA, 19 nt, Artificial Sequence
  Description of Artificial Sequence: Synthetic oligonucleotide
cccaugauagagacgcugg

SEQ ID NO: 972057 - RNA, 19 nt, Artificial Sequence
  Description of Artificial Sequence: Synthetic oligonucleotide
ggcaacauagccaucugac

SEQ ID NO: 972058 - RNA, 19 nt, Artificial Sequence
  Description of Artificial Sequence: Synthetic oligonucleotide
agcgccagcgcgcaccuug

SEQ ID NO: 972059 - RNA, 19 nt, Artificial Sequence
  Description of Artificial Sequence: Synthetic oligonucleotide
cugucgcagaaugaaggcc

SEQ ID NO: 972060 - RNA, 19 nt, Artificial Sequence
  Description of Artificial Sequence: Synthetic oligonucleotide
ugaagcgcccauugagcac

SEQ ID NO: 972061 - RNA, 19 nt, Artificial Sequence
  Description of Artificial Sequence: Synthetic oligonucleotide
ggcggugagugccucaggg

SEQ ID NO: 972062 - RNA, 19 nt, Artificial Sequence
  Description of Artificial Sequence: Synthetic oligonucleotide
ucuugacuuguguucguuu

SEQ ID NO: 972063 - RNA, 19 nt, Artificial Sequence
  Description of Artificial Sequence: Synthetic oligonucleotide
uugcccgaugguuggaagu

SEQ ID NO: 972064 - RNA, 19 nt, Artificial Sequence
  Description of Artificial Sequence: Synthetic oligonucleotide
ccaguggggagccaaagag

SEQ ID NO: 972065 - RNA, 19 nt, Artificial Sequence
  Description of Artificial Sequence: Synthetic oligonucleotide
ugggcaacauagccaucug

SEQ ID NO: 972066 - RNA, 19 nt, Artificial Sequence
  Description of Artificial Sequence: Synthetic oligonucleotide
aaaggcggugagugccuca

SEQ ID NO: 972067 - RNA, 19 nt, Artificial Sequence
  Description of Artificial Sequence: Synthetic oligonucleotide
ugcccgaugguuggaagug

SEQ ID NO: 972068 - RNA, 19 nt, Artificial Sequence
  Description of Artificial Sequence: Synthetic oligonucleotide
gcccaagugggcaacauag

SEQ ID NO: 972069 - RNA, 19 nt, Artificial Sequence
  Description of Artificial Sequence: Synthetic oligonucleotide
cacaucggcugauucccag

SEQ ID NO: 972070 - RNA, 19 nt, Artificial Sequence
  Description of Artificial Sequence: Synthetic oligonucleotide
auaacgugguacagccagg

SEQ ID NO: 972071 - RNA, 19 nt, Artificial Sequence
  Description of Artificial Sequence: Synthetic oligonucleotide
cucggcauaggugugguca

SEQ ID NO: 972072 - RNA, 19 nt, Artificial Sequence
  Description of Artificial Sequence: Synthetic oligonucleotide
cuugcccgaugguuggaag

SEQ ID NO: 972073 - RNA, 19 nt, Artificial Sequence
  Description of Artificial Sequence: Synthetic oligonucleotide
gggaugagccaucuccuag

SEQ ID NO: 972074 - RNA, 19 nt, Artificial Sequence
  Description of Artificial Sequence: Synthetic oligonucleotide
gauccacuuuccugacagc

SEQ ID NO: 972075 - RNA, 19 nt, Artificial Sequence
  Description of Artificial Sequence: Synthetic oligonucleotide
agcauuaguggggccauca

SEQ ID NO: 972076 - RNA, 19 nt, Artificial Sequence
  Description of Artificial Sequence: Synthetic oligonucleotide
cauuccggaucuugacuug

SEQ ID NO: 972077 - RNA, 19 nt, Artificial Sequence
  Description of Artificial Sequence: Synthetic oligonucleotide
auagguguggucaccccug

SEQ ID NO: 972078 - RNA, 19 nt, Artificial Sequence
  Description of Artificial Sequence: Synthetic oligonucleotide
uugcgcacagcacggccca

SEQ ID NO: 972079 - RNA, 19 nt, Artificial Sequence
  Description of Artificial Sequence: Synthetic oligonucleotide
cguagagccagcaccaggc

SEQ ID NO: 972080 - RNA, 19 nt, Artificial Sequence
  Description of Artificial Sequence: Synthetic oligonucleotide
uugguuccccaccagcguu

SEQ ID NO: 972081 - RNA, 19 nt, Artificial Sequence
  Description of Artificial Sequence: Synthetic oligonucleotide
ucggcauagguguggucac

SEQ ID NO: 972082 - RNA, 19 nt, Artificial Sequence
  Description of Artificial Sequence: Synthetic oligonucleotide
guagacgccaaugcccagc

SEQ ID NO: 972083 - RNA, 19 nt, Artificial Sequence
  Description of Artificial Sequence: Synthetic oligonucleotide
acccuugaguaucaauaaa

SEQ ID NO: 972084 - RNA, 19 nt, Artificial Sequence
  Description of Artificial Sequence: Synthetic oligonucleotide
ucacgguuuugcguagagc

SEQ ID NO: 972085 - RNA, 19 nt, Artificial Sequence
  Description of Artificial Sequence: Synthetic oligonucleotide
gaccugucgcagaaugaag

SEQ ID NO: 972086 - RNA, 19 nt, Artificial Sequence
  Description of Artificial Sequence: Synthetic oligonucleotide
acggcuucugugccucggg

SEQ ID NO: 972087 - RNA, 19 nt, Artificial Sequence
  Description of Artificial Sequence: Synthetic oligonucleotide
ugaccgugggaaaggcggu

SEQ ID NO: 972088 - RNA, 19 nt, Artificial Sequence
  Description of Artificial Sequence: Synthetic oligonucleotide
ugccaaaguggauccacuu

SEQ ID NO: 972089 - RNA, 19 nt, Artificial Sequence
  Description of Artificial Sequence: Synthetic oligonucleotide
uaacguagacauccaccuu

SEQ ID NO: 972090 - RNA, 19 nt, Artificial Sequence
  Description of Artificial Sequence: Synthetic oligonucleotide
aacuucugauaacguggua

SEQ ID NO: 972091 - RNA, 19 nt, Artificial Sequence
  Description of Artificial Sequence: Synthetic oligonucleotide
agaagccugagaccuugaa

SEQ ID NO: 972092 - RNA, 19 nt, Artificial Sequence
  Description of Artificial Sequence: Synthetic oligonucleotide
cacaggguagacgccaaug

SEQ ID NO: 972093 - RNA, 19 nt, Artificial Sequence
  Description of Artificial Sequence: Synthetic oligonucleotide
cuaggggaaacuucugaua

SEQ ID NO: 972094 - RNA, 19 nt, Artificial Sequence
  Description of Artificial Sequence: Synthetic oligonucleotide
gacuuguguucguuuucuc

SEQ ID NO: 972095 - RNA, 19 nt, Artificial Sequence
  Description of Artificial Sequence: Synthetic oligonucleotide
agugaguagucgauccgcu

SEQ ID NO: 972096 - RNA, 19 nt, Artificial Sequence
  Description of Artificial Sequence: Synthetic oligonucleotide
ccugucgcagaaugaaggc

SEQ ID NO: 972097 - RNA, 19 nt, Artificial Sequence
  Description of Artificial Sequence: Synthetic oligonucleotide
ggcaucacgguuuugcgua

SEQ ID NO: 972098 - RNA, 19 nt, Artificial Sequence
  Description of Artificial Sequence: Synthetic oligonucleotide
ucgggcaaccacagucaga

SEQ ID NO: 972099 - RNA, 19 nt, Artificial Sequence
  Description of Artificial Sequence: Synthetic oligonucleotide
gaacuggcagguggacagg

SEQ ID NO: 972100 - RNA, 19 nt, Artificial Sequence
  Description of Artificial Sequence: Synthetic oligonucleotide
agacgccaaugcccagcgc

SEQ ID NO: 972101 - RNA, 19 nt, Artificial Sequence
  Description of Artificial Sequence: Synthetic oligonucleotide
ugcgcacaggguagacgcc

SEQ ID NO: 972102 - RNA, 19 nt, Artificial Sequence
  Description of Artificial Sequence: Synthetic oligonucleotide
auccaaugguccauacaug

SEQ ID NO: 972103 - RNA, 19 nt, Artificial Sequence
  Description of Artificial Sequence: Synthetic oligonucleotide
cuuacggaggaaguccaca

SEQ ID NO: 972104 - RNA, 19 nt, Artificial Sequence
  Description of Artificial Sequence: Synthetic oligonucleotide
cucgggcaaccacagucag

SEQ ID NO: 972105 - RNA, 19 nt, Artificial Sequence
  Description of Artificial Sequence: Synthetic oligonucleotide
ugucagcucacugccugcu

SEQ ID NO: 972106 - RNA, 19 nt, Artificial Sequence
  Description of Artificial Sequence: Synthetic oligonucleotide
uucgggucuugccccuagc

SEQ ID NO: 972107 - RNA, 19 nt, Artificial Sequence
  Description of Artificial Sequence: Synthetic oligonucleotide
ugguuccccaccagcguuc

SEQ ID NO: 972108 - RNA, 19 nt, Artificial Sequence
  Description of Artificial Sequence: Synthetic oligonucleotide
ggggacggcccucacauac

SEQ ID NO: 972109 - RNA, 19 nt, Artificial Sequence
  Description of Artificial Sequence: Synthetic oligonucleotide
caauggccuggaacuuggg

SEQ ID NO: 972110 - RNA, 19 nt, Artificial Sequence
  Description of Artificial Sequence: Synthetic oligonucleotide
caccuucucuccagugagc

SEQ ID NO: 972111 - RNA, 19 nt, Artificial Sequence
  Description of Artificial Sequence: Synthetic oligonucleotide
ggcagugugaccgugggaa

SEQ ID NO: 972112 - RNA, 19 nt, Artificial Sequence
  Description of Artificial Sequence: Synthetic oligonucleotide
guccauacaugaagcgccc

SEQ ID NO: 972113 - RNA, 19 nt, Artificial Sequence
  Description of Artificial Sequence: Synthetic oligonucleotide
cauggaagagguuguagau

SEQ ID NO: 972114 - RNA, 19 nt, Artificial Sequence
  Description of Artificial Sequence: Synthetic oligonucleotide
acgccaaugcccagcgcac

SEQ ID NO: 972115 - RNA, 19 nt, Artificial Sequence
  Description of Artificial Sequence: Synthetic oligonucleotide
gacagcggcugugucauaa

SEQ ID NO: 972116 - RNA, 19 nt, Artificial Sequence
  Description of Artificial Sequence: Synthetic oligonucleotide
agcggcugugucauaacgu

SEQ ID NO: 972117 - RNA, 19 nt, Artificial Sequence
  Description of Artificial Sequence: Synthetic oligonucleotide
uccauacaugaagcgccca

SEQ ID NO: 972118 - RNA, 19 nt, Artificial Sequence
  Description of Artificial Sequence: Synthetic oligonucleotide
gccucgggcaaccacaguc

SEQ ID NO: 972119 - RNA, 19 nt, Artificial Sequence
  Description of Artificial Sequence: Synthetic oligonucleotide
gauccgcuugguuccccac

SEQ ID NO: 972120 - RNA, 19 nt, Artificial Sequence
  Description of Artificial Sequence: Synthetic oligonucleotide
gccuuaaugggucaugggu

SEQ ID NO: 972121 - RNA, 19 nt, Artificial Sequence
  Description of Artificial Sequence: Synthetic oligonucleotide
uaacccagguucagccaua

SEQ ID NO: 972122 - RNA, 19 nt, Artificial Sequence
  Description of Artificial Sequence: Synthetic oligonucleotide
aauguaggucuggcucgga

SEQ ID NO: 972123 - RNA, 19 nt, Artificial Sequence
  Description of Artificial Sequence: Synthetic oligonucleotide
cugcaacaucuuuugggga

SEQ ID NO: 972124 - RNA, 19 nt, Artificial Sequence
  Description of Artificial Sequence: Synthetic oligonucleotide
gagcuguuggugaccucag

SEQ ID NO: 972125 - RNA, 19 nt, Artificial Sequence
  Description of Artificial Sequence: Synthetic oligonucleotide
ggacccauauccagccacg

SEQ ID NO: 972126 - RNA, 19 nt, Artificial Sequence
  Description of Artificial Sequence: Synthetic oligonucleotide
ccaugauagagacgcuggc

SEQ ID NO: 972127 - RNA, 19 nt, Artificial Sequence
  Description of Artificial Sequence: Synthetic oligonucleotide
gucauaacguagacaucca

SEQ ID NO: 972128 - RNA, 19 nt, Artificial Sequence
  Description of Artificial Sequence: Synthetic oligonucleotide
ugcguagagccagcaccag

SEQ ID NO: 972129 - RNA, 19 nt, Artificial Sequence
  Description of Artificial Sequence: Synthetic oligonucleotide
acccauauccagccacgau

SEQ ID NO: 972130 - RNA, 19 nt, Artificial Sequence
  Description of Artificial Sequence: Synthetic oligonucleotide
ccuugaguaucaauaaaua

SEQ ID NO: 972131 - RNA, 19 nt, Artificial Sequence
  Description of Artificial Sequence: Synthetic oligonucleotide
acguagacauccaccuucu

SEQ ID NO: 972132 - RNA, 19 nt, Artificial Sequence
  Description of Artificial Sequence: Synthetic oligonucleotide
cuucgggucuugccccuag

SEQ ID NO: 972133 - RNA, 19 nt, Artificial Sequence
  Description of Artificial Sequence: Synthetic oligonucleotide
cugauacuucgggucuugc

SEQ ID NO: 972134 - RNA, 19 nt, Artificial Sequence
  Description of Artificial Sequence: Synthetic oligonucleotide
gcguagagccagcaccagg

SEQ ID NO: 972135 - RNA, 19 nt, Artificial Sequence
  Description of Artificial Sequence: Synthetic oligonucleotide
uuccugacagcggcugugu

SEQ ID NO: 972136 - RNA, 19 nt, Artificial Sequence
  Description of Artificial Sequence: Synthetic oligonucleotide
gcaacaucuuuuggggacc

SEQ ID NO: 972137 - RNA, 19 nt, Artificial Sequence
  Description of Artificial Sequence: Synthetic oligonucleotide
agacgcuggcugugaaaga

SEQ ID NO: 972138 - RNA, 19 nt, Artificial Sequence
  Description of Artificial Sequence: Synthetic oligonucleotide
cagccacgcuaccacgcgg

SEQ ID NO: 972139 - RNA, 19 nt, Artificial Sequence
  Description of Artificial Sequence: Synthetic oligonucleotide
ggcauagguguggucaccc

SEQ ID NO: 972140 - RNA, 19 nt, Artificial Sequence
  Description of Artificial Sequence: Synthetic oligonucleotide
aaggcaccacuggccgagg

SEQ ID NO: 972141 - RNA, 19 nt, Artificial Sequence
  Description of Artificial Sequence: Synthetic oligonucleotide
gagugggucugcaaagugu

SEQ ID NO: 972142 - RNA, 19 nt, Artificial Sequence
  Description of Artificial Sequence: Synthetic oligonucleotide
augaccugucgcagaauga

SEQ ID NO: 972143 - RNA, 19 nt, Artificial Sequence
  Description of Artificial Sequence: Synthetic oligonucleotide
acgguuuugcguagagcca

SEQ ID NO: 972144 - RNA, 19 nt, Artificial Sequence
  Description of Artificial Sequence: Synthetic oligonucleotide
gauucccaguagcuggcgu

SEQ ID NO: 972145 - RNA, 19 nt, Artificial Sequence
  Description of Artificial Sequence: Synthetic oligonucleotide
ucgcagaaugaaggccacc

SEQ ID NO: 972146 - RNA, 19 nt, Artificial Sequence
  Description of Artificial Sequence: Synthetic oligonucleotide
gcgggcaucacgguuuugc

SEQ ID NO: 972147 - RNA, 19 nt, Artificial Sequence
  Description of Artificial Sequence: Synthetic oligonucleotide
ggcugauucccaguagcug

SEQ ID NO: 972148 - RNA, 19 nt, Artificial Sequence
  Description of Artificial Sequence: Synthetic oligonucleotide
cauagguguggucaccccu

SEQ ID NO: 972149 - RNA, 19 nt, Artificial Sequence
  Description of Artificial Sequence: Synthetic oligonucleotide
agcgaagcaguuggcucug

SEQ ID NO: 972150 - RNA, 19 nt, Artificial Sequence
  Description of Artificial Sequence: Synthetic oligonucleotide
gccugagaccuugaagucc

SEQ ID NO: 972151 - RNA, 19 nt, Artificial Sequence
  Description of Artificial Sequence: Synthetic oligonucleotide
cgggcaaccacagucagac

SEQ ID NO: 972152 - RNA, 19 nt, Artificial Sequence
  Description of Artificial Sequence: Synthetic oligonucleotide
ggugagugccucagggcag

SEQ ID NO: 972153 - RNA, 19 nt, Artificial Sequence
  Description of Artificial Sequence: Synthetic oligonucleotide
aucugcucgcaggcuggac

SEQ ID NO: 972154 - RNA, 19 nt, Artificial Sequence
  Description of Artificial Sequence: Synthetic oligonucleotide
gcccucacauaccacugug

SEQ ID NO: 972155 - RNA, 19 nt, Artificial Sequence
  Description of Artificial Sequence: Synthetic oligonucleotide
caccccugaccaccaugcg

SEQ ID NO: 972156 - RNA, 19 nt, Artificial Sequence
  Description of Artificial Sequence: Synthetic oligonucleotide
cccaagugggcaacauagc

SEQ ID NO: 972157 - RNA, 19 nt, Artificial Sequence
  Description of Artificial Sequence: Synthetic oligonucleotide
uucugccuuaaugggucau

SEQ ID NO: 972158 - RNA, 19 nt, Artificial Sequence
  Description of Artificial Sequence: Synthetic oligonucleotide
cugugccucgggcaaccac

SEQ ID NO: 972159 - RNA, 19 nt, Artificial Sequence
  Description of Artificial Sequence: Synthetic oligonucleotide
gacccauauccagccacga

SEQ ID NO: 972160 - RNA, 19 nt, Artificial Sequence
  Description of Artificial Sequence: Synthetic oligonucleotide
gcauagguguggucacccc

SEQ ID NO: 972161 - RNA, 19 nt, Artificial Sequence
  Description of Artificial Sequence: Synthetic oligonucleotide
aguagucgauccgcuuggu

SEQ ID NO: 972162 - RNA, 19 nt, Artificial Sequence
  Description of Artificial Sequence: Synthetic oligonucleotide
gcaucacgguuuugcguag

SEQ ID NO: 972163 - RNA, 19 nt, Artificial Sequence
  Description of Artificial Sequence: Synthetic oligonucleotide
cuccagugagcgugaccac

SEQ ID NO: 972164 - RNA, 19 nt, Artificial Sequence
  Description of Artificial Sequence: Synthetic oligonucleotide
guucguuuucucugccacu

SEQ ID NO: 972165 - RNA, 19 nt, Artificial Sequence
  Description of Artificial Sequence: Synthetic oligonucleotide
gcucgagugggucugcaaa

SEQ ID NO: 972166 - RNA, 19 nt, Artificial Sequence
  Description of Artificial Sequence: Synthetic oligonucleotide
cacgcuaccacgcggugcu

SEQ ID NO: 972167 - RNA, 19 nt, Artificial Sequence
  Description of Artificial Sequence: Synthetic oligonucleotide
ggguagacgccaaugccca

SEQ ID NO: 972168 - RNA, 19 nt, Artificial Sequence
  Description of Artificial Sequence: Synthetic oligonucleotide
gguagacgccaaugcccag

SEQ ID NO: 972169 - RNA, 19 nt, Artificial Sequence
  Description of Artificial Sequence: Synthetic oligonucleotide
ucaggccggccaguuacau

SEQ ID NO: 972170 - RNA, 19 nt, Artificial Sequence
  Description of Artificial Sequence: Synthetic oligonucleotide
gcggugagugccucagggc

SEQ ID NO: 972171 - RNA, 19 nt, Artificial Sequence
  Description of Artificial Sequence: Synthetic oligonucleotide
acuugcccgaugguuggaa

SEQ ID NO: 972172 - RNA, 19 nt, Artificial Sequence
  Description of Artificial Sequence: Synthetic oligonucleotide
uggacgcaucugagccacc

SEQ ID NO: 972173 - RNA, 19 nt, Artificial Sequence
  Description of Artificial Sequence: Synthetic oligonucleotide
agugggcaacauagccauc

SEQ ID NO: 972174 - RNA, 19 nt, Artificial Sequence
  Description of Artificial Sequence: Synthetic oligonucleotide
ggcguggaagagguggggc

SEQ ID NO: 972175 - RNA, 19 nt, Artificial Sequence
  Description of Artificial Sequence: Synthetic oligonucleotide
cccgaugguuggaagugac

SEQ ID NO: 972176 - RNA, 19 nt, Artificial Sequence
  Description of Artificial Sequence: Synthetic oligonucleotide
cuggggacggcccucacau

SEQ ID NO: 972177 - RNA, 19 nt, Artificial Sequence
  Description of Artificial Sequence: Synthetic oligonucleotide
cccuugaguaucaauaaau

SEQ ID NO: 972178 - RNA, 19 nt, Artificial Sequence
  Description of Artificial Sequence: Synthetic oligonucleotide
cuugguuccccaccagcgu

SEQ ID NO: 972179 - RNA, 19 nt, Artificial Sequence
  Description of Artificial Sequence: Synthetic oligonucleotide
gguuuugcguagagccagc

SEQ ID NO: 972180 - RNA, 19 nt, Artificial Sequence
  Description of Artificial Sequence: Synthetic oligonucleotide
ucgauccgcuugguucccc

SEQ ID NO: 972181 - RNA, 19 nt, Artificial Sequence
  Description of Artificial Sequence: Synthetic oligonucleotide
aggcaccacuggccgaggu

SEQ ID NO: 972182 - RNA, 19 nt, Artificial Sequence
  Description of Artificial Sequence: Synthetic oligonucleotide
cugugucacuugcccgaug

SEQ ID NO: 972183 - RNA, 19 nt, Artificial Sequence
  Description of Artificial Sequence: Synthetic oligonucleotide
cggccaguuacauacacaa

SEQ ID NO: 972184 - RNA, 19 nt, Artificial Sequence
  Description of Artificial Sequence: Synthetic oligonucleotide
agacagcacucggcauagg

SEQ ID NO: 972185 - RNA, 19 nt, Artificial Sequence
  Description of Artificial Sequence: Synthetic oligonucleotide
cgguuuugcguagagccag

SEQ ID NO: 972186 - RNA, 19 nt, Artificial Sequence
  Description of Artificial Sequence: Synthetic oligonucleotide
cagugagcgugaccacauc

SEQ ID NO: 972187 - RNA, 19 nt, Artificial Sequence
  Description of Artificial Sequence: Synthetic oligonucleotide
gccggccaguuacauacac

SEQ ID NO: 972188 - RNA, 19 nt, Artificial Sequence
  Description of Artificial Sequence: Synthetic oligonucleotide
gaucugcucgcaggcugga

SEQ ID NO: 972189 - RNA, 19 nt, Artificial Sequence
  Description of Artificial Sequence: Synthetic oligonucleotide
augucaggccggccaguua

SEQ ID NO: 972190 - RNA, 19 nt, Artificial Sequence
  Description of Artificial Sequence: Synthetic oligonucleotide
ccacuggccgaggugggcg

SEQ ID NO: 972191 - RNA, 19 nt, Artificial Sequence
  Description of Artificial Sequence: Synthetic oligonucleotide
gcuggacgcaucugagcca

SEQ ID NO: 972192 - RNA, 19 nt, Artificial Sequence
  Description of Artificial Sequence: Synthetic oligonucleotide
cuuccaggaagaggcucga

SEQ ID NO: 972193 - RNA, 19 nt, Artificial Sequence
  Description of Artificial Sequence: Synthetic oligonucleotide
ugccccuagccaggguggu

SEQ ID NO: 972194 - RNA, 19 nt, Artificial Sequence
  Description of Artificial Sequence: Synthetic oligonucleotide
cgagugggucugcaaagug

SEQ ID NO: 972195 - RNA, 19 nt, Artificial Sequence
  Description of Artificial Sequence: Synthetic oligonucleotide
ccagcguuccaggaucuuc

SEQ ID NO: 972196 - RNA, 19 nt, Artificial Sequence
  Description of Artificial Sequence: Synthetic oligonucleotide
cauagccaucugacaggaa

SEQ ID NO: 972197 - RNA, 19 nt, Artificial Sequence
  Description of Artificial Sequence: Synthetic oligonucleotide
cuaccacgcggugcuucug

SEQ ID NO: 972198 - RNA, 19 nt, Artificial Sequence
  Description of Artificial Sequence: Synthetic oligonucleotide
cuuuccugacagcggcugu

SEQ ID NO: 972199 - RNA, 19 nt, Artificial Sequence
  Description of Artificial Sequence: Synthetic oligonucleotide
acuggccgaggugggcgug

SEQ ID NO: 972200 - RNA, 19 nt, Artificial Sequence
  Description of Artificial Sequence: Synthetic oligonucleotide
guagucgauccgcuugguu

SEQ ID NO: 972201 - RNA, 19 nt, Artificial Sequence
  Description of Artificial Sequence: Synthetic oligonucleotide
gggacggcccucacauacc

SEQ ID NO: 972202 - RNA, 19 nt, Artificial Sequence
  Description of Artificial Sequence: Synthetic oligonucleotide
caucacgguuuugcguaga

SEQ ID NO: 972203 - RNA, 19 nt, Artificial Sequence
  Description of Artificial Sequence: Synthetic oligonucleotide
ccuaggggaaacuucugau

SEQ ID NO: 972204 - RNA, 19 nt, Artificial Sequence
  Description of Artificial Sequence: Synthetic oligonucleotide
agcgcgcaccuugggguca

SEQ ID NO: 972205 - RNA, 19 nt, Artificial Sequence
  Description of Artificial Sequence: Synthetic oligonucleotide
gggaaacuucugauaacgu

SEQ ID NO: 972206 - RNA, 19 nt, Artificial Sequence
  Description of Artificial Sequence: Synthetic oligonucleotide
gugccaaaguggauccacu

SEQ ID NO: 972207 - RNA, 19 nt, Artificial Sequence
  Description of Artificial Sequence: Synthetic oligonucleotide
gagcgugaccacauccaau

SEQ ID NO: 972208 - RNA, 19 nt, Artificial Sequence
  Description of Artificial Sequence: Synthetic oligonucleotide
cauagcuuucugccuuaau

SEQ ID NO: 972209 - RNA, 19 nt, Artificial Sequence
  Description of Artificial Sequence: Synthetic oligonucleotide
uggggacggcccucacaua

SEQ ID NO: 972210 - RNA, 19 nt, Artificial Sequence
  Description of Artificial Sequence: Synthetic oligonucleotide
caaugcgggcaucacgguu

SEQ ID NO: 972211 - RNA, 19 nt, Artificial Sequence
  Description of Artificial Sequence: Synthetic oligonucleotide
cugaguccugccagugccu

SEQ ID NO: 972212 - RNA, 19 nt, Artificial Sequence
  Description of Artificial Sequence: Synthetic oligonucleotide
ugggcguggagggcaccau

SEQ ID NO: 972213 - RNA, 19 nt, Artificial Sequence
  Description of Artificial Sequence: Synthetic oligonucleotide
ggucagcggcauggaagag

SEQ ID NO: 972214 - RNA, 19 nt, Artificial Sequence
  Description of Artificial Sequence: Synthetic oligonucleotide
gcuuacggaggaaguccac

SEQ ID NO: 972215 - RNA, 19 nt, Artificial Sequence
  Description of Artificial Sequence: Synthetic oligonucleotide
ccgugggaaaggcggugag

SEQ ID NO: 972216 - RNA, 19 nt, Artificial Sequence
  Description of Artificial Sequence: Synthetic oligonucleotide
ccacgcuaccacgcggugc

SEQ ID NO: 972217 - RNA, 19 nt, Artificial Sequence
  Description of Artificial Sequence: Synthetic oligonucleotide
cacuuuccugacagcggcu

SEQ ID NO: 972218 - RNA, 19 nt, Artificial Sequence
  Description of Artificial Sequence: Synthetic oligonucleotide
ccacgauguucaguucuac

SEQ ID NO: 972219 - RNA, 19 nt, Artificial Sequence
  Description of Artificial Sequence: Synthetic oligonucleotide
cguggagggcaccaucauc

SEQ ID NO: 972220 - RNA, 19 nt, Artificial Sequence
  Description of Artificial Sequence: Synthetic oligonucleotide
cagcacggcccacaaugua

SEQ ID NO: 972221 - RNA, 19 nt, Artificial Sequence
  Description of Artificial Sequence: Synthetic oligonucleotide
ugagugccucagggcagua

SEQ ID NO: 972222 - RNA, 19 nt, Artificial Sequence
  Description of Artificial Sequence: Synthetic oligonucleotide
gcgcacaggguagacgcca

SEQ ID NO: 972223 - RNA, 19 nt, Artificial Sequence
  Description of Artificial Sequence: Synthetic oligonucleotide
gugagugccucagggcagu

SEQ ID NO: 972224 - RNA, 19 nt, Artificial Sequence
  Description of Artificial Sequence: Synthetic oligonucleotide
ccggccaguuacauacaca

SEQ ID NO: 972225 - RNA, 19 nt, Artificial Sequence
  Description of Artificial Sequence: Synthetic oligonucleotide
gcuaccacgcggugcuucu

SEQ ID NO: 972226 - RNA, 19 nt, Artificial Sequence
  Description of Artificial Sequence: Synthetic oligonucleotide
gccacgcuaccacgcggug

SEQ ID NO: 972227 - RNA, 19 nt, Artificial Sequence
  Description of Artificial Sequence: Synthetic oligonucleotide
gggcguggagggcaccauc

SEQ ID NO: 972228 - RNA, 19 nt, Artificial Sequence
  Description of Artificial Sequence: Synthetic oligonucleotide
cagcauuaguggggccauc

SEQ ID NO: 972229 - RNA, 19 nt, Artificial Sequence
  Description of Artificial Sequence: Synthetic oligonucleotide
caccucgcugguggugcug

SEQ ID NO: 972230 - RNA, 19 nt, Artificial Sequence
  Description of Artificial Sequence: Synthetic oligonucleotide
caggccggccaguuacaua

SEQ ID NO: 972231 - RNA, 19 nt, Artificial Sequence
  Description of Artificial Sequence: Synthetic oligonucleotide
caccagcguuccaggaucu

SEQ ID NO: 972232 - RNA, 19 nt, Artificial Sequence
  Description of Artificial Sequence: Synthetic oligonucleotide
gugaggcggccugagcugu

SEQ ID NO: 972233 - RNA, 19 nt, Artificial Sequence
  Description of Artificial Sequence: Synthetic oligonucleotide
ggacgcaucugagccaccu

SEQ ID NO: 972234 - RNA, 19 nt, Artificial Sequence
  Description of Artificial Sequence: Synthetic oligonucleotide
guguugugacagccacgcu

SEQ ID NO: 972235 - RNA, 19 nt, Artificial Sequence
  Description of Artificial Sequence: Synthetic oligonucleotide
caucuccuaggggaaacuu

SEQ ID NO: 972236 - RNA, 19 nt, Artificial Sequence
  Description of Artificial Sequence: Synthetic oligonucleotide
cacauaccacugugucacu

SEQ ID NO: 972237 - RNA, 19 nt, Artificial Sequence
  Description of Artificial Sequence: Synthetic oligonucleotide
accagcguuccaggaucuu

SEQ ID NO: 972238 - RNA, 19 nt, Artificial Sequence
  Description of Artificial Sequence: Synthetic oligonucleotide
acuucgggucuugccccua

SEQ ID NO: 972239 - RNA, 19 nt, Artificial Sequence
  Description of Artificial Sequence: Synthetic oligonucleotide
gcgccagcgcgcaccuugg

SEQ ID NO: 972240 - RNA, 19 nt, Artificial Sequence
  Description of Artificial Sequence: Synthetic oligonucleotide
cggcuucugugccucgggc

SEQ ID NO: 972241 - RNA, 19 nt, Artificial Sequence
  Description of Artificial Sequence: Synthetic oligonucleotide
cacggcccacaauguaggu

SEQ ID NO: 972242 - RNA, 19 nt, Artificial Sequence
  Description of Artificial Sequence: Synthetic oligonucleotide
cgugaccacauccaauggu

SEQ ID NO: 972243 - RNA, 19 nt, Artificial Sequence
  Description of Artificial Sequence: Synthetic oligonucleotide
ccacaauguaggucuggcu

SEQ ID NO: 972244 - RNA, 19 nt, Artificial Sequence
  Description of Artificial Sequence: Synthetic oligonucleotide
ggcccucacauaccacugu

SEQ ID NO: 972245 - RNA, 19 nt, Artificial Sequence
  Description of Artificial Sequence: Synthetic oligonucleotide
cacucggcauagguguggu

SEQ ID NO: 972246 - RNA, 19 nt, Artificial Sequence
  Description of Artificial Sequence: Synthetic oligonucleotide
gggcaaccacagucagaca

SEQ ID NO: 972247 - RNA, 19 nt, Artificial Sequence
  Description of Artificial Sequence: Synthetic oligonucleotide
cacuugcccgaugguugga

SEQ ID NO: 972248 - RNA, 19 nt, Artificial Sequence
  Description of Artificial Sequence: Synthetic oligonucleotide
ccagugagcgugaccacau

SEQ ID NO: 972249 - RNA, 19 nt, Artificial Sequence
  Description of Artificial Sequence: Synthetic oligonucleotide
gcccgaugguuggaaguga

SEQ ID NO: 972250 - RNA, 19 nt, Artificial Sequence
  Description of Artificial Sequence: Synthetic oligonucleotide
cacuggccgaggugggcgu

SEQ ID NO: 972251 - RNA, 19 nt, Artificial Sequence
  Description of Artificial Sequence: Synthetic oligonucleotide
gcggcauggaagagguugu

SEQ ID NO: 972252 - RNA, 19 nt, Artificial Sequence
  Description of Artificial Sequence: Synthetic oligonucleotide
ccgcuugguuccccaccag

SEQ ID NO: 972253 - RNA, 19 nt, Artificial Sequence
  Description of Artificial Sequence: Synthetic oligonucleotide
ggcggccugagcuguuggu

SEQ ID NO: 972254 - RNA, 19 nt, Artificial Sequence
  Description of Artificial Sequence: Synthetic oligonucleotide
gguaugggagugggagccu

SEQ ID NO: 972255 - RNA, 19 nt, Artificial Sequence
  Description of Artificial Sequence: Synthetic oligonucleotide
ggaagagguggggcagugu

SEQ ID NO: 972256 - RNA, 19 nt, Artificial Sequence
  Description of Artificial Sequence: Synthetic oligonucleotide
cagccauagccugcucacu

SEQ ID NO: 972257 - RNA, 19 nt, Artificial Sequence
  Description of Artificial Sequence: Synthetic oligonucleotide
cggcauagguguggucacc

SEQ ID NO: 972258 - RNA, 19 nt, Artificial Sequence
  Description of Artificial Sequence: Synthetic oligonucleotide
cgauccgcuugguucccca

SEQ ID NO: 972259 - RNA, 19 nt, Artificial Sequence
  Description of Artificial Sequence: Synthetic oligonucleotide
ggccaguuacauacacaau

SEQ ID NO: 972260 - RNA, 19 nt, Artificial Sequence
  Description of Artificial Sequence: Synthetic oligonucleotide
ggccggccaguuacauaca

SEQ ID NO: 972261 - RNA, 19 nt, Artificial Sequence
  Description of Artificial Sequence: Synthetic oligonucleotide
cgccagcgcgcaccuuggg

SEQ ID NO: 972262 - RNA, 19 nt, Artificial Sequence
  Description of Artificial Sequence: Synthetic oligonucleotide
ggcugauacuucgggucuu

SEQ ID NO: 972263 - RNA, 19 nt, Artificial Sequence
  Description of Artificial Sequence: Synthetic oligonucleotide
acgcuaccacgcggugcuu

SEQ ID NO: 972264 - RNA, 19 nt, Artificial Sequence
  Description of Artificial Sequence: Synthetic oligonucleotide
gcgcgcaccuuggggucac

SEQ ID NO: 972265 - RNA, 19 nt, Artificial Sequence
  Description of Artificial Sequence: Synthetic oligonucleotide
gacgaaagaaacuugagag

SEQ ID NO: 972266 - RNA, 19 nt, Artificial Sequence
  Description of Artificial Sequence: Synthetic oligonucleotide
aacgcagacacacauuacc

SEQ ID NO: 972267 - RNA, 19 nt, Artificial Sequence
  Description of Artificial Sequence: Synthetic oligonucleotide
aagagaaccaaucucuuag

SEQ ID NO: 972268 - RNA, 19 nt, Artificial Sequence
  Description of Artificial Sequence: Synthetic oligonucleotide
aaugcguaaaauaaauuac

SEQ ID NO: 972269 - RNA, 19 nt, Artificial Sequence
  Description of Artificial Sequence: Synthetic oligonucleotide
uguaucaucguucaagagc

SEQ ID NO: 972270 - RNA, 19 nt, Artificial Sequence
  Description of Artificial Sequence: Synthetic oligonucleotide
  modified_base (3)..(3): a, c, u, g, unknown or other
uanaugacaacugucacag

SEQ ID NO: 972271 - RNA, 19 nt, Artificial Sequence
  Description of Artificial Sequence: Synthetic oligonucleotide
ucgguaaacaguaaaugcg

SEQ ID NO: 972272 - RNA, 19 nt, Artificial Sequence
  Description of Artificial Sequence: Synthetic oligonucleotide
aaaugcguaaaauaaauua

SEQ ID NO: 972273 - RNA, 19 nt, Artificial Sequence
  Description of Artificial Sequence: Synthetic oligonucleotide
ucaucagauaacuacaccc

SEQ ID NO: 972274 - RNA, 19 nt, Artificial Sequence
  Description of Artificial Sequence: Synthetic oligonucleotide
aaucucuuaguaugaacgg

SEQ ID NO: 972275 - RNA, 19 nt, Artificial Sequence
  Description of Artificial Sequence: Synthetic oligonucleotide
acacacaccacacacacac

SEQ ID NO: 972276 - RNA, 19 nt, Artificial Sequence
  Description of Artificial Sequence: Synthetic oligonucleotide
uguucgacaaggauuuugg

SEQ ID NO: 972277 - RNA, 19 nt, Artificial Sequence
  Description of Artificial Sequence: Synthetic oligonucleotide
ucucuuaguaugaacgggg

SEQ ID NO: 972278 - RNA, 19 nt, Artificial Sequence
  Description of Artificial Sequence: Synthetic oligonucleotide
uaacgugugagcagaaugg

SEQ ID NO: 972279 - RNA, 19 nt, Artificial Sequence
  Description of Artificial Sequence: Synthetic oligonucleotide
ucuaugaguguauugaacu

SEQ ID NO: 972280 - RNA, 19 nt, Artificial Sequence
  Description of Artificial Sequence: Synthetic oligonucleotide
gaaccaaucucuuaguaug

SEQ ID NO: 972281 - RNA, 19 nt, Artificial Sequence
  Description of Artificial Sequence: Synthetic oligonucleotide
uuaacgugugagcagaaug

SEQ ID NO: 972282 - RNA, 19 nt, Artificial Sequence
  Description of Artificial Sequence: Synthetic oligonucleotide
uucgguaaacaguaaaugc

SEQ ID NO: 972283 - RNA, 19 nt, Artificial Sequence
  Description of Artificial Sequence: Synthetic oligonucleotide
guauugaacucuuugagac

SEQ ID NO: 972284 - RNA, 19 nt, Artificial Sequence
  Description of Artificial Sequence: Synthetic oligonucleotide
uuauuagggcaucucacag

SEQ ID NO: 972285 - RNA, 19 nt, Artificial Sequence
  Description of Artificial Sequence: Synthetic oligonucleotide
uuuuguucgacaaggauuu

SEQ ID NO: 972286 - RNA, 19 nt, Artificial Sequence
  Description of Artificial Sequence: Synthetic oligonucleotide
accacacacacacacacac

SEQ ID NO: 972287 - RNA, 19 nt, Artificial Sequence
  Description of Artificial Sequence: Synthetic oligonucleotide
agugguuagagccacucuc

SEQ ID NO: 972288 - RNA, 19 nt, Artificial Sequence
  Description of Artificial Sequence: Synthetic oligonucleotide
agaacauugggacugauuu

SEQ ID NO: 972289 - RNA, 19 nt, Artificial Sequence
  Description of Artificial Sequence: Synthetic oligonucleotide
uguguguuuacauuuggac

SEQ ID NO: 972290 - RNA, 19 nt, Artificial Sequence
  Description of Artificial Sequence: Synthetic oligonucleotide
uauguaucaucguucaaga

SEQ ID NO: 972291 - RNA, 19 nt, Artificial Sequence
  Description of Artificial Sequence: Synthetic oligonucleotide
acacacacaccacacacac

SEQ ID NO: 972292 - RNA, 19 nt, Artificial Sequence
  Description of Artificial Sequence: Synthetic oligonucleotide
caucagauaacuacacccg

SEQ ID NO: 972293 - RNA, 19 nt, Artificial Sequence
  Description of Artificial Sequence: Synthetic oligonucleotide
acacacacacaccacacac

SEQ ID NO: 972294 - RNA, 19 nt, Artificial Sequence
  Description of Artificial Sequence: Synthetic oligonucleotide
augcguaaaauaaauuacc

SEQ ID NO: 972295 - RNA, 19 nt, Artificial Sequence
  Description of Artificial Sequence: Synthetic oligonucleotide
ugggacugauuuauuaggg

SEQ ID NO: 972296 - RNA, 19 nt, Artificial Sequence
  Description of Artificial Sequence: Synthetic oligonucleotide
acgaaagaaacuugagagg

SEQ ID NO: 972297 - RNA, 19 nt, Artificial Sequence
  Description of Artificial Sequence: Synthetic oligonucleotide
acaccacacacacacacac

SEQ ID NO: 972298 - RNA, 19 nt, Artificial Sequence
  Description of Artificial Sequence: Synthetic oligonucleotide
uccaacaucacuguguaga

SEQ ID NO: 972299 - RNA, 19 nt, Artificial Sequence
  Description of Artificial Sequence: Synthetic oligonucleotide
gauaacuacacccgggcac

SEQ ID NO: 972300 - RNA, 19 nt, Artificial Sequence
  Description of Artificial Sequence: Synthetic oligonucleotide
gacacacacacucacacac

SEQ ID NO: 972301 - RNA, 19 nt, Artificial Sequence
  Description of Artificial Sequence: Synthetic oligonucleotide
aguguauugaacucuuuga

SEQ ID NO: 972302 - RNA, 19 nt, Artificial Sequence
  Description of Artificial Sequence: Synthetic oligonucleotide
cuauguaucaucguucaag

SEQ ID NO: 972303 - RNA, 19 nt, Artificial Sequence
  Description of Artificial Sequence: Synthetic oligonucleotide
acacaccacacacacacac

SEQ ID NO: 972304 - RNA, 19 nt, Artificial Sequence
  Description of Artificial Sequence: Synthetic oligonucleotide
auuuauuagggcaucucac

SEQ ID NO: 972305 - RNA, 19 nt, Artificial Sequence
  Description of Artificial Sequence: Synthetic oligonucleotide
ucugaaucccuguucagga

SEQ ID NO: 972306 - RNA, 19 nt, Artificial Sequence
  Description of Artificial Sequence: Synthetic oligonucleotide
aucagauaacuacacccgg

SEQ ID NO: 972307 - RNA, 19 nt, Artificial Sequence
  Description of Artificial Sequence: Synthetic oligonucleotide
ucaucguucaagagcagga

SEQ ID NO: 972308 - RNA, 19 nt, Artificial Sequence
  Description of Artificial Sequence: Synthetic oligonucleotide
cacaauaacugacggacgc

SEQ ID NO: 972309 - RNA, 19 nt, Artificial Sequence
  Description of Artificial Sequence: Synthetic oligonucleotide
ucacaauaacugacggacg

SEQ ID NO: 972310 - RNA, 19 nt, Artificial Sequence
  Description of Artificial Sequence: Synthetic oligonucleotide
cuuaguaugaacggggcug

SEQ ID NO: 972311 - RNA, 19 nt, Artificial Sequence
  Description of Artificial Sequence: Synthetic oligonucleotide
caaacaugggguuaacgug

SEQ ID NO: 972312 - RNA, 19 nt, Artificial Sequence
  Description of Artificial Sequence: Synthetic oligonucleotide
uucgucaacaggaggcccg

SEQ ID NO: 972313 - RNA, 19 nt, Artificial Sequence
  Description of Artificial Sequence: Synthetic oligonucleotide
ugugaagcggcgaugucug

SEQ ID NO: 972314 - RNA, 19 nt, Artificial Sequence
  Description of Artificial Sequence: Synthetic oligonucleotide
acucuuauugcuuaagaua

SEQ ID NO: 972315 - RNA, 19 nt, Artificial Sequence
  Description of Artificial Sequence: Synthetic oligonucleotide
accaucaucgugguggccc

SEQ ID NO: 972316 - RNA, 19 nt, Artificial Sequence
  Description of Artificial Sequence: Synthetic oligonucleotide
cacacacucacacacacac

SEQ ID NO: 972317 - RNA, 19 nt, Artificial Sequence
  Description of Artificial Sequence: Synthetic oligonucleotide
aacauugggacugauuuau

SEQ ID NO: 972318 - RNA, 19 nt, Artificial Sequence
  Description of Artificial Sequence: Synthetic oligonucleotide
uguucgguaaacaguaaau

SEQ ID NO: 972319 - RNA, 19 nt, Artificial Sequence
  Description of Artificial Sequence: Synthetic oligonucleotide
cugacuguagcaccaagcc

SEQ ID NO: 972320 - RNA, 19 nt, Artificial Sequence
  Description of Artificial Sequence: Synthetic oligonucleotide
cuucacaggaacacggggc

SEQ ID NO: 972321 - RNA, 19 nt, Artificial Sequence
  Description of Artificial Sequence: Synthetic oligonucleotide
agacgaaagaaacuugaga

SEQ ID NO: 972322 - RNA, 19 nt, Artificial Sequence
  Description of Artificial Sequence: Synthetic oligonucleotide
aauggucauucaaaguauc

SEQ ID NO: 972323 - RNA, 19 nt, Artificial Sequence
  Description of Artificial Sequence: Synthetic oligonucleotide
auaacugacggacgcugac

SEQ ID NO: 972324 - RNA, 19 nt, Artificial Sequence
  Description of Artificial Sequence: Synthetic oligonucleotide
aaacuugagagggucccac

SEQ ID NO: 972325 - RNA, 19 nt, Artificial Sequence
  Description of Artificial Sequence: Synthetic oligonucleotide
ucacuuaaugcuucucuug

SEQ ID NO: 972326 - RNA, 19 nt, Artificial Sequence
  Description of Artificial Sequence: Synthetic oligonucleotide
augggguuaacgugugagc

SEQ ID NO: 972327 - RNA, 19 nt, Artificial Sequence
  Description of Artificial Sequence: Synthetic oligonucleotide
cucacacacacacacacac

SEQ ID NO: 972328 - RNA, 19 nt, Artificial Sequence
  Description of Artificial Sequence: Synthetic oligonucleotide
aaagugguugugccacuuc

SEQ ID NO: 972329 - RNA, 19 nt, Artificial Sequence
  Description of Artificial Sequence: Synthetic oligonucleotide
auuaccuugagagggccac

SEQ ID NO: 972330 - RNA, 19 nt, Artificial Sequence
  Description of Artificial Sequence: Synthetic oligonucleotide
cacacucacacacacacac

SEQ ID NO: 972331 - RNA, 19 nt, Artificial Sequence
  Description of Artificial Sequence: Synthetic oligonucleotide
uuaguaugaacggggcugg

SEQ ID NO: 972332 - RNA, 19 nt, Artificial Sequence
  Description of Artificial Sequence: Synthetic oligonucleotide
acuacacccgggcacaguc

SEQ ID NO: 972333 - RNA, 19 nt, Artificial Sequence
  Description of Artificial Sequence: Synthetic oligonucleotide
  modified_base (4)..(4): a, c, u, g, unknown or other
guanaugacaacugucaca

SEQ ID NO: 972334 - RNA, 19 nt, Artificial Sequence
  Description of Artificial Sequence: Synthetic oligonucleotide
ugacgugccucacacagga

SEQ ID NO: 972335 - RNA, 19 nt, Artificial Sequence
  Description of Artificial Sequence: Synthetic oligonucleotide
uugagagggccacaugugc

SEQ ID NO: 972336 - RNA, 19 nt, Artificial Sequence
  Description of Artificial Sequence: Synthetic oligonucleotide
cacacacacacacacacac

SEQ ID NO: 972337 - RNA, 19 nt, Artificial Sequence
  Description of Artificial Sequence: Synthetic oligonucleotide
uaugaacggggcugggugg

SEQ ID NO: 972338 - RNA, 19 nt, Artificial Sequence
  Description of Artificial Sequence: Synthetic oligonucleotide
aacugacggacgcugacgu

SEQ ID NO: 972339 - RNA, 19 nt, Artificial Sequence
  Description of Artificial Sequence: Synthetic oligonucleotide
uggacuccauuccaggggc

SEQ ID NO: 972340 - RNA, 19 nt, Artificial Sequence
  Description of Artificial Sequence: Synthetic oligonucleotide
aacggcaguacccagucua

SEQ ID NO: 972341 - RNA, 19 nt, Artificial Sequence
  Description of Artificial Sequence: Synthetic oligonucleotide
cauccaaacgcagacacac

SEQ ID NO: 972342 - RNA, 19 nt, Artificial Sequence
  Description of Artificial Sequence: Synthetic oligonucleotide
uuugguuuguggcauccaa

SEQ ID NO: 972343 - RNA, 19 nt, Artificial Sequence
  Description of Artificial Sequence: Synthetic oligonucleotide
ugacuguagcaccaagccc

SEQ ID NO: 972344 - RNA, 19 nt, Artificial Sequence
  Description of Artificial Sequence: Synthetic oligonucleotide
cacauuaccucccagccuc

SEQ ID NO: 972345 - RNA, 19 nt, Artificial Sequence
  Description of Artificial Sequence: Synthetic oligonucleotide
uccaaacgcagacacacau

SEQ ID NO: 972346 - RNA, 19 nt, Artificial Sequence
  Description of Artificial Sequence: Synthetic oligonucleotide
acacacacacacaccaucc

SEQ ID NO: 972347 - RNA, 19 nt, Artificial Sequence
  Description of Artificial Sequence: Synthetic oligonucleotide
agucuauguaucaucguuc

SEQ ID NO: 972348 - RNA, 19 nt, Artificial Sequence
  Description of Artificial Sequence: Synthetic oligonucleotide
gagaugugggaagagcggg

SEQ ID NO: 972349 - RNA, 19 nt, Artificial Sequence
  Description of Artificial Sequence: Synthetic oligonucleotide
aucucuuaguaugaacggg

SEQ ID NO: 972350 - RNA, 19 nt, Artificial Sequence
  Description of Artificial Sequence: Synthetic oligonucleotide
ucuuaguaugaacggggcu

SEQ ID NO: 972351 - RNA, 19 nt, Artificial Sequence
  Description of Artificial Sequence: Synthetic oligonucleotide
cacaggaauguguuagcgg

SEQ ID NO: 972352 - RNA, 19 nt, Artificial Sequence
  Description of Artificial Sequence: Synthetic oligonucleotide
cacuagaacggcaguaccc

SEQ ID NO: 972353 - RNA, 19 nt, Artificial Sequence
  Description of Artificial Sequence: Synthetic oligonucleotide
aucuaugaguguauugaac

SEQ ID NO: 972354 - RNA, 19 nt, Artificial Sequence
  Description of Artificial Sequence: Synthetic oligonucleotide
uuguucgguaaacaguaaa

SEQ ID NO: 972355 - RNA, 19 nt, Artificial Sequence
  Description of Artificial Sequence: Synthetic oligonucleotide
guaugaacggggcugggug

SEQ ID NO: 972356 - RNA, 19 nt, Artificial Sequence
  Description of Artificial Sequence: Synthetic oligonucleotide
uucgacaaggauuuugguu

SEQ ID NO: 972357 - RNA, 19 nt, Artificial Sequence
  Description of Artificial Sequence: Synthetic oligonucleotide
ucuuauugcuuaagauaca

SEQ ID NO: 972358 - RNA, 19 nt, Artificial Sequence
  Description of Artificial Sequence: Synthetic oligonucleotide
cacucacacacacacacac

SEQ ID NO: 972359 - RNA, 19 nt, Artificial Sequence
  Description of Artificial Sequence: Synthetic oligonucleotide
cuaacucccauuuccugug

SEQ ID NO: 972360 - RNA, 19 nt, Artificial Sequence
  Description of Artificial Sequence: Synthetic oligonucleotide
guucgguaaacaguaaaug

SEQ ID NO: 972361 - RNA, 19 nt, Artificial Sequence
  Description of Artificial Sequence: Synthetic oligonucleotide
cuaugaguguauugaacuc

SEQ ID NO: 972362 - RNA, 19 nt, Artificial Sequence
  Description of Artificial Sequence: Synthetic oligonucleotide
cucuuaguaugaacggggc

SEQ ID NO: 972363 - RNA, 19 nt, Artificial Sequence
  Description of Artificial Sequence: Synthetic oligonucleotide
auuuguucgguaaacagua

SEQ ID NO: 972364 - RNA, 19 nt, Artificial Sequence
  Description of Artificial Sequence: Synthetic oligonucleotide
cagucagacauuuguucgg

SEQ ID NO: 972365 - RNA, 19 nt, Artificial Sequence
  Description of Artificial Sequence: Synthetic oligonucleotide
aucaucguucaagagcagg

SEQ ID NO: 972366 - RNA, 19 nt, Artificial Sequence
  Description of Artificial Sequence: Synthetic oligonucleotide
aguuuggcggguccuguuc

SEQ ID NO: 972367 - RNA, 19 nt, Artificial Sequence
  Description of Artificial Sequence: Synthetic oligonucleotide
ugggguuaacgugugagca

SEQ ID NO: 972368 - RNA, 19 nt, Artificial Sequence
  Description of Artificial Sequence: Synthetic oligonucleotide
ggguccuguucauugaugg

SEQ ID NO: 972369 - RNA, 19 nt, Artificial Sequence
  Description of Artificial Sequence: Synthetic oligonucleotide
uuguucgacaaggauuuug

SEQ ID NO: 972370 - RNA, 19 nt, Artificial Sequence
  Description of Artificial Sequence: Synthetic oligonucleotide
caugggguuaacgugugag

SEQ ID NO: 972371 - RNA, 19 nt, Artificial Sequence
  Description of Artificial Sequence: Synthetic oligonucleotide
uaacugacggacgcugacg

SEQ ID NO: 972372 - RNA, 19 nt, Artificial Sequence
  Description of Artificial Sequence: Synthetic oligonucleotide
gucuauguaucaucguuca

SEQ ID NO: 972373 - RNA, 19 nt, Artificial Sequence
  Description of Artificial Sequence: Synthetic oligonucleotide
cucacacacucacacacac

SEQ ID NO: 972374 - RNA, 19 nt, Artificial Sequence
  Description of Artificial Sequence: Synthetic oligonucleotide
ucacacacacacacacacc

SEQ ID NO: 972375 - RNA, 19 nt, Artificial Sequence
  Description of Artificial Sequence: Synthetic oligonucleotide
uggcugucugucaagcucu

SEQ ID NO: 972376 - RNA, 19 nt, Artificial Sequence
  Description of Artificial Sequence: Synthetic oligonucleotide
aaacgcagacacacauuac

SEQ ID NO: 972377 - RNA, 19 nt, Artificial Sequence
  Description of Artificial Sequence: Synthetic oligonucleotide
  modified_base (18)..(18): a, c, u, g, unknown or other
ucaacaggaggcccguana

SEQ ID NO: 972378 - RNA, 19 nt, Artificial Sequence
  Description of Artificial Sequence: Synthetic oligonucleotide
cacacacacacacacacca

SEQ ID NO: 972379 - RNA, 19 nt, Artificial Sequence
  Description of Artificial Sequence: Synthetic oligonucleotide
aauaaaagccaaagugguu

SEQ ID NO: 972380 - RNA, 19 nt, Artificial Sequence
  Description of Artificial Sequence: Synthetic oligonucleotide
gugguuagagccacucucg

SEQ ID NO: 972381 - RNA, 19 nt, Artificial Sequence
  Description of Artificial Sequence: Synthetic oligonucleotide
gaagagcgggacaggaggg

SEQ ID NO: 972382 - RNA, 19 nt, Artificial Sequence
  Description of Artificial Sequence: Synthetic oligonucleotide
ucuucgucaacaggaggcc

SEQ ID NO: 972383 - RNA, 19 nt, Artificial Sequence
  Description of Artificial Sequence: Synthetic oligonucleotide
acuagaacggcaguaccca

SEQ ID NO: 972384 - RNA, 19 nt, Artificial Sequence
  Description of Artificial Sequence: Synthetic oligonucleotide
gucagcgggcacuucagag

SEQ ID NO: 972385 - RNA, 19 nt, Artificial Sequence
  Description of Artificial Sequence: Synthetic oligonucleotide
acagugguuagagccacuc

SEQ ID NO: 972386 - RNA, 19 nt, Artificial Sequence
  Description of Artificial Sequence: Synthetic oligonucleotide
  modified_base (10)..(10): a, c, u, g, unknown or other
aggcccguanaugacaacu

SEQ ID NO: 972387 - RNA, 19 nt, Artificial Sequence
  Description of Artificial Sequence: Synthetic oligonucleotide
uguuagcggcugcaaagcu

SEQ ID NO: 972388 - RNA, 19 nt, Artificial Sequence
  Description of Artificial Sequence: Synthetic oligonucleotide
agauaacuacacccgggca

SEQ ID NO: 972389 - RNA, 19 nt, Artificial Sequence
  Description of Artificial Sequence: Synthetic oligonucleotide
guggcauccaaacgcagac

SEQ ID NO: 972390 - RNA, 19 nt, Artificial Sequence
  Description of Artificial Sequence: Synthetic oligonucleotide
acacacacacacaccacac

SEQ ID NO: 972391 - RNA, 19 nt, Artificial Sequence
  Description of Artificial Sequence: Synthetic oligonucleotide
cugcacucaggccagcacc

SEQ ID NO: 972392 - RNA, 19 nt, Artificial Sequence
  Description of Artificial Sequence: Synthetic oligonucleotide
aauaacugacggacgcuga

SEQ ID NO: 972393 - RNA, 19 nt, Artificial Sequence
  Description of Artificial Sequence: Synthetic oligonucleotide
aacgugugagcagaauggu

SEQ ID NO: 972394 - RNA, 19 nt, Artificial Sequence
  Description of Artificial Sequence: Synthetic oligonucleotide
cugacggacgcugacgugc

SEQ ID NO: 972395 - RNA, 19 nt, Artificial Sequence
  Description of Artificial Sequence: Synthetic oligonucleotide
auaacuacacccgggcaca

SEQ ID NO: 972396 - RNA, 19 nt, Artificial Sequence
  Description of Artificial Sequence: Synthetic oligonucleotide
caauaacugacggacgcug

SEQ ID NO: 972397 - RNA, 19 nt, Artificial Sequence
  Description of Artificial Sequence: Synthetic oligonucleotide
caaacgcagacacacauua

SEQ ID NO: 972398 - RNA, 19 nt, Artificial Sequence
  Description of Artificial Sequence: Synthetic oligonucleotide
ugccagacgaaagaaacuu

SEQ ID NO: 972399 - RNA, 19 nt, Artificial Sequence
  Description of Artificial Sequence: Synthetic oligonucleotide
cacacacacacacaccauc

SEQ ID NO: 972400 - RNA, 19 nt, Artificial Sequence
  Description of Artificial Sequence: Synthetic oligonucleotide
guaaaugcguaaaauaaau

SEQ ID NO: 972401 - RNA, 19 nt, Artificial Sequence
  Description of Artificial Sequence: Synthetic oligonucleotide
uuuguucgguaaacaguaa

SEQ ID NO: 972402 - RNA, 19 nt, Artificial Sequence
  Description of Artificial Sequence: Synthetic oligonucleotide
ucucuugugggugucuccu

SEQ ID NO: 972403 - RNA, 19 nt, Artificial Sequence
  Description of Artificial Sequence: Synthetic oligonucleotide
cacacacacucacacacuc

SEQ ID NO: 972404 - RNA, 19 nt, Artificial Sequence
  Description of Artificial Sequence: Synthetic oligonucleotide
  modified_base (2)..(2): a, c, u, g, unknown or other
anaugacaacugucacaga

SEQ ID NO: 972405 - RNA, 19 nt, Artificial Sequence
  Description of Artificial Sequence: Synthetic oligonucleotide
acacacacacacacacacc

SEQ ID NO: 972406 - RNA, 19 nt, Artificial Sequence
  Description of Artificial Sequence: Synthetic oligonucleotide
ggcauccaaacgcagacac

SEQ ID NO: 972407 - RNA, 19 nt, Artificial Sequence
  Description of Artificial Sequence: Synthetic oligonucleotide
uucugagcgucaguguggc

SEQ ID NO: 972408 - RNA, 19 nt, Artificial Sequence
  Description of Artificial Sequence: Synthetic oligonucleotide
gaacacggggcuuggggac

SEQ ID NO: 972409 - RNA, 19 nt, Artificial Sequence
  Description of Artificial Sequence: Synthetic oligonucleotide
ugguuagagccacucucgu

SEQ ID NO: 972410 - RNA, 19 nt, Artificial Sequence
  Description of Artificial Sequence: Synthetic oligonucleotide
ucacacacucacacacaca

SEQ ID NO: 972411 - RNA, 19 nt, Artificial Sequence
  Description of Artificial Sequence: Synthetic oligonucleotide
gacucuuauugcuuaagau

SEQ ID NO: 972412 - RNA, 19 nt, Artificial Sequence
  Description of Artificial Sequence: Synthetic oligonucleotide
uucucacuagaacggcagu

SEQ ID NO: 972413 - RNA, 19 nt, Artificial Sequence
  Description of Artificial Sequence: Synthetic oligonucleotide
cuugugggugucuccuacc

SEQ ID NO: 972414 - RNA, 19 nt, Artificial Sequence
  Description of Artificial Sequence: Synthetic oligonucleotide
ugagcgucaguguggccug

SEQ ID NO: 972415 - RNA, 19 nt, Artificial Sequence
  Description of Artificial Sequence: Synthetic oligonucleotide
uguagacuucacuuuuguu

SEQ ID NO: 972416 - RNA, 19 nt, Artificial Sequence
  Description of Artificial Sequence: Synthetic oligonucleotide
uggcggguccuguucauug

SEQ ID NO: 972417 - RNA, 19 nt, Artificial Sequence
  Description of Artificial Sequence: Synthetic oligonucleotide
acgugccucacacaggaau

SEQ ID NO: 972418 - RNA, 19 nt, Artificial Sequence
  Description of Artificial Sequence: Synthetic oligonucleotide
cauccacaccccaaacuug

SEQ ID NO: 972419 - RNA, 19 nt, Artificial Sequence
  Description of Artificial Sequence: Synthetic oligonucleotide
gggacugauuuauuagggc

SEQ ID NO: 972420 - RNA, 19 nt, Artificial Sequence
  Description of Artificial Sequence: Synthetic oligonucleotide
cugucaagcucucgguuac

SEQ ID NO: 972421 - RNA, 19 nt, Artificial Sequence
  Description of Artificial Sequence: Synthetic oligonucleotide
acacacacacaccauccaa

SEQ ID NO: 972422 - RNA, 19 nt, Artificial Sequence
  Description of Artificial Sequence: Synthetic oligonucleotide
aggaauguguuagcggcug

SEQ ID NO: 972423 - RNA, 19 nt, Artificial Sequence
  Description of Artificial Sequence: Synthetic oligonucleotide
gcggcugcaaagcugacug

SEQ ID NO: 972424 - RNA, 19 nt, Artificial Sequence
  Description of Artificial Sequence: Synthetic oligonucleotide
acaaggauuuugguuugug

SEQ ID NO: 972425 - RNA, 19 nt, Artificial Sequence
  Description of Artificial Sequence: Synthetic oligonucleotide
guuagcggcugcaaagcug

SEQ ID NO: 972426 - RNA, 19 nt, Artificial Sequence
  Description of Artificial Sequence: Synthetic oligonucleotide
gauuuugguuuguggcauc

SEQ ID NO: 972427 - RNA, 19 nt, Artificial Sequence
  Description of Artificial Sequence: Synthetic oligonucleotide
aacaugggguuaacgugug

SEQ ID NO: 972428 - RNA, 19 nt, Artificial Sequence
  Description of Artificial Sequence: Synthetic oligonucleotide
aauuaccuugagagggcca

SEQ ID NO: 972429 - RNA, 19 nt, Artificial Sequence
  Description of Artificial Sequence: Synthetic oligonucleotide
ugacggacgcugacgugcc

SEQ ID NO: 972430 - RNA, 19 nt, Artificial Sequence
  Description of Artificial Sequence: Synthetic oligonucleotide
cacacacacacacaccaca

SEQ ID NO: 972431 - RNA, 19 nt, Artificial Sequence
  Description of Artificial Sequence: Synthetic oligonucleotide
uccuuacacucugaauccc

SEQ ID NO: 972432 - RNA, 19 nt, Artificial Sequence
  Description of Artificial Sequence: Synthetic oligonucleotide
uugagaccaucaucguggu

SEQ ID NO: 972433 - RNA, 19 nt, Artificial Sequence
  Description of Artificial Sequence: Synthetic oligonucleotide
gugguugugccacuucuga

SEQ ID NO: 972434 - RNA, 19 nt, Artificial Sequence
  Description of Artificial Sequence: Synthetic oligonucleotide
acaauaacugacggacgcu

SEQ ID NO: 972435 - RNA, 19 nt, Artificial Sequence
  Description of Artificial Sequence: Synthetic oligonucleotide
gagcagaauggucauucaa

SEQ ID NO: 972436 - RNA, 19 nt, Artificial Sequence
  Description of Artificial Sequence: Synthetic oligonucleotide
guguuagcggcugcaaagc

SEQ ID NO: 972437 - RNA, 19 nt, Artificial Sequence
  Description of Artificial Sequence: Synthetic oligonucleotide
gccccuaacucccauuucc

SEQ ID NO: 972438 - RNA, 19 nt, Artificial Sequence
  Description of Artificial Sequence: Synthetic oligonucleotide
  modified_base (6)..(6): a, c, u, g, unknown or other
ccguanaugacaacuguca

SEQ ID NO: 972439 - RNA, 19 nt, Artificial Sequence
  Description of Artificial Sequence: Synthetic oligonucleotide
agucccagaaccagagucu

SEQ ID NO: 972440 - RNA, 19 nt, Artificial Sequence
  Description of Artificial Sequence: Synthetic oligonucleotide
auugcuuaagauacacaua

SEQ ID NO: 972441 - RNA, 19 nt, Artificial Sequence
  Description of Artificial Sequence: Synthetic oligonucleotide
agucuccgucuucuacaac

SEQ ID NO: 972442 - RNA, 19 nt, Artificial Sequence
  Description of Artificial Sequence: Synthetic oligonucleotide
cugcgcugugaguuuggcg

SEQ ID NO: 972443 - RNA, 19 nt, Artificial Sequence
  Description of Artificial Sequence: Synthetic oligonucleotide
acacacacacacacaccac

SEQ ID NO: 972444 - RNA, 19 nt, Artificial Sequence
  Description of Artificial Sequence: Synthetic oligonucleotide
ggugucuugucuuugcugu

SEQ ID NO: 972445 - RNA, 19 nt, Artificial Sequence
  Description of Artificial Sequence: Synthetic oligonucleotide
ugguugugccacuucugaa

SEQ ID NO: 972446 - RNA, 19 nt, Artificial Sequence
  Description of Artificial Sequence: Synthetic oligonucleotide
agccaaagugguugugcca

SEQ ID NO: 972447 - RNA, 19 nt, Artificial Sequence
  Description of Artificial Sequence: Synthetic oligonucleotide
acgugugagcagaaugguc

SEQ ID NO: 972448 - RNA, 19 nt, Artificial Sequence
  Description of Artificial Sequence: Synthetic oligonucleotide
ugagaccaucaucguggug

SEQ ID NO: 972449 - RNA, 19 nt, Artificial Sequence
  Description of Artificial Sequence: Synthetic oligonucleotide
gggguuaacgugugagcag

SEQ ID NO: 972450 - RNA, 19 nt, Artificial Sequence
  Description of Artificial Sequence: Synthetic oligonucleotide
uggccccuaacucccauuu

SEQ ID NO: 972451 - RNA, 19 nt, Artificial Sequence
  Description of Artificial Sequence: Synthetic oligonucleotide
cucucgucacccagccugc

SEQ ID NO: 972452 - RNA, 19 nt, Artificial Sequence
  Description of Artificial Sequence: Synthetic oligonucleotide
gacaacugucacagaaguc

SEQ ID NO: 972453 - RNA, 19 nt, Artificial Sequence
  Description of Artificial Sequence: Synthetic oligonucleotide
aagagcgggacaggaggga

SEQ ID NO: 972454 - RNA, 19 nt, Artificial Sequence
  Description of Artificial Sequence: Synthetic oligonucleotide
agcggacucuuauugcuua

SEQ ID NO: 972455 - RNA, 19 nt, Artificial Sequence
  Description of Artificial Sequence: Synthetic oligonucleotide
ggacucuuauugcuuaaga

SEQ ID NO: 972456 - RNA, 19 nt, Artificial Sequence
  Description of Artificial Sequence: Synthetic oligonucleotide
accugugaagcggcgaugu

SEQ ID NO: 972457 - RNA, 19 nt, Artificial Sequence
  Description of Artificial Sequence: Synthetic oligonucleotide
  modified_base (19)..(19): a, c, u, g, unknown or other
gucaacaggaggcccguan

SEQ ID NO: 972458 - RNA, 19 nt, Artificial Sequence
  Description of Artificial Sequence: Synthetic oligonucleotide
  modified_base (7)..(7): a, c, u, g, unknown or other
cccguanaugacaacuguc

SEQ ID NO: 972459 - RNA, 19 nt, Artificial Sequence
  Description of Artificial Sequence: Synthetic oligonucleotide
  modified_base (5)..(5): a, c, u, g, unknown or other
cguanaugacaacugucac

SEQ ID NO: 972460 - RNA, 19 nt, Artificial Sequence
  Description of Artificial Sequence: Synthetic oligonucleotide
uggcucggccaucucgaug

SEQ ID NO: 972461 - RNA, 19 nt, Artificial Sequence
  Description of Artificial Sequence: Synthetic oligonucleotide
gagucuccgucuucuacaa

SEQ ID NO: 972462 - RNA, 19 nt, Artificial Sequence
  Description of Artificial Sequence: Synthetic oligonucleotide
ccagacgaaagaaacuuga

SEQ ID NO: 972463 - RNA, 19 nt, Artificial Sequence
  Description of Artificial Sequence: Synthetic oligonucleotide
cacacacacaccacacaca

SEQ ID NO: 972464 - RNA, 19 nt, Artificial Sequence
  Description of Artificial Sequence: Synthetic oligonucleotide
caaagcacggcugggccuc

SEQ ID NO: 972465 - RNA, 19 nt, Artificial Sequence
  Description of Artificial Sequence: Synthetic oligonucleotide
ccaacaucacuguguagac

SEQ ID NO: 972466 - RNA, 19 nt, Artificial Sequence
  Description of Artificial Sequence: Synthetic oligonucleotide
acggacgcugacgugccuc

SEQ ID NO: 972467 - RNA, 19 nt, Artificial Sequence
  Description of Artificial Sequence: Synthetic oligonucleotide
aaugcccgagucaccugug

SEQ ID NO: 972468 - RNA, 19 nt, Artificial Sequence
  Description of Artificial Sequence: Synthetic oligonucleotide
ggaacacggggcuugggga

SEQ ID NO: 972469 - RNA, 19 nt, Artificial Sequence
  Description of Artificial Sequence: Synthetic oligonucleotide
acugacggacgcugacgug

SEQ ID NO: 972470 - RNA, 19 nt, Artificial Sequence
  Description of Artificial Sequence: Synthetic oligonucleotide
cucgucacccagccugccc

SEQ ID NO: 972471 - RNA, 19 nt, Artificial Sequence
  Description of Artificial Sequence: Synthetic oligonucleotide
augugggaagagcgggaca

SEQ ID NO: 972472 - RNA, 19 nt, Artificial Sequence
  Description of Artificial Sequence: Synthetic oligonucleotide
guaccuggagaugugggaa

SEQ ID NO: 972473 - RNA, 19 nt, Artificial Sequence
  Description of Artificial Sequence: Synthetic oligonucleotide
cacaccacacacacacaca

SEQ ID NO: 972474 - RNA, 19 nt, Artificial Sequence
  Description of Artificial Sequence: Synthetic oligonucleotide
cacccgggcacagucagac

SEQ ID NO: 972475 - RNA, 19 nt, Artificial Sequence
  Description of Artificial Sequence: Synthetic oligonucleotide
augaguguauugaacucuu

SEQ ID NO: 972476 - RNA, 19 nt, Artificial Sequence
  Description of Artificial Sequence: Synthetic oligonucleotide
ugcuccaaacaugggguua

SEQ ID NO: 972477 - RNA, 19 nt, Artificial Sequence
  Description of Artificial Sequence: Synthetic oligonucleotide
ggcgaugucugccaggugu

SEQ ID NO: 972478 - RNA, 19 nt, Artificial Sequence
  Description of Artificial Sequence: Synthetic oligonucleotide
uaacuacacccgggcacag

SEQ ID NO: 972479 - RNA, 19 nt, Artificial Sequence
  Description of Artificial Sequence: Synthetic oligonucleotide
aggcgagucccagaaccag

SEQ ID NO: 972480 - RNA, 19 nt, Artificial Sequence
  Description of Artificial Sequence: Synthetic oligonucleotide
aacuacacccgggcacagu

SEQ ID NO: 972481 - RNA, 19 nt, Artificial Sequence
  Description of Artificial Sequence: Synthetic oligonucleotide
gcccgagucaccugugaag

SEQ ID NO: 972482 - RNA, 19 nt, Artificial Sequence
  Description of Artificial Sequence: Synthetic oligonucleotide
cacacacacacaccacaca

SEQ ID NO: 972483 - RNA, 19 nt, Artificial Sequence
  Description of Artificial Sequence: Synthetic oligonucleotide
cacacacacacaccaucca

SEQ ID NO: 972484 - RNA, 19 nt, Artificial Sequence
  Description of Artificial Sequence: Synthetic oligonucleotide
cagaauggucauucaaagu

SEQ ID NO: 972485 - RNA, 19 nt, Artificial Sequence
  Description of Artificial Sequence: Synthetic oligonucleotide
gggaauguucacuucggcu

SEQ ID NO: 972486 - RNA, 19 nt, Artificial Sequence
  Description of Artificial Sequence: Synthetic oligonucleotide
  modified_base (13)..(13): a, c, u, g, unknown or other
aggaggcccguanaugaca

SEQ ID NO: 972487 - RNA, 19 nt, Artificial Sequence
  Description of Artificial Sequence: Synthetic oligonucleotide
cccgagucaccugugaagc

SEQ ID NO: 972488 - RNA, 19 nt, Artificial Sequence
  Description of Artificial Sequence: Synthetic oligonucleotide
gguuagagccacucucguc

SEQ ID NO: 972489 - RNA, 19 nt, Artificial Sequence
  Description of Artificial Sequence: Synthetic oligonucleotide
acucacacacacacacaca

SEQ ID NO: 972490 - RNA, 19 nt, Artificial Sequence
  Description of Artificial Sequence: Synthetic oligonucleotide
cagucuauguaucaucguu

SEQ ID NO: 972491 - RNA, 19 nt, Artificial Sequence
  Description of Artificial Sequence: Synthetic oligonucleotide
acaugggguuaacguguga

SEQ ID NO: 972492 - RNA, 19 nt, Artificial Sequence
  Description of Artificial Sequence: Synthetic oligonucleotide
gccucuagagccugaggac

SEQ ID NO: 972493 - RNA, 19 nt, Artificial Sequence
  Description of Artificial Sequence: Synthetic oligonucleotide
  modified_base (11)..(11): a, c, u, g, unknown or other
gaggcccguanaugacaac

SEQ ID NO: 972494 - RNA, 19 nt, Artificial Sequence
  Description of Artificial Sequence: Synthetic oligonucleotide
ucugagcgucaguguggcc

SEQ ID NO: 972495 - RNA, 19 nt, Artificial Sequence
  Description of Artificial Sequence: Synthetic oligonucleotide
ggguuaacgugugagcaga

SEQ ID NO: 972496 - RNA, 19 nt, Artificial Sequence
  Description of Artificial Sequence: Synthetic oligonucleotide
cugagcgucaguguggccu

SEQ ID NO: 972497 - RNA, 19 nt, Artificial Sequence
  Description of Artificial Sequence: Synthetic oligonucleotide
acacacacacacacacaca

SEQ ID NO: 972498 - RNA, 19 nt, Artificial Sequence
  Description of Artificial Sequence: Synthetic oligonucleotide
acagaaguccaggggccca

SEQ ID NO: 972499 - RNA, 19 nt, Artificial Sequence
  Description of Artificial Sequence: Synthetic oligonucleotide
ugucaagcucucgguuaca

SEQ ID NO: 972500 - RNA, 19 nt, Artificial Sequence
  Description of Artificial Sequence: Synthetic oligonucleotide
cucucgguuacaggcagga

SEQ ID NO: 972501 - RNA, 19 nt, Artificial Sequence
  Description of Artificial Sequence: Synthetic oligonucleotide
acacacacacucacacacu

SEQ ID NO: 972502 - RNA, 19 nt, Artificial Sequence
  Description of Artificial Sequence: Synthetic oligonucleotide
uccacaccccaaacuugua

SEQ ID NO: 972503 - RNA, 19 nt, Artificial Sequence
  Description of Artificial Sequence: Synthetic oligonucleotide
ucgucaacaggaggcccgu

SEQ ID NO: 972504 - RNA, 19 nt, Artificial Sequence
  Description of Artificial Sequence: Synthetic oligonucleotide
cauuugccuggaaacccaa

SEQ ID NO: 972505 - RNA, 19 nt, Artificial Sequence
  Description of Artificial Sequence: Synthetic oligonucleotide
gcgagucccagaaccagag

SEQ ID NO: 972506 - RNA, 19 nt, Artificial Sequence
  Description of Artificial Sequence: Synthetic oligonucleotide
acacucacacacacacaca

SEQ ID NO: 972507 - RNA, 19 nt, Artificial Sequence
  Description of Artificial Sequence: Synthetic oligonucleotide
ggacacacacacucacaca

SEQ ID NO: 972508 - RNA, 19 nt, Artificial Sequence
  Description of Artificial Sequence: Synthetic oligonucleotide
  modified_base (9)..(9): a, c, u, g, unknown or other
ggcccguanaugacaacug

SEQ ID NO: 972509 - RNA, 19 nt, Artificial Sequence
  Description of Artificial Sequence: Synthetic oligonucleotide
agcggcugcaaagcugacu

SEQ ID NO: 972510 - RNA, 19 nt, Artificial Sequence
  Description of Artificial Sequence: Synthetic oligonucleotide
uggccccgguugcacacac

SEQ ID NO: 972511 - RNA, 19 nt, Artificial Sequence
  Description of Artificial Sequence: Synthetic oligonucleotide
agagcgggacaggagggaa

SEQ ID NO: 972512 - RNA, 19 nt, Artificial Sequence
  Description of Artificial Sequence: Synthetic oligonucleotide
guucgacaaggauuuuggu

SEQ ID NO: 972513 - RNA, 19 nt, Artificial Sequence
  Description of Artificial Sequence: Synthetic oligonucleotide
ugcccggucagcgggcacu

SEQ ID NO: 972514 - RNA, 19 nt, Artificial Sequence
  Description of Artificial Sequence: Synthetic oligonucleotide
caucguucaagagcaggaa

SEQ ID NO: 972515 - RNA, 19 nt, Artificial Sequence
  Description of Artificial Sequence: Synthetic oligonucleotide
caccacacacacacacaca

SEQ ID NO: 972516 - RNA, 19 nt, Artificial Sequence
  Description of Artificial Sequence: Synthetic oligonucleotide
cugugaagcggcgaugucu

SEQ ID NO: 972517 - RNA, 19 nt, Artificial Sequence
  Description of Artificial Sequence: Synthetic oligonucleotide
gcguaaaauaaauuaccuu

SEQ ID NO: 972518 - RNA, 19 nt, Artificial Sequence
  Description of Artificial Sequence: Synthetic oligonucleotide
acacacucacacacacaca

SEQ ID NO: 972519 - RNA, 19 nt, Artificial Sequence
  Description of Artificial Sequence: Synthetic oligonucleotide
ccaucaucgugguggcccc

SEQ ID NO: 972520 - RNA, 19 nt, Artificial Sequence
  Description of Artificial Sequence: Synthetic oligonucleotide
auccaaacgcagacacaca

SEQ ID NO: 972521 - RNA, 19 nt, Artificial Sequence
  Description of Artificial Sequence: Synthetic oligonucleotide
cacacacaccacacacaca

SEQ ID NO: 972522 - RNA, 19 nt, Artificial Sequence
  Description of Artificial Sequence: Synthetic oligonucleotide
cuguguagacuucacuuuu

SEQ ID NO: 972523 - RNA, 19 nt, Artificial Sequence
  Description of Artificial Sequence: Synthetic oligonucleotide
uuuguucgacaaggauuuu

SEQ ID NO: 972524 - RNA, 19 nt, Artificial Sequence
  Description of Artificial Sequence: Synthetic oligonucleotide
ccgagucaccugugaagcg

SEQ ID NO: 972525 - RNA, 19 nt, Artificial Sequence
  Description of Artificial Sequence: Synthetic oligonucleotide
cacacaccacacacacaca

SEQ ID NO: 972526 - RNA, 19 nt, Artificial Sequence
  Description of Artificial Sequence: Synthetic oligonucleotide
cacaggcgagucccagaac

SEQ ID NO: 972527 - RNA, 19 nt, Artificial Sequence
  Description of Artificial Sequence: Synthetic oligonucleotide
caguacccagucuauguau

SEQ ID NO: 972528 - RNA, 19 nt, Artificial Sequence
  Description of Artificial Sequence: Synthetic oligonucleotide
ccuaacucccauuuccugu

SEQ ID NO: 972529 - RNA, 19 nt, Artificial Sequence
  Description of Artificial Sequence: Synthetic oligonucleotide
acacacacacacacaccau

SEQ ID NO: 972530 - RNA, 19 nt, Artificial Sequence
  Description of Artificial Sequence: Synthetic oligonucleotide
aaagcacggcugggccucu

SEQ ID NO: 972531 - RNA, 19 nt, Artificial Sequence
  Description of Artificial Sequence: Synthetic oligonucleotide
gucagacauuuguucggua

SEQ ID NO: 972532 - RNA, 19 nt, Artificial Sequence
  Description of Artificial Sequence: Synthetic oligonucleotide
gcaguacccagucuaugua

SEQ ID NO: 972533 - RNA, 19 nt, Artificial Sequence
  Description of Artificial Sequence: Synthetic oligonucleotide
gggcaucucacagugguua

SEQ ID NO: 972534 - RNA, 19 nt, Artificial Sequence
  Description of Artificial Sequence: Synthetic oligonucleotide
caccugugaagcggcgaug

SEQ ID NO: 972535 - RNA, 19 nt, Artificial Sequence
  Description of Artificial Sequence: Synthetic oligonucleotide
guacaccaccaugcuccag

SEQ ID NO: 972536 - RNA, 19 nt, Artificial Sequence
  Description of Artificial Sequence: Synthetic oligonucleotide
acauuaccucccagccuca

SEQ ID NO: 972537 - RNA, 19 nt, Artificial Sequence
  Description of Artificial Sequence: Synthetic oligonucleotide
  modified_base (12)..(12): a, c, u, g, unknown or other
ggaggcccguanaugacaa

SEQ ID NO: 972538 - RNA, 19 nt, Artificial Sequence
  Description of Artificial Sequence: Synthetic oligonucleotide
guuaacgugugagcagaau

SEQ ID NO: 972539 - RNA, 19 nt, Artificial Sequence
  Description of Artificial Sequence: Synthetic oligonucleotide
gacaaggauuuugguuugu

SEQ ID NO: 972540 - RNA, 19 nt, Artificial Sequence
  Description of Artificial Sequence: Synthetic oligonucleotide
gcgucaguguggccugaag

SEQ ID NO: 972541 - RNA, 19 nt, Artificial Sequence
  Description of Artificial Sequence: Synthetic oligonucleotide
cagaguguggcucggccau

SEQ ID NO: 972542 - RNA, 19 nt, Artificial Sequence
  Description of Artificial Sequence: Synthetic oligonucleotide
ccucuagagccugaggaca

SEQ ID NO: 972543 - RNA, 19 nt, Artificial Sequence
  Description of Artificial Sequence: Synthetic oligonucleotide
  modified_base (8)..(8): a, c, u, g, unknown or other
gcccguanaugacaacugu

SEQ ID NO: 972544 - RNA, 19 nt, Artificial Sequence
  Description of Artificial Sequence: Synthetic oligonucleotide
gguggccguggcagggugg

SEQ ID NO: 972545 - RNA, 19 nt, Artificial Sequence
  Description of Artificial Sequence: Synthetic oligonucleotide
acccgggcacagucagaca

SEQ ID NO: 972546 - RNA, 19 nt, Artificial Sequence
  Description of Artificial Sequence: Synthetic oligonucleotide
cccguggcuggccacugag

SEQ ID NO: 972547 - RNA, 19 nt, Artificial Sequence
  Description of Artificial Sequence: Synthetic oligonucleotide
ggcggguccuguucauuga

SEQ ID NO: 972548 - RNA, 19 nt, Artificial Sequence
  Description of Artificial Sequence: Synthetic oligonucleotide
gaugucugccaggugucuu

SEQ ID NO: 972549 - RNA, 19 nt, Artificial Sequence
  Description of Artificial Sequence: Synthetic oligonucleotide
guuacaggcaggaccuguu

SEQ ID NO: 972550 - RNA, 19 nt, Artificial Sequence
  Description of Artificial Sequence: Synthetic oligonucleotide
uccccguggcuggccacug

SEQ ID NO: 972551 - RNA, 19 nt, Artificial Sequence
  Description of Artificial Sequence: Synthetic oligonucleotide
gcucucgguuacaggcagg

SEQ ID NO: 972552 - RNA, 19 nt, Artificial Sequence
  Description of Artificial Sequence: Synthetic oligonucleotide
cacacaccucaaugcccga

SEQ ID NO: 972553 - RNA, 19 nt, Artificial Sequence
  Description of Artificial Sequence: Synthetic oligonucleotide
cucuugugggugucuccua

SEQ ID NO: 972554 - RNA, 19 nt, Artificial Sequence
  Description of Artificial Sequence: Synthetic oligonucleotide
cagugguuagagccacucu

SEQ ID NO: 972555 - RNA, 19 nt, Artificial Sequence
  Description of Artificial Sequence: Synthetic oligonucleotide
gaguuuggcggguccuguu

SEQ ID NO: 972556 - RNA, 19 nt, Artificial Sequence
  Description of Artificial Sequence: Synthetic oligonucleotide
gguuacaggcaggaccugu

SEQ ID NO: 972557 - RNA, 19 nt, Artificial Sequence
  Description of Artificial Sequence: Synthetic oligonucleotide
ccacacacacacacacaca

SEQ ID NO: 972558 - RNA, 19 nt, Artificial Sequence
  Description of Artificial Sequence: Synthetic oligonucleotide
ccguggcuggccacugagc

SEQ ID NO: 972559 - RNA, 19 nt, Artificial Sequence
  Description of Artificial Sequence: Synthetic oligonucleotide
agggcaucucacagugguu

SEQ ID NO: 972560 - RNA, 19 nt, Artificial Sequence
  Description of Artificial Sequence: Synthetic oligonucleotide
ggccccuaacucccauuuc

SEQ ID NO: 972561 - RNA, 19 nt, Artificial Sequence
  Description of Artificial Sequence: Synthetic oligonucleotide
agcgucaguguggccugaa

SEQ ID NO: 972562 - RNA, 19 nt, Artificial Sequence
  Description of Artificial Sequence: Synthetic oligonucleotide
gguuaacgugugagcagaa

SEQ ID NO: 972563 - RNA, 19 nt, Artificial Sequence
  Description of Artificial Sequence: Synthetic oligonucleotide
cggguccuguucauugaug

SEQ ID NO: 972564 - RNA, 19 nt, Artificial Sequence
  Description of Artificial Sequence: Synthetic oligonucleotide
gcggacucuuauugcuuaa

SEQ ID NO: 972565 - RNA, 19 nt, Artificial Sequence
  Description of Artificial Sequence: Synthetic oligonucleotide
gacgugccucacacaggaa

SEQ ID NO: 972566 - RNA, 19 nt, Artificial Sequence
  Description of Artificial Sequence: Synthetic oligonucleotide
gcugugaguuuggcggguc

SEQ ID NO: 972567 - RNA, 19 nt, Artificial Sequence
  Description of Artificial Sequence: Synthetic oligonucleotide
cagcggacucuuauugcuu

SEQ ID NO: 972568 - RNA, 19 nt, Artificial Sequence
  Description of Artificial Sequence: Synthetic oligonucleotide
ccagucuauguaucaucgu

SEQ ID NO: 972569 - RNA, 19 nt, Artificial Sequence
  Description of Artificial Sequence: Synthetic oligonucleotide
gacggacgcugacgugccu

SEQ ID NO: 972570 - RNA, 19 nt, Artificial Sequence
  Description of Artificial Sequence: Synthetic oligonucleotide
guggcucggccaucucgau

SEQ ID NO: 972571 - RNA, 19 nt, Artificial Sequence
  Description of Artificial Sequence: Synthetic oligonucleotide
caucgugguggccccgguu

SEQ ID NO: 972572 - RNA, 19 nt, Artificial Sequence
  Description of Artificial Sequence: Synthetic oligonucleotide
ccccgguugcacacacaca

SEQ ID NO: 972573 - RNA, 19 nt, Artificial Sequence
  Description of Artificial Sequence: Synthetic oligonucleotide
cggcaguacccagucuaug

SEQ ID NO: 972574 - RNA, 19 nt, Artificial Sequence
  Description of Artificial Sequence: Synthetic oligonucleotide
cugugcccuuucugagcgu

SEQ ID NO: 972575 - RNA, 19 nt, Artificial Sequence
  Description of Artificial Sequence: Synthetic oligonucleotide
cuccccguggcuggccacu

SEQ ID NO: 972576 - RNA, 19 nt, Artificial Sequence
  Description of Artificial Sequence: Synthetic oligonucleotide
cacggggcuuggggacaca

SEQ ID NO: 972577 - RNA, 19 nt, Artificial Sequence
  Description of Artificial Sequence: Synthetic oligonucleotide
cgcugacgugccucacaca

SEQ ID NO: 972578 - RNA, 19 nt, Artificial Sequence
  Description of Artificial Sequence: Synthetic oligonucleotide
cggcgaugucugccaggug

SEQ ID NO: 972579 - RNA, 19 nt, Artificial Sequence
  Description of Artificial Sequence: Synthetic oligonucleotide
ccccguggcuggccacuga

SEQ ID NO: 972580 - RNA, 19 nt, Artificial Sequence
  Description of Artificial Sequence: Synthetic oligonucleotide
gcccggucagcgggcacuu

SEQ ID NO: 972581 - RNA, 19 nt, Artificial Sequence
  Description of Artificial Sequence: Synthetic oligonucleotide
cgucaacaggaggcccgua

SEQ ID NO: 972582 - RNA, 19 nt, Artificial Sequence
  Description of Artificial Sequence: Synthetic oligonucleotide
auaaauucgauaauguucc

SEQ ID NO: 972583 - RNA, 19 nt, Artificial Sequence
  Description of Artificial Sequence: Synthetic oligonucleotide
uguuguaaacucaugauag

SEQ ID NO: 972584 - RNA, 19 nt, Artificial Sequence
  Description of Artificial Sequence: Synthetic oligonucleotide
uguacauuaacacuguagc

SEQ ID NO: 972585 - RNA, 19 nt, Artificial Sequence
  Description of Artificial Sequence: Synthetic oligonucleotide
aacauuaugacuccaaaga

SEQ ID NO: 972586 - RNA, 19 nt, Artificial Sequence
  Description of Artificial Sequence: Synthetic oligonucleotide
acaaccauguauuuagugc

SEQ ID NO: 972587 - RNA, 19 nt, Artificial Sequence
  Description of Artificial Sequence: Synthetic oligonucleotide
ucuacuuaagcgaauaagc

SEQ ID NO: 972588 - RNA, 19 nt, Artificial Sequence
  Description of Artificial Sequence: Synthetic oligonucleotide
aacucaugauagcagaucg

SEQ ID NO: 972589 - RNA, 19 nt, Artificial Sequence
  Description of Artificial Sequence: Synthetic oligonucleotide
aaugauuaguaaaugccgc

SEQ ID NO: 972590 - RNA, 19 nt, Artificial Sequence
  Description of Artificial Sequence: Synthetic oligonucleotide
aauucgauaauguucccug

SEQ ID NO: 972591 - RNA, 19 nt, Artificial Sequence
  Description of Artificial Sequence: Synthetic oligonucleotide
aacggaaaaucauucacag

SEQ ID NO: 972592 - RNA, 19 nt, Artificial Sequence
  Description of Artificial Sequence: Synthetic oligonucleotide
aaaacuaaagucucucuca

SEQ ID NO: 972593 - RNA, 19 nt, Artificial Sequence
  Description of Artificial Sequence: Synthetic oligonucleotide
ugaauguacagccauuucc

SEQ ID NO: 972594 - RNA, 19 nt, Artificial Sequence
  Description of Artificial Sequence: Synthetic oligonucleotide
uuaaacagauaccucaaug

SEQ ID NO: 972595 - RNA, 19 nt, Artificial Sequence
  Description of Artificial Sequence: Synthetic oligonucleotide
uaauccauaaauccgguac

SEQ ID NO: 972596 - RNA, 19 nt, Artificial Sequence
  Description of Artificial Sequence: Synthetic oligonucleotide
uguggagcgaacaaaguag

SEQ ID NO: 972597 - RNA, 19 nt, Artificial Sequence
  Description of Artificial Sequence: Synthetic oligonucleotide
auuucuugcaaguggcucc

SEQ ID NO: 972598 - RNA, 19 nt, Artificial Sequence
  Description of Artificial Sequence: Synthetic oligonucleotide
ugaacaggcaagcagagac

SEQ ID NO: 972599 - RNA, 19 nt, Artificial Sequence
  Description of Artificial Sequence: Synthetic oligonucleotide
caaugauuaguaaaugccg

SEQ ID NO: 972600 - RNA, 19 nt, Artificial Sequence
  Description of Artificial Sequence: Synthetic oligonucleotide
uaaacagauaccucaauga

SEQ ID NO: 972601 - RNA, 19 nt, Artificial Sequence
  Description of Artificial Sequence: Synthetic oligonucleotide
uguaaacucaugauagcag

SEQ ID NO: 972602 - RNA, 19 nt, Artificial Sequence
  Description of Artificial Sequence: Synthetic oligonucleotide
acuuaagccagucugaaga

SEQ ID NO: 972603 - RNA, 19 nt, Artificial Sequence
  Description of Artificial Sequence: Synthetic oligonucleotide
uaugcauguaggcacauca

SEQ ID NO: 972604 - RNA, 19 nt, Artificial Sequence
  Description of Artificial Sequence: Synthetic oligonucleotide
gacauauccaaucccaaag

SEQ ID NO: 972605 - RNA, 19 nt, Artificial Sequence
  Description of Artificial Sequence: Synthetic oligonucleotide
auaauguucccuguggagc

SEQ ID NO: 972606 - RNA, 19 nt, Artificial Sequence
  Description of Artificial Sequence: Synthetic oligonucleotide
auaaaaccacuucaguuuc

SEQ ID NO: 972607 - RNA, 19 nt, Artificial Sequence
  Description of Artificial Sequence: Synthetic oligonucleotide
ugagaaucaaagacgaggu

SEQ ID NO: 972608 - RNA, 19 nt, Artificial Sequence
  Description of Artificial Sequence: Synthetic oligonucleotide
aauuauccuugauaucguc

SEQ ID NO: 972609 - RNA, 19 nt, Artificial Sequence
  Description of Artificial Sequence: Synthetic oligonucleotide
uguggaguaauaaaaccac

SEQ ID NO: 972610 - RNA, 19 nt, Artificial Sequence
  Description of Artificial Sequence: Synthetic oligonucleotide
cauaacugaguaaaacagg

SEQ ID NO: 972611 - RNA, 19 nt, Artificial Sequence
  Description of Artificial Sequence: Synthetic oligonucleotide
uucaguugauccaaugaag

SEQ ID NO: 972612 - RNA, 19 nt, Artificial Sequence
  Description of Artificial Sequence: Synthetic oligonucleotide
auuacaggaaccaagauau

SEQ ID NO: 972613 - RNA, 19 nt, Artificial Sequence
  Description of Artificial Sequence: Synthetic oligonucleotide
aguucuacgauucaugaau

SEQ ID NO: 972614 - RNA, 19 nt, Artificial Sequence
  Description of Artificial Sequence: Synthetic oligonucleotide
cuacuuaagcgaauaagcc

SEQ ID NO: 972615 - RNA, 19 nt, Artificial Sequence
  Description of Artificial Sequence: Synthetic oligonucleotide
aaugaggucccagaaauca

SEQ ID NO: 972616 - RNA, 19 nt, Artificial Sequence
  Description of Artificial Sequence: Synthetic oligonucleotide
aacaaccauguauuuagug

SEQ ID NO: 972617 - RNA, 19 nt, Artificial Sequence
  Description of Artificial Sequence: Synthetic oligonucleotide
aggacgaugagugccaucc

SEQ ID NO: 972618 - RNA, 19 nt, Artificial Sequence
  Description of Artificial Sequence: Synthetic oligonucleotide
uugauaucgucuucgaugu

SEQ ID NO: 972619 - RNA, 19 nt, Artificial Sequence
  Description of Artificial Sequence: Synthetic oligonucleotide
guagccgucaaucaugaag

SEQ ID NO: 972620 - RNA, 19 nt, Artificial Sequence
  Description of Artificial Sequence: Synthetic oligonucleotide
cagauugcaaaugaggucc

SEQ ID NO: 972621 - RNA, 19 nt, Artificial Sequence
  Description of Artificial Sequence: Synthetic oligonucleotide
auccuuguuagccagaaga

SEQ ID NO: 972622 - RNA, 19 nt, Artificial Sequence
  Description of Artificial Sequence: Synthetic oligonucleotide
acuuaagcgaauaagccuc

SEQ ID NO: 972623 - RNA, 19 nt, Artificial Sequence
  Description of Artificial Sequence: Synthetic oligonucleotide
acauauccaaucccaaagg

SEQ ID NO: 972624 - RNA, 19 nt, Artificial Sequence
  Description of Artificial Sequence: Synthetic oligonucleotide
acuguaauccauaaauccg

SEQ ID NO: 972625 - RNA, 19 nt, Artificial Sequence
  Description of Artificial Sequence: Synthetic oligonucleotide
uguaauggcagcucuguga

SEQ ID NO: 972626 - RNA, 19 nt, Artificial Sequence
  Description of Artificial Sequence: Synthetic oligonucleotide
uucauugggugcaauaaac

SEQ ID NO: 972627 - RNA, 19 nt, Artificial Sequence
  Description of Artificial Sequence: Synthetic oligonucleotide
aaacagauaccucaaugau

SEQ ID NO: 972628 - RNA, 19 nt, Artificial Sequence
  Description of Artificial Sequence: Synthetic oligonucleotide
acuggcgugaagcguaucc

SEQ ID NO: 972629 - RNA, 19 nt, Artificial Sequence
  Description of Artificial Sequence: Synthetic oligonucleotide
gaaaacuaaagucucucuc

SEQ ID NO: 972630 - RNA, 19 nt, Artificial Sequence
  Description of Artificial Sequence: Synthetic oligonucleotide
ccgucaaucaugaagagcg

SEQ ID NO: 972631 - RNA, 19 nt, Artificial Sequence
  Description of Artificial Sequence: Synthetic oligonucleotide
ucugugauuaagccgauua

SEQ ID NO: 972632 - RNA, 19 nt, Artificial Sequence
  Description of Artificial Sequence: Synthetic oligonucleotide
ugcauagugaugccagagg

SEQ ID NO: 972633 - RNA, 19 nt, Artificial Sequence
  Description of Artificial Sequence: Synthetic oligonucleotide
ucauugggugcaauaaacc

SEQ ID NO: 972634 - RNA, 19 nt, Artificial Sequence
  Description of Artificial Sequence: Synthetic oligonucleotide
uacuuaagcgaauaagccu

SEQ ID NO: 972635 - RNA, 19 nt, Artificial Sequence
  Description of Artificial Sequence: Synthetic oligonucleotide
cuaaugaucagauugcaaa

SEQ ID NO: 972636 - RNA, 19 nt, Artificial Sequence
  Description of Artificial Sequence: Synthetic oligonucleotide
uucuacuuaagcgaauaag

SEQ ID NO: 972637 - RNA, 19 nt, Artificial Sequence
  Description of Artificial Sequence: Synthetic oligonucleotide
cugagagacauuagcacgg

SEQ ID NO: 972638 - RNA, 19 nt, Artificial Sequence
  Description of Artificial Sequence: Synthetic oligonucleotide
uuuaaucggggucaccaug

SEQ ID NO: 972639 - RNA, 19 nt, Artificial Sequence
  Description of Artificial Sequence: Synthetic oligonucleotide
auggacuggaucugggagc

SEQ ID NO: 972640 - RNA, 19 nt, Artificial Sequence
  Description of Artificial Sequence: Synthetic oligonucleotide
augauagcagaucgcacac

SEQ ID NO: 972641 - RNA, 19 nt, Artificial Sequence
  Description of Artificial Sequence: Synthetic oligonucleotide
agcgucuucucuuaaagcu

SEQ ID NO: 972642 - RNA, 19 nt, Artificial Sequence
  Description of Artificial Sequence: Synthetic oligonucleotide
uaaaugccgcuuuaaucgg

SEQ ID NO: 972643 - RNA, 19 nt, Artificial Sequence
  Description of Artificial Sequence: Synthetic oligonucleotide
ugugauuaagccgauuaca

SEQ ID NO: 972644 - RNA, 19 nt, Artificial Sequence
  Description of Artificial Sequence: Synthetic oligonucleotide
aacagcaguucuacgauuc

SEQ ID NO: 972645 - RNA, 19 nt, Artificial Sequence
  Description of Artificial Sequence: Synthetic oligonucleotide
ugaucagauugcaaaugag

SEQ ID NO: 972646 - RNA, 19 nt, Artificial Sequence
  Description of Artificial Sequence: Synthetic oligonucleotide
cuauugaagaaaugacagc

SEQ ID NO: 972647 - RNA, 19 nt, Artificial Sequence
  Description of Artificial Sequence: Synthetic oligonucleotide
auguccgggaaacgaaucc

SEQ ID NO: 972648 - RNA, 19 nt, Artificial Sequence
  Description of Artificial Sequence: Synthetic oligonucleotide
ucugucaucccguggauga

SEQ ID NO: 972649 - RNA, 19 nt, Artificial Sequence
  Description of Artificial Sequence: Synthetic oligonucleotide
auaagccucucuucaggcc

SEQ ID NO: 972650 - RNA, 19 nt, Artificial Sequence
  Description of Artificial Sequence: Synthetic oligonucleotide
aaacuaaagucucucucau

SEQ ID NO: 972651 - RNA, 19 nt, Artificial Sequence
  Description of Artificial Sequence: Synthetic oligonucleotide
ucaaucaugaagagcgcgu

SEQ ID NO: 972652 - RNA, 19 nt, Artificial Sequence
  Description of Artificial Sequence: Synthetic oligonucleotide
gauuacaggaaccaagaua

SEQ ID NO: 972653 - RNA, 19 nt, Artificial Sequence
  Description of Artificial Sequence: Synthetic oligonucleotide
guacauaugccucacuaac

SEQ ID NO: 972654 - RNA, 19 nt, Artificial Sequence
  Description of Artificial Sequence: Synthetic oligonucleotide
aauaaacccauuguuguua

SEQ ID NO: 972655 - RNA, 19 nt, Artificial Sequence
  Description of Artificial Sequence: Synthetic oligonucleotide
ugcguggaaguaaugguug

SEQ ID NO: 972656 - RNA, 19 nt, Artificial Sequence
  Description of Artificial Sequence: Synthetic oligonucleotide
caagcagaguuccacacag

SEQ ID NO: 972657 - RNA, 19 nt, Artificial Sequence
  Description of Artificial Sequence: Synthetic oligonucleotide
uaagccgauuacaggaacc

SEQ ID NO: 972658 - RNA, 19 nt, Artificial Sequence
  Description of Artificial Sequence: Synthetic oligonucleotide
auaugagaaucaaagacga

SEQ ID NO: 972659 - RNA, 19 nt, Artificial Sequence
  Description of Artificial Sequence: Synthetic oligonucleotide
uccauuuugggugaacuga

SEQ ID NO: 972660 - RNA, 19 nt, Artificial Sequence
  Description of Artificial Sequence: Synthetic oligonucleotide
uggaguaauaaaaccacuu

SEQ ID NO: 972661 - RNA, 19 nt, Artificial Sequence
  Description of Artificial Sequence: Synthetic oligonucleotide
gacgaggugaaaacuaaag

SEQ ID NO: 972662 - RNA, 19 nt, Artificial Sequence
  Description of Artificial Sequence: Synthetic oligonucleotide
ugacuccaaagauaaauuc

SEQ ID NO: 972663 - RNA, 19 nt, Artificial Sequence
  Description of Artificial Sequence: Synthetic oligonucleotide
uuuucauugggugcaauaa

SEQ ID NO: 972664 - RNA, 19 nt, Artificial Sequence
  Description of Artificial Sequence: Synthetic oligonucleotide
cucguucaguucuuggucg

SEQ ID NO: 972665 - RNA, 19 nt, Artificial Sequence
  Description of Artificial Sequence: Synthetic oligonucleotide
aauccgguacauaugccuc

SEQ ID NO: 972666 - RNA, 19 nt, Artificial Sequence
  Description of Artificial Sequence: Synthetic oligonucleotide
cauaaauccgguacauaug

SEQ ID NO: 972667 - RNA, 19 nt, Artificial Sequence
  Description of Artificial Sequence: Synthetic oligonucleotide
aaugcaggacugcaguuaa

SEQ ID NO: 972668 - RNA, 19 nt, Artificial Sequence
  Description of Artificial Sequence: Synthetic oligonucleotide
aaauucgauaauguucccu

SEQ ID NO: 972669 - RNA, 19 nt, Artificial Sequence
  Description of Artificial Sequence: Synthetic oligonucleotide
aauggcagcucugugauua

SEQ ID NO: 972670 - RNA, 19 nt, Artificial Sequence
  Description of Artificial Sequence: Synthetic oligonucleotide
guaaacucaugauagcaga

SEQ ID NO: 972671 - RNA, 19 nt, Artificial Sequence
  Description of Artificial Sequence: Synthetic oligonucleotide
auaggccccauucccaaac

SEQ ID NO: 972672 - RNA, 19 nt, Artificial Sequence
  Description of Artificial Sequence: Synthetic oligonucleotide
gaggacauuguaguagccg

SEQ ID NO: 972673 - RNA, 19 nt, Artificial Sequence
  Description of Artificial Sequence: Synthetic oligonucleotide
agauaaauucgauaauguu

SEQ ID NO: 972674 - RNA, 19 nt, Artificial Sequence
  Description of Artificial Sequence: Synthetic oligonucleotide
ucuuaacagcaguucuacg

SEQ ID NO: 972675 - RNA, 19 nt, Artificial Sequence
  Description of Artificial Sequence: Synthetic oligonucleotide
ucacuaacagguaaacaua

SEQ ID NO: 972676 - RNA, 19 nt, Artificial Sequence
  Description of Artificial Sequence: Synthetic oligonucleotide
agagcgcguacacagugac

SEQ ID NO: 972677 - RNA, 19 nt, Artificial Sequence
  Description of Artificial Sequence: Synthetic oligonucleotide
ggaaccaagauauucaaaa

SEQ ID NO: 972678 - RNA, 19 nt, Artificial Sequence
  Description of Artificial Sequence: Synthetic oligonucleotide
acacacgucgccuauuucu

SEQ ID NO: 972679 - RNA, 19 nt, Artificial Sequence
  Description of Artificial Sequence: Synthetic oligonucleotide
ugaguagauggacuggauc

SEQ ID NO: 972680 - RNA, 19 nt, Artificial Sequence
  Description of Artificial Sequence: Synthetic oligonucleotide
aguuucacugccaagacaa

SEQ ID NO: 972681 - RNA, 19 nt, Artificial Sequence
  Description of Artificial Sequence: Synthetic oligonucleotide
acgaggugaaaacuaaagu

SEQ ID NO: 972682 - RNA, 19 nt, Artificial Sequence
  Description of Artificial Sequence: Synthetic oligonucleotide
agcgcucaugccuagaaca

SEQ ID NO: 972683 - RNA, 19 nt, Artificial Sequence
  Description of Artificial Sequence: Synthetic oligonucleotide
gaggacauaacugaguaaa

SEQ ID NO: 972684 - RNA, 19 nt, Artificial Sequence
  Description of Artificial Sequence: Synthetic oligonucleotide
ucgucuucgauguacacuu

SEQ ID NO: 972685 - RNA, 19 nt, Artificial Sequence
  Description of Artificial Sequence: Synthetic oligonucleotide
agcgcguacacagugacag

SEQ ID NO: 972686 - RNA, 19 nt, Artificial Sequence
  Description of Artificial Sequence: Synthetic oligonucleotide
caugauagcagaucgcaca

SEQ ID NO: 972687 - RNA, 19 nt, Artificial Sequence
  Description of Artificial Sequence: Synthetic oligonucleotide
uaccucaaugauuaguaaa

SEQ ID NO: 972688 - RNA, 19 nt, Artificial Sequence
  Description of Artificial Sequence: Synthetic oligonucleotide
uccuuguuagccagaagac

SEQ ID NO: 972689 - RNA, 19 nt, Artificial Sequence
  Description of Artificial Sequence: Synthetic oligonucleotide
aggacauuguaguagccgu

SEQ ID NO: 972690 - RNA, 19 nt, Artificial Sequence
  Description of Artificial Sequence: Synthetic oligonucleotide
uggcacaugggacaagugu

SEQ ID NO: 972691 - RNA, 19 nt, Artificial Sequence
  Description of Artificial Sequence: Synthetic oligonucleotide
caucccguggaugaaaugc

SEQ ID NO: 972692 - RNA, 19 nt, Artificial Sequence
  Description of Artificial Sequence: Synthetic oligonucleotide
augauuaguaaaugccgcu

SEQ ID NO: 972693 - RNA, 19 nt, Artificial Sequence
  Description of Artificial Sequence: Synthetic oligonucleotide
aaugccgcuuuaaucgggg

SEQ ID NO: 972694 - RNA, 19 nt, Artificial Sequence
  Description of Artificial Sequence: Synthetic oligonucleotide
auaugccucacuaacaggu

SEQ ID NO: 972695 - RNA, 19 nt, Artificial Sequence
  Description of Artificial Sequence: Synthetic oligonucleotide
cuuaagccagucugaagag

SEQ ID NO: 972696 - RNA, 19 nt, Artificial Sequence
  Description of Artificial Sequence: Synthetic oligonucleotide
uuuaaacagauaccucaau

SEQ ID NO: 972697 - RNA, 19 nt, Artificial Sequence
  Description of Artificial Sequence: Synthetic oligonucleotide
uaagcgaauaagccucucu

SEQ ID NO: 972698 - RNA, 19 nt, Artificial Sequence
  Description of Artificial Sequence: Synthetic oligonucleotide
auguuguaaacucaugaua

SEQ ID NO: 972699 - RNA, 19 nt, Artificial Sequence
  Description of Artificial Sequence: Synthetic oligonucleotide
caaccauguauuuagugca

SEQ ID NO: 972700 - RNA, 19 nt, Artificial Sequence
  Description of Artificial Sequence: Synthetic oligonucleotide
uugggugcaauaaacccau

SEQ ID NO: 972701 - RNA, 19 nt, Artificial Sequence
  Description of Artificial Sequence: Synthetic oligonucleotide
gauaccucaaugauuagua

SEQ ID NO: 972702 - RNA, 19 nt, Artificial Sequence
  Description of Artificial Sequence: Synthetic oligonucleotide
aaugguugcacggugucau

SEQ ID NO: 972703 - RNA, 19 nt, Artificial Sequence
  Description of Artificial Sequence: Synthetic oligonucleotide
auauuugaauuauccuuga

SEQ ID NO: 972704 - RNA, 19 nt, Artificial Sequence
  Description of Artificial Sequence: Synthetic oligonucleotide
uuaagccgauuacaggaac

SEQ ID NO: 972705 - RNA, 19 nt, Artificial Sequence
  Description of Artificial Sequence: Synthetic oligonucleotide
gaugccagaggacauaacu

SEQ ID NO: 972706 - RNA, 19 nt, Artificial Sequence
  Description of Artificial Sequence: Synthetic oligonucleotide
cauuuccgaaggcagagug

SEQ ID NO: 972707 - RNA, 19 nt, Artificial Sequence
  Description of Artificial Sequence: Synthetic oligonucleotide
auaaucagcugugaguaga

SEQ ID NO: 972708 - RNA, 19 nt, Artificial Sequence
  Description of Artificial Sequence: Synthetic oligonucleotide
gagacauuagcacgggguc

SEQ ID NO: 972709 - RNA, 19 nt, Artificial Sequence
  Description of Artificial Sequence: Synthetic oligonucleotide
caguaacggaaaaucauuc

SEQ ID NO: 972710 - RNA, 19 nt, Artificial Sequence
  Description of Artificial Sequence: Synthetic oligonucleotide
ucuacgauucaugaauguc

SEQ ID NO: 972711 - RNA, 19 nt, Artificial Sequence
  Description of Artificial Sequence: Synthetic oligonucleotide
aggugaaaacuaaagucuc

SEQ ID NO: 972712 - RNA, 19 nt, Artificial Sequence
  Description of Artificial Sequence: Synthetic oligonucleotide
cauaugccucacuaacagg

SEQ ID NO: 972713 - RNA, 19 nt, Artificial Sequence
  Description of Artificial Sequence: Synthetic oligonucleotide
auuagcacggggucuguca

SEQ ID NO: 972714 - RNA, 19 nt, Artificial Sequence
  Description of Artificial Sequence: Synthetic oligonucleotide
gucaaucaugaagagcgcg

SEQ ID NO: 972715 - RNA, 19 nt, Artificial Sequence
  Description of Artificial Sequence: Synthetic oligonucleotide
agcagggugacauauccaa

SEQ ID NO: 972716 - RNA, 19 nt, Artificial Sequence
  Description of Artificial Sequence: Synthetic oligonucleotide
gaggugaaaacuaaagucu

SEQ ID NO: 972717 - RNA, 19 nt, Artificial Sequence
  Description of Artificial Sequence: Synthetic oligonucleotide
ucaugauagcagaucgcac

SEQ ID NO: 972718 - RNA, 19 nt, Artificial Sequence
  Description of Artificial Sequence: Synthetic oligonucleotide
agcguaucccuccauuuug

SEQ ID NO: 972719 - RNA, 19 nt, Artificial Sequence
  Description of Artificial Sequence: Synthetic oligonucleotide
gauuuuacuucccgacuca

SEQ ID NO: 972720 - RNA, 19 nt, Artificial Sequence
  Description of Artificial Sequence: Synthetic oligonucleotide
acccauuguuguuagaaau

SEQ ID NO: 972721 - RNA, 19 nt, Artificial Sequence
  Description of Artificial Sequence: Synthetic oligonucleotide
gcagaucgcacacacgucg

SEQ ID NO: 972722 - RNA, 19 nt, Artificial Sequence
  Description of Artificial Sequence: Synthetic oligonucleotide
uuauuucaggaagugaauu

SEQ ID NO: 972723 - RNA, 19 nt, Artificial Sequence
  Description of Artificial Sequence: Synthetic oligonucleotide
cacuguauuuaauaugaga

SEQ ID NO: 972724 - RNA, 19 nt, Artificial Sequence
  Description of Artificial Sequence: Synthetic oligonucleotide
uacgauucaugaaugucuu

SEQ ID NO: 972725 - RNA, 19 nt, Artificial Sequence
  Description of Artificial Sequence: Synthetic oligonucleotide
gcuccgagcacccucaccg

SEQ ID NO: 972726 - RNA, 19 nt, Artificial Sequence
  Description of Artificial Sequence: Synthetic oligonucleotide
gagaaucaaagacgaggug

SEQ ID NO: 972727 - RNA, 19 nt, Artificial Sequence
  Description of Artificial Sequence: Synthetic oligonucleotide
ugcauguaggcacaucaua

SEQ ID NO: 972728 - RNA, 19 nt, Artificial Sequence
  Description of Artificial Sequence: Synthetic oligonucleotide
gagcgaacaaaguagacau

SEQ ID NO: 972729 - RNA, 19 nt, Artificial Sequence
  Description of Artificial Sequence: Synthetic oligonucleotide
agagacauuagcacggggu

SEQ ID NO: 972730 - RNA, 19 nt, Artificial Sequence
  Description of Artificial Sequence: Synthetic oligonucleotide
uaaauucgauaauguuccc

SEQ ID NO: 972731 - RNA, 19 nt, Artificial Sequence
  Description of Artificial Sequence: Synthetic oligonucleotide
aaugggcuauugaagaaau

SEQ ID NO: 972732 - RNA, 19 nt, Artificial Sequence
  Description of Artificial Sequence: Synthetic oligonucleotide
uggagucacacccacuaau

SEQ ID NO: 972733 - RNA, 19 nt, Artificial Sequence
  Description of Artificial Sequence: Synthetic oligonucleotide
aaaugccgcuuuaaucggg

SEQ ID NO: 972734 - RNA, 19 nt, Artificial Sequence
  Description of Artificial Sequence: Synthetic oligonucleotide
aaacaacacaggugcgaca

SEQ ID NO: 972735 - RNA, 19 nt, Artificial Sequence
  Description of Artificial Sequence: Synthetic oligonucleotide
ggaguaauaaaaccacuuc

SEQ ID NO: 972736 - RNA, 19 nt, Artificial Sequence
  Description of Artificial Sequence: Synthetic oligonucleotide
agcugugauccuuguuagc

SEQ ID NO: 972737 - RNA, 19 nt, Artificial Sequence
  Description of Artificial Sequence: Synthetic oligonucleotide
uuugggugaacugaauuuu

SEQ ID NO: 972738 - RNA, 19 nt, Artificial Sequence
  Description of Artificial Sequence: Synthetic oligonucleotide
ucgccuauuucuugcaagu

SEQ ID NO: 972739 - RNA, 19 nt, Artificial Sequence
  Description of Artificial Sequence: Synthetic oligonucleotide
uucuacgauucaugaaugu

SEQ ID NO: 972740 - RNA, 19 nt, Artificial Sequence
  Description of Artificial Sequence: Synthetic oligonucleotide
uugaauguacagccauuuc

SEQ ID NO: 972741 - RNA, 19 nt, Artificial Sequence
  Description of Artificial Sequence: Synthetic oligonucleotide
aggugcgacaaagccaagc

SEQ ID NO: 972742 - RNA, 19 nt, Artificial Sequence
  Description of Artificial Sequence: Synthetic oligonucleotide
aagccgauuacaggaacca

SEQ ID NO: 972743 - RNA, 19 nt, Artificial Sequence
  Description of Artificial Sequence: Synthetic oligonucleotide
aucggggucaccaugaaau

SEQ ID NO: 972744 - RNA, 19 nt, Artificial Sequence
  Description of Artificial Sequence: Synthetic oligonucleotide
acucaugauagcagaucgc

SEQ ID NO: 972745 - RNA, 19 nt, Artificial Sequence
  Description of Artificial Sequence: Synthetic oligonucleotide
gacgaugagugccauccac

SEQ ID NO: 972746 - RNA, 19 nt, Artificial Sequence
  Description of Artificial Sequence: Synthetic oligonucleotide
ugagagacauuagcacggg

SEQ ID NO: 972747 - RNA, 19 nt, Artificial Sequence
  Description of Artificial Sequence: Synthetic oligonucleotide
uuagugcauagugaugcca

SEQ ID NO: 972748 - RNA, 19 nt, Artificial Sequence
  Description of Artificial Sequence: Synthetic oligonucleotide
uaguaacuguaauccauaa

SEQ ID NO: 972749 - RNA, 19 nt, Artificial Sequence
  Description of Artificial Sequence: Synthetic oligonucleotide
ugcguuugugcuugguuac

SEQ ID NO: 972750 - RNA, 19 nt, Artificial Sequence
  Description of Artificial Sequence: Synthetic oligonucleotide
ucccaaacauuaugacucc

SEQ ID NO: 972751 - RNA, 19 nt, Artificial Sequence
  Description of Artificial Sequence: Synthetic oligonucleotide
ggugcgacaaagccaagcc

SEQ ID NO: 972752 - RNA, 19 nt, Artificial Sequence
  Description of Artificial Sequence: Synthetic oligonucleotide
gucgccuauuucuugcaag

SEQ ID NO: 972753 - RNA, 19 nt, Artificial Sequence
  Description of Artificial Sequence: Synthetic oligonucleotide
agauaccucaaugauuagu

SEQ ID NO: 972754 - RNA, 19 nt, Artificial Sequence
  Description of Artificial Sequence: Synthetic oligonucleotide
ugcaggacgaugagugcca

SEQ ID NO: 972755 - RNA, 19 nt, Artificial Sequence
  Description of Artificial Sequence: Synthetic oligonucleotide
uugcacggugucauccggg

SEQ ID NO: 972756 - RNA, 19 nt, Artificial Sequence
  Description of Artificial Sequence: Synthetic oligonucleotide
agacacuaucaccuucaag

SEQ ID NO: 972757 - RNA, 19 nt, Artificial Sequence
  Description of Artificial Sequence: Synthetic oligonucleotide
guaauaaaaccacuucagu

SEQ ID NO: 972758 - RNA, 19 nt, Artificial Sequence
  Description of Artificial Sequence: Synthetic oligonucleotide
guagauggacuggaucugg

SEQ ID NO: 972759 - RNA, 19 nt, Artificial Sequence
  Description of Artificial Sequence: Synthetic oligonucleotide
accucaaugauuaguaaau

SEQ ID NO: 972760 - RNA, 19 nt, Artificial Sequence
  Description of Artificial Sequence: Synthetic oligonucleotide
cuacgauucaugaaugucu

SEQ ID NO: 972761 - RNA, 19 nt, Artificial Sequence
  Description of Artificial Sequence: Synthetic oligonucleotide
cacgucgccuauuucuugc

SEQ ID NO: 972762 - RNA, 19 nt, Artificial Sequence
  Description of Artificial Sequence: Synthetic oligonucleotide
acacgugggaggcacugag

SEQ ID NO: 972763 - RNA, 19 nt, Artificial Sequence
  Description of Artificial Sequence: Synthetic oligonucleotide
cacuaucaccuucaagcag

SEQ ID NO: 972764 - RNA, 19 nt, Artificial Sequence
  Description of Artificial Sequence: Synthetic oligonucleotide
cgaggugaaaacuaaaguc

SEQ ID NO: 972765 - RNA, 19 nt, Artificial Sequence
  Description of Artificial Sequence: Synthetic oligonucleotide
ugaagcguaucccuccauu

SEQ ID NO: 972766 - RNA, 19 nt, Artificial Sequence
  Description of Artificial Sequence: Synthetic oligonucleotide
cauuaguaacuguaaucca

SEQ ID NO: 972767 - RNA, 19 nt, Artificial Sequence
  Description of Artificial Sequence: Synthetic oligonucleotide
aagucucucucauguguaa

SEQ ID NO: 972768 - RNA, 19 nt, Artificial Sequence
  Description of Artificial Sequence: Synthetic oligonucleotide
uccgaaggcagagugcgug

SEQ ID NO: 972769 - RNA, 19 nt, Artificial Sequence
  Description of Artificial Sequence: Synthetic oligonucleotide
aagcguaucccuccauuuu

SEQ ID NO: 972770 - RNA, 19 nt, Artificial Sequence
  Description of Artificial Sequence: Synthetic oligonucleotide
uccgggaaacgaauccucu

SEQ ID NO: 972771 - RNA, 19 nt, Artificial Sequence
  Description of Artificial Sequence: Synthetic oligonucleotide
uagaacagucaguguggag

SEQ ID NO: 972772 - RNA, 19 nt, Artificial Sequence
  Description of Artificial Sequence: Synthetic oligonucleotide
aagacgaggugaaaacuaa

SEQ ID NO: 972773 - RNA, 19 nt, Artificial Sequence
  Description of Artificial Sequence: Synthetic oligonucleotide
uaccguguggaguaauaaa

SEQ ID NO: 972774 - RNA, 19 nt, Artificial Sequence
  Description of Artificial Sequence: Synthetic oligonucleotide
agauugcaaaugagguccc

SEQ ID NO: 972775 - RNA, 19 nt, Artificial Sequence
  Description of Artificial Sequence: Synthetic oligonucleotide
ugauuaguaaaugccgcuu

SEQ ID NO: 972776 - RNA, 19 nt, Artificial Sequence
  Description of Artificial Sequence: Synthetic oligonucleotide
guugcacggugucauccgg

SEQ ID NO: 972777 - RNA, 19 nt, Artificial Sequence
  Description of Artificial Sequence: Synthetic oligonucleotide
acgauucaugaaugucuuc

SEQ ID NO: 972778 - RNA, 19 nt, Artificial Sequence
  Description of Artificial Sequence: Synthetic oligonucleotide
cucaugauagcagaucgca

SEQ ID NO: 972779 - RNA, 19 nt, Artificial Sequence
  Description of Artificial Sequence: Synthetic oligonucleotide
uuagcacggggucugucau

SEQ ID NO: 972780 - RNA, 19 nt, Artificial Sequence
  Description of Artificial Sequence: Synthetic oligonucleotide
cauguaggcacaucauaca

SEQ ID NO: 972781 - RNA, 19 nt, Artificial Sequence
  Description of Artificial Sequence: Synthetic oligonucleotide
auacaagcccggauuuuac

SEQ ID NO: 972782 - RNA, 19 nt, Artificial Sequence
  Description of Artificial Sequence: Synthetic oligonucleotide
gacccgaaggauguccggg

SEQ ID NO: 972783 - RNA, 19 nt, Artificial Sequence
  Description of Artificial Sequence: Synthetic oligonucleotide
auccaaugaaggccaauau

SEQ ID NO: 972784 - RNA, 19 nt, Artificial Sequence
  Description of Artificial Sequence: Synthetic oligonucleotide
uggagcgaacaaaguagac

SEQ ID NO: 972785 - RNA, 19 nt, Artificial Sequence
  Description of Artificial Sequence: Synthetic oligonucleotide
acaagcccggauuuuacuu

SEQ ID NO: 972786 - RNA, 19 nt, Artificial Sequence
  Description of Artificial Sequence: Synthetic oligonucleotide
acaugggacaagugucuug

SEQ ID NO: 972787 - RNA, 19 nt, Artificial Sequence
  Description of Artificial Sequence: Synthetic oligonucleotide
gucucucucgcuccgagca

SEQ ID NO: 972788 - RNA, 19 nt, Artificial Sequence
  Description of Artificial Sequence: Synthetic oligonucleotide
aaucggggucaccaugaaa

SEQ ID NO: 972789 - RNA, 19 nt, Artificial Sequence
  Description of Artificial Sequence: Synthetic oligonucleotide
agaggacauuguaguagcc

SEQ ID NO: 972790 - RNA, 19 nt, Artificial Sequence
  Description of Artificial Sequence: Synthetic oligonucleotide
cacggggucugucaucccg

SEQ ID NO: 972791 - RNA, 19 nt, Artificial Sequence
  Description of Artificial Sequence: Synthetic oligonucleotide
guaaugguugcacgguguc

SEQ ID NO: 972792 - RNA, 19 nt, Artificial Sequence
  Description of Artificial Sequence: Synthetic oligonucleotide
cagauguuguaaacucaug

SEQ ID NO: 972793 - RNA, 19 nt, Artificial Sequence
  Description of Artificial Sequence: Synthetic oligonucleotide
auaccucaaugauuaguaa

SEQ ID NO: 972794 - RNA, 19 nt, Artificial Sequence
  Description of Artificial Sequence: Synthetic oligonucleotide
accguguggaguaauaaaa

SEQ ID NO: 972795 - RNA, 19 nt, Artificial Sequence
  Description of Artificial Sequence: Synthetic oligonucleotide
ccauguauuuagugcauag

SEQ ID NO: 972796 - RNA, 19 nt, Artificial Sequence
  Description of Artificial Sequence: Synthetic oligonucleotide
cacuuaagccagucugaag

SEQ ID NO: 972797 - RNA, 19 nt, Artificial Sequence
  Description of Artificial Sequence: Synthetic oligonucleotide
aguaaugguugcacggugu

SEQ ID NO: 972798 - RNA, 19 nt, Artificial Sequence
  Description of Artificial Sequence: Synthetic oligonucleotide
ggacauaacugaguaaaac

SEQ ID NO: 972799 - RNA, 19 nt, Artificial Sequence
  Description of Artificial Sequence: Synthetic oligonucleotide
uguccgggaaacgaauccu

SEQ ID NO: 972800 - RNA, 19 nt, Artificial Sequence
  Description of Artificial Sequence: Synthetic oligonucleotide
ugccgcuuuaaucgggguc

SEQ ID NO: 972801 - RNA, 19 nt, Artificial Sequence
  Description of Artificial Sequence: Synthetic oligonucleotide
uccgagcacccucaccgcc

SEQ ID NO: 972802 - RNA, 19 nt, Artificial Sequence
  Description of Artificial Sequence: Synthetic oligonucleotide
ucggggucaccaugaaaug

SEQ ID NO: 972803 - RNA, 19 nt, Artificial Sequence
  Description of Artificial Sequence: Synthetic oligonucleotide
ggugacauauccaauccca

SEQ ID NO: 972804 - RNA, 19 nt, Artificial Sequence
  Description of Artificial Sequence: Synthetic oligonucleotide
uaaugguugcacgguguca

SEQ ID NO: 972805 - RNA, 19 nt, Artificial Sequence
  Description of Artificial Sequence: Synthetic oligonucleotide
uggcgugaagcguaucccu

SEQ ID NO: 972806 - RNA, 19 nt, Artificial Sequence
  Description of Artificial Sequence: Synthetic oligonucleotide
cagaucgcacacacgucgc

SEQ ID NO: 972807 - RNA, 19 nt, Artificial Sequence
  Description of Artificial Sequence: Synthetic oligonucleotide
gugcauagugaugccagag

SEQ ID NO: 972808 - RNA, 19 nt, Artificial Sequence
  Description of Artificial Sequence: Synthetic oligonucleotide
uaucgucuucgauguacac

SEQ ID NO: 972809 - RNA, 19 nt, Artificial Sequence
  Description of Artificial Sequence: Synthetic oligonucleotide
caugggacaagugucuuga

SEQ ID NO: 972810 - RNA, 19 nt, Artificial Sequence
  Description of Artificial Sequence: Synthetic oligonucleotide
cacaggugcgacaaagcca

SEQ ID NO: 972811 - RNA, 19 nt, Artificial Sequence
  Description of Artificial Sequence: Synthetic oligonucleotide
aagaaaugacagcgcucau

SEQ ID NO: 972812 - RNA, 19 nt, Artificial Sequence
  Description of Artificial Sequence: Synthetic oligonucleotide
agcacucacaguaacggaa

SEQ ID NO: 972813 - RNA, 19 nt, Artificial Sequence
  Description of Artificial Sequence: Synthetic oligonucleotide
gcgaauaagccucucuuca

SEQ ID NO: 972814 - RNA, 19 nt, Artificial Sequence
  Description of Artificial Sequence: Synthetic oligonucleotide
uugcaaguggcucccuuuu

SEQ ID NO: 972815 - RNA, 19 nt, Artificial Sequence
  Description of Artificial Sequence: Synthetic oligonucleotide
uguuagccagaagacccga

SEQ ID NO: 972816 - RNA, 19 nt, Artificial Sequence
  Description of Artificial Sequence: Synthetic oligonucleotide
cagagagggccccuuccgg

SEQ ID NO: 972817 - RNA, 19 nt, Artificial Sequence
  Description of Artificial Sequence: Synthetic oligonucleotide
gcaguucuacgauucauga

SEQ ID NO: 972818 - RNA, 19 nt, Artificial Sequence
  Description of Artificial Sequence: Synthetic oligonucleotide
auaucgucuucgauguaca

SEQ ID NO: 972819 - RNA, 19 nt, Artificial Sequence
  Description of Artificial Sequence: Synthetic oligonucleotide
acuaaugaucagauugcaa

SEQ ID NO: 972820 - RNA, 19 nt, Artificial Sequence
  Description of Artificial Sequence: Synthetic oligonucleotide
auuaagccgauuacaggaa

SEQ ID NO: 972821 - RNA, 19 nt, Artificial Sequence
  Description of Artificial Sequence: Synthetic oligonucleotide
gccgauuacaggaaccaag

SEQ ID NO: 972822 - RNA, 19 nt, Artificial Sequence
  Description of Artificial Sequence: Synthetic oligonucleotide
acagcgcucaugccuagaa

SEQ ID NO: 972823 - RNA, 19 nt, Artificial Sequence
  Description of Artificial Sequence: Synthetic oligonucleotide
ggagcgaacaaaguagaca

SEQ ID NO: 972824 - RNA, 19 nt, Artificial Sequence
  Description of Artificial Sequence: Synthetic oligonucleotide
ucucucgcuccgagcaccc

SEQ ID NO: 972825 - RNA, 19 nt, Artificial Sequence
  Description of Artificial Sequence: Synthetic oligonucleotide
cuggcgugaagcguauccc

SEQ ID NO: 972826 - RNA, 19 nt, Artificial Sequence
  Description of Artificial Sequence: Synthetic oligonucleotide
augguugcacggugucauc

SEQ ID NO: 972827 - RNA, 19 nt, Artificial Sequence
  Description of Artificial Sequence: Synthetic oligonucleotide
guguaauggcagcucugug

SEQ ID NO: 972828 - RNA, 19 nt, Artificial Sequence
  Description of Artificial Sequence: Synthetic oligonucleotide
ucuugcaaguggcucccuu

SEQ ID NO: 972829 - RNA, 19 nt, Artificial Sequence
  Description of Artificial Sequence: Synthetic oligonucleotide
ugauagcagaucgcacaca

SEQ ID NO: 972830 - RNA, 19 nt, Artificial Sequence
  Description of Artificial Sequence: Synthetic oligonucleotide
uccgggcagauguuguaaa

SEQ ID NO: 972831 - RNA, 19 nt, Artificial Sequence
  Description of Artificial Sequence: Synthetic oligonucleotide
ccggauuuuacuucccgac

SEQ ID NO: 972832 - RNA, 19 nt, Artificial Sequence
  Description of Artificial Sequence: Synthetic oligonucleotide
auccauaaauccgguacau

SEQ ID NO: 972833 - RNA, 19 nt, Artificial Sequence
  Description of Artificial Sequence: Synthetic oligonucleotide
acucacaguaacggaaaau

SEQ ID NO: 972834 - RNA, 19 nt, Artificial Sequence
  Description of Artificial Sequence: Synthetic oligonucleotide
cugcguuugugcuugguua

SEQ ID NO: 972835 - RNA, 19 nt, Artificial Sequence
  Description of Artificial Sequence: Synthetic oligonucleotide
aacagucaguguggaguca

SEQ ID NO: 972836 - RNA, 19 nt, Artificial Sequence
  Description of Artificial Sequence: Synthetic oligonucleotide
auaccguguggaguaauaa

SEQ ID NO: 972837 - RNA, 19 nt, Artificial Sequence
  Description of Artificial Sequence: Synthetic oligonucleotide
cugugauccuuguuagcca

SEQ ID NO: 972838 - RNA, 19 nt, Artificial Sequence
  Description of Artificial Sequence: Synthetic oligonucleotide
ucucucucgcuccgagcac

SEQ ID NO: 972839 - RNA, 19 nt, Artificial Sequence
  Description of Artificial Sequence: Synthetic oligonucleotide
ccuuguuagccagaagacc

SEQ ID NO: 972840 - RNA, 19 nt, Artificial Sequence
  Description of Artificial Sequence: Synthetic oligonucleotide
uauaggccccauucccaaa

SEQ ID NO: 972841 - RNA, 19 nt, Artificial Sequence
  Description of Artificial Sequence: Synthetic oligonucleotide
ugcaaguggcucccuuuua

SEQ ID NO: 972842 - RNA, 19 nt, Artificial Sequence
  Description of Artificial Sequence: Synthetic oligonucleotide
gaauuauccuugauaucgu

SEQ ID NO: 972843 - RNA, 19 nt, Artificial Sequence
  Description of Artificial Sequence: Synthetic oligonucleotide
acccgaaggauguccggga

SEQ ID NO: 972844 - RNA, 19 nt, Artificial Sequence
  Description of Artificial Sequence: Synthetic oligonucleotide
ccguguggaguaauaaaac

SEQ ID NO: 972845 - RNA, 19 nt, Artificial Sequence
  Description of Artificial Sequence: Synthetic oligonucleotide
agcagaucgcacacacguc

SEQ ID NO: 972846 - RNA, 19 nt, Artificial Sequence
  Description of Artificial Sequence: Synthetic oligonucleotide
ugccuagaacagucagugu

SEQ ID NO: 972847 - RNA, 19 nt, Artificial Sequence
  Description of Artificial Sequence: Synthetic oligonucleotide
agcagcgucuucucuuaaa

SEQ ID NO: 972848 - RNA, 19 nt, Artificial Sequence
  Description of Artificial Sequence: Synthetic oligonucleotide
guggagcgaacaaaguaga

SEQ ID NO: 972849 - RNA, 19 nt, Artificial Sequence
  Description of Artificial Sequence: Synthetic oligonucleotide
ugauuuucauugggugcaa

SEQ ID NO: 972850 - RNA, 19 nt, Artificial Sequence
  Description of Artificial Sequence: Synthetic oligonucleotide
auccaaucccaaaggucag

SEQ ID NO: 972851 - RNA, 19 nt, Artificial Sequence
  Description of Artificial Sequence: Synthetic oligonucleotide
gaagcguaucccuccauuu

SEQ ID NO: 972852 - RNA, 19 nt, Artificial Sequence
  Description of Artificial Sequence: Synthetic oligonucleotide
acgaauccucuuccaugug

SEQ ID NO: 972853 - RNA, 19 nt, Artificial Sequence
  Description of Artificial Sequence: Synthetic oligonucleotide
caucauacaagcccggauu

SEQ ID NO: 972854 - RNA, 19 nt, Artificial Sequence
  Description of Artificial Sequence: Synthetic oligonucleotide
ugacagcgcucaugccuag

SEQ ID NO: 972855 - RNA, 19 nt, Artificial Sequence
  Description of Artificial Sequence: Synthetic oligonucleotide
ggcacauguuucuacuuaa

SEQ ID NO: 972856 - RNA, 19 nt, Artificial Sequence
  Description of Artificial Sequence: Synthetic oligonucleotide
ccgauuacaggaaccaaga

SEQ ID NO: 972857 - RNA, 19 nt, Artificial Sequence
  Description of Artificial Sequence: Synthetic oligonucleotide
cauacaagcccggauuuua

SEQ ID NO: 972858 - RNA, 19 nt, Artificial Sequence
  Description of Artificial Sequence: Synthetic oligonucleotide
aucccguggaugaaaugca

SEQ ID NO: 972859 - RNA, 19 nt, Artificial Sequence
  Description of Artificial Sequence: Synthetic oligonucleotide
caguuucacugccaagaca

SEQ ID NO: 972860 - RNA, 19 nt, Artificial Sequence
  Description of Artificial Sequence: Synthetic oligonucleotide
guaucccuccauuuugggu

SEQ ID NO: 972861 - RNA, 19 nt, Artificial Sequence
  Description of Artificial Sequence: Synthetic oligonucleotide
agcccacuuaagccagucu

SEQ ID NO: 972862 - RNA, 19 nt, Artificial Sequence
  Description of Artificial Sequence: Synthetic oligonucleotide
ugauccaaugaaggccaau

SEQ ID NO: 972863 - RNA, 19 nt, Artificial Sequence
  Description of Artificial Sequence: Synthetic oligonucleotide
cuuaaagcuuccucuggau

SEQ ID NO: 972864 - RNA, 19 nt, Artificial Sequence
  Description of Artificial Sequence: Synthetic oligonucleotide
cauaccguguggaguaaua

SEQ ID NO: 972865 - RNA, 19 nt, Artificial Sequence
  Description of Artificial Sequence: Synthetic oligonucleotide
aacauaccguguggaguaa

SEQ ID NO: 972866 - RNA, 19 nt, Artificial Sequence
  Description of Artificial Sequence: Synthetic oligonucleotide
uuccgaaggcagagugcgu

SEQ ID NO: 972867 - RNA, 19 nt, Artificial Sequence
  Description of Artificial Sequence: Synthetic oligonucleotide
ggacugcaguuaauaaaag

SEQ ID NO: 972868 - RNA, 19 nt, Artificial Sequence
  Description of Artificial Sequence: Synthetic oligonucleotide
agucucucucauguguaau

SEQ ID NO: 972869 - RNA, 19 nt, Artificial Sequence
  Description of Artificial Sequence: Synthetic oligonucleotide
caguucuacgauucaugaa

SEQ ID NO: 972870 - RNA, 19 nt, Artificial Sequence
  Description of Artificial Sequence: Synthetic oligonucleotide
gcgugaagcguaucccucc

SEQ ID NO: 972871 - RNA, 19 nt, Artificial Sequence
  Description of Artificial Sequence: Synthetic oligonucleotide
ccucguucaguucuugguc

SEQ ID NO: 972872 - RNA, 19 nt, Artificial Sequence
  Description of Artificial Sequence: Synthetic oligonucleotide
aggacauaacugaguaaaa

SEQ ID NO: 972873 - RNA, 19 nt, Artificial Sequence
  Description of Artificial Sequence: Synthetic oligonucleotide
gcccggauuuuacuucccg

SEQ ID NO: 972874 - RNA, 19 nt, Artificial Sequence
  Description of Artificial Sequence: Synthetic oligonucleotide
ccucaaugauuaguaaaug

SEQ ID NO: 972875 - RNA, 19 nt, Artificial Sequence
  Description of Artificial Sequence: Synthetic oligonucleotide
gguauaggccccauuccca

SEQ ID NO: 972876 - RNA, 19 nt, Artificial Sequence
  Description of Artificial Sequence: Synthetic oligonucleotide
gcguaucccuccauuuugg

SEQ ID NO: 972877 - RNA, 19 nt, Artificial Sequence
  Description of Artificial Sequence: Synthetic oligonucleotide
ccaaguaaugggcuauuga

SEQ ID NO: 972878 - RNA, 19 nt, Artificial Sequence
  Description of Artificial Sequence: Synthetic oligonucleotide
augggcuauugaagaaaug

SEQ ID NO: 972879 - RNA, 19 nt, Artificial Sequence
  Description of Artificial Sequence: Synthetic oligonucleotide
ugucauccgggcagauguu

SEQ ID NO: 972880 - RNA, 19 nt, Artificial Sequence
  Description of Artificial Sequence: Synthetic oligonucleotide
cagcgcucaugccuagaac

SEQ ID NO: 972881 - RNA, 19 nt, Artificial Sequence
  Description of Artificial Sequence: Synthetic oligonucleotide
cuugaauguacagccauuu

SEQ ID NO: 972882 - RNA, 19 nt, Artificial Sequence
  Description of Artificial Sequence: Synthetic oligonucleotide
cucgcuccgagcacccuca

SEQ ID NO: 972883 - RNA, 19 nt, Artificial Sequence
  Description of Artificial Sequence: Synthetic oligonucleotide
agacgaggugaaaacuaaa

SEQ ID NO: 972884 - RNA, 19 nt, Artificial Sequence
  Description of Artificial Sequence: Synthetic oligonucleotide
acaacacaggugcgacaaa

SEQ ID NO: 972885 - RNA, 19 nt, Artificial Sequence
  Description of Artificial Sequence: Synthetic oligonucleotide
gugaugccagaggacauaa

SEQ ID NO: 972886 - RNA, 19 nt, Artificial Sequence
  Description of Artificial Sequence: Synthetic oligonucleotide
gccgucaaucaugaagagc

SEQ ID NO: 972887 - RNA, 19 nt, Artificial Sequence
  Description of Artificial Sequence: Synthetic oligonucleotide
guggaguaauaaaaccacu

SEQ ID NO: 972888 - RNA, 19 nt, Artificial Sequence
  Description of Artificial Sequence: Synthetic oligonucleotide
cacacacgucgccuauuuc

SEQ ID NO: 972889 - RNA, 19 nt, Artificial Sequence
  Description of Artificial Sequence: Synthetic oligonucleotide
gcaaacaaccauguauuua

SEQ ID NO: 972890 - RNA, 19 nt, Artificial Sequence
  Description of Artificial Sequence: Synthetic oligonucleotide
guccgggaaacgaauccuc

SEQ ID NO: 972891 - RNA, 19 nt, Artificial Sequence
  Description of Artificial Sequence: Synthetic oligonucleotide
uaauggcagcucugugauu

SEQ ID NO: 972892 - RNA, 19 nt, Artificial Sequence
  Description of Artificial Sequence: Synthetic oligonucleotide
ccgaaggcagagugcgugg

SEQ ID NO: 972893 - RNA, 19 nt, Artificial Sequence
  Description of Artificial Sequence: Synthetic oligonucleotide
cagaaggcugucacugcaa

SEQ ID NO: 972894 - RNA, 19 nt, Artificial Sequence
  Description of Artificial Sequence: Synthetic oligonucleotide
cguaucccuccauuuuggg

SEQ ID NO: 972895 - RNA, 19 nt, Artificial Sequence
  Description of Artificial Sequence: Synthetic oligonucleotide
uagcacggggucugucauc

SEQ ID NO: 972896 - RNA, 19 nt, Artificial Sequence
  Description of Artificial Sequence: Synthetic oligonucleotide
aguagccgucaaucaugaa

SEQ ID NO: 972897 - RNA, 19 nt, Artificial Sequence
  Description of Artificial Sequence: Synthetic oligonucleotide
gcacaucauacaagcccgg

SEQ ID NO: 972898 - RNA, 19 nt, Artificial Sequence
  Description of Artificial Sequence: Synthetic oligonucleotide
cuuuaaucggggucaccau

SEQ ID NO: 972899 - RNA, 19 nt, Artificial Sequence
  Description of Artificial Sequence: Synthetic oligonucleotide
ggaagugaauugauuuucu

SEQ ID NO: 972900 - RNA, 19 nt, Artificial Sequence
  Description of Artificial Sequence: Synthetic oligonucleotide
cccauuguuguuagaaaua

SEQ ID NO: 972901 - RNA, 19 nt, Artificial Sequence
  Description of Artificial Sequence: Synthetic oligonucleotide
agccgauuacaggaaccaa

SEQ ID NO: 972902 - RNA, 19 nt, Artificial Sequence
  Description of Artificial Sequence: Synthetic oligonucleotide
cuugcaaguggcucccuuu

SEQ ID NO: 972903 - RNA, 19 nt, Artificial Sequence
  Description of Artificial Sequence: Synthetic oligonucleotide
caucaugguauaggcccca

SEQ ID NO: 972904 - RNA, 19 nt, Artificial Sequence
  Description of Artificial Sequence: Synthetic oligonucleotide
acggggucugucaucccgu

SEQ ID NO: 972905 - RNA, 19 nt, Artificial Sequence
  Description of Artificial Sequence: Synthetic oligonucleotide
gggucaccaugaaaugcug

SEQ ID NO: 972906 - RNA, 19 nt, Artificial Sequence
  Description of Artificial Sequence: Synthetic oligonucleotide
ggggucaccaugaaaugcu

SEQ ID NO: 972907 - RNA, 19 nt, Artificial Sequence
  Description of Artificial Sequence: Synthetic oligonucleotide
cagcccacuuaagccaguc

SEQ ID NO: 972908 - RNA, 19 nt, Artificial Sequence
  Description of Artificial Sequence: Synthetic oligonucleotide
ugggugcaauaaacccauu

SEQ ID NO: 972909 - RNA, 19 nt, Artificial Sequence
  Description of Artificial Sequence: Synthetic oligonucleotide
acggugucauccgggcaga

SEQ ID NO: 972910 - RNA, 19 nt, Artificial Sequence
  Description of Artificial Sequence: Synthetic oligonucleotide
gagcgcguacacagugaca

SEQ ID NO: 972911 - RNA, 19 nt, Artificial Sequence
  Description of Artificial Sequence: Synthetic oligonucleotide
cauccgggcagauguugua

SEQ ID NO: 972912 - RNA, 19 nt, Artificial Sequence
  Description of Artificial Sequence: Synthetic oligonucleotide
caggugcgacaaagccaag

SEQ ID NO: 972913 - RNA, 19 nt, Artificial Sequence
  Description of Artificial Sequence: Synthetic oligonucleotide
gacagcgcucaugccuaga

SEQ ID NO: 972914 - RNA, 19 nt, Artificial Sequence
  Description of Artificial Sequence: Synthetic oligonucleotide
gcaaguggcucccuuuuau

SEQ ID NO: 972915 - RNA, 19 nt, Artificial Sequence
  Description of Artificial Sequence: Synthetic oligonucleotide
cacacgucgccuauuucuu

SEQ ID NO: 972916 - RNA, 19 nt, Artificial Sequence
  Description of Artificial Sequence: Synthetic oligonucleotide
cccaaguaaugggcuauug

SEQ ID NO: 972917 - RNA, 19 nt, Artificial Sequence
  Description of Artificial Sequence: Synthetic oligonucleotide
guacacagugacagacacu

SEQ ID NO: 972918 - RNA, 19 nt, Artificial Sequence
  Description of Artificial Sequence: Synthetic oligonucleotide
ggacgaugagugccaucca

SEQ ID NO: 972919 - RNA, 19 nt, Artificial Sequence
  Description of Artificial Sequence: Synthetic oligonucleotide
ccgucucucucgcuccgag

SEQ ID NO: 972920 - RNA, 19 nt, Artificial Sequence
  Description of Artificial Sequence: Synthetic oligonucleotide
cgguacauaugccucacua

SEQ ID NO: 972921 - RNA, 19 nt, Artificial Sequence
  Description of Artificial Sequence: Synthetic oligonucleotide
uggucggguccagcagcgu

SEQ ID NO: 972922 - RNA, 19 nt, Artificial Sequence
  Description of Artificial Sequence: Synthetic oligonucleotide
gcugcgcccgugugcugag

SEQ ID NO: 972923 - RNA, 19 nt, Artificial Sequence
  Description of Artificial Sequence: Synthetic oligonucleotide
gccccuuccggagggagca

SEQ ID NO: 972924 - RNA, 19 nt, Artificial Sequence
  Description of Artificial Sequence: Synthetic oligonucleotide
cgucucucucgcuccgagc

SEQ ID NO: 972925 - RNA, 19 nt, Artificial Sequence
  Description of Artificial Sequence: Synthetic oligonucleotide
cagcaguucuacgauucau

SEQ ID NO: 972926 - RNA, 19 nt, Artificial Sequence
  Description of Artificial Sequence: Synthetic oligonucleotide
gugaagcguaucccuccau

SEQ ID NO: 972927 - RNA, 19 nt, Artificial Sequence
  Description of Artificial Sequence: Synthetic oligonucleotide
cgccuauuucuugcaagug

SEQ ID NO: 972928 - RNA, 19 nt, Artificial Sequence
  Description of Artificial Sequence: Synthetic oligonucleotide
ccuccauuuugggugaacu

SEQ ID NO: 972929 - RNA, 19 nt, Artificial Sequence
  Description of Artificial Sequence: Synthetic oligonucleotide
cccaaacauuaugacucca

SEQ ID NO: 972930 - RNA, 19 nt, Artificial Sequence
  Description of Artificial Sequence: Synthetic oligonucleotide
cgugaagcguaucccucca

SEQ ID NO: 972931 - RNA, 19 nt, Artificial Sequence
  Description of Artificial Sequence: Synthetic oligonucleotide
cacuggcgugaagcguauc

SEQ ID NO: 972932 - RNA, 19 nt, Artificial Sequence
  Description of Artificial Sequence: Synthetic oligonucleotide
gcgcguacacagugacaga

SEQ ID NO: 972933 - RNA, 19 nt, Artificial Sequence
  Description of Artificial Sequence: Synthetic oligonucleotide
ccgaaggauguccgggaaa

SEQ ID NO: 972934 - RNA, 19 nt, Artificial Sequence
  Description of Artificial Sequence: Synthetic oligonucleotide
cagcagcgucuucucuuaa

SEQ ID NO: 972935 - RNA, 19 nt, Artificial Sequence
  Description of Artificial Sequence: Synthetic oligonucleotide
cugcgcccgugugcugagc

SEQ ID NO: 972936 - RNA, 19 nt, Artificial Sequence
  Description of Artificial Sequence: Synthetic oligonucleotide
cggauuuuacuucccgacu

SEQ ID NO: 972937 - RNA, 19 nt, Artificial Sequence
  Description of Artificial Sequence: Synthetic oligonucleotide
gcgucuucucuuaaagcuu

SEQ ID NO: 972938 - RNA, 19 nt, Artificial Sequence
  Description of Artificial Sequence: Synthetic oligonucleotide
ggcccaaguaaugggcuau

SEQ ID NO: 972939 - RNA, 19 nt, Artificial Sequence
  Description of Artificial Sequence: Synthetic oligonucleotide
cccuccauuuugggugaac

SEQ ID NO: 972940 - RNA, 19 nt, Artificial Sequence
  Description of Artificial Sequence: Synthetic oligonucleotide
cgcuccgagcacccucacc

SEQ ID NO: 972941 - RNA, 19 nt, Artificial Sequence
  Description of Artificial Sequence: Synthetic oligonucleotide
ccgcuuuaaucggggucac

SEQ ID NO: 972942 - RNA, 19 nt, Artificial Sequence
  Description of Artificial Sequence: Synthetic oligonucleotide
cucugugauuaagccgauu

SEQ ID NO: 972943 - RNA, 19 nt, Artificial Sequence
  Description of Artificial Sequence: Synthetic oligonucleotide
gccaagccgccugucgucu

SEQ ID NO: 972944 - RNA, 19 nt, Artificial Sequence
  Description of Artificial Sequence: Synthetic oligonucleotide
ccgggaaacgaauccucuu

SEQ ID NO: 972945 - RNA, 19 nt, Artificial Sequence
  Description of Artificial Sequence: Synthetic oligonucleotide
ccgucugugcugucacccu

SEQ ID NO: 972946 - RNA, 19 nt, Artificial Sequence
  Description of Artificial Sequence: Synthetic oligonucleotide
cccgugugcugagcgccuc

SEQ ID NO: 972947 - RNA, 19 nt, Artificial Sequence
  Description of Artificial Sequence: Synthetic oligonucleotide
ccauuuccgaaggcagagu

SEQ ID NO: 972948 - RNA, 19 nt, Artificial Sequence
  Description of Artificial Sequence: Synthetic oligonucleotide
cugugcugucacccucguu

SEQ ID NO: 972949 - RNA, 19 nt, Artificial Sequence
  Description of Artificial Sequence: Synthetic oligonucleotide
gcaggacgaugagugccau

SEQ ID NO: 972950 - RNA, 19 nt, Artificial Sequence
  Description of Artificial Sequence: Synthetic oligonucleotide
gcucugugauuaagccgau

SEQ ID NO: 972951 - RNA, 19 nt, Artificial Sequence
  Description of Artificial Sequence: Synthetic oligonucleotide
gcccaaguaaugggcuauu

SEQ ID NO: 972952 - RNA, 19 nt, Artificial Sequence
  Description of Artificial Sequence: Synthetic oligonucleotide
gcccgugugcugagcgccu

SEQ ID NO: 972953 - RNA, 19 nt, Artificial Sequence
  Description of Artificial Sequence: Synthetic oligonucleotide
ccaagccgccugucgucuu

SEQ ID NO: 972954 - RNA, 19 nt, Artificial Sequence
  Description of Artificial Sequence: Synthetic oligonucleotide
aacagugugcgacuguggc

SEQ ID NO: 972955 - RNA, 19 nt, Artificial Sequence
  Description of Artificial Sequence: Synthetic oligonucleotide
ucuucuguaaguaacgccu

SEQ ID NO: 972956 - RNA, 19 nt, Artificial Sequence
  Description of Artificial Sequence: Synthetic oligonucleotide
uucaugacgaggaacagug

SEQ ID NO: 972957 - RNA, 19 nt, Artificial Sequence
  Description of Artificial Sequence: Synthetic oligonucleotide
aaauccgagaucaccagcc

SEQ ID NO: 972958 - RNA, 19 nt, Artificial Sequence
  Description of Artificial Sequence: Synthetic oligonucleotide
aguuucagauucuucaggg

SEQ ID NO: 972959 - RNA, 19 nt, Artificial Sequence
  Description of Artificial Sequence: Synthetic oligonucleotide
agauuugaggucccgaugg

SEQ ID NO: 972960 - RNA, 19 nt, Artificial Sequence
  Description of Artificial Sequence: Synthetic oligonucleotide
agaugcucgccccagaggc

SEQ ID NO: 972961 - RNA, 19 nt, Artificial Sequence
  Description of Artificial Sequence: Synthetic oligonucleotide
aauggacuguccuaucagg

SEQ ID NO: 972962 - RNA, 19 nt, Artificial Sequence
  Description of Artificial Sequence: Synthetic oligonucleotide
guagcuucggcucucaagg

SEQ ID NO: 972963 - RNA, 19 nt, Artificial Sequence
  Description of Artificial Sequence: Synthetic oligonucleotide
cagguaauccuccagacgg

SEQ ID NO: 972964 - RNA, 19 nt, Artificial Sequence
  Description of Artificial Sequence: Synthetic oligonucleotide
ugucgcaccgccauggugg

SEQ ID NO: 972965 - RNA, 19 nt, Artificial Sequence
  Description of Artificial Sequence: Synthetic oligonucleotide
aagucaacuacuguccugg

SEQ ID NO: 972966 - RNA, 19 nt, Artificial Sequence
  Description of Artificial Sequence: Synthetic oligonucleotide
guaaguaacgccuccauac

SEQ ID NO: 972967 - RNA, 19 nt, Artificial Sequence
  Description of Artificial Sequence: Synthetic oligonucleotide
auaccagcuagugaaaggc

SEQ ID NO: 972968 - RNA, 19 nt, Artificial Sequence
  Description of Artificial Sequence: Synthetic oligonucleotide
uaauccuccagacggaagc

SEQ ID NO: 972969 - RNA, 19 nt, Artificial Sequence
  Description of Artificial Sequence: Synthetic oligonucleotide
acgaauugucgcuggaucc

SEQ ID NO: 972970 - RNA, 19 nt, Artificial Sequence
  Description of Artificial Sequence: Synthetic oligonucleotide
uguccuaucagguaauccu

SEQ ID NO: 972971 - RNA, 19 nt, Artificial Sequence
  Description of Artificial Sequence: Synthetic oligonucleotide
accguugccaccgaggucc

SEQ ID NO: 972972 - RNA, 19 nt, Artificial Sequence
  Description of Artificial Sequence: Synthetic oligonucleotide
gaggcuuaagugcagcacg

SEQ ID NO: 972973 - RNA, 19 nt, Artificial Sequence
  Description of Artificial Sequence: Synthetic oligonucleotide
acagaugaagugaaggcgc

SEQ ID NO: 972974 - RNA, 19 nt, Artificial Sequence
  Description of Artificial Sequence: Synthetic oligonucleotide
cugucuugcaucuggaggc

SEQ ID NO: 972975 - RNA, 19 nt, Artificial Sequence
  Description of Artificial Sequence: Synthetic oligonucleotide
uuaagauggcuucacugga

SEQ ID NO: 972976 - RNA, 19 nt, Artificial Sequence
  Description of Artificial Sequence: Synthetic oligonucleotide
aaaacccggaugauguugg

SEQ ID NO: 972977 - RNA, 19 nt, Artificial Sequence
  Description of Artificial Sequence: Synthetic oligonucleotide
uccacgaguauguugucag

SEQ ID NO: 972978 - RNA, 19 nt, Artificial Sequence
  Description of Artificial Sequence: Synthetic oligonucleotide
auuucauaggcgauggcuc

SEQ ID NO: 972979 - RNA, 19 nt, Artificial Sequence
  Description of Artificial Sequence: Synthetic oligonucleotide
agggcuagaagaugcucgc

SEQ ID NO: 972980 - RNA, 19 nt, Artificial Sequence
  Description of Artificial Sequence: Synthetic oligonucleotide
uuagaaggcuaacacacuu

SEQ ID NO: 972981 - RNA, 19 nt, Artificial Sequence
  Description of Artificial Sequence: Synthetic oligonucleotide
aguaacugcaaggucauca

SEQ ID NO: 972982 - RNA, 19 nt, Artificial Sequence
  Description of Artificial Sequence: Synthetic oligonucleotide
cauaccagcuagugaaagg

SEQ ID NO: 972983 - RNA, 19 nt, Artificial Sequence
  Description of Artificial Sequence: Synthetic oligonucleotide
aagaugcucgccccagagg

SEQ ID NO: 972984 - RNA, 19 nt, Artificial Sequence
  Description of Artificial Sequence: Synthetic oligonucleotide
cuugauggcaaagggaaag

SEQ ID NO: 972985 - RNA, 19 nt, Artificial Sequence
  Description of Artificial Sequence: Synthetic oligonucleotide
acgaggaacagugugcgac

SEQ ID NO: 972986 - RNA, 19 nt, Artificial Sequence
  Description of Artificial Sequence: Synthetic oligonucleotide
uuuagaaggcuaacacacu

SEQ ID NO: 972987 - RNA, 19 nt, Artificial Sequence
  Description of Artificial Sequence: Synthetic oligonucleotide
cauacucuccauccaaggc

SEQ ID NO: 972988 - RNA, 19 nt, Artificial Sequence
  Description of Artificial Sequence: Synthetic oligonucleotide
augacgaggaacagugugc

SEQ ID NO: 972989 - RNA, 19 nt, Artificial Sequence
  Description of Artificial Sequence: Synthetic oligonucleotide
auugucgcuggauccgcgc

SEQ ID NO: 972990 - RNA, 19 nt, Artificial Sequence
  Description of Artificial Sequence: Synthetic oligonucleotide
uagaaggcuaacacacuug

SEQ ID NO: 972991 - RNA, 19 nt, Artificial Sequence
  Description of Artificial Sequence: Synthetic oligonucleotide
uaaguaacgccuccauacu

SEQ ID NO: 972992 - RNA, 19 nt, Artificial Sequence
  Description of Artificial Sequence: Synthetic oligonucleotide
uccauacucuccauccaag

SEQ ID NO: 972993 - RNA, 19 nt, Artificial Sequence
  Description of Artificial Sequence: Synthetic oligonucleotide
cuuugggaggacauccggg

SEQ ID NO: 972994 - RNA, 19 nt, Artificial Sequence
  Description of Artificial Sequence: Synthetic oligonucleotide
gaaauccgagaucaccagc

SEQ ID NO: 972995 - RNA, 19 nt, Artificial Sequence
  Description of Artificial Sequence: Synthetic oligonucleotide
ugaaggcgcggaaaacccg

SEQ ID NO: 972996 - RNA, 19 nt, Artificial Sequence
  Description of Artificial Sequence: Synthetic oligonucleotide
ugaagucaacuacuguccu

SEQ ID NO: 972997 - RNA, 19 nt, Artificial Sequence
  Description of Artificial Sequence: Synthetic oligonucleotide
caguuucagauucuucagg

SEQ ID NO: 972998 - RNA, 19 nt, Artificial Sequence
  Description of Artificial Sequence: Synthetic oligonucleotide
gaaaacccggaugauguug

SEQ ID NO: 972999 - RNA, 19 nt, Artificial Sequence
  Description of Artificial Sequence: Synthetic oligonucleotide
gugcucgucagccaggcag

SEQ ID NO: 973000 - RNA, 19 nt, Artificial Sequence
  Description of Artificial Sequence: Synthetic oligonucleotide
ucagauuugaggucccgau

SEQ ID NO: 973001 - RNA, 19 nt, Artificial Sequence
  Description of Artificial Sequence: Synthetic oligonucleotide
acugacuugggcaucucgg

SEQ ID NO: 973002 - RNA, 19 nt, Artificial Sequence
  Description of Artificial Sequence: Synthetic oligonucleotide
cagacggaagccuugccag

SEQ ID NO: 973003 - RNA, 19 nt, Artificial Sequence
  Description of Artificial Sequence: Synthetic oligonucleotide
gaagucaacuacuguccug

SEQ ID NO: 973004 - RNA, 19 nt, Artificial Sequence
  Description of Artificial Sequence: Synthetic oligonucleotide
cugacuugggcaucucggg

SEQ ID NO: 973005 - RNA, 19 nt, Artificial Sequence
  Description of Artificial Sequence: Synthetic oligonucleotide
caggcagcagccgaaaucc

SEQ ID NO: 973006 - RNA, 19 nt, Artificial Sequence
  Description of Artificial Sequence: Synthetic oligonucleotide
aagugaaggcgcggaaaac

SEQ ID NO: 973007 - RNA, 19 nt, Artificial Sequence
  Description of Artificial Sequence: Synthetic oligonucleotide
uguaaguaacgccuccaua

SEQ ID NO: 973008 - RNA, 19 nt, Artificial Sequence
  Description of Artificial Sequence: Synthetic oligonucleotide
gaaggcgcggaaaacccgg

SEQ ID NO: 973009 - RNA, 19 nt, Artificial Sequence
  Description of Artificial Sequence: Synthetic oligonucleotide
aggcuaacacacuuggccu

SEQ ID NO: 973010 - RNA, 19 nt, Artificial Sequence
  Description of Artificial Sequence: Synthetic oligonucleotide
cagaugaagugaaggcgcg

SEQ ID NO: 973011 - RNA, 19 nt, Artificial Sequence
  Description of Artificial Sequence: Synthetic oligonucleotide
agugccucguguccagugg

SEQ ID NO: 973012 - RNA, 19 nt, Artificial Sequence
  Description of Artificial Sequence: Synthetic oligonucleotide
gcuagugaaaggcaacugc

SEQ ID NO: 973013 - RNA, 19 nt, Artificial Sequence
  Description of Artificial Sequence: Synthetic oligonucleotide
aauccgagaucaccagcca

SEQ ID NO: 973014 - RNA, 19 nt, Artificial Sequence
  Description of Artificial Sequence: Synthetic oligonucleotide
gcuuaagauggcuucacug

SEQ ID NO: 973015 - RNA, 19 nt, Artificial Sequence
  Description of Artificial Sequence: Synthetic oligonucleotide
agcgguagcgaucgggaag

SEQ ID NO: 973016 - RNA, 19 nt, Artificial Sequence
  Description of Artificial Sequence: Synthetic oligonucleotide
accgacuggcggaagaagc

SEQ ID NO: 973017 - RNA, 19 nt, Artificial Sequence
  Description of Artificial Sequence: Synthetic oligonucleotide
ugucgcuggauccgcgccg

SEQ ID NO: 973018 - RNA, 19 nt, Artificial Sequence
  Description of Artificial Sequence: Synthetic oligonucleotide
agugugcuccugaagguac

SEQ ID NO: 973019 - RNA, 19 nt, Artificial Sequence
  Description of Artificial Sequence: Synthetic oligonucleotide
gaagugaaggcgcggaaaa

SEQ ID NO: 973020 - RNA, 19 nt, Artificial Sequence
  Description of Artificial Sequence: Synthetic oligonucleotide
gcucauucugcuuaagaug

SEQ ID NO: 973021 - RNA, 19 nt, Artificial Sequence
  Description of Artificial Sequence: Synthetic oligonucleotide
agacccaucacgggacugc

SEQ ID NO: 973022 - RNA, 19 nt, Artificial Sequence
  Description of Artificial Sequence: Synthetic oligonucleotide
agaagcgguagcgaucggg

SEQ ID NO: 973023 - RNA, 19 nt, Artificial Sequence
  Description of Artificial Sequence: Synthetic oligonucleotide
ucccuuugggaggacaucc

SEQ ID NO: 973024 - RNA, 19 nt, Artificial Sequence
  Description of Artificial Sequence: Synthetic oligonucleotide
gaaccugccgagauauucc

SEQ ID NO: 973025 - RNA, 19 nt, Artificial Sequence
  Description of Artificial Sequence: Synthetic oligonucleotide
cagugggucagacaccagc

SEQ ID NO: 973026 - RNA, 19 nt, Artificial Sequence
  Description of Artificial Sequence: Synthetic oligonucleotide
cacgaauugucgcuggauc

SEQ ID NO: 973027 - RNA, 19 nt, Artificial Sequence
  Description of Artificial Sequence: Synthetic oligonucleotide
ugcuuaagauggcuucacu

SEQ ID NO: 973028 - RNA, 19 nt, Artificial Sequence
  Description of Artificial Sequence: Synthetic oligonucleotide
acauaccagcuagugaaag

SEQ ID NO: 973029 - RNA, 19 nt, Artificial Sequence
  Description of Artificial Sequence: Synthetic oligonucleotide
aaccguugccaccgagguc

SEQ ID NO: 973030 - RNA, 19 nt, Artificial Sequence
  Description of Artificial Sequence: Synthetic oligonucleotide
ucucgcuggagcagugacc

SEQ ID NO: 973031 - RNA, 19 nt, Artificial Sequence
  Description of Artificial Sequence: Synthetic oligonucleotide
cagcacaucaggauaguca

SEQ ID NO: 973032 - RNA, 19 nt, Artificial Sequence
  Description of Artificial Sequence: Synthetic oligonucleotide
gaguauguugucagauuug

SEQ ID NO: 973033 - RNA, 19 nt, Artificial Sequence
  Description of Artificial Sequence: Synthetic oligonucleotide
caucuugauggcaaaggga

SEQ ID NO: 973034 - RNA, 19 nt, Artificial Sequence
  Description of Artificial Sequence: Synthetic oligonucleotide
aauugucgcuggauccgcg

SEQ ID NO: 973035 - RNA, 19 nt, Artificial Sequence
  Description of Artificial Sequence: Synthetic oligonucleotide
ugcucgucagccaggcagc

SEQ ID NO: 973036 - RNA, 19 nt, Artificial Sequence
  Description of Artificial Sequence: Synthetic oligonucleotide
ugcggauugcuggaggagc

SEQ ID NO: 973037 - RNA, 19 nt, Artificial Sequence
  Description of Artificial Sequence: Synthetic oligonucleotide
aguaacgccuccauacucu

SEQ ID NO: 973038 - RNA, 19 nt, Artificial Sequence
  Description of Artificial Sequence: Synthetic oligonucleotide
auccgagaucaccagccag

SEQ ID NO: 973039 - RNA, 19 nt, Artificial Sequence
  Description of Artificial Sequence: Synthetic oligonucleotide
cagggaaccguugccaccg

SEQ ID NO: 973040 - RNA, 19 nt, Artificial Sequence
  Description of Artificial Sequence: Synthetic oligonucleotide
guuagccaggaacagcauc

SEQ ID NO: 973041 - RNA, 19 nt, Artificial Sequence
  Description of Artificial Sequence: Synthetic oligonucleotide
aucgggccgggcuuggccg

SEQ ID NO: 973042 - RNA, 19 nt, Artificial Sequence
  Description of Artificial Sequence: Synthetic oligonucleotide
cacagacccaucacgggac

SEQ ID NO: 973043 - RNA, 19 nt, Artificial Sequence
  Description of Artificial Sequence: Synthetic oligonucleotide
agcuucggcucucaaggug

SEQ ID NO: 973044 - RNA, 19 nt, Artificial Sequence
  Description of Artificial Sequence: Synthetic oligonucleotide
ggcuagaagaugcucgccc

SEQ ID NO: 973045 - RNA, 19 nt, Artificial Sequence
  Description of Artificial Sequence: Synthetic oligonucleotide
gguagcuucggcucucaag

SEQ ID NO: 973046 - RNA, 19 nt, Artificial Sequence
  Description of Artificial Sequence: Synthetic oligonucleotide
cuucuguaaguaacgccuc

SEQ ID NO: 973047 - RNA, 19 nt, Artificial Sequence
  Description of Artificial Sequence: Synthetic oligonucleotide
cuaucugcucccuuuggga

SEQ ID NO: 973048 - RNA, 19 nt, Artificial Sequence
  Description of Artificial Sequence: Synthetic oligonucleotide
uggaggaaccugccgagau

SEQ ID NO: 973049 - RNA, 19 nt, Artificial Sequence
  Description of Artificial Sequence: Synthetic oligonucleotide
uuccugguagcuucggcuc

SEQ ID NO: 973050 - RNA, 19 nt, Artificial Sequence
  Description of Artificial Sequence: Synthetic oligonucleotide
aggccacccggcuugcugg

SEQ ID NO: 973051 - RNA, 19 nt, Artificial Sequence
  Description of Artificial Sequence: Synthetic oligonucleotide
agucaacuacuguccuggg

SEQ ID NO: 973052 - RNA, 19 nt, Artificial Sequence
  Description of Artificial Sequence: Synthetic oligonucleotide
gaacagugugcgacugugg

SEQ ID NO: 973053 - RNA, 19 nt, Artificial Sequence
  Description of Artificial Sequence: Synthetic oligonucleotide
gggacugcccuccaggagc

SEQ ID NO: 973054 - RNA, 19 nt, Artificial Sequence
  Description of Artificial Sequence: Synthetic oligonucleotide
caggugucagccuugcuga

SEQ ID NO: 973055 - RNA, 19 nt, Artificial Sequence
  Description of Artificial Sequence: Synthetic oligonucleotide
gaauugucgcuggauccgc

SEQ ID NO: 973056 - RNA, 19 nt, Artificial Sequence
  Description of Artificial Sequence: Synthetic oligonucleotide
uucccaagcccgagaucgg

SEQ ID NO: 973057 - RNA, 19 nt, Artificial Sequence
  Description of Artificial Sequence: Synthetic oligonucleotide
accggaucccgcugccacc

SEQ ID NO: 973058 - RNA, 19 nt, Artificial Sequence
  Description of Artificial Sequence: Synthetic oligonucleotide
gugaaggcgcggaaaaccc

SEQ ID NO: 973059 - RNA, 19 nt, Artificial Sequence
  Description of Artificial Sequence: Synthetic oligonucleotide
uggacuguccuaucaggua

SEQ ID NO: 973060 - RNA, 19 nt, Artificial Sequence
  Description of Artificial Sequence: Synthetic oligonucleotide
agaugaagugaaggcgcgg

SEQ ID NO: 973061 - RNA, 19 nt, Artificial Sequence
  Description of Artificial Sequence: Synthetic oligonucleotide
aggccgaugugcucgucag

SEQ ID NO: 973062 - RNA, 19 nt, Artificial Sequence
  Description of Artificial Sequence: Synthetic oligonucleotide
gaagcgguagcgaucggga

SEQ ID NO: 973063 - RNA, 19 nt, Artificial Sequence
  Description of Artificial Sequence: Synthetic oligonucleotide
cuguccuaucagguaaucc

SEQ ID NO: 973064 - RNA, 19 nt, Artificial Sequence
  Description of Artificial Sequence: Synthetic oligonucleotide
gcuagaagaugcucgcccc

SEQ ID NO: 973065 - RNA, 19 nt, Artificial Sequence
  Description of Artificial Sequence: Synthetic oligonucleotide
cuggguggcagcacaucag

SEQ ID NO: 973066 - RNA, 19 nt, Artificial Sequence
  Description of Artificial Sequence: Synthetic oligonucleotide
agcagccgaaauccgagau

SEQ ID NO: 973067 - RNA, 19 nt, Artificial Sequence
  Description of Artificial Sequence: Synthetic oligonucleotide
uuccacgaguauguuguca

SEQ ID NO: 973068 - RNA, 19 nt, Artificial Sequence
  Description of Artificial Sequence: Synthetic oligonucleotide
gaucgggccgggcuuggcc

SEQ ID NO: 973069 - RNA, 19 nt, Artificial Sequence
  Description of Artificial Sequence: Synthetic oligonucleotide
cacguuugcagccacacgu

SEQ ID NO: 973070 - RNA, 19 nt, Artificial Sequence
  Description of Artificial Sequence: Synthetic oligonucleotide
ccgagguccacauaccagc

SEQ ID NO: 973071 - RNA, 19 nt, Artificial Sequence
  Description of Artificial Sequence: Synthetic oligonucleotide
acgugcagaaggucucuug

SEQ ID NO: 973072 - RNA, 19 nt, Artificial Sequence
  Description of Artificial Sequence: Synthetic oligonucleotide
cacacgugcagaaggucuc

SEQ ID NO: 973073 - RNA, 19 nt, Artificial Sequence
  Description of Artificial Sequence: Synthetic oligonucleotide
cagccgaaauccgagauca

SEQ ID NO: 973074 - RNA, 19 nt, Artificial Sequence
  Description of Artificial Sequence: Synthetic oligonucleotide
ggauuggcaaguccaaaga

SEQ ID NO: 973075 - RNA, 19 nt, Artificial Sequence
  Description of Artificial Sequence: Synthetic oligonucleotide
gugccucguguccaguggg

SEQ ID NO: 973076 - RNA, 19 nt, Artificial Sequence
  Description of Artificial Sequence: Synthetic oligonucleotide
ugccaauggacuguccuau

SEQ ID NO: 973077 - RNA, 19 nt, Artificial Sequence
  Description of Artificial Sequence: Synthetic oligonucleotide
uggcgcggcgaccggaucc

SEQ ID NO: 973078 - RNA, 19 nt, Artificial Sequence
  Description of Artificial Sequence: Synthetic oligonucleotide
ucccaagcccgagaucggg

SEQ ID NO: 973079 - RNA, 19 nt, Artificial Sequence
  Description of Artificial Sequence: Synthetic oligonucleotide
acgaguauguugucagauu

SEQ ID NO: 973080 - RNA, 19 nt, Artificial Sequence
  Description of Artificial Sequence: Synthetic oligonucleotide
acuguccuaucagguaauc

SEQ ID NO: 973081 - RNA, 19 nt, Artificial Sequence
  Description of Artificial Sequence: Synthetic oligonucleotide
agcuagugaaaggcaacug

SEQ ID NO: 973082 - RNA, 19 nt, Artificial Sequence
  Description of Artificial Sequence: Synthetic oligonucleotide
ggcaaguccaaagauuuca

SEQ ID NO: 973083 - RNA, 19 nt, Artificial Sequence
  Description of Artificial Sequence: Synthetic oligonucleotide
uccagacggaagccuugcc

SEQ ID NO: 973084 - RNA, 19 nt, Artificial Sequence
  Description of Artificial Sequence: Synthetic oligonucleotide
uugggaccgccucuggguc

SEQ ID NO: 973085 - RNA, 19 nt, Artificial Sequence
  Description of Artificial Sequence: Synthetic oligonucleotide
cuugcaucuggaggcacug

SEQ ID NO: 973086 - RNA, 19 nt, Artificial Sequence
  Description of Artificial Sequence: Synthetic oligonucleotide
gaccggaucccgcugccac

SEQ ID NO: 973087 - RNA, 19 nt, Artificial Sequence
  Description of Artificial Sequence: Synthetic oligonucleotide
gaaccguugccaccgaggu

SEQ ID NO: 973088 - RNA, 19 nt, Artificial Sequence
  Description of Artificial Sequence: Synthetic oligonucleotide
ccugucagccagcagagug

SEQ ID NO: 973089 - RNA, 19 nt, Artificial Sequence
  Description of Artificial Sequence: Synthetic oligonucleotide
ucuccgcggccccaggcug

SEQ ID NO: 973090 - RNA, 19 nt, Artificial Sequence
  Description of Artificial Sequence: Synthetic oligonucleotide
uacugacgcaggguacagg

SEQ ID NO: 973091 - RNA, 19 nt, Artificial Sequence
  Description of Artificial Sequence: Synthetic oligonucleotide
agcgccucccacuccaggu

SEQ ID NO: 973092 - RNA, 19 nt, Artificial Sequence
  Description of Artificial Sequence: Synthetic oligonucleotide
guaauccuccagacggaag

SEQ ID NO: 973093 - RNA, 19 nt, Artificial Sequence
  Description of Artificial Sequence: Synthetic oligonucleotide
ggaaccguugccaccgagg

SEQ ID NO: 973094 - RNA, 19 nt, Artificial Sequence
  Description of Artificial Sequence: Synthetic oligonucleotide
uccacgcccuccaguaacu

SEQ ID NO: 973095 - RNA, 19 nt, Artificial Sequence
  Description of Artificial Sequence: Synthetic oligonucleotide
aagcgguagcgaucgggaa

SEQ ID NO: 973096 - RNA, 19 nt, Artificial Sequence
  Description of Artificial Sequence: Synthetic oligonucleotide
ugucuugcaucuggaggca

SEQ ID NO: 973097 - RNA, 19 nt, Artificial Sequence
  Description of Artificial Sequence: Synthetic oligonucleotide
agguacugacgcaggguac

SEQ ID NO: 973098 - RNA, 19 nt, Artificial Sequence
  Description of Artificial Sequence: Synthetic oligonucleotide
caacugcaggccgaugugc

SEQ ID NO: 973099 - RNA, 19 nt, Artificial Sequence
  Description of Artificial Sequence: Synthetic oligonucleotide
gcaugguggcuucauacac

SEQ ID NO: 973100 - RNA, 19 nt, Artificial Sequence
  Description of Artificial Sequence: Synthetic oligonucleotide
ucgccccagaggcuuaagu

SEQ ID NO: 973101 - RNA, 19 nt, Artificial Sequence
  Description of Artificial Sequence: Synthetic oligonucleotide
caucacgggacugcccucc

SEQ ID NO: 973102 - RNA, 19 nt, Artificial Sequence
  Description of Artificial Sequence: Synthetic oligonucleotide
guaacgccuccauacucuc

SEQ ID NO: 973103 - RNA, 19 nt, Artificial Sequence
  Description of Artificial Sequence: Synthetic oligonucleotide
aagggauuggcaaguccaa

SEQ ID NO: 973104 - RNA, 19 nt, Artificial Sequence
  Description of Artificial Sequence: Synthetic oligonucleotide
guccuaucagguaauccuc

SEQ ID NO: 973105 - RNA, 19 nt, Artificial Sequence
  Description of Artificial Sequence: Synthetic oligonucleotide
accgagguccacauaccag

SEQ ID NO: 973106 - RNA, 19 nt, Artificial Sequence
  Description of Artificial Sequence: Synthetic oligonucleotide
caggggcacagaugaagug

SEQ ID NO: 973107 - RNA, 19 nt, Artificial Sequence
  Description of Artificial Sequence: Synthetic oligonucleotide
ggucuucuguaaguaacgc

SEQ ID NO: 973108 - RNA, 19 nt, Artificial Sequence
  Description of Artificial Sequence: Synthetic oligonucleotide
ggaaccugccgagauauuc

SEQ ID NO: 973109 - RNA, 19 nt, Artificial Sequence
  Description of Artificial Sequence: Synthetic oligonucleotide
caaggugggcucugccuug

SEQ ID NO: 973110 - RNA, 19 nt, Artificial Sequence
  Description of Artificial Sequence: Synthetic oligonucleotide
caagcugcuugggaccgcc

SEQ ID NO: 973111 - RNA, 19 nt, Artificial Sequence
  Description of Artificial Sequence: Synthetic oligonucleotide
agacggaagccuugccagu

SEQ ID NO: 973112 - RNA, 19 nt, Artificial Sequence
  Description of Artificial Sequence: Synthetic oligonucleotide
gcgguagcgaucgggaagg

SEQ ID NO: 973113 - RNA, 19 nt, Artificial Sequence
  Description of Artificial Sequence: Synthetic oligonucleotide
cuccaguaacugcaagguc

SEQ ID NO: 973114 - RNA, 19 nt, Artificial Sequence
  Description of Artificial Sequence: Synthetic oligonucleotide
caaggucaucaugguagcc

SEQ ID NO: 973115 - RNA, 19 nt, Artificial Sequence
  Description of Artificial Sequence: Synthetic oligonucleotide
cuagaagaugcucgcccca

SEQ ID NO: 973116 - RNA, 19 nt, Artificial Sequence
  Description of Artificial Sequence: Synthetic oligonucleotide
ccgacuggcggaagaagcg

SEQ ID NO: 973117 - RNA, 19 nt, Artificial Sequence
  Description of Artificial Sequence: Synthetic oligonucleotide
accacgaauugucgcugga

SEQ ID NO: 973118 - RNA, 19 nt, Artificial Sequence
  Description of Artificial Sequence: Synthetic oligonucleotide
ggccauagaagggauuggc

SEQ ID NO: 973119 - RNA, 19 nt, Artificial Sequence
  Description of Artificial Sequence: Synthetic oligonucleotide
caggguacagggguaguuc

SEQ ID NO: 973120 - RNA, 19 nt, Artificial Sequence
  Description of Artificial Sequence: Synthetic oligonucleotide
acagacccaucacgggacu

SEQ ID NO: 973121 - RNA, 19 nt, Artificial Sequence
  Description of Artificial Sequence: Synthetic oligonucleotide
gccgaaauccgagaucacc

SEQ ID NO: 973122 - RNA, 19 nt, Artificial Sequence
  Description of Artificial Sequence: Synthetic oligonucleotide
uagcuucggcucucaaggu

SEQ ID NO: 973123 - RNA, 19 nt, Artificial Sequence
  Description of Artificial Sequence: Synthetic oligonucleotide
gccgaugugcucgucagcc

SEQ ID NO: 973124 - RNA, 19 nt, Artificial Sequence
  Description of Artificial Sequence: Synthetic oligonucleotide
ccauagaagggauuggcaa

SEQ ID NO: 973125 - RNA, 19 nt, Artificial Sequence
  Description of Artificial Sequence: Synthetic oligonucleotide
ggcgcggaaaacccggaug

SEQ ID NO: 973126 - RNA, 19 nt, Artificial Sequence
  Description of Artificial Sequence: Synthetic oligonucleotide
acgggacugcccuccagga

SEQ ID NO: 973127 - RNA, 19 nt, Artificial Sequence
  Description of Artificial Sequence: Synthetic oligonucleotide
ugccucguguccagugggu

SEQ ID NO: 973128 - RNA, 19 nt, Artificial Sequence
  Description of Artificial Sequence: Synthetic oligonucleotide
uagccaggaacagcaucug

SEQ ID NO: 973129 - RNA, 19 nt, Artificial Sequence
  Description of Artificial Sequence: Synthetic oligonucleotide
agaguggcugcggauugcu

SEQ ID NO: 973130 - RNA, 19 nt, Artificial Sequence
  Description of Artificial Sequence: Synthetic oligonucleotide
agcagugcccgacccaguu

SEQ ID NO: 973131 - RNA, 19 nt, Artificial Sequence
  Description of Artificial Sequence: Synthetic oligonucleotide
ucggcccagcgccugucgc

SEQ ID NO: 973132 - RNA, 19 nt, Artificial Sequence
  Description of Artificial Sequence: Synthetic oligonucleotide
aggagccagccaaucaucu

SEQ ID NO: 973133 - RNA, 19 nt, Artificial Sequence
  Description of Artificial Sequence: Synthetic oligonucleotide
cuccauacucuccauccaa

SEQ ID NO: 973134 - RNA, 19 nt, Artificial Sequence
  Description of Artificial Sequence: Synthetic oligonucleotide
cgugcagaaggucucuugc

SEQ ID NO: 973135 - RNA, 19 nt, Artificial Sequence
  Description of Artificial Sequence: Synthetic oligonucleotide
ggcaugguggcuucauaca

SEQ ID NO: 973136 - RNA, 19 nt, Artificial Sequence
  Description of Artificial Sequence: Synthetic oligonucleotide
cagugccucguguccagug

SEQ ID NO: 973137 - RNA, 19 nt, Artificial Sequence
  Description of Artificial Sequence: Synthetic oligonucleotide
ugugcucgucagccaggca

SEQ ID NO: 973138 - RNA, 19 nt, Artificial Sequence
  Description of Artificial Sequence: Synthetic oligonucleotide
agcagaguggcugcggauu

SEQ ID NO: 973139 - RNA, 19 nt, Artificial Sequence
  Description of Artificial Sequence: Synthetic oligonucleotide
aggcuuaagugcagcacgu

SEQ ID NO: 973140 - RNA, 19 nt, Artificial Sequence
  Description of Artificial Sequence: Synthetic oligonucleotide
acguuugcagccacacgug

SEQ ID NO: 973141 - RNA, 19 nt, Artificial Sequence
  Description of Artificial Sequence: Synthetic oligonucleotide
uugccaccgagguccacau

SEQ ID NO: 973142 - RNA, 19 nt, Artificial Sequence
  Description of Artificial Sequence: Synthetic oligonucleotide
caaagauuucauaggcgau

SEQ ID NO: 973143 - RNA, 19 nt, Artificial Sequence
  Description of Artificial Sequence: Synthetic oligonucleotide
gguagcgaucgggaagggg

SEQ ID NO: 973144 - RNA, 19 nt, Artificial Sequence
  Description of Artificial Sequence: Synthetic oligonucleotide
gguacagggguaguucuuc

SEQ ID NO: 973145 - RNA, 19 nt, Artificial Sequence
  Description of Artificial Sequence: Synthetic oligonucleotide
guggcugcggauugcugga

SEQ ID NO: 973146 - RNA, 19 nt, Artificial Sequence
  Description of Artificial Sequence: Synthetic oligonucleotide
cuugggaccgccucugggu

SEQ ID NO: 973147 - RNA, 19 nt, Artificial Sequence
  Description of Artificial Sequence: Synthetic oligonucleotide
gcgacuguggcccaggccu

SEQ ID NO: 973148 - RNA, 19 nt, Artificial Sequence
  Description of Artificial Sequence: Synthetic oligonucleotide
gcgcggaaaacccggauga

SEQ ID NO: 973149 - RNA, 19 nt, Artificial Sequence
  Description of Artificial Sequence: Synthetic oligonucleotide
ggcugcggauugcuggagg

SEQ ID NO: 973150 - RNA, 19 nt, Artificial Sequence
  Description of Artificial Sequence: Synthetic oligonucleotide
gguacugacgcaggguaca

SEQ ID NO: 973151 - RNA, 19 nt, Artificial Sequence
  Description of Artificial Sequence: Synthetic oligonucleotide
gcagaguggcugcggauug

SEQ ID NO: 973152 - RNA, 19 nt, Artificial Sequence
  Description of Artificial Sequence: Synthetic oligonucleotide
aucucgggcagcugagcuu

SEQ ID NO: 973153 - RNA, 19 nt, Artificial Sequence
  Description of Artificial Sequence: Synthetic oligonucleotide
cugucgcaccgccauggug

SEQ ID NO: 973154 - RNA, 19 nt, Artificial Sequence
  Description of Artificial Sequence: Synthetic oligonucleotide
caucagccugucagccagc

SEQ ID NO: 973155 - RNA, 19 nt, Artificial Sequence
  Description of Artificial Sequence: Synthetic oligonucleotide
ccugccgagauauuccaca

SEQ ID NO: 973156 - RNA, 19 nt, Artificial Sequence
  Description of Artificial Sequence: Synthetic oligonucleotide
cgaauugucgcuggauccg

SEQ ID NO: 973157 - RNA, 19 nt, Artificial Sequence
  Description of Artificial Sequence: Synthetic oligonucleotide
caccgagguccacauacca

SEQ ID NO: 973158 - RNA, 19 nt, Artificial Sequence
  Description of Artificial Sequence: Synthetic oligonucleotide
gauccgcgccgccagccca

SEQ ID NO: 973159 - RNA, 19 nt, Artificial Sequence
  Description of Artificial Sequence: Synthetic oligonucleotide
cugcggauugcuggaggag

SEQ ID NO: 973160 - RNA, 19 nt, Artificial Sequence
  Description of Artificial Sequence: Synthetic oligonucleotide
cagagcgccucccacucca

SEQ ID NO: 973161 - RNA, 19 nt, Artificial Sequence
  Description of Artificial Sequence: Synthetic oligonucleotide
ugggaccgccucugggucu

SEQ ID NO: 973162 - RNA, 19 nt, Artificial Sequence
  Description of Artificial Sequence: Synthetic oligonucleotide
gucgcaccgccaugguggc

SEQ ID NO: 973163 - RNA, 19 nt, Artificial Sequence
  Description of Artificial Sequence: Synthetic oligonucleotide
cucgcuggagcagugaccu

SEQ ID NO: 973164 - RNA, 19 nt, Artificial Sequence
  Description of Artificial Sequence: Synthetic oligonucleotide
cacauaccagcuagugaaa

SEQ ID NO: 973165 - RNA, 19 nt, Artificial Sequence
  Description of Artificial Sequence: Synthetic oligonucleotide
agguaauccuccagacgga

SEQ ID NO: 973166 - RNA, 19 nt, Artificial Sequence
  Description of Artificial Sequence: Synthetic oligonucleotide
gagaucgggccgggcuugg

SEQ ID NO: 973167 - RNA, 19 nt, Artificial Sequence
  Description of Artificial Sequence: Synthetic oligonucleotide
guguccagugggucagaca

SEQ ID NO: 973168 - RNA, 19 nt, Artificial Sequence
  Description of Artificial Sequence: Synthetic oligonucleotide
ggacugcccuccaggagcg

SEQ ID NO: 973169 - RNA, 19 nt, Artificial Sequence
  Description of Artificial Sequence: Synthetic oligonucleotide
guagccaggcggggacugg

SEQ ID NO: 973170 - RNA, 19 nt, Artificial Sequence
  Description of Artificial Sequence: Synthetic oligonucleotide
acacgugcagaaggucucu

SEQ ID NO: 973171 - RNA, 19 nt, Artificial Sequence
  Description of Artificial Sequence: Synthetic oligonucleotide
caccgacuggcggaagaag

SEQ ID NO: 973172 - RNA, 19 nt, Artificial Sequence
  Description of Artificial Sequence: Synthetic oligonucleotide
uucggcucucaaggugggc

SEQ ID NO: 973173 - RNA, 19 nt, Artificial Sequence
  Description of Artificial Sequence: Synthetic oligonucleotide
guuccacgaguauguuguc

SEQ ID NO: 973174 - RNA, 19 nt, Artificial Sequence
  Description of Artificial Sequence: Synthetic oligonucleotide
gccugucgcaccgccaugg

SEQ ID NO: 973175 - RNA, 19 nt, Artificial Sequence
  Description of Artificial Sequence: Synthetic oligonucleotide
cccgcaccacgaauugucg

SEQ ID NO: 973176 - RNA, 19 nt, Artificial Sequence
  Description of Artificial Sequence: Synthetic oligonucleotide
agccgaaauccgagaucac

SEQ ID NO: 973177 - RNA, 19 nt, Artificial Sequence
  Description of Artificial Sequence: Synthetic oligonucleotide
ugguagcuucggcucucaa

SEQ ID NO: 973178 - RNA, 19 nt, Artificial Sequence
  Description of Artificial Sequence: Synthetic oligonucleotide
gagguccacauaccagcua

SEQ ID NO: 973179 - RNA, 19 nt, Artificial Sequence
  Description of Artificial Sequence: Synthetic oligonucleotide
gcagccgaaauccgagauc

SEQ ID NO: 973180 - RNA, 19 nt, Artificial Sequence
  Description of Artificial Sequence: Synthetic oligonucleotide
ccucgaucagccccagccc

SEQ ID NO: 973181 - RNA, 19 nt, Artificial Sequence
  Description of Artificial Sequence: Synthetic oligonucleotide
aucacgggacugcccucca

SEQ ID NO: 973182 - RNA, 19 nt, Artificial Sequence
  Description of Artificial Sequence: Synthetic oligonucleotide
cuggaggagccagccaauc

SEQ ID NO: 973183 - RNA, 19 nt, Artificial Sequence
  Description of Artificial Sequence: Synthetic oligonucleotide
caugguagccaggcgggga

SEQ ID NO: 973184 - RNA, 19 nt, Artificial Sequence
  Description of Artificial Sequence: Synthetic oligonucleotide
ggaggagccagccaaucau

SEQ ID NO: 973185 - RNA, 19 nt, Artificial Sequence
  Description of Artificial Sequence: Synthetic oligonucleotide
gucgcuggauccgcgccgc

SEQ ID NO: 973186 - RNA, 19 nt, Artificial Sequence
  Description of Artificial Sequence: Synthetic oligonucleotide
ggccgcgaagcgcagcagc

SEQ ID NO: 973187 - RNA, 19 nt, Artificial Sequence
  Description of Artificial Sequence: Synthetic oligonucleotide
cuccgcggccccaggcugc

SEQ ID NO: 973188 - RNA, 19 nt, Artificial Sequence
  Description of Artificial Sequence: Synthetic oligonucleotide
ggcccgggcgcucuccgcg

SEQ ID NO: 973189 - RNA, 19 nt, Artificial Sequence
  Description of Artificial Sequence: Synthetic oligonucleotide
gccgcaagggcccgccccg

SEQ ID NO: 973190 - RNA, 19 nt, Artificial Sequence
  Description of Artificial Sequence: Synthetic oligonucleotide
ccgagaucaccagccaggg

SEQ ID NO: 973191 - RNA, 19 nt, Artificial Sequence
  Description of Artificial Sequence: Synthetic oligonucleotide
caggcugccgcggggccgg

SEQ ID NO: 973192 - RNA, 19 nt, Artificial Sequence
  Description of Artificial Sequence: Synthetic oligonucleotide
cugacaggccgaggcggcc

SEQ ID NO: 973193 - RNA, 19 nt, Artificial Sequence
  Description of Artificial Sequence: Synthetic oligonucleotide
ggcgaccggaucccgcugc

SEQ ID NO: 973194 - RNA, 19 nt, Artificial Sequence
  Description of Artificial Sequence: Synthetic oligonucleotide
cucuggggcccgccgcccg

SEQ ID NO: 973195 - RNA, 19 nt, Artificial Sequence
  Description of Artificial Sequence: Synthetic oligonucleotide
gcggauugcuggaggagcc

SEQ ID NO: 973196 - RNA, 19 nt, Artificial Sequence
  Description of Artificial Sequence: Synthetic oligonucleotide
ccagguuagccaggaacag

SEQ ID NO: 973197 - RNA, 19 nt, Artificial Sequence
  Description of Artificial Sequence: Synthetic oligonucleotide
cccuaucugcucccuuugg

SEQ ID NO: 973198 - RNA, 19 nt, Artificial Sequence
  Description of Artificial Sequence: Synthetic oligonucleotide
ccagacggaagccuugcca

SEQ ID NO: 973199 - RNA, 19 nt, Artificial Sequence
  Description of Artificial Sequence: Synthetic oligonucleotide
aggucucuugcuggccucu

SEQ ID NO: 973200 - RNA, 19 nt, Artificial Sequence
  Description of Artificial Sequence: Synthetic oligonucleotide
cguuugcagccacacgugc

SEQ ID NO: 973201 - RNA, 19 nt, Artificial Sequence
  Description of Artificial Sequence: Synthetic oligonucleotide
aggcgcggaaaacccggau

SEQ ID NO: 973202 - RNA, 19 nt, Artificial Sequence
  Description of Artificial Sequence: Synthetic oligonucleotide
gggaaccguugccaccgag

SEQ ID NO: 973203 - RNA, 19 nt, Artificial Sequence
  Description of Artificial Sequence: Synthetic oligonucleotide
cuggcucauucugcuuaag

SEQ ID NO: 973204 - RNA, 19 nt, Artificial Sequence
  Description of Artificial Sequence: Synthetic oligonucleotide
cucgucagccaggcagcag

SEQ ID NO: 973205 - RNA, 19 nt, Artificial Sequence
  Description of Artificial Sequence: Synthetic oligonucleotide
ucggccgcaagggcccgcc

SEQ ID NO: 973206 - RNA, 19 nt, Artificial Sequence
  Description of Artificial Sequence: Synthetic oligonucleotide
cuguaaguaacgccuccau

SEQ ID NO: 973207 - RNA, 19 nt, Artificial Sequence
  Description of Artificial Sequence: Synthetic oligonucleotide
ccaccgagguccacauacc

SEQ ID NO: 973208 - RNA, 19 nt, Artificial Sequence
  Description of Artificial Sequence: Synthetic oligonucleotide
cccaagcccgagaucgggc

SEQ ID NO: 973209 - RNA, 19 nt, Artificial Sequence
  Description of Artificial Sequence: Synthetic oligonucleotide
ggagugugcuccugaaggu

SEQ ID NO: 973210 - RNA, 19 nt, Artificial Sequence
  Description of Artificial Sequence: Synthetic oligonucleotide
cacgaguauguugucagau

SEQ ID NO: 973211 - RNA, 19 nt, Artificial Sequence
  Description of Artificial Sequence: Synthetic oligonucleotide
cagacccaucacgggacug

SEQ ID NO: 973212 - RNA, 19 nt, Artificial Sequence
  Description of Artificial Sequence: Synthetic oligonucleotide
ccgcaccacgaauugucgc

SEQ ID NO: 973213 - RNA, 19 nt, Artificial Sequence
  Description of Artificial Sequence: Synthetic oligonucleotide
ugcucccuaucugcucccu

SEQ ID NO: 973214 - RNA, 19 nt, Artificial Sequence
  Description of Artificial Sequence: Synthetic oligonucleotide
cagcagccgaaauccgaga

SEQ ID NO: 973215 - RNA, 19 nt, Artificial Sequence
  Description of Artificial Sequence: Synthetic oligonucleotide
gcuuaagugcagcacguuu

SEQ ID NO: 973216 - RNA, 19 nt, Artificial Sequence
  Description of Artificial Sequence: Synthetic oligonucleotide
ccagccaccgacuggcgga

SEQ ID NO: 973217 - RNA, 19 nt, Artificial Sequence
  Description of Artificial Sequence: Synthetic oligonucleotide
ggccgggccuuucccaagc

SEQ ID NO: 973218 - RNA, 19 nt, Artificial Sequence
  Description of Artificial Sequence: Synthetic oligonucleotide
agggaaccguugccaccga

SEQ ID NO: 973219 - RNA, 19 nt, Artificial Sequence
  Description of Artificial Sequence: Synthetic oligonucleotide
cccagccaccgacuggcgg

SEQ ID NO: 973220 - RNA, 19 nt, Artificial Sequence
  Description of Artificial Sequence: Synthetic oligonucleotide
ggaggaaccugccgagaua

SEQ ID NO: 973221 - RNA, 19 nt, Artificial Sequence
  Description of Artificial Sequence: Synthetic oligonucleotide
uggccgcgaagcgcagcag

SEQ ID NO: 973222 - RNA, 19 nt, Artificial Sequence
  Description of Artificial Sequence: Synthetic oligonucleotide
gggcuagaagaugcucgcc

SEQ ID NO: 973223 - RNA, 19 nt, Artificial Sequence
  Description of Artificial Sequence: Synthetic oligonucleotide
ccggaucccgcugccaccg

SEQ ID NO: 973224 - RNA, 19 nt, Artificial Sequence
  Description of Artificial Sequence: Synthetic oligonucleotide
ugguggcgcggcgaccgga

SEQ ID NO: 973225 - RNA, 19 nt, Artificial Sequence
  Description of Artificial Sequence: Synthetic oligonucleotide
gcagcacguuugcagccac

SEQ ID NO: 973226 - RNA, 19 nt, Artificial Sequence
  Description of Artificial Sequence: Synthetic oligonucleotide
ucgcaccgccaugguggcg

SEQ ID NO: 973227 - RNA, 19 nt, Artificial Sequence
  Description of Artificial Sequence: Synthetic oligonucleotide
gcaagggcccgccccgccc

SEQ ID NO: 973228 - RNA, 19 nt, Artificial Sequence
  Description of Artificial Sequence: Synthetic oligonucleotide
gcccuccaguaacugcaag

SEQ ID NO: 973229 - RNA, 19 nt, Artificial Sequence
  Description of Artificial Sequence: Synthetic oligonucleotide
ggccacccggcuugcuggg

SEQ ID NO: 973230 - RNA, 19 nt, Artificial Sequence
  Description of Artificial Sequence: Synthetic oligonucleotide
gacuguccuaucagguaau

SEQ ID NO: 973231 - RNA, 19 nt, Artificial Sequence
  Description of Artificial Sequence: Synthetic oligonucleotide
gccaauggacuguccuauc

SEQ ID NO: 973232 - RNA, 19 nt, Artificial Sequence
  Description of Artificial Sequence: Synthetic oligonucleotide
agugggcaugguggcuuca

SEQ ID NO: 973233 - RNA, 19 nt, Artificial Sequence
  Description of Artificial Sequence: Synthetic oligonucleotide
ugcucgccccagaggcuua

SEQ ID NO: 973234 - RNA, 19 nt, Artificial Sequence
  Description of Artificial Sequence: Synthetic oligonucleotide
acccggcuugcugggacca

SEQ ID NO: 973235 - RNA, 19 nt, Artificial Sequence
  Description of Artificial Sequence: Synthetic oligonucleotide
cgacuggcggaagaagcgg

SEQ ID NO: 973236 - RNA, 19 nt, Artificial Sequence
  Description of Artificial Sequence: Synthetic oligonucleotide
ggccgaugugcucgucagc

SEQ ID NO: 973237 - RNA, 19 nt, Artificial Sequence
  Description of Artificial Sequence: Synthetic oligonucleotide
gaugcucgccccagaggcu

SEQ ID NO: 973238 - RNA, 19 nt, Artificial Sequence
  Description of Artificial Sequence: Synthetic oligonucleotide
ccucguguccaguggguca

SEQ ID NO: 973239 - RNA, 19 nt, Artificial Sequence
  Description of Artificial Sequence: Synthetic oligonucleotide
gugugcgacuguggcccag

SEQ ID NO: 973240 - RNA, 19 nt, Artificial Sequence
  Description of Artificial Sequence: Synthetic oligonucleotide
ugccaccgagguccacaua

SEQ ID NO: 973241 - RNA, 19 nt, Artificial Sequence
  Description of Artificial Sequence: Synthetic oligonucleotide
gccaccgacuggcggaaga

SEQ ID NO: 973242 - RNA, 19 nt, Artificial Sequence
  Description of Artificial Sequence: Synthetic oligonucleotide
cagugaccucaccagcugu

SEQ ID NO: 973243 - RNA, 19 nt, Artificial Sequence
  Description of Artificial Sequence: Synthetic oligonucleotide
gggcuuggccgcgaagcgc

SEQ ID NO: 973244 - RNA, 19 nt, Artificial Sequence
  Description of Artificial Sequence: Synthetic oligonucleotide
cuaggugcuggggcaaagu

SEQ ID NO: 973245 - RNA, 19 nt, Artificial Sequence
  Description of Artificial Sequence: Synthetic oligonucleotide
gcaucucgggcagcugagc

SEQ ID NO: 973246 - RNA, 19 nt, Artificial Sequence
  Description of Artificial Sequence: Synthetic oligonucleotide
agugcccgacccaguugca

SEQ ID NO: 973247 - RNA, 19 nt, Artificial Sequence
  Description of Artificial Sequence: Synthetic oligonucleotide
ggcuaacacacuuggccuu

SEQ ID NO: 973248 - RNA, 19 nt, Artificial Sequence
  Description of Artificial Sequence: Synthetic oligonucleotide
cucgccccagaggcuuaag

SEQ ID NO: 973249 - RNA, 19 nt, Artificial Sequence
  Description of Artificial Sequence: Synthetic oligonucleotide
ccacccggcuugcugggac

SEQ ID NO: 973250 - RNA, 19 nt, Artificial Sequence
  Description of Artificial Sequence: Synthetic oligonucleotide
gcgaccggaucccgcugcc

SEQ ID NO: 973251 - RNA, 19 nt, Artificial Sequence
  Description of Artificial Sequence: Synthetic oligonucleotide
cgggcuuggccgcgaagcg

SEQ ID NO: 973252 - RNA, 19 nt, Artificial Sequence
  Description of Artificial Sequence: Synthetic oligonucleotide
ggcgcggcgaccggauccc

SEQ ID NO: 973253 - RNA, 19 nt, Artificial Sequence
  Description of Artificial Sequence: Synthetic oligonucleotide
gcgauggcucccacagccc

SEQ ID NO: 973254 - RNA, 19 nt, Artificial Sequence
  Description of Artificial Sequence: Synthetic oligonucleotide
cccaucacgggacugcccu

SEQ ID NO: 973255 - RNA, 19 nt, Artificial Sequence
  Description of Artificial Sequence: Synthetic oligonucleotide
gccacacgugcagaagguc

SEQ ID NO: 973256 - RNA, 19 nt, Artificial Sequence
  Description of Artificial Sequence: Synthetic oligonucleotide
gggccgggccuuucccaag

SEQ ID NO: 973257 - RNA, 19 nt, Artificial Sequence
  Description of Artificial Sequence: Synthetic oligonucleotide
gcaccgccaugguggcgcg

SEQ ID NO: 973258 - RNA, 19 nt, Artificial Sequence
  Description of Artificial Sequence: Synthetic oligonucleotide
gcccgaaggccaggaaggc

SEQ ID NO: 973259 - RNA, 19 nt, Artificial Sequence
  Description of Artificial Sequence: Synthetic oligonucleotide
cccgaugggcaaugcccug

SEQ ID NO: 973260 - RNA, 19 nt, Artificial Sequence
  Description of Artificial Sequence: Synthetic oligonucleotide
gcccgagcgggcccggcug

SEQ ID NO: 973261 - RNA, 19 nt, Artificial Sequence
  Description of Artificial Sequence: Synthetic oligonucleotide
gcccgggcgcucuccgcgg

SEQ ID NO: 973262 - RNA, 19 nt, Artificial Sequence
  Description of Artificial Sequence: Synthetic oligonucleotide
ccuggcucauucugcuuaa

SEQ ID NO: 973263 - RNA, 19 nt, Artificial Sequence
  Description of Artificial Sequence: Synthetic oligonucleotide
gccucguguccaguggguc

SEQ ID NO: 973264 - RNA, 19 nt, Artificial Sequence
  Description of Artificial Sequence: Synthetic oligonucleotide
gaggcggcccgccggcccu

SEQ ID NO: 973265 - RNA, 19 nt, Artificial Sequence
  Description of Artificial Sequence: Synthetic oligonucleotide
guggcgcggcgaccggauc

SEQ ID NO: 973266 - RNA, 19 nt, Artificial Sequence
  Description of Artificial Sequence: Synthetic oligonucleotide
ccaucacgggacugcccuc

SEQ ID NO: 973267 - RNA, 19 nt, Artificial Sequence
  Description of Artificial Sequence: Synthetic oligonucleotide
gcggggccgggccuuuccc

SEQ ID NO: 973268 - RNA, 19 nt, Artificial Sequence
  Description of Artificial Sequence: Synthetic oligonucleotide
ccuuucccaagcccgagau

SEQ ID NO: 973269 - RNA, 19 nt, Artificial Sequence
  Description of Artificial Sequence: Synthetic oligonucleotide
cagauucuucagggcuaga

SEQ ID NO: 973270 - RNA, 19 nt, Artificial Sequence
  Description of Artificial Sequence: Synthetic oligonucleotide
gcggggacugggagugugc

SEQ ID NO: 973271 - RNA, 19 nt, Artificial Sequence
  Description of Artificial Sequence: Synthetic oligonucleotide
gcaagcugcuugggaccgc

SEQ ID NO: 973272 - RNA, 19 nt, Artificial Sequence
  Description of Artificial Sequence: Synthetic oligonucleotide
caccgccaugguggcgcgg

SEQ ID NO: 973273 - RNA, 19 nt, Artificial Sequence
  Description of Artificial Sequence: Synthetic oligonucleotide
cucggccgcaagggcccgc

SEQ ID NO: 973274 - RNA, 19 nt, Artificial Sequence
  Description of Artificial Sequence: Synthetic oligonucleotide
cgggacugcccuccaggag

SEQ ID NO: 973275 - RNA, 19 nt, Artificial Sequence
  Description of Artificial Sequence: Synthetic oligonucleotide
ccgaugugcucgucagcca

SEQ ID NO: 973276 - RNA, 19 nt, Artificial Sequence
  Description of Artificial Sequence: Synthetic oligonucleotide
gccgggcuuggccgcgaag

SEQ ID NO: 973277 - RNA, 19 nt, Artificial Sequence
  Description of Artificial Sequence: Synthetic oligonucleotide
cagcagaguggcugcggau

SEQ ID NO: 973278 - RNA, 19 nt, Artificial Sequence
  Description of Artificial Sequence: Synthetic oligonucleotide
cccgacccaguugcaggcc

SEQ ID NO: 973279 - RNA, 19 nt, Artificial Sequence
  Description of Artificial Sequence: Synthetic oligonucleotide
cguguccagugggucagac

SEQ ID NO: 973280 - RNA, 19 nt, Artificial Sequence
  Description of Artificial Sequence: Synthetic oligonucleotide
gcggcgaccggaucccgcu

SEQ ID NO: 973281 - RNA, 19 nt, Artificial Sequence
  Description of Artificial Sequence: Synthetic oligonucleotide
cagccaccgacuggcggaa

SEQ ID NO: 973282 - RNA, 19 nt, Artificial Sequence
  Description of Artificial Sequence: Synthetic oligonucleotide
cgagaucgggccgggcuug

SEQ ID NO: 973283 - RNA, 19 nt, Artificial Sequence
  Description of Artificial Sequence: Synthetic oligonucleotide
cccgagaucgggccgggcu

SEQ ID NO: 973284 - RNA, 19 nt, Artificial Sequence
  Description of Artificial Sequence: Synthetic oligonucleotide
cgaggaacagugugcgacu

SEQ ID NO: 973285 - RNA, 19 nt, Artificial Sequence
  Description of Artificial Sequence: Synthetic oligonucleotide
ggagcccgagcgggcccgg

SEQ ID NO: 973286 - RNA, 19 nt, Artificial Sequence
  Description of Artificial Sequence: Synthetic oligonucleotide
gaccgccucugggucuucu

SEQ ID NO: 973287 - RNA, 19 nt, Artificial Sequence
  Description of Artificial Sequence: Synthetic oligonucleotide
aggcggcccgccggcccuc

SEQ ID NO: 973288 - RNA, 19 nt, Artificial Sequence
  Description of Artificial Sequence: Synthetic oligonucleotide
cgcggcgaccggaucccgc

SEQ ID NO: 973289 - RNA, 19 nt, Artificial Sequence
  Description of Artificial Sequence: Synthetic oligonucleotide
gcccuugccaauggacugu

SEQ ID NO: 973290 - RNA, 19 nt, Artificial Sequence
  Description of Artificial Sequence: Synthetic oligonucleotide
gcgccugucgcaccgccau

SEQ ID NO: 973291 - RNA, 19 nt, Artificial Sequence
  Description of Artificial Sequence: Synthetic oligonucleotide
gcccagccaccgacuggcg

SEQ ID NO: 973292 - RNA, 19 nt, Artificial Sequence
  Description of Artificial Sequence: Synthetic oligonucleotide
gcucggccgcaagggcccg

SEQ ID NO: 973293 - RNA, 19 nt, Artificial Sequence
  Description of Artificial Sequence: Synthetic oligonucleotide
gcaggguacagggguaguu

SEQ ID NO: 973294 - RNA, 19 nt, Artificial Sequence
  Description of Artificial Sequence: Synthetic oligonucleotide
ccaccgacuggcggaagaa

SEQ ID NO: 973295 - RNA, 19 nt, Artificial Sequence
  Description of Artificial Sequence: Synthetic oligonucleotide
ccgagauauuccacaucau

SEQ ID NO: 973296 - RNA, 19 nt, Artificial Sequence
  Description of Artificial Sequence: Synthetic oligonucleotide
cgagaucaccagccaggga

SEQ ID NO: 973297 - RNA, 19 nt, Artificial Sequence
  Description of Artificial Sequence: Synthetic oligonucleotide
ggcuuaagugcagcacguu

SEQ ID NO: 973298 - RNA, 19 nt, Artificial Sequence
  Description of Artificial Sequence: Synthetic oligonucleotide
ccucucgcuggagcaguga

SEQ ID NO: 973299 - RNA, 19 nt, Artificial Sequence
  Description of Artificial Sequence: Synthetic oligonucleotide
ccgacccaguugcaggccu

SEQ ID NO: 973300 - RNA, 19 nt, Artificial Sequence
  Description of Artificial Sequence: Synthetic oligonucleotide
ccacgaauugucgcuggau

SEQ ID NO: 973301 - RNA, 19 nt, Artificial Sequence
  Description of Artificial Sequence: Synthetic oligonucleotide
cccggcuugcugggaccag

SEQ ID NO: 973302 - RNA, 19 nt, Artificial Sequence
  Description of Artificial Sequence: Synthetic oligonucleotide
gcgcggcgaccggaucccg

SEQ ID NO: 973303 - RNA, 19 nt, Artificial Sequence
  Description of Artificial Sequence: Synthetic oligonucleotide
gguggcgcggcgaccggau

SEQ ID NO: 973304 - RNA, 19 nt, Artificial Sequence
  Description of Artificial Sequence: Synthetic oligonucleotide
ccgcaagggcccgccccgc

SEQ ID NO: 973305 - RNA, 19 nt, Artificial Sequence
  Description of Artificial Sequence: Synthetic oligonucleotide
gcucgccccagaggcuuaa

SEQ ID NO: 973306 - RNA, 19 nt, Artificial Sequence
  Description of Artificial Sequence: Synthetic oligonucleotide
cgaugggcaaugcccugcu

SEQ ID NO: 973307 - RNA, 19 nt, Artificial Sequence
  Description of Artificial Sequence: Synthetic oligonucleotide
cgccugucgcaccgccaug

SEQ ID NO: 973308 - RNA, 19 nt, Artificial Sequence
  Description of Artificial Sequence: Synthetic oligonucleotide
ccgagaucgggccgggcuu

SEQ ID NO: 973309 - RNA, 19 nt, Artificial Sequence
  Description of Artificial Sequence: Synthetic oligonucleotide
gcccgagaucgggccgggc

SEQ ID NO: 973310 - RNA, 19 nt, Artificial Sequence
  Description of Artificial Sequence: Synthetic oligonucleotide
cccggcccgggcgcucucc

SEQ ID NO: 973311 - RNA, 19 nt, Artificial Sequence
  Description of Artificial Sequence: Synthetic oligonucleotide
cggcgaccggaucccgcug

SEQ ID NO: 973312 - RNA, 19 nt, Artificial Sequence
  Description of Artificial Sequence: Synthetic oligonucleotide
cugccgcggggccgggccu

SEQ ID NO: 973313 - RNA, 19 nt, Artificial Sequence
  Description of Artificial Sequence: Synthetic oligonucleotide
ccgagcgggcccggcugug

SEQ ID NO: 973314 - RNA, 19 nt, Artificial Sequence
  Description of Artificial Sequence: Synthetic oligonucleotide
ccgaggcggcccgccggcc

SEQ ID NO: 973315 - RNA, 19 nt, Artificial Sequence
  Description of Artificial Sequence: Synthetic oligonucleotide
cgccaugguggcgcggcga

SEQ ID NO: 973316 - RNA, 19 nt, Artificial Sequence
  Description of Artificial Sequence: Synthetic oligonucleotide
cggccgcaagggcccgccc

SEQ ID NO: 973317 - RNA, 19 nt, Artificial Sequence
  Description of Artificial Sequence: Synthetic oligonucleotide
cgaccggaucccgcugcca

SEQ ID NO: 973318 - RNA, 19 nt, Artificial Sequence
  Description of Artificial Sequence: Synthetic oligonucleotide
cccgggcccgcaccacgaa

SEQ ID NO: 973319 - RNA, 19 nt, Artificial Sequence
  Description of Artificial Sequence: Synthetic oligonucleotide
ccagugccucguguccagu

SEQ ID NO: 973320 - RNA, 19 nt, Artificial Sequence
  Description of Artificial Sequence: Synthetic oligonucleotide
cgggcccggcugugcucug

SEQ ID NO: 973321 - RNA, 19 nt, Artificial Sequence
  Description of Artificial Sequence: Synthetic oligonucleotide
ccgcggggccgggccuuuc

SEQ ID NO: 973322 - RNA, 19 nt, Artificial Sequence
  Description of Artificial Sequence: Synthetic oligonucleotide
uguaacacagacuugacag

SEQ ID NO: 973323 - RNA, 19 nt, Artificial Sequence
  Description of Artificial Sequence: Synthetic oligonucleotide
aguaguuaugcccaaaacg

SEQ ID NO: 973324 - RNA, 19 nt, Artificial Sequence
  Description of Artificial Sequence: Synthetic oligonucleotide
aaaacuaauuucuaccucu

SEQ ID NO: 973325 - RNA, 19 nt, Artificial Sequence
  Description of Artificial Sequence: Synthetic oligonucleotide
agaugucgaauucauagcc

SEQ ID NO: 973326 - RNA, 19 nt, Artificial Sequence
  Description of Artificial Sequence: Synthetic oligonucleotide
gaaaguguaggacaggcgc

SEQ ID NO: 973327 - RNA, 19 nt, Artificial Sequence
  Description of Artificial Sequence: Synthetic oligonucleotide
uagacaaugggaaugccag

SEQ ID NO: 973328 - RNA, 19 nt, Artificial Sequence
  Description of Artificial Sequence: Synthetic oligonucleotide
uauuauugcacaucacucc

SEQ ID NO: 973329 - RNA, 19 nt, Artificial Sequence
  Description of Artificial Sequence: Synthetic oligonucleotide
aaagagauuuaguaguuau

SEQ ID NO: 973330 - RNA, 19 nt, Artificial Sequence
  Description of Artificial Sequence: Synthetic oligonucleotide
agcaguuucggcuuuauug

SEQ ID NO: 973331 - RNA, 19 nt, Artificial Sequence
  Description of Artificial Sequence: Synthetic oligonucleotide
uggaaagagauuuaguagu

SEQ ID NO: 973332 - RNA, 19 nt, Artificial Sequence
  Description of Artificial Sequence: Synthetic oligonucleotide
ucuggaaagagauuuagua

SEQ ID NO: 973333 - RNA, 19 nt, Artificial Sequence
  Description of Artificial Sequence: Synthetic oligonucleotide
uggaccaagaaccugcacc

SEQ ID NO: 973334 - RNA, 19 nt, Artificial Sequence
  Description of Artificial Sequence: Synthetic oligonucleotide
auuucuaccucucaacucu

SEQ ID NO: 973335 - RNA, 19 nt, Artificial Sequence
  Description of Artificial Sequence: Synthetic oligonucleotide
cuagguucuaugaagggag

SEQ ID NO: 973336 - RNA, 19 nt, Artificial Sequence
  Description of Artificial Sequence: Synthetic oligonucleotide
aggacaaggaguucauccc

SEQ ID NO: 973337 - RNA, 19 nt, Artificial Sequence
  Description of Artificial Sequence: Synthetic oligonucleotide
agcacuagcuuguaggcgg

SEQ ID NO: 973338 - RNA, 19 nt, Artificial Sequence
  Description of Artificial Sequence: Synthetic oligonucleotide
ugaggaauggcuuauuguc

SEQ ID NO: 973339 - RNA, 19 nt, Artificial Sequence
  Description of Artificial Sequence: Synthetic oligonucleotide
uaagaucgccuccagaucu

SEQ ID NO: 973340 - RNA, 19 nt, Artificial Sequence
  Description of Artificial Sequence: Synthetic oligonucleotide
gacuacagccccuaguuag

SEQ ID NO: 973341 - RNA, 19 nt, Artificial Sequence
  Description of Artificial Sequence: Synthetic oligonucleotide
cuggaaagagauuuaguag

SEQ ID NO: 973342 - RNA, 19 nt, Artificial Sequence
  Description of Artificial Sequence: Synthetic oligonucleotide
auaccugcgauccuuacug

SEQ ID NO: 973343 - RNA, 19 nt, Artificial Sequence
  Description of Artificial Sequence: Synthetic oligonucleotide
uggguuauaccacugcaug

SEQ ID NO: 973344 - RNA, 19 nt, Artificial Sequence
  Description of Artificial Sequence: Synthetic oligonucleotide
aaaguguaggacaggcgcc

SEQ ID NO: 973345 - RNA, 19 nt, Artificial Sequence
  Description of Artificial Sequence: Synthetic oligonucleotide
agguaguauguuuacauca

SEQ ID NO: 973346 - RNA, 19 nt, Artificial Sequence
  Description of Artificial Sequence: Synthetic oligonucleotide
uaaagcagagccuuaguaa

SEQ ID NO: 973347 - RNA, 19 nt, Artificial Sequence
  Description of Artificial Sequence: Synthetic oligonucleotide
uauacugaucuggaaagag

SEQ ID NO: 973348 - RNA, 19 nt, Artificial Sequence
  Description of Artificial Sequence: Synthetic oligonucleotide
auuauugcacaucacuccu

SEQ ID NO: 973349 - RNA, 19 nt, Artificial Sequence
  Description of Artificial Sequence: Synthetic oligonucleotide
uuugacaggcuucaaguuc

SEQ ID NO: 973350 - RNA, 19 nt, Artificial Sequence
  Description of Artificial Sequence: Synthetic oligonucleotide
cuaacuguggaaaguguag

SEQ ID NO: 973351 - RNA, 19 nt, Artificial Sequence
  Description of Artificial Sequence: Synthetic oligonucleotide
gaaaaugggagccacaggu

SEQ ID NO: 973352 - RNA, 19 nt, Artificial Sequence
  Description of Artificial Sequence: Synthetic oligonucleotide
cuucucauggguuauacca

SEQ ID NO: 973353 - RNA, 19 nt, Artificial Sequence
  Description of Artificial Sequence: Synthetic oligonucleotide
gcaauaguguccuugaggc

SEQ ID NO: 973354 - RNA, 19 nt, Artificial Sequence
  Description of Artificial Sequence: Synthetic oligonucleotide
acggaggugaagcagaugu

SEQ ID NO: 973355 - RNA, 19 nt, Artificial Sequence
  Description of Artificial Sequence: Synthetic oligonucleotide
uuacuuucaccuuccacug

SEQ ID NO: 973356 - RNA, 19 nt, Artificial Sequence
  Description of Artificial Sequence: Synthetic oligonucleotide
guaguuaugcccaaaacga

SEQ ID NO: 973357 - RNA, 19 nt, Artificial Sequence
  Description of Artificial Sequence: Synthetic oligonucleotide
cagaagugaccuaacacag

SEQ ID NO: 973358 - RNA, 19 nt, Artificial Sequence
  Description of Artificial Sequence: Synthetic oligonucleotide
aacaugauucagugaaaga

SEQ ID NO: 973359 - RNA, 19 nt, Artificial Sequence
  Description of Artificial Sequence: Synthetic oligonucleotide
uggaacuauuucaaucacc

SEQ ID NO: 973360 - RNA, 19 nt, Artificial Sequence
  Description of Artificial Sequence: Synthetic oligonucleotide
ugaucaggcuccauuggag

SEQ ID NO: 973361 - RNA, 19 nt, Artificial Sequence
  Description of Artificial Sequence: Synthetic oligonucleotide
uaguuaugcccaaaacgag

SEQ ID NO: 973362 - RNA, 19 nt, Artificial Sequence
  Description of Artificial Sequence: Synthetic oligonucleotide
augucgaauucauagccag

SEQ ID NO: 973363 - RNA, 19 nt, Artificial Sequence
  Description of Artificial Sequence: Synthetic oligonucleotide
accuaacacagccagagga

SEQ ID NO: 973364 - RNA, 19 nt, Artificial Sequence
  Description of Artificial Sequence: Synthetic oligonucleotide
acaucguaagaucgccucc

SEQ ID NO: 973365 - RNA, 19 nt, Artificial Sequence
  Description of Artificial Sequence: Synthetic oligonucleotide
uaacuguggaaaguguagg

SEQ ID NO: 973366 - RNA, 19 nt, Artificial Sequence
  Description of Artificial Sequence: Synthetic oligonucleotide
aauguaacacagacuugac

SEQ ID NO: 973367 - RNA, 19 nt, Artificial Sequence
  Description of Artificial Sequence: Synthetic oligonucleotide
uugacgaugccccgaaggc

SEQ ID NO: 973368 - RNA, 19 nt, Artificial Sequence
  Description of Artificial Sequence: Synthetic oligonucleotide
auggaacuauuucaaucac

SEQ ID NO: 973369 - RNA, 19 nt, Artificial Sequence
  Description of Artificial Sequence: Synthetic oligonucleotide
ucgaaaucuuuccacucgc

SEQ ID NO: 973370 - RNA, 19 nt, Artificial Sequence
  Description of Artificial Sequence: Synthetic oligonucleotide
ucauagacaaugggaaugc

SEQ ID NO: 973371 - RNA, 19 nt, Artificial Sequence
  Description of Artificial Sequence: Synthetic oligonucleotide
uuuagggccuuuaggguca

SEQ ID NO: 973372 - RNA, 19 nt, Artificial Sequence
  Description of Artificial Sequence: Synthetic oligonucleotide
caaaacgaguucugaaccc

SEQ ID NO: 973373 - RNA, 19 nt, Artificial Sequence
  Description of Artificial Sequence: Synthetic oligonucleotide
auguggaccaagaaccugc

SEQ ID NO: 973374 - RNA, 19 nt, Artificial Sequence
  Description of Artificial Sequence: Synthetic oligonucleotide
aaacuaauuucuaccucuc

SEQ ID NO: 973375 - RNA, 19 nt, Artificial Sequence
  Description of Artificial Sequence: Synthetic oligonucleotide
cauggcgacaggcaggagg

SEQ ID NO: 973376 - RNA, 19 nt, Artificial Sequence
  Description of Artificial Sequence: Synthetic oligonucleotide
gaggaugcggcagagacug

SEQ ID NO: 973377 - RNA, 19 nt, Artificial Sequence
  Description of Artificial Sequence: Synthetic oligonucleotide
uaaauacacauguaccuuu

SEQ ID NO: 973378 - RNA, 19 nt, Artificial Sequence
  Description of Artificial Sequence: Synthetic oligonucleotide
acuguggaaaguguaggac

SEQ ID NO: 973379 - RNA, 19 nt, Artificial Sequence
  Description of Artificial Sequence: Synthetic oligonucleotide
ucugacuagguucuaugaa

SEQ ID NO: 973380 - RNA, 19 nt, Artificial Sequence
  Description of Artificial Sequence: Synthetic oligonucleotide
uguuaagaggagccguccc

SEQ ID NO: 973381 - RNA, 19 nt, Artificial Sequence
  Description of Artificial Sequence: Synthetic oligonucleotide
agaucggcgucguaccagc

SEQ ID NO: 973382 - RNA, 19 nt, Artificial Sequence
  Description of Artificial Sequence: Synthetic oligonucleotide
aaaacgaguucugaaccca

SEQ ID NO: 973383 - RNA, 19 nt, Artificial Sequence
  Description of Artificial Sequence: Synthetic oligonucleotide
guuucggcuuuauugagac

SEQ ID NO: 973384 - RNA, 19 nt, Artificial Sequence
  Description of Artificial Sequence: Synthetic oligonucleotide
guacgagucugccugcucg

SEQ ID NO: 973385 - RNA, 19 nt, Artificial Sequence
  Description of Artificial Sequence: Synthetic oligonucleotide
cuaugaagggagugggugc

SEQ ID NO: 973386 - RNA, 19 nt, Artificial Sequence
  Description of Artificial Sequence: Synthetic oligonucleotide
uaaggucugcauaccugcg

SEQ ID NO: 973387 - RNA, 19 nt, Artificial Sequence
  Description of Artificial Sequence: Synthetic oligonucleotide
ucauggguuauaccacugc

SEQ ID NO: 973388 - RNA, 19 nt, Artificial Sequence
  Description of Artificial Sequence: Synthetic oligonucleotide
aguauguuuacaucaccau

SEQ ID NO: 973389 - RNA, 19 nt, Artificial Sequence
  Description of Artificial Sequence: Synthetic oligonucleotide
ggugcaggggauuaaauac

SEQ ID NO: 973390 - RNA, 19 nt, Artificial Sequence
  Description of Artificial Sequence: Synthetic oligonucleotide
ucuuccuaaagcagagccu

SEQ ID NO: 973391 - RNA, 19 nt, Artificial Sequence
  Description of Artificial Sequence: Synthetic oligonucleotide
ggcaauaguguccuugagg

SEQ ID NO: 973392 - RNA, 19 nt, Artificial Sequence
  Description of Artificial Sequence: Synthetic oligonucleotide
uuaccugcgccucaccaug

SEQ ID NO: 973393 - RNA, 19 nt, Artificial Sequence
  Description of Artificial Sequence: Synthetic oligonucleotide
acaggauuggucccaaccu

SEQ ID NO: 973394 - RNA, 19 nt, Artificial Sequence
  Description of Artificial Sequence: Synthetic oligonucleotide
uaguaguuaugcccaaaac

SEQ ID NO: 973395 - RNA, 19 nt, Artificial Sequence
  Description of Artificial Sequence: Synthetic oligonucleotide
uaugcccaaaacgaguucu

SEQ ID NO: 973396 - RNA, 19 nt, Artificial Sequence
  Description of Artificial Sequence: Synthetic oligonucleotide
uucugacuagguucuauga

SEQ ID NO: 973397 - RNA, 19 nt, Artificial Sequence
  Description of Artificial Sequence: Synthetic oligonucleotide
ggccuuuagggucagagag

SEQ ID NO: 973398 - RNA, 19 nt, Artificial Sequence
  Description of Artificial Sequence: Synthetic oligonucleotide
ucuggcaauaguguccuug

SEQ ID NO: 973399 - RNA, 19 nt, Artificial Sequence
  Description of Artificial Sequence: Synthetic oligonucleotide
ugccggaucagcacuagcu

SEQ ID NO: 973400 - RNA, 19 nt, Artificial Sequence
  Description of Artificial Sequence: Synthetic oligonucleotide
uuauuauacugaucuggaa

SEQ ID NO: 973401 - RNA, 19 nt, Artificial Sequence
  Description of Artificial Sequence: Synthetic oligonucleotide
auggcuuauugucugguga

SEQ ID NO: 973402 - RNA, 19 nt, Artificial Sequence
  Description of Artificial Sequence: Synthetic oligonucleotide
guaguauguuuacaucacc

SEQ ID NO: 973403 - RNA, 19 nt, Artificial Sequence
  Description of Artificial Sequence: Synthetic oligonucleotide
ugaagcagaugucgaauuc

SEQ ID NO: 973404 - RNA, 19 nt, Artificial Sequence
  Description of Artificial Sequence: Synthetic oligonucleotide
cuggacccgaucaaggggc

SEQ ID NO: 973405 - RNA, 19 nt, Artificial Sequence
  Description of Artificial Sequence: Synthetic oligonucleotide
aaucaccacuagaaacagc

SEQ ID NO: 973406 - RNA, 19 nt, Artificial Sequence
  Description of Artificial Sequence: Synthetic oligonucleotide
gacaucguaagaucgccuc

SEQ ID NO: 973407 - RNA, 19 nt, Artificial Sequence
  Description of Artificial Sequence: Synthetic oligonucleotide
uuagcuaacuguggaaagu

SEQ ID NO: 973408 - RNA, 19 nt, Artificial Sequence
  Description of Artificial Sequence: Synthetic oligonucleotide
augacuacagccccuaguu

SEQ ID NO: 973409 - RNA, 19 nt, Artificial Sequence
  Description of Artificial Sequence: Synthetic oligonucleotide
cucgcaggaggguagcugg

SEQ ID NO: 973410 - RNA, 19 nt, Artificial Sequence
  Description of Artificial Sequence: Synthetic oligonucleotide
aaacgaguucugaacccac

SEQ ID NO: 973411 - RNA, 19 nt, Artificial Sequence
  Description of Artificial Sequence: Synthetic oligonucleotide
aagauccuaaagauguagu

SEQ ID NO: 973412 - RNA, 19 nt, Artificial Sequence
  Description of Artificial Sequence: Synthetic oligonucleotide
ugggacaucguaagaucgc

SEQ ID NO: 973413 - RNA, 19 nt, Artificial Sequence
  Description of Artificial Sequence: Synthetic oligonucleotide
uccucgaaaucuuuccacu

SEQ ID NO: 973414 - RNA, 19 nt, Artificial Sequence
  Description of Artificial Sequence: Synthetic oligonucleotide
gagguguuuucugacuagg

SEQ ID NO: 973415 - RNA, 19 nt, Artificial Sequence
  Description of Artificial Sequence: Synthetic oligonucleotide
aagcagagccuuaguaaac

SEQ ID NO: 973416 - RNA, 19 nt, Artificial Sequence
  Description of Artificial Sequence: Synthetic oligonucleotide
aaaccuggacccgaucaag

SEQ ID NO: 973417 - RNA, 19 nt, Artificial Sequence
  Description of Artificial Sequence: Synthetic oligonucleotide
uauugagaccagucagacc

SEQ ID NO: 973418 - RNA, 19 nt, Artificial Sequence
  Description of Artificial Sequence: Synthetic oligonucleotide
ucgccuucacuucuugacc

SEQ ID NO: 973419 - RNA, 19 nt, Artificial Sequence
  Description of Artificial Sequence: Synthetic oligonucleotide
ugucgaauucauagccagc

SEQ ID NO: 973420 - RNA, 19 nt, Artificial Sequence
  Description of Artificial Sequence: Synthetic oligonucleotide
agagguguuuucugacuag

SEQ ID NO: 973421 - RNA, 19 nt, Artificial Sequence
  Description of Artificial Sequence: Synthetic oligonucleotide
ugcuuagcagcaguuucgg

SEQ ID NO: 973422 - RNA, 19 nt, Artificial Sequence
  Description of Artificial Sequence: Synthetic oligonucleotide
agaagugaccuaacacagc

SEQ ID NO: 973423 - RNA, 19 nt, Artificial Sequence
  Description of Artificial Sequence: Synthetic oligonucleotide
uccuaaagcagagccuuag

SEQ ID NO: 973424 - RNA, 19 nt, Artificial Sequence
  Description of Artificial Sequence: Synthetic oligonucleotide
gguucuaugaagggagugg

SEQ ID NO: 973425 - RNA, 19 nt, Artificial Sequence
  Description of Artificial Sequence: Synthetic oligonucleotide
cucagaucggcgucguacc

SEQ ID NO: 973426 - RNA, 19 nt, Artificial Sequence
  Description of Artificial Sequence: Synthetic oligonucleotide
cagugcucuggcaauagug

SEQ ID NO: 973427 - RNA, 19 nt, Artificial Sequence
  Description of Artificial Sequence: Synthetic oligonucleotide
uuaagaggagccgucccug

SEQ ID NO: 973428 - RNA, 19 nt, Artificial Sequence
  Description of Artificial Sequence: Synthetic oligonucleotide
cuuaaacuuaagauccuaa

SEQ ID NO: 973429 - RNA, 19 nt, Artificial Sequence
  Description of Artificial Sequence: Synthetic oligonucleotide
ccaaaacgaguucugaacc

SEQ ID NO: 973430 - RNA, 19 nt, Artificial Sequence
  Description of Artificial Sequence: Synthetic oligonucleotide
gucugcauaccugcgaucc

SEQ ID NO: 973431 - RNA, 19 nt, Artificial Sequence
  Description of Artificial Sequence: Synthetic oligonucleotide
caaaaccuggacccgauca

SEQ ID NO: 973432 - RNA, 19 nt, Artificial Sequence
  Description of Artificial Sequence: Synthetic oligonucleotide
aguuagcuaacuguggaaa

SEQ ID NO: 973433 - RNA, 19 nt, Artificial Sequence
  Description of Artificial Sequence: Synthetic oligonucleotide
ggaugaucaggcuccauug

SEQ ID NO: 973434 - RNA, 19 nt, Artificial Sequence
  Description of Artificial Sequence: Synthetic oligonucleotide
guaccagccgcugaagcgg

SEQ ID NO: 973435 - RNA, 19 nt, Artificial Sequence
  Description of Artificial Sequence: Synthetic oligonucleotide
ggguuauaccacugcaugg

SEQ ID NO: 973436 - RNA, 19 nt, Artificial Sequence
  Description of Artificial Sequence: Synthetic oligonucleotide
aguuaugcccaaaacgagu

SEQ ID NO: 973437 - RNA, 19 nt, Artificial Sequence
  Description of Artificial Sequence: Synthetic oligonucleotide
uugaucuggggaacaauuu

SEQ ID NO: 973438 - RNA, 19 nt, Artificial Sequence
  Description of Artificial Sequence: Synthetic oligonucleotide
gaacuauuucaaucaccac

SEQ ID NO: 973439 - RNA, 19 nt, Artificial Sequence
  Description of Artificial Sequence: Synthetic oligonucleotide
cuguggaaaguguaggaca

SEQ ID NO: 973440 - RNA, 19 nt, Artificial Sequence
  Description of Artificial Sequence: Synthetic oligonucleotide
aaugaaaaugggagccaca

SEQ ID NO: 973441 - RNA, 19 nt, Artificial Sequence
  Description of Artificial Sequence: Synthetic oligonucleotide
gucgaauucauagccagca

SEQ ID NO: 973442 - RNA, 19 nt, Artificial Sequence
  Description of Artificial Sequence: Synthetic oligonucleotide
uuuaccugcgccucaccau

SEQ ID NO: 973443 - RNA, 19 nt, Artificial Sequence
  Description of Artificial Sequence: Synthetic oligonucleotide
ggauuaaauacuaaaugaa

SEQ ID NO: 973444 - RNA, 19 nt, Artificial Sequence
  Description of Artificial Sequence: Synthetic oligonucleotide
acagccccuaguuagcuaa

SEQ ID NO: 973445 - RNA, 19 nt, Artificial Sequence
  Description of Artificial Sequence: Synthetic oligonucleotide
cuccucgaaaucuuuccac

SEQ ID NO: 973446 - RNA, 19 nt, Artificial Sequence
  Description of Artificial Sequence: Synthetic oligonucleotide
ucguaccagccgcugaagc

SEQ ID NO: 973447 - RNA, 19 nt, Artificial Sequence
  Description of Artificial Sequence: Synthetic oligonucleotide
aguaaggucugcauaccug

SEQ ID NO: 973448 - RNA, 19 nt, Artificial Sequence
  Description of Artificial Sequence: Synthetic oligonucleotide
gaccuaacacagccagagg

SEQ ID NO: 973449 - RNA, 19 nt, Artificial Sequence
  Description of Artificial Sequence: Synthetic oligonucleotide
aucggcgucguaccagccg

SEQ ID NO: 973450 - RNA, 19 nt, Artificial Sequence
  Description of Artificial Sequence: Synthetic oligonucleotide
aaguguaggacaggcgcca

SEQ ID NO: 973451 - RNA, 19 nt, Artificial Sequence
  Description of Artificial Sequence: Synthetic oligonucleotide
acugcaugguuccucccug

SEQ ID NO: 973452 - RNA, 19 nt, Artificial Sequence
  Description of Artificial Sequence: Synthetic oligonucleotide
augccccgaaggcuguugc

SEQ ID NO: 973453 - RNA, 19 nt, Artificial Sequence
  Description of Artificial Sequence: Synthetic oligonucleotide
gaugucgaauucauagcca

SEQ ID NO: 973454 - RNA, 19 nt, Artificial Sequence
  Description of Artificial Sequence: Synthetic oligonucleotide
agggccuuuagggucagag

SEQ ID NO: 973455 - RNA, 19 nt, Artificial Sequence
  Description of Artificial Sequence: Synthetic oligonucleotide
ucucgcaacgccuguccgc

SEQ ID NO: 973456 - RNA, 19 nt, Artificial Sequence
  Description of Artificial Sequence: Synthetic oligonucleotide
gaugcggcagagacugagg

SEQ ID NO: 973457 - RNA, 19 nt, Artificial Sequence
  Description of Artificial Sequence: Synthetic oligonucleotide
agugcucuggcaauagugu

SEQ ID NO: 973458 - RNA, 19 nt, Artificial Sequence
  Description of Artificial Sequence: Synthetic oligonucleotide
augauucagugaaagacaa

SEQ ID NO: 973459 - RNA, 19 nt, Artificial Sequence
  Description of Artificial Sequence: Synthetic oligonucleotide
uuaugcccaaaacgaguuc

SEQ ID NO: 973460 - RNA, 19 nt, Artificial Sequence
  Description of Artificial Sequence: Synthetic oligonucleotide
ugauucagugaaagacaaa

SEQ ID NO: 973461 - RNA, 19 nt, Artificial Sequence
  Description of Artificial Sequence: Synthetic oligonucleotide
cuuccggggccuuuagggc

SEQ ID NO: 973462 - RNA, 19 nt, Artificial Sequence
  Description of Artificial Sequence: Synthetic oligonucleotide
caucucgcaacgccugucc

SEQ ID NO: 973463 - RNA, 19 nt, Artificial Sequence
  Description of Artificial Sequence: Synthetic oligonucleotide
aucucgcaacgccuguccg

SEQ ID NO: 973464 - RNA, 19 nt, Artificial Sequence
  Description of Artificial Sequence: Synthetic oligonucleotide
uucgccuccucguggcccg

SEQ ID NO: 973465 - RNA, 19 nt, Artificial Sequence
  Description of Artificial Sequence: Synthetic oligonucleotide
ccuuccggggccuuuaggg

SEQ ID NO: 973466 - RNA, 19 nt, Artificial Sequence
  Description of Artificial Sequence: Synthetic oligonucleotide
cauggguuauaccacugca

SEQ ID NO: 973467 - RNA, 19 nt, Artificial Sequence
  Description of Artificial Sequence: Synthetic oligonucleotide
uccggauugcucucuucug

SEQ ID NO: 973468 - RNA, 19 nt, Artificial Sequence
  Description of Artificial Sequence: Synthetic oligonucleotide
ucagaucggcgucguacca

SEQ ID NO: 973469 - RNA, 19 nt, Artificial Sequence
  Description of Artificial Sequence: Synthetic oligonucleotide
ucguaagaucgccuccaga

SEQ ID NO: 973470 - RNA, 19 nt, Artificial Sequence
  Description of Artificial Sequence: Synthetic oligonucleotide
auacugaucuggaaagaga

SEQ ID NO: 973471 - RNA, 19 nt, Artificial Sequence
  Description of Artificial Sequence: Synthetic oligonucleotide
guaagaucgccuccagauc

SEQ ID NO: 973472 - RNA, 19 nt, Artificial Sequence
  Description of Artificial Sequence: Synthetic oligonucleotide
aucaaggggcacugcaccu

SEQ ID NO: 973473 - RNA, 19 nt, Artificial Sequence
  Description of Artificial Sequence: Synthetic oligonucleotide
ggaauggcuuauugucugg

SEQ ID NO: 973474 - RNA, 19 nt, Artificial Sequence
  Description of Artificial Sequence: Synthetic oligonucleotide
uacgagucugccugcucgc

SEQ ID NO: 973475 - RNA, 19 nt, Artificial Sequence
  Description of Artificial Sequence: Synthetic oligonucleotide
agacuguccagaggguccg

SEQ ID NO: 973476 - RNA, 19 nt, Artificial Sequence
  Description of Artificial Sequence: Synthetic oligonucleotide
uacuuucaccuuccacuga

SEQ ID NO: 973477 - RNA, 19 nt, Artificial Sequence
  Description of Artificial Sequence: Synthetic oligonucleotide
ugaggagcgcugagauucc

SEQ ID NO: 973478 - RNA, 19 nt, Artificial Sequence
  Description of Artificial Sequence: Synthetic oligonucleotide
gguaguauguuuacaucac

SEQ ID NO: 973479 - RNA, 19 nt, Artificial Sequence
  Description of Artificial Sequence: Synthetic oligonucleotide
cuguuaagaggagccgucc

SEQ ID NO: 973480 - RNA, 19 nt, Artificial Sequence
  Description of Artificial Sequence: Synthetic oligonucleotide
gaggaagguaguauguuua

SEQ ID NO: 973481 - RNA, 19 nt, Artificial Sequence
  Description of Artificial Sequence: Synthetic oligonucleotide
ucuuuaccugcgccucacc

SEQ ID NO: 973482 - RNA, 19 nt, Artificial Sequence
  Description of Artificial Sequence: Synthetic oligonucleotide
auggguuugacaggcuuca

SEQ ID NO: 973483 - RNA, 19 nt, Artificial Sequence
  Description of Artificial Sequence: Synthetic oligonucleotide
uuacaucaccauguaaguu

SEQ ID NO: 973484 - RNA, 19 nt, Artificial Sequence
  Description of Artificial Sequence: Synthetic oligonucleotide
ucugcauaccugcgauccu

SEQ ID NO: 973485 - RNA, 19 nt, Artificial Sequence
  Description of Artificial Sequence: Synthetic oligonucleotide
ugcaugguuccucccugac

SEQ ID NO: 973486 - RNA, 19 nt, Artificial Sequence
  Description of Artificial Sequence: Synthetic oligonucleotide
cccuaguuagcuaacugug

SEQ ID NO: 973487 - RNA, 19 nt, Artificial Sequence
  Description of Artificial Sequence: Synthetic oligonucleotide
gugaaagacaaaaccugga

SEQ ID NO: 973488 - RNA, 19 nt, Artificial Sequence
  Description of Artificial Sequence: Synthetic oligonucleotide
uuucggcuuuauugagacc

SEQ ID NO: 973489 - RNA, 19 nt, Artificial Sequence
  Description of Artificial Sequence: Synthetic oligonucleotide
cucgcaacgccuguccgcc

SEQ ID NO: 973490 - RNA, 19 nt, Artificial Sequence
  Description of Artificial Sequence: Synthetic oligonucleotide
aacgaguucugaacccaca

SEQ ID NO: 973491 - RNA, 19 nt, Artificial Sequence
  Description of Artificial Sequence: Synthetic oligonucleotide
aaccuuccggggccuuuag

SEQ ID NO: 973492 - RNA, 19 nt, Artificial Sequence
  Description of Artificial Sequence: Synthetic oligonucleotide
gaaagagauuuaguaguua

SEQ ID NO: 973493 - RNA, 19 nt, Artificial Sequence
  Description of Artificial Sequence: Synthetic oligonucleotide
ugacuacagccccuaguua

SEQ ID NO: 973494 - RNA, 19 nt, Artificial Sequence
  Description of Artificial Sequence: Synthetic oligonucleotide
agguucuaugaagggagug

SEQ ID NO: 973495 - RNA, 19 nt, Artificial Sequence
  Description of Artificial Sequence: Synthetic oligonucleotide
cacugcaccucugcaaagc

SEQ ID NO: 973496 - RNA, 19 nt, Artificial Sequence
  Description of Artificial Sequence: Synthetic oligonucleotide
gucccaaccuuccggggcc

SEQ ID NO: 973497 - RNA, 19 nt, Artificial Sequence
  Description of Artificial Sequence: Synthetic oligonucleotide
uggucccaaccuuccgggg

SEQ ID NO: 973498 - RNA, 19 nt, Artificial Sequence
  Description of Artificial Sequence: Synthetic oligonucleotide
ugcccaaaacgaguucuga

SEQ ID NO: 973499 - RNA, 19 nt, Artificial Sequence
  Description of Artificial Sequence: Synthetic oligonucleotide
guuaagaggagccgucccu

SEQ ID NO: 973500 - RNA, 19 nt, Artificial Sequence
  Description of Artificial Sequence: Synthetic oligonucleotide
ugcauaccugcgauccuua

SEQ ID NO: 973501 - RNA, 19 nt, Artificial Sequence
  Description of Artificial Sequence: Synthetic oligonucleotide
aagugaccuaacacagcca

SEQ ID NO: 973502 - RNA, 19 nt, Artificial Sequence
  Description of Artificial Sequence: Synthetic oligonucleotide
ccaucugguaugaggaaug

SEQ ID NO: 973503 - RNA, 19 nt, Artificial Sequence
  Description of Artificial Sequence: Synthetic oligonucleotide
accuuccggggccuuuagg

SEQ ID NO: 973504 - RNA, 19 nt, Artificial Sequence
  Description of Artificial Sequence: Synthetic oligonucleotide
aggcauaaacaggcagggg

SEQ ID NO: 973505 - RNA, 19 nt, Artificial Sequence
  Description of Artificial Sequence: Synthetic oligonucleotide
ggucaauggcauccaagac

SEQ ID NO: 973506 - RNA, 19 nt, Artificial Sequence
  Description of Artificial Sequence: Synthetic oligonucleotide
gaaaggcagugcucuggca

SEQ ID NO: 973507 - RNA, 19 nt, Artificial Sequence
  Description of Artificial Sequence: Synthetic oligonucleotide
cacuaaggaaaacuaauuu

SEQ ID NO: 973508 - RNA, 19 nt, Artificial Sequence
  Description of Artificial Sequence: Synthetic oligonucleotide
acgagucugccugcucgcc

SEQ ID NO: 973509 - RNA, 19 nt, Artificial Sequence
  Description of Artificial Sequence: Synthetic oligonucleotide
ugcucgccuucacuucuug

SEQ ID NO: 973510 - RNA, 19 nt, Artificial Sequence
  Description of Artificial Sequence: Synthetic oligonucleotide
ucaggacucucuuccccuc

SEQ ID NO: 973511 - RNA, 19 nt, Artificial Sequence
  Description of Artificial Sequence: Synthetic oligonucleotide
gacugaggagcgcugagau

SEQ ID NO: 973512 - RNA, 19 nt, Artificial Sequence
  Description of Artificial Sequence: Synthetic oligonucleotide
uaccugcgccucaccaugc

SEQ ID NO: 973513 - RNA, 19 nt, Artificial Sequence
  Description of Artificial Sequence: Synthetic oligonucleotide
ggucccaaccuuccggggc

SEQ ID NO: 973514 - RNA, 19 nt, Artificial Sequence
  Description of Artificial Sequence: Synthetic oligonucleotide
cagcacuaaggaaaacuaa

SEQ ID NO: 973515 - RNA, 19 nt, Artificial Sequence
  Description of Artificial Sequence: Synthetic oligonucleotide
auggguuauaccacugcau

SEQ ID NO: 973516 - RNA, 19 nt, Artificial Sequence
  Description of Artificial Sequence: Synthetic oligonucleotide
cguaccagccgcugaagcg

SEQ ID NO: 973517 - RNA, 19 nt, Artificial Sequence
  Description of Artificial Sequence: Synthetic oligonucleotide
aggcgccagggacaaaacu

SEQ ID NO: 973518 - RNA, 19 nt, Artificial Sequence
  Description of Artificial Sequence: Synthetic oligonucleotide
uaccugcgauccuuacuga

SEQ ID NO: 973519 - RNA, 19 nt, Artificial Sequence
  Description of Artificial Sequence: Synthetic oligonucleotide
caucguaagaucgccucca

SEQ ID NO: 973520 - RNA, 19 nt, Artificial Sequence
  Description of Artificial Sequence: Synthetic oligonucleotide
cacagcacuaaggaaaacu

SEQ ID NO: 973521 - RNA, 19 nt, Artificial Sequence
  Description of Artificial Sequence: Synthetic oligonucleotide
gacaaugggaaugccaguu

SEQ ID NO: 973522 - RNA, 19 nt, Artificial Sequence
  Description of Artificial Sequence: Synthetic oligonucleotide
gaggagcgcugagauuccg

SEQ ID NO: 973523 - RNA, 19 nt, Artificial Sequence
  Description of Artificial Sequence: Synthetic oligonucleotide
cagaggguccggauugcuc

SEQ ID NO: 973524 - RNA, 19 nt, Artificial Sequence
  Description of Artificial Sequence: Synthetic oligonucleotide
gaugccccgaaggcuguug

SEQ ID NO: 973525 - RNA, 19 nt, Artificial Sequence
  Description of Artificial Sequence: Synthetic oligonucleotide
uuccgcacggucucuucau

SEQ ID NO: 973526 - RNA, 19 nt, Artificial Sequence
  Description of Artificial Sequence: Synthetic oligonucleotide
agacugaggagcgcugaga

SEQ ID NO: 973527 - RNA, 19 nt, Artificial Sequence
  Description of Artificial Sequence: Synthetic oligonucleotide
ggaugcggcagagacugag

SEQ ID NO: 973528 - RNA, 19 nt, Artificial Sequence
  Description of Artificial Sequence: Synthetic oligonucleotide
cagaucggcgucguaccag

SEQ ID NO: 973529 - RNA, 19 nt, Artificial Sequence
  Description of Artificial Sequence: Synthetic oligonucleotide
uaccagccgcugaagcggu

SEQ ID NO: 973530 - RNA, 19 nt, Artificial Sequence
  Description of Artificial Sequence: Synthetic oligonucleotide
cacgcuucgccuccucgug

SEQ ID NO: 973531 - RNA, 19 nt, Artificial Sequence
  Description of Artificial Sequence: Synthetic oligonucleotide
ccggauugcucucuucugc

SEQ ID NO: 973532 - RNA, 19 nt, Artificial Sequence
  Description of Artificial Sequence: Synthetic oligonucleotide
agguguuuucugacuaggu

SEQ ID NO: 973533 - RNA, 19 nt, Artificial Sequence
  Description of Artificial Sequence: Synthetic oligonucleotide
gccuuuagggucagagagg

SEQ ID NO: 973534 - RNA, 19 nt, Artificial Sequence
  Description of Artificial Sequence: Synthetic oligonucleotide
cugcgauccuuacugaugu

SEQ ID NO: 973535 - RNA, 19 nt, Artificial Sequence
  Description of Artificial Sequence: Synthetic oligonucleotide
uguccgccacgcuucgccu

SEQ ID NO: 973536 - RNA, 19 nt, Artificial Sequence
  Description of Artificial Sequence: Synthetic oligonucleotide
aucuuuccacucgcucgac

SEQ ID NO: 973537 - RNA, 19 nt, Artificial Sequence
  Description of Artificial Sequence: Synthetic oligonucleotide
uuccgcucgcagcccgucc

SEQ ID NO: 973538 - RNA, 19 nt, Artificial Sequence
  Description of Artificial Sequence: Synthetic oligonucleotide
gcucagaucggcgucguac

SEQ ID NO: 973539 - RNA, 19 nt, Artificial Sequence
  Description of Artificial Sequence: Synthetic oligonucleotide
caccuuccacugaaaugac

SEQ ID NO: 973540 - RNA, 19 nt, Artificial Sequence
  Description of Artificial Sequence: Synthetic oligonucleotide
gcgccugcgcacuugcgcg

SEQ ID NO: 973541 - RNA, 19 nt, Artificial Sequence
  Description of Artificial Sequence: Synthetic oligonucleotide
aggagccgucccuggaugu

SEQ ID NO: 973542 - RNA, 19 nt, Artificial Sequence
  Description of Artificial Sequence: Synthetic oligonucleotide
aggguagcugguccucagu

SEQ ID NO: 973543 - RNA, 19 nt, Artificial Sequence
  Description of Artificial Sequence: Synthetic oligonucleotide
gguuauaccacugcauggu

SEQ ID NO: 973544 - RNA, 19 nt, Artificial Sequence
  Description of Artificial Sequence: Synthetic oligonucleotide
ccuguuaagaggagccguc

SEQ ID NO: 973545 - RNA, 19 nt, Artificial Sequence
  Description of Artificial Sequence: Synthetic oligonucleotide
gcuuauugucuggugacca

SEQ ID NO: 973546 - RNA, 19 nt, Artificial Sequence
  Description of Artificial Sequence: Synthetic oligonucleotide
guuaugcccaaaacgaguu

SEQ ID NO: 973547 - RNA, 19 nt, Artificial Sequence
  Description of Artificial Sequence: Synthetic oligonucleotide
uggcccgccgggcucagau

SEQ ID NO: 973548 - RNA, 19 nt, Artificial Sequence
  Description of Artificial Sequence: Synthetic oligonucleotide
augcccaaaacgaguucug

SEQ ID NO: 973549 - RNA, 19 nt, Artificial Sequence
  Description of Artificial Sequence: Synthetic oligonucleotide
ccggaucagcacuagcuug

SEQ ID NO: 973550 - RNA, 19 nt, Artificial Sequence
  Description of Artificial Sequence: Synthetic oligonucleotide
guuugacaggcuucaaguu

SEQ ID NO: 973551 - RNA, 19 nt, Artificial Sequence
  Description of Artificial Sequence: Synthetic oligonucleotide
ggcgcucucgccgugccgg

SEQ ID NO: 973552 - RNA, 19 nt, Artificial Sequence
  Description of Artificial Sequence: Synthetic oligonucleotide
ggcuuauugucuggugacc

SEQ ID NO: 973553 - RNA, 19 nt, Artificial Sequence
  Description of Artificial Sequence: Synthetic oligonucleotide
ggaagguaguauguuuaca

SEQ ID NO: 973554 - RNA, 19 nt, Artificial Sequence
  Description of Artificial Sequence: Synthetic oligonucleotide
aacccacaugguagggcca

SEQ ID NO: 973555 - RNA, 19 nt, Artificial Sequence
  Description of Artificial Sequence: Synthetic oligonucleotide
augguagggccaagcagcu

SEQ ID NO: 973556 - RNA, 19 nt, Artificial Sequence
  Description of Artificial Sequence: Synthetic oligonucleotide
gcucccgcgcacuuucucc

SEQ ID NO: 973557 - RNA, 19 nt, Artificial Sequence
  Description of Artificial Sequence: Synthetic oligonucleotide
augccaguuggcagguuca

SEQ ID NO: 973558 - RNA, 19 nt, Artificial Sequence
  Description of Artificial Sequence: Synthetic oligonucleotide
gccccuaguuagcuaacug

SEQ ID NO: 973559 - RNA, 19 nt, Artificial Sequence
  Description of Artificial Sequence: Synthetic oligonucleotide
gguagcugguccucaguaa

SEQ ID NO: 973560 - RNA, 19 nt, Artificial Sequence
  Description of Artificial Sequence: Synthetic oligonucleotide
cauaccugcgauccuuacu

SEQ ID NO: 973561 - RNA, 19 nt, Artificial Sequence
  Description of Artificial Sequence: Synthetic oligonucleotide
cugcgccucaccaugcuua

SEQ ID NO: 973562 - RNA, 19 nt, Artificial Sequence
  Description of Artificial Sequence: Synthetic oligonucleotide
aagaucgccuccagaucuu

SEQ ID NO: 973563 - RNA, 19 nt, Artificial Sequence
  Description of Artificial Sequence: Synthetic oligonucleotide
gucguaccagccgcugaag

SEQ ID NO: 973564 - RNA, 19 nt, Artificial Sequence
  Description of Artificial Sequence: Synthetic oligonucleotide
cugguaugaggaauggcuu

SEQ ID NO: 973565 - RNA, 19 nt, Artificial Sequence
  Description of Artificial Sequence: Synthetic oligonucleotide
gaucggcgucguaccagcc

SEQ ID NO: 973566 - RNA, 19 nt, Artificial Sequence
  Description of Artificial Sequence: Synthetic oligonucleotide
gcgccagggacaaaacuug

SEQ ID NO: 973567 - RNA, 19 nt, Artificial Sequence
  Description of Artificial Sequence: Synthetic oligonucleotide
cauugaggcgccagguccu

SEQ ID NO: 973568 - RNA, 19 nt, Artificial Sequence
  Description of Artificial Sequence: Synthetic oligonucleotide
augcuugacgaugccccga

SEQ ID NO: 973569 - RNA, 19 nt, Artificial Sequence
  Description of Artificial Sequence: Synthetic oligonucleotide
gugcaggggauuaaauacu

SEQ ID NO: 973570 - RNA, 19 nt, Artificial Sequence
  Description of Artificial Sequence: Synthetic oligonucleotide
ugguagggccaagcagcug

SEQ ID NO: 973571 - RNA, 19 nt, Artificial Sequence
  Description of Artificial Sequence: Synthetic oligonucleotide
cacuagcuuguaggcggcc

SEQ ID NO: 973572 - RNA, 19 nt, Artificial Sequence
  Description of Artificial Sequence: Synthetic oligonucleotide
cguaagaucgccuccagau

SEQ ID NO: 973573 - RNA, 19 nt, Artificial Sequence
  Description of Artificial Sequence: Synthetic oligonucleotide
ugcgauccuuacugauguu

SEQ ID NO: 973574 - RNA, 19 nt, Artificial Sequence
  Description of Artificial Sequence: Synthetic oligonucleotide
gccgcugaagcgguucucc

SEQ ID NO: 973575 - RNA, 19 nt, Artificial Sequence
  Description of Artificial Sequence: Synthetic oligonucleotide
cagcccgucccaccaccgc

SEQ ID NO: 973576 - RNA, 19 nt, Artificial Sequence
  Description of Artificial Sequence: Synthetic oligonucleotide
gggccuuuagggucagaga

SEQ ID NO: 973577 - RNA, 19 nt, Artificial Sequence
  Description of Artificial Sequence: Synthetic oligonucleotide
agcagaugucgaauucaua

SEQ ID NO: 973578 - RNA, 19 nt, Artificial Sequence
  Description of Artificial Sequence: Synthetic oligonucleotide
gguacgagucugccugcuc

SEQ ID NO: 973579 - RNA, 19 nt, Artificial Sequence
  Description of Artificial Sequence: Synthetic oligonucleotide
gcauaccugcgauccuuac

SEQ ID NO: 973580 - RNA, 19 nt, Artificial Sequence
  Description of Artificial Sequence: Synthetic oligonucleotide
ggaaagagauuuaguaguu

SEQ ID NO: 973581 - RNA, 19 nt, Artificial Sequence
  Description of Artificial Sequence: Synthetic oligonucleotide
gggguacgagucugccugc

SEQ ID NO: 973582 - RNA, 19 nt, Artificial Sequence
  Description of Artificial Sequence: Synthetic oligonucleotide
ccgaucaaggggcacugca

SEQ ID NO: 973583 - RNA, 19 nt, Artificial Sequence
  Description of Artificial Sequence: Synthetic oligonucleotide
aggguccggauugcucucu

SEQ ID NO: 973584 - RNA, 19 nt, Artificial Sequence
  Description of Artificial Sequence: Synthetic oligonucleotide
ccccuccagaugcuugacg

SEQ ID NO: 973585 - RNA, 19 nt, Artificial Sequence
  Description of Artificial Sequence: Synthetic oligonucleotide
agaucgccuccagaucuuu

SEQ ID NO: 973586 - RNA, 19 nt, Artificial Sequence
  Description of Artificial Sequence: Synthetic oligonucleotide
ucgcaacgccuguccgcca

SEQ ID NO: 973587 - RNA, 19 nt, Artificial Sequence
  Description of Artificial Sequence: Synthetic oligonucleotide
cagccaccgcuuccauggc

SEQ ID NO: 973588 - RNA, 19 nt, Artificial Sequence
  Description of Artificial Sequence: Synthetic oligonucleotide
ccgucccuggauguggacc

SEQ ID NO: 973589 - RNA, 19 nt, Artificial Sequence
  Description of Artificial Sequence: Synthetic oligonucleotide
gcuugacgaugccccgaag

SEQ ID NO: 973590 - RNA, 19 nt, Artificial Sequence
  Description of Artificial Sequence: Synthetic oligonucleotide
ccccuaguuagcuaacugu

SEQ ID NO: 973591 - RNA, 19 nt, Artificial Sequence
  Description of Artificial Sequence: Synthetic oligonucleotide
cgccucaccaugcuuagca

SEQ ID NO: 973592 - RNA, 19 nt, Artificial Sequence
  Description of Artificial Sequence: Synthetic oligonucleotide
ccucaguaaggucugcaua

SEQ ID NO: 973593 - RNA, 19 nt, Artificial Sequence
  Description of Artificial Sequence: Synthetic oligonucleotide
gcacuaaggaaaacuaauu

SEQ ID NO: 973594 - RNA, 19 nt, Artificial Sequence
  Description of Artificial Sequence: Synthetic oligonucleotide
ccuuuagggccuuuagggu

SEQ ID NO: 973595 - RNA, 19 nt, Artificial Sequence
  Description of Artificial Sequence: Synthetic oligonucleotide
ucccaaccuuccggggccu

SEQ ID NO: 973596 - RNA, 19 nt, Artificial Sequence
  Description of Artificial Sequence: Synthetic oligonucleotide
ggcacugggguacgagucu

SEQ ID NO: 973597 - RNA, 19 nt, Artificial Sequence
  Description of Artificial Sequence: Synthetic oligonucleotide
cucccgcgcacuuucuccu

SEQ ID NO: 973598 - RNA, 19 nt, Artificial Sequence
  Description of Artificial Sequence: Synthetic oligonucleotide
cgcuucgccuccucguggc

SEQ ID NO: 973599 - RNA, 19 nt, Artificial Sequence
  Description of Artificial Sequence: Synthetic oligonucleotide
cgcgccugcgcacuugcgc

SEQ ID NO: 973600 - RNA, 19 nt, Artificial Sequence
  Description of Artificial Sequence: Synthetic oligonucleotide
ggauguggaccaagaaccu

SEQ ID NO: 973601 - RNA, 19 nt, Artificial Sequence
  Description of Artificial Sequence: Synthetic oligonucleotide
agccgucccuggaugugga

SEQ ID NO: 973602 - RNA, 19 nt, Artificial Sequence
  Description of Artificial Sequence: Synthetic oligonucleotide
cgcacggucucuucaucuc

SEQ ID NO: 973603 - RNA, 19 nt, Artificial Sequence
  Description of Artificial Sequence: Synthetic oligonucleotide
ggcgucguaccagccgcug

SEQ ID NO: 973604 - RNA, 19 nt, Artificial Sequence
  Description of Artificial Sequence: Synthetic oligonucleotide
gcaucucgcaacgccuguc

SEQ ID NO: 973605 - RNA, 19 nt, Artificial Sequence
  Description of Artificial Sequence: Synthetic oligonucleotide
cugcauaccugcgauccuu

SEQ ID NO: 973606 - RNA, 19 nt, Artificial Sequence
  Description of Artificial Sequence: Synthetic oligonucleotide
gauuccgcucgcagcccgu

SEQ ID NO: 973607 - RNA, 19 nt, Artificial Sequence
  Description of Artificial Sequence: Synthetic oligonucleotide
guaugaggaauggcuuauu

SEQ ID NO: 973608 - RNA, 19 nt, Artificial Sequence
  Description of Artificial Sequence: Synthetic oligonucleotide
gcgcugagauuccgcucgc

SEQ ID NO: 973609 - RNA, 19 nt, Artificial Sequence
  Description of Artificial Sequence: Synthetic oligonucleotide
gcgucguaccagccgcuga

SEQ ID NO: 973610 - RNA, 19 nt, Artificial Sequence
  Description of Artificial Sequence: Synthetic oligonucleotide
gcaccccagagguguuuuc

SEQ ID NO: 973611 - RNA, 19 nt, Artificial Sequence
  Description of Artificial Sequence: Synthetic oligonucleotide
gccggaucagcacuagcuu

SEQ ID NO: 973612 - RNA, 19 nt, Artificial Sequence
  Description of Artificial Sequence: Synthetic oligonucleotide
caccgcgccugcgcacuug

SEQ ID NO: 973613 - RNA, 19 nt, Artificial Sequence
  Description of Artificial Sequence: Synthetic oligonucleotide
cgucguaccagccgcugaa

SEQ ID NO: 973614 - RNA, 19 nt, Artificial Sequence
  Description of Artificial Sequence: Synthetic oligonucleotide
gccgucccuggauguggac

SEQ ID NO: 973615 - RNA, 19 nt, Artificial Sequence
  Description of Artificial Sequence: Synthetic oligonucleotide
cccgucccaccaccgcgcc

SEQ ID NO: 973616 - RNA, 19 nt, Artificial Sequence
  Description of Artificial Sequence: Synthetic oligonucleotide
cccgaucaaggggcacugc

SEQ ID NO: 973617 - RNA, 19 nt, Artificial Sequence
  Description of Artificial Sequence: Synthetic oligonucleotide
cgccgugccggaucagcac

SEQ ID NO: 973618 - RNA, 19 nt, Artificial Sequence
  Description of Artificial Sequence: Synthetic oligonucleotide
cugcucgccuucacuucuu

SEQ ID NO: 973619 - RNA, 19 nt, Artificial Sequence
  Description of Artificial Sequence: Synthetic oligonucleotide
ggguacgagucugccugcu

SEQ ID NO: 973620 - RNA, 19 nt, Artificial Sequence
  Description of Artificial Sequence: Synthetic oligonucleotide
gacaggcgccagggacaaa

SEQ ID NO: 973621 - RNA, 19 nt, Artificial Sequence
  Description of Artificial Sequence: Synthetic oligonucleotide
ggcucagaucggcgucgua

SEQ ID NO: 973622 - RNA, 19 nt, Artificial Sequence
  Description of Artificial Sequence: Synthetic oligonucleotide
gcgcucucgccgugccgga

SEQ ID NO: 973623 - RNA, 19 nt, Artificial Sequence
  Description of Artificial Sequence: Synthetic oligonucleotide
cucuggcaauaguguccuu

SEQ ID NO: 973624 - RNA, 19 nt, Artificial Sequence
  Description of Artificial Sequence: Synthetic oligonucleotide
ccgcucgcagcccguccca

SEQ ID NO: 973625 - RNA, 19 nt, Artificial Sequence
  Description of Artificial Sequence: Synthetic oligonucleotide
gcgccagguccugaccacu

SEQ ID NO: 973626 - RNA, 19 nt, Artificial Sequence
  Description of Artificial Sequence: Synthetic oligonucleotide
cgcucgcagcccgucccac

SEQ ID NO: 973627 - RNA, 19 nt, Artificial Sequence
  Description of Artificial Sequence: Synthetic oligonucleotide
ccaccgcuuccauggcuuu

SEQ ID NO: 973628 - RNA, 19 nt, Artificial Sequence
  Description of Artificial Sequence: Synthetic oligonucleotide
ccgucccaccaccgcgccu

SEQ ID NO: 973629 - RNA, 19 nt, Artificial Sequence
  Description of Artificial Sequence: Synthetic oligonucleotide
cggcgucguaccagccgcu

SEQ ID NO: 973630 - RNA, 19 nt, Artificial Sequence
  Description of Artificial Sequence: Synthetic oligonucleotide
ccgccacgcuucgccuccu

SEQ ID NO: 973631 - RNA, 19 nt, Artificial Sequence
  Description of Artificial Sequence: Synthetic oligonucleotide
cgaugccccgaaggcuguu

SEQ ID NO: 973632 - RNA, 19 nt, Artificial Sequence
  Description of Artificial Sequence: Synthetic oligonucleotide
ccggggccuuuagggccuu

SEQ ID NO: 973633 - RNA, 19 nt, Artificial Sequence
  Description of Artificial Sequence: Synthetic oligonucleotide
aaacagguaaaacauaacc

SEQ ID NO: 973634 - RNA, 19 nt, Artificial Sequence
  Description of Artificial Sequence: Synthetic oligonucleotide
auaacaaagauucauauaa

SEQ ID NO: 973635 - RNA, 19 nt, Artificial Sequence
  Description of Artificial Sequence: Synthetic oligonucleotide
aacagguaaaacauaaccc

SEQ ID NO: 973636 - RNA, 19 nt, Artificial Sequence
  Description of Artificial Sequence: Synthetic oligonucleotide
aaugccuaggagcagagag

SEQ ID NO: 973637 - RNA, 19 nt, Artificial Sequence
  Description of Artificial Sequence: Synthetic oligonucleotide
aauaucgugacgcagcugu

SEQ ID NO: 973638 - RNA, 19 nt, Artificial Sequence
  Description of Artificial Sequence: Synthetic oligonucleotide
uugagaguaagaaaacagg

SEQ ID NO: 973639 - RNA, 19 nt, Artificial Sequence
  Description of Artificial Sequence: Synthetic oligonucleotide
uccuacuuaaccuuuaggc

SEQ ID NO: 973640 - RNA, 19 nt, Artificial Sequence
  Description of Artificial Sequence: Synthetic oligonucleotide
aaagauucauauaaauaac

SEQ ID NO: 973641 - RNA, 19 nt, Artificial Sequence
  Description of Artificial Sequence: Synthetic oligonucleotide
ucuguuuccacuucgagac

SEQ ID NO: 973642 - RNA, 19 nt, Artificial Sequence
  Description of Artificial Sequence: Synthetic oligonucleotide
guuaauuaguaacucagcc

SEQ ID NO: 973643 - RNA, 19 nt, Artificial Sequence
  Description of Artificial Sequence: Synthetic oligonucleotide
aagauguggacccugguug

SEQ ID NO: 973644 - RNA, 19 nt, Artificial Sequence
  Description of Artificial Sequence: Synthetic oligonucleotide
uguauagcacaacaggcag

SEQ ID NO: 973645 - RNA, 19 nt, Artificial Sequence
  Description of Artificial Sequence: Synthetic oligonucleotide
agguaaaccacccauaacu

SEQ ID NO: 973646 - RNA, 19 nt, Artificial Sequence
  Description of Artificial Sequence: Synthetic oligonucleotide
uuugugaggaccuuaucag

SEQ ID NO: 973647 - RNA, 19 nt, Artificial Sequence
  Description of Artificial Sequence: Synthetic oligonucleotide
cauaacuccucauacauac

SEQ ID NO: 973648 - RNA, 19 nt, Artificial Sequence
  Description of Artificial Sequence: Synthetic oligonucleotide
uaacccgugagcauggagg

SEQ ID NO: 973649 - RNA, 19 nt, Artificial Sequence
  Description of Artificial Sequence: Synthetic oligonucleotide
aacaaagauucauauaaau

SEQ ID NO: 973650 - RNA, 19 nt, Artificial Sequence
  Description of Artificial Sequence: Synthetic oligonucleotide
uaauuaguaacucagccuu

SEQ ID NO: 973651 - RNA, 19 nt, Artificial Sequence
  Description of Artificial Sequence: Synthetic oligonucleotide
ugagaguaagaaaacaggu

SEQ ID NO: 973652 - RNA, 19 nt, Artificial Sequence
  Description of Artificial Sequence: Synthetic oligonucleotide
aaaauaacccgugagcaug

SEQ ID NO: 973653 - RNA, 19 nt, Artificial Sequence
  Description of Artificial Sequence: Synthetic oligonucleotide
agaguaagaaaacagguaa

SEQ ID NO: 973654 - RNA, 19 nt, Artificial Sequence
  Description of Artificial Sequence: Synthetic oligonucleotide
acagguaaaacauaaccca

SEQ ID NO: 973655 - RNA, 19 nt, Artificial Sequence
  Description of Artificial Sequence: Synthetic oligonucleotide
uucaauaucgugacgcagc

SEQ ID NO: 973656 - RNA, 19 nt, Artificial Sequence
  Description of Artificial Sequence: Synthetic oligonucleotide
auaucugucugauaggcug

SEQ ID NO: 973657 - RNA, 19 nt, Artificial Sequence
  Description of Artificial Sequence: Synthetic oligonucleotide
agugacauaggguggacuc

SEQ ID NO: 973658 - RNA, 19 nt, Artificial Sequence
  Description of Artificial Sequence: Synthetic oligonucleotide
cucacaucaacccuggccc

SEQ ID NO: 973659 - RNA, 19 nt, Artificial Sequence
  Description of Artificial Sequence: Synthetic oligonucleotide
uggcccaacaaccagauaa

SEQ ID NO: 973660 - RNA, 19 nt, Artificial Sequence
  Description of Artificial Sequence: Synthetic oligonucleotide
aaagguaaaccacccauaa

SEQ ID NO: 973661 - RNA, 19 nt, Artificial Sequence
  Description of Artificial Sequence: Synthetic oligonucleotide
uagcgaaacacaaaccacc

SEQ ID NO: 973662 - RNA, 19 nt, Artificial Sequence
  Description of Artificial Sequence: Synthetic oligonucleotide
ugaaagguaaaccacccau

SEQ ID NO: 973663 - RNA, 19 nt, Artificial Sequence
  Description of Artificial Sequence: Synthetic oligonucleotide
aaaacuaagaccaucccua

SEQ ID NO: 973664 - RNA, 19 nt, Artificial Sequence
  Description of Artificial Sequence: Synthetic oligonucleotide
uguuacuccuacuuaaccu

SEQ ID NO: 973665 - RNA, 19 nt, Artificial Sequence
  Description of Artificial Sequence: Synthetic oligonucleotide
caagcuaugucuagcagag

SEQ ID NO: 973666 - RNA, 19 nt, Artificial Sequence
  Description of Artificial Sequence: Synthetic oligonucleotide
aagguaaaccacccauaac

SEQ ID NO: 973667 - RNA, 19 nt, Artificial Sequence
  Description of Artificial Sequence: Synthetic oligonucleotide
ccuuaagucuucaauaucg

SEQ ID NO: 973668 - RNA, 19 nt, Artificial Sequence
  Description of Artificial Sequence: Synthetic oligonucleotide
aacccagaaagccagcuga

SEQ ID NO: 973669 - RNA, 19 nt, Artificial Sequence
  Description of Artificial Sequence: Synthetic oligonucleotide
aguaacucagccuuugaga

SEQ ID NO: 973670 - RNA, 19 nt, Artificial Sequence
  Description of Artificial Sequence: Synthetic oligonucleotide
aagguauagaguaggaaug

SEQ ID NO: 973671 - RNA, 19 nt, Artificial Sequence
  Description of Artificial Sequence: Synthetic oligonucleotide
acuaagaccaucccuaaau

SEQ ID NO: 973672 - RNA, 19 nt, Artificial Sequence
  Description of Artificial Sequence: Synthetic oligonucleotide
ggggagauaacccugaggc

SEQ ID NO: 973673 - RNA, 19 nt, Artificial Sequence
  Description of Artificial Sequence: Synthetic oligonucleotide
uauagcacaacaggcaggc

SEQ ID NO: 973674 - RNA, 19 nt, Artificial Sequence
  Description of Artificial Sequence: Synthetic oligonucleotide
uucuucugaccacaucugg

SEQ ID NO: 973675 - RNA, 19 nt, Artificial Sequence
  Description of Artificial Sequence: Synthetic oligonucleotide
uaguaacucagccuuugag

SEQ ID NO: 973676 - RNA, 19 nt, Artificial Sequence
  Description of Artificial Sequence: Synthetic oligonucleotide
caucccuaaaucaggaggc

SEQ ID NO: 973677 - RNA, 19 nt, Artificial Sequence
  Description of Artificial Sequence: Synthetic oligonucleotide
uugguaauagagcaucagu

SEQ ID NO: 973678 - RNA, 19 nt, Artificial Sequence
  Description of Artificial Sequence: Synthetic oligonucleotide
acauaacaaagauucauau

SEQ ID NO: 973679 - RNA, 19 nt, Artificial Sequence
  Description of Artificial Sequence: Synthetic oligonucleotide
aaucagguccugauuuugc

SEQ ID NO: 973680 - RNA, 19 nt, Artificial Sequence
  Description of Artificial Sequence: Synthetic oligonucleotide
ucauauaaauaacuuuaua

SEQ ID NO: 973681 - RNA, 19 nt, Artificial Sequence
  Description of Artificial Sequence: Synthetic oligonucleotide
uaagaccaucccuaaauca

SEQ ID NO: 973682 - RNA, 19 nt, Artificial Sequence
  Description of Artificial Sequence: Synthetic oligonucleotide
guuugugaggaccuuauca

SEQ ID NO: 973683 - RNA, 19 nt, Artificial Sequence
  Description of Artificial Sequence: Synthetic oligonucleotide
aaucuagcugagucccugg

SEQ ID NO: 973684 - RNA, 19 nt, Artificial Sequence
  Description of Artificial Sequence: Synthetic oligonucleotide
agguuaauuaguaacucag

SEQ ID NO: 973685 - RNA, 19 nt, Artificial Sequence
  Description of Artificial Sequence: Synthetic oligonucleotide
ugucuggugaagaugugga

SEQ ID NO: 973686 - RNA, 19 nt, Artificial Sequence
  Description of Artificial Sequence: Synthetic oligonucleotide
aaccagucgacauaacaaa

SEQ ID NO: 973687 - RNA, 19 nt, Artificial Sequence
  Description of Artificial Sequence: Synthetic oligonucleotide
aucaguaggaccaagguau

SEQ ID NO: 973688 - RNA, 19 nt, Artificial Sequence
  Description of Artificial Sequence: Synthetic oligonucleotide
acccauaaagccaaggguc

SEQ ID NO: 973689 - RNA, 19 nt, Artificial Sequence
  Description of Artificial Sequence: Synthetic oligonucleotide
ugucuagcagagaagaauu

SEQ ID NO: 973690 - RNA, 19 nt, Artificial Sequence
  Description of Artificial Sequence: Synthetic oligonucleotide
agcuaugucuagcagagaa

SEQ ID NO: 973691 - RNA, 19 nt, Artificial Sequence
  Description of Artificial Sequence: Synthetic oligonucleotide
ggcaauacaaaccagucga

SEQ ID NO: 973692 - RNA, 19 nt, Artificial Sequence
  Description of Artificial Sequence: Synthetic oligonucleotide
uuuaucuugcaagcuaugu

SEQ ID NO: 973693 - RNA, 19 nt, Artificial Sequence
  Description of Artificial Sequence: Synthetic oligonucleotide
gaccuuaucaguuccaucu

SEQ ID NO: 973694 - RNA, 19 nt, Artificial Sequence
  Description of Artificial Sequence: Synthetic oligonucleotide
ucaauaucgugacgcagcu

SEQ ID NO: 973695 - RNA, 19 nt, Artificial Sequence
  Description of Artificial Sequence: Synthetic oligonucleotide
gagggaaucgcauuccuuc

SEQ ID NO: 973696 - RNA, 19 nt, Artificial Sequence
  Description of Artificial Sequence: Synthetic oligonucleotide
aaaccagucgacauaacaa

SEQ ID NO: 973697 - RNA, 19 nt, Artificial Sequence
  Description of Artificial Sequence: Synthetic oligonucleotide
ugcagcgucagauucuucu

SEQ ID NO: 973698 - RNA, 19 nt, Artificial Sequence
  Description of Artificial Sequence: Synthetic oligonucleotide
aaauaacccgugagcaugg

SEQ ID NO: 973699 - RNA, 19 nt, Artificial Sequence
  Description of Artificial Sequence: Synthetic oligonucleotide
uaacaaagauucauauaaa

SEQ ID NO: 973700 - RNA, 19 nt, Artificial Sequence
  Description of Artificial Sequence: Synthetic oligonucleotide
aaccuuuaggccuuuggua

SEQ ID NO: 973701 - RNA, 19 nt, Artificial Sequence
  Description of Artificial Sequence: Synthetic oligonucleotide
cuagcgaaacacaaaccac

SEQ ID NO: 973702 - RNA, 19 nt, Artificial Sequence
  Description of Artificial Sequence: Synthetic oligonucleotide
uuaccugagaaaacccaga

SEQ ID NO: 973703 - RNA, 19 nt, Artificial Sequence
  Description of Artificial Sequence: Synthetic oligonucleotide
uguugaaccucuucuaguu

SEQ ID NO: 973704 - RNA, 19 nt, Artificial Sequence
  Description of Artificial Sequence: Synthetic oligonucleotide
gaucuuucggagggaaucg

SEQ ID NO: 973705 - RNA, 19 nt, Artificial Sequence
  Description of Artificial Sequence: Synthetic oligonucleotide
gaccaagguauagaguagg

SEQ ID NO: 973706 - RNA, 19 nt, Artificial Sequence
  Description of Artificial Sequence: Synthetic oligonucleotide
cagguuaccugagaaaacc

SEQ ID NO: 973707 - RNA, 19 nt, Artificial Sequence
  Description of Artificial Sequence: Synthetic oligonucleotide
uccaaaccaaaggagguug

SEQ ID NO: 973708 - RNA, 19 nt, Artificial Sequence
  Description of Artificial Sequence: Synthetic oligonucleotide
ugggcucccagugacauag

SEQ ID NO: 973709 - RNA, 19 nt, Artificial Sequence
  Description of Artificial Sequence: Synthetic oligonucleotide
ucuucaauaucgugacgca

SEQ ID NO: 973710 - RNA, 19 nt, Artificial Sequence
  Description of Artificial Sequence: Synthetic oligonucleotide
agauguggacccugguugg

SEQ ID NO: 973711 - RNA, 19 nt, Artificial Sequence
  Description of Artificial Sequence: Synthetic oligonucleotide
ccuacuuaaccuuuaggcc

SEQ ID NO: 973712 - RNA, 19 nt, Artificial Sequence
  Description of Artificial Sequence: Synthetic oligonucleotide
agauacagggucuccccuc

SEQ ID NO: 973713 - RNA, 19 nt, Artificial Sequence
  Description of Artificial Sequence: Synthetic oligonucleotide
agagagguuaggguugugg

SEQ ID NO: 973714 - RNA, 19 nt, Artificial Sequence
  Description of Artificial Sequence: Synthetic oligonucleotide
guuaccugagaaaacccag

SEQ ID NO: 973715 - RNA, 19 nt, Artificial Sequence
  Description of Artificial Sequence: Synthetic oligonucleotide
uuaggcucuggacuugaga

SEQ ID NO: 973716 - RNA, 19 nt, Artificial Sequence
  Description of Artificial Sequence: Synthetic oligonucleotide
augaaguggggaguugagc

SEQ ID NO: 973717 - RNA, 19 nt, Artificial Sequence
  Description of Artificial Sequence: Synthetic oligonucleotide
aaacuaagaccaucccuaa

SEQ ID NO: 973718 - RNA, 19 nt, Artificial Sequence
  Description of Artificial Sequence: Synthetic oligonucleotide
aauccuaguggggacuuug

SEQ ID NO: 973719 - RNA, 19 nt, Artificial Sequence
  Description of Artificial Sequence: Synthetic oligonucleotide
acaacaggcaggcuucuca

SEQ ID NO: 973720 - RNA, 19 nt, Artificial Sequence
  Description of Artificial Sequence: Synthetic oligonucleotide
ugguccuuaagucuucaau

SEQ ID NO: 973721 - RNA, 19 nt, Artificial Sequence
  Description of Artificial Sequence: Synthetic oligonucleotide
acaaagauucauauaaaua

SEQ ID NO: 973722 - RNA, 19 nt, Artificial Sequence
  Description of Artificial Sequence: Synthetic oligonucleotide
gcaagaaaacccauaaagc

SEQ ID NO: 973723 - RNA, 19 nt, Artificial Sequence
  Description of Artificial Sequence: Synthetic oligonucleotide
ucaacucagcauccuuaag

SEQ ID NO: 973724 - RNA, 19 nt, Artificial Sequence
  Description of Artificial Sequence: Synthetic oligonucleotide
uucaacucagcauccuuaa

SEQ ID NO: 973725 - RNA, 19 nt, Artificial Sequence
  Description of Artificial Sequence: Synthetic oligonucleotide
uaccugagaaaacccagaa

SEQ ID NO: 973726 - RNA, 19 nt, Artificial Sequence
  Description of Artificial Sequence: Synthetic oligonucleotide
cuucauggaggaugaagug

SEQ ID NO: 973727 - RNA, 19 nt, Artificial Sequence
  Description of Artificial Sequence: Synthetic oligonucleotide
guguuacuccuacuuaacc

SEQ ID NO: 973728 - RNA, 19 nt, Artificial Sequence
  Description of Artificial Sequence: Synthetic oligonucleotide
ucgacauaacaaagauuca

SEQ ID NO: 973729 - RNA, 19 nt, Artificial Sequence
  Description of Artificial Sequence: Synthetic oligonucleotide
ugucaggggaggaaccucu

SEQ ID NO: 973730 - RNA, 19 nt, Artificial Sequence
  Description of Artificial Sequence: Synthetic oligonucleotide
caguaauaaggcaaagcca

SEQ ID NO: 973731 - RNA, 19 nt, Artificial Sequence
  Description of Artificial Sequence: Synthetic oligonucleotide
aagguguuacuccuacuua

SEQ ID NO: 973732 - RNA, 19 nt, Artificial Sequence
  Description of Artificial Sequence: Synthetic oligonucleotide
cuaagaccaucccuaaauc

SEQ ID NO: 973733 - RNA, 19 nt, Artificial Sequence
  Description of Artificial Sequence: Synthetic oligonucleotide
cuacuuaaccuuuaggccu

SEQ ID NO: 973734 - RNA, 19 nt, Artificial Sequence
  Description of Artificial Sequence: Synthetic oligonucleotide
cuugcaagcuaugucuagc

SEQ ID NO: 973735 - RNA, 19 nt, Artificial Sequence
  Description of Artificial Sequence: Synthetic oligonucleotide
agguguuacuccuacuuaa

SEQ ID NO: 973736 - RNA, 19 nt, Artificial Sequence
  Description of Artificial Sequence: Synthetic oligonucleotide
agguuaccugagaaaaccc

SEQ ID NO: 973737 - RNA, 19 nt, Artificial Sequence
  Description of Artificial Sequence: Synthetic oligonucleotide
gaggcuaguaacagccagg

SEQ ID NO: 973738 - RNA, 19 nt, Artificial Sequence
  Description of Artificial Sequence: Synthetic oligonucleotide
agauucauauaaauaacuu

SEQ ID NO: 973739 - RNA, 19 nt, Artificial Sequence
  Description of Artificial Sequence: Synthetic oligonucleotide
cuaugucuagcagagaaga

SEQ ID NO: 973740 - RNA, 19 nt, Artificial Sequence
  Description of Artificial Sequence: Synthetic oligonucleotide
ugucucaggcuuuccagcu

SEQ ID NO: 973741 - RNA, 19 nt, Artificial Sequence
  Description of Artificial Sequence: Synthetic oligonucleotide
aguuugugaggaccuuauc

SEQ ID NO: 973742 - RNA, 19 nt, Artificial Sequence
  Description of Artificial Sequence: Synthetic oligonucleotide
aucuagcugagucccuggg

SEQ ID NO: 973743 - RNA, 19 nt, Artificial Sequence
  Description of Artificial Sequence: Synthetic oligonucleotide
ggaaacacugaacacuuca

SEQ ID NO: 973744 - RNA, 19 nt, Artificial Sequence
  Description of Artificial Sequence: Synthetic oligonucleotide
uaugucuagcagagaagaa

SEQ ID NO: 973745 - RNA, 19 nt, Artificial Sequence
  Description of Artificial Sequence: Synthetic oligonucleotide
cuccuacuuaaccuuuagg

SEQ ID NO: 973746 - RNA, 19 nt, Artificial Sequence
  Description of Artificial Sequence: Synthetic oligonucleotide
ccaucccuaaaucaggagg

SEQ ID NO: 973747 - RNA, 19 nt, Artificial Sequence
  Description of Artificial Sequence: Synthetic oligonucleotide
cagaaagccagcugaguuc

SEQ ID NO: 973748 - RNA, 19 nt, Artificial Sequence
  Description of Artificial Sequence: Synthetic oligonucleotide
uccacuucgagaccuucuc

SEQ ID NO: 973749 - RNA, 19 nt, Artificial Sequence
  Description of Artificial Sequence: Synthetic oligonucleotide
agccagcaauccuaguggg

SEQ ID NO: 973750 - RNA, 19 nt, Artificial Sequence
  Description of Artificial Sequence: Synthetic oligonucleotide
ucuagcugagucccugggu

SEQ ID NO: 973751 - RNA, 19 nt, Artificial Sequence
  Description of Artificial Sequence: Synthetic oligonucleotide
uugugaggaccuuaucagu

SEQ ID NO: 973752 - RNA, 19 nt, Artificial Sequence
  Description of Artificial Sequence: Synthetic oligonucleotide
aagcagguuaccugagaaa

SEQ ID NO: 973753 - RNA, 19 nt, Artificial Sequence
  Description of Artificial Sequence: Synthetic oligonucleotide
cacccauaacuccucauac

SEQ ID NO: 973754 - RNA, 19 nt, Artificial Sequence
  Description of Artificial Sequence: Synthetic oligonucleotide
uuuaggccuuugguaauag

SEQ ID NO: 973755 - RNA, 19 nt, Artificial Sequence
  Description of Artificial Sequence: Synthetic oligonucleotide
agaccaucccuaaaucagg

SEQ ID NO: 973756 - RNA, 19 nt, Artificial Sequence
  Description of Artificial Sequence: Synthetic oligonucleotide
guauagcacaacaggcagg

SEQ ID NO: 973757 - RNA, 19 nt, Artificial Sequence
  Description of Artificial Sequence: Synthetic oligonucleotide
gaugaaguggggaguugag

SEQ ID NO: 973758 - RNA, 19 nt, Artificial Sequence
  Description of Artificial Sequence: Synthetic oligonucleotide
uguggacccugguugggcc

SEQ ID NO: 973759 - RNA, 19 nt, Artificial Sequence
  Description of Artificial Sequence: Synthetic oligonucleotide
ugacauaggguggacucca

SEQ ID NO: 973760 - RNA, 19 nt, Artificial Sequence
  Description of Artificial Sequence: Synthetic oligonucleotide
gauaggcugguccuuaagu

SEQ ID NO: 973761 - RNA, 19 nt, Artificial Sequence
  Description of Artificial Sequence: Synthetic oligonucleotide
cuucaauaucgugacgcag

SEQ ID NO: 973762 - RNA, 19 nt, Artificial Sequence
  Description of Artificial Sequence: Synthetic oligonucleotide
cagcuugcagaucuugaag

SEQ ID NO: 973763 - RNA, 19 nt, Artificial Sequence
  Description of Artificial Sequence: Synthetic oligonucleotide
auacaaaccagucgacaua

SEQ ID NO: 973764 - RNA, 19 nt, Artificial Sequence
  Description of Artificial Sequence: Synthetic oligonucleotide
ugcuuuaggcucuggacuu

SEQ ID NO: 973765 - RNA, 19 nt, Artificial Sequence
  Description of Artificial Sequence: Synthetic oligonucleotide
uuuaggaggcaggauccca

SEQ ID NO: 973766 - RNA, 19 nt, Artificial Sequence
  Description of Artificial Sequence: Synthetic oligonucleotide
ggagguugaggacuggccc

SEQ ID NO: 973767 - RNA, 19 nt, Artificial Sequence
  Description of Artificial Sequence: Synthetic oligonucleotide
gugacgcagcuguugaacc

SEQ ID NO: 973768 - RNA, 19 nt, Artificial Sequence
  Description of Artificial Sequence: Synthetic oligonucleotide
uacuuaaccuuuaggccuu

SEQ ID NO: 973769 - RNA, 19 nt, Artificial Sequence
  Description of Artificial Sequence: Synthetic oligonucleotide
aucgugacgcagcuguuga

SEQ ID NO: 973770 - RNA, 19 nt, Artificial Sequence
  Description of Artificial Sequence: Synthetic oligonucleotide
uccugauuuugcacugaga

SEQ ID NO: 973771 - RNA, 19 nt, Artificial Sequence
  Description of Artificial Sequence: Synthetic oligonucleotide
uccuaguggggacuuugcu

SEQ ID NO: 973772 - RNA, 19 nt, Artificial Sequence
  Description of Artificial Sequence: Synthetic oligonucleotide
uuuugcacugagagcuccu

SEQ ID NO: 973773 - RNA, 19 nt, Artificial Sequence
  Description of Artificial Sequence: Synthetic oligonucleotide
gguuaauuaguaacucagc

SEQ ID NO: 973774 - RNA, 19 nt, Artificial Sequence
  Description of Artificial Sequence: Synthetic oligonucleotide
aaggcaaagccaguguaua

SEQ ID NO: 973775 - RNA, 19 nt, Artificial Sequence
  Description of Artificial Sequence: Synthetic oligonucleotide
cucuugcagcgucagauuc

SEQ ID NO: 973776 - RNA, 19 nt, Artificial Sequence
  Description of Artificial Sequence: Synthetic oligonucleotide
guguauagcacaacaggca

SEQ ID NO: 973777 - RNA, 19 nt, Artificial Sequence
  Description of Artificial Sequence: Synthetic oligonucleotide
ggguccaaaggcccuagcg

SEQ ID NO: 973778 - RNA, 19 nt, Artificial Sequence
  Description of Artificial Sequence: Synthetic oligonucleotide
uuccacuucgagaccuucu

SEQ ID NO: 973779 - RNA, 19 nt, Artificial Sequence
  Description of Artificial Sequence: Synthetic oligonucleotide
uuuuaggaggcaggauccc

SEQ ID NO: 973780 - RNA, 19 nt, Artificial Sequence
  Description of Artificial Sequence: Synthetic oligonucleotide
ucgagaccuucuccauugg

SEQ ID NO: 973781 - RNA, 19 nt, Artificial Sequence
  Description of Artificial Sequence: Synthetic oligonucleotide
accaucccuaaaucaggag

SEQ ID NO: 973782 - RNA, 19 nt, Artificial Sequence
  Description of Artificial Sequence: Synthetic oligonucleotide
uaucgugacgcagcuguug

SEQ ID NO: 973783 - RNA, 19 nt, Artificial Sequence
  Description of Artificial Sequence: Synthetic oligonucleotide
accagucgacauaacaaag

SEQ ID NO: 973784 - RNA, 19 nt, Artificial Sequence
  Description of Artificial Sequence: Synthetic oligonucleotide
agguaaaacauaacccagu

SEQ ID NO: 973785 - RNA, 19 nt, Artificial Sequence
  Description of Artificial Sequence: Synthetic oligonucleotide
uggugaggcuaguaacagc

SEQ ID NO: 973786 - RNA, 19 nt, Artificial Sequence
  Description of Artificial Sequence: Synthetic oligonucleotide
augaaugccuaggagcaga

SEQ ID NO: 973787 - RNA, 19 nt, Artificial Sequence
  Description of Artificial Sequence: Synthetic oligonucleotide
auguggacccugguugggc

SEQ ID NO: 973788 - RNA, 19 nt, Artificial Sequence
  Description of Artificial Sequence: Synthetic oligonucleotide
gagguugaggacuggccca

SEQ ID NO: 973789 - RNA, 19 nt, Artificial Sequence
  Description of Artificial Sequence: Synthetic oligonucleotide
ucacaucaacccuggcccc

SEQ ID NO: 973790 - RNA, 19 nt, Artificial Sequence
  Description of Artificial Sequence: Synthetic oligonucleotide
auaacccugaggccucugu

SEQ ID NO: 973791 - RNA, 19 nt, Artificial Sequence
  Description of Artificial Sequence: Synthetic oligonucleotide
uugagcagccucuuugcuu

SEQ ID NO: 973792 - RNA, 19 nt, Artificial Sequence
  Description of Artificial Sequence: Synthetic oligonucleotide
ccuagcgaaacacaaacca

SEQ ID NO: 973793 - RNA, 19 nt, Artificial Sequence
  Description of Artificial Sequence: Synthetic oligonucleotide
uuaggccuuugguaauaga

SEQ ID NO: 973794 - RNA, 19 nt, Artificial Sequence
  Description of Artificial Sequence: Synthetic oligonucleotide
aguggggaguugagcagcc

SEQ ID NO: 973795 - RNA, 19 nt, Artificial Sequence
  Description of Artificial Sequence: Synthetic oligonucleotide
ccaguguauagcacaacag

SEQ ID NO: 973796 - RNA, 19 nt, Artificial Sequence
  Description of Artificial Sequence: Synthetic oligonucleotide
cccauaaagccaagggucc

SEQ ID NO: 973797 - RNA, 19 nt, Artificial Sequence
  Description of Artificial Sequence: Synthetic oligonucleotide
ugccaguugggcugugucu

SEQ ID NO: 973798 - RNA, 19 nt, Artificial Sequence
  Description of Artificial Sequence: Synthetic oligonucleotide
agcgaaacacaaaccacca

SEQ ID NO: 973799 - RNA, 19 nt, Artificial Sequence
  Description of Artificial Sequence: Synthetic oligonucleotide
cuggugaggcuaguaacag

SEQ ID NO: 973800 - RNA, 19 nt, Artificial Sequence
  Description of Artificial Sequence: Synthetic oligonucleotide
aggguggacuccaaacagg

SEQ ID NO: 973801 - RNA, 19 nt, Artificial Sequence
  Description of Artificial Sequence: Synthetic oligonucleotide
auccuaguggggacuuugc

SEQ ID NO: 973802 - RNA, 19 nt, Artificial Sequence
  Description of Artificial Sequence: Synthetic oligonucleotide
ggcgcaagugcucuugcag

SEQ ID NO: 973803 - RNA, 19 nt, Artificial Sequence
  Description of Artificial Sequence: Synthetic oligonucleotide
gaaagguaaaccacccaua

SEQ ID NO: 973804 - RNA, 19 nt, Artificial Sequence
  Description of Artificial Sequence: Synthetic oligonucleotide
guccaaaggcccuagcgaa

SEQ ID NO: 973805 - RNA, 19 nt, Artificial Sequence
  Description of Artificial Sequence: Synthetic oligonucleotide
ugagagugcagcugcucua

SEQ ID NO: 973806 - RNA, 19 nt, Artificial Sequence
  Description of Artificial Sequence: Synthetic oligonucleotide
caaucagguccugauuuug

SEQ ID NO: 973807 - RNA, 19 nt, Artificial Sequence
  Description of Artificial Sequence: Synthetic oligonucleotide
cuucaacucagcauccuua

SEQ ID NO: 973808 - RNA, 19 nt, Artificial Sequence
  Description of Artificial Sequence: Synthetic oligonucleotide
gugaggaccuuaucaguuc

SEQ ID NO: 973809 - RNA, 19 nt, Artificial Sequence
  Description of Artificial Sequence: Synthetic oligonucleotide
gcccuagcgaaacacaaac

SEQ ID NO: 973810 - RNA, 19 nt, Artificial Sequence
  Description of Artificial Sequence: Synthetic oligonucleotide
uuucggagggaaucgcauu

SEQ ID NO: 973811 - RNA, 19 nt, Artificial Sequence
  Description of Artificial Sequence: Synthetic oligonucleotide
agcuguugccgcuccacga

SEQ ID NO: 973812 - RNA, 19 nt, Artificial Sequence
  Description of Artificial Sequence: Synthetic oligonucleotide
cuaguaacagccagguccu

SEQ ID NO: 973813 - RNA, 19 nt, Artificial Sequence
  Description of Artificial Sequence: Synthetic oligonucleotide
agcgucagauucuucucaa

SEQ ID NO: 973814 - RNA, 19 nt, Artificial Sequence
  Description of Artificial Sequence: Synthetic oligonucleotide
cucugguuuuaggaggcag

SEQ ID NO: 973815 - RNA, 19 nt, Artificial Sequence
  Description of Artificial Sequence: Synthetic oligonucleotide
agcucauaugccaguuggg

SEQ ID NO: 973816 - RNA, 19 nt, Artificial Sequence
  Description of Artificial Sequence: Synthetic oligonucleotide
guuuaucuugcaagcuaug

SEQ ID NO: 973817 - RNA, 19 nt, Artificial Sequence
  Description of Artificial Sequence: Synthetic oligonucleotide
gcucauaugccaguugggc

SEQ ID NO: 973818 - RNA, 19 nt, Artificial Sequence
  Description of Artificial Sequence: Synthetic oligonucleotide
uacuccuacuuaaccuuua

SEQ ID NO: 973819 - RNA, 19 nt, Artificial Sequence
  Description of Artificial Sequence: Synthetic oligonucleotide
caguucuguguucuucaac

SEQ ID NO: 973820 - RNA, 19 nt, Artificial Sequence
  Description of Artificial Sequence: Synthetic oligonucleotide
ugguacacggggccugagu

SEQ ID NO: 973821 - RNA, 19 nt, Artificial Sequence
  Description of Artificial Sequence: Synthetic oligonucleotide
ucggagggaaucgcauucc

SEQ ID NO: 973822 - RNA, 19 nt, Artificial Sequence
  Description of Artificial Sequence: Synthetic oligonucleotide
gguaaaccacccauaacuc

SEQ ID NO: 973823 - RNA, 19 nt, Artificial Sequence
  Description of Artificial Sequence: Synthetic oligonucleotide
gugacauaggguggacucc

SEQ ID NO: 973824 - RNA, 19 nt, Artificial Sequence
  Description of Artificial Sequence: Synthetic oligonucleotide
ccuuugguaauagagcauc

SEQ ID NO: 973825 - RNA, 19 nt, Artificial Sequence
  Description of Artificial Sequence: Synthetic oligonucleotide
caucaguaggaccaaggua

SEQ ID NO: 973826 - RNA, 19 nt, Artificial Sequence
  Description of Artificial Sequence: Synthetic oligonucleotide
ugcgcaucugcugcagggc

SEQ ID NO: 973827 - RNA, 19 nt, Artificial Sequence
  Description of Artificial Sequence: Synthetic oligonucleotide
aauaacccgugagcaugga

SEQ ID NO: 973828 - RNA, 19 nt, Artificial Sequence
  Description of Artificial Sequence: Synthetic oligonucleotide
uucucacaucaacccuggc

SEQ ID NO: 973829 - RNA, 19 nt, Artificial Sequence
  Description of Artificial Sequence: Synthetic oligonucleotide
ggcccucugggucacaaug

SEQ ID NO: 973830 - RNA, 19 nt, Artificial Sequence
  Description of Artificial Sequence: Synthetic oligonucleotide
ccagauacagggucucccc

SEQ ID NO: 973831 - RNA, 19 nt, Artificial Sequence
  Description of Artificial Sequence: Synthetic oligonucleotide
ggagauaacccugaggccu

SEQ ID NO: 973832 - RNA, 19 nt, Artificial Sequence
  Description of Artificial Sequence: Synthetic oligonucleotide
agggcggucucccuccgcu

SEQ ID NO: 973833 - RNA, 19 nt, Artificial Sequence
  Description of Artificial Sequence: Synthetic oligonucleotide
agcaauccuaguggggacu

SEQ ID NO: 973834 - RNA, 19 nt, Artificial Sequence
  Description of Artificial Sequence: Synthetic oligonucleotide
cagcaauccuaguggggac

SEQ ID NO: 973835 - RNA, 19 nt, Artificial Sequence
  Description of Artificial Sequence: Synthetic oligonucleotide
gacgcagcuguugaaccuc

SEQ ID NO: 973836 - RNA, 19 nt, Artificial Sequence
  Description of Artificial Sequence: Synthetic oligonucleotide
accuuaucaguuccaucua

SEQ ID NO: 973837 - RNA, 19 nt, Artificial Sequence
  Description of Artificial Sequence: Synthetic oligonucleotide
acaaaccagucgacauaac

SEQ ID NO: 973838 - RNA, 19 nt, Artificial Sequence
  Description of Artificial Sequence: Synthetic oligonucleotide
cuugagagugcagcugcuc

SEQ ID NO: 973839 - RNA, 19 nt, Artificial Sequence
  Description of Artificial Sequence: Synthetic oligonucleotide
uccaaacaggcagcucucu

SEQ ID NO: 973840 - RNA, 19 nt, Artificial Sequence
  Description of Artificial Sequence: Synthetic oligonucleotide
uuuccacuucgagaccuuc

SEQ ID NO: 973841 - RNA, 19 nt, Artificial Sequence
  Description of Artificial Sequence: Synthetic oligonucleotide
gguguuacuccuacuuaac

SEQ ID NO: 973842 - RNA, 19 nt, Artificial Sequence
  Description of Artificial Sequence: Synthetic oligonucleotide
aggaccuuaucaguuccau

SEQ ID NO: 973843 - RNA, 19 nt, Artificial Sequence
  Description of Artificial Sequence: Synthetic oligonucleotide
gucuagcagagaagaauuc

SEQ ID NO: 973844 - RNA, 19 nt, Artificial Sequence
  Description of Artificial Sequence: Synthetic oligonucleotide
uuugcacugagagcuccuu

SEQ ID NO: 973845 - RNA, 19 nt, Artificial Sequence
  Description of Artificial Sequence: Synthetic oligonucleotide
cagguccugauuuugcacu

SEQ ID NO: 973846 - RNA, 19 nt, Artificial Sequence
  Description of Artificial Sequence: Synthetic oligonucleotide
agucgacauaacaaagauu

SEQ ID NO: 973847 - RNA, 19 nt, Artificial Sequence
  Description of Artificial Sequence: Synthetic oligonucleotide
cuggguggaaugaaugccu

SEQ ID NO: 973848 - RNA, 19 nt, Artificial Sequence
  Description of Artificial Sequence: Synthetic oligonucleotide
ccagucgacauaacaaaga

SEQ ID NO: 973849 - RNA, 19 nt, Artificial Sequence
  Description of Artificial Sequence: Synthetic oligonucleotide
cuggcgcaagugcucuugc

SEQ ID NO: 973850 - RNA, 19 nt, Artificial Sequence
  Description of Artificial Sequence: Synthetic oligonucleotide
ugcugggauucuguuucca

SEQ ID NO: 973851 - RNA, 19 nt, Artificial Sequence
  Description of Artificial Sequence: Synthetic oligonucleotide
cagucgacauaacaaagau

SEQ ID NO: 973852 - RNA, 19 nt, Artificial Sequence
  Description of Artificial Sequence: Synthetic oligonucleotide
uaugccaguugggcugugu

SEQ ID NO: 973853 - RNA, 19 nt, Artificial Sequence
  Description of Artificial Sequence: Synthetic oligonucleotide
uugucaggggaggaaccuc

SEQ ID NO: 973854 - RNA, 19 nt, Artificial Sequence
  Description of Artificial Sequence: Synthetic oligonucleotide
cugggauucuguuuccacu

SEQ ID NO: 973855 - RNA, 19 nt, Artificial Sequence
  Description of Artificial Sequence: Synthetic oligonucleotide
cccuagcgaaacacaaacc

SEQ ID NO: 973856 - RNA, 19 nt, Artificial Sequence
  Description of Artificial Sequence: Synthetic oligonucleotide
cgucagauucuucucaauc

SEQ ID NO: 973857 - RNA, 19 nt, Artificial Sequence
  Description of Artificial Sequence: Synthetic oligonucleotide
agguuaggguuguggcccu

SEQ ID NO: 973858 - RNA, 19 nt, Artificial Sequence
  Description of Artificial Sequence: Synthetic oligonucleotide
gcuccacgaucuuucggag

SEQ ID NO: 973859 - RNA, 19 nt, Artificial Sequence
  Description of Artificial Sequence: Synthetic oligonucleotide
uucaaaagccuggcuuauu

SEQ ID NO: 973860 - RNA, 19 nt, Artificial Sequence
  Description of Artificial Sequence: Synthetic oligonucleotide
aggaugaaguggggaguug

SEQ ID NO: 973861 - RNA, 19 nt, Artificial Sequence
  Description of Artificial Sequence: Synthetic oligonucleotide
ugggcauaucugucugaua

SEQ ID NO: 973862 - RNA, 19 nt, Artificial Sequence
  Description of Artificial Sequence: Synthetic oligonucleotide
aggaaccucuggugaggcu

SEQ ID NO: 973863 - RNA, 19 nt, Artificial Sequence
  Description of Artificial Sequence: Synthetic oligonucleotide
gcugaggggauaggcagcc

SEQ ID NO: 973864 - RNA, 19 nt, Artificial Sequence
  Description of Artificial Sequence: Synthetic oligonucleotide
uggacccugguugggccug

SEQ ID NO: 973865 - RNA, 19 nt, Artificial Sequence
  Description of Artificial Sequence: Synthetic oligonucleotide
caauaucgugacgcagcug

SEQ ID NO: 973866 - RNA, 19 nt, Artificial Sequence
  Description of Artificial Sequence: Synthetic oligonucleotide
gaggaccuuaucaguucca

SEQ ID NO: 973867 - RNA, 19 nt, Artificial Sequence
  Description of Artificial Sequence: Synthetic oligonucleotide
ggccccuagcuccaaacca

SEQ ID NO: 973868 - RNA, 19 nt, Artificial Sequence
  Description of Artificial Sequence: Synthetic oligonucleotide
ucgugacgcagcuguugaa

SEQ ID NO: 973869 - RNA, 19 nt, Artificial Sequence
  Description of Artificial Sequence: Synthetic oligonucleotide
cauaaagccaaggguccaa

SEQ ID NO: 973870 - RNA, 19 nt, Artificial Sequence
  Description of Artificial Sequence: Synthetic oligonucleotide
gcaauacaaaccagucgac

SEQ ID NO: 973871 - RNA, 19 nt, Artificial Sequence
  Description of Artificial Sequence: Synthetic oligonucleotide
ggaccuuaucaguuccauc

SEQ ID NO: 973872 - RNA, 19 nt, Artificial Sequence
  Description of Artificial Sequence: Synthetic oligonucleotide
cuuuaggcucuggacuuga

SEQ ID NO: 973873 - RNA, 19 nt, Artificial Sequence
  Description of Artificial Sequence: Synthetic oligonucleotide
cuguugccgcuccacgauc

SEQ ID NO: 973874 - RNA, 19 nt, Artificial Sequence
  Description of Artificial Sequence: Synthetic oligonucleotide
gaaugccuaggagcagaga

SEQ ID NO: 973875 - RNA, 19 nt, Artificial Sequence
  Description of Artificial Sequence: Synthetic oligonucleotide
gcaucaguaggaccaaggu

SEQ ID NO: 973876 - RNA, 19 nt, Artificial Sequence
  Description of Artificial Sequence: Synthetic oligonucleotide
ccacuucgagaccuucucc

SEQ ID NO: 973877 - RNA, 19 nt, Artificial Sequence
  Description of Artificial Sequence: Synthetic oligonucleotide
ggaaccucuggugaggcua

SEQ ID NO: 973878 - RNA, 19 nt, Artificial Sequence
  Description of Artificial Sequence: Synthetic oligonucleotide
cccagauacagggucuccc

SEQ ID NO: 973879 - RNA, 19 nt, Artificial Sequence
  Description of Artificial Sequence: Synthetic oligonucleotide
aggaucccagaggcugagg

SEQ ID NO: 973880 - RNA, 19 nt, Artificial Sequence
  Description of Artificial Sequence: Synthetic oligonucleotide
cauacauacagggccccua

SEQ ID NO: 973881 - RNA, 19 nt, Artificial Sequence
  Description of Artificial Sequence: Synthetic oligonucleotide
ggguuguggcccugggccc

SEQ ID NO: 973882 - RNA, 19 nt, Artificial Sequence
  Description of Artificial Sequence: Synthetic oligonucleotide
cuuuaggccuuugguaaua

SEQ ID NO: 973883 - RNA, 19 nt, Artificial Sequence
  Description of Artificial Sequence: Synthetic oligonucleotide
cgaucuuucggagggaauc

SEQ ID NO: 973884 - RNA, 19 nt, Artificial Sequence
  Description of Artificial Sequence: Synthetic oligonucleotide
agguugaggacuggcccaa

SEQ ID NO: 973885 - RNA, 19 nt, Artificial Sequence
  Description of Artificial Sequence: Synthetic oligonucleotide
ccuaaaucaggaggcaaga

SEQ ID NO: 973886 - RNA, 19 nt, Artificial Sequence
  Description of Artificial Sequence: Synthetic oligonucleotide
gcagguuaccugagaaaac

SEQ ID NO: 973887 - RNA, 19 nt, Artificial Sequence
  Description of Artificial Sequence: Synthetic oligonucleotide
cccgugagcauggaggcug

SEQ ID NO: 973888 - RNA, 19 nt, Artificial Sequence
  Description of Artificial Sequence: Synthetic oligonucleotide
cugugcgcaucugcugcag

SEQ ID NO: 973889 - RNA, 19 nt, Artificial Sequence
  Description of Artificial Sequence: Synthetic oligonucleotide
cccuagcuccaaaccaaag

SEQ ID NO: 973890 - RNA, 19 nt, Artificial Sequence
  Description of Artificial Sequence: Synthetic oligonucleotide
auagcacaacaggcaggcu

SEQ ID NO: 973891 - RNA, 19 nt, Artificial Sequence
  Description of Artificial Sequence: Synthetic oligonucleotide
agauaacccugaggccucu

SEQ ID NO: 973892 - RNA, 19 nt, Artificial Sequence
  Description of Artificial Sequence: Synthetic oligonucleotide
caaaggcccuagcgaaaca

SEQ ID NO: 973893 - RNA, 19 nt, Artificial Sequence
  Description of Artificial Sequence: Synthetic oligonucleotide
ccuaguggggacuuugcua

SEQ ID NO: 973894 - RNA, 19 nt, Artificial Sequence
  Description of Artificial Sequence: Synthetic oligonucleotide
gccgcuccacgaucuuucg

SEQ ID NO: 973895 - RNA, 19 nt, Artificial Sequence
  Description of Artificial Sequence: Synthetic oligonucleotide
gguacacggggccugaguu

SEQ ID NO: 973896 - RNA, 19 nt, Artificial Sequence
  Description of Artificial Sequence: Synthetic oligonucleotide
gugaggcuaguaacagcca

SEQ ID NO: 973897 - RNA, 19 nt, Artificial Sequence
  Description of Artificial Sequence: Synthetic oligonucleotide
augucagguuagggcuggg

SEQ ID NO: 973898 - RNA, 19 nt, Artificial Sequence
  Description of Artificial Sequence: Synthetic oligonucleotide
gaggaugaaguggggaguu

SEQ ID NO: 973899 - RNA, 19 nt, Artificial Sequence
  Description of Artificial Sequence: Synthetic oligonucleotide
cugcagguugccugggugu

SEQ ID NO: 973900 - RNA, 19 nt, Artificial Sequence
  Description of Artificial Sequence: Synthetic oligonucleotide
cccauaacuccucauacau

SEQ ID NO: 973901 - RNA, 19 nt, Artificial Sequence
  Description of Artificial Sequence: Synthetic oligonucleotide
cacaucaacccuggcccca

SEQ ID NO: 973902 - RNA, 19 nt, Artificial Sequence
  Description of Artificial Sequence: Synthetic oligonucleotide
cgcuccacgaucuuucgga

SEQ ID NO: 973903 - RNA, 19 nt, Artificial Sequence
  Description of Artificial Sequence: Synthetic oligonucleotide
acgaucuuucggagggaau

SEQ ID NO: 973904 - RNA, 19 nt, Artificial Sequence
  Description of Artificial Sequence: Synthetic oligonucleotide
cagauacagggucuccccu

SEQ ID NO: 973905 - RNA, 19 nt, Artificial Sequence
  Description of Artificial Sequence: Synthetic oligonucleotide
aguucccaggaaggcuggu

SEQ ID NO: 973906 - RNA, 19 nt, Artificial Sequence
  Description of Artificial Sequence: Synthetic oligonucleotide
auaucgugacgcagcuguu

SEQ ID NO: 973907 - RNA, 19 nt, Artificial Sequence
  Description of Artificial Sequence: Synthetic oligonucleotide
ccacccauaacuccucaua

SEQ ID NO: 973908 - RNA, 19 nt, Artificial Sequence
  Description of Artificial Sequence: Synthetic oligonucleotide
cugguacacggggccugag

SEQ ID NO: 973909 - RNA, 19 nt, Artificial Sequence
  Description of Artificial Sequence: Synthetic oligonucleotide
ggcugguacacggggccug

SEQ ID NO: 973910 - RNA, 19 nt, Artificial Sequence
  Description of Artificial Sequence: Synthetic oligonucleotide
ccauaacuccucauacaua

SEQ ID NO: 973911 - RNA, 19 nt, Artificial Sequence
  Description of Artificial Sequence: Synthetic oligonucleotide
cuugcagcgucagauucuu

SEQ ID NO: 973912 - RNA, 19 nt, Artificial Sequence
  Description of Artificial Sequence: Synthetic oligonucleotide
ccgcuccacgaucuuucgg

SEQ ID NO: 973913 - RNA, 19 nt, Artificial Sequence
  Description of Artificial Sequence: Synthetic oligonucleotide
cugggcauaucugucugau

SEQ ID NO: 973914 - RNA, 19 nt, Artificial Sequence
  Description of Artificial Sequence: Synthetic oligonucleotide
cagggcggucucccuccgc

SEQ ID NO: 973915 - RNA, 19 nt, Artificial Sequence
  Description of Artificial Sequence: Synthetic oligonucleotide
guacacggggccugaguuu

SEQ ID NO: 973916 - RNA, 19 nt, Artificial Sequence
  Description of Artificial Sequence: Synthetic oligonucleotide
ccccaagccagcaauccua

SEQ ID NO: 973917 - RNA, 19 nt, Artificial Sequence
  Description of Artificial Sequence: Synthetic oligonucleotide
gcucuggacuugagagugc

SEQ ID NO: 973918 - RNA, 19 nt, Artificial Sequence
  Description of Artificial Sequence: Synthetic oligonucleotide
gcagggcggucucccuccg

SEQ ID NO: 973919 - RNA, 19 nt, Artificial Sequence
  Description of Artificial Sequence: Synthetic oligonucleotide
ccucucuggcccuccucac

SEQ ID NO: 973920 - RNA, 19 nt, Artificial Sequence
  Description of Artificial Sequence: Synthetic oligonucleotide
cagugacauaggguggacu

SEQ ID NO: 973921 - RNA, 19 nt, Artificial Sequence
  Description of Artificial Sequence: Synthetic oligonucleotide
cgacauaacaaagauucau

SEQ ID NO: 973922 - RNA, 19 nt, Artificial Sequence
  Description of Artificial Sequence: Synthetic oligonucleotide
gcccaacaaccagauaaaa

SEQ ID NO: 973923 - RNA, 19 nt, Artificial Sequence
  Description of Artificial Sequence: Synthetic oligonucleotide
ggcccuagcgaaacacaaa

SEQ ID NO: 973924 - RNA, 19 nt, Artificial Sequence
  Description of Artificial Sequence: Synthetic oligonucleotide
gguugaggacuggcccaac

SEQ ID NO: 973925 - RNA, 19 nt, Artificial Sequence
  Description of Artificial Sequence: Synthetic oligonucleotide
ccccagauacagggucucc

SEQ ID NO: 973926 - RNA, 19 nt, Artificial Sequence
  Description of Artificial Sequence: Synthetic oligonucleotide
cugaggggauaggcagcca

SEQ ID NO: 973927 - RNA, 19 nt, Artificial Sequence
  Description of Artificial Sequence: Synthetic oligonucleotide
ggaguugagcagccucuuu

SEQ ID NO: 973928 - RNA, 19 nt, Artificial Sequence
  Description of Artificial Sequence: Synthetic oligonucleotide
gguuagggcugggaacagu

SEQ ID NO: 973929 - RNA, 19 nt, Artificial Sequence
  Description of Artificial Sequence: Synthetic oligonucleotide
guugccgcuccacgaucuu

SEQ ID NO: 973930 - RNA, 19 nt, Artificial Sequence
  Description of Artificial Sequence: Synthetic oligonucleotide
gcgucagauucuucucaau

SEQ ID NO: 973931 - RNA, 19 nt, Artificial Sequence
  Description of Artificial Sequence: Synthetic oligonucleotide
ccuccgcugagccuccucu

SEQ ID NO: 973932 - RNA, 19 nt, Artificial Sequence
  Description of Artificial Sequence: Synthetic oligonucleotide
cucccauguccugggcaua

SEQ ID NO: 973933 - RNA, 19 nt, Artificial Sequence
  Description of Artificial Sequence: Synthetic oligonucleotide
gcaauccuaguggggacuu

SEQ ID NO: 973934 - RNA, 19 nt, Artificial Sequence
  Description of Artificial Sequence: Synthetic oligonucleotide
cgugagcauggaggcuggg

SEQ ID NO: 973935 - RNA, 19 nt, Artificial Sequence
  Description of Artificial Sequence: Synthetic oligonucleotide
ggcaggcuucucacaucaa

SEQ ID NO: 973936 - RNA, 19 nt, Artificial Sequence
  Description of Artificial Sequence: Synthetic oligonucleotide
caauccuaguggggacuuu

SEQ ID NO: 973937 - RNA, 19 nt, Artificial Sequence
  Description of Artificial Sequence: Synthetic oligonucleotide
cgagaccuucuccauuggu

SEQ ID NO: 973938 - RNA, 19 nt, Artificial Sequence
  Description of Artificial Sequence: Synthetic oligonucleotide
ccacgaucuuucggaggga

SEQ ID NO: 973939 - RNA, 19 nt, Artificial Sequence
  Description of Artificial Sequence: Synthetic oligonucleotide
gggcccucugggucacaau

SEQ ID NO: 973940 - RNA, 19 nt, Artificial Sequence
  Description of Artificial Sequence: Synthetic oligonucleotide
uuaaaauacacacugggag

SEQ ID NO: 973941 - RNA, 19 nt, Artificial Sequence
  Description of Artificial Sequence: Synthetic oligonucleotide
caaaucugaaguuugaugg

SEQ ID NO: 973942 - RNA, 19 nt, Artificial Sequence
  Description of Artificial Sequence: Synthetic oligonucleotide
aaugguucgaaucuugaag

SEQ ID NO: 973943 - RNA, 19 nt, Artificial Sequence
  Description of Artificial Sequence: Synthetic oligonucleotide
uuuauugacguucucacug

SEQ ID NO: 973944 - RNA, 19 nt, Artificial Sequence
  Description of Artificial Sequence: Synthetic oligonucleotide
ugacaugacaccaaagggg

SEQ ID NO: 973945 - RNA, 19 nt, Artificial Sequence
  Description of Artificial Sequence: Synthetic oligonucleotide
aguuuauugacguucucac

SEQ ID NO: 973946 - RNA, 19 nt, Artificial Sequence
  Description of Artificial Sequence: Synthetic oligonucleotide
cuaguugugcucaagaccc

SEQ ID NO: 973947 - RNA, 19 nt, Artificial Sequence
  Description of Artificial Sequence: Synthetic oligonucleotide
gaaggggacacccagagag

SEQ ID NO: 973948 - RNA, 19 nt, Artificial Sequence
  Description of Artificial Sequence: Synthetic oligonucleotide
ucguacaccacgaugaugc

SEQ ID NO: 973949 - RNA, 19 nt, Artificial Sequence
  Description of Artificial Sequence: Synthetic oligonucleotide
aaaauacacacugggaggg

SEQ ID NO: 973950 - RNA, 19 nt, Artificial Sequence
  Description of Artificial Sequence: Synthetic oligonucleotide
uuuaaaauacacacuggga

SEQ ID NO: 973951 - RNA, 19 nt, Artificial Sequence
  Description of Artificial Sequence: Synthetic oligonucleotide
aacagguagucauauucgg

SEQ ID NO: 973952 - RNA, 19 nt, Artificial Sequence
  Description of Artificial Sequence: Synthetic oligonucleotide
gaacggagggauuagaagc

SEQ ID NO: 973953 - RNA, 19 nt, Artificial Sequence
  Description of Artificial Sequence: Synthetic oligonucleotide
uucacauuagcguaggacu

SEQ ID NO: 973954 - RNA, 19 nt, Artificial Sequence
  Description of Artificial Sequence: Synthetic oligonucleotide
aaaugccugacaugacacc

SEQ ID NO: 973955 - RNA, 19 nt, Artificial Sequence
  Description of Artificial Sequence: Synthetic oligonucleotide
aaaaugccugacaugacac

SEQ ID NO: 973956 - RNA, 19 nt, Artificial Sequence
  Description of Artificial Sequence: Synthetic oligonucleotide
uucucagggacaaaggggc

SEQ ID NO: 973957 - RNA, 19 nt, Artificial Sequence
  Description of Artificial Sequence: Synthetic oligonucleotide
uccacgaccuucuuggugg

SEQ ID NO: 973958 - RNA, 19 nt, Artificial Sequence
  Description of Artificial Sequence: Synthetic oligonucleotide
gaagugaugguccggaacc

SEQ ID NO: 973959 - RNA, 19 nt, Artificial Sequence
  Description of Artificial Sequence: Synthetic oligonucleotide
cacgaugaugccaugagcc

SEQ ID NO: 973960 - RNA, 19 nt, Artificial Sequence
  Description of Artificial Sequence: Synthetic oligonucleotide
acucaaaugcccuaggaga

SEQ ID NO: 973961 - RNA, 19 nt, Artificial Sequence
  Description of Artificial Sequence: Synthetic oligonucleotide
auuagcguaggacuccugg

SEQ ID NO: 973962 - RNA, 19 nt, Artificial Sequence
  Description of Artificial Sequence: Synthetic oligonucleotide
acuagcuggcuucacaggg

SEQ ID NO: 973963 - RNA, 19 nt, Artificial Sequence
  Description of Artificial Sequence: Synthetic oligonucleotide
auauucgggguucauggcg

SEQ ID NO: 973964 - RNA, 19 nt, Artificial Sequence
  Description of Artificial Sequence: Synthetic oligonucleotide
uauucgggguucauggcgg

SEQ ID NO: 973965 - RNA, 19 nt, Artificial Sequence
  Description of Artificial Sequence: Synthetic oligonucleotide
aacggagggauuagaagcc

SEQ ID NO: 973966 - RNA, 19 nt, Artificial Sequence
  Description of Artificial Sequence: Synthetic oligonucleotide
aggacccuggaucugagac

SEQ ID NO: 973967 - RNA, 19 nt, Artificial Sequence
  Description of Artificial Sequence: Synthetic oligonucleotide
cugacaugacaccaaaggg

SEQ ID NO: 973968 - RNA, 19 nt, Artificial Sequence
  Description of Artificial Sequence: Synthetic oligonucleotide
aagacccaacaguagcugg

SEQ ID NO: 973969 - RNA, 19 nt, Artificial Sequence
  Description of Artificial Sequence: Synthetic oligonucleotide
gaacagguagucauauucg

SEQ ID NO: 973970 - RNA, 19 nt, Artificial Sequence
  Description of Artificial Sequence: Synthetic oligonucleotide
aaaacccucggcuuaucca

SEQ ID NO: 973971 - RNA, 19 nt, Artificial Sequence
  Description of Artificial Sequence: Synthetic oligonucleotide
augguucgaaucuugaagu

SEQ ID NO: 973972 - RNA, 19 nt, Artificial Sequence
  Description of Artificial Sequence: Synthetic oligonucleotide
ugagguccgaagcaggacc

SEQ ID NO: 973973 - RNA, 19 nt, Artificial Sequence
  Description of Artificial Sequence: Synthetic oligonucleotide
caugaaugccugcucaacg

SEQ ID NO: 973974 - RNA, 19 nt, Artificial Sequence
  Description of Artificial Sequence: Synthetic oligonucleotide
cucaagacccaacaguagc

SEQ ID NO: 973975 - RNA, 19 nt, Artificial Sequence
  Description of Artificial Sequence: Synthetic oligonucleotide
cucaaaugcccuaggagag

SEQ ID NO: 973976 - RNA, 19 nt, Artificial Sequence
  Description of Artificial Sequence: Synthetic oligonucleotide
uuuugcagccccuugccug

SEQ ID NO: 973977 - RNA, 19 nt, Artificial Sequence
  Description of Artificial Sequence: Synthetic oligonucleotide
cucggcuuauccaagggcc

SEQ ID NO: 973978 - RNA, 19 nt, Artificial Sequence
  Description of Artificial Sequence: Synthetic oligonucleotide
aaguccaccccgauagugc

SEQ ID NO: 973979 - RNA, 19 nt, Artificial Sequence
  Description of Artificial Sequence: Synthetic oligonucleotide
ugugcucaagacccaacag

SEQ ID NO: 973980 - RNA, 19 nt, Artificial Sequence
  Description of Artificial Sequence: Synthetic oligonucleotide
aaugcccuaggagagggag

SEQ ID NO: 973981 - RNA, 19 nt, Artificial Sequence
  Description of Artificial Sequence: Synthetic oligonucleotide
gaaggagaagcccagugca

SEQ ID NO: 973982 - RNA, 19 nt, Artificial Sequence
  Description of Artificial Sequence: Synthetic oligonucleotide
uaccaggaguuuauugacg

SEQ ID NO: 973983 - RNA, 19 nt, Artificial Sequence
  Description of Artificial Sequence: Synthetic oligonucleotide
aaugccugacaugacacca

SEQ ID NO: 973984 - RNA, 19 nt, Artificial Sequence
  Description of Artificial Sequence: Synthetic oligonucleotide
uggggcgggauucugagug

SEQ ID NO: 973985 - RNA, 19 nt, Artificial Sequence
  Description of Artificial Sequence: Synthetic oligonucleotide
uuucacauuagcguaggac

SEQ ID NO: 973986 - RNA, 19 nt, Artificial Sequence
  Description of Artificial Sequence: Synthetic oligonucleotide
aagugcccuuccuagcaac

SEQ ID NO: 973987 - RNA, 19 nt, Artificial Sequence
  Description of Artificial Sequence: Synthetic oligonucleotide
aaacccucggcuuauccaa

SEQ ID NO: 973988 - RNA, 19 nt, Artificial Sequence
  Description of Artificial Sequence: Synthetic oligonucleotide
aaagggacauggcuucuca

SEQ ID NO: 973989 - RNA, 19 nt, Artificial Sequence
  Description of Artificial Sequence: Synthetic oligonucleotide
gagagagucccacaacccc

SEQ ID NO: 973990 - RNA, 19 nt, Artificial Sequence
  Description of Artificial Sequence: Synthetic oligonucleotide
aaaagugggcuguuggcuu

SEQ ID NO: 973991 - RNA, 19 nt, Artificial Sequence
  Description of Artificial Sequence: Synthetic oligonucleotide
uugugcucaagacccaaca

SEQ ID NO: 973992 - RNA, 19 nt, Artificial Sequence
  Description of Artificial Sequence: Synthetic oligonucleotide
cugucgaucuucagguugg

SEQ ID NO: 973993 - RNA, 19 nt, Artificial Sequence
  Description of Artificial Sequence: Synthetic oligonucleotide
uucucagguaaucaccaaa

SEQ ID NO: 973994 - RNA, 19 nt, Artificial Sequence
  Description of Artificial Sequence: Synthetic oligonucleotide
uuuccaucuuuccccaugu

SEQ ID NO: 973995 - RNA, 19 nt, Artificial Sequence
  Description of Artificial Sequence: Synthetic oligonucleotide
ucacauuagcguaggacuc

SEQ ID NO: 973996 - RNA, 19 nt, Artificial Sequence
  Description of Artificial Sequence: Synthetic oligonucleotide
aagccagaugugcugccuc

SEQ ID NO: 973997 - RNA, 19 nt, Artificial Sequence
  Description of Artificial Sequence: Synthetic oligonucleotide
accccgauagugcugaugu

SEQ ID NO: 973998 - RNA, 19 nt, Artificial Sequence
  Description of Artificial Sequence: Synthetic oligonucleotide
uguccugagguccgaagca

SEQ ID NO: 973999 - RNA, 19 nt, Artificial Sequence
  Description of Artificial Sequence: Synthetic oligonucleotide
aaaagggacauggcuucuc

SEQ ID NO: 974000 - RNA, 19 nt, Artificial Sequence
  Description of Artificial Sequence: Synthetic oligonucleotide
uguggcuuuuccuugcaaa

SEQ ID NO: 974001 - RNA, 19 nt, Artificial Sequence
  Description of Artificial Sequence: Synthetic oligonucleotide
cuaccaggaguuuauugac

SEQ ID NO: 974002 - RNA, 19 nt, Artificial Sequence
  Description of Artificial Sequence: Synthetic oligonucleotide
gacaugacaccaaagggga

SEQ ID NO: 974003 - RNA, 19 nt, Artificial Sequence
  Description of Artificial Sequence: Synthetic oligonucleotide
accuccgccuuucucaggg

SEQ ID NO: 974004 - RNA, 19 nt, Artificial Sequence
  Description of Artificial Sequence: Synthetic oligonucleotide
aaauacacacugggagggg

SEQ ID NO: 974005 - RNA, 19 nt, Artificial Sequence
  Description of Artificial Sequence: Synthetic oligonucleotide
cauuccccagagaaguagg

SEQ ID NO: 974006 - RNA, 19 nt, Artificial Sequence
  Description of Artificial Sequence: Synthetic oligonucleotide
ucuuguagccacuguuuca

SEQ ID NO: 974007 - RNA, 19 nt, Artificial Sequence
  Description of Artificial Sequence: Synthetic oligonucleotide
gguaccuagaggcagcagc

SEQ ID NO: 974008 - RNA, 19 nt, Artificial Sequence
  Description of Artificial Sequence: Synthetic oligonucleotide
cauccaguucaaugguucg

SEQ ID NO: 974009 - RNA, 19 nt, Artificial Sequence
  Description of Artificial Sequence: Synthetic oligonucleotide
uggucagugacgucguaca

SEQ ID NO: 974010 - RNA, 19 nt, Artificial Sequence
  Description of Artificial Sequence: Synthetic oligonucleotide
cagaugugcugccucaggg

SEQ ID NO: 974011 - RNA, 19 nt, Artificial Sequence
  Description of Artificial Sequence: Synthetic oligonucleotide
augugucaucagcaaaccg

SEQ ID NO: 974012 - RNA, 19 nt, Artificial Sequence
  Description of Artificial Sequence: Synthetic oligonucleotide
cgagucaccaaucaaaagc

SEQ ID NO: 974013 - RNA, 19 nt, Artificial Sequence
  Description of Artificial Sequence: Synthetic oligonucleotide
uauugacguucucacuggc

SEQ ID NO: 974014 - RNA, 19 nt, Artificial Sequence
  Description of Artificial Sequence: Synthetic oligonucleotide
agcuggacggcucaagcug

SEQ ID NO: 974015 - RNA, 19 nt, Artificial Sequence
  Description of Artificial Sequence: Synthetic oligonucleotide
aagugaugguccggaaccg

SEQ ID NO: 974016 - RNA, 19 nt, Artificial Sequence
  Description of Artificial Sequence: Synthetic oligonucleotide
cuguuucacauuagcguag

SEQ ID NO: 974017 - RNA, 19 nt, Artificial Sequence
  Description of Artificial Sequence: Synthetic oligonucleotide
gaugugcugccucagggga

SEQ ID NO: 974018 - RNA, 19 nt, Artificial Sequence
  Description of Artificial Sequence: Synthetic oligonucleotide
agggauuagaagccagaug

SEQ ID NO: 974019 - RNA, 19 nt, Artificial Sequence
  Description of Artificial Sequence: Synthetic oligonucleotide
gaugguccggaaccguucc

SEQ ID NO: 974020 - RNA, 19 nt, Artificial Sequence
  Description of Artificial Sequence: Synthetic oligonucleotide
ucuuuucaagguaccuaga

SEQ ID NO: 974021 - RNA, 19 nt, Artificial Sequence
  Description of Artificial Sequence: Synthetic oligonucleotide
caagcugagugugggagcg

SEQ ID NO: 974022 - RNA, 19 nt, Artificial Sequence
  Description of Artificial Sequence: Synthetic oligonucleotide
uggagaaggugucccuucc

SEQ ID NO: 974023 - RNA, 19 nt, Artificial Sequence
  Description of Artificial Sequence: Synthetic oligonucleotide
uuagcguaggacuccuggu

SEQ ID NO: 974024 - RNA, 19 nt, Artificial Sequence
  Description of Artificial Sequence: Synthetic oligonucleotide
uuggcacucgucuccagga

SEQ ID NO: 974025 - RNA, 19 nt, Artificial Sequence
  Description of Artificial Sequence: Synthetic oligonucleotide
ggaacggagggauuagaag

SEQ ID NO: 974026 - RNA, 19 nt, Artificial Sequence
  Description of Artificial Sequence: Synthetic oligonucleotide
caggaguuuauugacguuc

SEQ ID NO: 974027 - RNA, 19 nt, Artificial Sequence
  Description of Artificial Sequence: Synthetic oligonucleotide
agccacagacucaaaugcc

SEQ ID NO: 974028 - RNA, 19 nt, Artificial Sequence
  Description of Artificial Sequence: Synthetic oligonucleotide
agacucaaaugcccuagga

SEQ ID NO: 974029 - RNA, 19 nt, Artificial Sequence
  Description of Artificial Sequence: Synthetic oligonucleotide
guagcuggacggcucaagc

SEQ ID NO: 974030 - RNA, 19 nt, Artificial Sequence
  Description of Artificial Sequence: Synthetic oligonucleotide
ccuaguugugcucaagacc

SEQ ID NO: 974031 - RNA, 19 nt, Artificial Sequence
  Description of Artificial Sequence: Synthetic oligonucleotide
aaccccaaguggccccuac

SEQ ID NO: 974032 - RNA, 19 nt, Artificial Sequence
  Description of Artificial Sequence: Synthetic oligonucleotide
uggugggcaucuuuucaag

SEQ ID NO: 974033 - RNA, 19 nt, Artificial Sequence
  Description of Artificial Sequence: Synthetic oligonucleotide
gggagagagucccacaacc

SEQ ID NO: 974034 - RNA, 19 nt, Artificial Sequence
  Description of Artificial Sequence: Synthetic oligonucleotide
aguuccugugaccaccccu

SEQ ID NO: 974035 - RNA, 19 nt, Artificial Sequence
  Description of Artificial Sequence: Synthetic oligonucleotide
aaaggggcuuggugggcag

SEQ ID NO: 974036 - RNA, 19 nt, Artificial Sequence
  Description of Artificial Sequence: Synthetic oligonucleotide
auugacguucucacuggcg

SEQ ID NO: 974037 - RNA, 19 nt, Artificial Sequence
  Description of Artificial Sequence: Synthetic oligonucleotide
uuugcagccccuugccugu

SEQ ID NO: 974038 - RNA, 19 nt, Artificial Sequence
  Description of Artificial Sequence: Synthetic oligonucleotide
ucugagacccuggaucccc

SEQ ID NO: 974039 - RNA, 19 nt, Artificial Sequence
  Description of Artificial Sequence: Synthetic oligonucleotide
gugggcaggcagcacauag

SEQ ID NO: 974040 - RNA, 19 nt, Artificial Sequence
  Description of Artificial Sequence: Synthetic oligonucleotide
agcguaggacuccugguca

SEQ ID NO: 974041 - RNA, 19 nt, Artificial Sequence
  Description of Artificial Sequence: Synthetic oligonucleotide
guugguggcguucuuggca

SEQ ID NO: 974042 - RNA, 19 nt, Artificial Sequence
  Description of Artificial Sequence: Synthetic oligonucleotide
guagcuggaagugaugguc

SEQ ID NO: 974043 - RNA, 19 nt, Artificial Sequence
  Description of Artificial Sequence: Synthetic oligonucleotide
gacguucucacuggcguag

SEQ ID NO: 974044 - RNA, 19 nt, Artificial Sequence
  Description of Artificial Sequence: Synthetic oligonucleotide
aaccgcaggagcaggcacg

SEQ ID NO: 974045 - RNA, 19 nt, Artificial Sequence
  Description of Artificial Sequence: Synthetic oligonucleotide
cagaguaaggguuaaggcu

SEQ ID NO: 974046 - RNA, 19 nt, Artificial Sequence
  Description of Artificial Sequence: Synthetic oligonucleotide
uuaaggcuggugcccggcc

SEQ ID NO: 974047 - RNA, 19 nt, Artificial Sequence
  Description of Artificial Sequence: Synthetic oligonucleotide
aacguugguggcguucuug

SEQ ID NO: 974048 - RNA, 19 nt, Artificial Sequence
  Description of Artificial Sequence: Synthetic oligonucleotide
ucugaaguuugaugguuuu

SEQ ID NO: 974049 - RNA, 19 nt, Artificial Sequence
  Description of Artificial Sequence: Synthetic oligonucleotide
auucgggguucauggcggc

SEQ ID NO: 974050 - RNA, 19 nt, Artificial Sequence
  Description of Artificial Sequence: Synthetic oligonucleotide
ccacuguuucacauuagcg

SEQ ID NO: 974051 - RNA, 19 nt, Artificial Sequence
  Description of Artificial Sequence: Synthetic oligonucleotide
cacuguuucacauuagcgu

SEQ ID NO: 974052 - RNA, 19 nt, Artificial Sequence
  Description of Artificial Sequence: Synthetic oligonucleotide
guaaucaccaaagguuuuc

SEQ ID NO: 974053 - RNA, 19 nt, Artificial Sequence
  Description of Artificial Sequence: Synthetic oligonucleotide
ucggcuuauccaagggcca

SEQ ID NO: 974054 - RNA, 19 nt, Artificial Sequence
  Description of Artificial Sequence: Synthetic oligonucleotide
cacgacuugcccacacccg

SEQ ID NO: 974055 - RNA, 19 nt, Artificial Sequence
  Description of Artificial Sequence: Synthetic oligonucleotide
aaagugggcuguuggcuuu

SEQ ID NO: 974056 - RNA, 19 nt, Artificial Sequence
  Description of Artificial Sequence: Synthetic oligonucleotide
gaagcaggacccuggaucu

SEQ ID NO: 974057 - RNA, 19 nt, Artificial Sequence
  Description of Artificial Sequence: Synthetic oligonucleotide
agagagucugcaaauuccu

SEQ ID NO: 974058 - RNA, 19 nt, Artificial Sequence
  Description of Artificial Sequence: Synthetic oligonucleotide
uccaguucaaugguucgaa

SEQ ID NO: 974059 - RNA, 19 nt, Artificial Sequence
  Description of Artificial Sequence: Synthetic oligonucleotide
cagguaaucaccaaagguu

SEQ ID NO: 974060 - RNA, 19 nt, Artificial Sequence
  Description of Artificial Sequence: Synthetic oligonucleotide
cacauuagcguaggacucc

SEQ ID NO: 974061 - RNA, 19 nt, Artificial Sequence
  Description of Artificial Sequence: Synthetic oligonucleotide
cauugucaugaaugccugc

SEQ ID NO: 974062 - RNA, 19 nt, Artificial Sequence
  Description of Artificial Sequence: Synthetic oligonucleotide
acccuaguugugcucaaga

SEQ ID NO: 974063 - RNA, 19 nt, Artificial Sequence
  Description of Artificial Sequence: Synthetic oligonucleotide
acgacuugcccacacccga

SEQ ID NO: 974064 - RNA, 19 nt, Artificial Sequence
  Description of Artificial Sequence: Synthetic oligonucleotide
gucccacaaccccaagugg

SEQ ID NO: 974065 - RNA, 19 nt, Artificial Sequence
  Description of Artificial Sequence: Synthetic oligonucleotide
ugaaugccugcucaacguu

SEQ ID NO: 974066 - RNA, 19 nt, Artificial Sequence
  Description of Artificial Sequence: Synthetic oligonucleotide
ugcuccuggccccauccgc

SEQ ID NO: 974067 - RNA, 19 nt, Artificial Sequence
  Description of Artificial Sequence: Synthetic oligonucleotide
ugguuuugccauccaguuc

SEQ ID NO: 974068 - RNA, 19 nt, Artificial Sequence
  Description of Artificial Sequence: Synthetic oligonucleotide
ccaaguggccccuacauuc

SEQ ID NO: 974069 - RNA, 19 nt, Artificial Sequence
  Description of Artificial Sequence: Synthetic oligonucleotide
ugguucgaaucuugaaguc

SEQ ID NO: 974070 - RNA, 19 nt, Artificial Sequence
  Description of Artificial Sequence: Synthetic oligonucleotide
uugccuaccaggaguuuau

SEQ ID NO: 974071 - RNA, 19 nt, Artificial Sequence
  Description of Artificial Sequence: Synthetic oligonucleotide
ugaggaacggagggauuag

SEQ ID NO: 974072 - RNA, 19 nt, Artificial Sequence
  Description of Artificial Sequence: Synthetic oligonucleotide
acccaacaguagcuggacg

SEQ ID NO: 974073 - RNA, 19 nt, Artificial Sequence
  Description of Artificial Sequence: Synthetic oligonucleotide
aggggacacccagagaguc

SEQ ID NO: 974074 - RNA, 19 nt, Artificial Sequence
  Description of Artificial Sequence: Synthetic oligonucleotide
cagacucaaaugcccuagg

SEQ ID NO: 974075 - RNA, 19 nt, Artificial Sequence
  Description of Artificial Sequence: Synthetic oligonucleotide
aguccaccccgauagugcu

SEQ ID NO: 974076 - RNA, 19 nt, Artificial Sequence
  Description of Artificial Sequence: Synthetic oligonucleotide
agcucucuguguauguguc

SEQ ID NO: 974077 - RNA, 19 nt, Artificial Sequence
  Description of Artificial Sequence: Synthetic oligonucleotide
uagcuggacggcucaagcu

SEQ ID NO: 974078 - RNA, 19 nt, Artificial Sequence
  Description of Artificial Sequence: Synthetic oligonucleotide
agguaaucaccaaagguuu

SEQ ID NO: 974079 - RNA, 19 nt, Artificial Sequence
  Description of Artificial Sequence: Synthetic oligonucleotide
aggggaaccugggagaaga

SEQ ID NO: 974080 - RNA, 19 nt, Artificial Sequence
  Description of Artificial Sequence: Synthetic oligonucleotide
gcugucgaucuucagguug

SEQ ID NO: 974081 - RNA, 19 nt, Artificial Sequence
  Description of Artificial Sequence: Synthetic oligonucleotide
acaguagcuggacggcuca

SEQ ID NO: 974082 - RNA, 19 nt, Artificial Sequence
  Description of Artificial Sequence: Synthetic oligonucleotide
cucggucgcucccagucgg

SEQ ID NO: 974083 - RNA, 19 nt, Artificial Sequence
  Description of Artificial Sequence: Synthetic oligonucleotide
uccugugaccaccccugcc

SEQ ID NO: 974084 - RNA, 19 nt, Artificial Sequence
  Description of Artificial Sequence: Synthetic oligonucleotide
aggggagagagucccacaa

SEQ ID NO: 974085 - RNA, 19 nt, Artificial Sequence
  Description of Artificial Sequence: Synthetic oligonucleotide
ugccucaggggaagaaagu

SEQ ID NO: 974086 - RNA, 19 nt, Artificial Sequence
  Description of Artificial Sequence: Synthetic oligonucleotide
uccaccccgauagugcuga

SEQ ID NO: 974087 - RNA, 19 nt, Artificial Sequence
  Description of Artificial Sequence: Synthetic oligonucleotide
ugcucaacguugguggcgu

SEQ ID NO: 974088 - RNA, 19 nt, Artificial Sequence
  Description of Artificial Sequence: Synthetic oligonucleotide
ucgggguucauggcggcag

SEQ ID NO: 974089 - RNA, 19 nt, Artificial Sequence
  Description of Artificial Sequence: Synthetic oligonucleotide
ccuacauuccccagagaag

SEQ ID NO: 974090 - RNA, 19 nt, Artificial Sequence
  Description of Artificial Sequence: Synthetic oligonucleotide
uggaucugagacccuggau

SEQ ID NO: 974091 - RNA, 19 nt, Artificial Sequence
  Description of Artificial Sequence: Synthetic oligonucleotide
ggaagugaugguccggaac

SEQ ID NO: 974092 - RNA, 19 nt, Artificial Sequence
  Description of Artificial Sequence: Synthetic oligonucleotide
agcaaaccgcaggagcagg

SEQ ID NO: 974093 - RNA, 19 nt, Artificial Sequence
  Description of Artificial Sequence: Synthetic oligonucleotide
accuacccuaguugugcuc

SEQ ID NO: 974094 - RNA, 19 nt, Artificial Sequence
  Description of Artificial Sequence: Synthetic oligonucleotide
ggacggcucaagcugagug

SEQ ID NO: 974095 - RNA, 19 nt, Artificial Sequence
  Description of Artificial Sequence: Synthetic oligonucleotide
aggaguuuauugacguucu

SEQ ID NO: 974096 - RNA, 19 nt, Artificial Sequence
  Description of Artificial Sequence: Synthetic oligonucleotide
agagagucccacaacccca

SEQ ID NO: 974097 - RNA, 19 nt, Artificial Sequence
  Description of Artificial Sequence: Synthetic oligonucleotide
agucaccaaucaaaagcag

SEQ ID NO: 974098 - RNA, 19 nt, Artificial Sequence
  Description of Artificial Sequence: Synthetic oligonucleotide
gagguccgaagcaggaccc

SEQ ID NO: 974099 - RNA, 19 nt, Artificial Sequence
  Description of Artificial Sequence: Synthetic oligonucleotide
gugcugucgaucuucaggu

SEQ ID NO: 974100 - RNA, 19 nt, Artificial Sequence
  Description of Artificial Sequence: Synthetic oligonucleotide
aggcacgacuugcccacac

SEQ ID NO: 974101 - RNA, 19 nt, Artificial Sequence
  Description of Artificial Sequence: Synthetic oligonucleotide
acgaccuucuuggugguga

SEQ ID NO: 974102 - RNA, 19 nt, Artificial Sequence
  Description of Artificial Sequence: Synthetic oligonucleotide
gugucccuuccccaagugc

SEQ ID NO: 974103 - RNA, 19 nt, Artificial Sequence
  Description of Artificial Sequence: Synthetic oligonucleotide
cauggugggcaucuuuuca

SEQ ID NO: 974104 - RNA, 19 nt, Artificial Sequence
  Description of Artificial Sequence: Synthetic oligonucleotide
acggcucaagcugagugug

SEQ ID NO: 974105 - RNA, 19 nt, Artificial Sequence
  Description of Artificial Sequence: Synthetic oligonucleotide
guaccuagaggcagcagca

SEQ ID NO: 974106 - RNA, 19 nt, Artificial Sequence
  Description of Artificial Sequence: Synthetic oligonucleotide
cgaucuucagguugggccg

SEQ ID NO: 974107 - RNA, 19 nt, Artificial Sequence
  Description of Artificial Sequence: Synthetic oligonucleotide
acucgucuccaggaagggg

SEQ ID NO: 974108 - RNA, 19 nt, Artificial Sequence
  Description of Artificial Sequence: Synthetic oligonucleotide
agcccaggacaccccaaag

SEQ ID NO: 974109 - RNA, 19 nt, Artificial Sequence
  Description of Artificial Sequence: Synthetic oligonucleotide
gagcgguggagggaggcag

SEQ ID NO: 974110 - RNA, 19 nt, Artificial Sequence
  Description of Artificial Sequence: Synthetic oligonucleotide
caaugguucgaaucuugaa

SEQ ID NO: 974111 - RNA, 19 nt, Artificial Sequence
  Description of Artificial Sequence: Synthetic oligonucleotide
agccagaugugcugccuca

SEQ ID NO: 974112 - RNA, 19 nt, Artificial Sequence
  Description of Artificial Sequence: Synthetic oligonucleotide
cuggucagugacgucguac

SEQ ID NO: 974113 - RNA, 19 nt, Artificial Sequence
  Description of Artificial Sequence: Synthetic oligonucleotide
guuuauugacguucucacu

SEQ ID NO: 974114 - RNA, 19 nt, Artificial Sequence
  Description of Artificial Sequence: Synthetic oligonucleotide
ccgauagugcugauguagc

SEQ ID NO: 974115 - RNA, 19 nt, Artificial Sequence
  Description of Artificial Sequence: Synthetic oligonucleotide
gacccuggauccccuggcc

SEQ ID NO: 974116 - RNA, 19 nt, Artificial Sequence
  Description of Artificial Sequence: Synthetic oligonucleotide
gguggggcgggauucugag

SEQ ID NO: 974117 - RNA, 19 nt, Artificial Sequence
  Description of Artificial Sequence: Synthetic oligonucleotide
cugcucaacguugguggcg

SEQ ID NO: 974118 - RNA, 19 nt, Artificial Sequence
  Description of Artificial Sequence: Synthetic oligonucleotide
ucuuuccccauguggcuuu

SEQ ID NO: 974119 - RNA, 19 nt, Artificial Sequence
  Description of Artificial Sequence: Synthetic oligonucleotide
ggcucaagcugaguguggg

SEQ ID NO: 974120 - RNA, 19 nt, Artificial Sequence
  Description of Artificial Sequence: Synthetic oligonucleotide
gugggcaucuuuucaaggu

SEQ ID NO: 974121 - RNA, 19 nt, Artificial Sequence
  Description of Artificial Sequence: Synthetic oligonucleotide
agaagcccagugcagcaua

SEQ ID NO: 974122 - RNA, 19 nt, Artificial Sequence
  Description of Artificial Sequence: Synthetic oligonucleotide
acauuagcguaggacuccu

SEQ ID NO: 974123 - RNA, 19 nt, Artificial Sequence
  Description of Artificial Sequence: Synthetic oligonucleotide
acccgagucaccaaucaaa

SEQ ID NO: 974124 - RNA, 19 nt, Artificial Sequence
  Description of Artificial Sequence: Synthetic oligonucleotide
cccgauagugcugauguag

SEQ ID NO: 974125 - RNA, 19 nt, Artificial Sequence
  Description of Artificial Sequence: Synthetic oligonucleotide
agacccaacaguagcugga

SEQ ID NO: 974126 - RNA, 19 nt, Artificial Sequence
  Description of Artificial Sequence: Synthetic oligonucleotide
gcacucgucuccaggaagg

SEQ ID NO: 974127 - RNA, 19 nt, Artificial Sequence
  Description of Artificial Sequence: Synthetic oligonucleotide
guuaaggcuggugcccggc

SEQ ID NO: 974128 - RNA, 19 nt, Artificial Sequence
  Description of Artificial Sequence: Synthetic oligonucleotide
acguucucacuggcguagc

SEQ ID NO: 974129 - RNA, 19 nt, Artificial Sequence
  Description of Artificial Sequence: Synthetic oligonucleotide
aacccucggcuuauccaag

SEQ ID NO: 974130 - RNA, 19 nt, Artificial Sequence
  Description of Artificial Sequence: Synthetic oligonucleotide
ggagagagucccacaaccc

SEQ ID NO: 974131 - RNA, 19 nt, Artificial Sequence
  Description of Artificial Sequence: Synthetic oligonucleotide
guccugagguccgaagcag

SEQ ID NO: 974132 - RNA, 19 nt, Artificial Sequence
  Description of Artificial Sequence: Synthetic oligonucleotide
ccaaucaaaagcagcuuga

SEQ ID NO: 974133 - RNA, 19 nt, Artificial Sequence
  Description of Artificial Sequence: Synthetic oligonucleotide
aagcugagugugggagcgg

SEQ ID NO: 974134 - RNA, 19 nt, Artificial Sequence
  Description of Artificial Sequence: Synthetic oligonucleotide
ugacguucucacuggcgua

SEQ ID NO: 974135 - RNA, 19 nt, Artificial Sequence
  Description of Artificial Sequence: Synthetic oligonucleotide
aaggggacacccagagagu

SEQ ID NO: 974136 - RNA, 19 nt, Artificial Sequence
  Description of Artificial Sequence: Synthetic oligonucleotide
cucccagucggcucugcuc

SEQ ID NO: 974137 - RNA, 19 nt, Artificial Sequence
  Description of Artificial Sequence: Synthetic oligonucleotide
uacccuaguugugcucaag

SEQ ID NO: 974138 - RNA, 19 nt, Artificial Sequence
  Description of Artificial Sequence: Synthetic oligonucleotide
cuccgccuuucucagggac

SEQ ID NO: 974139 - RNA, 19 nt, Artificial Sequence
  Description of Artificial Sequence: Synthetic oligonucleotide
aggugcauggugggcaucu

SEQ ID NO: 974140 - RNA, 19 nt, Artificial Sequence
  Description of Artificial Sequence: Synthetic oligonucleotide
gccuaccaggaguuuauug

SEQ ID NO: 974141 - RNA, 19 nt, Artificial Sequence
  Description of Artificial Sequence: Synthetic oligonucleotide
uggaagugaugguccggaa

SEQ ID NO: 974142 - RNA, 19 nt, Artificial Sequence
  Description of Artificial Sequence: Synthetic oligonucleotide
gacggcucaagcugagugu

SEQ ID NO: 974143 - RNA, 19 nt, Artificial Sequence
  Description of Artificial Sequence: Synthetic oligonucleotide
ccuuccuagcaacagccac

SEQ ID NO: 974144 - RNA, 19 nt, Artificial Sequence
  Description of Artificial Sequence: Synthetic oligonucleotide
uggcguucuuggcacucgu

SEQ ID NO: 974145 - RNA, 19 nt, Artificial Sequence
  Description of Artificial Sequence: Synthetic oligonucleotide
aggaacggagggauuagaa

SEQ ID NO: 974146 - RNA, 19 nt, Artificial Sequence
  Description of Artificial Sequence: Synthetic oligonucleotide
ggauuagaagccagaugug

SEQ ID NO: 974147 - RNA, 19 nt, Artificial Sequence
  Description of Artificial Sequence: Synthetic oligonucleotide
agagucccacaaccccaag

SEQ ID NO: 974148 - RNA, 19 nt, Artificial Sequence
  Description of Artificial Sequence: Synthetic oligonucleotide
agaugggccagaggaagau

SEQ ID NO: 974149 - RNA, 19 nt, Artificial Sequence
  Description of Artificial Sequence: Synthetic oligonucleotide
uggcacucgucuccaggaa

SEQ ID NO: 974150 - RNA, 19 nt, Artificial Sequence
  Description of Artificial Sequence: Synthetic oligonucleotide
aggcucugaggaacggagg

SEQ ID NO: 974151 - RNA, 19 nt, Artificial Sequence
  Description of Artificial Sequence: Synthetic oligonucleotide
cagcaaaccgcaggagcag

SEQ ID NO: 974152 - RNA, 19 nt, Artificial Sequence
  Description of Artificial Sequence: Synthetic oligonucleotide
cccuacauuccccagagaa

SEQ ID NO: 974153 - RNA, 19 nt, Artificial Sequence
  Description of Artificial Sequence: Synthetic oligonucleotide
ggcaucuuuucaagguacc

SEQ ID NO: 974154 - RNA, 19 nt, Artificial Sequence
  Description of Artificial Sequence: Synthetic oligonucleotide
gguuaaggcuggugcccgg

SEQ ID NO: 974155 - RNA, 19 nt, Artificial Sequence
  Description of Artificial Sequence: Synthetic oligonucleotide
cauuagcguaggacuccug

SEQ ID NO: 974156 - RNA, 19 nt, Artificial Sequence
  Description of Artificial Sequence: Synthetic oligonucleotide
agcugagugugggagcggu

SEQ ID NO: 974157 - RNA, 19 nt, Artificial Sequence
  Description of Artificial Sequence: Synthetic oligonucleotide
guugugcucaagacccaac

SEQ ID NO: 974158 - RNA, 19 nt, Artificial Sequence
  Description of Artificial Sequence: Synthetic oligonucleotide
ggguuaaggcuggugcccg

SEQ ID NO: 974159 - RNA, 19 nt, Artificial Sequence
  Description of Artificial Sequence: Synthetic oligonucleotide
cucaacguugguggcguuc

SEQ ID NO: 974160 - RNA, 19 nt, Artificial Sequence
  Description of Artificial Sequence: Synthetic oligonucleotide
uggcagaguaaggguuaag

SEQ ID NO: 974161 - RNA, 19 nt, Artificial Sequence
  Description of Artificial Sequence: Synthetic oligonucleotide
cuggaucugagacccugga

SEQ ID NO: 974162 - RNA, 19 nt, Artificial Sequence
  Description of Artificial Sequence: Synthetic oligonucleotide
guugccuaccaggaguuua

SEQ ID NO: 974163 - RNA, 19 nt, Artificial Sequence
  Description of Artificial Sequence: Synthetic oligonucleotide
gggugagugacagacagcu

SEQ ID NO: 974164 - RNA, 19 nt, Artificial Sequence
  Description of Artificial Sequence: Synthetic oligonucleotide
cugagguccgaagcaggac

SEQ ID NO: 974165 - RNA, 19 nt, Artificial Sequence
  Description of Artificial Sequence: Synthetic oligonucleotide
ucggucgcucccagucggc

SEQ ID NO: 974166 - RNA, 19 nt, Artificial Sequence
  Description of Artificial Sequence: Synthetic oligonucleotide
ccucggcuuauccaagggc

SEQ ID NO: 974167 - RNA, 19 nt, Artificial Sequence
  Description of Artificial Sequence: Synthetic oligonucleotide
gccauugucaugaaugccu

SEQ ID NO: 974168 - RNA, 19 nt, Artificial Sequence
  Description of Artificial Sequence: Synthetic oligonucleotide
gaggaacggagggauuaga

SEQ ID NO: 974169 - RNA, 19 nt, Artificial Sequence
  Description of Artificial Sequence: Synthetic oligonucleotide
cagaugggccagaggaaga

SEQ ID NO: 974170 - RNA, 19 nt, Artificial Sequence
  Description of Artificial Sequence: Synthetic oligonucleotide
acggugggccuuccaccuc

SEQ ID NO: 974171 - RNA, 19 nt, Artificial Sequence
  Description of Artificial Sequence: Synthetic oligonucleotide
cugaggaacggagggauua

SEQ ID NO: 974172 - RNA, 19 nt, Artificial Sequence
  Description of Artificial Sequence: Synthetic oligonucleotide
gagggauuagaagccagau

SEQ ID NO: 974173 - RNA, 19 nt, Artificial Sequence
  Description of Artificial Sequence: Synthetic oligonucleotide
acggagggauuagaagcca

SEQ ID NO: 974174 - RNA, 19 nt, Artificial Sequence
  Description of Artificial Sequence: Synthetic oligonucleotide
gagcccaggacaccccaaa

SEQ ID NO: 974175 - RNA, 19 nt, Artificial Sequence
  Description of Artificial Sequence: Synthetic oligonucleotide
cccauguggcuuuuccuug

SEQ ID NO: 974176 - RNA, 19 nt, Artificial Sequence
  Description of Artificial Sequence: Synthetic oligonucleotide
ggauccccuggccacugcc

SEQ ID NO: 974177 - RNA, 19 nt, Artificial Sequence
  Description of Artificial Sequence: Synthetic oligonucleotide
agccauccgcccaccuacc

SEQ ID NO: 974178 - RNA, 19 nt, Artificial Sequence
  Description of Artificial Sequence: Synthetic oligonucleotide
accccaaguggccccuaca

SEQ ID NO: 974179 - RNA, 19 nt, Artificial Sequence
  Description of Artificial Sequence: Synthetic oligonucleotide
ccagaugugcugccucagg

SEQ ID NO: 974180 - RNA, 19 nt, Artificial Sequence
  Description of Artificial Sequence: Synthetic oligonucleotide
gcacggugggccuuccacc

SEQ ID NO: 974181 - RNA, 19 nt, Artificial Sequence
  Description of Artificial Sequence: Synthetic oligonucleotide
ccgagucaccaaucaaaag

SEQ ID NO: 974182 - RNA, 19 nt, Artificial Sequence
  Description of Artificial Sequence: Synthetic oligonucleotide
gagagucccacaaccccaa

SEQ ID NO: 974183 - RNA, 19 nt, Artificial Sequence
  Description of Artificial Sequence: Synthetic oligonucleotide
ccucaggcucugaggaacg

SEQ ID NO: 974184 - RNA, 19 nt, Artificial Sequence
  Description of Artificial Sequence: Synthetic oligonucleotide
ggcagcgguggcccgcucg

SEQ ID NO: 974185 - RNA, 19 nt, Artificial Sequence
  Description of Artificial Sequence: Synthetic oligonucleotide
gcagcgguggcccgcucgg

SEQ ID NO: 974186 - RNA, 19 nt, Artificial Sequence
  Description of Artificial Sequence: Synthetic oligonucleotide
cauccgcccaccuacccua

SEQ ID NO: 974187 - RNA, 19 nt, Artificial Sequence
  Description of Artificial Sequence: Synthetic oligonucleotide
ccuagcaacagccaccacu

SEQ ID NO: 974188 - RNA, 19 nt, Artificial Sequence
  Description of Artificial Sequence: Synthetic oligonucleotide
gcuugagacacaggcccag

SEQ ID NO: 974189 - RNA, 19 nt, Artificial Sequence
  Description of Artificial Sequence: Synthetic oligonucleotide
gcucggucgcucccagucg

SEQ ID NO: 974190 - RNA, 19 nt, Artificial Sequence
  Description of Artificial Sequence: Synthetic oligonucleotide
gcgguggcccgcucggucg

SEQ ID NO: 974191 - RNA, 19 nt, Artificial Sequence
  Description of Artificial Sequence: Synthetic oligonucleotide
ggggcgggauucugagugg

SEQ ID NO: 974192 - RNA, 19 nt, Artificial Sequence
  Description of Artificial Sequence: Synthetic oligonucleotide
cagucggcucugcuccgcc

SEQ ID NO: 974193 - RNA, 19 nt, Artificial Sequence
  Description of Artificial Sequence: Synthetic oligonucleotide
ggcacgacuugcccacacc

SEQ ID NO: 974194 - RNA, 19 nt, Artificial Sequence
  Description of Artificial Sequence: Synthetic oligonucleotide
gcuggaagugaugguccgg

SEQ ID NO: 974195 - RNA, 19 nt, Artificial Sequence
  Description of Artificial Sequence: Synthetic oligonucleotide
gcguaggacuccuggucag

SEQ ID NO: 974196 - RNA, 19 nt, Artificial Sequence
  Description of Artificial Sequence: Synthetic oligonucleotide
uucgggguucauggcggca

SEQ ID NO: 974197 - RNA, 19 nt, Artificial Sequence
  Description of Artificial Sequence: Synthetic oligonucleotide
ggccaguggaaauuuauuu

SEQ ID NO: 974198 - RNA, 19 nt, Artificial Sequence
  Description of Artificial Sequence: Synthetic oligonucleotide
cacaggggugcugucgauc

SEQ ID NO: 974199 - RNA, 19 nt, Artificial Sequence
  Description of Artificial Sequence: Synthetic oligonucleotide
caguuccugugaccacccc

SEQ ID NO: 974200 - RNA, 19 nt, Artificial Sequence
  Description of Artificial Sequence: Synthetic oligonucleotide
acaaccccaaguggccccu

SEQ ID NO: 974201 - RNA, 19 nt, Artificial Sequence
  Description of Artificial Sequence: Synthetic oligonucleotide
caaaccgcaggagcaggca

SEQ ID NO: 974202 - RNA, 19 nt, Artificial Sequence
  Description of Artificial Sequence: Synthetic oligonucleotide
ggagggauuagaagccaga

SEQ ID NO: 974203 - RNA, 19 nt, Artificial Sequence
  Description of Artificial Sequence: Synthetic oligonucleotide
gaccaccccugccacaggu

SEQ ID NO: 974204 - RNA, 19 nt, Artificial Sequence
  Description of Artificial Sequence: Synthetic oligonucleotide
ccccagagaaguaggucug

SEQ ID NO: 974205 - RNA, 19 nt, Artificial Sequence
  Description of Artificial Sequence: Synthetic oligonucleotide
agguaccuagaggcagcag

SEQ ID NO: 974206 - RNA, 19 nt, Artificial Sequence
  Description of Artificial Sequence: Synthetic oligonucleotide
gccaguggaaauuuauuuu

SEQ ID NO: 974207 - RNA, 19 nt, Artificial Sequence
  Description of Artificial Sequence: Synthetic oligonucleotide
ggacuccuggucagugacg

SEQ ID NO: 974208 - RNA, 19 nt, Artificial Sequence
  Description of Artificial Sequence: Synthetic oligonucleotide
ugcugccucaggggaagaa

SEQ ID NO: 974209 - RNA, 19 nt, Artificial Sequence
  Description of Artificial Sequence: Synthetic oligonucleotide
uccuagcaacagccaccac

SEQ ID NO: 974210 - RNA, 19 nt, Artificial Sequence
  Description of Artificial Sequence: Synthetic oligonucleotide
caccuccgccuuucucagg

SEQ ID NO: 974211 - RNA, 19 nt, Artificial Sequence
  Description of Artificial Sequence: Synthetic oligonucleotide
gcaaaccgcaggagcaggc

SEQ ID NO: 974212 - RNA, 19 nt, Artificial Sequence
  Description of Artificial Sequence: Synthetic oligonucleotide
gcguucuuggcacucgucu

SEQ ID NO: 974213 - RNA, 19 nt, Artificial Sequence
  Description of Artificial Sequence: Synthetic oligonucleotide
gucgcucccagucggcucu

SEQ ID NO: 974214 - RNA, 19 nt, Artificial Sequence
  Description of Artificial Sequence: Synthetic oligonucleotide
ccaggggcaucaucuggag

SEQ ID NO: 974215 - RNA, 19 nt, Artificial Sequence
  Description of Artificial Sequence: Synthetic oligonucleotide
caagugcccuuccuagcaa

SEQ ID NO: 974216 - RNA, 19 nt, Artificial Sequence
  Description of Artificial Sequence: Synthetic oligonucleotide
uggacggcucaagcugagu

SEQ ID NO: 974217 - RNA, 19 nt, Artificial Sequence
  Description of Artificial Sequence: Synthetic oligonucleotide
aagugggcuguuggcuuuu

SEQ ID NO: 974218 - RNA, 19 nt, Artificial Sequence
  Description of Artificial Sequence: Synthetic oligonucleotide
caccccgauagugcugaug

SEQ ID NO: 974219 - RNA, 19 nt, Artificial Sequence
  Description of Artificial Sequence: Synthetic oligonucleotide
uccgcccaccuacccuagu

SEQ ID NO: 974220 - RNA, 19 nt, Artificial Sequence
  Description of Artificial Sequence: Synthetic oligonucleotide
ccuacccuaguugugcuca

SEQ ID NO: 974221 - RNA, 19 nt, Artificial Sequence
  Description of Artificial Sequence: Synthetic oligonucleotide
ccaccuccgccuuucucag

SEQ ID NO: 974222 - RNA, 19 nt, Artificial Sequence
  Description of Artificial Sequence: Synthetic oligonucleotide
agcccucauuccaaagaaa

SEQ ID NO: 974223 - RNA, 19 nt, Artificial Sequence
  Description of Artificial Sequence: Synthetic oligonucleotide
gguccgaagcaggacccug

SEQ ID NO: 974224 - RNA, 19 nt, Artificial Sequence
  Description of Artificial Sequence: Synthetic oligonucleotide
cccgagucaccaaucaaaa

SEQ ID NO: 974225 - RNA, 19 nt, Artificial Sequence
  Description of Artificial Sequence: Synthetic oligonucleotide
ggugagugacagacagcug

SEQ ID NO: 974226 - RNA, 19 nt, Artificial Sequence
  Description of Artificial Sequence: Synthetic oligonucleotide
cugcuccgccucccguucc

SEQ ID NO: 974227 - RNA, 19 nt, Artificial Sequence
  Description of Artificial Sequence: Synthetic oligonucleotide
uguugccuaccaggaguuu

SEQ ID NO: 974228 - RNA, 19 nt, Artificial Sequence
  Description of Artificial Sequence: Synthetic oligonucleotide
ggcgggauucugagugggg

SEQ ID NO: 974229 - RNA, 19 nt, Artificial Sequence
  Description of Artificial Sequence: Synthetic oligonucleotide
uggcacggugggccuucca

SEQ ID NO: 974230 - RNA, 19 nt, Artificial Sequence
  Description of Artificial Sequence: Synthetic oligonucleotide
cacggugggccuuccaccu

SEQ ID NO: 974231 - RNA, 19 nt, Artificial Sequence
  Description of Artificial Sequence: Synthetic oligonucleotide
cuggauccccuggccacug

SEQ ID NO: 974232 - RNA, 19 nt, Artificial Sequence
  Description of Artificial Sequence: Synthetic oligonucleotide
caggggcaucaucuggaga

SEQ ID NO: 974233 - RNA, 19 nt, Artificial Sequence
  Description of Artificial Sequence: Synthetic oligonucleotide
ggccccuacauuccccaga

SEQ ID NO: 974234 - RNA, 19 nt, Artificial Sequence
  Description of Artificial Sequence: Synthetic oligonucleotide
gcgggauucugagugggga

SEQ ID NO: 974235 - RNA, 19 nt, Artificial Sequence
  Description of Artificial Sequence: Synthetic oligonucleotide
cccaaagccacagacucaa

SEQ ID NO: 974236 - RNA, 19 nt, Artificial Sequence
  Description of Artificial Sequence: Synthetic oligonucleotide
agguccgaagcaggacccu

SEQ ID NO: 974237 - RNA, 19 nt, Artificial Sequence
  Description of Artificial Sequence: Synthetic oligonucleotide
cggagggauuagaagccag

SEQ ID NO: 974238 - RNA, 19 nt, Artificial Sequence
  Description of Artificial Sequence: Synthetic oligonucleotide
cacccgagucaccaaucaa

SEQ ID NO: 974239 - RNA, 19 nt, Artificial Sequence
  Description of Artificial Sequence: Synthetic oligonucleotide
ggacauggcuucucaggua

SEQ ID NO: 974240 - RNA, 19 nt, Artificial Sequence
  Description of Artificial Sequence: Synthetic oligonucleotide
ccuucuugguggugagauc

SEQ ID NO: 974241 - RNA, 19 nt, Artificial Sequence
  Description of Artificial Sequence: Synthetic oligonucleotide
ccugacaggacagcacuca

SEQ ID NO: 974242 - RNA, 19 nt, Artificial Sequence
  Description of Artificial Sequence: Synthetic oligonucleotide
gccauccgcccaccuaccc

SEQ ID NO: 974243 - RNA, 19 nt, Artificial Sequence
  Description of Artificial Sequence: Synthetic oligonucleotide
cccgguaguagcuggaagu

SEQ ID NO: 974244 - RNA, 19 nt, Artificial Sequence
  Description of Artificial Sequence: Synthetic oligonucleotide
cuacccuaguugugcucaa

SEQ ID NO: 974245 - RNA, 19 nt, Artificial Sequence
  Description of Artificial Sequence: Synthetic oligonucleotide
cggccauuggcacgguggg

SEQ ID NO: 974246 - RNA, 19 nt, Artificial Sequence
  Description of Artificial Sequence: Synthetic oligonucleotide
gccagaugugcugccucag

SEQ ID NO: 974247 - RNA, 19 nt, Artificial Sequence
  Description of Artificial Sequence: Synthetic oligonucleotide
gauccccuggccacugccu

SEQ ID NO: 974248 - RNA, 19 nt, Artificial Sequence
  Description of Artificial Sequence: Synthetic oligonucleotide
ugccuaccaggaguuuauu

SEQ ID NO: 974249 - RNA, 19 nt, Artificial Sequence
  Description of Artificial Sequence: Synthetic oligonucleotide
agcuggcuucacaggggug

SEQ ID NO: 974250 - RNA, 19 nt, Artificial Sequence
  Description of Artificial Sequence: Synthetic oligonucleotide
ggggugagugacagacagc

SEQ ID NO: 974251 - RNA, 19 nt, Artificial Sequence
  Description of Artificial Sequence: Synthetic oligonucleotide
gcuggacggcucaagcuga

SEQ ID NO: 974252 - RNA, 19 nt, Artificial Sequence
  Description of Artificial Sequence: Synthetic oligonucleotide
ggucgcucccagucggcuc

SEQ ID NO: 974253 - RNA, 19 nt, Artificial Sequence
  Description of Artificial Sequence: Synthetic oligonucleotide
guccaccccgauagugcug

SEQ ID NO: 974254 - RNA, 19 nt, Artificial Sequence
  Description of Artificial Sequence: Synthetic oligonucleotide
gcaucuuuucaagguaccu

SEQ ID NO: 974255 - RNA, 19 nt, Artificial Sequence
  Description of Artificial Sequence: Synthetic oligonucleotide
ggggaaccugggagaagag

SEQ ID NO: 974256 - RNA, 19 nt, Artificial Sequence
  Description of Artificial Sequence: Synthetic oligonucleotide
ugccuguccugagguccga

SEQ ID NO: 974257 - RNA, 19 nt, Artificial Sequence
  Description of Artificial Sequence: Synthetic oligonucleotide
cacgaccuucuugguggug

SEQ ID NO: 974258 - RNA, 19 nt, Artificial Sequence
  Description of Artificial Sequence: Synthetic oligonucleotide
guuuugccauccaguucaa

SEQ ID NO: 974259 - RNA, 19 nt, Artificial Sequence
  Description of Artificial Sequence: Synthetic oligonucleotide
caacaguagcuggacggcu

SEQ ID NO: 974260 - RNA, 19 nt, Artificial Sequence
  Description of Artificial Sequence: Synthetic oligonucleotide
acauggcuucucagguaau

SEQ ID NO: 974261 - RNA, 19 nt, Artificial Sequence
  Description of Artificial Sequence: Synthetic oligonucleotide
caccuacccuaguugugcu

SEQ ID NO: 974262 - RNA, 19 nt, Artificial Sequence
  Description of Artificial Sequence: Synthetic oligonucleotide
caaaagggacauggcuucu

SEQ ID NO: 974263 - RNA, 19 nt, Artificial Sequence
  Description of Artificial Sequence: Synthetic oligonucleotide
gacagacagcugagcccuc

SEQ ID NO: 974264 - RNA, 19 nt, Artificial Sequence
  Description of Artificial Sequence: Synthetic oligonucleotide
cggugggccuuccaccucc

SEQ ID NO: 974265 - RNA, 19 nt, Artificial Sequence
  Description of Artificial Sequence: Synthetic oligonucleotide
cgaccuucuugguggugag

SEQ ID NO: 974266 - RNA, 19 nt, Artificial Sequence
  Description of Artificial Sequence: Synthetic oligonucleotide
caccacuagcuggcuucac

SEQ ID NO: 974267 - RNA, 19 nt, Artificial Sequence
  Description of Artificial Sequence: Synthetic oligonucleotide
ggccauuggcacggugggc

SEQ ID NO: 974268 - RNA, 19 nt, Artificial Sequence
  Description of Artificial Sequence: Synthetic oligonucleotide
gguaaucaccaaagguuuu

SEQ ID NO: 974269 - RNA, 19 nt, Artificial Sequence
  Description of Artificial Sequence: Synthetic oligonucleotide
cugagacccuggauccccu

SEQ ID NO: 974270 - RNA, 19 nt, Artificial Sequence
  Description of Artificial Sequence: Synthetic oligonucleotide
ggaggcacuuccugccccu

SEQ ID NO: 974271 - RNA, 19 nt, Artificial Sequence
  Description of Artificial Sequence: Synthetic oligonucleotide
cccagaggggcagcccagg

SEQ ID NO: 974272 - RNA, 19 nt, Artificial Sequence
  Description of Artificial Sequence: Synthetic oligonucleotide
ucgcucccagucggcucug

SEQ ID NO: 974273 - RNA, 19 nt, Artificial Sequence
  Description of Artificial Sequence: Synthetic oligonucleotide
ggcguucuuggcacucguc

SEQ ID NO: 974274 - RNA, 19 nt, Artificial Sequence
  Description of Artificial Sequence: Synthetic oligonucleotide
cuaggagagggaggcacuu

SEQ ID NO: 974275 - RNA, 19 nt, Artificial Sequence
  Description of Artificial Sequence: Synthetic oligonucleotide
cggcuuauccaagggccag

SEQ ID NO: 974276 - RNA, 19 nt, Artificial Sequence
  Description of Artificial Sequence: Synthetic oligonucleotide
guggggcgggauucugagu

SEQ ID NO: 974277 - RNA, 19 nt, Artificial Sequence
  Description of Artificial Sequence: Synthetic oligonucleotide
ccagucggcucugcuccgc

SEQ ID NO: 974278 - RNA, 19 nt, Artificial Sequence
  Description of Artificial Sequence: Synthetic oligonucleotide
ccuaggagagggaggcacu

SEQ ID NO: 974279 - RNA, 19 nt, Artificial Sequence
  Description of Artificial Sequence: Synthetic oligonucleotide
cgauagugcugauguagcu

SEQ ID NO: 974280 - RNA, 19 nt, Artificial Sequence
  Description of Artificial Sequence: Synthetic oligonucleotide
cgggguucauggcggcagc

SEQ ID NO: 974281 - RNA, 19 nt, Artificial Sequence
  Description of Artificial Sequence: Synthetic oligonucleotide
cgggauucugaguggggaa

SEQ ID NO: 974282 - RNA, 19 nt, Artificial Sequence
  Description of Artificial Sequence: Synthetic oligonucleotide
caguagcuggacggcucaa

SEQ ID NO: 974283 - RNA, 19 nt, Artificial Sequence
  Description of Artificial Sequence: Synthetic oligonucleotide
cccgcucggucgcucccag

SEQ ID NO: 974284 - RNA, 19 nt, Artificial Sequence
  Description of Artificial Sequence: Synthetic oligonucleotide
gcuccuggccccauccgcu

SEQ ID NO: 974285 - RNA, 19 nt, Artificial Sequence
  Description of Artificial Sequence: Synthetic oligonucleotide
gcagccccuugccuguccu

SEQ ID NO: 974286 - RNA, 19 nt, Artificial Sequence
  Description of Artificial Sequence: Synthetic oligonucleotide
ccaguucaaugguucgaau

SEQ ID NO: 974287 - RNA, 19 nt, Artificial Sequence
  Description of Artificial Sequence: Synthetic oligonucleotide
gugcugccucaggggaaga

SEQ ID NO: 974288 - RNA, 19 nt, Artificial Sequence
  Description of Artificial Sequence: Synthetic oligonucleotide
ccaaagccacagacucaaa

SEQ ID NO: 974289 - RNA, 19 nt, Artificial Sequence
  Description of Artificial Sequence: Synthetic oligonucleotide
ccauccgcccaccuacccu

SEQ ID NO: 974290 - RNA, 19 nt, Artificial Sequence
  Description of Artificial Sequence: Synthetic oligonucleotide
cuccuggccccauccgcuu

SEQ ID NO: 974291 - RNA, 19 nt, Artificial Sequence
  Description of Artificial Sequence: Synthetic oligonucleotide
ccaagggccaguggaaauu

SEQ ID NO: 974292 - RNA, 19 nt, Artificial Sequence
  Description of Artificial Sequence: Synthetic oligonucleotide
ccaggaguuuauugacguu

SEQ ID NO: 974293 - RNA, 19 nt, Artificial Sequence
  Description of Artificial Sequence: Synthetic oligonucleotide
cgguggcccgcucggucgc

SEQ ID NO: 974294 - RNA, 19 nt, Artificial Sequence
  Description of Artificial Sequence: Synthetic oligonucleotide
ccuccgccuuucucaggga

SEQ ID NO: 974295 - RNA, 19 nt, Artificial Sequence
  Description of Artificial Sequence: Synthetic oligonucleotide
ccccucaggcucugaggaa

SEQ ID NO: 974296 - RNA, 19 nt, Artificial Sequence
  Description of Artificial Sequence: Synthetic oligonucleotide
caacguugguggcguucuu

SEQ ID NO: 974297 - RNA, 19 nt, Artificial Sequence
  Description of Artificial Sequence: Synthetic oligonucleotide
gcccuaggagagggaggca

SEQ ID NO: 974298 - RNA, 19 nt, Artificial Sequence
  Description of Artificial Sequence: Synthetic oligonucleotide
ccucagcuacugggaagga

SEQ ID NO: 974299 - RNA, 19 nt, Artificial Sequence
  Description of Artificial Sequence: Synthetic oligonucleotide
cauuggcacggugggccuu

SEQ ID NO: 974300 - RNA, 19 nt, Artificial Sequence
  Description of Artificial Sequence: Synthetic oligonucleotide
ccccgauagugcugaugua

SEQ ID NO: 974301 - RNA, 19 nt, Artificial Sequence
  Description of Artificial Sequence: Synthetic oligonucleotide
ccccuacauuccccagaga

SEQ ID NO: 974302 - RNA, 19 nt, Artificial Sequence
  Description of Artificial Sequence: Synthetic oligonucleotide
gccuguccugagguccgaa

SEQ ID NO: 974303 - RNA, 19 nt, Artificial Sequence
  Description of Artificial Sequence: Synthetic oligonucleotide
gcccgcucggucgcuccca

SEQ ID NO: 974304 - RNA, 19 nt, Artificial Sequence
  Description of Artificial Sequence: Synthetic oligonucleotide
ccacgaccuucuugguggu

SEQ ID NO: 974305 - RNA, 19 nt, Artificial Sequence
  Description of Artificial Sequence: Synthetic oligonucleotide
ccuggauccccuggccacu

SEQ ID NO: 974306 - RNA, 19 nt, Artificial Sequence
  Description of Artificial Sequence: Synthetic oligonucleotide
cgucguacaccacgaugau

SEQ ID NO: 974307 - RNA, 19 nt, Artificial Sequence
  Description of Artificial Sequence: Synthetic oligonucleotide
ccgcccaccuacccuaguu

SEQ ID NO: 974308 - RNA, 19 nt, Artificial Sequence
  Description of Artificial Sequence: Synthetic oligonucleotide
ccgcaggagcaggcacgac

SEQ ID NO: 974309 - RNA, 19 nt, Artificial Sequence
  Description of Artificial Sequence: Synthetic oligonucleotide
ccuggccccauccgcuuuu

SEQ ID NO: 974310 - RNA, 19 nt, Artificial Sequence
  Description of Artificial Sequence: Synthetic oligonucleotide
gcucaacguugguggcguu

SEQ ID NO: 974311 - RNA, 19 nt, Artificial Sequence
  Description of Artificial Sequence: Synthetic oligonucleotide
gcggcagcgguggcccgcu

SEQ ID NO: 974312 - RNA, 19 nt, Artificial Sequence
  Description of Artificial Sequence: Synthetic oligonucleotide
gguggcccgcucggucgcu

SEQ ID NO: 974313 - RNA, 19 nt, Artificial Sequence
  Description of Artificial Sequence: Synthetic oligonucleotide
cccuuccccaagugcccuu

SEQ ID NO: 974314 - RNA, 19 nt, Artificial Sequence
  Description of Artificial Sequence: Synthetic oligonucleotide
cggucgcucccagucggcu

SEQ ID NO: 974315 - RNA, 19 nt, Artificial Sequence
  Description of Artificial Sequence: Synthetic oligonucleotide
gggcagcccaggggauuuu

SEQ ID NO: 974316 - RNA, 19 nt, Artificial Sequence
  Description of Artificial Sequence: Synthetic oligonucleotide
ccgcucggucgcucccagu

SEQ ID NO: 974317 - RNA, 19 nt, Artificial Sequence
  Description of Artificial Sequence: Synthetic oligonucleotide
ccaccccgauagugcugau

SEQ ID NO: 974318 - RNA, 19 nt, Artificial Sequence
  Description of Artificial Sequence: Synthetic oligonucleotide
cggcagcgguggcccgcuc

SEQ ID NO: 974319 - RNA, 19 nt, Artificial Sequence
  Description of Artificial Sequence: Synthetic oligonucleotide
agugagaccacucaguagc

SEQ ID NO: 974320 - RNA, 19 nt, Artificial Sequence
  Description of Artificial Sequence: Synthetic oligonucleotide
aauagugacuuggagaugc

SEQ ID NO: 974321 - RNA, 19 nt, Artificial Sequence
  Description of Artificial Sequence: Synthetic oligonucleotide
ugaacaaccacaaacaagu

SEQ ID NO: 974322 - RNA, 19 nt, Artificial Sequence
  Description of Artificial Sequence: Synthetic oligonucleotide
augaacaaaggcuugagac

SEQ ID NO: 974323 - RNA, 19 nt, Artificial Sequence
  Description of Artificial Sequence: Synthetic oligonucleotide
ugaaauaucaaaauauauc

SEQ ID NO: 974324 - RNA, 19 nt, Artificial Sequence
  Description of Artificial Sequence: Synthetic oligonucleotide
ucuuagucaauagagauag

SEQ ID NO: 974325 - RNA, 19 nt, Artificial Sequence
  Description of Artificial Sequence: Synthetic oligonucleotide
cucauaaagguucauaucc

SEQ ID NO: 974326 - RNA, 19 nt, Artificial Sequence
  Description of Artificial Sequence: Synthetic oligonucleotide
ucugauuugccuuucugcg

SEQ ID NO: 974327 - RNA, 19 nt, Artificial Sequence
  Description of Artificial Sequence: Synthetic oligonucleotide
auaaacugcagcaugaagg

SEQ ID NO: 974328 - RNA, 19 nt, Artificial Sequence
  Description of Artificial Sequence: Synthetic oligonucleotide
ugaacaaaggcuugagacg

SEQ ID NO: 974329 - RNA, 19 nt, Artificial Sequence
  Description of Artificial Sequence: Synthetic oligonucleotide
uuuaaucuggcucuuaguc

SEQ ID NO: 974330 - RNA, 19 nt, Artificial Sequence
  Description of Artificial Sequence: Synthetic oligonucleotide
aauaacauaugcuggagua

SEQ ID NO: 974331 - RNA, 19 nt, Artificial Sequence
  Description of Artificial Sequence: Synthetic oligonucleotide
agucaauagagauaggaug

SEQ ID NO: 974332 - RNA, 19 nt, Artificial Sequence
  Description of Artificial Sequence: Synthetic oligonucleotide
aaagcaauguuucucuccu

SEQ ID NO: 974333 - RNA, 19 nt, Artificial Sequence
  Description of Artificial Sequence: Synthetic oligonucleotide
auaggauguuguuugcugc

SEQ ID NO: 974334 - RNA, 19 nt, Artificial Sequence
  Description of Artificial Sequence: Synthetic oligonucleotide
agcaauguuucucuccugc

SEQ ID NO: 974335 - RNA, 19 nt, Artificial Sequence
  Description of Artificial Sequence: Synthetic oligonucleotide
accuaagaguuguaggucc

SEQ ID NO: 974336 - RNA, 19 nt, Artificial Sequence
  Description of Artificial Sequence: Synthetic oligonucleotide
agauccgugauucugaagu

SEQ ID NO: 974337 - RNA, 19 nt, Artificial Sequence
  Description of Artificial Sequence: Synthetic oligonucleotide
auaauauccacagaagcag

SEQ ID NO: 974338 - RNA, 19 nt, Artificial Sequence
  Description of Artificial Sequence: Synthetic oligonucleotide
auuucugcgauggagacuc

SEQ ID NO: 974339 - RNA, 19 nt, Artificial Sequence
  Description of Artificial Sequence: Synthetic oligonucleotide
uuagucaauagagauagga

SEQ ID NO: 974340 - RNA, 19 nt, Artificial Sequence
  Description of Artificial Sequence: Synthetic oligonucleotide
uguuccacacauuggaucc

SEQ ID NO: 974341 - RNA, 19 nt, Artificial Sequence
  Description of Artificial Sequence: Synthetic oligonucleotide
aauauaucuugccccgguc

SEQ ID NO: 974342 - RNA, 19 nt, Artificial Sequence
  Description of Artificial Sequence: Synthetic oligonucleotide
aaagcaaguucuuuaugcu

SEQ ID NO: 974343 - RNA, 19 nt, Artificial Sequence
  Description of Artificial Sequence: Synthetic oligonucleotide
auugguauugccccuguuc

SEQ ID NO: 974344 - RNA, 19 nt, Artificial Sequence
  Description of Artificial Sequence: Synthetic oligonucleotide
aagcaaugaagcuucugag

SEQ ID NO: 974345 - RNA, 19 nt, Artificial Sequence
  Description of Artificial Sequence: Synthetic oligonucleotide
cuuuucgccacacaugucc

SEQ ID NO: 974346 - RNA, 19 nt, Artificial Sequence
  Description of Artificial Sequence: Synthetic oligonucleotide
uggcucuuagucaauagag

SEQ ID NO: 974347 - RNA, 19 nt, Artificial Sequence
  Description of Artificial Sequence: Synthetic oligonucleotide
uccaauagugacuuggaga

SEQ ID NO: 974348 - RNA, 19 nt, Artificial Sequence
  Description of Artificial Sequence: Synthetic oligonucleotide
uugaccuaagaguuguagg

SEQ ID NO: 974349 - RNA, 19 nt, Artificial Sequence
  Description of Artificial Sequence: Synthetic oligonucleotide
ucucaucucugcaacaugc

SEQ ID NO: 974350 - RNA, 19 nt, Artificial Sequence
  Description of Artificial Sequence: Synthetic oligonucleotide
agaagcaguucucaguggg

SEQ ID NO: 974351 - RNA, 19 nt, Artificial Sequence
  Description of Artificial Sequence: Synthetic oligonucleotide
gacuguauggacuuuucgc

SEQ ID NO: 974352 - RNA, 19 nt, Artificial Sequence
  Description of Artificial Sequence: Synthetic oligonucleotide
gaggaaauaccauaaguca

SEQ ID NO: 974353 - RNA, 19 nt, Artificial Sequence
  Description of Artificial Sequence: Synthetic oligonucleotide
uugguauugccccuguucc

SEQ ID NO: 974354 - RNA, 19 nt, Artificial Sequence
  Description of Artificial Sequence: Synthetic oligonucleotide
uccugaacaaccacaaaca

SEQ ID NO: 974355 - RNA, 19 nt, Artificial Sequence
  Description of Artificial Sequence: Synthetic oligonucleotide
aaguuaucaacugaucuca

SEQ ID NO: 974356 - RNA, 19 nt, Artificial Sequence
  Description of Artificial Sequence: Synthetic oligonucleotide
uaauuugccagacuuuuaa

SEQ ID NO: 974357 - RNA, 19 nt, Artificial Sequence
  Description of Artificial Sequence: Synthetic oligonucleotide
uauuuuccucccaaaagca

SEQ ID NO: 974358 - RNA, 19 nt, Artificial Sequence
  Description of Artificial Sequence: Synthetic oligonucleotide
uaauaguccaagauccgug

SEQ ID NO: 974359 - RNA, 19 nt, Artificial Sequence
  Description of Artificial Sequence: Synthetic oligonucleotide
aauaguccaagauccguga

SEQ ID NO: 974360 - RNA, 19 nt, Artificial Sequence
  Description of Artificial Sequence: Synthetic oligonucleotide
gacuucauuaucauggaug

SEQ ID NO: 974361 - RNA, 19 nt, Artificial Sequence
  Description of Artificial Sequence: Synthetic oligonucleotide
aaaauguguaauauuucug

SEQ ID NO: 974362 - RNA, 19 nt, Artificial Sequence
  Description of Artificial Sequence: Synthetic oligonucleotide
ucucagacaaugaaccuga

SEQ ID NO: 974363 - RNA, 19 nt, Artificial Sequence
  Description of Artificial Sequence: Synthetic oligonucleotide
uaguuagcaggguagacug

SEQ ID NO: 974364 - RNA, 19 nt, Artificial Sequence
  Description of Artificial Sequence: Synthetic oligonucleotide
uuuagaacuucuuccuuug

SEQ ID NO: 974365 - RNA, 19 nt, Artificial Sequence
  Description of Artificial Sequence: Synthetic oligonucleotide
cuugcuaacaauaacauau

SEQ ID NO: 974366 - RNA, 19 nt, Artificial Sequence
  Description of Artificial Sequence: Synthetic oligonucleotide
auacucuugaacagaaccc

SEQ ID NO: 974367 - RNA, 19 nt, Artificial Sequence
  Description of Artificial Sequence: Synthetic oligonucleotide
uucucauaaagguucauau

SEQ ID NO: 974368 - RNA, 19 nt, Artificial Sequence
  Description of Artificial Sequence: Synthetic oligonucleotide
ugaccuaagaguuguaggu

SEQ ID NO: 974369 - RNA, 19 nt, Artificial Sequence
  Description of Artificial Sequence: Synthetic oligonucleotide
ugcuaacaauaacauaugc

SEQ ID NO: 974370 - RNA, 19 nt, Artificial Sequence
  Description of Artificial Sequence: Synthetic oligonucleotide
aaauauaucuugccccggu

SEQ ID NO: 974371 - RNA, 19 nt, Artificial Sequence
  Description of Artificial Sequence: Synthetic oligonucleotide
aauagagauaggauguugu

SEQ ID NO: 974372 - RNA, 19 nt, Artificial Sequence
  Description of Artificial Sequence: Synthetic oligonucleotide
gaguuguagguccaaaaug

SEQ ID NO: 974373 - RNA, 19 nt, Artificial Sequence
  Description of Artificial Sequence: Synthetic oligonucleotide
ucauaaagguucauaucca

SEQ ID NO: 974374 - RNA, 19 nt, Artificial Sequence
  Description of Artificial Sequence: Synthetic oligonucleotide
gaaacugguguuaauuugc

SEQ ID NO: 974375 - RNA, 19 nt, Artificial Sequence
  Description of Artificial Sequence: Synthetic oligonucleotide
agcuucuugagugucagac

SEQ ID NO: 974376 - RNA, 19 nt, Artificial Sequence
  Description of Artificial Sequence: Synthetic oligonucleotide
auuuagguggccuguagug

SEQ ID NO: 974377 - RNA, 19 nt, Artificial Sequence
  Description of Artificial Sequence: Synthetic oligonucleotide
cugacaagcgucuuacugc

SEQ ID NO: 974378 - RNA, 19 nt, Artificial Sequence
  Description of Artificial Sequence: Synthetic oligonucleotide
ugcguuuuagaagauaaac

SEQ ID NO: 974379 - RNA, 19 nt, Artificial Sequence
  Description of Artificial Sequence: Synthetic oligonucleotide
uaucauggauguucaagag

SEQ ID NO: 974380 - RNA, 19 nt, Artificial Sequence
  Description of Artificial Sequence: Synthetic oligonucleotide
caaguuaucaacugaucuc

SEQ ID NO: 974381 - RNA, 19 nt, Artificial Sequence
  Description of Artificial Sequence: Synthetic oligonucleotide
aaaggcauaucuguuacaa

SEQ ID NO: 974382 - RNA, 19 nt, Artificial Sequence
  Description of Artificial Sequence: Synthetic oligonucleotide
aucaacugaucucagacaa

SEQ ID NO: 974383 - RNA, 19 nt, Artificial Sequence
  Description of Artificial Sequence: Synthetic oligonucleotide
aguccaagauccgugauuc

SEQ ID NO: 974384 - RNA, 19 nt, Artificial Sequence
  Description of Artificial Sequence: Synthetic oligonucleotide
uucuaucauaggcacagac

SEQ ID NO: 974385 - RNA, 19 nt, Artificial Sequence
  Description of Artificial Sequence: Synthetic oligonucleotide
uguucacccagacuguaug

SEQ ID NO: 974386 - RNA, 19 nt, Artificial Sequence
  Description of Artificial Sequence: Synthetic oligonucleotide
uuauuuagguggccuguag

SEQ ID NO: 974387 - RNA, 19 nt, Artificial Sequence
  Description of Artificial Sequence: Synthetic oligonucleotide
cauaauaguccaagauccg

SEQ ID NO: 974388 - RNA, 19 nt, Artificial Sequence
  Description of Artificial Sequence: Synthetic oligonucleotide
uuugcugcucuguucacug

SEQ ID NO: 974389 - RNA, 19 nt, Artificial Sequence
  Description of Artificial Sequence: Synthetic oligonucleotide
agacuuuccacugaaauau

SEQ ID NO: 974390 - RNA, 19 nt, Artificial Sequence
  Description of Artificial Sequence: Synthetic oligonucleotide
aacaaguuaucaacugauc

SEQ ID NO: 974391 - RNA, 19 nt, Artificial Sequence
  Description of Artificial Sequence: Synthetic oligonucleotide
aaacaaguuaucaacugau

SEQ ID NO: 974392 - RNA, 19 nt, Artificial Sequence
  Description of Artificial Sequence: Synthetic oligonucleotide
aagaguugaccuaagaguu

SEQ ID NO: 974393 - RNA, 19 nt, Artificial Sequence
  Description of Artificial Sequence: Synthetic oligonucleotide
ugaguaagcaguacagcuc

SEQ ID NO: 974394 - RNA, 19 nt, Artificial Sequence
  Description of Artificial Sequence: Synthetic oligonucleotide
uugcuaacaauaacauaug

SEQ ID NO: 974395 - RNA, 19 nt, Artificial Sequence
  Description of Artificial Sequence: Synthetic oligonucleotide
auuggauccacuauuacau

SEQ ID NO: 974396 - RNA, 19 nt, Artificial Sequence
  Description of Artificial Sequence: Synthetic oligonucleotide
uaugcuggaguaguuagca

SEQ ID NO: 974397 - RNA, 19 nt, Artificial Sequence
  Description of Artificial Sequence: Synthetic oligonucleotide
uggacuuuucgccacacau

SEQ ID NO: 974398 - RNA, 19 nt, Artificial Sequence
  Description of Artificial Sequence: Synthetic oligonucleotide
uagucaauagagauaggau

SEQ ID NO: 974399 - RNA, 19 nt, Artificial Sequence
  Description of Artificial Sequence: Synthetic oligonucleotide
caaaaggcauaucuguuac

SEQ ID NO: 974400 - RNA, 19 nt, Artificial Sequence
  Description of Artificial Sequence: Synthetic oligonucleotide
ucagacaaugaaccugagc

SEQ ID NO: 974401 - RNA, 19 nt, Artificial Sequence
  Description of Artificial Sequence: Synthetic oligonucleotide
uauuuagguggccuguagu

SEQ ID NO: 974402 - RNA, 19 nt, Artificial Sequence
  Description of Artificial Sequence: Synthetic oligonucleotide
ucuuaggccaccuucuauc

SEQ ID NO: 974403 - RNA, 19 nt, Artificial Sequence
  Description of Artificial Sequence: Synthetic oligonucleotide
aagguucauauccaggauu

SEQ ID NO: 974404 - RNA, 19 nt, Artificial Sequence
  Description of Artificial Sequence: Synthetic oligonucleotide
uacucuugaacagaacccc

SEQ ID NO: 974405 - RNA, 19 nt, Artificial Sequence
  Description of Artificial Sequence: Synthetic oligonucleotide
aagaguuguagguccaaaa

SEQ ID NO: 974406 - RNA, 19 nt, Artificial Sequence
  Description of Artificial Sequence: Synthetic oligonucleotide
auguguaauauuucugcga

SEQ ID NO: 974407 - RNA, 19 nt, Artificial Sequence
  Description of Artificial Sequence: Synthetic oligonucleotide
aggcauaucuguuacaaua

SEQ ID NO: 974408 - RNA, 19 nt, Artificial Sequence
  Description of Artificial Sequence: Synthetic oligonucleotide
ucugcgauggagacucucc

SEQ ID NO: 974409 - RNA, 19 nt, Artificial Sequence
  Description of Artificial Sequence: Synthetic oligonucleotide
uaucaacugaucucagaca

SEQ ID NO: 974410 - RNA, 19 nt, Artificial Sequence
  Description of Artificial Sequence: Synthetic oligonucleotide
aguguugcugacaagcguc

SEQ ID NO: 974411 - RNA, 19 nt, Artificial Sequence
  Description of Artificial Sequence: Synthetic oligonucleotide
ucauucuuugcuuuaccaa

SEQ ID NO: 974412 - RNA, 19 nt, Artificial Sequence
  Description of Artificial Sequence: Synthetic oligonucleotide
ucuaaacuuuuguacuugu

SEQ ID NO: 974413 - RNA, 19 nt, Artificial Sequence
  Description of Artificial Sequence: Synthetic oligonucleotide
cucagacucacuucuuagg

SEQ ID NO: 974414 - RNA, 19 nt, Artificial Sequence
  Description of Artificial Sequence: Synthetic oligonucleotide
gaaguguugcugacaagcg

SEQ ID NO: 974415 - RNA, 19 nt, Artificial Sequence
  Description of Artificial Sequence: Synthetic oligonucleotide
ugagcaucccauaggcaag

SEQ ID NO: 974416 - RNA, 19 nt, Artificial Sequence
  Description of Artificial Sequence: Synthetic oligonucleotide
gcagauaucccacugaaca

SEQ ID NO: 974417 - RNA, 19 nt, Artificial Sequence
  Description of Artificial Sequence: Synthetic oligonucleotide
auauaucuugccccggucu

SEQ ID NO: 974418 - RNA, 19 nt, Artificial Sequence
  Description of Artificial Sequence: Synthetic oligonucleotide
acaaaggcuugagacgugc

SEQ ID NO: 974419 - RNA, 19 nt, Artificial Sequence
  Description of Artificial Sequence: Synthetic oligonucleotide
ugucccauuccagauaaug

SEQ ID NO: 974420 - RNA, 19 nt, Artificial Sequence
  Description of Artificial Sequence: Synthetic oligonucleotide
aaguguugcugacaagcgu

SEQ ID NO: 974421 - RNA, 19 nt, Artificial Sequence
  Description of Artificial Sequence: Synthetic oligonucleotide
aaagguucauauccaggau

SEQ ID NO: 974422 - RNA, 19 nt, Artificial Sequence
  Description of Artificial Sequence: Synthetic oligonucleotide
aagccaguagguacggugg

SEQ ID NO: 974423 - RNA, 19 nt, Artificial Sequence
  Description of Artificial Sequence: Synthetic oligonucleotide
auauagauuccaguuucuc

SEQ ID NO: 974424 - RNA, 19 nt, Artificial Sequence
  Description of Artificial Sequence: Synthetic oligonucleotide
agaguuguagguccaaaau

SEQ ID NO: 974425 - RNA, 19 nt, Artificial Sequence
  Description of Artificial Sequence: Synthetic oligonucleotide
cauaggcacagacuccucg

SEQ ID NO: 974426 - RNA, 19 nt, Artificial Sequence
  Description of Artificial Sequence: Synthetic oligonucleotide
uggauauagauuccaguuu

SEQ ID NO: 974427 - RNA, 19 nt, Artificial Sequence
  Description of Artificial Sequence: Synthetic oligonucleotide
agcaucuacaaauacuaua

SEQ ID NO: 974428 - RNA, 19 nt, Artificial Sequence
  Description of Artificial Sequence: Synthetic oligonucleotide
aagcaguucucagugggag

SEQ ID NO: 974429 - RNA, 19 nt, Artificial Sequence
  Description of Artificial Sequence: Synthetic oligonucleotide
uuuucgccacacauguccc

SEQ ID NO: 974430 - RNA, 19 nt, Artificial Sequence
  Description of Artificial Sequence: Synthetic oligonucleotide
ugagccagacuuuccacug

SEQ ID NO: 974431 - RNA, 19 nt, Artificial Sequence
  Description of Artificial Sequence: Synthetic oligonucleotide
uuuuauuuagguggccugu

SEQ ID NO: 974432 - RNA, 19 nt, Artificial Sequence
  Description of Artificial Sequence: Synthetic oligonucleotide
ugacaagcgucuuacugcu

SEQ ID NO: 974433 - RNA, 19 nt, Artificial Sequence
  Description of Artificial Sequence: Synthetic oligonucleotide
ucaagagaaccucuacauc

SEQ ID NO: 974434 - RNA, 19 nt, Artificial Sequence
  Description of Artificial Sequence: Synthetic oligonucleotide
cuucucuuuaccugcacuc

SEQ ID NO: 974435 - RNA, 19 nt, Artificial Sequence
  Description of Artificial Sequence: Synthetic oligonucleotide
agaugcucagacucacuuc

SEQ ID NO: 974436 - RNA, 19 nt, Artificial Sequence
  Description of Artificial Sequence: Synthetic oligonucleotide
ugauucugaaguguugcug

SEQ ID NO: 974437 - RNA, 19 nt, Artificial Sequence
  Description of Artificial Sequence: Synthetic oligonucleotide
guaguguucccaaaccuag

SEQ ID NO: 974438 - RNA, 19 nt, Artificial Sequence
  Description of Artificial Sequence: Synthetic oligonucleotide
auaacauaugcuggaguag

SEQ ID NO: 974439 - RNA, 19 nt, Artificial Sequence
  Description of Artificial Sequence: Synthetic oligonucleotide
gguacgguggcuccaauag

SEQ ID NO: 974440 - RNA, 19 nt, Artificial Sequence
  Description of Artificial Sequence: Synthetic oligonucleotide
uguauggacuuuucgccac

SEQ ID NO: 974441 - RNA, 19 nt, Artificial Sequence
  Description of Artificial Sequence: Synthetic oligonucleotide
ggauauagauuccaguuuc

SEQ ID NO: 974442 - RNA, 19 nt, Artificial Sequence
  Description of Artificial Sequence: Synthetic oligonucleotide
gcaauaugauaacagugag

SEQ ID NO: 974443 - RNA, 19 nt, Artificial Sequence
  Description of Artificial Sequence: Synthetic oligonucleotide
cuaaacuuuuguacuugug

SEQ ID NO: 974444 - RNA, 19 nt, Artificial Sequence
  Description of Artificial Sequence: Synthetic oligonucleotide
acaauaacauaugcuggag

SEQ ID NO: 974445 - RNA, 19 nt, Artificial Sequence
  Description of Artificial Sequence: Synthetic oligonucleotide
ucuggcucuuagucaauag

SEQ ID NO: 974446 - RNA, 19 nt, Artificial Sequence
  Description of Artificial Sequence: Synthetic oligonucleotide
cauuggauccacuauuaca

SEQ ID NO: 974447 - RNA, 19 nt, Artificial Sequence
  Description of Artificial Sequence: Synthetic oligonucleotide
cuccucguucucauaaagg

SEQ ID NO: 974448 - RNA, 19 nt, Artificial Sequence
  Description of Artificial Sequence: Synthetic oligonucleotide
uccaagauccgugauucug

SEQ ID NO: 974449 - RNA, 19 nt, Artificial Sequence
  Description of Artificial Sequence: Synthetic oligonucleotide
uacuauacuucuuuucauu

SEQ ID NO: 974450 - RNA, 19 nt, Artificial Sequence
  Description of Artificial Sequence: Synthetic oligonucleotide
uucaccagucucaucucug

SEQ ID NO: 974451 - RNA, 19 nt, Artificial Sequence
  Description of Artificial Sequence: Synthetic oligonucleotide
caagaguugaccuaagagu

SEQ ID NO: 974452 - RNA, 19 nt, Artificial Sequence
  Description of Artificial Sequence: Synthetic oligonucleotide
uugcucaaagccaguaggu

SEQ ID NO: 974453 - RNA, 19 nt, Artificial Sequence
  Description of Artificial Sequence: Synthetic oligonucleotide
auaaugccuugguaaaaca

SEQ ID NO: 974454 - RNA, 19 nt, Artificial Sequence
  Description of Artificial Sequence: Synthetic oligonucleotide
cuugauucugcaugacgac

SEQ ID NO: 974455 - RNA, 19 nt, Artificial Sequence
  Description of Artificial Sequence: Synthetic oligonucleotide
ggaaauaccauaagucacc

SEQ ID NO: 974456 - RNA, 19 nt, Artificial Sequence
  Description of Artificial Sequence: Synthetic oligonucleotide
aguaguuagcaggguagac

SEQ ID NO: 974457 - RNA, 19 nt, Artificial Sequence
  Description of Artificial Sequence: Synthetic oligonucleotide
auaauaguccaagauccgu

SEQ ID NO: 974458 - RNA, 19 nt, Artificial Sequence
  Description of Artificial Sequence: Synthetic oligonucleotide
caaacaaguuaucaacuga

SEQ ID NO: 974459 - RNA, 19 nt, Artificial Sequence
  Description of Artificial Sequence: Synthetic oligonucleotide
guugaccuaagaguuguag

SEQ ID NO: 974460 - RNA, 19 nt, Artificial Sequence
  Description of Artificial Sequence: Synthetic oligonucleotide
gacuuuucgccacacaugu

SEQ ID NO: 974461 - RNA, 19 nt, Artificial Sequence
  Description of Artificial Sequence: Synthetic oligonucleotide
agccaagcaaugaagcuuc

SEQ ID NO: 974462 - RNA, 19 nt, Artificial Sequence
  Description of Artificial Sequence: Synthetic oligonucleotide
aagauccgugauucugaag

SEQ ID NO: 974463 - RNA, 19 nt, Artificial Sequence
  Description of Artificial Sequence: Synthetic oligonucleotide
auaugcuggaguaguuagc

SEQ ID NO: 974464 - RNA, 19 nt, Artificial Sequence
  Description of Artificial Sequence: Synthetic oligonucleotide
gacgacugcaguuucucuc

SEQ ID NO: 974465 - RNA, 19 nt, Artificial Sequence
  Description of Artificial Sequence: Synthetic oligonucleotide
cagacucacuucuuaggcc

SEQ ID NO: 974466 - RNA, 19 nt, Artificial Sequence
  Description of Artificial Sequence: Synthetic oligonucleotide
uuccagauaaugccuuggu

SEQ ID NO: 974467 - RNA, 19 nt, Artificial Sequence
  Description of Artificial Sequence: Synthetic oligonucleotide
uguacuugugguucaguuu

SEQ ID NO: 974468 - RNA, 19 nt, Artificial Sequence
  Description of Artificial Sequence: Synthetic oligonucleotide
aguguucccaaaccuagaa

SEQ ID NO: 974469 - RNA, 19 nt, Artificial Sequence
  Description of Artificial Sequence: Synthetic oligonucleotide
cuauuacaucaguagguuc

SEQ ID NO: 974470 - RNA, 19 nt, Artificial Sequence
  Description of Artificial Sequence: Synthetic oligonucleotide
agugacuuggagaugcuca

SEQ ID NO: 974471 - RNA, 19 nt, Artificial Sequence
  Description of Artificial Sequence: Synthetic oligonucleotide
uuaauuugccagacuuuua

SEQ ID NO: 974472 - RNA, 19 nt, Artificial Sequence
  Description of Artificial Sequence: Synthetic oligonucleotide
agguucauauccaggauug

SEQ ID NO: 974473 - RNA, 19 nt, Artificial Sequence
  Description of Artificial Sequence: Synthetic oligonucleotide
cauaagucaccuugcuaac

SEQ ID NO: 974474 - RNA, 19 nt, Artificial Sequence
  Description of Artificial Sequence: Synthetic oligonucleotide
auagcuucuugagugucag

SEQ ID NO: 974475 - RNA, 19 nt, Artificial Sequence
  Description of Artificial Sequence: Synthetic oligonucleotide
uucuuuaugcugacauguc

SEQ ID NO: 974476 - RNA, 19 nt, Artificial Sequence
  Description of Artificial Sequence: Synthetic oligonucleotide
uggaguaguuagcagggua

SEQ ID NO: 974477 - RNA, 19 nt, Artificial Sequence
  Description of Artificial Sequence: Synthetic oligonucleotide
ucccaaaccuagaagccaa

SEQ ID NO: 974478 - RNA, 19 nt, Artificial Sequence
  Description of Artificial Sequence: Synthetic oligonucleotide
guugcaggugacucuaaac

SEQ ID NO: 974479 - RNA, 19 nt, Artificial Sequence
  Description of Artificial Sequence: Synthetic oligonucleotide
gauccgugauucugaagug

SEQ ID NO: 974480 - RNA, 19 nt, Artificial Sequence
  Description of Artificial Sequence: Synthetic oligonucleotide
uauaucuugccccggucuu

SEQ ID NO: 974481 - RNA, 19 nt, Artificial Sequence
  Description of Artificial Sequence: Synthetic oligonucleotide
gagauaggauguuguuugc

SEQ ID NO: 974482 - RNA, 19 nt, Artificial Sequence
  Description of Artificial Sequence: Synthetic oligonucleotide
auuacaucaguagguucag

SEQ ID NO: 974483 - RNA, 19 nt, Artificial Sequence
  Description of Artificial Sequence: Synthetic oligonucleotide
uuuagguggccuguagugu

SEQ ID NO: 974484 - RNA, 19 nt, Artificial Sequence
  Description of Artificial Sequence: Synthetic oligonucleotide
aagccaagcaaugaagcuu

SEQ ID NO: 974485 - RNA, 19 nt, Artificial Sequence
  Description of Artificial Sequence: Synthetic oligonucleotide
cugagcaucccauaggcaa

SEQ ID NO: 974486 - RNA, 19 nt, Artificial Sequence
  Description of Artificial Sequence: Synthetic oligonucleotide
caccuucuaucauaggcac

SEQ ID NO: 974487 - RNA, 19 nt, Artificial Sequence
  Description of Artificial Sequence: Synthetic oligonucleotide
agacacggcccauuucccg

SEQ ID NO: 974488 - RNA, 19 nt, Artificial Sequence
  Description of Artificial Sequence: Synthetic oligonucleotide
ccacuauuacaucaguagg

SEQ ID NO: 974489 - RNA, 19 nt, Artificial Sequence
  Description of Artificial Sequence: Synthetic oligonucleotide
auagagauaggauguuguu

SEQ ID NO: 974490 - RNA, 19 nt, Artificial Sequence
  Description of Artificial Sequence: Synthetic oligonucleotide
acucuaaacuuuuguacuu

SEQ ID NO: 974491 - RNA, 19 nt, Artificial Sequence
  Description of Artificial Sequence: Synthetic oligonucleotide
ccucuauugguauugcccc

SEQ ID NO: 974492 - RNA, 19 nt, Artificial Sequence
  Description of Artificial Sequence: Synthetic oligonucleotide
uuuaccaaggagggugucu

SEQ ID NO: 974493 - RNA, 19 nt, Artificial Sequence
  Description of Artificial Sequence: Synthetic oligonucleotide
acuauuacaucaguagguu

SEQ ID NO: 974494 - RNA, 19 nt, Artificial Sequence
  Description of Artificial Sequence: Synthetic oligonucleotide
uccagauaaugccuuggua

SEQ ID NO: 974495 - RNA, 19 nt, Artificial Sequence
  Description of Artificial Sequence: Synthetic oligonucleotide
ucucucagacuuucaccag

SEQ ID NO: 974496 - RNA, 19 nt, Artificial Sequence
  Description of Artificial Sequence: Synthetic oligonucleotide
uguuguccccagcaauaug

SEQ ID NO: 974497 - RNA, 19 nt, Artificial Sequence
  Description of Artificial Sequence: Synthetic oligonucleotide
gaacaaaggcuugagacgu

SEQ ID NO: 974498 - RNA, 19 nt, Artificial Sequence
  Description of Artificial Sequence: Synthetic oligonucleotide
ucguucucauaaagguuca

SEQ ID NO: 974499 - RNA, 19 nt, Artificial Sequence
  Description of Artificial Sequence: Synthetic oligonucleotide
acaagcgucuuacugcuuu

SEQ ID NO: 974500 - RNA, 19 nt, Artificial Sequence
  Description of Artificial Sequence: Synthetic oligonucleotide
uaggcaagaguugaccuaa

SEQ ID NO: 974501 - RNA, 19 nt, Artificial Sequence
  Description of Artificial Sequence: Synthetic oligonucleotide
gcugacaagcgucuuacug

SEQ ID NO: 974502 - RNA, 19 nt, Artificial Sequence
  Description of Artificial Sequence: Synthetic oligonucleotide
gucaauagagauaggaugu

SEQ ID NO: 974503 - RNA, 19 nt, Artificial Sequence
  Description of Artificial Sequence: Synthetic oligonucleotide
ugcaacaugccaagacauc

SEQ ID NO: 974504 - RNA, 19 nt, Artificial Sequence
  Description of Artificial Sequence: Synthetic oligonucleotide
cuuagucaauagagauagg

SEQ ID NO: 974505 - RNA, 19 nt, Artificial Sequence
  Description of Artificial Sequence: Synthetic oligonucleotide
augauaacagugagaccac

SEQ ID NO: 974506 - RNA, 19 nt, Artificial Sequence
  Description of Artificial Sequence: Synthetic oligonucleotide
caauagagauaggauguug

SEQ ID NO: 974507 - RNA, 19 nt, Artificial Sequence
  Description of Artificial Sequence: Synthetic oligonucleotide
aagcaauguuucucuccug

SEQ ID NO: 974508 - RNA, 19 nt, Artificial Sequence
  Description of Artificial Sequence: Synthetic oligonucleotide
cuccaauagugacuuggag

SEQ ID NO: 974509 - RNA, 19 nt, Artificial Sequence
  Description of Artificial Sequence: Synthetic oligonucleotide
caaaggcuugagacgugcg

SEQ ID NO: 974510 - RNA, 19 nt, Artificial Sequence
  Description of Artificial Sequence: Synthetic oligonucleotide
cccagcaauaugauaacag

SEQ ID NO: 974511 - RNA, 19 nt, Artificial Sequence
  Description of Artificial Sequence: Synthetic oligonucleotide
aagcgucuuacugcuuuuc

SEQ ID NO: 974512 - RNA, 19 nt, Artificial Sequence
  Description of Artificial Sequence: Synthetic oligonucleotide
cuagaagccaagcaaugaa

SEQ ID NO: 974513 - RNA, 19 nt, Artificial Sequence
  Description of Artificial Sequence: Synthetic oligonucleotide
cuuucugcguuuugcuuuc

SEQ ID NO: 974514 - RNA, 19 nt, Artificial Sequence
  Description of Artificial Sequence: Synthetic oligonucleotide
uccgugauucugaaguguu

SEQ ID NO: 974515 - RNA, 19 nt, Artificial Sequence
  Description of Artificial Sequence: Synthetic oligonucleotide
cugaguaagcaguacagcu

SEQ ID NO: 974516 - RNA, 19 nt, Artificial Sequence
  Description of Artificial Sequence: Synthetic oligonucleotide
cuugugguucaguuucuuc

SEQ ID NO: 974517 - RNA, 19 nt, Artificial Sequence
  Description of Artificial Sequence: Synthetic oligonucleotide
uucucuuuaccugcacucu

SEQ ID NO: 974518 - RNA, 19 nt, Artificial Sequence
  Description of Artificial Sequence: Synthetic oligonucleotide
auaggcaagaguugaccua

SEQ ID NO: 974519 - RNA, 19 nt, Artificial Sequence
  Description of Artificial Sequence: Synthetic oligonucleotide
agguccaaaauguguaaua

SEQ ID NO: 974520 - RNA, 19 nt, Artificial Sequence
  Description of Artificial Sequence: Synthetic oligonucleotide
uaguccaagauccgugauu

SEQ ID NO: 974521 - RNA, 19 nt, Artificial Sequence
  Description of Artificial Sequence: Synthetic oligonucleotide
cacuauuacaucaguaggu

SEQ ID NO: 974522 - RNA, 19 nt, Artificial Sequence
  Description of Artificial Sequence: Synthetic oligonucleotide
caucccauaggcaagaguu

SEQ ID NO: 974523 - RNA, 19 nt, Artificial Sequence
  Description of Artificial Sequence: Synthetic oligonucleotide
gaaggaugaacaaaggcuu

SEQ ID NO: 974524 - RNA, 19 nt, Artificial Sequence
  Description of Artificial Sequence: Synthetic oligonucleotide
cugacauguccaguguuag

SEQ ID NO: 974525 - RNA, 19 nt, Artificial Sequence
  Description of Artificial Sequence: Synthetic oligonucleotide
guuguagguccaaaaugug

SEQ ID NO: 974526 - RNA, 19 nt, Artificial Sequence
  Description of Artificial Sequence: Synthetic oligonucleotide
aaauaccauaagucaccuu

SEQ ID NO: 974527 - RNA, 19 nt, Artificial Sequence
  Description of Artificial Sequence: Synthetic oligonucleotide
uugauggcuggauuuucau

SEQ ID NO: 974528 - RNA, 19 nt, Artificial Sequence
  Description of Artificial Sequence: Synthetic oligonucleotide
cagauaaugccuugguaaa

SEQ ID NO: 974529 - RNA, 19 nt, Artificial Sequence
  Description of Artificial Sequence: Synthetic oligonucleotide
uuuauuuagguggccugua

SEQ ID NO: 974530 - RNA, 19 nt, Artificial Sequence
  Description of Artificial Sequence: Synthetic oligonucleotide
agcgucuuacugcuuuucu

SEQ ID NO: 974531 - RNA, 19 nt, Artificial Sequence
  Description of Artificial Sequence: Synthetic oligonucleotide
ccagauaaugccuugguaa

SEQ ID NO: 974532 - RNA, 19 nt, Artificial Sequence
  Description of Artificial Sequence: Synthetic oligonucleotide
aaggcuugagacgugcguu

SEQ ID NO: 974533 - RNA, 19 nt, Artificial Sequence
  Description of Artificial Sequence: Synthetic oligonucleotide
acucacuucuuaggccacc

SEQ ID NO: 974534 - RNA, 19 nt, Artificial Sequence
  Description of Artificial Sequence: Synthetic oligonucleotide
uagcaucuacaaauacuau

SEQ ID NO: 974535 - RNA, 19 nt, Artificial Sequence
  Description of Artificial Sequence: Synthetic oligonucleotide
ugaaccugagccagacuuu

SEQ ID NO: 974536 - RNA, 19 nt, Artificial Sequence
  Description of Artificial Sequence: Synthetic oligonucleotide
uauugccccuguuccacac

SEQ ID NO: 974537 - RNA, 19 nt, Artificial Sequence
  Description of Artificial Sequence: Synthetic oligonucleotide
cagugagaccacucaguag

SEQ ID NO: 974538 - RNA, 19 nt, Artificial Sequence
  Description of Artificial Sequence: Synthetic oligonucleotide
cacaaacaaguuaucaacu

SEQ ID NO: 974539 - RNA, 19 nt, Artificial Sequence
  Description of Artificial Sequence: Synthetic oligonucleotide
ugcaugacgacugcaguuu

SEQ ID NO: 974540 - RNA, 19 nt, Artificial Sequence
  Description of Artificial Sequence: Synthetic oligonucleotide
ugguauugccccuguucca

SEQ ID NO: 974541 - RNA, 19 nt, Artificial Sequence
  Description of Artificial Sequence: Synthetic oligonucleotide
ccggucuuugccuugauuc

SEQ ID NO: 974542 - RNA, 19 nt, Artificial Sequence
  Description of Artificial Sequence: Synthetic oligonucleotide
auaagucaccuugcuaaca

SEQ ID NO: 974543 - RNA, 19 nt, Artificial Sequence
  Description of Artificial Sequence: Synthetic oligonucleotide
cuuaggccaccuucuauca

SEQ ID NO: 974544 - RNA, 19 nt, Artificial Sequence
  Description of Artificial Sequence: Synthetic oligonucleotide
agauaggauguuguuugcu

SEQ ID NO: 974545 - RNA, 19 nt, Artificial Sequence
  Description of Artificial Sequence: Synthetic oligonucleotide
uuggauccacuauuacauc

SEQ ID NO: 974546 - RNA, 19 nt, Artificial Sequence
  Description of Artificial Sequence: Synthetic oligonucleotide
ugccuugguaaaacauuuc

SEQ ID NO: 974547 - RNA, 19 nt, Artificial Sequence
  Description of Artificial Sequence: Synthetic oligonucleotide
ucuuugauggcuggauuuu

SEQ ID NO: 974548 - RNA, 19 nt, Artificial Sequence
  Description of Artificial Sequence: Synthetic oligonucleotide
gaccuaagaguuguagguc

SEQ ID NO: 974549 - RNA, 19 nt, Artificial Sequence
  Description of Artificial Sequence: Synthetic oligonucleotide
cuggauauagauuccaguu

SEQ ID NO: 974550 - RNA, 19 nt, Artificial Sequence
  Description of Artificial Sequence: Synthetic oligonucleotide
uucugaaguguugcugaca

SEQ ID NO: 974551 - RNA, 19 nt, Artificial Sequence
  Description of Artificial Sequence: Synthetic oligonucleotide
cugguguuaauuugccaga

SEQ ID NO: 974552 - RNA, 19 nt, Artificial Sequence
  Description of Artificial Sequence: Synthetic oligonucleotide
ucaauagagauaggauguu

SEQ ID NO: 974553 - RNA, 19 nt, Artificial Sequence
  Description of Artificial Sequence: Synthetic oligonucleotide
auuucccgaagggaggcug

SEQ ID NO: 974554 - RNA, 19 nt, Artificial Sequence
  Description of Artificial Sequence: Synthetic oligonucleotide
agaccaugggagcuuucca

SEQ ID NO: 974555 - RNA, 19 nt, Artificial Sequence
  Description of Artificial Sequence: Synthetic oligonucleotide
uccccagcaauaugauaac

SEQ ID NO: 974556 - RNA, 19 nt, Artificial Sequence
  Description of Artificial Sequence: Synthetic oligonucleotide
ugauaacagugagaccacu

SEQ ID NO: 974557 - RNA, 19 nt, Artificial Sequence
  Description of Artificial Sequence: Synthetic oligonucleotide
gcucagacucacuucuuag

SEQ ID NO: 974558 - RNA, 19 nt, Artificial Sequence
  Description of Artificial Sequence: Synthetic oligonucleotide
uuucgccacacauguccca

SEQ ID NO: 974559 - RNA, 19 nt, Artificial Sequence
  Description of Artificial Sequence: Synthetic oligonucleotide
gaacagcaucaauaggcaa

SEQ ID NO: 974560 - RNA, 19 nt, Artificial Sequence
  Description of Artificial Sequence: Synthetic oligonucleotide
aguuaucaacugaucucag

SEQ ID NO: 974561 - RNA, 19 nt, Artificial Sequence
  Description of Artificial Sequence: Synthetic oligonucleotide
cucuuagucaauagagaua

SEQ ID NO: 974562 - RNA, 19 nt, Artificial Sequence
  Description of Artificial Sequence: Synthetic oligonucleotide
uuccaucuuuaaucuggcu

SEQ ID NO: 974563 - RNA, 19 nt, Artificial Sequence
  Description of Artificial Sequence: Synthetic oligonucleotide
guagacugcaauacuaagu

SEQ ID NO: 974564 - RNA, 19 nt, Artificial Sequence
  Description of Artificial Sequence: Synthetic oligonucleotide
cuggcucuuagucaauaga

SEQ ID NO: 974565 - RNA, 19 nt, Artificial Sequence
  Description of Artificial Sequence: Synthetic oligonucleotide
gaaauaccauaagucaccu

SEQ ID NO: 974566 - RNA, 19 nt, Artificial Sequence
  Description of Artificial Sequence: Synthetic oligonucleotide
auaguccaagauccgugau

SEQ ID NO: 974567 - RNA, 19 nt, Artificial Sequence
  Description of Artificial Sequence: Synthetic oligonucleotide
ugacgacugcaguuucucu

SEQ ID NO: 974568 - RNA, 19 nt, Artificial Sequence
  Description of Artificial Sequence: Synthetic oligonucleotide
acggcccauuucccgaagg

SEQ ID NO: 974569 - RNA, 19 nt, Artificial Sequence
  Description of Artificial Sequence: Synthetic oligonucleotide
gaucucagacaaugaaccu

SEQ ID NO: 974570 - RNA, 19 nt, Artificial Sequence
  Description of Artificial Sequence: Synthetic oligonucleotide
gaaccucuacaucaaaguu

SEQ ID NO: 974571 - RNA, 19 nt, Artificial Sequence
  Description of Artificial Sequence: Synthetic oligonucleotide
cagacacggcccauuuccc

SEQ ID NO: 974572 - RNA, 19 nt, Artificial Sequence
  Description of Artificial Sequence: Synthetic oligonucleotide
agguggccuguaguguucc

SEQ ID NO: 974573 - RNA, 19 nt, Artificial Sequence
  Description of Artificial Sequence: Synthetic oligonucleotide
ugcgauggagacucuccuc

SEQ ID NO: 974574 - RNA, 19 nt, Artificial Sequence
  Description of Artificial Sequence: Synthetic oligonucleotide
acuaaaguugauacuucuu

SEQ ID NO: 974575 - RNA, 19 nt, Artificial Sequence
  Description of Artificial Sequence: Synthetic oligonucleotide
uacagacacggcccauuuc

SEQ ID NO: 974576 - RNA, 19 nt, Artificial Sequence
  Description of Artificial Sequence: Synthetic oligonucleotide
agauaaugccuugguaaaa

SEQ ID NO: 974577 - RNA, 19 nt, Artificial Sequence
  Description of Artificial Sequence: Synthetic oligonucleotide
accuagaagccaagcaaug

SEQ ID NO: 974578 - RNA, 19 nt, Artificial Sequence
  Description of Artificial Sequence: Synthetic oligonucleotide
cugaaguguugcugacaag

SEQ ID NO: 974579 - RNA, 19 nt, Artificial Sequence
  Description of Artificial Sequence: Synthetic oligonucleotide
gaguaguuagcaggguaga

SEQ ID NO: 974580 - RNA, 19 nt, Artificial Sequence
  Description of Artificial Sequence: Synthetic oligonucleotide
ggaugaacaaaggcuugag

SEQ ID NO: 974581 - RNA, 19 nt, Artificial Sequence
  Description of Artificial Sequence: Synthetic oligonucleotide
acaugucccauuccagaua

SEQ ID NO: 974582 - RNA, 19 nt, Artificial Sequence
  Description of Artificial Sequence: Synthetic oligonucleotide
uguccugaguaagcaguac

SEQ ID NO: 974583 - RNA, 19 nt, Artificial Sequence
  Description of Artificial Sequence: Synthetic oligonucleotide
aacauaugcuggaguaguu

SEQ ID NO: 974584 - RNA, 19 nt, Artificial Sequence
  Description of Artificial Sequence: Synthetic oligonucleotide
augccuugguaaaacauuu

SEQ ID NO: 974585 - RNA, 19 nt, Artificial Sequence
  Description of Artificial Sequence: Synthetic oligonucleotide
uuguuguccccagcaauau

SEQ ID NO: 974586 - RNA, 19 nt, Artificial Sequence
  Description of Artificial Sequence: Synthetic oligonucleotide
auccgugauucugaagugu

SEQ ID NO: 974587 - RNA, 19 nt, Artificial Sequence
  Description of Artificial Sequence: Synthetic oligonucleotide
gauauagauuccaguuucu

SEQ ID NO: 974588 - RNA, 19 nt, Artificial Sequence
  Description of Artificial Sequence: Synthetic oligonucleotide
uggucauaucagccuucca

SEQ ID NO: 974589 - RNA, 19 nt, Artificial Sequence
  Description of Artificial Sequence: Synthetic oligonucleotide
gcuaacaauaacauaugcu

SEQ ID NO: 974590 - RNA, 19 nt, Artificial Sequence
  Description of Artificial Sequence: Synthetic oligonucleotide
cucugucaaugcaaugcca

SEQ ID NO: 974591 - RNA, 19 nt, Artificial Sequence
  Description of Artificial Sequence: Synthetic oligonucleotide
caucaaaguuggucauauc

SEQ ID NO: 974592 - RNA, 19 nt, Artificial Sequence
  Description of Artificial Sequence: Synthetic oligonucleotide
uaccugcacucugauuugc

SEQ ID NO: 974593 - RNA, 19 nt, Artificial Sequence
  Description of Artificial Sequence: Synthetic oligonucleotide
gcccauuucccgaagggag

SEQ ID NO: 974594 - RNA, 19 nt, Artificial Sequence
  Description of Artificial Sequence: Synthetic oligonucleotide
ggugacucuaaacuuuugu

SEQ ID NO: 974595 - RNA, 19 nt, Artificial Sequence
  Description of Artificial Sequence: Synthetic oligonucleotide
ccaauagugacuuggagau

SEQ ID NO: 974596 - RNA, 19 nt, Artificial Sequence
  Description of Artificial Sequence: Synthetic oligonucleotide
ucauaggcacagacuccuc

SEQ ID NO: 974597 - RNA, 19 nt, Artificial Sequence
  Description of Artificial Sequence: Synthetic oligonucleotide
agguugcagauaucccacu

SEQ ID NO: 974598 - RNA, 19 nt, Artificial Sequence
  Description of Artificial Sequence: Synthetic oligonucleotide
uuccagccaauuccucaaa

SEQ ID NO: 974599 - RNA, 19 nt, Artificial Sequence
  Description of Artificial Sequence: Synthetic oligonucleotide
agccucauuugagguaaag

SEQ ID NO: 974600 - RNA, 19 nt, Artificial Sequence
  Description of Artificial Sequence: Synthetic oligonucleotide
ggacuuuucgccacacaug

SEQ ID NO: 974601 - RNA, 19 nt, Artificial Sequence
  Description of Artificial Sequence: Synthetic oligonucleotide
gcucuuagucaauagagau

SEQ ID NO: 974602 - RNA, 19 nt, Artificial Sequence
  Description of Artificial Sequence: Synthetic oligonucleotide
aucccauaggcaagaguug

SEQ ID NO: 974603 - RNA, 19 nt, Artificial Sequence
  Description of Artificial Sequence: Synthetic oligonucleotide
gccucauuugagguaaagc

SEQ ID NO: 974604 - RNA, 19 nt, Artificial Sequence
  Description of Artificial Sequence: Synthetic oligonucleotide
gguucauauccaggauugg

SEQ ID NO: 974605 - RNA, 19 nt, Artificial Sequence
  Description of Artificial Sequence: Synthetic oligonucleotide
gcaauacuaaguuacuuuu

SEQ ID NO: 974606 - RNA, 19 nt, Artificial Sequence
  Description of Artificial Sequence: Synthetic oligonucleotide
ccaugggagcuuuccagcc

SEQ ID NO: 974607 - RNA, 19 nt, Artificial Sequence
  Description of Artificial Sequence: Synthetic oligonucleotide
guauggacuuuucgccaca

SEQ ID NO: 974608 - RNA, 19 nt, Artificial Sequence
  Description of Artificial Sequence: Synthetic oligonucleotide
gacuuuccacugaaauauc

SEQ ID NO: 974609 - RNA, 19 nt, Artificial Sequence
  Description of Artificial Sequence: Synthetic oligonucleotide
acuuuucgccacacauguc

SEQ ID NO: 974610 - RNA, 19 nt, Artificial Sequence
  Description of Artificial Sequence: Synthetic oligonucleotide
gucagacaugauggaaaug

SEQ ID NO: 974611 - RNA, 19 nt, Artificial Sequence
  Description of Artificial Sequence: Synthetic oligonucleotide
caagauccgugauucugaa

SEQ ID NO: 974612 - RNA, 19 nt, Artificial Sequence
  Description of Artificial Sequence: Synthetic oligonucleotide
ugcugacaagcgucuuacu

SEQ ID NO: 974613 - RNA, 19 nt, Artificial Sequence
  Description of Artificial Sequence: Synthetic oligonucleotide
cauaucagccuuccacuua

SEQ ID NO: 974614 - RNA, 19 nt, Artificial Sequence
  Description of Artificial Sequence: Synthetic oligonucleotide
caauagugacuuggagaug

SEQ ID NO: 974615 - RNA, 19 nt, Artificial Sequence
  Description of Artificial Sequence: Synthetic oligonucleotide
gauguucacccagacugua

SEQ ID NO: 974616 - RNA, 19 nt, Artificial Sequence
  Description of Artificial Sequence: Synthetic oligonucleotide
auccacuauuacaucagua

SEQ ID NO: 974617 - RNA, 19 nt, Artificial Sequence
  Description of Artificial Sequence: Synthetic oligonucleotide
uucugcgauggagacucuc

SEQ ID NO: 974618 - RNA, 19 nt, Artificial Sequence
  Description of Artificial Sequence: Synthetic oligonucleotide
guccaguguuagcaucuac

SEQ ID NO: 974619 - RNA, 19 nt, Artificial Sequence
  Description of Artificial Sequence: Synthetic oligonucleotide
gcuggauuuucauaauagu

SEQ ID NO: 974620 - RNA, 19 nt, Artificial Sequence
  Description of Artificial Sequence: Synthetic oligonucleotide
ggcuggauauagauuccag

SEQ ID NO: 974621 - RNA, 19 nt, Artificial Sequence
  Description of Artificial Sequence: Synthetic oligonucleotide
ccgucccuggucuacagac

SEQ ID NO: 974622 - RNA, 19 nt, Artificial Sequence
  Description of Artificial Sequence: Synthetic oligonucleotide
ggcucuuagucaauagaga

SEQ ID NO: 974623 - RNA, 19 nt, Artificial Sequence
  Description of Artificial Sequence: Synthetic oligonucleotide
gcguuuuagaagauaaacu

SEQ ID NO: 974624 - RNA, 19 nt, Artificial Sequence
  Description of Artificial Sequence: Synthetic oligonucleotide
ggcaagaguugaccuaaga

SEQ ID NO: 974625 - RNA, 19 nt, Artificial Sequence
  Description of Artificial Sequence: Synthetic oligonucleotide
ccaaaccuagaagccaagc

SEQ ID NO: 974626 - RNA, 19 nt, Artificial Sequence
  Description of Artificial Sequence: Synthetic oligonucleotide
ccaguguuagcaucuacaa

SEQ ID NO: 974627 - RNA, 19 nt, Artificial Sequence
  Description of Artificial Sequence: Synthetic oligonucleotide
cgugcguuuuagaagauaa

SEQ ID NO: 974628 - RNA, 19 nt, Artificial Sequence
  Description of Artificial Sequence: Synthetic oligonucleotide
gcgucuuacugcuuuucuc

SEQ ID NO: 974629 - RNA, 19 nt, Artificial Sequence
  Description of Artificial Sequence: Synthetic oligonucleotide
ccaaaaggcauaucuguua

SEQ ID NO: 974630 - RNA, 19 nt, Artificial Sequence
  Description of Artificial Sequence: Synthetic oligonucleotide
cauuaucauggauguucaa

SEQ ID NO: 974631 - RNA, 19 nt, Artificial Sequence
  Description of Artificial Sequence: Synthetic oligonucleotide
cucucagacuuucaccagu

SEQ ID NO: 974632 - RNA, 19 nt, Artificial Sequence
  Description of Artificial Sequence: Synthetic oligonucleotide
cacacauuggauccacuau

SEQ ID NO: 974633 - RNA, 19 nt, Artificial Sequence
  Description of Artificial Sequence: Synthetic oligonucleotide
uuucugcgauggagacucu

SEQ ID NO: 974634 - RNA, 19 nt, Artificial Sequence
  Description of Artificial Sequence: Synthetic oligonucleotide
gggagguugcagauauccc

SEQ ID NO: 974635 - RNA, 19 nt, Artificial Sequence
  Description of Artificial Sequence: Synthetic oligonucleotide
auaucuugccccggucuuu

SEQ ID NO: 974636 - RNA, 19 nt, Artificial Sequence
  Description of Artificial Sequence: Synthetic oligonucleotide
acacggcccauuucccgaa

SEQ ID NO: 974637 - RNA, 19 nt, Artificial Sequence
  Description of Artificial Sequence: Synthetic oligonucleotide
gcagccucauuugagguaa

SEQ ID NO: 974638 - RNA, 19 nt, Artificial Sequence
  Description of Artificial Sequence: Synthetic oligonucleotide
guucacagagccugagcau

SEQ ID NO: 974639 - RNA, 19 nt, Artificial Sequence
  Description of Artificial Sequence: Synthetic oligonucleotide
accuucuaucauaggcaca

SEQ ID NO: 974640 - RNA, 19 nt, Artificial Sequence
  Description of Artificial Sequence: Synthetic oligonucleotide
aggugacucuaaacuuuug

SEQ ID NO: 974641 - RNA, 19 nt, Artificial Sequence
  Description of Artificial Sequence: Synthetic oligonucleotide
guggccuguaguguuccca

SEQ ID NO: 974642 - RNA, 19 nt, Artificial Sequence
  Description of Artificial Sequence: Synthetic oligonucleotide
acgguggcuccaauaguga

SEQ ID NO: 974643 - RNA, 19 nt, Artificial Sequence
  Description of Artificial Sequence: Synthetic oligonucleotide
gcgauggagacucuccucu

SEQ ID NO: 974644 - RNA, 19 nt, Artificial Sequence
  Description of Artificial Sequence: Synthetic oligonucleotide
auguucacccagacuguau

SEQ ID NO: 974645 - RNA, 19 nt, Artificial Sequence
  Description of Artificial Sequence: Synthetic oligonucleotide
acuugugguucaguuucuu

SEQ ID NO: 974646 - RNA, 19 nt, Artificial Sequence
  Description of Artificial Sequence: Synthetic oligonucleotide
ccuaagaguuguaggucca

SEQ ID NO: 974647 - RNA, 19 nt, Artificial Sequence
  Description of Artificial Sequence: Synthetic oligonucleotide
ccgugauucugaaguguug

SEQ ID NO: 974648 - RNA, 19 nt, Artificial Sequence
  Description of Artificial Sequence: Synthetic oligonucleotide
cucuauugguauugccccu

SEQ ID NO: 974649 - RNA, 19 nt, Artificial Sequence
  Description of Artificial Sequence: Synthetic oligonucleotide
gugcguuuuagaagauaaa

SEQ ID NO: 974650 - RNA, 19 nt, Artificial Sequence
  Description of Artificial Sequence: Synthetic oligonucleotide
ugggagcuuuccagccaau

SEQ ID NO: 974651 - RNA, 19 nt, Artificial Sequence
  Description of Artificial Sequence: Synthetic oligonucleotide
uuucugcguuuugcuuucu

SEQ ID NO: 974652 - RNA, 19 nt, Artificial Sequence
  Description of Artificial Sequence: Synthetic oligonucleotide
gcaaugccaacaaugacuu

SEQ ID NO: 974653 - RNA, 19 nt, Artificial Sequence
  Description of Artificial Sequence: Synthetic oligonucleotide
aggcaagaguugaccuaag

SEQ ID NO: 974654 - RNA, 19 nt, Artificial Sequence
  Description of Artificial Sequence: Synthetic oligonucleotide
caguacagcucugcccguc

SEQ ID NO: 974655 - RNA, 19 nt, Artificial Sequence
  Description of Artificial Sequence: Synthetic oligonucleotide
acgugcguuuuagaagaua

SEQ ID NO: 974656 - RNA, 19 nt, Artificial Sequence
  Description of Artificial Sequence: Synthetic oligonucleotide
caggguagacugcaauacu

SEQ ID NO: 974657 - RNA, 19 nt, Artificial Sequence
  Description of Artificial Sequence: Synthetic oligonucleotide
gcaugacgacugcaguuuc

SEQ ID NO: 974658 - RNA, 19 nt, Artificial Sequence
  Description of Artificial Sequence: Synthetic oligonucleotide
ugcccgucccuggucuaca

SEQ ID NO: 974659 - RNA, 19 nt, Artificial Sequence
  Description of Artificial Sequence: Synthetic oligonucleotide
cugcaugacgacugcaguu

SEQ ID NO: 974660 - RNA, 19 nt, Artificial Sequence
  Description of Artificial Sequence: Synthetic oligonucleotide
gcauaucuguuacaauaau

SEQ ID NO: 974661 - RNA, 19 nt, Artificial Sequence
  Description of Artificial Sequence: Synthetic oligonucleotide
gcaguucucagugggaggu

SEQ ID NO: 974662 - RNA, 19 nt, Artificial Sequence
  Description of Artificial Sequence: Synthetic oligonucleotide
ucugcccgucccuggucua

SEQ ID NO: 974663 - RNA, 19 nt, Artificial Sequence
  Description of Artificial Sequence: Synthetic oligonucleotide
cuucuaucauaggcacaga

SEQ ID NO: 974664 - RNA, 19 nt, Artificial Sequence
  Description of Artificial Sequence: Synthetic oligonucleotide
gcugacauguccaguguua

SEQ ID NO: 974665 - RNA, 19 nt, Artificial Sequence
  Description of Artificial Sequence: Synthetic oligonucleotide
ccuugcuaacaauaacaua

SEQ ID NO: 974666 - RNA, 19 nt, Artificial Sequence
  Description of Artificial Sequence: Synthetic oligonucleotide
ucgccacacaugucccauu

SEQ ID NO: 974667 - RNA, 19 nt, Artificial Sequence
  Description of Artificial Sequence: Synthetic oligonucleotide
cugcgauggagacucuccu

SEQ ID NO: 974668 - RNA, 19 nt, Artificial Sequence
  Description of Artificial Sequence: Synthetic oligonucleotide
ugccccuguuccacacauu

SEQ ID NO: 974669 - RNA, 19 nt, Artificial Sequence
  Description of Artificial Sequence: Synthetic oligonucleotide
cagagccugagcaucccau

SEQ ID NO: 974670 - RNA, 19 nt, Artificial Sequence
  Description of Artificial Sequence: Synthetic oligonucleotide
cugcaauacuaaguuacuu

SEQ ID NO: 974671 - RNA, 19 nt, Artificial Sequence
  Description of Artificial Sequence: Synthetic oligonucleotide
ccuugguaaaacauuucuu

SEQ ID NO: 974672 - RNA, 19 nt, Artificial Sequence
  Description of Artificial Sequence: Synthetic oligonucleotide
cuacagacacggcccauuu

SEQ ID NO: 974673 - RNA, 19 nt, Artificial Sequence
  Description of Artificial Sequence: Synthetic oligonucleotide
ccugagcaucccauaggca

SEQ ID NO: 974674 - RNA, 19 nt, Artificial Sequence
  Description of Artificial Sequence: Synthetic oligonucleotide
gcaggugacucuaaacuuu

SEQ ID NO: 974675 - RNA, 19 nt, Artificial Sequence
  Description of Artificial Sequence: Synthetic oligonucleotide
cuugagugucagacaugau

SEQ ID NO: 974676 - RNA, 19 nt, Artificial Sequence
  Description of Artificial Sequence: Synthetic oligonucleotide
gcuugagacgugcguuuua

SEQ ID NO: 974677 - RNA, 19 nt, Artificial Sequence
  Description of Artificial Sequence: Synthetic oligonucleotide
ccccgauguucacccagac

SEQ ID NO: 974678 - RNA, 19 nt, Artificial Sequence
  Description of Artificial Sequence: Synthetic oligonucleotide
gcuuuaccaaggagggugu

SEQ ID NO: 974679 - RNA, 19 nt, Artificial Sequence
  Description of Artificial Sequence: Synthetic oligonucleotide
ggccuguaguguucccaaa

SEQ ID NO: 974680 - RNA, 19 nt, Artificial Sequence
  Description of Artificial Sequence: Synthetic oligonucleotide
ccucguucucauaaagguu

SEQ ID NO: 974681 - RNA, 19 nt, Artificial Sequence
  Description of Artificial Sequence: Synthetic oligonucleotide
augucccauuccagauaau

SEQ ID NO: 974682 - RNA, 19 nt, Artificial Sequence
  Description of Artificial Sequence: Synthetic oligonucleotide
gacgugcguuuuagaagau

SEQ ID NO: 974683 - RNA, 19 nt, Artificial Sequence
  Description of Artificial Sequence: Synthetic oligonucleotide
ccccagcaauaugauaaca

SEQ ID NO: 974684 - RNA, 19 nt, Artificial Sequence
  Description of Artificial Sequence: Synthetic oligonucleotide
gucagaccaugggagcuuu

SEQ ID NO: 974685 - RNA, 19 nt, Artificial Sequence
  Description of Artificial Sequence: Synthetic oligonucleotide
ccuguuccacacauuggau

SEQ ID NO: 974686 - RNA, 19 nt, Artificial Sequence
  Description of Artificial Sequence: Synthetic oligonucleotide
cauuucccgaagggaggcu

SEQ ID NO: 974687 - RNA, 19 nt, Artificial Sequence
  Description of Artificial Sequence: Synthetic oligonucleotide
cagccucauuugagguaaa

SEQ ID NO: 974688 - RNA, 19 nt, Artificial Sequence
  Description of Artificial Sequence: Synthetic oligonucleotide
ccccacuaaaguugauacu

SEQ ID NO: 974689 - RNA, 19 nt, Artificial Sequence
  Description of Artificial Sequence: Synthetic oligonucleotide
gacaagcgucuuacugcuu

SEQ ID NO: 974690 - RNA, 19 nt, Artificial Sequence
  Description of Artificial Sequence: Synthetic oligonucleotide
gucuacagacacggcccau

SEQ ID NO: 974691 - RNA, 19 nt, Artificial Sequence
  Description of Artificial Sequence: Synthetic oligonucleotide
cccgauguucacccagacu

SEQ ID NO: 974692 - RNA, 19 nt, Artificial Sequence
  Description of Artificial Sequence: Synthetic oligonucleotide
ggcuugagacgugcguuuu

SEQ ID NO: 974693 - RNA, 19 nt, Artificial Sequence
  Description of Artificial Sequence: Synthetic oligonucleotide
caguucucagugggagguu

SEQ ID NO: 974694 - RNA, 19 nt, Artificial Sequence
  Description of Artificial Sequence: Synthetic oligonucleotide
gccaagcaaugaagcuucu

SEQ ID NO: 974695 - RNA, 19 nt, Artificial Sequence
  Description of Artificial Sequence: Synthetic oligonucleotide
aaaauggucagccaugucc

SEQ ID NO: 974696 - RNA, 19 nt, Artificial Sequence
  Description of Artificial Sequence: Synthetic oligonucleotide
gauuuauugauacugugag

SEQ ID NO: 974697 - RNA, 19 nt, Artificial Sequence
  Description of Artificial Sequence: Synthetic oligonucleotide
uuaaagaaccgauuuauug

SEQ ID NO: 974698 - RNA, 19 nt, Artificial Sequence
  Description of Artificial Sequence: Synthetic oligonucleotide
agaaccgauuuauugauac

SEQ ID NO: 974699 - RNA, 19 nt, Artificial Sequence
  Description of Artificial Sequence: Synthetic oligonucleotide
aguaccacggcgcacagcg

SEQ ID NO: 974700 - RNA, 19 nt, Artificial Sequence
  Description of Artificial Sequence: Synthetic oligonucleotide
aauauaaauccuugccuug

SEQ ID NO: 974701 - RNA, 19 nt, Artificial Sequence
  Description of Artificial Sequence: Synthetic oligonucleotide
uguuccaucaguccauggg

SEQ ID NO: 974702 - RNA, 19 nt, Artificial Sequence
  Description of Artificial Sequence: Synthetic oligonucleotide
gauacgaauagugaacagg

SEQ ID NO: 974703 - RNA, 19 nt, Artificial Sequence
  Description of Artificial Sequence: Synthetic oligonucleotide
acgaauagugaacagguag

SEQ ID NO: 974704 - RNA, 19 nt, Artificial Sequence
  Description of Artificial Sequence: Synthetic oligonucleotide
guugcaaccagguagcaag

SEQ ID NO: 974705 - RNA, 19 nt, Artificial Sequence
  Description of Artificial Sequence: Synthetic oligonucleotide
ucuguuggcaaccaguuuc

SEQ ID NO: 974706 - RNA, 19 nt, Artificial Sequence
  Description of Artificial Sequence: Synthetic oligonucleotide
uccaaggcuccccagaggg

SEQ ID NO: 974707 - RNA, 19 nt, Artificial Sequence
  Description of Artificial Sequence: Synthetic oligonucleotide
aaagaaccgauuuauugau

SEQ ID NO: 974708 - RNA, 19 nt, Artificial Sequence
  Description of Artificial Sequence: Synthetic oligonucleotide
guagcugagauguaucggg

SEQ ID NO: 974709 - RNA, 19 nt, Artificial Sequence
  Description of Artificial Sequence: Synthetic oligonucleotide
gauagaagcgaagauacac

SEQ ID NO: 974710 - RNA, 19 nt, Artificial Sequence
  Description of Artificial Sequence: Synthetic oligonucleotide
aaccgauuuauugauacug

SEQ ID NO: 974711 - RNA, 19 nt, Artificial Sequence
  Description of Artificial Sequence: Synthetic oligonucleotide
acagucuuaccacggaugg

SEQ ID NO: 974712 - RNA, 19 nt, Artificial Sequence
  Description of Artificial Sequence: Synthetic oligonucleotide
uacaucauagcgcuucacc

SEQ ID NO: 974713 - RNA, 19 nt, Artificial Sequence
  Description of Artificial Sequence: Synthetic oligonucleotide
uagaagcgaagauacaccc

SEQ ID NO: 974714 - RNA, 19 nt, Artificial Sequence
  Description of Artificial Sequence: Synthetic oligonucleotide
gaguagaggagcuacacuc

SEQ ID NO: 974715 - RNA, 19 nt, Artificial Sequence
  Description of Artificial Sequence: Synthetic oligonucleotide
ugauccucuacucucuuca

SEQ ID NO: 974716 - RNA, 19 nt, Artificial Sequence
  Description of Artificial Sequence: Synthetic oligonucleotide
auagaagcgaagauacacc

SEQ ID NO: 974717 - RNA, 19 nt, Artificial Sequence
  Description of Artificial Sequence: Synthetic oligonucleotide
uccucuacucucuucagcc

SEQ ID NO: 974718 - RNA, 19 nt, Artificial Sequence
  Description of Artificial Sequence: Synthetic oligonucleotide
uaaugagacuggauucugg

SEQ ID NO: 974719 - RNA, 19 nt, Artificial Sequence
  Description of Artificial Sequence: Synthetic oligonucleotide
uauggcgcugauagaagcg

SEQ ID NO: 974720 - RNA, 19 nt, Artificial Sequence
  Description of Artificial Sequence: Synthetic oligonucleotide
uauugauacugugaguuug

SEQ ID NO: 974721 - RNA, 19 nt, Artificial Sequence
  Description of Artificial Sequence: Synthetic oligonucleotide
agacugauccucuacucuc

SEQ ID NO: 974722 - RNA, 19 nt, Artificial Sequence
  Description of Artificial Sequence: Synthetic oligonucleotide
ugagguacagucuuaccac

SEQ ID NO: 974723 - RNA, 19 nt, Artificial Sequence
  Description of Artificial Sequence: Synthetic oligonucleotide
uucgcuagcagccccacca

SEQ ID NO: 974724 - RNA, 19 nt, Artificial Sequence
  Description of Artificial Sequence: Synthetic oligonucleotide
gugaguuugggcuuggcug

SEQ ID NO: 974725 - RNA, 19 nt, Artificial Sequence
  Description of Artificial Sequence: Synthetic oligonucleotide
auauaaauccuugccuugg

SEQ ID NO: 974726 - RNA, 19 nt, Artificial Sequence
  Description of Artificial Sequence: Synthetic oligonucleotide
auagaggaacaguaccacg

SEQ ID NO: 974727 - RNA, 19 nt, Artificial Sequence
  Description of Artificial Sequence: Synthetic oligonucleotide
uugucaagaaacagcagaa

SEQ ID NO: 974728 - RNA, 19 nt, Artificial Sequence
  Description of Artificial Sequence: Synthetic oligonucleotide
uacagucuuaccacggaug

SEQ ID NO: 974729 - RNA, 19 nt, Artificial Sequence
  Description of Artificial Sequence: Synthetic oligonucleotide
ugagauguaucggggaggg

SEQ ID NO: 974730 - RNA, 19 nt, Artificial Sequence
  Description of Artificial Sequence: Synthetic oligonucleotide
uguaguuccaaggggaaga

SEQ ID NO: 974731 - RNA, 19 nt, Artificial Sequence
  Description of Artificial Sequence: Synthetic oligonucleotide
auggauacgaauagugaac

SEQ ID NO: 974732 - RNA, 19 nt, Artificial Sequence
  Description of Artificial Sequence: Synthetic oligonucleotide
uggcuagacacagucaccg

SEQ ID NO: 974733 - RNA, 19 nt, Artificial Sequence
  Description of Artificial Sequence: Synthetic oligonucleotide
guugucuggaguugcaacc

SEQ ID NO: 974734 - RNA, 19 nt, Artificial Sequence
  Description of Artificial Sequence: Synthetic oligonucleotide
caggacaccgccuaggaac

SEQ ID NO: 974735 - RNA, 19 nt, Artificial Sequence
  Description of Artificial Sequence: Synthetic oligonucleotide
cauugagagccuuuagggc

SEQ ID NO: 974736 - RNA, 19 nt, Artificial Sequence
  Description of Artificial Sequence: Synthetic oligonucleotide
aucauagcgcuucaccguc

SEQ ID NO: 974737 - RNA, 19 nt, Artificial Sequence
  Description of Artificial Sequence: Synthetic oligonucleotide
aaagguaacccggggugac

SEQ ID NO: 974738 - RNA, 19 nt, Artificial Sequence
  Description of Artificial Sequence: Synthetic oligonucleotide
uggauucugggguaguccc

SEQ ID NO: 974739 - RNA, 19 nt, Artificial Sequence
  Description of Artificial Sequence: Synthetic oligonucleotide
gaagauacacccaacugga

SEQ ID NO: 974740 - RNA, 19 nt, Artificial Sequence
  Description of Artificial Sequence: Synthetic oligonucleotide
ugccucaaagguaaugaga

SEQ ID NO: 974741 - RNA, 19 nt, Artificial Sequence
  Description of Artificial Sequence: Synthetic oligonucleotide
accgucuucugacagaccu

SEQ ID NO: 974742 - RNA, 19 nt, Artificial Sequence
  Description of Artificial Sequence: Synthetic oligonucleotide
auacgaauagugaacaggu

SEQ ID NO: 974743 - RNA, 19 nt, Artificial Sequence
  Description of Artificial Sequence: Synthetic oligonucleotide
augcugagagaccccauac

SEQ ID NO: 974744 - RNA, 19 nt, Artificial Sequence
  Description of Artificial Sequence: Synthetic oligonucleotide
ugauacugugaguuugggc

SEQ ID NO: 974745 - RNA, 19 nt, Artificial Sequence
  Description of Artificial Sequence: Synthetic oligonucleotide
uggauacgaauagugaaca

SEQ ID NO: 974746 - RNA, 19 nt, Artificial Sequence
  Description of Artificial Sequence: Synthetic oligonucleotide
uaccaaguucgcuagcagc

SEQ ID NO: 974747 - RNA, 19 nt, Artificial Sequence
  Description of Artificial Sequence: Synthetic oligonucleotide
ugugaguuugggcuuggcu

SEQ ID NO: 974748 - RNA, 19 nt, Artificial Sequence
  Description of Artificial Sequence: Synthetic oligonucleotide
auaccuggcacugugguug

SEQ ID NO: 974749 - RNA, 19 nt, Artificial Sequence
  Description of Artificial Sequence: Synthetic oligonucleotide
uucagccguucauugagag

SEQ ID NO: 974750 - RNA, 19 nt, Artificial Sequence
  Description of Artificial Sequence: Synthetic oligonucleotide
agugcuaccaggacaccgc

SEQ ID NO: 974751 - RNA, 19 nt, Artificial Sequence
  Description of Artificial Sequence: Synthetic oligonucleotide
cuauggcgcugauagaagc

SEQ ID NO: 974752 - RNA, 19 nt, Artificial Sequence
  Description of Artificial Sequence: Synthetic oligonucleotide
uguaccaaguucgcuagca

SEQ ID NO: 974753 - RNA, 19 nt, Artificial Sequence
  Description of Artificial Sequence: Synthetic oligonucleotide
gauagaggaacaguaccac

SEQ ID NO: 974754 - RNA, 19 nt, Artificial Sequence
  Description of Artificial Sequence: Synthetic oligonucleotide
ugucaagaaacagcagaag

SEQ ID NO: 974755 - RNA, 19 nt, Artificial Sequence
  Description of Artificial Sequence: Synthetic oligonucleotide
uacucacuggucucugagg

SEQ ID NO: 974756 - RNA, 19 nt, Artificial Sequence
  Description of Artificial Sequence: Synthetic oligonucleotide
agcgaagauacacccaacu

SEQ ID NO: 974757 - RNA, 19 nt, Artificial Sequence
  Description of Artificial Sequence: Synthetic oligonucleotide
cauggauacgaauagugaa

SEQ ID NO: 974758 - RNA, 19 nt, Artificial Sequence
  Description of Artificial Sequence: Synthetic oligonucleotide
cugacagaccuuuacuuuc

SEQ ID NO: 974759 - RNA, 19 nt, Artificial Sequence
  Description of Artificial Sequence: Synthetic oligonucleotide
ugacagaccuuuacuuuca

SEQ ID NO: 974760 - RNA, 19 nt, Artificial Sequence
  Description of Artificial Sequence: Synthetic oligonucleotide
aguagcugagauguaucgg

SEQ ID NO: 974761 - RNA, 19 nt, Artificial Sequence
  Description of Artificial Sequence: Synthetic oligonucleotide
gcaaaagcaaaauggucag

SEQ ID NO: 974762 - RNA, 19 nt, Artificial Sequence
  Description of Artificial Sequence: Synthetic oligonucleotide
gacuggccgaugcugagag

SEQ ID NO: 974763 - RNA, 19 nt, Artificial Sequence
  Description of Artificial Sequence: Synthetic oligonucleotide
auggccacgucccacacgu

SEQ ID NO: 974764 - RNA, 19 nt, Artificial Sequence
  Description of Artificial Sequence: Synthetic oligonucleotide
uugcaaccagguagcaagg

SEQ ID NO: 974765 - RNA, 19 nt, Artificial Sequence
  Description of Artificial Sequence: Synthetic oligonucleotide
auaaauccuugccuuggcu

SEQ ID NO: 974766 - RNA, 19 nt, Artificial Sequence
  Description of Artificial Sequence: Synthetic oligonucleotide
uuuagggccaguugccuuc

SEQ ID NO: 974767 - RNA, 19 nt, Artificial Sequence
  Description of Artificial Sequence: Synthetic oligonucleotide
aaccaguuucagauguggg

SEQ ID NO: 974768 - RNA, 19 nt, Artificial Sequence
  Description of Artificial Sequence: Synthetic oligonucleotide
ggcaaauauaaauccuugc

SEQ ID NO: 974769 - RNA, 19 nt, Artificial Sequence
  Description of Artificial Sequence: Synthetic oligonucleotide
ugggcagacaugugcaggc

SEQ ID NO: 974770 - RNA, 19 nt, Artificial Sequence
  Description of Artificial Sequence: Synthetic oligonucleotide
gaaaagugaggaagguggc

SEQ ID NO: 974771 - RNA, 19 nt, Artificial Sequence
  Description of Artificial Sequence: Synthetic oligonucleotide
ugauagaagcgaagauaca

SEQ ID NO: 974772 - RNA, 19 nt, Artificial Sequence
  Description of Artificial Sequence: Synthetic oligonucleotide
aaaagguaacccgggguga

SEQ ID NO: 974773 - RNA, 19 nt, Artificial Sequence
  Description of Artificial Sequence: Synthetic oligonucleotide
uccaguaaucgcccggcca

SEQ ID NO: 974774 - RNA, 19 nt, Artificial Sequence
  Description of Artificial Sequence: Synthetic oligonucleotide
gugcuccuacaucauagcg

SEQ ID NO: 974775 - RNA, 19 nt, Artificial Sequence
  Description of Artificial Sequence: Synthetic oligonucleotide
caacagcaugggaacaacg

SEQ ID NO: 974776 - RNA, 19 nt, Artificial Sequence
  Description of Artificial Sequence: Synthetic oligonucleotide
uaccacggcgcacagcgcc

SEQ ID NO: 974777 - RNA, 19 nt, Artificial Sequence
  Description of Artificial Sequence: Synthetic oligonucleotide
agauagaggaacaguacca

SEQ ID NO: 974778 - RNA, 19 nt, Artificial Sequence
  Description of Artificial Sequence: Synthetic oligonucleotide
gaaggaagccauguaggug

SEQ ID NO: 974779 - RNA, 19 nt, Artificial Sequence
  Description of Artificial Sequence: Synthetic oligonucleotide
guagaggagcuacacucag

SEQ ID NO: 974780 - RNA, 19 nt, Artificial Sequence
  Description of Artificial Sequence: Synthetic oligonucleotide
gccuaggaaccccagagcg

SEQ ID NO: 974781 - RNA, 19 nt, Artificial Sequence
  Description of Artificial Sequence: Synthetic oligonucleotide
gggccagacagacugaucc

SEQ ID NO: 974782 - RNA, 19 nt, Artificial Sequence
  Description of Artificial Sequence: Synthetic oligonucleotide
uugauacugugaguuuggg

SEQ ID NO: 974783 - RNA, 19 nt, Artificial Sequence
  Description of Artificial Sequence: Synthetic oligonucleotide
aagguaacccggggugacc

SEQ ID NO: 974784 - RNA, 19 nt, Artificial Sequence
  Description of Artificial Sequence: Synthetic oligonucleotide
aguuugcuugagugcuacc

SEQ ID NO: 974785 - RNA, 19 nt, Artificial Sequence
  Description of Artificial Sequence: Synthetic oligonucleotide
uccuacaucauagcgcuuc

SEQ ID NO: 974786 - RNA, 19 nt, Artificial Sequence
  Description of Artificial Sequence: Synthetic oligonucleotide
gaaaauaccugggagcugu

SEQ ID NO: 974787 - RNA, 19 nt, Artificial Sequence
  Description of Artificial Sequence: Synthetic oligonucleotide
gacgucggcgucuugagaa

SEQ ID NO: 974788 - RNA, 19 nt, Artificial Sequence
  Description of Artificial Sequence: Synthetic oligonucleotide
aaagccguaggacgccagu

SEQ ID NO: 974789 - RNA, 19 nt, Artificial Sequence
  Description of Artificial Sequence: Synthetic oligonucleotide
cuacucacuggucucugag

SEQ ID NO: 974790 - RNA, 19 nt, Artificial Sequence
  Description of Artificial Sequence: Synthetic oligonucleotide
aggccguguaccaaguucg

SEQ ID NO: 974791 - RNA, 19 nt, Artificial Sequence
  Description of Artificial Sequence: Synthetic oligonucleotide
guaggugacgagguaggcg

SEQ ID NO: 974792 - RNA, 19 nt, Artificial Sequence
  Description of Artificial Sequence: Synthetic oligonucleotide
uacacucagguuuggaguu

SEQ ID NO: 974793 - RNA, 19 nt, Artificial Sequence
  Description of Artificial Sequence: Synthetic oligonucleotide
agaggggcuccaguaaucg

SEQ ID NO: 974794 - RNA, 19 nt, Artificial Sequence
  Description of Artificial Sequence: Synthetic oligonucleotide
guggaagcuucuucugagg

SEQ ID NO: 974795 - RNA, 19 nt, Artificial Sequence
  Description of Artificial Sequence: Synthetic oligonucleotide
uuauugauacugugaguuu

SEQ ID NO: 974796 - RNA, 19 nt, Artificial Sequence
  Description of Artificial Sequence: Synthetic oligonucleotide
gggaacaacgcugacgcgg

SEQ ID NO: 974797 - RNA, 19 nt, Artificial Sequence
  Description of Artificial Sequence: Synthetic oligonucleotide
ccggcuauggcgcugauag

SEQ ID NO: 974798 - RNA, 19 nt, Artificial Sequence
  Description of Artificial Sequence: Synthetic oligonucleotide
uaaucgcccggccaccaca

SEQ ID NO: 974799 - RNA, 19 nt, Artificial Sequence
  Description of Artificial Sequence: Synthetic oligonucleotide
ugcaucuucccggcggacg

SEQ ID NO: 974800 - RNA, 19 nt, Artificial Sequence
  Description of Artificial Sequence: Synthetic oligonucleotide
gaggccguguaccaaguuc

SEQ ID NO: 974801 - RNA, 19 nt, Artificial Sequence
  Description of Artificial Sequence: Synthetic oligonucleotide
aggacaccgccuaggaacc

SEQ ID NO: 974802 - RNA, 19 nt, Artificial Sequence
  Description of Artificial Sequence: Synthetic oligonucleotide
cuggccgaugcugagagac

SEQ ID NO: 974803 - RNA, 19 nt, Artificial Sequence
  Description of Artificial Sequence: Synthetic oligonucleotide
acugauggccacgucccac

SEQ ID NO: 974804 - RNA, 19 nt, Artificial Sequence
  Description of Artificial Sequence: Synthetic oligonucleotide
guaccaaguucgcuagcag

SEQ ID NO: 974805 - RNA, 19 nt, Artificial Sequence
  Description of Artificial Sequence: Synthetic oligonucleotide
cugccucaaagguaaugag

SEQ ID NO: 974806 - RNA, 19 nt, Artificial Sequence
  Description of Artificial Sequence: Synthetic oligonucleotide
uccuagcugagccccagaa

SEQ ID NO: 974807 - RNA, 19 nt, Artificial Sequence
  Description of Artificial Sequence: Synthetic oligonucleotide
gaaccccagagcgccaugg

SEQ ID NO: 974808 - RNA, 19 nt, Artificial Sequence
  Description of Artificial Sequence: Synthetic oligonucleotide
aagcgaagauacacccaac

SEQ ID NO: 974809 - RNA, 19 nt, Artificial Sequence
  Description of Artificial Sequence: Synthetic oligonucleotide
gcacaagaaagccugcaug

SEQ ID NO: 974810 - RNA, 19 nt, Artificial Sequence
  Description of Artificial Sequence: Synthetic oligonucleotide
caaguucgcuagcagcccc

SEQ ID NO: 974811 - RNA, 19 nt, Artificial Sequence
  Description of Artificial Sequence: Synthetic oligonucleotide
uacacccaacuggagagca

SEQ ID NO: 974812 - RNA, 19 nt, Artificial Sequence
  Description of Artificial Sequence: Synthetic oligonucleotide
gagccuuuagggccaguug

SEQ ID NO: 974813 - RNA, 19 nt, Artificial Sequence
  Description of Artificial Sequence: Synthetic oligonucleotide
agguaacccggggugaccg

SEQ ID NO: 974814 - RNA, 19 nt, Artificial Sequence
  Description of Artificial Sequence: Synthetic oligonucleotide
uacgaauagugaacaggua

SEQ ID NO: 974815 - RNA, 19 nt, Artificial Sequence
  Description of Artificial Sequence: Synthetic oligonucleotide
guaaugagacuggauucug

SEQ ID NO: 974816 - RNA, 19 nt, Artificial Sequence
  Description of Artificial Sequence: Synthetic oligonucleotide
cuagcagccccaccacagg

SEQ ID NO: 974817 - RNA, 19 nt, Artificial Sequence
  Description of Artificial Sequence: Synthetic oligonucleotide
acaacuguggccagacuga

SEQ ID NO: 974818 - RNA, 19 nt, Artificial Sequence
  Description of Artificial Sequence: Synthetic oligonucleotide
uaguuugcuugagugcuac

SEQ ID NO: 974819 - RNA, 19 nt, Artificial Sequence
  Description of Artificial Sequence: Synthetic oligonucleotide
ucgcagaaccacgcaaucc

SEQ ID NO: 974820 - RNA, 19 nt, Artificial Sequence
  Description of Artificial Sequence: Synthetic oligonucleotide
uaccaggacaccgccuagg

SEQ ID NO: 974821 - RNA, 19 nt, Artificial Sequence
  Description of Artificial Sequence: Synthetic oligonucleotide
ccauaguuugcuugagugc

SEQ ID NO: 974822 - RNA, 19 nt, Artificial Sequence
  Description of Artificial Sequence: Synthetic oligonucleotide
cucggccccggcuauggcg

SEQ ID NO: 974823 - RNA, 19 nt, Artificial Sequence
  Description of Artificial Sequence: Synthetic oligonucleotide
cauaguuugcuugagugcu

SEQ ID NO: 974824 - RNA, 19 nt, Artificial Sequence
  Description of Artificial Sequence: Synthetic oligonucleotide
aguugaaggaagccaugua

SEQ ID NO: 974825 - RNA, 19 nt, Artificial Sequence
  Description of Artificial Sequence: Synthetic oligonucleotide
auguaguguugucaagaaa

SEQ ID NO: 974826 - RNA, 19 nt, Artificial Sequence
  Description of Artificial Sequence: Synthetic oligonucleotide
ggauacgaauagugaacag

SEQ ID NO: 974827 - RNA, 19 nt, Artificial Sequence
  Description of Artificial Sequence: Synthetic oligonucleotide
gguagaccaaguugaagga

SEQ ID NO: 974828 - RNA, 19 nt, Artificial Sequence
  Description of Artificial Sequence: Synthetic oligonucleotide
accgauuuauugauacugu

SEQ ID NO: 974829 - RNA, 19 nt, Artificial Sequence
  Description of Artificial Sequence: Synthetic oligonucleotide
gcgaagauacacccaacug

SEQ ID NO: 974830 - RNA, 19 nt, Artificial Sequence
  Description of Artificial Sequence: Synthetic oligonucleotide
caguccaaagccguaggac

SEQ ID NO: 974831 - RNA, 19 nt, Artificial Sequence
  Description of Artificial Sequence: Synthetic oligonucleotide
guaguuccaaggggaagag

SEQ ID NO: 974832 - RNA, 19 nt, Artificial Sequence
  Description of Artificial Sequence: Synthetic oligonucleotide
cacggacacauugaccacc

SEQ ID NO: 974833 - RNA, 19 nt, Artificial Sequence
  Description of Artificial Sequence: Synthetic oligonucleotide
acaugugcaggcccauccu

SEQ ID NO: 974834 - RNA, 19 nt, Artificial Sequence
  Description of Artificial Sequence: Synthetic oligonucleotide
cccacggacacauugacca

SEQ ID NO: 974835 - RNA, 19 nt, Artificial Sequence
  Description of Artificial Sequence: Synthetic oligonucleotide
ugggaacaacgcugacgcg

SEQ ID NO: 974836 - RNA, 19 nt, Artificial Sequence
  Description of Artificial Sequence: Synthetic oligonucleotide
gguugucuggaguugcaac

SEQ ID NO: 974837 - RNA, 19 nt, Artificial Sequence
  Description of Artificial Sequence: Synthetic oligonucleotide
gcugacgcggaccuggggc

SEQ ID NO: 974838 - RNA, 19 nt, Artificial Sequence
  Description of Artificial Sequence: Synthetic oligonucleotide
agcgccauggauacgaaua

SEQ ID NO: 974839 - RNA, 19 nt, Artificial Sequence
  Description of Artificial Sequence: Synthetic oligonucleotide
aacugugccugcugaggua

SEQ ID NO: 974840 - RNA, 19 nt, Artificial Sequence
  Description of Artificial Sequence: Synthetic oligonucleotide
uucccggcggacgucggcg

SEQ ID NO: 974841 - RNA, 19 nt, Artificial Sequence
  Description of Artificial Sequence: Synthetic oligonucleotide
ucauagcgcuucaccgucu

SEQ ID NO: 974842 - RNA, 19 nt, Artificial Sequence
  Description of Artificial Sequence: Synthetic oligonucleotide
ggagauagaggaacaguac

SEQ ID NO: 974843 - RNA, 19 nt, Artificial Sequence
  Description of Artificial Sequence: Synthetic oligonucleotide
auagcgcuucaccgucuuc

SEQ ID NO: 974844 - RNA, 19 nt, Artificial Sequence
  Description of Artificial Sequence: Synthetic oligonucleotide
ggcgucuugagaaaaguga

SEQ ID NO: 974845 - RNA, 19 nt, Artificial Sequence
  Description of Artificial Sequence: Synthetic oligonucleotide
cuaggggccuccccggggc

SEQ ID NO: 974846 - RNA, 19 nt, Artificial Sequence
  Description of Artificial Sequence: Synthetic oligonucleotide
guugccuucuccgcucugc

SEQ ID NO: 974847 - RNA, 19 nt, Artificial Sequence
  Description of Artificial Sequence: Synthetic oligonucleotide
ucggcgucuugagaaaagu

SEQ ID NO: 974848 - RNA, 19 nt, Artificial Sequence
  Description of Artificial Sequence: Synthetic oligonucleotide
ccggcuguaguuccaaggg

SEQ ID NO: 974849 - RNA, 19 nt, Artificial Sequence
  Description of Artificial Sequence: Synthetic oligonucleotide
ucggggagggcaugggagu

SEQ ID NO: 974850 - RNA, 19 nt, Artificial Sequence
  Description of Artificial Sequence: Synthetic oligonucleotide
gucaccgccacagcagaag

SEQ ID NO: 974851 - RNA, 19 nt, Artificial Sequence
  Description of Artificial Sequence: Synthetic oligonucleotide
cugguccggcuguaguucc

SEQ ID NO: 974852 - RNA, 19 nt, Artificial Sequence
  Description of Artificial Sequence: Synthetic oligonucleotide
aggcccauccuagcugagc

SEQ ID NO: 974853 - RNA, 19 nt, Artificial Sequence
  Description of Artificial Sequence: Synthetic oligonucleotide
ggugcuccuacaucauagc

SEQ ID NO: 974854 - RNA, 19 nt, Artificial Sequence
  Description of Artificial Sequence: Synthetic oligonucleotide
gaccccauaccuggcacug

SEQ ID NO: 974855 - RNA, 19 nt, Artificial Sequence
  Description of Artificial Sequence: Synthetic oligonucleotide
cuguaguuccaaggggaag

SEQ ID NO: 974856 - RNA, 19 nt, Artificial Sequence
  Description of Artificial Sequence: Synthetic oligonucleotide
ggagagcaguccaaagccg

SEQ ID NO: 974857 - RNA, 19 nt, Artificial Sequence
  Description of Artificial Sequence: Synthetic oligonucleotide
ggagcuacacucagguuug

SEQ ID NO: 974858 - RNA, 19 nt, Artificial Sequence
  Description of Artificial Sequence: Synthetic oligonucleotide
uguuggcaaccaguuucag

SEQ ID NO: 974859 - RNA, 19 nt, Artificial Sequence
  Description of Artificial Sequence: Synthetic oligonucleotide
ccgauuuauugauacugug

SEQ ID NO: 974860 - RNA, 19 nt, Artificial Sequence
  Description of Artificial Sequence: Synthetic oligonucleotide
gagcgcguugcaucuuccc

SEQ ID NO: 974861 - RNA, 19 nt, Artificial Sequence
  Description of Artificial Sequence: Synthetic oligonucleotide
uggccgaugcugagagacc

SEQ ID NO: 974862 - RNA, 19 nt, Artificial Sequence
  Description of Artificial Sequence: Synthetic oligonucleotide
aggagcagugccaccagug

SEQ ID NO: 974863 - RNA, 19 nt, Artificial Sequence
  Description of Artificial Sequence: Synthetic oligonucleotide
gacaccgccuaggaacccc

SEQ ID NO: 974864 - RNA, 19 nt, Artificial Sequence
  Description of Artificial Sequence: Synthetic oligonucleotide
agagcgcguugcaucuucc

SEQ ID NO: 974865 - RNA, 19 nt, Artificial Sequence
  Description of Artificial Sequence: Synthetic oligonucleotide
gguccuguagaaaauaccu

SEQ ID NO: 974866 - RNA, 19 nt, Artificial Sequence
  Description of Artificial Sequence: Synthetic oligonucleotide
uggacgcagucuggggugg

SEQ ID NO: 974867 - RNA, 19 nt, Artificial Sequence
  Description of Artificial Sequence: Synthetic oligonucleotide
cugcauggacgcagucugg

SEQ ID NO: 974868 - RNA, 19 nt, Artificial Sequence
  Description of Artificial Sequence: Synthetic oligonucleotide
cacaccuuaaagaaccgau

SEQ ID NO: 974869 - RNA, 19 nt, Artificial Sequence
  Description of Artificial Sequence: Synthetic oligonucleotide
cgcagaaccacgcaauccc

SEQ ID NO: 974870 - RNA, 19 nt, Artificial Sequence
  Description of Artificial Sequence: Synthetic oligonucleotide
gauccagaaguugggugga

SEQ ID NO: 974871 - RNA, 19 nt, Artificial Sequence
  Description of Artificial Sequence: Synthetic oligonucleotide
ggguaguccccuucccugg

SEQ ID NO: 974872 - RNA, 19 nt, Artificial Sequence
  Description of Artificial Sequence: Synthetic oligonucleotide
aguucgcuagcagccccac

SEQ ID NO: 974873 - RNA, 19 nt, Artificial Sequence
  Description of Artificial Sequence: Synthetic oligonucleotide
aacccggggugaccgccag

SEQ ID NO: 974874 - RNA, 19 nt, Artificial Sequence
  Description of Artificial Sequence: Synthetic oligonucleotide
gaaccgauuuauugauacu

SEQ ID NO: 974875 - RNA, 19 nt, Artificial Sequence
  Description of Artificial Sequence: Synthetic oligonucleotide
cucgcagaaccacgcaauc

SEQ ID NO: 974876 - RNA, 19 nt, Artificial Sequence
  Description of Artificial Sequence: Synthetic oligonucleotide
ggaccuggggcacucgcag

SEQ ID NO: 974877 - RNA, 19 nt, Artificial Sequence
  Description of Artificial Sequence: Synthetic oligonucleotide
ccaguaaucgcccggccac

SEQ ID NO: 974878 - RNA, 19 nt, Artificial Sequence
  Description of Artificial Sequence: Synthetic oligonucleotide
ggagcugccucaaagguaa

SEQ ID NO: 974879 - RNA, 19 nt, Artificial Sequence
  Description of Artificial Sequence: Synthetic oligonucleotide
ggccaagcggagcaggagc

SEQ ID NO: 974880 - RNA, 19 nt, Artificial Sequence
  Description of Artificial Sequence: Synthetic oligonucleotide
caaagguaaugagacugga

SEQ ID NO: 974881 - RNA, 19 nt, Artificial Sequence
  Description of Artificial Sequence: Synthetic oligonucleotide
gcuccuacaucauagcgcu

SEQ ID NO: 974882 - RNA, 19 nt, Artificial Sequence
  Description of Artificial Sequence: Synthetic oligonucleotide
uggcgcugauagaagcgaa

SEQ ID NO: 974883 - RNA, 19 nt, Artificial Sequence
  Description of Artificial Sequence: Synthetic oligonucleotide
cagagcgccauggauacga

SEQ ID NO: 974884 - RNA, 19 nt, Artificial Sequence
  Description of Artificial Sequence: Synthetic oligonucleotide
ggaacaguaccacggcgca

SEQ ID NO: 974885 - RNA, 19 nt, Artificial Sequence
  Description of Artificial Sequence: Synthetic oligonucleotide
aagaaccgauuuauugaua

SEQ ID NO: 974886 - RNA, 19 nt, Artificial Sequence
  Description of Artificial Sequence: Synthetic oligonucleotide
ggcuccaguaaucgcccgg

SEQ ID NO: 974887 - RNA, 19 nt, Artificial Sequence
  Description of Artificial Sequence: Synthetic oligonucleotide
uaacccggggugaccgcca

SEQ ID NO: 974888 - RNA, 19 nt, Artificial Sequence
  Description of Artificial Sequence: Synthetic oligonucleotide
gguacagucuuaccacgga

SEQ ID NO: 974889 - RNA, 19 nt, Artificial Sequence
  Description of Artificial Sequence: Synthetic oligonucleotide
aaguucgcuagcagcccca

SEQ ID NO: 974890 - RNA, 19 nt, Artificial Sequence
  Description of Artificial Sequence: Synthetic oligonucleotide
cagucuuaccacggauggg

SEQ ID NO: 974891 - RNA, 19 nt, Artificial Sequence
  Description of Artificial Sequence: Synthetic oligonucleotide
gugcuaccaggacaccgcc

SEQ ID NO: 974892 - RNA, 19 nt, Artificial Sequence
  Description of Artificial Sequence: Synthetic oligonucleotide
ucccacacgugcuguucca

SEQ ID NO: 974893 - RNA, 19 nt, Artificial Sequence
  Description of Artificial Sequence: Synthetic oligonucleotide
ugggcuuggcugcccacuc

SEQ ID NO: 974894 - RNA, 19 nt, Artificial Sequence
  Description of Artificial Sequence: Synthetic oligonucleotide
gucccauguaguguuguca

SEQ ID NO: 974895 - RNA, 19 nt, Artificial Sequence
  Description of Artificial Sequence: Synthetic oligonucleotide
ggccacgucccacacgugc

SEQ ID NO: 974896 - RNA, 19 nt, Artificial Sequence
  Description of Artificial Sequence: Synthetic oligonucleotide
guaacccggggugaccgcc

SEQ ID NO: 974897 - RNA, 19 nt, Artificial Sequence
  Description of Artificial Sequence: Synthetic oligonucleotide
ucgcuagcagccccaccac

SEQ ID NO: 974898 - RNA, 19 nt, Artificial Sequence
  Description of Artificial Sequence: Synthetic oligonucleotide
gcugagagaccccauaccu

SEQ ID NO: 974899 - RNA, 19 nt, Artificial Sequence
  Description of Artificial Sequence: Synthetic oligonucleotide
caucauagcgcuucaccgu

SEQ ID NO: 974900 - RNA, 19 nt, Artificial Sequence
  Description of Artificial Sequence: Synthetic oligonucleotide
cugauggccacgucccaca

SEQ ID NO: 974901 - RNA, 19 nt, Artificial Sequence
  Description of Artificial Sequence: Synthetic oligonucleotide
ggcaaccaguuucagaugu

SEQ ID NO: 974902 - RNA, 19 nt, Artificial Sequence
  Description of Artificial Sequence: Synthetic oligonucleotide
guaucggggagggcauggg

SEQ ID NO: 974903 - RNA, 19 nt, Artificial Sequence
  Description of Artificial Sequence: Synthetic oligonucleotide
guagaccaaguugaaggaa

SEQ ID NO: 974904 - RNA, 19 nt, Artificial Sequence
  Description of Artificial Sequence: Synthetic oligonucleotide
cuaccaggacaccgccuag

SEQ ID NO: 974905 - RNA, 19 nt, Artificial Sequence
  Description of Artificial Sequence: Synthetic oligonucleotide
uaguuccaaggggaagaga

SEQ ID NO: 974906 - RNA, 19 nt, Artificial Sequence
  Description of Artificial Sequence: Synthetic oligonucleotide
agagccuuuagggccaguu

SEQ ID NO: 974907 - RNA, 19 nt, Artificial Sequence
  Description of Artificial Sequence: Synthetic oligonucleotide
agcaagggucccauguagu

SEQ ID NO: 974908 - RNA, 19 nt, Artificial Sequence
  Description of Artificial Sequence: Synthetic oligonucleotide
ucuccgcucugcgucuugc

SEQ ID NO: 974909 - RNA, 19 nt, Artificial Sequence
  Description of Artificial Sequence: Synthetic oligonucleotide
cuccaguaaucgcccggcc

SEQ ID NO: 974910 - RNA, 19 nt, Artificial Sequence
  Description of Artificial Sequence: Synthetic oligonucleotide
acucgcagaaccacgcaau

SEQ ID NO: 974911 - RNA, 19 nt, Artificial Sequence
  Description of Artificial Sequence: Synthetic oligonucleotide
cgaauagugaacagguaga

SEQ ID NO: 974912 - RNA, 19 nt, Artificial Sequence
  Description of Artificial Sequence: Synthetic oligonucleotide
ccauggauacgaauaguga

SEQ ID NO: 974913 - RNA, 19 nt, Artificial Sequence
  Description of Artificial Sequence: Synthetic oligonucleotide
cguugcaucuucccggcgg

SEQ ID NO: 974914 - RNA, 19 nt, Artificial Sequence
  Description of Artificial Sequence: Synthetic oligonucleotide
aguaaucgcccggccacca

SEQ ID NO: 974915 - RNA, 19 nt, Artificial Sequence
  Description of Artificial Sequence: Synthetic oligonucleotide
caccuuaaagaaccgauuu

SEQ ID NO: 974916 - RNA, 19 nt, Artificial Sequence
  Description of Artificial Sequence: Synthetic oligonucleotide
cagagcgcguugcaucuuc

SEQ ID NO: 974917 - RNA, 19 nt, Artificial Sequence
  Description of Artificial Sequence: Synthetic oligonucleotide
ugcgucuugcgggucugug

SEQ ID NO: 974918 - RNA, 19 nt, Artificial Sequence
  Description of Artificial Sequence: Synthetic oligonucleotide
gauucugggguaguccccu

SEQ ID NO: 974919 - RNA, 19 nt, Artificial Sequence
  Description of Artificial Sequence: Synthetic oligonucleotide
gguaaugagacuggauucu

SEQ ID NO: 974920 - RNA, 19 nt, Artificial Sequence
  Description of Artificial Sequence: Synthetic oligonucleotide
ccgccuaggaaccccagag

SEQ ID NO: 974921 - RNA, 19 nt, Artificial Sequence
  Description of Artificial Sequence: Synthetic oligonucleotide
gaccaccgagaagaagaug

SEQ ID NO: 974922 - RNA, 19 nt, Artificial Sequence
  Description of Artificial Sequence: Synthetic oligonucleotide
gagagcaguccaaagccgu

SEQ ID NO: 974923 - RNA, 19 nt, Artificial Sequence
  Description of Artificial Sequence: Synthetic oligonucleotide
accgccuaggaaccccaga

SEQ ID NO: 974924 - RNA, 19 nt, Artificial Sequence
  Description of Artificial Sequence: Synthetic oligonucleotide
guguaccaaguucgcuagc

SEQ ID NO: 974925 - RNA, 19 nt, Artificial Sequence
  Description of Artificial Sequence: Synthetic oligonucleotide
cuacaucauagcgcuucac

SEQ ID NO: 974926 - RNA, 19 nt, Artificial Sequence
  Description of Artificial Sequence: Synthetic oligonucleotide
accccagagcgccauggau

SEQ ID NO: 974927 - RNA, 19 nt, Artificial Sequence
  Description of Artificial Sequence: Synthetic oligonucleotide
guuugggcuuggcugccca

SEQ ID NO: 974928 - RNA, 19 nt, Artificial Sequence
  Description of Artificial Sequence: Synthetic oligonucleotide
uuagggccaguugccuucu

SEQ ID NO: 974929 - RNA, 19 nt, Artificial Sequence
  Description of Artificial Sequence: Synthetic oligonucleotide
ggccgaugcugagagaccc

SEQ ID NO: 974930 - RNA, 19 nt, Artificial Sequence
  Description of Artificial Sequence: Synthetic oligonucleotide
cugugguugucuggaguug

SEQ ID NO: 974931 - RNA, 19 nt, Artificial Sequence
  Description of Artificial Sequence: Synthetic oligonucleotide
cauggacgcagucuggggu

SEQ ID NO: 974932 - RNA, 19 nt, Artificial Sequence
  Description of Artificial Sequence: Synthetic oligonucleotide
gaacaguaccacggcgcac

SEQ ID NO: 974933 - RNA, 19 nt, Artificial Sequence
  Description of Artificial Sequence: Synthetic oligonucleotide
aaucgcccggccaccacaa

SEQ ID NO: 974934 - RNA, 19 nt, Artificial Sequence
  Description of Artificial Sequence: Synthetic oligonucleotide
cucuggcuagacacaguca

SEQ ID NO: 974935 - RNA, 19 nt, Artificial Sequence
  Description of Artificial Sequence: Synthetic oligonucleotide
cguaggacgccagugcugg

SEQ ID NO: 974936 - RNA, 19 nt, Artificial Sequence
  Description of Artificial Sequence: Synthetic oligonucleotide
cugacgcggaccuggggca

SEQ ID NO: 974937 - RNA, 19 nt, Artificial Sequence
  Description of Artificial Sequence: Synthetic oligonucleotide
acccaacuggagagcaguc

SEQ ID NO: 974938 - RNA, 19 nt, Artificial Sequence
  Description of Artificial Sequence: Synthetic oligonucleotide
gagcuacacucagguuugg

SEQ ID NO: 974939 - RNA, 19 nt, Artificial Sequence
  Description of Artificial Sequence: Synthetic oligonucleotide
cagacugauccucuacucu

SEQ ID NO: 974940 - RNA, 19 nt, Artificial Sequence
  Description of Artificial Sequence: Synthetic oligonucleotide
gaacaacgcugacgcggac

SEQ ID NO: 974941 - RNA, 19 nt, Artificial Sequence
  Description of Artificial Sequence: Synthetic oligonucleotide
caguaaucgcccggccacc

SEQ ID NO: 974942 - RNA, 19 nt, Artificial Sequence
  Description of Artificial Sequence: Synthetic oligonucleotide
gacugauggccacguccca

SEQ ID NO: 974943 - RNA, 19 nt, Artificial Sequence
  Description of Artificial Sequence: Synthetic oligonucleotide
cacucgcagaaccacgcaa

SEQ ID NO: 974944 - RNA, 19 nt, Artificial Sequence
  Description of Artificial Sequence: Synthetic oligonucleotide
ggcgcugauagaagcgaag

SEQ ID NO: 974945 - RNA, 19 nt, Artificial Sequence
  Description of Artificial Sequence: Synthetic oligonucleotide
guucgcuagcagccccacc

SEQ ID NO: 974946 - RNA, 19 nt, Artificial Sequence
  Description of Artificial Sequence: Synthetic oligonucleotide
gcuaccaggacaccgccua

SEQ ID NO: 974947 - RNA, 19 nt, Artificial Sequence
  Description of Artificial Sequence: Synthetic oligonucleotide
ccauguaguguugucaaga

SEQ ID NO: 974948 - RNA, 19 nt, Artificial Sequence
  Description of Artificial Sequence: Synthetic oligonucleotide
aguugccuucuccgcucug

SEQ ID NO: 974949 - RNA, 19 nt, Artificial Sequence
  Description of Artificial Sequence: Synthetic oligonucleotide
guacagucuuaccacggau

SEQ ID NO: 974950 - RNA, 19 nt, Artificial Sequence
  Description of Artificial Sequence: Synthetic oligonucleotide
agguuuggaguuacaguuu

SEQ ID NO: 974951 - RNA, 19 nt, Artificial Sequence
  Description of Artificial Sequence: Synthetic oligonucleotide
gacugauccucuacucucu

SEQ ID NO: 974952 - RNA, 19 nt, Artificial Sequence
  Description of Artificial Sequence: Synthetic oligonucleotide
gagauguaucggggagggc

SEQ ID NO: 974953 - RNA, 19 nt, Artificial Sequence
  Description of Artificial Sequence: Synthetic oligonucleotide
cuucccggcggacgucggc

SEQ ID NO: 974954 - RNA, 19 nt, Artificial Sequence
  Description of Artificial Sequence: Synthetic oligonucleotide
ggaacaacgcugacgcgga

SEQ ID NO: 974955 - RNA, 19 nt, Artificial Sequence
  Description of Artificial Sequence: Synthetic oligonucleotide
cacggcgaaggagaggaga

SEQ ID NO: 974956 - RNA, 19 nt, Artificial Sequence
  Description of Artificial Sequence: Synthetic oligonucleotide
guccggcuguaguuccaag

SEQ ID NO: 974957 - RNA, 19 nt, Artificial Sequence
  Description of Artificial Sequence: Synthetic oligonucleotide
acacccaacuggagagcag

SEQ ID NO: 974958 - RNA, 19 nt, Artificial Sequence
  Description of Artificial Sequence: Synthetic oligonucleotide
auccuagcugagccccaga

SEQ ID NO: 974959 - RNA, 19 nt, Artificial Sequence
  Description of Artificial Sequence: Synthetic oligonucleotide
gcgucuugcgggucugugc

SEQ ID NO: 974960 - RNA, 19 nt, Artificial Sequence
  Description of Artificial Sequence: Synthetic oligonucleotide
gccuuuagggccaguugcc

SEQ ID NO: 974961 - RNA, 19 nt, Artificial Sequence
  Description of Artificial Sequence: Synthetic oligonucleotide
ccuagcugagccccagaac

SEQ ID NO: 974962 - RNA, 19 nt, Artificial Sequence
  Description of Artificial Sequence: Synthetic oligonucleotide
caccgucuucugacagacc

SEQ ID NO: 974963 - RNA, 19 nt, Artificial Sequence
  Description of Artificial Sequence: Synthetic oligonucleotide
acggugcuccuacaucaua

SEQ ID NO: 974964 - RNA, 19 nt, Artificial Sequence
  Description of Artificial Sequence: Synthetic oligonucleotide
gguuuggaguuacaguuuu

SEQ ID NO: 974965 - RNA, 19 nt, Artificial Sequence
  Description of Artificial Sequence: Synthetic oligonucleotide
auaguuugcuugagugcua

SEQ ID NO: 974966 - RNA, 19 nt, Artificial Sequence
  Description of Artificial Sequence: Synthetic oligonucleotide
cccaacuggagagcagucc

SEQ ID NO: 974967 - RNA, 19 nt, Artificial Sequence
  Description of Artificial Sequence: Synthetic oligonucleotide
agccccaccacaggcugca

SEQ ID NO: 974968 - RNA, 19 nt, Artificial Sequence
  Description of Artificial Sequence: Synthetic oligonucleotide
auguaucggggagggcaug

SEQ ID NO: 974969 - RNA, 19 nt, Artificial Sequence
  Description of Artificial Sequence: Synthetic oligonucleotide
ggccuaggggccuccccgg

SEQ ID NO: 974970 - RNA, 19 nt, Artificial Sequence
  Description of Artificial Sequence: Synthetic oligonucleotide
ccaaggcuccccagagggg

SEQ ID NO: 974971 - RNA, 19 nt, Artificial Sequence
  Description of Artificial Sequence: Synthetic oligonucleotide
ccaaguucgcuagcagccc

SEQ ID NO: 974972 - RNA, 19 nt, Artificial Sequence
  Description of Artificial Sequence: Synthetic oligonucleotide
ggucccauguaguguuguc

SEQ ID NO: 974973 - RNA, 19 nt, Artificial Sequence
  Description of Artificial Sequence: Synthetic oligonucleotide
acuggccgaugcugagaga

SEQ ID NO: 974974 - RNA, 19 nt, Artificial Sequence
  Description of Artificial Sequence: Synthetic oligonucleotide
ccaucaguccauggguggc

SEQ ID NO: 974975 - RNA, 19 nt, Artificial Sequence
  Description of Artificial Sequence: Synthetic oligonucleotide
acgcagucuggggugggca

SEQ ID NO: 974976 - RNA, 19 nt, Artificial Sequence
  Description of Artificial Sequence: Synthetic oligonucleotide
gcgcugauagaagcgaaga

SEQ ID NO: 974977 - RNA, 19 nt, Artificial Sequence
  Description of Artificial Sequence: Synthetic oligonucleotide
gguaacccggggugaccgc

SEQ ID NO: 974978 - RNA, 19 nt, Artificial Sequence
  Description of Artificial Sequence: Synthetic oligonucleotide
agagcaguccaaagccgua

SEQ ID NO: 974979 - RNA, 19 nt, Artificial Sequence
  Description of Artificial Sequence: Synthetic oligonucleotide
cagacagacugauccucua

SEQ ID NO: 974980 - RNA, 19 nt, Artificial Sequence
  Description of Artificial Sequence: Synthetic oligonucleotide
gcuucaccgucuucugaca

SEQ ID NO: 974981 - RNA, 19 nt, Artificial Sequence
  Description of Artificial Sequence: Synthetic oligonucleotide
caccgccuaggaaccccag

SEQ ID NO: 974982 - RNA, 19 nt, Artificial Sequence
  Description of Artificial Sequence: Synthetic oligonucleotide
uugcaucuucccggcggac

SEQ ID NO: 974983 - RNA, 19 nt, Artificial Sequence
  Description of Artificial Sequence: Synthetic oligonucleotide
ccguguaccaaguucgcua

SEQ ID NO: 974984 - RNA, 19 nt, Artificial Sequence
  Description of Artificial Sequence: Synthetic oligonucleotide
cacugugguugucuggagu

SEQ ID NO: 974985 - RNA, 19 nt, Artificial Sequence
  Description of Artificial Sequence: Synthetic oligonucleotide
ccccacggacacauugacc

SEQ ID NO: 974986 - RNA, 19 nt, Artificial Sequence
  Description of Artificial Sequence: Synthetic oligonucleotide
aggaaccccagagcgccau

SEQ ID NO: 974987 - RNA, 19 nt, Artificial Sequence
  Description of Artificial Sequence: Synthetic oligonucleotide
agguggccuaggggccucc

SEQ ID NO: 974988 - RNA, 19 nt, Artificial Sequence
  Description of Artificial Sequence: Synthetic oligonucleotide
cgagguaggcgaaggcccc

SEQ ID NO: 974989 - RNA, 19 nt, Artificial Sequence
  Description of Artificial Sequence: Synthetic oligonucleotide
gggcuccaguaaucgcccg

SEQ ID NO: 974990 - RNA, 19 nt, Artificial Sequence
  Description of Artificial Sequence: Synthetic oligonucleotide
ucccggcggacgucggcgu

SEQ ID NO: 974991 - RNA, 19 nt, Artificial Sequence
  Description of Artificial Sequence: Synthetic oligonucleotide
uggccacgucccacacgug

SEQ ID NO: 974992 - RNA, 19 nt, Artificial Sequence
  Description of Artificial Sequence: Synthetic oligonucleotide
gcuacucacuggucucuga

SEQ ID NO: 974993 - RNA, 19 nt, Artificial Sequence
  Description of Artificial Sequence: Synthetic oligonucleotide
caagggucccauguagugu

SEQ ID NO: 974994 - RNA, 19 nt, Artificial Sequence
  Description of Artificial Sequence: Synthetic oligonucleotide
cagaugcuggcgggccccg

SEQ ID NO: 974995 - RNA, 19 nt, Artificial Sequence
  Description of Artificial Sequence: Synthetic oligonucleotide
gccccacggacacauugac

SEQ ID NO: 974996 - RNA, 19 nt, Artificial Sequence
  Description of Artificial Sequence: Synthetic oligonucleotide
gaagguggccuaggggccu

SEQ ID NO: 974997 - RNA, 19 nt, Artificial Sequence
  Description of Artificial Sequence: Synthetic oligonucleotide
aggaggccguguaccaagu

SEQ ID NO: 974998 - RNA, 19 nt, Artificial Sequence
  Description of Artificial Sequence: Synthetic oligonucleotide
ccuaggggccuccccgggg

SEQ ID NO: 974999 - RNA, 19 nt, Artificial Sequence
  Description of Artificial Sequence: Synthetic oligonucleotide
cccggggugaccgccaggc

SEQ ID NO: 975000 - RNA, 19 nt, Artificial Sequence
  Description of Artificial Sequence: Synthetic oligonucleotide
cggggugaccgccaggcag

SEQ ID NO: 975001 - RNA, 19 nt, Artificial Sequence
  Description of Artificial Sequence: Synthetic oligonucleotide
gucugguccggcuguaguu

SEQ ID NO: 975002 - RNA, 19 nt, Artificial Sequence
  Description of Artificial Sequence: Synthetic oligonucleotide
acgcggaccuggggcacuc

SEQ ID NO: 975003 - RNA, 19 nt, Artificial Sequence
  Description of Artificial Sequence: Synthetic oligonucleotide
cacccaacuggagagcagu

SEQ ID NO: 975004 - RNA, 19 nt, Artificial Sequence
  Description of Artificial Sequence: Synthetic oligonucleotide
ccggcuacucacuggucuc

SEQ ID NO: 975005 - RNA, 19 nt, Artificial Sequence
  Description of Artificial Sequence: Synthetic oligonucleotide
cgcguugcaucuucccggc

SEQ ID NO: 975006 - RNA, 19 nt, Artificial Sequence
  Description of Artificial Sequence: Synthetic oligonucleotide
acgcugacgcggaccuggg

SEQ ID NO: 975007 - RNA, 19 nt, Artificial Sequence
  Description of Artificial Sequence: Synthetic oligonucleotide
ccuacaucauagcgcuuca

SEQ ID NO: 975008 - RNA, 19 nt, Artificial Sequence
  Description of Artificial Sequence: Synthetic oligonucleotide
ccguaggacgccagugcug

SEQ ID NO: 975009 - RNA, 19 nt, Artificial Sequence
  Description of Artificial Sequence: Synthetic oligonucleotide
cggcgucuugagaaaagug

SEQ ID NO: 975010 - RNA, 19 nt, Artificial Sequence
  Description of Artificial Sequence: Synthetic oligonucleotide
ggcuacucacuggucucug

SEQ ID NO: 975011 - RNA, 19 nt, Artificial Sequence
  Description of Artificial Sequence: Synthetic oligonucleotide
agccguucauugagagccu

SEQ ID NO: 975012 - RNA, 19 nt, Artificial Sequence
  Description of Artificial Sequence: Synthetic oligonucleotide
agggucccauguaguguug

SEQ ID NO: 975013 - RNA, 19 nt, Artificial Sequence
  Description of Artificial Sequence: Synthetic oligonucleotide
ccacggacacauugaccac

SEQ ID NO: 975014 - RNA, 19 nt, Artificial Sequence
  Description of Artificial Sequence: Synthetic oligonucleotide
cauaccuggcacugugguu

SEQ ID NO: 975015 - RNA, 19 nt, Artificial Sequence
  Description of Artificial Sequence: Synthetic oligonucleotide
guaccacggcgcacagcgc

SEQ ID NO: 975016 - RNA, 19 nt, Artificial Sequence
  Description of Artificial Sequence: Synthetic oligonucleotide
gcggaccuggggcacucgc

SEQ ID NO: 975017 - RNA, 19 nt, Artificial Sequence
  Description of Artificial Sequence: Synthetic oligonucleotide
caugggaguagaggagcua

SEQ ID NO: 975018 - RNA, 19 nt, Artificial Sequence
  Description of Artificial Sequence: Synthetic oligonucleotide
gcguugcaucuucccggcg

SEQ ID NO: 975019 - RNA, 19 nt, Artificial Sequence
  Description of Artificial Sequence: Synthetic oligonucleotide
gagcgccauggauacgaau

SEQ ID NO: 975020 - RNA, 19 nt, Artificial Sequence
  Description of Artificial Sequence: Synthetic oligonucleotide
ggccguguaccaaguucgc

SEQ ID NO: 975021 - RNA, 19 nt, Artificial Sequence
  Description of Artificial Sequence: Synthetic oligonucleotide
agucaccgccacagcagaa

SEQ ID NO: 975022 - RNA, 19 nt, Artificial Sequence
  Description of Artificial Sequence: Synthetic oligonucleotide
ggacgucggcgucuugaga

SEQ ID NO: 975023 - RNA, 19 nt, Artificial Sequence
  Description of Artificial Sequence: Synthetic oligonucleotide
gcacucgcagaaccacgca

SEQ ID NO: 975024 - RNA, 19 nt, Artificial Sequence
  Description of Artificial Sequence: Synthetic oligonucleotide
ggucugguccggcuguagu

SEQ ID NO: 975025 - RNA, 19 nt, Artificial Sequence
  Description of Artificial Sequence: Synthetic oligonucleotide
ggcccggcuacucacuggu

SEQ ID NO: 975026 - RNA, 19 nt, Artificial Sequence
  Description of Artificial Sequence: Synthetic oligonucleotide
gcggacgucggcgucuuga

SEQ ID NO: 975027 - RNA, 19 nt, Artificial Sequence
  Description of Artificial Sequence: Synthetic oligonucleotide
gccguaggacgccagugcu

SEQ ID NO: 975028 - RNA, 19 nt, Artificial Sequence
  Description of Artificial Sequence: Synthetic oligonucleotide
cggacgucggcgucuugag

SEQ ID NO: 975029 - RNA, 19 nt, Artificial Sequence
  Description of Artificial Sequence: Synthetic oligonucleotide
ggccagacagacugauccu

SEQ ID NO: 975030 - RNA, 19 nt, Artificial Sequence
  Description of Artificial Sequence: Synthetic oligonucleotide
ccaagcggagcaggagcag

SEQ ID NO: 975031 - RNA, 19 nt, Artificial Sequence
  Description of Artificial Sequence: Synthetic oligonucleotide
ggacgcagucugggguggg

SEQ ID NO: 975032 - RNA, 19 nt, Artificial Sequence
  Description of Artificial Sequence: Synthetic oligonucleotide
ccauaccuggcacuguggu

SEQ ID NO: 975033 - RNA, 19 nt, Artificial Sequence
  Description of Artificial Sequence: Synthetic oligonucleotide
ggacuggccgaugcugaga

SEQ ID NO: 975034 - RNA, 19 nt, Artificial Sequence
  Description of Artificial Sequence: Synthetic oligonucleotide
aggugacgagguaggcgaa

SEQ ID NO: 975035 - RNA, 19 nt, Artificial Sequence
  Description of Artificial Sequence: Synthetic oligonucleotide
gacggugcuccuacaucau

SEQ ID NO: 975036 - RNA, 19 nt, Artificial Sequence
  Description of Artificial Sequence: Synthetic oligonucleotide
ccccagaugcuggcgggcc

SEQ ID NO: 975037 - RNA, 19 nt, Artificial Sequence
  Description of Artificial Sequence: Synthetic oligonucleotide
cggacggugcuccuacauc

SEQ ID NO: 975038 - RNA, 19 nt, Artificial Sequence
  Description of Artificial Sequence: Synthetic oligonucleotide
ggacaccgccuaggaaccc

SEQ ID NO: 975039 - RNA, 19 nt, Artificial Sequence
  Description of Artificial Sequence: Synthetic oligonucleotide
cccgacgggaggcccgggc

SEQ ID NO: 975040 - RNA, 19 nt, Artificial Sequence
  Description of Artificial Sequence: Synthetic oligonucleotide
cguucauugagagccuuua

SEQ ID NO: 975041 - RNA, 19 nt, Artificial Sequence
  Description of Artificial Sequence: Synthetic oligonucleotide
cccggcuacucacuggucu

SEQ ID NO: 975042 - RNA, 19 nt, Artificial Sequence
  Description of Artificial Sequence: Synthetic oligonucleotide
cccagaggggcuccaguaa

SEQ ID NO: 975043 - RNA, 19 nt, Artificial Sequence
  Description of Artificial Sequence: Synthetic oligonucleotide
gguggccuaggggccuccc

SEQ ID NO: 975044 - RNA, 19 nt, Artificial Sequence
  Description of Artificial Sequence: Synthetic oligonucleotide
caguugccuucuccgcucu

SEQ ID NO: 975045 - RNA, 19 nt, Artificial Sequence
  Description of Artificial Sequence: Synthetic oligonucleotide
gguccggcuguaguuccaa

SEQ ID NO: 975046 - RNA, 19 nt, Artificial Sequence
  Description of Artificial Sequence: Synthetic oligonucleotide
cugggccagacagacugau

SEQ ID NO: 975047 - RNA, 19 nt, Artificial Sequence
  Description of Artificial Sequence: Synthetic oligonucleotide
ccauguaggugacgaggua

SEQ ID NO: 975048 - RNA, 19 nt, Artificial Sequence
  Description of Artificial Sequence: Synthetic oligonucleotide
ggugaccgccaggcagccc

SEQ ID NO: 975049 - RNA, 19 nt, Artificial Sequence
  Description of Artificial Sequence: Synthetic oligonucleotide
gcugagccccagaacauuu

SEQ ID NO: 975050 - RNA, 19 nt, Artificial Sequence
  Description of Artificial Sequence: Synthetic oligonucleotide
ccaggacaccgccuaggaa

SEQ ID NO: 975051 - RNA, 19 nt, Artificial Sequence
  Description of Artificial Sequence: Synthetic oligonucleotide
gacgcggaccuggggcacu

SEQ ID NO: 975052 - RNA, 19 nt, Artificial Sequence
  Description of Artificial Sequence: Synthetic oligonucleotide
ggcggacggugcuccuaca

SEQ ID NO: 975053 - RNA, 19 nt, Artificial Sequence
  Description of Artificial Sequence: Synthetic oligonucleotide
gcguggccaagcggagcag

SEQ ID NO: 975054 - RNA, 19 nt, Artificial Sequence
  Description of Artificial Sequence: Synthetic oligonucleotide
cgcugacgcggaccugggg

SEQ ID NO: 975055 - RNA, 19 nt, Artificial Sequence
  Description of Artificial Sequence: Synthetic oligonucleotide
gcggacggugcuccuacau

SEQ ID NO: 975056 - RNA, 19 nt, Artificial Sequence
  Description of Artificial Sequence: Synthetic oligonucleotide
gggucccauguaguguugu

SEQ ID NO: 975057 - RNA, 19 nt, Artificial Sequence
  Description of Artificial Sequence: Synthetic oligonucleotide
cuggcgggccccgggcaga

SEQ ID NO: 975058 - RNA, 19 nt, Artificial Sequence
  Description of Artificial Sequence: Synthetic oligonucleotide
cgucccacacgugcuguuc

SEQ ID NO: 975059 - RNA, 19 nt, Artificial Sequence
  Description of Artificial Sequence: Synthetic oligonucleotide
gccguguaccaaguucgcu

SEQ ID NO: 975060 - RNA, 19 nt, Artificial Sequence
  Description of Artificial Sequence: Synthetic oligonucleotide
ccuucuccgcucugcgucu

SEQ ID NO: 975061 - RNA, 19 nt, Artificial Sequence
  Description of Artificial Sequence: Synthetic oligonucleotide
cggaccuggggcacucgca

SEQ ID NO: 975062 - RNA, 19 nt, Artificial Sequence
  Description of Artificial Sequence: Synthetic oligonucleotide
ggaggccguguaccaaguu

SEQ ID NO: 975063 - RNA, 19 nt, Artificial Sequence
  Description of Artificial Sequence: Synthetic oligonucleotide
cuccuacaucauagcgcuu

SEQ ID NO: 975064 - RNA, 19 nt, Artificial Sequence
  Description of Artificial Sequence: Synthetic oligonucleotide
gccccggcuauggcgcuga

SEQ ID NO: 975065 - RNA, 19 nt, Artificial Sequence
  Description of Artificial Sequence: Synthetic oligonucleotide
ggcggacgucggcgucuug

SEQ ID NO: 975066 - RNA, 19 nt, Artificial Sequence
  Description of Artificial Sequence: Synthetic oligonucleotide
gaagccccacggacacauu

SEQ ID NO: 975067 - RNA, 19 nt, Artificial Sequence
  Description of Artificial Sequence: Synthetic oligonucleotide
ggggucuggacuggccgau

SEQ ID NO: 975068 - RNA, 19 nt, Artificial Sequence
  Description of Artificial Sequence: Synthetic oligonucleotide
gcucugcgucuugcggguc

SEQ ID NO: 975069 - RNA, 19 nt, Artificial Sequence
  Description of Artificial Sequence: Synthetic oligonucleotide
ccguucauugagagccuuu

SEQ ID NO: 975070 - RNA, 19 nt, Artificial Sequence
  Description of Artificial Sequence: Synthetic oligonucleotide
ccguguccacggcgaagga

SEQ ID NO: 975071 - RNA, 19 nt, Artificial Sequence
  Description of Artificial Sequence: Synthetic oligonucleotide
cgucggcgucuugagaaaa

SEQ ID NO: 975072 - RNA, 19 nt, Artificial Sequence
  Description of Artificial Sequence: Synthetic oligonucleotide
cuucuccgcucugcgucuu

SEQ ID NO: 975073 - RNA, 19 nt, Artificial Sequence
  Description of Artificial Sequence: Synthetic oligonucleotide
cugcgucuugcgggucugu

SEQ ID NO: 975074 - RNA, 19 nt, Artificial Sequence
  Description of Artificial Sequence: Synthetic oligonucleotide
ccggggugaccgccaggca

SEQ ID NO: 975075 - RNA, 19 nt, Artificial Sequence
  Description of Artificial Sequence: Synthetic oligonucleotide
ggcgggccccgggcagagc

SEQ ID NO: 975076 - RNA, 19 nt, Artificial Sequence
  Description of Artificial Sequence: Synthetic oligonucleotide
cgccauggauacgaauagu

SEQ ID NO: 975077 - RNA, 19 nt, Artificial Sequence
  Description of Artificial Sequence: Synthetic oligonucleotide
cccggcuauggcgcugaua

SEQ ID NO: 975078 - RNA, 19 nt, Artificial Sequence
  Description of Artificial Sequence: Synthetic oligonucleotide
ccccucggccccggcuaug

SEQ ID NO: 975079 - RNA, 19 nt, Artificial Sequence
  Description of Artificial Sequence: Synthetic oligonucleotide
cccacacgugcuguuccau

SEQ ID NO: 975080 - RNA, 19 nt, Artificial Sequence
  Description of Artificial Sequence: Synthetic oligonucleotide
ccggcggacgucggcgucu

SEQ ID NO: 975081 - RNA, 19 nt, Artificial Sequence
  Description of Artificial Sequence: Synthetic oligonucleotide
cccggggccucgucccagu

SEQ ID NO: 975082 - RNA, 19 nt, Artificial Sequence
  Description of Artificial Sequence: Synthetic oligonucleotide
gccccgggcagagcgcguu

SEQ ID NO: 975083 - RNA, 19 nt, Artificial Sequence
  Description of Artificial Sequence: Synthetic oligonucleotide
ccccggcuauggcgcugau

SEQ ID NO: 975084 - RNA, 19 nt, Artificial Sequence
  Description of Artificial Sequence: Synthetic oligonucleotide
cggcggacgucggcgucuu

SEQ ID NO: 975085 - RNA, 19 nt, Artificial Sequence
  Description of Artificial Sequence: Synthetic oligonucleotide
ucuaguaaaacuuacaguc

SEQ ID NO: 975086 - RNA, 19 nt, Artificial Sequence
  Description of Artificial Sequence: Synthetic oligonucleotide
aagaacauaaacccgaaca

SEQ ID NO: 975087 - RNA, 19 nt, Artificial Sequence
  Description of Artificial Sequence: Synthetic oligonucleotide
ucaaacuaaagccacgagg

SEQ ID NO: 975088 - RNA, 19 nt, Artificial Sequence
  Description of Artificial Sequence: Synthetic oligonucleotide
cuuugcuacauuuauacgg

SEQ ID NO: 975089 - RNA, 19 nt, Artificial Sequence
  Description of Artificial Sequence: Synthetic oligonucleotide
uauacgguaauaaaugagc

SEQ ID NO: 975090 - RNA, 19 nt, Artificial Sequence
  Description of Artificial Sequence: Synthetic oligonucleotide
aaauccaaucuacuggugg

SEQ ID NO: 975091 - RNA, 19 nt, Artificial Sequence
  Description of Artificial Sequence: Synthetic oligonucleotide
auuucuaagcaccuugccc

SEQ ID NO: 975092 - RNA, 19 nt, Artificial Sequence
  Description of Artificial Sequence: Synthetic oligonucleotide
uuauauucgaggaucuugc

SEQ ID NO: 975093 - RNA, 19 nt, Artificial Sequence
  Description of Artificial Sequence: Synthetic oligonucleotide
agugaauauuucuaagcac

SEQ ID NO: 975094 - RNA, 19 nt, Artificial Sequence
  Description of Artificial Sequence: Synthetic oligonucleotide
uuauacgguaauaaaugag

SEQ ID NO: 975095 - RNA, 19 nt, Artificial Sequence
  Description of Artificial Sequence: Synthetic oligonucleotide
uuuaaggaucacuuuauca

SEQ ID NO: 975096 - RNA, 19 nt, Artificial Sequence
  Description of Artificial Sequence: Synthetic oligonucleotide
aaagccacgaggccucucc

SEQ ID NO: 975097 - RNA, 19 nt, Artificial Sequence
  Description of Artificial Sequence: Synthetic oligonucleotide
uuaaggaucacuuuaucau

SEQ ID NO: 975098 - RNA, 19 nt, Artificial Sequence
  Description of Artificial Sequence: Synthetic oligonucleotide
uucauauaauaaauuaccu

SEQ ID NO: 975099 - RNA, 19 nt, Artificial Sequence
  Description of Artificial Sequence: Synthetic oligonucleotide
uguaacucuaguaaaacuu

SEQ ID NO: 975100 - RNA, 19 nt, Artificial Sequence
  Description of Artificial Sequence: Synthetic oligonucleotide
gaaaagagcaccgaccagg

SEQ ID NO: 975101 - RNA, 19 nt, Artificial Sequence
  Description of Artificial Sequence: Synthetic oligonucleotide
aaauauucggauggcuugc

SEQ ID NO: 975102 - RNA, 19 nt, Artificial Sequence
  Description of Artificial Sequence: Synthetic oligonucleotide
uuucuaagcaccuugcccu

SEQ ID NO: 975103 - RNA, 19 nt, Artificial Sequence
  Description of Artificial Sequence: Synthetic oligonucleotide
uuuauacgguaauaaauga

SEQ ID NO: 975104 - RNA, 19 nt, Artificial Sequence
  Description of Artificial Sequence: Synthetic oligonucleotide
auuuauacgguaauaaaug

SEQ ID NO: 975105 - RNA, 19 nt, Artificial Sequence
  Description of Artificial Sequence: Synthetic oligonucleotide
uuugcuacauuuauacggu

SEQ ID NO: 975106 - RNA, 19 nt, Artificial Sequence
  Description of Artificial Sequence: Synthetic oligonucleotide
agaguuguaacucuaguaa

SEQ ID NO: 975107 - RNA, 19 nt, Artificial Sequence
  Description of Artificial Sequence: Synthetic oligonucleotide
agcuuaggaaaauauucgg

SEQ ID NO: 975108 - RNA, 19 nt, Artificial Sequence
  Description of Artificial Sequence: Synthetic oligonucleotide
gugaauauuucuaagcacc

SEQ ID NO: 975109 - RNA, 19 nt, Artificial Sequence
  Description of Artificial Sequence: Synthetic oligonucleotide
uuuaaggguguguugaggu

SEQ ID NO: 975110 - RNA, 19 nt, Artificial Sequence
  Description of Artificial Sequence: Synthetic oligonucleotide
agaagagcaaacuggggag

SEQ ID NO: 975111 - RNA, 19 nt, Artificial Sequence
  Description of Artificial Sequence: Synthetic oligonucleotide
aaaugacacaagaaugggg

SEQ ID NO: 975112 - RNA, 19 nt, Artificial Sequence
  Description of Artificial Sequence: Synthetic oligonucleotide
acgguaauaaaugagcaag

SEQ ID NO: 975113 - RNA, 19 nt, Artificial Sequence
  Description of Artificial Sequence: Synthetic oligonucleotide
gucgcuguuauauucgagg

SEQ ID NO: 975114 - RNA, 19 nt, Artificial Sequence
  Description of Artificial Sequence: Synthetic oligonucleotide
agcauucacccucagacag

SEQ ID NO: 975115 - RNA, 19 nt, Artificial Sequence
  Description of Artificial Sequence: Synthetic oligonucleotide
aaaagagcaccgaccaggc

SEQ ID NO: 975116 - RNA, 19 nt, Artificial Sequence
  Description of Artificial Sequence: Synthetic oligonucleotide
uaaacccgaacauauauua

SEQ ID NO: 975117 - RNA, 19 nt, Artificial Sequence
  Description of Artificial Sequence: Synthetic oligonucleotide
uguauuucucacaugcaaa

SEQ ID NO: 975118 - RNA, 19 nt, Artificial Sequence
  Description of Artificial Sequence: Synthetic oligonucleotide
caaagcacaccauacaguc

SEQ ID NO: 975119 - RNA, 19 nt, Artificial Sequence
  Description of Artificial Sequence: Synthetic oligonucleotide
aguucuuaccucuccacag

SEQ ID NO: 975120 - RNA, 19 nt, Artificial Sequence
  Description of Artificial Sequence: Synthetic oligonucleotide
aacauaaacccgaacauau

SEQ ID NO: 975121 - RNA, 19 nt, Artificial Sequence
  Description of Artificial Sequence: Synthetic oligonucleotide
aaauguccaggguggcacc

SEQ ID NO: 975122 - RNA, 19 nt, Artificial Sequence
  Description of Artificial Sequence: Synthetic oligonucleotide
auucggauggcuugcgugg

SEQ ID NO: 975123 - RNA, 19 nt, Artificial Sequence
  Description of Artificial Sequence: Synthetic oligonucleotide
uacauuuauacgguaauaa

SEQ ID NO: 975124 - RNA, 19 nt, Artificial Sequence
  Description of Artificial Sequence: Synthetic oligonucleotide
uugcgugaggcucuuauca

SEQ ID NO: 975125 - RNA, 19 nt, Artificial Sequence
  Description of Artificial Sequence: Synthetic oligonucleotide
uauuucuaagcaccuugcc

SEQ ID NO: 975126 - RNA, 19 nt, Artificial Sequence
  Description of Artificial Sequence: Synthetic oligonucleotide
auauuucuaagcaccuugc

SEQ ID NO: 975127 - RNA, 19 nt, Artificial Sequence
  Description of Artificial Sequence: Synthetic oligonucleotide
ugauguauguguuggucug

SEQ ID NO: 975128 - RNA, 19 nt, Artificial Sequence
  Description of Artificial Sequence: Synthetic oligonucleotide
uuuccagaugcuaccaucu

SEQ ID NO: 975129 - RNA, 19 nt, Artificial Sequence
  Description of Artificial Sequence: Synthetic oligonucleotide
auauccuuuucauauaaua

SEQ ID NO: 975130 - RNA, 19 nt, Artificial Sequence
  Description of Artificial Sequence: Synthetic oligonucleotide
aaaaccgggucgcgguccc

SEQ ID NO: 975131 - RNA, 19 nt, Artificial Sequence
  Description of Artificial Sequence: Synthetic oligonucleotide
ucauauuagcccagguucu

SEQ ID NO: 975132 - RNA, 19 nt, Artificial Sequence
  Description of Artificial Sequence: Synthetic oligonucleotide
ucucaaacuaucgaggguc

SEQ ID NO: 975133 - RNA, 19 nt, Artificial Sequence
  Description of Artificial Sequence: Synthetic oligonucleotide
cacaagaauggggagaagg

SEQ ID NO: 975134 - RNA, 19 nt, Artificial Sequence
  Description of Artificial Sequence: Synthetic oligonucleotide
agggaaugaaauccaaucu

SEQ ID NO: 975135 - RNA, 19 nt, Artificial Sequence
  Description of Artificial Sequence: Synthetic oligonucleotide
uuucauauuagcccagguu

SEQ ID NO: 975136 - RNA, 19 nt, Artificial Sequence
  Description of Artificial Sequence: Synthetic oligonucleotide
guuauauucgaggaucuug

SEQ ID NO: 975137 - RNA, 19 nt, Artificial Sequence
  Description of Artificial Sequence: Synthetic oligonucleotide
aacuaaagccacgaggccu

SEQ ID NO: 975138 - RNA, 19 nt, Artificial Sequence
  Description of Artificial Sequence: Synthetic oligonucleotide
aaagcacaccauacagucc

SEQ ID NO: 975139 - RNA, 19 nt, Artificial Sequence
  Description of Artificial Sequence: Synthetic oligonucleotide
agaugcguacugcacacuc

SEQ ID NO: 975140 - RNA, 19 nt, Artificial Sequence
  Description of Artificial Sequence: Synthetic oligonucleotide
uuguaacucuaguaaaacu

SEQ ID NO: 975141 - RNA, 19 nt, Artificial Sequence
  Description of Artificial Sequence: Synthetic oligonucleotide
uauucggauggcuugcgug

SEQ ID NO: 975142 - RNA, 19 nt, Artificial Sequence
  Description of Artificial Sequence: Synthetic oligonucleotide
uuccuagggaaggugaagg

SEQ ID NO: 975143 - RNA, 19 nt, Artificial Sequence
  Description of Artificial Sequence: Synthetic oligonucleotide
ugaaugcguuugauggucg

SEQ ID NO: 975144 - RNA, 19 nt, Artificial Sequence
  Description of Artificial Sequence: Synthetic oligonucleotide
agauuuaaggguguguuga

SEQ ID NO: 975145 - RNA, 19 nt, Artificial Sequence
  Description of Artificial Sequence: Synthetic oligonucleotide
cagggaaugaaauccaauc

SEQ ID NO: 975146 - RNA, 19 nt, Artificial Sequence
  Description of Artificial Sequence: Synthetic oligonucleotide
uaacucuaguaaaacuuac

SEQ ID NO: 975147 - RNA, 19 nt, Artificial Sequence
  Description of Artificial Sequence: Synthetic oligonucleotide
aaacuaucgaggguccuag

SEQ ID NO: 975148 - RNA, 19 nt, Artificial Sequence
  Description of Artificial Sequence: Synthetic oligonucleotide
uucuuaccucuccacagag

SEQ ID NO: 975149 - RNA, 19 nt, Artificial Sequence
  Description of Artificial Sequence: Synthetic oligonucleotide
ucuagucucuagauggggu

SEQ ID NO: 975150 - RNA, 19 nt, Artificial Sequence
  Description of Artificial Sequence: Synthetic oligonucleotide
cagagguucugaaaguggc

SEQ ID NO: 975151 - RNA, 19 nt, Artificial Sequence
  Description of Artificial Sequence: Synthetic oligonucleotide
acauuuauacgguaauaaa

SEQ ID NO: 975152 - RNA, 19 nt, Artificial Sequence
  Description of Artificial Sequence: Synthetic oligonucleotide
ugcucaaacuaaagccacg

SEQ ID NO: 975153 - RNA, 19 nt, Artificial Sequence
  Description of Artificial Sequence: Synthetic oligonucleotide
uuuuaaggaucacuuuauc

SEQ ID NO: 975154 - RNA, 19 nt, Artificial Sequence
  Description of Artificial Sequence: Synthetic oligonucleotide
aauauucggauggcuugcg

SEQ ID NO: 975155 - RNA, 19 nt, Artificial Sequence
  Description of Artificial Sequence: Synthetic oligonucleotide
uaucgaggguccuagggca

SEQ ID NO: 975156 - RNA, 19 nt, Artificial Sequence
  Description of Artificial Sequence: Synthetic oligonucleotide
uucugaaaguggcugcccc

SEQ ID NO: 975157 - RNA, 19 nt, Artificial Sequence
  Description of Artificial Sequence: Synthetic oligonucleotide
ucuuaccucuccacagagg

SEQ ID NO: 975158 - RNA, 19 nt, Artificial Sequence
  Description of Artificial Sequence: Synthetic oligonucleotide
gauggguuugggcucuagg

SEQ ID NO: 975159 - RNA, 19 nt, Artificial Sequence
  Description of Artificial Sequence: Synthetic oligonucleotide
agugaugauguauguguug

SEQ ID NO: 975160 - RNA, 19 nt, Artificial Sequence
  Description of Artificial Sequence: Synthetic oligonucleotide
ucgcucucaaagcacacca

SEQ ID NO: 975161 - RNA, 19 nt, Artificial Sequence
  Description of Artificial Sequence: Synthetic oligonucleotide
aacaggauguccugauggu

SEQ ID NO: 975162 - RNA, 19 nt, Artificial Sequence
  Description of Artificial Sequence: Synthetic oligonucleotide
ucacuucgcucucaaagca

SEQ ID NO: 975163 - RNA, 19 nt, Artificial Sequence
  Description of Artificial Sequence: Synthetic oligonucleotide
uccguccucucgcagaugc

SEQ ID NO: 975164 - RNA, 19 nt, Artificial Sequence
  Description of Artificial Sequence: Synthetic oligonucleotide
cuaucgaggguccuagggc

SEQ ID NO: 975165 - RNA, 19 nt, Artificial Sequence
  Description of Artificial Sequence: Synthetic oligonucleotide
acccuccaagcauucaccc

SEQ ID NO: 975166 - RNA, 19 nt, Artificial Sequence
  Description of Artificial Sequence: Synthetic oligonucleotide
uaugucaaucacuggugca

SEQ ID NO: 975167 - RNA, 19 nt, Artificial Sequence
  Description of Artificial Sequence: Synthetic oligonucleotide
auacagucccgcccgcugc

SEQ ID NO: 975168 - RNA, 19 nt, Artificial Sequence
  Description of Artificial Sequence: Synthetic oligonucleotide
uguguugagguaucagagu

SEQ ID NO: 975169 - RNA, 19 nt, Artificial Sequence
  Description of Artificial Sequence: Synthetic oligonucleotide
auaaaugagcaaggguggg

SEQ ID NO: 975170 - RNA, 19 nt, Artificial Sequence
  Description of Artificial Sequence: Synthetic oligonucleotide
uuaucauggagaagugcuc

SEQ ID NO: 975171 - RNA, 19 nt, Artificial Sequence
  Description of Artificial Sequence: Synthetic oligonucleotide
cuuaucauggagaagugcu

SEQ ID NO: 975172 - RNA, 19 nt, Artificial Sequence
  Description of Artificial Sequence: Synthetic oligonucleotide
uuuuccaaaaggcccuaaa

SEQ ID NO: 975173 - RNA, 19 nt, Artificial Sequence
  Description of Artificial Sequence: Synthetic oligonucleotide
aaugcuugcucaaacuaaa

SEQ ID NO: 975174 - RNA, 19 nt, Artificial Sequence
  Description of Artificial Sequence: Synthetic oligonucleotide
ucgcuguuauauucgagga

SEQ ID NO: 975175 - RNA, 19 nt, Artificial Sequence
  Description of Artificial Sequence: Synthetic oligonucleotide
uguagucacugauuuucca

SEQ ID NO: 975176 - RNA, 19 nt, Artificial Sequence
  Description of Artificial Sequence: Synthetic oligonucleotide
gauggucgcucccuugggg

SEQ ID NO: 975177 - RNA, 19 nt, Artificial Sequence
  Description of Artificial Sequence: Synthetic oligonucleotide
ugcaaugcuugcucaaacu

SEQ ID NO: 975178 - RNA, 19 nt, Artificial Sequence
  Description of Artificial Sequence: Synthetic oligonucleotide
gaugauguauguguugguc

SEQ ID NO: 975179 - RNA, 19 nt, Artificial Sequence
  Description of Artificial Sequence: Synthetic oligonucleotide
ucgaggaucuugccggugc

SEQ ID NO: 975180 - RNA, 19 nt, Artificial Sequence
  Description of Artificial Sequence: Synthetic oligonucleotide
uacgguaauaaaugagcaa

SEQ ID NO: 975181 - RNA, 19 nt, Artificial Sequence
  Description of Artificial Sequence: Synthetic oligonucleotide
gucucgaucucuucccgcg

SEQ ID NO: 975182 - RNA, 19 nt, Artificial Sequence
  Description of Artificial Sequence: Synthetic oligonucleotide
cuagucucuagauggggug

SEQ ID NO: 975183 - RNA, 19 nt, Artificial Sequence
  Description of Artificial Sequence: Synthetic oligonucleotide
aacucuaguaaaacuuaca

SEQ ID NO: 975184 - RNA, 19 nt, Artificial Sequence
  Description of Artificial Sequence: Synthetic oligonucleotide
guguguugagguaucagag

SEQ ID NO: 975185 - RNA, 19 nt, Artificial Sequence
  Description of Artificial Sequence: Synthetic oligonucleotide
aaccagagguucugaaagu

SEQ ID NO: 975186 - RNA, 19 nt, Artificial Sequence
  Description of Artificial Sequence: Synthetic oligonucleotide
guuguaacucuaguaaaac

SEQ ID NO: 975187 - RNA, 19 nt, Artificial Sequence
  Description of Artificial Sequence: Synthetic oligonucleotide
aagccacgaggccucuccc

SEQ ID NO: 975188 - RNA, 19 nt, Artificial Sequence
  Description of Artificial Sequence: Synthetic oligonucleotide
uuuuccuagggaaggugaa

SEQ ID NO: 975189 - RNA, 19 nt, Artificial Sequence
  Description of Artificial Sequence: Synthetic oligonucleotide
aggaggaggaggaggaggc

SEQ ID NO: 975190 - RNA, 19 nt, Artificial Sequence
  Description of Artificial Sequence: Synthetic oligonucleotide
uguguuggucugcugcuga

SEQ ID NO: 975191 - RNA, 19 nt, Artificial Sequence
  Description of Artificial Sequence: Synthetic oligonucleotide
agguaucagaguuguaacu

SEQ ID NO: 975192 - RNA, 19 nt, Artificial Sequence
  Description of Artificial Sequence: Synthetic oligonucleotide
ggagcuuaggaaaauauuc

SEQ ID NO: 975193 - RNA, 19 nt, Artificial Sequence
  Description of Artificial Sequence: Synthetic oligonucleotide
aacuaucgaggguccuagg

SEQ ID NO: 975194 - RNA, 19 nt, Artificial Sequence
  Description of Artificial Sequence: Synthetic oligonucleotide
guagggcacucguacacgg

SEQ ID NO: 975195 - RNA, 19 nt, Artificial Sequence
  Description of Artificial Sequence: Synthetic oligonucleotide
ugacacaagaauggggaga

SEQ ID NO: 975196 - RNA, 19 nt, Artificial Sequence
  Description of Artificial Sequence: Synthetic oligonucleotide
uaccucuagucucuagaug

SEQ ID NO: 975197 - RNA, 19 nt, Artificial Sequence
  Description of Artificial Sequence: Synthetic oligonucleotide
acuaaagccacgaggccuc

SEQ ID NO: 975198 - RNA, 19 nt, Artificial Sequence
  Description of Artificial Sequence: Synthetic oligonucleotide
uguugcgugaggcucuuau

SEQ ID NO: 975199 - RNA, 19 nt, Artificial Sequence
  Description of Artificial Sequence: Synthetic oligonucleotide
cucaaacuaucgagggucc

SEQ ID NO: 975200 - RNA, 19 nt, Artificial Sequence
  Description of Artificial Sequence: Synthetic oligonucleotide
agaaaagagcaccgaccag

SEQ ID NO: 975201 - RNA, 19 nt, Artificial Sequence
  Description of Artificial Sequence: Synthetic oligonucleotide
caccauacagucccgcccg

SEQ ID NO: 975202 - RNA, 19 nt, Artificial Sequence
  Description of Artificial Sequence: Synthetic oligonucleotide
agcgagugaauauuucuaa

SEQ ID NO: 975203 - RNA, 19 nt, Artificial Sequence
  Description of Artificial Sequence: Synthetic oligonucleotide
ugcgucucgaucucuuccc

SEQ ID NO: 975204 - RNA, 19 nt, Artificial Sequence
  Description of Artificial Sequence: Synthetic oligonucleotide
aaaagaacauaaacccgaa

SEQ ID NO: 975205 - RNA, 19 nt, Artificial Sequence
  Description of Artificial Sequence: Synthetic oligonucleotide
auacgguaauaaaugagca

SEQ ID NO: 975206 - RNA, 19 nt, Artificial Sequence
  Description of Artificial Sequence: Synthetic oligonucleotide
aagaggaggaggaggagga

SEQ ID NO: 975207 - RNA, 19 nt, Artificial Sequence
  Description of Artificial Sequence: Synthetic oligonucleotide
gaggaggaggaggaggagg

SEQ ID NO: 975208 - RNA, 19 nt, Artificial Sequence
  Description of Artificial Sequence: Synthetic oligonucleotide
ccaucucaaacuaucgagg

SEQ ID NO: 975209 - RNA, 19 nt, Artificial Sequence
  Description of Artificial Sequence: Synthetic oligonucleotide
cagacuuguugcgugaggc

SEQ ID NO: 975210 - RNA, 19 nt, Artificial Sequence
  Description of Artificial Sequence: Synthetic oligonucleotide
acgaagugguaugucaauc

SEQ ID NO: 975211 - RNA, 19 nt, Artificial Sequence
  Description of Artificial Sequence: Synthetic oligonucleotide
guggguaaggaguucuuac

SEQ ID NO: 975212 - RNA, 19 nt, Artificial Sequence
  Description of Artificial Sequence: Synthetic oligonucleotide
aaaaggguaaccagagguu

SEQ ID NO: 975213 - RNA, 19 nt, Artificial Sequence
  Description of Artificial Sequence: Synthetic oligonucleotide
uggggugagaagagcaaac

SEQ ID NO: 975214 - RNA, 19 nt, Artificial Sequence
  Description of Artificial Sequence: Synthetic oligonucleotide
gcacguuccacguugcccg

SEQ ID NO: 975215 - RNA, 19 nt, Artificial Sequence
  Description of Artificial Sequence: Synthetic oligonucleotide
ugcgaugugcgucucgauc

SEQ ID NO: 975216 - RNA, 19 nt, Artificial Sequence
  Description of Artificial Sequence: Synthetic oligonucleotide
uaaaugagcaaggguggga

SEQ ID NO: 975217 - RNA, 19 nt, Artificial Sequence
  Description of Artificial Sequence: Synthetic oligonucleotide
uugcguggcggugaugugg

SEQ ID NO: 975218 - RNA, 19 nt, Artificial Sequence
  Description of Artificial Sequence: Synthetic oligonucleotide
  modified_base (14)..(14): a, c, u, g, unknown or other
gagguagcgggccngucca

SEQ ID NO: 975219 - RNA, 19 nt, Artificial Sequence
  Description of Artificial Sequence: Synthetic oligonucleotide
uccauccaucccaggaugc

SEQ ID NO: 975220 - RNA, 19 nt, Artificial Sequence
  Description of Artificial Sequence: Synthetic oligonucleotide
gucacgaagugguauguca

SEQ ID NO: 975221 - RNA, 19 nt, Artificial Sequence
  Description of Artificial Sequence: Synthetic oligonucleotide
auccauccaucccaggaug

SEQ ID NO: 975222 - RNA, 19 nt, Artificial Sequence
  Description of Artificial Sequence: Synthetic oligonucleotide
cacgguagggcacucguac

SEQ ID NO: 975223 - RNA, 19 nt, Artificial Sequence
  Description of Artificial Sequence: Synthetic oligonucleotide
gaaugcguuugauggucgc

SEQ ID NO: 975224 - RNA, 19 nt, Artificial Sequence
  Description of Artificial Sequence: Synthetic oligonucleotide
aagugguaugucaaucacu

SEQ ID NO: 975225 - RNA, 19 nt, Artificial Sequence
  Description of Artificial Sequence: Synthetic oligonucleotide
aucucaaacuaucgagggu

SEQ ID NO: 975226 - RNA, 19 nt, Artificial Sequence
  Description of Artificial Sequence: Synthetic oligonucleotide
uaaggguguguugagguau

SEQ ID NO: 975227 - RNA, 19 nt, Artificial Sequence
  Description of Artificial Sequence: Synthetic oligonucleotide
gaguucuuaccucuccaca

SEQ ID NO: 975228 - RNA, 19 nt, Artificial Sequence
  Description of Artificial Sequence: Synthetic oligonucleotide
cucaaacuaaagccacgag

SEQ ID NO: 975229 - RNA, 19 nt, Artificial Sequence
  Description of Artificial Sequence: Synthetic oligonucleotide
agggucacgaagugguaug

SEQ ID NO: 975230 - RNA, 19 nt, Artificial Sequence
  Description of Artificial Sequence: Synthetic oligonucleotide
ugcguggcggugauguggc

SEQ ID NO: 975231 - RNA, 19 nt, Artificial Sequence
  Description of Artificial Sequence: Synthetic oligonucleotide
aaaaggcccuaaaugucca

SEQ ID NO: 975232 - RNA, 19 nt, Artificial Sequence
  Description of Artificial Sequence: Synthetic oligonucleotide
aaugcguuugauggucgcu

SEQ ID NO: 975233 - RNA, 19 nt, Artificial Sequence
  Description of Artificial Sequence: Synthetic oligonucleotide
aguuguaacucuaguaaaa

SEQ ID NO: 975234 - RNA, 19 nt, Artificial Sequence
  Description of Artificial Sequence: Synthetic oligonucleotide
gaggcucuuaucauggaga

SEQ ID NO: 975235 - RNA, 19 nt, Artificial Sequence
  Description of Artificial Sequence: Synthetic oligonucleotide
ggcacucguacacggaugg

SEQ ID NO: 975236 - RNA, 19 nt, Artificial Sequence
  Description of Artificial Sequence: Synthetic oligonucleotide
guagucacugauuuuccaa

SEQ ID NO: 975237 - RNA, 19 nt, Artificial Sequence
  Description of Artificial Sequence: Synthetic oligonucleotide
ugcguuugauggucgcucc

SEQ ID NO: 975238 - RNA, 19 nt, Artificial Sequence
  Description of Artificial Sequence: Synthetic oligonucleotide
cccuaaauguccagggugg

SEQ ID NO: 975239 - RNA, 19 nt, Artificial Sequence
  Description of Artificial Sequence: Synthetic oligonucleotide
  modified_base (11)..(11): a, c, u, g, unknown or other
guagcgggccnguccagcg

SEQ ID NO: 975240 - RNA, 19 nt, Artificial Sequence
  Description of Artificial Sequence: Synthetic oligonucleotide
gcaaaugacauuucuccca

SEQ ID NO: 975241 - RNA, 19 nt, Artificial Sequence
  Description of Artificial Sequence: Synthetic oligonucleotide
uucuaagcaccuugcccug

SEQ ID NO: 975242 - RNA, 19 nt, Artificial Sequence
  Description of Artificial Sequence: Synthetic oligonucleotide
auccaaucuacuggugggg

SEQ ID NO: 975243 - RNA, 19 nt, Artificial Sequence
  Description of Artificial Sequence: Synthetic oligonucleotide
uccugauuggauugccagu

SEQ ID NO: 975244 - RNA, 19 nt, Artificial Sequence
  Description of Artificial Sequence: Synthetic oligonucleotide
gcuguuauauucgaggauc

SEQ ID NO: 975245 - RNA, 19 nt, Artificial Sequence
  Description of Artificial Sequence: Synthetic oligonucleotide
gauguauguguuggucugc

SEQ ID NO: 975246 - RNA, 19 nt, Artificial Sequence
  Description of Artificial Sequence: Synthetic oligonucleotide
cugauuggauugccagugg

SEQ ID NO: 975247 - RNA, 19 nt, Artificial Sequence
  Description of Artificial Sequence: Synthetic oligonucleotide
cuugccggugcgcacugcg

SEQ ID NO: 975248 - RNA, 19 nt, Artificial Sequence
  Description of Artificial Sequence: Synthetic oligonucleotide
uaaggaguucuuaccucuc

SEQ ID NO: 975249 - RNA, 19 nt, Artificial Sequence
  Description of Artificial Sequence: Synthetic oligonucleotide
gguaucagaguuguaacuc

SEQ ID NO: 975250 - RNA, 19 nt, Artificial Sequence
  Description of Artificial Sequence: Synthetic oligonucleotide
gaugcguacugcacacucc

SEQ ID NO: 975251 - RNA, 19 nt, Artificial Sequence
  Description of Artificial Sequence: Synthetic oligonucleotide
ucucuucccgcgcacguuc

SEQ ID NO: 975252 - RNA, 19 nt, Artificial Sequence
  Description of Artificial Sequence: Synthetic oligonucleotide
guaaggaguucuuaccucu

SEQ ID NO: 975253 - RNA, 19 nt, Artificial Sequence
  Description of Artificial Sequence: Synthetic oligonucleotide
cugaaugcguuugaugguc

SEQ ID NO: 975254 - RNA, 19 nt, Artificial Sequence
  Description of Artificial Sequence: Synthetic oligonucleotide
agccccuaguguaacaguc

SEQ ID NO: 975255 - RNA, 19 nt, Artificial Sequence
  Description of Artificial Sequence: Synthetic oligonucleotide
guaaccagagguucugaaa

SEQ ID NO: 975256 - RNA, 19 nt, Artificial Sequence
  Description of Artificial Sequence: Synthetic oligonucleotide
aaggggaaauucucccuuu

SEQ ID NO: 975257 - RNA, 19 nt, Artificial Sequence
  Description of Artificial Sequence: Synthetic oligonucleotide
aaagagcaccgaccaggca

SEQ ID NO: 975258 - RNA, 19 nt, Artificial Sequence
  Description of Artificial Sequence: Synthetic oligonucleotide
cauaaacccgaacauauau

SEQ ID NO: 975259 - RNA, 19 nt, Artificial Sequence
  Description of Artificial Sequence: Synthetic oligonucleotide
gaacauaaacccgaacaua

SEQ ID NO: 975260 - RNA, 19 nt, Artificial Sequence
  Description of Artificial Sequence: Synthetic oligonucleotide
guaacucuaguaaaacuua

SEQ ID NO: 975261 - RNA, 19 nt, Artificial Sequence
  Description of Artificial Sequence: Synthetic oligonucleotide
uucgcucucaaagcacacc

SEQ ID NO: 975262 - RNA, 19 nt, Artificial Sequence
  Description of Artificial Sequence: Synthetic oligonucleotide
ucggauggcuugcguggcg

SEQ ID NO: 975263 - RNA, 19 nt, Artificial Sequence
  Description of Artificial Sequence: Synthetic oligonucleotide
ucucgaucucuucccgcgc

SEQ ID NO: 975264 - RNA, 19 nt, Artificial Sequence
  Description of Artificial Sequence: Synthetic oligonucleotide
aaacccgaacauauauuaa

SEQ ID NO: 975265 - RNA, 19 nt, Artificial Sequence
  Description of Artificial Sequence: Synthetic oligonucleotide
aggcucuuaucauggagaa

SEQ ID NO: 975266 - RNA, 19 nt, Artificial Sequence
  Description of Artificial Sequence: Synthetic oligonucleotide
agacuuguugcgugaggcu

SEQ ID NO: 975267 - RNA, 19 nt, Artificial Sequence
  Description of Artificial Sequence: Synthetic oligonucleotide
guuuuccuagggaagguga

SEQ ID NO: 975268 - RNA, 19 nt, Artificial Sequence
  Description of Artificial Sequence: Synthetic oligonucleotide
uucccgcgcacguuccacg

SEQ ID NO: 975269 - RNA, 19 nt, Artificial Sequence
  Description of Artificial Sequence: Synthetic oligonucleotide
gcgagugaauauuucuaag

SEQ ID NO: 975270 - RNA, 19 nt, Artificial Sequence
  Description of Artificial Sequence: Synthetic oligonucleotide
cccuacauauauucuaaac

SEQ ID NO: 975271 - RNA, 19 nt, Artificial Sequence
  Description of Artificial Sequence: Synthetic oligonucleotide
cagggguaccucuagucuc

SEQ ID NO: 975272 - RNA, 19 nt, Artificial Sequence
  Description of Artificial Sequence: Synthetic oligonucleotide
accauacagucccgcccgc

SEQ ID NO: 975273 - RNA, 19 nt, Artificial Sequence
  Description of Artificial Sequence: Synthetic oligonucleotide
cauacagucccgcccgcug

SEQ ID NO: 975274 - RNA, 19 nt, Artificial Sequence
  Description of Artificial Sequence: Synthetic oligonucleotide
acucguacacggaugguca

SEQ ID NO: 975275 - RNA, 19 nt, Artificial Sequence
  Description of Artificial Sequence: Synthetic oligonucleotide
gcccuaaauguccagggug

SEQ ID NO: 975276 - RNA, 19 nt, Artificial Sequence
  Description of Artificial Sequence: Synthetic oligonucleotide
gugcgucucgaucucuucc

SEQ ID NO: 975277 - RNA, 19 nt, Artificial Sequence
  Description of Artificial Sequence: Synthetic oligonucleotide
ucgcagaugcguacugcac

SEQ ID NO: 975278 - RNA, 19 nt, Artificial Sequence
  Description of Artificial Sequence: Synthetic oligonucleotide
uacagucccgcccgcugcc

SEQ ID NO: 975279 - RNA, 19 nt, Artificial Sequence
  Description of Artificial Sequence: Synthetic oligonucleotide
ccagagguucugaaagugg

SEQ ID NO: 975280 - RNA, 19 nt, Artificial Sequence
  Description of Artificial Sequence: Synthetic oligonucleotide
accgaccaggcaucugagg

SEQ ID NO: 975281 - RNA, 19 nt, Artificial Sequence
  Description of Artificial Sequence: Synthetic oligonucleotide
auauucggauggcuugcgu

SEQ ID NO: 975282 - RNA, 19 nt, Artificial Sequence
  Description of Artificial Sequence: Synthetic oligonucleotide
  modified_base (4)..(4): a, c, u, g, unknown or other
gccnguccagcgcagcucg

SEQ ID NO: 975283 - RNA, 19 nt, Artificial Sequence
  Description of Artificial Sequence: Synthetic oligonucleotide
uggauccguccucucgcag

SEQ ID NO: 975284 - RNA, 19 nt, Artificial Sequence
  Description of Artificial Sequence: Synthetic oligonucleotide
ucccuacauauauucuaaa

SEQ ID NO: 975285 - RNA, 19 nt, Artificial Sequence
  Description of Artificial Sequence: Synthetic oligonucleotide
gguaaggaguucuuaccuc

SEQ ID NO: 975286 - RNA, 19 nt, Artificial Sequence
  Description of Artificial Sequence: Synthetic oligonucleotide
cguacugcacacuccaugc

SEQ ID NO: 975287 - RNA, 19 nt, Artificial Sequence
  Description of Artificial Sequence: Synthetic oligonucleotide
auaaacccgaacauauauu

SEQ ID NO: 975288 - RNA, 19 nt, Artificial Sequence
  Description of Artificial Sequence: Synthetic oligonucleotide
ugcgugaggcucuuaucau

SEQ ID NO: 975289 - RNA, 19 nt, Artificial Sequence
  Description of Artificial Sequence: Synthetic oligonucleotide
ugagcaagggugggauuug

SEQ ID NO: 975290 - RNA, 19 nt, Artificial Sequence
  Description of Artificial Sequence: Synthetic oligonucleotide
cgguaauaaaugagcaagg

SEQ ID NO: 975291 - RNA, 19 nt, Artificial Sequence
  Description of Artificial Sequence: Synthetic oligonucleotide
agggcacucguacacggau

SEQ ID NO: 975292 - RNA, 19 nt, Artificial Sequence
  Description of Artificial Sequence: Synthetic oligonucleotide
ggaucuguggagccccuag

SEQ ID NO: 975293 - RNA, 19 nt, Artificial Sequence
  Description of Artificial Sequence: Synthetic oligonucleotide
guugagguaucagaguugu

SEQ ID NO: 975294 - RNA, 19 nt, Artificial Sequence
  Description of Artificial Sequence: Synthetic oligonucleotide
aaccgggucgcggucccgg

SEQ ID NO: 975295 - RNA, 19 nt, Artificial Sequence
  Description of Artificial Sequence: Synthetic oligonucleotide
uucucucccuacauauauu

SEQ ID NO: 975296 - RNA, 19 nt, Artificial Sequence
  Description of Artificial Sequence: Synthetic oligonucleotide
ucguacacggauggucacc

SEQ ID NO: 975297 - RNA, 19 nt, Artificial Sequence
  Description of Artificial Sequence: Synthetic oligonucleotide
cacucguacacggaugguc

SEQ ID NO: 975298 - RNA, 19 nt, Artificial Sequence
  Description of Artificial Sequence: Synthetic oligonucleotide
ucaaacuaucgaggguccu

SEQ ID NO: 975299 - RNA, 19 nt, Artificial Sequence
  Description of Artificial Sequence: Synthetic oligonucleotide
acugcgaugugcgucucga

SEQ ID NO: 975300 - RNA, 19 nt, Artificial Sequence
  Description of Artificial Sequence: Synthetic oligonucleotide
acccgaacauauauuaaaa

SEQ ID NO: 975301 - RNA, 19 nt, Artificial Sequence
  Description of Artificial Sequence: Synthetic oligonucleotide
uccaagcauucacccucag

SEQ ID NO: 975302 - RNA, 19 nt, Artificial Sequence
  Description of Artificial Sequence: Synthetic oligonucleotide
aaggcggcgccagacuugu

SEQ ID NO: 975303 - RNA, 19 nt, Artificial Sequence
  Description of Artificial Sequence: Synthetic oligonucleotide
aagucgccgucgcuguuau

SEQ ID NO: 975304 - RNA, 19 nt, Artificial Sequence
  Description of Artificial Sequence: Synthetic oligonucleotide
cucgcagaugcguacugca

SEQ ID NO: 975305 - RNA, 19 nt, Artificial Sequence
  Description of Artificial Sequence: Synthetic oligonucleotide
ucgaucucuucccgcgcac

SEQ ID NO: 975306 - RNA, 19 nt, Artificial Sequence
  Description of Artificial Sequence: Synthetic oligonucleotide
uccacucacccaccuugac

SEQ ID NO: 975307 - RNA, 19 nt, Artificial Sequence
  Description of Artificial Sequence: Synthetic oligonucleotide
aggguaaccagagguucug

SEQ ID NO: 975308 - RNA, 19 nt, Artificial Sequence
  Description of Artificial Sequence: Synthetic oligonucleotide
gggaaagaacaggaugucc

SEQ ID NO: 975309 - RNA, 19 nt, Artificial Sequence
  Description of Artificial Sequence: Synthetic oligonucleotide
guugcgugaggcucuuauc

SEQ ID NO: 975310 - RNA, 19 nt, Artificial Sequence
  Description of Artificial Sequence: Synthetic oligonucleotide
agggagcuuaggaaaauau

SEQ ID NO: 975311 - RNA, 19 nt, Artificial Sequence
  Description of Artificial Sequence: Synthetic oligonucleotide
acaccaaaggcggcgccag

SEQ ID NO: 975312 - RNA, 19 nt, Artificial Sequence
  Description of Artificial Sequence: Synthetic oligonucleotide
agagauggguuugggcucu

SEQ ID NO: 975313 - RNA, 19 nt, Artificial Sequence
  Description of Artificial Sequence: Synthetic oligonucleotide
auucgaggaucuugccggu

SEQ ID NO: 975314 - RNA, 19 nt, Artificial Sequence
  Description of Artificial Sequence: Synthetic oligonucleotide
uucggauggcuugcguggc

SEQ ID NO: 975315 - RNA, 19 nt, Artificial Sequence
  Description of Artificial Sequence: Synthetic oligonucleotide
  modified_base (9)..(9): a, c, u, g, unknown or other
agcgggccnguccagcgca

SEQ ID NO: 975316 - RNA, 19 nt, Artificial Sequence
  Description of Artificial Sequence: Synthetic oligonucleotide
agaauggggagaagggaaa

SEQ ID NO: 975317 - RNA, 19 nt, Artificial Sequence
  Description of Artificial Sequence: Synthetic oligonucleotide
guucugaaaguggcugccc

SEQ ID NO: 975318 - RNA, 19 nt, Artificial Sequence
  Description of Artificial Sequence: Synthetic oligonucleotide
cccuuuuccagaugcuacc

SEQ ID NO: 975319 - RNA, 19 nt, Artificial Sequence
  Description of Artificial Sequence: Synthetic oligonucleotide
cagugccuuggcugaagag

SEQ ID NO: 975320 - RNA, 19 nt, Artificial Sequence
  Description of Artificial Sequence: Synthetic oligonucleotide
cacggauggucaccuggcc

SEQ ID NO: 975321 - RNA, 19 nt, Artificial Sequence
  Description of Artificial Sequence: Synthetic oligonucleotide
acuuguugcgugaggcucu

SEQ ID NO: 975322 - RNA, 19 nt, Artificial Sequence
  Description of Artificial Sequence: Synthetic oligonucleotide
gguagggcacucguacacg

SEQ ID NO: 975323 - RNA, 19 nt, Artificial Sequence
  Description of Artificial Sequence: Synthetic oligonucleotide
gacagggagcuuaggaaaa

SEQ ID NO: 975324 - RNA, 19 nt, Artificial Sequence
  Description of Artificial Sequence: Synthetic oligonucleotide
ucaugccucccuuccccac

SEQ ID NO: 975325 - RNA, 19 nt, Artificial Sequence
  Description of Artificial Sequence: Synthetic oligonucleotide
ugccggugcgcacugcgau

SEQ ID NO: 975326 - RNA, 19 nt, Artificial Sequence
  Description of Artificial Sequence: Synthetic oligonucleotide
cagcgagugaauauuucua

SEQ ID NO: 975327 - RNA, 19 nt, Artificial Sequence
  Description of Artificial Sequence: Synthetic oligonucleotide
ggagccccuaguguaacag

SEQ ID NO: 975328 - RNA, 19 nt, Artificial Sequence
  Description of Artificial Sequence: Synthetic oligonucleotide
gcguacugcacacuccaug

SEQ ID NO: 975329 - RNA, 19 nt, Artificial Sequence
  Description of Artificial Sequence: Synthetic oligonucleotide
ggcggcgccagacuuguug

SEQ ID NO: 975330 - RNA, 19 nt, Artificial Sequence
  Description of Artificial Sequence: Synthetic oligonucleotide
cucuucccgcgcacguucc

SEQ ID NO: 975331 - RNA, 19 nt, Artificial Sequence
  Description of Artificial Sequence: Synthetic oligonucleotide
aggggaaauucucccuuuu

SEQ ID NO: 975332 - RNA, 19 nt, Artificial Sequence
  Description of Artificial Sequence: Synthetic oligonucleotide
uggagccccuaguguaaca

SEQ ID NO: 975333 - RNA, 19 nt, Artificial Sequence
  Description of Artificial Sequence: Synthetic oligonucleotide
  modified_base (2)..(2): a, c, u, g, unknown or other
cnguccagcgcagcucggg

SEQ ID NO: 975334 - RNA, 19 nt, Artificial Sequence
  Description of Artificial Sequence: Synthetic oligonucleotide
uugccggugcgcacugcga

SEQ ID NO: 975335 - RNA, 19 nt, Artificial Sequence
  Description of Artificial Sequence: Synthetic oligonucleotide
guacugcacacuccaugca

SEQ ID NO: 975336 - RNA, 19 nt, Artificial Sequence
  Description of Artificial Sequence: Synthetic oligonucleotide
cucucgcagaugcguacug

SEQ ID NO: 975337 - RNA, 19 nt, Artificial Sequence
  Description of Artificial Sequence: Synthetic oligonucleotide
ggcagggguaccucuaguc

SEQ ID NO: 975338 - RNA, 19 nt, Artificial Sequence
  Description of Artificial Sequence: Synthetic oligonucleotide
cacguuccacguugcccgg

SEQ ID NO: 975339 - RNA, 19 nt, Artificial Sequence
  Description of Artificial Sequence: Synthetic oligonucleotide
gcucaaacuaaagccacga

SEQ ID NO: 975340 - RNA, 19 nt, Artificial Sequence
  Description of Artificial Sequence: Synthetic oligonucleotide
agggguaccucuagucucu

SEQ ID NO: 975341 - RNA, 19 nt, Artificial Sequence
  Description of Artificial Sequence: Synthetic oligonucleotide
uucgaggaucuugccggug

SEQ ID NO: 975342 - RNA, 19 nt, Artificial Sequence
  Description of Artificial Sequence: Synthetic oligonucleotide
accgggucgcggucccggc

SEQ ID NO: 975343 - RNA, 19 nt, Artificial Sequence
  Description of Artificial Sequence: Synthetic oligonucleotide
agaggaggaggaggaggag

SEQ ID NO: 975344 - RNA, 19 nt, Artificial Sequence
  Description of Artificial Sequence: Synthetic oligonucleotide
auauuagcccagguucuuu

SEQ ID NO: 975345 - RNA, 19 nt, Artificial Sequence
  Description of Artificial Sequence: Synthetic oligonucleotide
gccgucgcuguuauauucg

SEQ ID NO: 975346 - RNA, 19 nt, Artificial Sequence
  Description of Artificial Sequence: Synthetic oligonucleotide
auggcuugcguggcgguga

SEQ ID NO: 975347 - RNA, 19 nt, Artificial Sequence
  Description of Artificial Sequence: Synthetic oligonucleotide
acauaaacccgaacauaua

SEQ ID NO: 975348 - RNA, 19 nt, Artificial Sequence
  Description of Artificial Sequence: Synthetic oligonucleotide
gcgugaggcucuuaucaug

SEQ ID NO: 975349 - RNA, 19 nt, Artificial Sequence
  Description of Artificial Sequence: Synthetic oligonucleotide
cuuuguggguaaggaguuc

SEQ ID NO: 975350 - RNA, 19 nt, Artificial Sequence
  Description of Artificial Sequence: Synthetic oligonucleotide
gaucucuucccgcgcacgu

SEQ ID NO: 975351 - RNA, 19 nt, Artificial Sequence
  Description of Artificial Sequence: Synthetic oligonucleotide
uugagguaucagaguugua

SEQ ID NO: 975352 - RNA, 19 nt, Artificial Sequence
  Description of Artificial Sequence: Synthetic oligonucleotide
ggugggauuuggaucugug

SEQ ID NO: 975353 - RNA, 19 nt, Artificial Sequence
  Description of Artificial Sequence: Synthetic oligonucleotide
cuugcguggcggugaugug

SEQ ID NO: 975354 - RNA, 19 nt, Artificial Sequence
  Description of Artificial Sequence: Synthetic oligonucleotide
ucccgcgcacguuccacgu

SEQ ID NO: 975355 - RNA, 19 nt, Artificial Sequence
  Description of Artificial Sequence: Synthetic oligonucleotide
ggauccguccucucgcaga

SEQ ID NO: 975356 - RNA, 19 nt, Artificial Sequence
  Description of Artificial Sequence: Synthetic oligonucleotide
cuccaagcauucacccuca

SEQ ID NO: 975357 - RNA, 19 nt, Artificial Sequence
  Description of Artificial Sequence: Synthetic oligonucleotide
aaaccgggucgcggucccg

SEQ ID NO: 975358 - RNA, 19 nt, Artificial Sequence
  Description of Artificial Sequence: Synthetic oligonucleotide
gauccguccucucgcagau

SEQ ID NO: 975359 - RNA, 19 nt, Artificial Sequence
  Description of Artificial Sequence: Synthetic oligonucleotide
ugcgcacugcgaugugcgu

SEQ ID NO: 975360 - RNA, 19 nt, Artificial Sequence
  Description of Artificial Sequence: Synthetic oligonucleotide
caaacuaucgaggguccua

SEQ ID NO: 975361 - RNA, 19 nt, Artificial Sequence
  Description of Artificial Sequence: Synthetic oligonucleotide
cacccugggcagugggccc

SEQ ID NO: 975362 - RNA, 19 nt, Artificial Sequence
  Description of Artificial Sequence: Synthetic oligonucleotide
ccagacuuguugcgugagg

SEQ ID NO: 975363 - RNA, 19 nt, Artificial Sequence
  Description of Artificial Sequence: Synthetic oligonucleotide
gcgucucgaucucuucccg

SEQ ID NO: 975364 - RNA, 19 nt, Artificial Sequence
  Description of Artificial Sequence: Synthetic oligonucleotide
cgaagugguaugucaauca

SEQ ID NO: 975365 - RNA, 19 nt, Artificial Sequence
  Description of Artificial Sequence: Synthetic oligonucleotide
agauggguuugggcucuag

SEQ ID NO: 975366 - RNA, 19 nt, Artificial Sequence
  Description of Artificial Sequence: Synthetic oligonucleotide
gaagucgccgucgcuguua

SEQ ID NO: 975367 - RNA, 19 nt, Artificial Sequence
  Description of Artificial Sequence: Synthetic oligonucleotide
gcucuagggucacgaagug

SEQ ID NO: 975368 - RNA, 19 nt, Artificial Sequence
  Description of Artificial Sequence: Synthetic oligonucleotide
gcggcgccagacuuguugc

SEQ ID NO: 975369 - RNA, 19 nt, Artificial Sequence
  Description of Artificial Sequence: Synthetic oligonucleotide
accccagcgagugaauauu

SEQ ID NO: 975370 - RNA, 19 nt, Artificial Sequence
  Description of Artificial Sequence: Synthetic oligonucleotide
gauguccugaugguggcuu

SEQ ID NO: 975371 - RNA, 19 nt, Artificial Sequence
  Description of Artificial Sequence: Synthetic oligonucleotide
  modified_base (19)..(19): a, c, u, g, unknown or other
caucugagguagcgggccn

SEQ ID NO: 975372 - RNA, 19 nt, Artificial Sequence
  Description of Artificial Sequence: Synthetic oligonucleotide
ccccauccugauuggauug

SEQ ID NO: 975373 - RNA, 19 nt, Artificial Sequence
  Description of Artificial Sequence: Synthetic oligonucleotide
cuucccgcgcacguuccac

SEQ ID NO: 975374 - RNA, 19 nt, Artificial Sequence
  Description of Artificial Sequence: Synthetic oligonucleotide
ccuaaauguccaggguggc

SEQ ID NO: 975375 - RNA, 19 nt, Artificial Sequence
  Description of Artificial Sequence: Synthetic oligonucleotide
agccacucaugccucccuu

SEQ ID NO: 975376 - RNA, 19 nt, Artificial Sequence
  Description of Artificial Sequence: Synthetic oligonucleotide
agcaaacuggggagagaga

SEQ ID NO: 975377 - RNA, 19 nt, Artificial Sequence
  Description of Artificial Sequence: Synthetic oligonucleotide
ggcucuagggucacgaagu

SEQ ID NO: 975378 - RNA, 19 nt, Artificial Sequence
  Description of Artificial Sequence: Synthetic oligonucleotide
aggguguguugagguauca

SEQ ID NO: 975379 - RNA, 19 nt, Artificial Sequence
  Description of Artificial Sequence: Synthetic oligonucleotide
cuggauccguccucucgca

SEQ ID NO: 975380 - RNA, 19 nt, Artificial Sequence
  Description of Artificial Sequence: Synthetic oligonucleotide
acguuccacguugcccggg

SEQ ID NO: 975381 - RNA, 19 nt, Artificial Sequence
  Description of Artificial Sequence: Synthetic oligonucleotide
cuggcccggcagagcaggg

SEQ ID NO: 975382 - RNA, 19 nt, Artificial Sequence
  Description of Artificial Sequence: Synthetic oligonucleotide
cucacccaccuugacccuc

SEQ ID NO: 975383 - RNA, 19 nt, Artificial Sequence
  Description of Artificial Sequence: Synthetic oligonucleotide
caaggggaaauucucccuu

SEQ ID NO: 975384 - RNA, 19 nt, Artificial Sequence
  Description of Artificial Sequence: Synthetic oligonucleotide
gcgccagacuuguugcgug

SEQ ID NO: 975385 - RNA, 19 nt, Artificial Sequence
  Description of Artificial Sequence: Synthetic oligonucleotide
cacaccaaaggcggcgcca

SEQ ID NO: 975386 - RNA, 19 nt, Artificial Sequence
  Description of Artificial Sequence: Synthetic oligonucleotide
accacacgguagggcacuc

SEQ ID NO: 975387 - RNA, 19 nt, Artificial Sequence
  Description of Artificial Sequence: Synthetic oligonucleotide
uaaagccacgaggccucuc

SEQ ID NO: 975388 - RNA, 19 nt, Artificial Sequence
  Description of Artificial Sequence: Synthetic oligonucleotide
uggcuugcguggcggugau

SEQ ID NO: 975389 - RNA, 19 nt, Artificial Sequence
  Description of Artificial Sequence: Synthetic oligonucleotide
ucgccgucgcuguuauauu

SEQ ID NO: 975390 - RNA, 19 nt, Artificial Sequence
  Description of Artificial Sequence: Synthetic oligonucleotide
ccggcugggagugaugaug

SEQ ID NO: 975391 - RNA, 19 nt, Artificial Sequence
  Description of Artificial Sequence: Synthetic oligonucleotide
cacacgguagggcacucgu

SEQ ID NO: 975392 - RNA, 19 nt, Artificial Sequence
  Description of Artificial Sequence: Synthetic oligonucleotide
gcagggguaccucuagucu

SEQ ID NO: 975393 - RNA, 19 nt, Artificial Sequence
  Description of Artificial Sequence: Synthetic oligonucleotide
cccagcgagugaauauuuc

SEQ ID NO: 975394 - RNA, 19 nt, Artificial Sequence
  Description of Artificial Sequence: Synthetic oligonucleotide
ccagcgagugaauauuucu

SEQ ID NO: 975395 - RNA, 19 nt, Artificial Sequence
  Description of Artificial Sequence: Synthetic oligonucleotide
gcuugcguggcggugaugu

SEQ ID NO: 975396 - RNA, 19 nt, Artificial Sequence
  Description of Artificial Sequence: Synthetic oligonucleotide
gaugugcgucucgaucucu

SEQ ID NO: 975397 - RNA, 19 nt, Artificial Sequence
  Description of Artificial Sequence: Synthetic oligonucleotide
cgaggaucuugccggugcg

SEQ ID NO: 975398 - RNA, 19 nt, Artificial Sequence
  Description of Artificial Sequence: Synthetic oligonucleotide
agcaccgaccaggcaucug

SEQ ID NO: 975399 - RNA, 19 nt, Artificial Sequence
  Description of Artificial Sequence: Synthetic oligonucleotide
augugcgucucgaucucuu

SEQ ID NO: 975400 - RNA, 19 nt, Artificial Sequence
  Description of Artificial Sequence: Synthetic oligonucleotide
ccgcgcacguuccacguug

SEQ ID NO: 975401 - RNA, 19 nt, Artificial Sequence
  Description of Artificial Sequence: Synthetic oligonucleotide
aucucuucccgcgcacguu

SEQ ID NO: 975402 - RNA, 19 nt, Artificial Sequence
  Description of Artificial Sequence: Synthetic oligonucleotide
cguuccacguugcccgggg

SEQ ID NO: 975403 - RNA, 19 nt, Artificial Sequence
  Description of Artificial Sequence: Synthetic oligonucleotide
gggcacucguacacggaug

SEQ ID NO: 975404 - RNA, 19 nt, Artificial Sequence
  Description of Artificial Sequence: Synthetic oligonucleotide
ggucacgaagugguauguc

SEQ ID NO: 975405 - RNA, 19 nt, Artificial Sequence
  Description of Artificial Sequence: Synthetic oligonucleotide
cgcacguuccacguugccc

SEQ ID NO: 975406 - RNA, 19 nt, Artificial Sequence
  Description of Artificial Sequence: Synthetic oligonucleotide
cgucgcuguuauauucgag

SEQ ID NO: 975407 - RNA, 19 nt, Artificial Sequence
  Description of Artificial Sequence: Synthetic oligonucleotide
caaaggcggcgccagacuu

SEQ ID NO: 975408 - RNA, 19 nt, Artificial Sequence
  Description of Artificial Sequence: Synthetic oligonucleotide
  modified_base (13)..(13): a, c, u, g, unknown or other
agguagcgggccnguccag

SEQ ID NO: 975409 - RNA, 19 nt, Artificial Sequence
  Description of Artificial Sequence: Synthetic oligonucleotide
cagggagcuuaggaaaaua

SEQ ID NO: 975410 - RNA, 19 nt, Artificial Sequence
  Description of Artificial Sequence: Synthetic oligonucleotide
ggccccagaagggaccaac

SEQ ID NO: 975411 - RNA, 19 nt, Artificial Sequence
  Description of Artificial Sequence: Synthetic oligonucleotide
ccgaccaggcaucugaggu

SEQ ID NO: 975412 - RNA, 19 nt, Artificial Sequence
  Description of Artificial Sequence: Synthetic oligonucleotide
cagucccgcccgcugccug

SEQ ID NO: 975413 - RNA, 19 nt, Artificial Sequence
  Description of Artificial Sequence: Synthetic oligonucleotide
cacguugcccggggcgccc

SEQ ID NO: 975414 - RNA, 19 nt, Artificial Sequence
  Description of Artificial Sequence: Synthetic oligonucleotide
ggggugagaagagcaaacu

SEQ ID NO: 975415 - RNA, 19 nt, Artificial Sequence
  Description of Artificial Sequence: Synthetic oligonucleotide
gccggugcgcacugcgaug

SEQ ID NO: 975416 - RNA, 19 nt, Artificial Sequence
  Description of Artificial Sequence: Synthetic oligonucleotide
ccuugcccuguagucacug

SEQ ID NO: 975417 - RNA, 19 nt, Artificial Sequence
  Description of Artificial Sequence: Synthetic oligonucleotide
ggcgcccgugaucucaaaa

SEQ ID NO: 975418 - RNA, 19 nt, Artificial Sequence
  Description of Artificial Sequence: Synthetic oligonucleotide
caccccagcgagugaauau

SEQ ID NO: 975419 - RNA, 19 nt, Artificial Sequence
  Description of Artificial Sequence: Synthetic oligonucleotide
cauauuagcccagguucuu

SEQ ID NO: 975420 - RNA, 19 nt, Artificial Sequence
  Description of Artificial Sequence: Synthetic oligonucleotide
gggucgcggucccggcugg

SEQ ID NO: 975421 - RNA, 19 nt, Artificial Sequence
  Description of Artificial Sequence: Synthetic oligonucleotide
ccguccucucgcagaugcg

SEQ ID NO: 975422 - RNA, 19 nt, Artificial Sequence
  Description of Artificial Sequence: Synthetic oligonucleotide
cgccgucgcuguuauauuc

SEQ ID NO: 975423 - RNA, 19 nt, Artificial Sequence
  Description of Artificial Sequence: Synthetic oligonucleotide
ggcccuaaauguccagggu

SEQ ID NO: 975424 - RNA, 19 nt, Artificial Sequence
  Description of Artificial Sequence: Synthetic oligonucleotide
gggagcuuaggaaaauauu

SEQ ID NO: 975425 - RNA, 19 nt, Artificial Sequence
  Description of Artificial Sequence: Synthetic oligonucleotide
acagucccgcccgcugccu

SEQ ID NO: 975426 - RNA, 19 nt, Artificial Sequence
  Description of Artificial Sequence: Synthetic oligonucleotide
  modified_base (3)..(3): a, c, u, g, unknown or other
ccnguccagcgcagcucgg

SEQ ID NO: 975427 - RNA, 19 nt, Artificial Sequence
  Description of Artificial Sequence: Synthetic oligonucleotide
acacgguagggcacucgua

SEQ ID NO: 975428 - RNA, 19 nt, Artificial Sequence
  Description of Artificial Sequence: Synthetic oligonucleotide
cggauggcuugcguggcgg

SEQ ID NO: 975429 - RNA, 19 nt, Artificial Sequence
  Description of Artificial Sequence: Synthetic oligonucleotide
cccucccaaaaggguaacc

SEQ ID NO: 975430 - RNA, 19 nt, Artificial Sequence
  Description of Artificial Sequence: Synthetic oligonucleotide
  modified_base (5)..(5): a, c, u, g, unknown or other
ggccnguccagcgcagcuc

SEQ ID NO: 975431 - RNA, 19 nt, Artificial Sequence
  Description of Artificial Sequence: Synthetic oligonucleotide
gcgcacugcgaugugcguc

SEQ ID NO: 975432 - RNA, 19 nt, Artificial Sequence
  Description of Artificial Sequence: Synthetic oligonucleotide
ccgucgcuguuauauucga

SEQ ID NO: 975433 - RNA, 19 nt, Artificial Sequence
  Description of Artificial Sequence: Synthetic oligonucleotide
ggaggaggaggaggaggca

SEQ ID NO: 975434 - RNA, 19 nt, Artificial Sequence
  Description of Artificial Sequence: Synthetic oligonucleotide
caccaaaggcggcgccaga

SEQ ID NO: 975435 - RNA, 19 nt, Artificial Sequence
  Description of Artificial Sequence: Synthetic oligonucleotide
accuugcccuguagucacu

SEQ ID NO: 975436 - RNA, 19 nt, Artificial Sequence
  Description of Artificial Sequence: Synthetic oligonucleotide
gucccggcugggagugaug

SEQ ID NO: 975437 - RNA, 19 nt, Artificial Sequence
  Description of Artificial Sequence: Synthetic oligonucleotide
uuguugcgugaggcucuua

SEQ ID NO: 975438 - RNA, 19 nt, Artificial Sequence
  Description of Artificial Sequence: Synthetic oligonucleotide
cggcgccagacuuguugcg

SEQ ID NO: 975439 - RNA, 19 nt, Artificial Sequence
  Description of Artificial Sequence: Synthetic oligonucleotide
cgcgcacguuccacguugc

SEQ ID NO: 975440 - RNA, 19 nt, Artificial Sequence
  Description of Artificial Sequence: Synthetic oligonucleotide
  modified_base (6)..(6): a, c, u, g, unknown or other
gggccnguccagcgcagcu

SEQ ID NO: 975441 - RNA, 19 nt, Artificial Sequence
  Description of Artificial Sequence: Synthetic oligonucleotide
ggucgcggucccggcuggg

SEQ ID NO: 975442 - RNA, 19 nt, Artificial Sequence
  Description of Artificial Sequence: Synthetic oligonucleotide
cagaugcguacugcacacu

SEQ ID NO: 975443 - RNA, 19 nt, Artificial Sequence
  Description of Artificial Sequence: Synthetic oligonucleotide
gagauggguuugggcucua

SEQ ID NO: 975444 - RNA, 19 nt, Artificial Sequence
  Description of Artificial Sequence: Synthetic oligonucleotide
ccacguugcccggggcgcc

SEQ ID NO: 975445 - RNA, 19 nt, Artificial Sequence
  Description of Artificial Sequence: Synthetic oligonucleotide
cugcgaugugcgucucgau

SEQ ID NO: 975446 - RNA, 19 nt, Artificial Sequence
  Description of Artificial Sequence: Synthetic oligonucleotide
cuuguugcgugaggcucuu

SEQ ID NO: 975447 - RNA, 19 nt, Artificial Sequence
  Description of Artificial Sequence: Synthetic oligonucleotide
ccgcccgcugccugggcuc

SEQ ID NO: 975448 - RNA, 19 nt, Artificial Sequence
  Description of Artificial Sequence: Synthetic oligonucleotide
cgccagacuuguugcguga

SEQ ID NO: 975449 - RNA, 19 nt, Artificial Sequence
  Description of Artificial Sequence: Synthetic oligonucleotide
ccccucccaaaaggguaac

SEQ ID NO: 975450 - RNA, 19 nt, Artificial Sequence
  Description of Artificial Sequence: Synthetic oligonucleotide
  modified_base (8)..(8): a, c, u, g, unknown or other
gcgggccnguccagcgcag

SEQ ID NO: 975451 - RNA, 19 nt, Artificial Sequence
  Description of Artificial Sequence: Synthetic oligonucleotide
  modified_base (7)..(7): a, c, u, g, unknown or other
cgggccnguccagcgcagc

SEQ ID NO: 975452 - RNA, 19 nt, Artificial Sequence
  Description of Artificial Sequence: Synthetic oligonucleotide
cgcuguuauauucgaggau

SEQ ID NO: 975453 - RNA, 19 nt, Artificial Sequence
  Description of Artificial Sequence: Synthetic oligonucleotide
cccuaguguaacagucuuu

SEQ ID NO: 975454 - RNA, 19 nt, Artificial Sequence
  Description of Artificial Sequence: Synthetic oligonucleotide
ccccaccccagcgagugaa

SEQ ID NO: 975455 - RNA, 19 nt, Artificial Sequence
  Description of Artificial Sequence: Synthetic oligonucleotide
cccggggcgcccgugaucu

SEQ ID NO: 975456 - RNA, 19 nt, Artificial Sequence
  Description of Artificial Sequence: Synthetic oligonucleotide
ccggugcgcacugcgaugu

SEQ ID NO: 975457 - RNA, 19 nt, Artificial Sequence
  Description of Artificial Sequence: Synthetic oligonucleotide
ccggcagagcaggggccac

SEQ ID NO: 975458 - RNA, 19 nt, Artificial Sequence
  Description of Artificial Sequence: Synthetic oligonucleotide
ccccagcgagugaauauuu

SEQ ID NO: 975459 - RNA, 19 nt, Artificial Sequence
  Description of Artificial Sequence: Synthetic oligonucleotide
gcacucguacacggauggu

SEQ ID NO: 975460 - RNA, 19 nt, Artificial Sequence
  Description of Artificial Sequence: Synthetic oligonucleotide
gggcgcccgugaucucaaa

SEQ ID NO: 975461 - RNA, 19 nt, Artificial Sequence
  Description of Artificial Sequence: Synthetic oligonucleotide
cgcccgcugccugggcucc

SEQ ID NO: 975462 - RNA, 19 nt, Artificial Sequence
  Description of Artificial Sequence: Synthetic oligonucleotide
cccgcccgcugccugggcu

SEQ ID NO: 975463 - RNA, 19 nt, Artificial Sequence
  Description of Artificial Sequence: Synthetic oligonucleotide
aggcggcgccagacuuguu

SEQ ID NO: 975464 - RNA, 19 nt, Artificial Sequence
  Description of Artificial Sequence: Synthetic oligonucleotide
ccgcugccugggcuccgca

SEQ ID NO: 975465 - RNA, 19 nt, Artificial Sequence
  Description of Artificial Sequence: Synthetic oligonucleotide
cccaccccagcgagugaau

SEQ ID NO: 975466 - RNA, 19 nt, Artificial Sequence
  Description of Artificial Sequence: Synthetic oligonucleotide
ccggggcgcccgugaucuc

SEQ ID NO: 975467 - RNA, 19 nt, Artificial Sequence
  Description of Artificial Sequence: Synthetic oligonucleotide
ccgggucgcggucccggcu

SEQ ID NO: 975468 - RNA, 19 nt, Artificial Sequence
  Description of Artificial Sequence: Synthetic oligonucleotide
cccgcgcacguuccacguu

SEQ ID NO: 975469 - RNA, 19 nt, Artificial Sequence
  Description of Artificial Sequence: Synthetic oligonucleotide
cguugcccggggcgcccgu

SEQ ID NO: 975470 - RNA, 19 nt, Artificial Sequence
  Description of Artificial Sequence: Synthetic oligonucleotide
  modified_base (1)..(1): a, c, u, g, unknown or other
nguccagcgcagcucgggg

SEQ ID NO: 975471 - RNA, 19 nt, Artificial Sequence
  Description of Artificial Sequence: Synthetic oligonucleotide
auauaaaucucccuucccc

SEQ ID NO: 975472 - RNA, 19 nt, Artificial Sequence
  Description of Artificial Sequence: Synthetic oligonucleotide
aauauaaaucucccuuccc

SEQ ID NO: 975473 - RNA, 19 nt, Artificial Sequence
  Description of Artificial Sequence: Synthetic oligonucleotide
aauaaauacgauggggccc

SEQ ID NO: 975474 - RNA, 19 nt, Artificial Sequence
  Description of Artificial Sequence: Synthetic oligonucleotide
uucgccauaagccaagugc

SEQ ID NO: 975475 - RNA, 19 nt, Artificial Sequence
  Description of Artificial Sequence: Synthetic oligonucleotide
uuagcuaggcucaggauag

SEQ ID NO: 975476 - RNA, 19 nt, Artificial Sequence
  Description of Artificial Sequence: Synthetic oligonucleotide
aagaaaauggaagcggcuc

SEQ ID NO: 975477 - RNA, 19 nt, Artificial Sequence
  Description of Artificial Sequence: Synthetic oligonucleotide
auaaauacgauggggcccc

SEQ ID NO: 975478 - RNA, 19 nt, Artificial Sequence
  Description of Artificial Sequence: Synthetic oligonucleotide
aauacgauggggccccagg

SEQ ID NO: 975479 - RNA, 19 nt, Artificial Sequence
  Description of Artificial Sequence: Synthetic oligonucleotide
cucagguucgccauaagcc

SEQ ID NO: 975480 - RNA, 19 nt, Artificial Sequence
  Description of Artificial Sequence: Synthetic oligonucleotide
ucgccauaagccaagugcg

SEQ ID NO: 975481 - RNA, 19 nt, Artificial Sequence
  Description of Artificial Sequence: Synthetic oligonucleotide
agggaauauacaaagggac

SEQ ID NO: 975482 - RNA, 19 nt, Artificial Sequence
  Description of Artificial Sequence: Synthetic oligonucleotide
uagggaauauacaaaggga

SEQ ID NO: 975483 - RNA, 19 nt, Artificial Sequence
  Description of Artificial Sequence: Synthetic oligonucleotide
ucaacuguucagcugugag

SEQ ID NO: 975484 - RNA, 19 nt, Artificial Sequence
  Description of Artificial Sequence: Synthetic oligonucleotide
aaacuugccaccgcacacc

SEQ ID NO: 975485 - RNA, 19 nt, Artificial Sequence
  Description of Artificial Sequence: Synthetic oligonucleotide
cacgcaaagggcuucaggc

SEQ ID NO: 975486 - RNA, 19 nt, Artificial Sequence
  Description of Artificial Sequence: Synthetic oligonucleotide
aauggguguggucgcaagg

SEQ ID NO: 975487 - RNA, 19 nt, Artificial Sequence
  Description of Artificial Sequence: Synthetic oligonucleotide
cuugccaccgcacaccugg

SEQ ID NO: 975488 - RNA, 19 nt, Artificial Sequence
  Description of Artificial Sequence: Synthetic oligonucleotide
uaucccuggcuccagaucu

SEQ ID NO: 975489 - RNA, 19 nt, Artificial Sequence
  Description of Artificial Sequence: Synthetic oligonucleotide
agagaaacggucgaugguc

SEQ ID NO: 975490 - RNA, 19 nt, Artificial Sequence
  Description of Artificial Sequence: Synthetic oligonucleotide
agaacgggaaccaaggaag

SEQ ID NO: 975491 - RNA, 19 nt, Artificial Sequence
  Description of Artificial Sequence: Synthetic oligonucleotide
uucacauuaucagucccgg

SEQ ID NO: 975492 - RNA, 19 nt, Artificial Sequence
  Description of Artificial Sequence: Synthetic oligonucleotide
agcgucugaauagugacac

SEQ ID NO: 975493 - RNA, 19 nt, Artificial Sequence
  Description of Artificial Sequence: Synthetic oligonucleotide
auagggacgugucagccag

SEQ ID NO: 975494 - RNA, 19 nt, Artificial Sequence
  Description of Artificial Sequence: Synthetic oligonucleotide
cagguugucaccaaagcuc

SEQ ID NO: 975495 - RNA, 19 nt, Artificial Sequence
  Description of Artificial Sequence: Synthetic oligonucleotide
ucagguucgccauaagcca

SEQ ID NO: 975496 - RNA, 19 nt, Artificial Sequence
  Description of Artificial Sequence: Synthetic oligonucleotide
aauggaagcggcucuggaa

SEQ ID NO: 975497 - RNA, 19 nt, Artificial Sequence
  Description of Artificial Sequence: Synthetic oligonucleotide
aaacggucgaugguccggc

SEQ ID NO: 975498 - RNA, 19 nt, Artificial Sequence
  Description of Artificial Sequence: Synthetic oligonucleotide
auggugcacggauagggac

SEQ ID NO: 975499 - RNA, 19 nt, Artificial Sequence
  Description of Artificial Sequence: Synthetic oligonucleotide
aaggcacaaagcgagugag

SEQ ID NO: 975500 - RNA, 19 nt, Artificial Sequence
  Description of Artificial Sequence: Synthetic oligonucleotide
augcaauaaauacgauggg

SEQ ID NO: 975501 - RNA, 19 nt, Artificial Sequence
  Description of Artificial Sequence: Synthetic oligonucleotide
uuucguugguuacuugucu

SEQ ID NO: 975502 - RNA, 19 nt, Artificial Sequence
  Description of Artificial Sequence: Synthetic oligonucleotide
caacuguucagcugugagg

SEQ ID NO: 975503 - RNA, 19 nt, Artificial Sequence
  Description of Artificial Sequence: Synthetic oligonucleotide
agugcgucuucucauguug

SEQ ID NO: 975504 - RNA, 19 nt, Artificial Sequence
  Description of Artificial Sequence: Synthetic oligonucleotide
caugguuccacgcugcgug

SEQ ID NO: 975505 - RNA, 19 nt, Artificial Sequence
  Description of Artificial Sequence: Synthetic oligonucleotide
uauggcgugucaugguucc

SEQ ID NO: 975506 - RNA, 19 nt, Artificial Sequence
  Description of Artificial Sequence: Synthetic oligonucleotide
ggagagaaacggucgaugg

SEQ ID NO: 975507 - RNA, 19 nt, Artificial Sequence
  Description of Artificial Sequence: Synthetic oligonucleotide
acgcaucgcacgcaaaggg

SEQ ID NO: 975508 - RNA, 19 nt, Artificial Sequence
  Description of Artificial Sequence: Synthetic oligonucleotide
cggauuaaggcacaaagcg

SEQ ID NO: 975509 - RNA, 19 nt, Artificial Sequence
  Description of Artificial Sequence: Synthetic oligonucleotide
auacgauggggccccaggg

SEQ ID NO: 975510 - RNA, 19 nt, Artificial Sequence
  Description of Artificial Sequence: Synthetic oligonucleotide
aaauggaagcggcucugga

SEQ ID NO: 975511 - RNA, 19 nt, Artificial Sequence
  Description of Artificial Sequence: Synthetic oligonucleotide
uggaaugcgcaugugcucc

SEQ ID NO: 975512 - RNA, 19 nt, Artificial Sequence
  Description of Artificial Sequence: Synthetic oligonucleotide
ggcgcuuuagguuggagag

SEQ ID NO: 975513 - RNA, 19 nt, Artificial Sequence
  Description of Artificial Sequence: Synthetic oligonucleotide
ugagguugcgcuguugagc

SEQ ID NO: 975514 - RNA, 19 nt, Artificial Sequence
  Description of Artificial Sequence: Synthetic oligonucleotide
agaaagguggggccaccac

SEQ ID NO: 975515 - RNA, 19 nt, Artificial Sequence
  Description of Artificial Sequence: Synthetic oligonucleotide
ugcgugcaucuucaugugg

SEQ ID NO: 975516 - RNA, 19 nt, Artificial Sequence
  Description of Artificial Sequence: Synthetic oligonucleotide
gaauuuggccagcggguag

SEQ ID NO: 975517 - RNA, 19 nt, Artificial Sequence
  Description of Artificial Sequence: Synthetic oligonucleotide
agcgagugaggccagguga

SEQ ID NO: 975518 - RNA, 19 nt, Artificial Sequence
  Description of Artificial Sequence: Synthetic oligonucleotide
gggccgacuaaccacaggg

SEQ ID NO: 975519 - RNA, 19 nt, Artificial Sequence
  Description of Artificial Sequence: Synthetic oligonucleotide
agcuuagcuaggcucagga

SEQ ID NO: 975520 - RNA, 19 nt, Artificial Sequence
  Description of Artificial Sequence: Synthetic oligonucleotide
cccaccacuaccaaagggg

SEQ ID NO: 975521 - RNA, 19 nt, Artificial Sequence
  Description of Artificial Sequence: Synthetic oligonucleotide
ucacauuaucagucccggg

SEQ ID NO: 975522 - RNA, 19 nt, Artificial Sequence
  Description of Artificial Sequence: Synthetic oligonucleotide
ugagcaaacuugccaccgc

SEQ ID NO: 975523 - RNA, 19 nt, Artificial Sequence
  Description of Artificial Sequence: Synthetic oligonucleotide
gaggcauagaaaggugggg

SEQ ID NO: 975524 - RNA, 19 nt, Artificial Sequence
  Description of Artificial Sequence: Synthetic oligonucleotide
ggcgcaugcaauaaauacg

SEQ ID NO: 975525 - RNA, 19 nt, Artificial Sequence
  Description of Artificial Sequence: Synthetic oligonucleotide
aguggaaugcgcaugugcu

SEQ ID NO: 975526 - RNA, 19 nt, Artificial Sequence
  Description of Artificial Sequence: Synthetic oligonucleotide
gaagugcgugguuugcgcc

SEQ ID NO: 975527 - RNA, 19 nt, Artificial Sequence
  Description of Artificial Sequence: Synthetic oligonucleotide
cuuagcuaggcucaggaua

SEQ ID NO: 975528 - RNA, 19 nt, Artificial Sequence
  Description of Artificial Sequence: Synthetic oligonucleotide
aauuuggccagcggguaga

SEQ ID NO: 975529 - RNA, 19 nt, Artificial Sequence
  Description of Artificial Sequence: Synthetic oligonucleotide
uacugcgugcaucuucaug

SEQ ID NO: 975530 - RNA, 19 nt, Artificial Sequence
  Description of Artificial Sequence: Synthetic oligonucleotide
uccgggguuuuccccaccg

SEQ ID NO: 975531 - RNA, 19 nt, Artificial Sequence
  Description of Artificial Sequence: Synthetic oligonucleotide
uaucccaccccguccgggg

SEQ ID NO: 975532 - RNA, 19 nt, Artificial Sequence
  Description of Artificial Sequence: Synthetic oligonucleotide
gaacgggaaccaaggaagg

SEQ ID NO: 975533 - RNA, 19 nt, Artificial Sequence
  Description of Artificial Sequence: Synthetic oligonucleotide
aacggucgaugguccggcc

SEQ ID NO: 975534 - RNA, 19 nt, Artificial Sequence
  Description of Artificial Sequence: Synthetic oligonucleotide
uggagagaaacggucgaug

SEQ ID NO: 975535 - RNA, 19 nt, Artificial Sequence
  Description of Artificial Sequence: Synthetic oligonucleotide
acggauagggacgugucag

SEQ ID NO: 975536 - RNA, 19 nt, Artificial Sequence
  Description of Artificial Sequence: Synthetic oligonucleotide
acgggaaccaaggaaggag

SEQ ID NO: 975537 - RNA, 19 nt, Artificial Sequence
  Description of Artificial Sequence: Synthetic oligonucleotide
ggcaacgccagguaguccc

SEQ ID NO: 975538 - RNA, 19 nt, Artificial Sequence
  Description of Artificial Sequence: Synthetic oligonucleotide
gugcccaaugcuccgaccc

SEQ ID NO: 975539 - RNA, 19 nt, Artificial Sequence
  Description of Artificial Sequence: Synthetic oligonucleotide
ucgaugguccggccguccg

SEQ ID NO: 975540 - RNA, 19 nt, Artificial Sequence
  Description of Artificial Sequence: Synthetic oligonucleotide
ucucccgaguggaaugcgc

SEQ ID NO: 975541 - RNA, 19 nt, Artificial Sequence
  Description of Artificial Sequence: Synthetic oligonucleotide
gagaaacggucgauggucc

SEQ ID NO: 975542 - RNA, 19 nt, Artificial Sequence
  Description of Artificial Sequence: Synthetic oligonucleotide
accaguuguccccgggccg

SEQ ID NO: 975543 - RNA, 19 nt, Artificial Sequence
  Description of Artificial Sequence: Synthetic oligonucleotide
ggagcgucugaauagugac

SEQ ID NO: 975544 - RNA, 19 nt, Artificial Sequence
  Description of Artificial Sequence: Synthetic oligonucleotide
auagaaagguggggccacc

SEQ ID NO: 975545 - RNA, 19 nt, Artificial Sequence
  Description of Artificial Sequence: Synthetic oligonucleotide
ugcuuguuuugguuugagu

SEQ ID NO: 975546 - RNA, 19 nt, Artificial Sequence
  Description of Artificial Sequence: Synthetic oligonucleotide
aaagcgagugaggccaggu

SEQ ID NO: 975547 - RNA, 19 nt, Artificial Sequence
  Description of Artificial Sequence: Synthetic oligonucleotide
cccggauuaaggcacaaag

SEQ ID NO: 975548 - RNA, 19 nt, Artificial Sequence
  Description of Artificial Sequence: Synthetic oligonucleotide
uuaucagucccgggcuggg

SEQ ID NO: 975549 - RNA, 19 nt, Artificial Sequence
  Description of Artificial Sequence: Synthetic oligonucleotide
gggcgcaugcaauaaauac

SEQ ID NO: 975550 - RNA, 19 nt, Artificial Sequence
  Description of Artificial Sequence: Synthetic oligonucleotide
cuaccaguuguccccgggc

SEQ ID NO: 975551 - RNA, 19 nt, Artificial Sequence
  Description of Artificial Sequence: Synthetic oligonucleotide
cuuguagcucuugucgcag

SEQ ID NO: 975552 - RNA, 19 nt, Artificial Sequence
  Description of Artificial Sequence: Synthetic oligonucleotide
auauggcgugucaugguuc

SEQ ID NO: 975553 - RNA, 19 nt, Artificial Sequence
  Description of Artificial Sequence: Synthetic oligonucleotide
caccucugccgccuuaucc

SEQ ID NO: 975554 - RNA, 19 nt, Artificial Sequence
  Description of Artificial Sequence: Synthetic oligonucleotide
cucaggauaggggccaccc

SEQ ID NO: 975555 - RNA, 19 nt, Artificial Sequence
  Description of Artificial Sequence: Synthetic oligonucleotide
agcuaggcucaggauaggg

SEQ ID NO: 975556 - RNA, 19 nt, Artificial Sequence
  Description of Artificial Sequence: Synthetic oligonucleotide
acggucgaugguccggccg

SEQ ID NO: 975557 - RNA, 19 nt, Artificial Sequence
  Description of Artificial Sequence: Synthetic oligonucleotide
aggaagugcgugguuugcg

SEQ ID NO: 975558 - RNA, 19 nt, Artificial Sequence
  Description of Artificial Sequence: Synthetic oligonucleotide
agcucggcagugaauuugg

SEQ ID NO: 975559 - RNA, 19 nt, Artificial Sequence
  Description of Artificial Sequence: Synthetic oligonucleotide
aacgggaaccaaggaagga

SEQ ID NO: 975560 - RNA, 19 nt, Artificial Sequence
  Description of Artificial Sequence: Synthetic oligonucleotide
ugcccaaugcuccgacccc

SEQ ID NO: 975561 - RNA, 19 nt, Artificial Sequence
  Description of Artificial Sequence: Synthetic oligonucleotide
gaaaucgagcuugcccuug

SEQ ID NO: 975562 - RNA, 19 nt, Artificial Sequence
  Description of Artificial Sequence: Synthetic oligonucleotide
cauguugccucagcguggc

SEQ ID NO: 975563 - RNA, 19 nt, Artificial Sequence
  Description of Artificial Sequence: Synthetic oligonucleotide
ugcacggauagggacgugu

SEQ ID NO: 975564 - RNA, 19 nt, Artificial Sequence
  Description of Artificial Sequence: Synthetic oligonucleotide
acgcgcagcgguaaggccg

SEQ ID NO: 975565 - RNA, 19 nt, Artificial Sequence
  Description of Artificial Sequence: Synthetic oligonucleotide
caugccgcacgcaucgcac

SEQ ID NO: 975566 - RNA, 19 nt, Artificial Sequence
  Description of Artificial Sequence: Synthetic oligonucleotide
agggaucucagaaggggag

SEQ ID NO: 975567 - RNA, 19 nt, Artificial Sequence
  Description of Artificial Sequence: Synthetic oligonucleotide
guuugcgccagcagcuccg

SEQ ID NO: 975568 - RNA, 19 nt, Artificial Sequence
  Description of Artificial Sequence: Synthetic oligonucleotide
gcauggguagcccuccagg

SEQ ID NO: 975569 - RNA, 19 nt, Artificial Sequence
  Description of Artificial Sequence: Synthetic oligonucleotide
gucaugguuccacgcugcg

SEQ ID NO: 975570 - RNA, 19 nt, Artificial Sequence
  Description of Artificial Sequence: Synthetic oligonucleotide
agguugucaccaaagcucu

SEQ ID NO: 975571 - RNA, 19 nt, Artificial Sequence
  Description of Artificial Sequence: Synthetic oligonucleotide
gccgacuaaccacagggag

SEQ ID NO: 975572 - RNA, 19 nt, Artificial Sequence
  Description of Artificial Sequence: Synthetic oligonucleotide
ccggauuaaggcacaaagc

SEQ ID NO: 975573 - RNA, 19 nt, Artificial Sequence
  Description of Artificial Sequence: Synthetic oligonucleotide
ugcuccgugaggcgguacu

SEQ ID NO: 975574 - RNA, 19 nt, Artificial Sequence
  Description of Artificial Sequence: Synthetic oligonucleotide
ggaagugcgugguuugcgc

SEQ ID NO: 975575 - RNA, 19 nt, Artificial Sequence
  Description of Artificial Sequence: Synthetic oligonucleotide
ugggagcgucugaauagug

SEQ ID NO: 975576 - RNA, 19 nt, Artificial Sequence
  Description of Artificial Sequence: Synthetic oligonucleotide
gucugaauagugacacccc

SEQ ID NO: 975577 - RNA, 19 nt, Artificial Sequence
  Description of Artificial Sequence: Synthetic oligonucleotide
gguguggucgcaagggccg

SEQ ID NO: 975578 - RNA, 19 nt, Artificial Sequence
  Description of Artificial Sequence: Synthetic oligonucleotide
ucucucccgaguggaaugc

SEQ ID NO: 975579 - RNA, 19 nt, Artificial Sequence
  Description of Artificial Sequence: Synthetic oligonucleotide
gaccccagcggggagauuc

SEQ ID NO: 975580 - RNA, 19 nt, Artificial Sequence
  Description of Artificial Sequence: Synthetic oligonucleotide
agggccguuaucccuggcu

SEQ ID NO: 975581 - RNA, 19 nt, Artificial Sequence
  Description of Artificial Sequence: Synthetic oligonucleotide
cacgcaucgcacgcaaagg

SEQ ID NO: 975582 - RNA, 19 nt, Artificial Sequence
  Description of Artificial Sequence: Synthetic oligonucleotide
gggaaaucgagcuugcccu

SEQ ID NO: 975583 - RNA, 19 nt, Artificial Sequence
  Description of Artificial Sequence: Synthetic oligonucleotide
uacuggcgggugaagcgca

SEQ ID NO: 975584 - RNA, 19 nt, Artificial Sequence
  Description of Artificial Sequence: Synthetic oligonucleotide
gaugguccggccguccggc

SEQ ID NO: 975585 - RNA, 19 nt, Artificial Sequence
  Description of Artificial Sequence: Synthetic oligonucleotide
gggaauauacaaagggaca

SEQ ID NO: 975586 - RNA, 19 nt, Artificial Sequence
  Description of Artificial Sequence: Synthetic oligonucleotide
gauggugcacggauaggga

SEQ ID NO: 975587 - RNA, 19 nt, Artificial Sequence
  Description of Artificial Sequence: Synthetic oligonucleotide
gcacgcaucgcacgcaaag

SEQ ID NO: 975588 - RNA, 19 nt, Artificial Sequence
  Description of Artificial Sequence: Synthetic oligonucleotide
ggauuaaggcacaaagcga

SEQ ID NO: 975589 - RNA, 19 nt, Artificial Sequence
  Description of Artificial Sequence: Synthetic oligonucleotide
cgucugaauagugacaccc

SEQ ID NO: 975590 - RNA, 19 nt, Artificial Sequence
  Description of Artificial Sequence: Synthetic oligonucleotide
gaagcggcucuggaagagc

SEQ ID NO: 975591 - RNA, 19 nt, Artificial Sequence
  Description of Artificial Sequence: Synthetic oligonucleotide
auuaaggcacaaagcgagu

SEQ ID NO: 975592 - RNA, 19 nt, Artificial Sequence
  Description of Artificial Sequence: Synthetic oligonucleotide
gacgcgcagcgguaaggcc

SEQ ID NO: 975593 - RNA, 19 nt, Artificial Sequence
  Description of Artificial Sequence: Synthetic oligonucleotide
aggauaggggccacccggg

SEQ ID NO: 975594 - RNA, 19 nt, Artificial Sequence
  Description of Artificial Sequence: Synthetic oligonucleotide
guggaaugcgcaugugcuc

SEQ ID NO: 975595 - RNA, 19 nt, Artificial Sequence
  Description of Artificial Sequence: Synthetic oligonucleotide
gagagaaacggucgauggu

SEQ ID NO: 975596 - RNA, 19 nt, Artificial Sequence
  Description of Artificial Sequence: Synthetic oligonucleotide
gcgcaugcaauaaauacga

SEQ ID NO: 975597 - RNA, 19 nt, Artificial Sequence
  Description of Artificial Sequence: Synthetic oligonucleotide
gcucuccuaggccaccugg

SEQ ID NO: 975598 - RNA, 19 nt, Artificial Sequence
  Description of Artificial Sequence: Synthetic oligonucleotide
guucgccauaagccaagug

SEQ ID NO: 975599 - RNA, 19 nt, Artificial Sequence
  Description of Artificial Sequence: Synthetic oligonucleotide
uggcgugucaugguuccac

SEQ ID NO: 975600 - RNA, 19 nt, Artificial Sequence
  Description of Artificial Sequence: Synthetic oligonucleotide
gaucucagaaggggaguca

SEQ ID NO: 975601 - RNA, 19 nt, Artificial Sequence
  Description of Artificial Sequence: Synthetic oligonucleotide
aucgcacgcaaagggcuuc

SEQ ID NO: 975602 - RNA, 19 nt, Artificial Sequence
  Description of Artificial Sequence: Synthetic oligonucleotide
gcgcaugccgcacgcaucg

SEQ ID NO: 975603 - RNA, 19 nt, Artificial Sequence
  Description of Artificial Sequence: Synthetic oligonucleotide
uuggagagaaacggucgau

SEQ ID NO: 975604 - RNA, 19 nt, Artificial Sequence
  Description of Artificial Sequence: Synthetic oligonucleotide
gccuuauccgggcugaguc

SEQ ID NO: 975605 - RNA, 19 nt, Artificial Sequence
  Description of Artificial Sequence: Synthetic oligonucleotide
ucaugguuccacgcugcgu

SEQ ID NO: 975606 - RNA, 19 nt, Artificial Sequence
  Description of Artificial Sequence: Synthetic oligonucleotide
accccguccgggguuuucc

SEQ ID NO: 975607 - RNA, 19 nt, Artificial Sequence
  Description of Artificial Sequence: Synthetic oligonucleotide
ggauagggacgugucagcc

SEQ ID NO: 975608 - RNA, 19 nt, Artificial Sequence
  Description of Artificial Sequence: Synthetic oligonucleotide
guugguuacuugucuuuua

SEQ ID NO: 975609 - RNA, 19 nt, Artificial Sequence
  Description of Artificial Sequence: Synthetic oligonucleotide
uuauccgggcugaguccca

SEQ ID NO: 975610 - RNA, 19 nt, Artificial Sequence
  Description of Artificial Sequence: Synthetic oligonucleotide
ggcgugucaugguuccacg

SEQ ID NO: 975611 - RNA, 19 nt, Artificial Sequence
  Description of Artificial Sequence: Synthetic oligonucleotide
ugguccggccguccggccc

SEQ ID NO: 975612 - RNA, 19 nt, Artificial Sequence
  Description of Artificial Sequence: Synthetic oligonucleotide
cuccgugaggcgguacugg

SEQ ID NO: 975613 - RNA, 19 nt, Artificial Sequence
  Description of Artificial Sequence: Synthetic oligonucleotide
aggacgcgcagcgguaagg

SEQ ID NO: 975614 - RNA, 19 nt, Artificial Sequence
  Description of Artificial Sequence: Synthetic oligonucleotide
ugcuaccaguuguccccgg

SEQ ID NO: 975615 - RNA, 19 nt, Artificial Sequence
  Description of Artificial Sequence: Synthetic oligonucleotide
cugcgugcaucuucaugug

SEQ ID NO: 975616 - RNA, 19 nt, Artificial Sequence
  Description of Artificial Sequence: Synthetic oligonucleotide
gcuaccaguuguccccggg

SEQ ID NO: 975617 - RNA, 19 nt, Artificial Sequence
  Description of Artificial Sequence: Synthetic oligonucleotide
agggacgugucagccagug

SEQ ID NO: 975618 - RNA, 19 nt, Artificial Sequence
  Description of Artificial Sequence: Synthetic oligonucleotide
cuccggccggcucaguccc

SEQ ID NO: 975619 - RNA, 19 nt, Artificial Sequence
  Description of Artificial Sequence: Synthetic oligonucleotide
cccgaggccagccagcgcc

SEQ ID NO: 975620 - RNA, 19 nt, Artificial Sequence
  Description of Artificial Sequence: Synthetic oligonucleotide
augguccggccguccggcc

SEQ ID NO: 975621 - RNA, 19 nt, Artificial Sequence
  Description of Artificial Sequence: Synthetic oligonucleotide
cgacuaaccacagggagag

SEQ ID NO: 975622 - RNA, 19 nt, Artificial Sequence
  Description of Artificial Sequence: Synthetic oligonucleotide
cgggaaaucgagcuugccc

SEQ ID NO: 975623 - RNA, 19 nt, Artificial Sequence
  Description of Artificial Sequence: Synthetic oligonucleotide
cagcaaucuuguccccacc

SEQ ID NO: 975624 - RNA, 19 nt, Artificial Sequence
  Description of Artificial Sequence: Synthetic oligonucleotide
agguucgccauaagccaag

SEQ ID NO: 975625 - RNA, 19 nt, Artificial Sequence
  Description of Artificial Sequence: Synthetic oligonucleotide
cucccgaguggaaugcgca

SEQ ID NO: 975626 - RNA, 19 nt, Artificial Sequence
  Description of Artificial Sequence: Synthetic oligonucleotide
ggcuagugccacuugugca

SEQ ID NO: 975627 - RNA, 19 nt, Artificial Sequence
  Description of Artificial Sequence: Synthetic oligonucleotide
gcgcuguugagcaaacuug

SEQ ID NO: 975628 - RNA, 19 nt, Artificial Sequence
  Description of Artificial Sequence: Synthetic oligonucleotide
gugcgucuucucauguugc

SEQ ID NO: 975629 - RNA, 19 nt, Artificial Sequence
  Description of Artificial Sequence: Synthetic oligonucleotide
ccuuauccgggcugagucc

SEQ ID NO: 975630 - RNA, 19 nt, Artificial Sequence
  Description of Artificial Sequence: Synthetic oligonucleotide
caggaagugcgugguuugc

SEQ ID NO: 975631 - RNA, 19 nt, Artificial Sequence
  Description of Artificial Sequence: Synthetic oligonucleotide
gguuugcgccagcagcucc

SEQ ID NO: 975632 - RNA, 19 nt, Artificial Sequence
  Description of Artificial Sequence: Synthetic oligonucleotide
uagcuaggcucaggauagg

SEQ ID NO: 975633 - RNA, 19 nt, Artificial Sequence
  Description of Artificial Sequence: Synthetic oligonucleotide
gagcgucugaauagugaca

SEQ ID NO: 975634 - RNA, 19 nt, Artificial Sequence
  Description of Artificial Sequence: Synthetic oligonucleotide
ugcgggcauggguagcccu

SEQ ID NO: 975635 - RNA, 19 nt, Artificial Sequence
  Description of Artificial Sequence: Synthetic oligonucleotide
gcgguaaggccgcagcagc

SEQ ID NO: 975636 - RNA, 19 nt, Artificial Sequence
  Description of Artificial Sequence: Synthetic oligonucleotide
gugaggcgguacuggcggg

SEQ ID NO: 975637 - RNA, 19 nt, Artificial Sequence
  Description of Artificial Sequence: Synthetic oligonucleotide
caaagcgagugaggccagg

SEQ ID NO: 975638 - RNA, 19 nt, Artificial Sequence
  Description of Artificial Sequence: Synthetic oligonucleotide
uuccccuaucccaccccgu

SEQ ID NO: 975639 - RNA, 19 nt, Artificial Sequence
  Description of Artificial Sequence: Synthetic oligonucleotide
agcgcaugccgcacgcauc

SEQ ID NO: 975640 - RNA, 19 nt, Artificial Sequence
  Description of Artificial Sequence: Synthetic oligonucleotide
cccuaucccaccccguccg

SEQ ID NO: 975641 - RNA, 19 nt, Artificial Sequence
  Description of Artificial Sequence: Synthetic oligonucleotide
uccuuuggucaaagcugau

SEQ ID NO: 975642 - RNA, 19 nt, Artificial Sequence
  Description of Artificial Sequence: Synthetic oligonucleotide
acccuccgggaaaucgagc

SEQ ID NO: 975643 - RNA, 19 nt, Artificial Sequence
  Description of Artificial Sequence: Synthetic oligonucleotide
gacuaaccacagggagagg

SEQ ID NO: 975644 - RNA, 19 nt, Artificial Sequence
  Description of Artificial Sequence: Synthetic oligonucleotide
aggugcgcgcccuggcuca

SEQ ID NO: 975645 - RNA, 19 nt, Artificial Sequence
  Description of Artificial Sequence: Synthetic oligonucleotide
uagccgggcgcaccugcga

SEQ ID NO: 975646 - RNA, 19 nt, Artificial Sequence
  Description of Artificial Sequence: Synthetic oligonucleotide
gggcgcuuuagguuggaga

SEQ ID NO: 975647 - RNA, 19 nt, Artificial Sequence
  Description of Artificial Sequence: Synthetic oligonucleotide
gccuguguacagaguaggg

SEQ ID NO: 975648 - RNA, 19 nt, Artificial Sequence
  Description of Artificial Sequence: Synthetic oligonucleotide
cacggauagggacguguca

SEQ ID NO: 975649 - RNA, 19 nt, Artificial Sequence
  Description of Artificial Sequence: Synthetic oligonucleotide
cucucccgaguggaaugcg

SEQ ID NO: 975650 - RNA, 19 nt, Artificial Sequence
  Description of Artificial Sequence: Synthetic oligonucleotide
gcggguagaggcucucgag

SEQ ID NO: 975651 - RNA, 19 nt, Artificial Sequence
  Description of Artificial Sequence: Synthetic oligonucleotide
cagguucgccauaagccaa

SEQ ID NO: 975652 - RNA, 19 nt, Artificial Sequence
  Description of Artificial Sequence: Synthetic oligonucleotide
guagccgggcgcaccugcg

SEQ ID NO: 975653 - RNA, 19 nt, Artificial Sequence
  Description of Artificial Sequence: Synthetic oligonucleotide
acaaagcgagugaggccag

SEQ ID NO: 975654 - RNA, 19 nt, Artificial Sequence
  Description of Artificial Sequence: Synthetic oligonucleotide
acacccuccgggaaaucga

SEQ ID NO: 975655 - RNA, 19 nt, Artificial Sequence
  Description of Artificial Sequence: Synthetic oligonucleotide
ggccguuaucccuggcucc

SEQ ID NO: 975656 - RNA, 19 nt, Artificial Sequence
  Description of Artificial Sequence: Synthetic oligonucleotide
gucgugcaggaagugcgug

SEQ ID NO: 975657 - RNA, 19 nt, Artificial Sequence
  Description of Artificial Sequence: Synthetic oligonucleotide
gcgcauauggcgugucaug

SEQ ID NO: 975658 - RNA, 19 nt, Artificial Sequence
  Description of Artificial Sequence: Synthetic oligonucleotide
uagugccacuugugcaaaa

SEQ ID NO: 975659 - RNA, 19 nt, Artificial Sequence
  Description of Artificial Sequence: Synthetic oligonucleotide
gccagugcgucuucucaug

SEQ ID NO: 975660 - RNA, 19 nt, Artificial Sequence
  Description of Artificial Sequence: Synthetic oligonucleotide
ggaucucagaaggggaguc

SEQ ID NO: 975661 - RNA, 19 nt, Artificial Sequence
  Description of Artificial Sequence: Synthetic oligonucleotide
guugcgcuguugagcaaac

SEQ ID NO: 975662 - RNA, 19 nt, Artificial Sequence
  Description of Artificial Sequence: Synthetic oligonucleotide
guuaucccuggcuccagau

SEQ ID NO: 975663 - RNA, 19 nt, Artificial Sequence
  Description of Artificial Sequence: Synthetic oligonucleotide
cauauggcgugucaugguu

SEQ ID NO: 975664 - RNA, 19 nt, Artificial Sequence
  Description of Artificial Sequence: Synthetic oligonucleotide
gggccguuaucccuggcuc

SEQ ID NO: 975665 - RNA, 19 nt, Artificial Sequence
  Description of Artificial Sequence: Synthetic oligonucleotide
gccaccgcacaccuggcac

SEQ ID NO: 975666 - RNA, 19 nt, Artificial Sequence
  Description of Artificial Sequence: Synthetic oligonucleotide
gcgagugaggccaggugag

SEQ ID NO: 975667 - RNA, 19 nt, Artificial Sequence
  Description of Artificial Sequence: Synthetic oligonucleotide
caggugcgcgcccuggcuc

SEQ ID NO: 975668 - RNA, 19 nt, Artificial Sequence
  Description of Artificial Sequence: Synthetic oligonucleotide
cacggagccggaggagggg

SEQ ID NO: 975669 - RNA, 19 nt, Artificial Sequence
  Description of Artificial Sequence: Synthetic oligonucleotide
ccaagugcgggcaugggua

SEQ ID NO: 975670 - RNA, 19 nt, Artificial Sequence
  Description of Artificial Sequence: Synthetic oligonucleotide
uaaauacgauggggcccca

SEQ ID NO: 975671 - RNA, 19 nt, Artificial Sequence
  Description of Artificial Sequence: Synthetic oligonucleotide
cgcaucgcacgcaaagggc

SEQ ID NO: 975672 - RNA, 19 nt, Artificial Sequence
  Description of Artificial Sequence: Synthetic oligonucleotide
gcgugucaugguuccacgc

SEQ ID NO: 975673 - RNA, 19 nt, Artificial Sequence
  Description of Artificial Sequence: Synthetic oligonucleotide
ugguuugcgccagcagcuc

SEQ ID NO: 975674 - RNA, 19 nt, Artificial Sequence
  Description of Artificial Sequence: Synthetic oligonucleotide
ccgacuaaccacagggaga

SEQ ID NO: 975675 - RNA, 19 nt, Artificial Sequence
  Description of Artificial Sequence: Synthetic oligonucleotide
uguggucgcaagggccgga

SEQ ID NO: 975676 - RNA, 19 nt, Artificial Sequence
  Description of Artificial Sequence: Synthetic oligonucleotide
guggucgcaagggccggag

SEQ ID NO: 975677 - RNA, 19 nt, Artificial Sequence
  Description of Artificial Sequence: Synthetic oligonucleotide
ucgcacgcaaagggcuuca

SEQ ID NO: 975678 - RNA, 19 nt, Artificial Sequence
  Description of Artificial Sequence: Synthetic oligonucleotide
guguggucgcaagggccgg

SEQ ID NO: 975679 - RNA, 19 nt, Artificial Sequence
  Description of Artificial Sequence: Synthetic oligonucleotide
gcuguuccgagcuggggaa

SEQ ID NO: 975680 - RNA, 19 nt, Artificial Sequence
  Description of Artificial Sequence: Synthetic oligonucleotide
ggacgcgcagcgguaaggc

SEQ ID NO: 975681 - RNA, 19 nt, Artificial Sequence
  Description of Artificial Sequence: Synthetic oligonucleotide
caggacgcgcagcgguaag

SEQ ID NO: 975682 - RNA, 19 nt, Artificial Sequence
  Description of Artificial Sequence: Synthetic oligonucleotide
gggagcgucugaauaguga

SEQ ID NO: 975683 - RNA, 19 nt, Artificial Sequence
  Description of Artificial Sequence: Synthetic oligonucleotide
gguuccacgcugcgugaac

SEQ ID NO: 975684 - RNA, 19 nt, Artificial Sequence
  Description of Artificial Sequence: Synthetic oligonucleotide
ggggccgacuaaccacagg

SEQ ID NO: 975685 - RNA, 19 nt, Artificial Sequence
  Description of Artificial Sequence: Synthetic oligonucleotide
aucccaccccguccggggu

SEQ ID NO: 975686 - RNA, 19 nt, Artificial Sequence
  Description of Artificial Sequence: Synthetic oligonucleotide
gguuugaguauaagaaaau

SEQ ID NO: 975687 - RNA, 19 nt, Artificial Sequence
  Description of Artificial Sequence: Synthetic oligonucleotide
cuguuccgagcuggggaag

SEQ ID NO: 975688 - RNA, 19 nt, Artificial Sequence
  Description of Artificial Sequence: Synthetic oligonucleotide
ggggcuagugccacuugug

SEQ ID NO: 975689 - RNA, 19 nt, Artificial Sequence
  Description of Artificial Sequence: Synthetic oligonucleotide
ggccggcaacgccagguag

SEQ ID NO: 975690 - RNA, 19 nt, Artificial Sequence
  Description of Artificial Sequence: Synthetic oligonucleotide
cgccauaagccaagugcgg

SEQ ID NO: 975691 - RNA, 19 nt, Artificial Sequence
  Description of Artificial Sequence: Synthetic oligonucleotide
ggcggggaggcccuccggc

SEQ ID NO: 975692 - RNA, 19 nt, Artificial Sequence
  Description of Artificial Sequence: Synthetic oligonucleotide
ccuccggccggcucagucc

SEQ ID NO: 975693 - RNA, 19 nt, Artificial Sequence
  Description of Artificial Sequence: Synthetic oligonucleotide
gcggcguugccgcugcuac

SEQ ID NO: 975694 - RNA, 19 nt, Artificial Sequence
  Description of Artificial Sequence: Synthetic oligonucleotide
gucgaugguccggccgucc

SEQ ID NO: 975695 - RNA, 19 nt, Artificial Sequence
  Description of Artificial Sequence: Synthetic oligonucleotide
aggcgguacuggcggguga

SEQ ID NO: 975696 - RNA, 19 nt, Artificial Sequence
  Description of Artificial Sequence: Synthetic oligonucleotide
ggucgcaagggccggaggu

SEQ ID NO: 975697 - RNA, 19 nt, Artificial Sequence
  Description of Artificial Sequence: Synthetic oligonucleotide
guuccacgcugcgugaacu

SEQ ID NO: 975698 - RNA, 19 nt, Artificial Sequence
  Description of Artificial Sequence: Synthetic oligonucleotide
cgcugcuaccaguuguccc

SEQ ID NO: 975699 - RNA, 19 nt, Artificial Sequence
  Description of Artificial Sequence: Synthetic oligonucleotide
gggagaggcgggguucucc

SEQ ID NO: 975700 - RNA, 19 nt, Artificial Sequence
  Description of Artificial Sequence: Synthetic oligonucleotide
cuagugccacuugugcaaa

SEQ ID NO: 975701 - RNA, 19 nt, Artificial Sequence
  Description of Artificial Sequence: Synthetic oligonucleotide
ccccaacugugcccaaugc

SEQ ID NO: 975702 - RNA, 19 nt, Artificial Sequence
  Description of Artificial Sequence: Synthetic oligonucleotide
cugcgcauauggcguguca

SEQ ID NO: 975703 - RNA, 19 nt, Artificial Sequence
  Description of Artificial Sequence: Synthetic oligonucleotide
cggauagggacgugucagc

SEQ ID NO: 975704 - RNA, 19 nt, Artificial Sequence
  Description of Artificial Sequence: Synthetic oligonucleotide
cuugccgucggggccggca

SEQ ID NO: 975705 - RNA, 19 nt, Artificial Sequence
  Description of Artificial Sequence: Synthetic oligonucleotide
gcaugccgcacgcaucgca

SEQ ID NO: 975706 - RNA, 19 nt, Artificial Sequence
  Description of Artificial Sequence: Synthetic oligonucleotide
cugguggaucaggaaggga

SEQ ID NO: 975707 - RNA, 19 nt, Artificial Sequence
  Description of Artificial Sequence: Synthetic oligonucleotide
guccgggguuuuccccacc

SEQ ID NO: 975708 - RNA, 19 nt, Artificial Sequence
  Description of Artificial Sequence: Synthetic oligonucleotide
ggggagauucacagugaga

SEQ ID NO: 975709 - RNA, 19 nt, Artificial Sequence
  Description of Artificial Sequence: Synthetic oligonucleotide
agguugcgcuguugagcaa

SEQ ID NO: 975710 - RNA, 19 nt, Artificial Sequence
  Description of Artificial Sequence: Synthetic oligonucleotide
ggagaggcgggguucuccu

SEQ ID NO: 975711 - RNA, 19 nt, Artificial Sequence
  Description of Artificial Sequence: Synthetic oligonucleotide
ccuaucccaccccguccgg

SEQ ID NO: 975712 - RNA, 19 nt, Artificial Sequence
  Description of Artificial Sequence: Synthetic oligonucleotide
gucgcaagggccggaggua

SEQ ID NO: 975713 - RNA, 19 nt, Artificial Sequence
  Description of Artificial Sequence: Synthetic oligonucleotide
cccguccgggguuuucccc

SEQ ID NO: 975714 - RNA, 19 nt, Artificial Sequence
  Description of Artificial Sequence: Synthetic oligonucleotide
gccguuaucccuggcucca

SEQ ID NO: 975715 - RNA, 19 nt, Artificial Sequence
  Description of Artificial Sequence: Synthetic oligonucleotide
cuccccucuccccaacugu

SEQ ID NO: 975716 - RNA, 19 nt, Artificial Sequence
  Description of Artificial Sequence: Synthetic oligonucleotide
cugggagcgucugaauagu

SEQ ID NO: 975717 - RNA, 19 nt, Artificial Sequence
  Description of Artificial Sequence: Synthetic oligonucleotide
gccaagugcgggcaugggu

SEQ ID NO: 975718 - RNA, 19 nt, Artificial Sequence
  Description of Artificial Sequence: Synthetic oligonucleotide
gcaacgccagguagucccc

SEQ ID NO: 975719 - RNA, 19 nt, Artificial Sequence
  Description of Artificial Sequence: Synthetic oligonucleotide
cagggccguuaucccuggc

SEQ ID NO: 975720 - RNA, 19 nt, Artificial Sequence
  Description of Artificial Sequence: Synthetic oligonucleotide
ccgggguuuuccccaccgg

SEQ ID NO: 975721 - RNA, 19 nt, Artificial Sequence
  Description of Artificial Sequence: Synthetic oligonucleotide
cccuccgggaaaucgagcu

SEQ ID NO: 975722 - RNA, 19 nt, Artificial Sequence
  Description of Artificial Sequence: Synthetic oligonucleotide
ggccgacuaaccacaggga

SEQ ID NO: 975723 - RNA, 19 nt, Artificial Sequence
  Description of Artificial Sequence: Synthetic oligonucleotide
gugcgugguuugcgccagc

SEQ ID NO: 975724 - RNA, 19 nt, Artificial Sequence
  Description of Artificial Sequence: Synthetic oligonucleotide
gcucucagguucgccauaa

SEQ ID NO: 975725 - RNA, 19 nt, Artificial Sequence
  Description of Artificial Sequence: Synthetic oligonucleotide
gccgcugcuaccaguuguc

SEQ ID NO: 975726 - RNA, 19 nt, Artificial Sequence
  Description of Artificial Sequence: Synthetic oligonucleotide
ggaaaucgagcuugcccuu

SEQ ID NO: 975727 - RNA, 19 nt, Artificial Sequence
  Description of Artificial Sequence: Synthetic oligonucleotide
cagcguggccggguccuug

SEQ ID NO: 975728 - RNA, 19 nt, Artificial Sequence
  Description of Artificial Sequence: Synthetic oligonucleotide
gcuuagcuaggcucaggau

SEQ ID NO: 975729 - RNA, 19 nt, Artificial Sequence
  Description of Artificial Sequence: Synthetic oligonucleotide
gcucggcagugaauuuggc

SEQ ID NO: 975730 - RNA, 19 nt, Artificial Sequence
  Description of Artificial Sequence: Synthetic oligonucleotide
ccggcaacgccagguaguc

SEQ ID NO: 975731 - RNA, 19 nt, Artificial Sequence
  Description of Artificial Sequence: Synthetic oligonucleotide
cgagugaggccaggugagg

SEQ ID NO: 975732 - RNA, 19 nt, Artificial Sequence
  Description of Artificial Sequence: Synthetic oligonucleotide
acuggcgggugaagcgcau

SEQ ID NO: 975733 - RNA, 19 nt, Artificial Sequence
  Description of Artificial Sequence: Synthetic oligonucleotide
ggggcgcaugcaauaaaua

SEQ ID NO: 975734 - RNA, 19 nt, Artificial Sequence
  Description of Artificial Sequence: Synthetic oligonucleotide
ccccguccgggguuuuccc

SEQ ID NO: 975735 - RNA, 19 nt, Artificial Sequence
  Description of Artificial Sequence: Synthetic oligonucleotide
cccugccauacagagccuc

SEQ ID NO: 975736 - RNA, 19 nt, Artificial Sequence
  Description of Artificial Sequence: Synthetic oligonucleotide
ggccacccggggcgcaugc

SEQ ID NO: 975737 - RNA, 19 nt, Artificial Sequence
  Description of Artificial Sequence: Synthetic oligonucleotide
cgcaagggccggagguagg

SEQ ID NO: 975738 - RNA, 19 nt, Artificial Sequence
  Description of Artificial Sequence: Synthetic oligonucleotide
ccgggaaaucgagcuugcc

SEQ ID NO: 975739 - RNA, 19 nt, Artificial Sequence
  Description of Artificial Sequence: Synthetic oligonucleotide
gcgcuuuagguuggagaga

SEQ ID NO: 975740 - RNA, 19 nt, Artificial Sequence
  Description of Artificial Sequence: Synthetic oligonucleotide
gcguugccgcugcuaccag

SEQ ID NO: 975741 - RNA, 19 nt, Artificial Sequence
  Description of Artificial Sequence: Synthetic oligonucleotide
ccgcugcuaccaguugucc

SEQ ID NO: 975742 - RNA, 19 nt, Artificial Sequence
  Description of Artificial Sequence: Synthetic oligonucleotide
ccccagcaaucuugucccc

SEQ ID NO: 975743 - RNA, 19 nt, Artificial Sequence
  Description of Artificial Sequence: Synthetic oligonucleotide
gccucugcccugccauaca

SEQ ID NO: 975744 - RNA, 19 nt, Artificial Sequence
  Description of Artificial Sequence: Synthetic oligonucleotide
ccgaguggaaugcgcaugu

SEQ ID NO: 975745 - RNA, 19 nt, Artificial Sequence
  Description of Artificial Sequence: Synthetic oligonucleotide
gccccggcagcuaccucag

SEQ ID NO: 975746 - RNA, 19 nt, Artificial Sequence
  Description of Artificial Sequence: Synthetic oligonucleotide
gcgguacuggcgggugaag

SEQ ID NO: 975747 - RNA, 19 nt, Artificial Sequence
  Description of Artificial Sequence: Synthetic oligonucleotide
gcgggcauggguagcccuc

SEQ ID NO: 975748 - RNA, 19 nt, Artificial Sequence
  Description of Artificial Sequence: Synthetic oligonucleotide
cccuccggccggcucaguc

SEQ ID NO: 975749 - RNA, 19 nt, Artificial Sequence
  Description of Artificial Sequence: Synthetic oligonucleotide
gcugcgcauauggcguguc

SEQ ID NO: 975750 - RNA, 19 nt, Artificial Sequence
  Description of Artificial Sequence: Synthetic oligonucleotide
cacgcugcgugaacuucuu

SEQ ID NO: 975751 - RNA, 19 nt, Artificial Sequence
  Description of Artificial Sequence: Synthetic oligonucleotide
cagcggggagauucacagu

SEQ ID NO: 975752 - RNA, 19 nt, Artificial Sequence
  Description of Artificial Sequence: Synthetic oligonucleotide
gugcuccgugaggcgguac

SEQ ID NO: 975753 - RNA, 19 nt, Artificial Sequence
  Description of Artificial Sequence: Synthetic oligonucleotide
gggcauggguagcccucca

SEQ ID NO: 975754 - RNA, 19 nt, Artificial Sequence
  Description of Artificial Sequence: Synthetic oligonucleotide
ccgggcugagucccagcuc

SEQ ID NO: 975755 - RNA, 19 nt, Artificial Sequence
  Description of Artificial Sequence: Synthetic oligonucleotide
caccccguccgggguuuuc

SEQ ID NO: 975756 - RNA, 19 nt, Artificial Sequence
  Description of Artificial Sequence: Synthetic oligonucleotide
gguucgccauaagccaagu

SEQ ID NO: 975757 - RNA, 19 nt, Artificial Sequence
  Description of Artificial Sequence: Synthetic oligonucleotide
cacccggggcgcaugcaau

SEQ ID NO: 975758 - RNA, 19 nt, Artificial Sequence
  Description of Artificial Sequence: Synthetic oligonucleotide
ggugcgcgcccuggcucag

SEQ ID NO: 975759 - RNA, 19 nt, Artificial Sequence
  Description of Artificial Sequence: Synthetic oligonucleotide
ggccuaaguggcugcgcau

SEQ ID NO: 975760 - RNA, 19 nt, Artificial Sequence
  Description of Artificial Sequence: Synthetic oligonucleotide
gccggcaacgccagguagu

SEQ ID NO: 975761 - RNA, 19 nt, Artificial Sequence
  Description of Artificial Sequence: Synthetic oligonucleotide
cguccgggguuuuccccac

SEQ ID NO: 975762 - RNA, 19 nt, Artificial Sequence
  Description of Artificial Sequence: Synthetic oligonucleotide
cgucggggccggcaacgcc

SEQ ID NO: 975763 - RNA, 19 nt, Artificial Sequence
  Description of Artificial Sequence: Synthetic oligonucleotide
gugcaggaagugcgugguu

SEQ ID NO: 975764 - RNA, 19 nt, Artificial Sequence
  Description of Artificial Sequence: Synthetic oligonucleotide
ggcggccccggcagcuacc

SEQ ID NO: 975765 - RNA, 19 nt, Artificial Sequence
  Description of Artificial Sequence: Synthetic oligonucleotide
gccgcacgcaucgcacgca

SEQ ID NO: 975766 - RNA, 19 nt, Artificial Sequence
  Description of Artificial Sequence: Synthetic oligonucleotide
ccccgaggccagccagcgc

SEQ ID NO: 975767 - RNA, 19 nt, Artificial Sequence
  Description of Artificial Sequence: Synthetic oligonucleotide
cggggcgcaugcaauaaau

SEQ ID NO: 975768 - RNA, 19 nt, Artificial Sequence
  Description of Artificial Sequence: Synthetic oligonucleotide
ccgcacgcaucgcacgcaa

SEQ ID NO: 975769 - RNA, 19 nt, Artificial Sequence
  Description of Artificial Sequence: Synthetic oligonucleotide
cgcacgcaaagggcuucag

SEQ ID NO: 975770 - RNA, 19 nt, Artificial Sequence
  Description of Artificial Sequence: Synthetic oligonucleotide
ccccagcggggagauucac

SEQ ID NO: 975771 - RNA, 19 nt, Artificial Sequence
  Description of Artificial Sequence: Synthetic oligonucleotide
ggcugcgcauauggcgugu

SEQ ID NO: 975772 - RNA, 19 nt, Artificial Sequence
  Description of Artificial Sequence: Synthetic oligonucleotide
cggcaacgccagguagucc

SEQ ID NO: 975773 - RNA, 19 nt, Artificial Sequence
  Description of Artificial Sequence: Synthetic oligonucleotide
cggccgcgccaccuacugc

SEQ ID NO: 975774 - RNA, 19 nt, Artificial Sequence
  Description of Artificial Sequence: Synthetic oligonucleotide
ccccggauuaaggcacaaa

SEQ ID NO: 975775 - RNA, 19 nt, Artificial Sequence
  Description of Artificial Sequence: Synthetic oligonucleotide
cgcaugccgcacgcaucgc

SEQ ID NO: 975776 - RNA, 19 nt, Artificial Sequence
  Description of Artificial Sequence: Synthetic oligonucleotide
cguugccgcugcuaccagu

SEQ ID NO: 975777 - RNA, 19 nt, Artificial Sequence
  Description of Artificial Sequence: Synthetic oligonucleotide
gccacccggggcgcaugca

SEQ ID NO: 975778 - RNA, 19 nt, Artificial Sequence
  Description of Artificial Sequence: Synthetic oligonucleotide
cgcacgcaucgcacgcaaa

SEQ ID NO: 975779 - RNA, 19 nt, Artificial Sequence
  Description of Artificial Sequence: Synthetic oligonucleotide
caccuacugcgugcaucuu

SEQ ID NO: 975780 - RNA, 19 nt, Artificial Sequence
  Description of Artificial Sequence: Synthetic oligonucleotide
cgccggguagccgggcgca

SEQ ID NO: 975781 - RNA, 19 nt, Artificial Sequence
  Description of Artificial Sequence: Synthetic oligonucleotide
ccuugccgucggggccggc

SEQ ID NO: 975782 - RNA, 19 nt, Artificial Sequence
  Description of Artificial Sequence: Synthetic oligonucleotide
cggccggcucaguccccuc

SEQ ID NO: 975783 - RNA, 19 nt, Artificial Sequence
  Description of Artificial Sequence: Synthetic oligonucleotide
gcccugccauacagagccu

SEQ ID NO: 975784 - RNA, 19 nt, Artificial Sequence
  Description of Artificial Sequence: Synthetic oligonucleotide
cugcggcguugccgcugcu

SEQ ID NO: 975785 - RNA, 19 nt, Artificial Sequence
  Description of Artificial Sequence: Synthetic oligonucleotide
gcgccaccuuggggucgug

SEQ ID NO: 975786 - RNA, 19 nt, Artificial Sequence
  Description of Artificial Sequence: Synthetic oligonucleotide
aauuacuggauuaagagac

SEQ ID NO: 975787 - RNA, 19 nt, Artificial Sequence
  Description of Artificial Sequence: Synthetic oligonucleotide
uauaacacagcuaaggcgc

SEQ ID NO: 975788 - RNA, 19 nt, Artificial Sequence
  Description of Artificial Sequence: Synthetic oligonucleotide
uuuaauggcaguaauacaa

SEQ ID NO: 975789 - RNA, 19 nt, Artificial Sequence
  Description of Artificial Sequence: Synthetic oligonucleotide
auuuaugacucaaagaggc

SEQ ID NO: 975790 - RNA, 19 nt, Artificial Sequence
  Description of Artificial Sequence: Synthetic oligonucleotide
uuaagagaccacaugagag

SEQ ID NO: 975791 - RNA, 19 nt, Artificial Sequence
  Description of Artificial Sequence: Synthetic oligonucleotide
acaauuacuggauuaagag

SEQ ID NO: 975792 - RNA, 19 nt, Artificial Sequence
  Description of Artificial Sequence: Synthetic oligonucleotide
acguuauauacauauuugc

SEQ ID NO: 975793 - RNA, 19 nt, Artificial Sequence
  Description of Artificial Sequence: Synthetic oligonucleotide
aacuauuucaagaggaggg

SEQ ID NO: 975794 - RNA, 19 nt, Artificial Sequence
  Description of Artificial Sequence: Synthetic oligonucleotide
auauaacacagcuaaggcg

SEQ ID NO: 975795 - RNA, 19 nt, Artificial Sequence
  Description of Artificial Sequence: Synthetic oligonucleotide
ucagcuaacuauuucaaga

SEQ ID NO: 975796 - RNA, 19 nt, Artificial Sequence
  Description of Artificial Sequence: Synthetic oligonucleotide
acauauuugcaccaucgac

SEQ ID NO: 975797 - RNA, 19 nt, Artificial Sequence
  Description of Artificial Sequence: Synthetic oligonucleotide
agaaacacuauuuacacuu

SEQ ID NO: 975798 - RNA, 19 nt, Artificial Sequence
  Description of Artificial Sequence: Synthetic oligonucleotide
acccaagaugguuagauac

SEQ ID NO: 975799 - RNA, 19 nt, Artificial Sequence
  Description of Artificial Sequence: Synthetic oligonucleotide
acaagcaaacacuaucugg

SEQ ID NO: 975800 - RNA, 19 nt, Artificial Sequence
  Description of Artificial Sequence: Synthetic oligonucleotide
aauuuaugacucaaagagg

SEQ ID NO: 975801 - RNA, 19 nt, Artificial Sequence
  Description of Artificial Sequence: Synthetic oligonucleotide
uacguuauauacauauuug

SEQ ID NO: 975802 - RNA, 19 nt, Artificial Sequence
  Description of Artificial Sequence: Synthetic oligonucleotide
aagaugguuagauacaauu

SEQ ID NO: 975803 - RNA, 19 nt, Artificial Sequence
  Description of Artificial Sequence: Synthetic oligonucleotide
aguuccuuaucccaugagg

SEQ ID NO: 975804 - RNA, 19 nt, Artificial Sequence
  Description of Artificial Sequence: Synthetic oligonucleotide
uucuuuaaaacuguggccu

SEQ ID NO: 975805 - RNA, 19 nt, Artificial Sequence
  Description of Artificial Sequence: Synthetic oligonucleotide
cauauaacacagcuaaggc

SEQ ID NO: 975806 - RNA, 19 nt, Artificial Sequence
  Description of Artificial Sequence: Synthetic oligonucleotide
uacaauuacuggauuaaga

SEQ ID NO: 975807 - RNA, 19 nt, Artificial Sequence
  Description of Artificial Sequence: Synthetic oligonucleotide
aaggggugcagcucgacuc

SEQ ID NO: 975808 - RNA, 19 nt, Artificial Sequence
  Description of Artificial Sequence: Synthetic oligonucleotide
uacaguacguuauauacau

SEQ ID NO: 975809 - RNA, 19 nt, Artificial Sequence
  Description of Artificial Sequence: Synthetic oligonucleotide
acggauuucagauuuaaaa

SEQ ID NO: 975810 - RNA, 19 nt, Artificial Sequence
  Description of Artificial Sequence: Synthetic oligonucleotide
cuacauauaacacagcuaa

SEQ ID NO: 975811 - RNA, 19 nt, Artificial Sequence
  Description of Artificial Sequence: Synthetic oligonucleotide
aagacagauacugaguaca

SEQ ID NO: 975812 - RNA, 19 nt, Artificial Sequence
  Description of Artificial Sequence: Synthetic oligonucleotide
agcaaacacuaucugguac

SEQ ID NO: 975813 - RNA, 19 nt, Artificial Sequence
  Description of Artificial Sequence: Synthetic oligonucleotide
auuaagagaccacaugaga

SEQ ID NO: 975814 - RNA, 19 nt, Artificial Sequence
  Description of Artificial Sequence: Synthetic oligonucleotide
uacaauccugguuagagaa

SEQ ID NO: 975815 - RNA, 19 nt, Artificial Sequence
  Description of Artificial Sequence: Synthetic oligonucleotide
acuauuucaagaggagggc

SEQ ID NO: 975816 - RNA, 19 nt, Artificial Sequence
  Description of Artificial Sequence: Synthetic oligonucleotide
uuccacaugacauggcucc

SEQ ID NO: 975817 - RNA, 19 nt, Artificial Sequence
  Description of Artificial Sequence: Synthetic oligonucleotide
guuacaauccugguuagag

SEQ ID NO: 975818 - RNA, 19 nt, Artificial Sequence
  Description of Artificial Sequence: Synthetic oligonucleotide
uuacacuuuuguuacaauc

SEQ ID NO: 975819 - RNA, 19 nt, Artificial Sequence
  Description of Artificial Sequence: Synthetic oligonucleotide
uuaugacucaaagaggcug

SEQ ID NO: 975820 - RNA, 19 nt, Artificial Sequence
  Description of Artificial Sequence: Synthetic oligonucleotide
uggauuaagagaccacaug

SEQ ID NO: 975821 - RNA, 19 nt, Artificial Sequence
  Description of Artificial Sequence: Synthetic oligonucleotide
agcuaaggcgcaugaaagc

SEQ ID NO: 975822 - RNA, 19 nt, Artificial Sequence
  Description of Artificial Sequence: Synthetic oligonucleotide
uaacugcauccuuuaaugg

SEQ ID NO: 975823 - RNA, 19 nt, Artificial Sequence
  Description of Artificial Sequence: Synthetic oligonucleotide
gauuaagagaccacaugag

SEQ ID NO: 975824 - RNA, 19 nt, Artificial Sequence
  Description of Artificial Sequence: Synthetic oligonucleotide
ugguuagauacaauuuaug

SEQ ID NO: 975825 - RNA, 19 nt, Artificial Sequence
  Description of Artificial Sequence: Synthetic oligonucleotide
uaauacaauuacuggauua

SEQ ID NO: 975826 - RNA, 19 nt, Artificial Sequence
  Description of Artificial Sequence: Synthetic oligonucleotide
ugcauugggaguccuuggg

SEQ ID NO: 975827 - RNA, 19 nt, Artificial Sequence
  Description of Artificial Sequence: Synthetic oligonucleotide
ugcauggcggcuaagucug

SEQ ID NO: 975828 - RNA, 19 nt, Artificial Sequence
  Description of Artificial Sequence: Synthetic oligonucleotide
gaugguuagauacaauuua

SEQ ID NO: 975829 - RNA, 19 nt, Artificial Sequence
  Description of Artificial Sequence: Synthetic oligonucleotide
agcuaacuauuucaagagg

SEQ ID NO: 975830 - RNA, 19 nt, Artificial Sequence
  Description of Artificial Sequence: Synthetic oligonucleotide
auacugaguacaaaagggg

SEQ ID NO: 975831 - RNA, 19 nt, Artificial Sequence
  Description of Artificial Sequence: Synthetic oligonucleotide
ugcaccaucgacuuucaac

SEQ ID NO: 975832 - RNA, 19 nt, Artificial Sequence
  Description of Artificial Sequence: Synthetic oligonucleotide
ucgacuuucaacucagaaa

SEQ ID NO: 975833 - RNA, 19 nt, Artificial Sequence
  Description of Artificial Sequence: Synthetic oligonucleotide
gcaguaauacaauuacugg

SEQ ID NO: 975834 - RNA, 19 nt, Artificial Sequence
  Description of Artificial Sequence: Synthetic oligonucleotide
cuugcucagcgucacaucc

SEQ ID NO: 975835 - RNA, 19 nt, Artificial Sequence
  Description of Artificial Sequence: Synthetic oligonucleotide
cagcuaacuauuucaagag

SEQ ID NO: 975836 - RNA, 19 nt, Artificial Sequence
  Description of Artificial Sequence: Synthetic oligonucleotide
ugagcucuugccauugccc

SEQ ID NO: 975837 - RNA, 19 nt, Artificial Sequence
  Description of Artificial Sequence: Synthetic oligonucleotide
gguuccagagaacagugcg

SEQ ID NO: 975838 - RNA, 19 nt, Artificial Sequence
  Description of Artificial Sequence: Synthetic oligonucleotide
cacuggacagguaauacug

SEQ ID NO: 975839 - RNA, 19 nt, Artificial Sequence
  Description of Artificial Sequence: Synthetic oligonucleotide
acaaguugcucacugggca

SEQ ID NO: 975840 - RNA, 19 nt, Artificial Sequence
  Description of Artificial Sequence: Synthetic oligonucleotide
uucagcuaacuauuucaag

SEQ ID NO: 975841 - RNA, 19 nt, Artificial Sequence
  Description of Artificial Sequence: Synthetic oligonucleotide
aguaauacaauuacuggau

SEQ ID NO: 975842 - RNA, 19 nt, Artificial Sequence
  Description of Artificial Sequence: Synthetic oligonucleotide
ugacgucucugcauggcgg

SEQ ID NO: 975843 - RNA, 19 nt, Artificial Sequence
  Description of Artificial Sequence: Synthetic oligonucleotide
uccuugagcugucucgagg

SEQ ID NO: 975844 - RNA, 19 nt, Artificial Sequence
  Description of Artificial Sequence: Synthetic oligonucleotide
gugaguggcuuuuagugcc

SEQ ID NO: 975845 - RNA, 19 nt, Artificial Sequence
  Description of Artificial Sequence: Synthetic oligonucleotide
ggauuaagagaccacauga

SEQ ID NO: 975846 - RNA, 19 nt, Artificial Sequence
  Description of Artificial Sequence: Synthetic oligonucleotide
cuuaguucaagggucgccc

SEQ ID NO: 975847 - RNA, 19 nt, Artificial Sequence
  Description of Artificial Sequence: Synthetic oligonucleotide
uuuaugacucaaagaggcu

SEQ ID NO: 975848 - RNA, 19 nt, Artificial Sequence
  Description of Artificial Sequence: Synthetic oligonucleotide
ucccuuaguucaagggucg

SEQ ID NO: 975849 - RNA, 19 nt, Artificial Sequence
  Description of Artificial Sequence: Synthetic oligonucleotide
cuuucgaacugcuggggcc

SEQ ID NO: 975850 - RNA, 19 nt, Artificial Sequence
  Description of Artificial Sequence: Synthetic oligonucleotide
ucacccacggauuucagau

SEQ ID NO: 975851 - RNA, 19 nt, Artificial Sequence
  Description of Artificial Sequence: Synthetic oligonucleotide
auuacuggauuaagagacc

SEQ ID NO: 975852 - RNA, 19 nt, Artificial Sequence
  Description of Artificial Sequence: Synthetic oligonucleotide
uccaacaccgcaccaggcc

SEQ ID NO: 975853 - RNA, 19 nt, Artificial Sequence
  Description of Artificial Sequence: Synthetic oligonucleotide
ucacugggcaacucguggg

SEQ ID NO: 975854 - RNA, 19 nt, Artificial Sequence
  Description of Artificial Sequence: Synthetic oligonucleotide
acaccacggauccuugagc

SEQ ID NO: 975855 - RNA, 19 nt, Artificial Sequence
  Description of Artificial Sequence: Synthetic oligonucleotide
ggcaguaauacaauuacug

SEQ ID NO: 975856 - RNA, 19 nt, Artificial Sequence
  Description of Artificial Sequence: Synthetic oligonucleotide
uaauccaacaccgcaccag

SEQ ID NO: 975857 - RNA, 19 nt, Artificial Sequence
  Description of Artificial Sequence: Synthetic oligonucleotide
guacucuacauauaacaca

SEQ ID NO: 975858 - RNA, 19 nt, Artificial Sequence
  Description of Artificial Sequence: Synthetic oligonucleotide
uucaggacagcucuaccaa

SEQ ID NO: 975859 - RNA, 19 nt, Artificial Sequence
  Description of Artificial Sequence: Synthetic oligonucleotide
caugagagaaggcagguga

SEQ ID NO: 975860 - RNA, 19 nt, Artificial Sequence
  Description of Artificial Sequence: Synthetic oligonucleotide
ugagcugucucgaggguca

SEQ ID NO: 975861 - RNA, 19 nt, Artificial Sequence
  Description of Artificial Sequence: Synthetic oligonucleotide
gauacaauuuaugacucaa

SEQ ID NO: 975862 - RNA, 19 nt, Artificial Sequence
  Description of Artificial Sequence: Synthetic oligonucleotide
acagcuaaggcgcaugaaa

SEQ ID NO: 975863 - RNA, 19 nt, Artificial Sequence
  Description of Artificial Sequence: Synthetic oligonucleotide
uuacaauccugguuagaga

SEQ ID NO: 975864 - RNA, 19 nt, Artificial Sequence
  Description of Artificial Sequence: Synthetic oligonucleotide
cagcuaaggcgcaugaaag

SEQ ID NO: 975865 - RNA, 19 nt, Artificial Sequence
  Description of Artificial Sequence: Synthetic oligonucleotide
ucgagggucaggccagugg

SEQ ID NO: 975866 - RNA, 19 nt, Artificial Sequence
  Description of Artificial Sequence: Synthetic oligonucleotide
gaagacagauacugaguac

SEQ ID NO: 975867 - RNA, 19 nt, Artificial Sequence
  Description of Artificial Sequence: Synthetic oligonucleotide
auauuugcaccaucgacuu

SEQ ID NO: 975868 - RNA, 19 nt, Artificial Sequence
  Description of Artificial Sequence: Synthetic oligonucleotide
uuacuggauuaagagacca

SEQ ID NO: 975869 - RNA, 19 nt, Artificial Sequence
  Description of Artificial Sequence: Synthetic oligonucleotide
cauauuugcaccaucgacu

SEQ ID NO: 975870 - RNA, 19 nt, Artificial Sequence
  Description of Artificial Sequence: Synthetic oligonucleotide
acuuucaggacagcucuac

SEQ ID NO: 975871 - RNA, 19 nt, Artificial Sequence
  Description of Artificial Sequence: Synthetic oligonucleotide
ucuucgggagucuggcagg

SEQ ID NO: 975872 - RNA, 19 nt, Artificial Sequence
  Description of Artificial Sequence: Synthetic oligonucleotide
uuugccgccugcauuggga

SEQ ID NO: 975873 - RNA, 19 nt, Artificial Sequence
  Description of Artificial Sequence: Synthetic oligonucleotide
aaauaacugcauccuuuaa

SEQ ID NO: 975874 - RNA, 19 nt, Artificial Sequence
  Description of Artificial Sequence: Synthetic oligonucleotide
cauggcuccgucaucuccc

SEQ ID NO: 975875 - RNA, 19 nt, Artificial Sequence
  Description of Artificial Sequence: Synthetic oligonucleotide
aaguugcucacugggcaac

SEQ ID NO: 975876 - RNA, 19 nt, Artificial Sequence
  Description of Artificial Sequence: Synthetic oligonucleotide
caauuacuggauuaagaga

SEQ ID NO: 975877 - RNA, 19 nt, Artificial Sequence
  Description of Artificial Sequence: Synthetic oligonucleotide
aacagugcgggcaaaacuu

SEQ ID NO: 975878 - RNA, 19 nt, Artificial Sequence
  Description of Artificial Sequence: Synthetic oligonucleotide
caugcgacgaucauguaaa

SEQ ID NO: 975879 - RNA, 19 nt, Artificial Sequence
  Description of Artificial Sequence: Synthetic oligonucleotide
cuggacagguaauacugag

SEQ ID NO: 975880 - RNA, 19 nt, Artificial Sequence
  Description of Artificial Sequence: Synthetic oligonucleotide
aaaggggugcagcucgacu

SEQ ID NO: 975881 - RNA, 19 nt, Artificial Sequence
  Description of Artificial Sequence: Synthetic oligonucleotide
ggauccuugagcugucucg

SEQ ID NO: 975882 - RNA, 19 nt, Artificial Sequence
  Description of Artificial Sequence: Synthetic oligonucleotide
uuugcgaagcacccaguaa

SEQ ID NO: 975883 - RNA, 19 nt, Artificial Sequence
  Description of Artificial Sequence: Synthetic oligonucleotide
uccugguuagagaacaauu

SEQ ID NO: 975884 - RNA, 19 nt, Artificial Sequence
  Description of Artificial Sequence: Synthetic oligonucleotide
cuaaggcgcaugaaagcag

SEQ ID NO: 975885 - RNA, 19 nt, Artificial Sequence
  Description of Artificial Sequence: Synthetic oligonucleotide
uuuugcgaagcacccagua

SEQ ID NO: 975886 - RNA, 19 nt, Artificial Sequence
  Description of Artificial Sequence: Synthetic oligonucleotide
aguggggauucacacggag

SEQ ID NO: 975887 - RNA, 19 nt, Artificial Sequence
  Description of Artificial Sequence: Synthetic oligonucleotide
acccaguaauccaacaccg

SEQ ID NO: 975888 - RNA, 19 nt, Artificial Sequence
  Description of Artificial Sequence: Synthetic oligonucleotide
uagggcacgggccagccga

SEQ ID NO: 975889 - RNA, 19 nt, Artificial Sequence
  Description of Artificial Sequence: Synthetic oligonucleotide
cucuucgggagucuggcag

SEQ ID NO: 975890 - RNA, 19 nt, Artificial Sequence
  Description of Artificial Sequence: Synthetic oligonucleotide
ccuuuaauggcaguaauac

SEQ ID NO: 975891 - RNA, 19 nt, Artificial Sequence
  Description of Artificial Sequence: Synthetic oligonucleotide
uuaguucaagggucgcccc

SEQ ID NO: 975892 - RNA, 19 nt, Artificial Sequence
  Description of Artificial Sequence: Synthetic oligonucleotide
cuugggucauacaagcuga

SEQ ID NO: 975893 - RNA, 19 nt, Artificial Sequence
  Description of Artificial Sequence: Synthetic oligonucleotide
aucgacuuucaacucagaa

SEQ ID NO: 975894 - RNA, 19 nt, Artificial Sequence
  Description of Artificial Sequence: Synthetic oligonucleotide
accaucgacuuucaacuca

SEQ ID NO: 975895 - RNA, 19 nt, Artificial Sequence
  Description of Artificial Sequence: Synthetic oligonucleotide
uggcaguaauacaauuacu

SEQ ID NO: 975896 - RNA, 19 nt, Artificial Sequence
  Description of Artificial Sequence: Synthetic oligonucleotide
gacagguccacacugccaa

SEQ ID NO: 975897 - RNA, 19 nt, Artificial Sequence
  Description of Artificial Sequence: Synthetic oligonucleotide
gguacaaguugcucacugg

SEQ ID NO: 975898 - RNA, 19 nt, Artificial Sequence
  Description of Artificial Sequence: Synthetic oligonucleotide
cauugggaguccuuggguc

SEQ ID NO: 975899 - RNA, 19 nt, Artificial Sequence
  Description of Artificial Sequence: Synthetic oligonucleotide
ugacauggcuccgucaucu

SEQ ID NO: 975900 - RNA, 19 nt, Artificial Sequence
  Description of Artificial Sequence: Synthetic oligonucleotide
acuaucugguacucuacau

SEQ ID NO: 975901 - RNA, 19 nt, Artificial Sequence
  Description of Artificial Sequence: Synthetic oligonucleotide
caggggaauguucacugcc

SEQ ID NO: 975902 - RNA, 19 nt, Artificial Sequence
  Description of Artificial Sequence: Synthetic oligonucleotide
uuuacacuuuuguuacaau

SEQ ID NO: 975903 - RNA, 19 nt, Artificial Sequence
  Description of Artificial Sequence: Synthetic oligonucleotide
agugcgggcaaaacuuggc

SEQ ID NO: 975904 - RNA, 19 nt, Artificial Sequence
  Description of Artificial Sequence: Synthetic oligonucleotide
aacacagcuaaggcgcaug

SEQ ID NO: 975905 - RNA, 19 nt, Artificial Sequence
  Description of Artificial Sequence: Synthetic oligonucleotide
caggguacaaguugcucac

SEQ ID NO: 975906 - RNA, 19 nt, Artificial Sequence
  Description of Artificial Sequence: Synthetic oligonucleotide
cugacgucucugcauggcg

SEQ ID NO: 975907 - RNA, 19 nt, Artificial Sequence
  Description of Artificial Sequence: Synthetic oligonucleotide
cagaacccaagaugguuag

SEQ ID NO: 975908 - RNA, 19 nt, Artificial Sequence
  Description of Artificial Sequence: Synthetic oligonucleotide
uccuuaucccaugaggguc

SEQ ID NO: 975909 - RNA, 19 nt, Artificial Sequence
  Description of Artificial Sequence: Synthetic oligonucleotide
uucaagggucgccccaggc

SEQ ID NO: 975910 - RNA, 19 nt, Artificial Sequence
  Description of Artificial Sequence: Synthetic oligonucleotide
ucacaacuucccuuaguuc

SEQ ID NO: 975911 - RNA, 19 nt, Artificial Sequence
  Description of Artificial Sequence: Synthetic oligonucleotide
gguacucuacauauaacac

SEQ ID NO: 975912 - RNA, 19 nt, Artificial Sequence
  Description of Artificial Sequence: Synthetic oligonucleotide
gggacaagcaaacacuauc

SEQ ID NO: 975913 - RNA, 19 nt, Artificial Sequence
  Description of Artificial Sequence: Synthetic oligonucleotide
gcuuuugccgccugcauug

SEQ ID NO: 975914 - RNA, 19 nt, Artificial Sequence
  Description of Artificial Sequence: Synthetic oligonucleotide
acacucacaacuucccuua

SEQ ID NO: 975915 - RNA, 19 nt, Artificial Sequence
  Description of Artificial Sequence: Synthetic oligonucleotide
ucgugggagcccaggagcc

SEQ ID NO: 975916 - RNA, 19 nt, Artificial Sequence
  Description of Artificial Sequence: Synthetic oligonucleotide
caguacguuauauacauau

SEQ ID NO: 975917 - RNA, 19 nt, Artificial Sequence
  Description of Artificial Sequence: Synthetic oligonucleotide
ucacgcaaggcucgcuccc

SEQ ID NO: 975918 - RNA, 19 nt, Artificial Sequence
  Description of Artificial Sequence: Synthetic oligonucleotide
gacgucucugcauggcggc

SEQ ID NO: 975919 - RNA, 19 nt, Artificial Sequence
  Description of Artificial Sequence: Synthetic oligonucleotide
ugcgaagcacccaguaauc

SEQ ID NO: 975920 - RNA, 19 nt, Artificial Sequence
  Description of Artificial Sequence: Synthetic oligonucleotide
cacaccacggauccuugag

SEQ ID NO: 975921 - RNA, 19 nt, Artificial Sequence
  Description of Artificial Sequence: Synthetic oligonucleotide
ccuugagcugucucgaggg

SEQ ID NO: 975922 - RNA, 19 nt, Artificial Sequence
  Description of Artificial Sequence: Synthetic oligonucleotide
ucucacgcaaggcucgcuc

SEQ ID NO: 975923 - RNA, 19 nt, Artificial Sequence
  Description of Artificial Sequence: Synthetic oligonucleotide
agccaugcgacgaucaugu

SEQ ID NO: 975924 - RNA, 19 nt, Artificial Sequence
  Description of Artificial Sequence: Synthetic oligonucleotide
aacccaagaugguuagaua

SEQ ID NO: 975925 - RNA, 19 nt, Artificial Sequence
  Description of Artificial Sequence: Synthetic oligonucleotide
auccuuuaauggcaguaau

SEQ ID NO: 975926 - RNA, 19 nt, Artificial Sequence
  Description of Artificial Sequence: Synthetic oligonucleotide
ggacgugcagagcagcagg

SEQ ID NO: 975927 - RNA, 19 nt, Artificial Sequence
  Description of Artificial Sequence: Synthetic oligonucleotide
ucccucuucgggagucugg

SEQ ID NO: 975928 - RNA, 19 nt, Artificial Sequence
  Description of Artificial Sequence: Synthetic oligonucleotide
uguggccugauggcgagug

SEQ ID NO: 975929 - RNA, 19 nt, Artificial Sequence
  Description of Artificial Sequence: Synthetic oligonucleotide
cagugcgggcaaaacuugg

SEQ ID NO: 975930 - RNA, 19 nt, Artificial Sequence
  Description of Artificial Sequence: Synthetic oligonucleotide
agaugguuagauacaauuu

SEQ ID NO: 975931 - RNA, 19 nt, Artificial Sequence
  Description of Artificial Sequence: Synthetic oligonucleotide
cucacgcaaggcucgcucc

SEQ ID NO: 975932 - RNA, 19 nt, Artificial Sequence
  Description of Artificial Sequence: Synthetic oligonucleotide
acccacggauuucagauuu

SEQ ID NO: 975933 - RNA, 19 nt, Artificial Sequence
  Description of Artificial Sequence: Synthetic oligonucleotide
ugggcaacucgugggagcc

SEQ ID NO: 975934 - RNA, 19 nt, Artificial Sequence
  Description of Artificial Sequence: Synthetic oligonucleotide
gcaaaacuuggcuugcuca

SEQ ID NO: 975935 - RNA, 19 nt, Artificial Sequence
  Description of Artificial Sequence: Synthetic oligonucleotide
cuucagcuaacuauuucaa

SEQ ID NO: 975936 - RNA, 19 nt, Artificial Sequence
  Description of Artificial Sequence: Synthetic oligonucleotide
cagauuccaucucacccac

SEQ ID NO: 975937 - RNA, 19 nt, Artificial Sequence
  Description of Artificial Sequence: Synthetic oligonucleotide
caggccgccagcagguagg

SEQ ID NO: 975938 - RNA, 19 nt, Artificial Sequence
  Description of Artificial Sequence: Synthetic oligonucleotide
agagcgagggucccgcagu

SEQ ID NO: 975939 - RNA, 19 nt, Artificial Sequence
  Description of Artificial Sequence: Synthetic oligonucleotide
gaacagugcgggcaaaacu

SEQ ID NO: 975940 - RNA, 19 nt, Artificial Sequence
  Description of Artificial Sequence: Synthetic oligonucleotide
acucacaacuucccuuagu

SEQ ID NO: 975941 - RNA, 19 nt, Artificial Sequence
  Description of Artificial Sequence: Synthetic oligonucleotide
uucaguuuuggaggugggu

SEQ ID NO: 975942 - RNA, 19 nt, Artificial Sequence
  Description of Artificial Sequence: Synthetic oligonucleotide
cgaguggggauucacacgg

SEQ ID NO: 975943 - RNA, 19 nt, Artificial Sequence
  Description of Artificial Sequence: Synthetic oligonucleotide
gauccuugagcugucucga

SEQ ID NO: 975944 - RNA, 19 nt, Artificial Sequence
  Description of Artificial Sequence: Synthetic oligonucleotide
cucgacuccugcaguuucc

SEQ ID NO: 975945 - RNA, 19 nt, Artificial Sequence
  Description of Artificial Sequence: Synthetic oligonucleotide
uccacaugacauggcuccg

SEQ ID NO: 975946 - RNA, 19 nt, Artificial Sequence
  Description of Artificial Sequence: Synthetic oligonucleotide
gagucuggcagguggccac

SEQ ID NO: 975947 - RNA, 19 nt, Artificial Sequence
  Description of Artificial Sequence: Synthetic oligonucleotide
uggcggcuaagucuggguc

SEQ ID NO: 975948 - RNA, 19 nt, Artificial Sequence
  Description of Artificial Sequence: Synthetic oligonucleotide
ccuuuugcgaagcacccag

SEQ ID NO: 975949 - RNA, 19 nt, Artificial Sequence
  Description of Artificial Sequence: Synthetic oligonucleotide
aacuguggccugauggcga

SEQ ID NO: 975950 - RNA, 19 nt, Artificial Sequence
  Description of Artificial Sequence: Synthetic oligonucleotide
cuaucugguacucuacaua

SEQ ID NO: 975951 - RNA, 19 nt, Artificial Sequence
  Description of Artificial Sequence: Synthetic oligonucleotide
ggguacaaguugcucacug

SEQ ID NO: 975952 - RNA, 19 nt, Artificial Sequence
  Description of Artificial Sequence: Synthetic oligonucleotide
cucguggugucagaggcug

SEQ ID NO: 975953 - RNA, 19 nt, Artificial Sequence
  Description of Artificial Sequence: Synthetic oligonucleotide
ugacucaaagaggcugagc

SEQ ID NO: 975954 - RNA, 19 nt, Artificial Sequence
  Description of Artificial Sequence: Synthetic oligonucleotide
uggcgaguggggauucaca

SEQ ID NO: 975955 - RNA, 19 nt, Artificial Sequence
  Description of Artificial Sequence: Synthetic oligonucleotide
acacagcuaaggcgcauga

SEQ ID NO: 975956 - RNA, 19 nt, Artificial Sequence
  Description of Artificial Sequence: Synthetic oligonucleotide
ccacaugagagaaggcagg

SEQ ID NO: 975957 - RNA, 19 nt, Artificial Sequence
  Description of Artificial Sequence: Synthetic oligonucleotide
ugcgggcaaaacuuggcuu

SEQ ID NO: 975958 - RNA, 19 nt, Artificial Sequence
  Description of Artificial Sequence: Synthetic oligonucleotide
agagggcgucacuuucagg

SEQ ID NO: 975959 - RNA, 19 nt, Artificial Sequence
  Description of Artificial Sequence: Synthetic oligonucleotide
gcaccaucgacuuucaacu

SEQ ID NO: 975960 - RNA, 19 nt, Artificial Sequence
  Description of Artificial Sequence: Synthetic oligonucleotide
ugggucauacaagcugaug

SEQ ID NO: 975961 - RNA, 19 nt, Artificial Sequence
  Description of Artificial Sequence: Synthetic oligonucleotide
ugcucagcgucacauccuu

SEQ ID NO: 975962 - RNA, 19 nt, Artificial Sequence
  Description of Artificial Sequence: Synthetic oligonucleotide
ucuugccauugcccucggg

SEQ ID NO: 975963 - RNA, 19 nt, Artificial Sequence
  Description of Artificial Sequence: Synthetic oligonucleotide
ucucacccacggauuucag

SEQ ID NO: 975964 - RNA, 19 nt, Artificial Sequence
  Description of Artificial Sequence: Synthetic oligonucleotide
gagccaugcgacgaucaug

SEQ ID NO: 975965 - RNA, 19 nt, Artificial Sequence
  Description of Artificial Sequence: Synthetic oligonucleotide
gcgggcaaaacuuggcuug

SEQ ID NO: 975966 - RNA, 19 nt, Artificial Sequence
  Description of Artificial Sequence: Synthetic oligonucleotide
auggcgaguggggauucac

SEQ ID NO: 975967 - RNA, 19 nt, Artificial Sequence
  Description of Artificial Sequence: Synthetic oligonucleotide
auccaacaccgcaccaggc

SEQ ID NO: 975968 - RNA, 19 nt, Artificial Sequence
  Description of Artificial Sequence: Synthetic oligonucleotide
ucguggugucagaggcugg

SEQ ID NO: 975969 - RNA, 19 nt, Artificial Sequence
  Description of Artificial Sequence: Synthetic oligonucleotide
ccaacaccgcaccaggccg

SEQ ID NO: 975970 - RNA, 19 nt, Artificial Sequence
  Description of Artificial Sequence: Synthetic oligonucleotide
cuuggcuugcucagcguca

SEQ ID NO: 975971 - RNA, 19 nt, Artificial Sequence
  Description of Artificial Sequence: Synthetic oligonucleotide
ggcgaguggggauucacac

SEQ ID NO: 975972 - RNA, 19 nt, Artificial Sequence
  Description of Artificial Sequence: Synthetic oligonucleotide
ucuucugcaggggucuguc

SEQ ID NO: 975973 - RNA, 19 nt, Artificial Sequence
  Description of Artificial Sequence: Synthetic oligonucleotide
cuagagggcgucacuuuca

SEQ ID NO: 975974 - RNA, 19 nt, Artificial Sequence
  Description of Artificial Sequence: Synthetic oligonucleotide
agggucccgcagugggugc

SEQ ID NO: 975975 - RNA, 19 nt, Artificial Sequence
  Description of Artificial Sequence: Synthetic oligonucleotide
uuuugaggggcugccccac

SEQ ID NO: 975976 - RNA, 19 nt, Artificial Sequence
  Description of Artificial Sequence: Synthetic oligonucleotide
guaauccaacaccgcacca

SEQ ID NO: 975977 - RNA, 19 nt, Artificial Sequence
  Description of Artificial Sequence: Synthetic oligonucleotide
ggcggcuaagucugggucc

SEQ ID NO: 975978 - RNA, 19 nt, Artificial Sequence
  Description of Artificial Sequence: Synthetic oligonucleotide
uugggucauacaagcugau

SEQ ID NO: 975979 - RNA, 19 nt, Artificial Sequence
  Description of Artificial Sequence: Synthetic oligonucleotide
aguacguuauauacauauu

SEQ ID NO: 975980 - RNA, 19 nt, Artificial Sequence
  Description of Artificial Sequence: Synthetic oligonucleotide
auggcggcuaagucugggu

SEQ ID NO: 975981 - RNA, 19 nt, Artificial Sequence
  Description of Artificial Sequence: Synthetic oligonucleotide
accgcaccaggccgcugcc

SEQ ID NO: 975982 - RNA, 19 nt, Artificial Sequence
  Description of Artificial Sequence: Synthetic oligonucleotide
gcuaaggcgcaugaaagca

SEQ ID NO: 975983 - RNA, 19 nt, Artificial Sequence
  Description of Artificial Sequence: Synthetic oligonucleotide
gcugucucgagggucaggc

SEQ ID NO: 975984 - RNA, 19 nt, Artificial Sequence
  Description of Artificial Sequence: Synthetic oligonucleotide
accagaacccaagaugguu

SEQ ID NO: 975985 - RNA, 19 nt, Artificial Sequence
  Description of Artificial Sequence: Synthetic oligonucleotide
cauggcggcuaagucuggg

SEQ ID NO: 975986 - RNA, 19 nt, Artificial Sequence
  Description of Artificial Sequence: Synthetic oligonucleotide
ggugggagagccaugcgac

SEQ ID NO: 975987 - RNA, 19 nt, Artificial Sequence
  Description of Artificial Sequence: Synthetic oligonucleotide
gcgaguggggauucacacg

SEQ ID NO: 975988 - RNA, 19 nt, Artificial Sequence
  Description of Artificial Sequence: Synthetic oligonucleotide
acgugcagagcagcaggcg

SEQ ID NO: 975989 - RNA, 19 nt, Artificial Sequence
  Description of Artificial Sequence: Synthetic oligonucleotide
acuggacagguaauacuga

SEQ ID NO: 975990 - RNA, 19 nt, Artificial Sequence
  Description of Artificial Sequence: Synthetic oligonucleotide
ggcgacguccugcuugggg

SEQ ID NO: 975991 - RNA, 19 nt, Artificial Sequence
  Description of Artificial Sequence: Synthetic oligonucleotide
guagggacgugcagagcag

SEQ ID NO: 975992 - RNA, 19 nt, Artificial Sequence
  Description of Artificial Sequence: Synthetic oligonucleotide
acagugcgggcaaaacuug

SEQ ID NO: 975993 - RNA, 19 nt, Artificial Sequence
  Description of Artificial Sequence: Synthetic oligonucleotide
guaauacaauuacuggauu

SEQ ID NO: 975994 - RNA, 19 nt, Artificial Sequence
  Description of Artificial Sequence: Synthetic oligonucleotide
aauccugguuagagaacaa

SEQ ID NO: 975995 - RNA, 19 nt, Artificial Sequence
  Description of Artificial Sequence: Synthetic oligonucleotide
cucacaacuucccuuaguu

SEQ ID NO: 975996 - RNA, 19 nt, Artificial Sequence
  Description of Artificial Sequence: Synthetic oligonucleotide
ggucuguccuuucgaacug

SEQ ID NO: 975997 - RNA, 19 nt, Artificial Sequence
  Description of Artificial Sequence: Synthetic oligonucleotide
cauccuuuaauggcaguaa

SEQ ID NO: 975998 - RNA, 19 nt, Artificial Sequence
  Description of Artificial Sequence: Synthetic oligonucleotide
auaacacagcuaaggcgca

SEQ ID NO: 975999 - RNA, 19 nt, Artificial Sequence
  Description of Artificial Sequence: Synthetic oligonucleotide
ucgacuccugcaguuuccu

SEQ ID NO: 976000 - RNA, 19 nt, Artificial Sequence
  Description of Artificial Sequence: Synthetic oligonucleotide
cacucacaacuucccuuag

SEQ ID NO: 976001 - RNA, 19 nt, Artificial Sequence
  Description of Artificial Sequence: Synthetic oligonucleotide
agacagauacugaguacaa

SEQ ID NO: 976002 - RNA, 19 nt, Artificial Sequence
  Description of Artificial Sequence: Synthetic oligonucleotide
gagagccaugcgacgauca

SEQ ID NO: 976003 - RNA, 19 nt, Artificial Sequence
  Description of Artificial Sequence: Synthetic oligonucleotide
caaguugcucacugggcaa

SEQ ID NO: 976004 - RNA, 19 nt, Artificial Sequence
  Description of Artificial Sequence: Synthetic oligonucleotide
cagccgagggucagagggc

SEQ ID NO: 976005 - RNA, 19 nt, Artificial Sequence
  Description of Artificial Sequence: Synthetic oligonucleotide
ggcgucacuuucaggacag

SEQ ID NO: 976006 - RNA, 19 nt, Artificial Sequence
  Description of Artificial Sequence: Synthetic oligonucleotide
cugucucgagggucaggcc

SEQ ID NO: 976007 - RNA, 19 nt, Artificial Sequence
  Description of Artificial Sequence: Synthetic oligonucleotide
ggguacuugccacugccca

SEQ ID NO: 976008 - RNA, 19 nt, Artificial Sequence
  Description of Artificial Sequence: Synthetic oligonucleotide
cugcauggcggcuaagucu

SEQ ID NO: 976009 - RNA, 19 nt, Artificial Sequence
  Description of Artificial Sequence: Synthetic oligonucleotide
caccaucgacuuucaacuc

SEQ ID NO: 976010 - RNA, 19 nt, Artificial Sequence
  Description of Artificial Sequence: Synthetic oligonucleotide
gcacucguggugucagagg

SEQ ID NO: 976011 - RNA, 19 nt, Artificial Sequence
  Description of Artificial Sequence: Synthetic oligonucleotide
ggggcgacguccugcuugg

SEQ ID NO: 976012 - RNA, 19 nt, Artificial Sequence
  Description of Artificial Sequence: Synthetic oligonucleotide
gcuagagggcgucacuuuc

SEQ ID NO: 976013 - RNA, 19 nt, Artificial Sequence
  Description of Artificial Sequence: Synthetic oligonucleotide
cucacccacggauuucaga

SEQ ID NO: 976014 - RNA, 19 nt, Artificial Sequence
  Description of Artificial Sequence: Synthetic oligonucleotide
ggacaagcaaacacuaucu

SEQ ID NO: 976015 - RNA, 19 nt, Artificial Sequence
  Description of Artificial Sequence: Synthetic oligonucleotide
uggcuagagggcgucacuu

SEQ ID NO: 976016 - RNA, 19 nt, Artificial Sequence
  Description of Artificial Sequence: Synthetic oligonucleotide
aggcgcaugaaagcagcga

SEQ ID NO: 976017 - RNA, 19 nt, Artificial Sequence
  Description of Artificial Sequence: Synthetic oligonucleotide
cuggauuaagagaccacau

SEQ ID NO: 976018 - RNA, 19 nt, Artificial Sequence
  Description of Artificial Sequence: Synthetic oligonucleotide
cccaguaauccaacaccgc

SEQ ID NO: 976019 - RNA, 19 nt, Artificial Sequence
  Description of Artificial Sequence: Synthetic oligonucleotide
aacaccgcaccaggccgcu

SEQ ID NO: 976020 - RNA, 19 nt, Artificial Sequence
  Description of Artificial Sequence: Synthetic oligonucleotide
caccacggauccuugagcu

SEQ ID NO: 976021 - RNA, 19 nt, Artificial Sequence
  Description of Artificial Sequence: Synthetic oligonucleotide
ggaguuccuuaucccauga

SEQ ID NO: 976022 - RNA, 19 nt, Artificial Sequence
  Description of Artificial Sequence: Synthetic oligonucleotide
ggcacuggacagguaauac

SEQ ID NO: 976023 - RNA, 19 nt, Artificial Sequence
  Description of Artificial Sequence: Synthetic oligonucleotide
aguugcucacugggcaacu

SEQ ID NO: 976024 - RNA, 19 nt, Artificial Sequence
  Description of Artificial Sequence: Synthetic oligonucleotide
ugagagcgagggucccgca

SEQ ID NO: 976025 - RNA, 19 nt, Artificial Sequence
  Description of Artificial Sequence: Synthetic oligonucleotide
cacggauuucagauuuaaa

SEQ ID NO: 976026 - RNA, 19 nt, Artificial Sequence
  Description of Artificial Sequence: Synthetic oligonucleotide
acggaguuccuuaucccau

SEQ ID NO: 976027 - RNA, 19 nt, Artificial Sequence
  Description of Artificial Sequence: Synthetic oligonucleotide
gcgacguccugcuugggga

SEQ ID NO: 976028 - RNA, 19 nt, Artificial Sequence
  Description of Artificial Sequence: Synthetic oligonucleotide
gcacugaccagaacccaag

SEQ ID NO: 976029 - RNA, 19 nt, Artificial Sequence
  Description of Artificial Sequence: Synthetic oligonucleotide
ggcuaagucugggucccgg

SEQ ID NO: 976030 - RNA, 19 nt, Artificial Sequence
  Description of Artificial Sequence: Synthetic oligonucleotide
agccuggcuuucacaagag

SEQ ID NO: 976031 - RNA, 19 nt, Artificial Sequence
  Description of Artificial Sequence: Synthetic oligonucleotide
gcgaagcacccaguaaucc

SEQ ID NO: 976032 - RNA, 19 nt, Artificial Sequence
  Description of Artificial Sequence: Synthetic oligonucleotide
cacugggcaacucguggga

SEQ ID NO: 976033 - RNA, 19 nt, Artificial Sequence
  Description of Artificial Sequence: Synthetic oligonucleotide
cacgcaaggcucgcucccc

SEQ ID NO: 976034 - RNA, 19 nt, Artificial Sequence
  Description of Artificial Sequence: Synthetic oligonucleotide
agcgagggucccgcagugg

SEQ ID NO: 976035 - RNA, 19 nt, Artificial Sequence
  Description of Artificial Sequence: Synthetic oligonucleotide
uugcaccaucgacuuucaa

SEQ ID NO: 976036 - RNA, 19 nt, Artificial Sequence
  Description of Artificial Sequence: Synthetic oligonucleotide
gguacuugccacugcccaa

SEQ ID NO: 976037 - RNA, 19 nt, Artificial Sequence
  Description of Artificial Sequence: Synthetic oligonucleotide
agcugucucgagggucagg

SEQ ID NO: 976038 - RNA, 19 nt, Artificial Sequence
  Description of Artificial Sequence: Synthetic oligonucleotide
agggacaagcaaacacuau

SEQ ID NO: 976039 - RNA, 19 nt, Artificial Sequence
  Description of Artificial Sequence: Synthetic oligonucleotide
caaaggggugcagcucgac

SEQ ID NO: 976040 - RNA, 19 nt, Artificial Sequence
  Description of Artificial Sequence: Synthetic oligonucleotide
augcgacgaucauguaaaa

SEQ ID NO: 976041 - RNA, 19 nt, Artificial Sequence
  Description of Artificial Sequence: Synthetic oligonucleotide
cacggauccuugagcuguc

SEQ ID NO: 976042 - RNA, 19 nt, Artificial Sequence
  Description of Artificial Sequence: Synthetic oligonucleotide
gugcgggcaaaacuuggcu

SEQ ID NO: 976043 - RNA, 19 nt, Artificial Sequence
  Description of Artificial Sequence: Synthetic oligonucleotide
cagguggccacaccacgga

SEQ ID NO: 976044 - RNA, 19 nt, Artificial Sequence
  Description of Artificial Sequence: Synthetic oligonucleotide
gcuccgucaucucccagca

SEQ ID NO: 976045 - RNA, 19 nt, Artificial Sequence
  Description of Artificial Sequence: Synthetic oligonucleotide
cagcagguagggacgugca

SEQ ID NO: 976046 - RNA, 19 nt, Artificial Sequence
  Description of Artificial Sequence: Synthetic oligonucleotide
ccaugcgacgaucauguaa

SEQ ID NO: 976047 - RNA, 19 nt, Artificial Sequence
  Description of Artificial Sequence: Synthetic oligonucleotide
ucccgcagugggugcccag

SEQ ID NO: 976048 - RNA, 19 nt, Artificial Sequence
  Description of Artificial Sequence: Synthetic oligonucleotide
ccgccagcagguagggacg

SEQ ID NO: 976049 - RNA, 19 nt, Artificial Sequence
  Description of Artificial Sequence: Synthetic oligonucleotide
ccauuccagacacucacaa

SEQ ID NO: 976050 - RNA, 19 nt, Artificial Sequence
  Description of Artificial Sequence: Synthetic oligonucleotide
caucgacuuucaacucaga

SEQ ID NO: 976051 - RNA, 19 nt, Artificial Sequence
  Description of Artificial Sequence: Synthetic oligonucleotide
guugcucacugggcaacuc

SEQ ID NO: 976052 - RNA, 19 nt, Artificial Sequence
  Description of Artificial Sequence: Synthetic oligonucleotide
ugcccaacucaggguacaa

SEQ ID NO: 976053 - RNA, 19 nt, Artificial Sequence
  Description of Artificial Sequence: Synthetic oligonucleotide
gccgcccugcuucugucag

SEQ ID NO: 976054 - RNA, 19 nt, Artificial Sequence
  Description of Artificial Sequence: Synthetic oligonucleotide
gcggcuaagucuggguccc

SEQ ID NO: 976055 - RNA, 19 nt, Artificial Sequence
  Description of Artificial Sequence: Synthetic oligonucleotide
gcucgacuccugcaguuuc

SEQ ID NO: 976056 - RNA, 19 nt, Artificial Sequence
  Description of Artificial Sequence: Synthetic oligonucleotide
gcgcaugaaagcagcgagc

SEQ ID NO: 976057 - RNA, 19 nt, Artificial Sequence
  Description of Artificial Sequence: Synthetic oligonucleotide
ccccugacgucucugcaug

SEQ ID NO: 976058 - RNA, 19 nt, Artificial Sequence
  Description of Artificial Sequence: Synthetic oligonucleotide
cccucuucgggagucuggc

SEQ ID NO: 976059 - RNA, 19 nt, Artificial Sequence
  Description of Artificial Sequence: Synthetic oligonucleotide
cuuuugcgaagcacccagu

SEQ ID NO: 976060 - RNA, 19 nt, Artificial Sequence
  Description of Artificial Sequence: Synthetic oligonucleotide
cucccucuucgggagucug

SEQ ID NO: 976061 - RNA, 19 nt, Artificial Sequence
  Description of Artificial Sequence: Synthetic oligonucleotide
acaguacguuauauacaua

SEQ ID NO: 976062 - RNA, 19 nt, Artificial Sequence
  Description of Artificial Sequence: Synthetic oligonucleotide
gauggcgaguggggauuca

SEQ ID NO: 976063 - RNA, 19 nt, Artificial Sequence
  Description of Artificial Sequence: Synthetic oligonucleotide
agggucgccccaggcuggg

SEQ ID NO: 976064 - RNA, 19 nt, Artificial Sequence
  Description of Artificial Sequence: Synthetic oligonucleotide
gggguacuugccacugccc

SEQ ID NO: 976065 - RNA, 19 nt, Artificial Sequence
  Description of Artificial Sequence: Synthetic oligonucleotide
gccgccugcauugggaguc

SEQ ID NO: 976066 - RNA, 19 nt, Artificial Sequence
  Description of Artificial Sequence: Synthetic oligonucleotide
gaguggggauucacacgga

SEQ ID NO: 976067 - RNA, 19 nt, Artificial Sequence
  Description of Artificial Sequence: Synthetic oligonucleotide
guggggauucacacggagu

SEQ ID NO: 976068 - RNA, 19 nt, Artificial Sequence
  Description of Artificial Sequence: Synthetic oligonucleotide
gcauugggaguccuugggu

SEQ ID NO: 976069 - RNA, 19 nt, Artificial Sequence
  Description of Artificial Sequence: Synthetic oligonucleotide
acgucucugcauggcggcu

SEQ ID NO: 976070 - RNA, 19 nt, Artificial Sequence
  Description of Artificial Sequence: Synthetic oligonucleotide
cgcaugaaagcagcgagca

SEQ ID NO: 976071 - RNA, 19 nt, Artificial Sequence
  Description of Artificial Sequence: Synthetic oligonucleotide
ggccagccgagggucagag

SEQ ID NO: 976072 - RNA, 19 nt, Artificial Sequence
  Description of Artificial Sequence: Synthetic oligonucleotide
cuugagcugucucgagggu

SEQ ID NO: 976073 - RNA, 19 nt, Artificial Sequence
  Description of Artificial Sequence: Synthetic oligonucleotide
gcuggaaugaaggcugccu

SEQ ID NO: 976074 - RNA, 19 nt, Artificial Sequence
  Description of Artificial Sequence: Synthetic oligonucleotide
cucgagggucaggccagug

SEQ ID NO: 976075 - RNA, 19 nt, Artificial Sequence
  Description of Artificial Sequence: Synthetic oligonucleotide
gaccagaacccaagauggu

SEQ ID NO: 976076 - RNA, 19 nt, Artificial Sequence
  Description of Artificial Sequence: Synthetic oligonucleotide
cucgggacccuugggcuga

SEQ ID NO: 976077 - RNA, 19 nt, Artificial Sequence
  Description of Artificial Sequence: Synthetic oligonucleotide
gcccaacucaggguacaag

SEQ ID NO: 976078 - RNA, 19 nt, Artificial Sequence
  Description of Artificial Sequence: Synthetic oligonucleotide
acggauccuugagcugucu

SEQ ID NO: 976079 - RNA, 19 nt, Artificial Sequence
  Description of Artificial Sequence: Synthetic oligonucleotide
ggcuggaaugaaggcugcc

SEQ ID NO: 976080 - RNA, 19 nt, Artificial Sequence
  Description of Artificial Sequence: Synthetic oligonucleotide
cacuuucaggacagcucua

SEQ ID NO: 976081 - RNA, 19 nt, Artificial Sequence
  Description of Artificial Sequence: Synthetic oligonucleotide
gcuggcuagagggcgucac

SEQ ID NO: 976082 - RNA, 19 nt, Artificial Sequence
  Description of Artificial Sequence: Synthetic oligonucleotide
ccuuaucccaugagggucu

SEQ ID NO: 976083 - RNA, 19 nt, Artificial Sequence
  Description of Artificial Sequence: Synthetic oligonucleotide
gguaauacugagggagaau

SEQ ID NO: 976084 - RNA, 19 nt, Artificial Sequence
  Description of Artificial Sequence: Synthetic oligonucleotide
cugcccaacucaggguaca

SEQ ID NO: 976085 - RNA, 19 nt, Artificial Sequence
  Description of Artificial Sequence: Synthetic oligonucleotide
ccgagggucagagggcccc

SEQ ID NO: 976086 - RNA, 19 nt, Artificial Sequence
  Description of Artificial Sequence: Synthetic oligonucleotide
cacagcuaaggcgcaugaa

SEQ ID NO: 976087 - RNA, 19 nt, Artificial Sequence
  Description of Artificial Sequence: Synthetic oligonucleotide
cccuuaguucaagggucgc

SEQ ID NO: 976088 - RNA, 19 nt, Artificial Sequence
  Description of Artificial Sequence: Synthetic oligonucleotide
cuggcuagagggcgucacu

SEQ ID NO: 976089 - RNA, 19 nt, Artificial Sequence
  Description of Artificial Sequence: Synthetic oligonucleotide
gccacaccacggauccuug

SEQ ID NO: 976090 - RNA, 19 nt, Artificial Sequence
  Description of Artificial Sequence: Synthetic oligonucleotide
cuguugcagcugagagcga

SEQ ID NO: 976091 - RNA, 19 nt, Artificial Sequence
  Description of Artificial Sequence: Synthetic oligonucleotide
cuuugccagggccacccuu

SEQ ID NO: 976092 - RNA, 19 nt, Artificial Sequence
  Description of Artificial Sequence: Synthetic oligonucleotide
cugauggcgaguggggauu

SEQ ID NO: 976093 - RNA, 19 nt, Artificial Sequence
  Description of Artificial Sequence: Synthetic oligonucleotide
cuucgggagucuggcaggu

SEQ ID NO: 976094 - RNA, 19 nt, Artificial Sequence
  Description of Artificial Sequence: Synthetic oligonucleotide
gggucccgcagugggugcc

SEQ ID NO: 976095 - RNA, 19 nt, Artificial Sequence
  Description of Artificial Sequence: Synthetic oligonucleotide
caggugucucaaccagagu

SEQ ID NO: 976096 - RNA, 19 nt, Artificial Sequence
  Description of Artificial Sequence: Synthetic oligonucleotide
ggucccgcagugggugccc

SEQ ID NO: 976097 - RNA, 19 nt, Artificial Sequence
  Description of Artificial Sequence: Synthetic oligonucleotide
ccacggauccuugagcugu

SEQ ID NO: 976098 - RNA, 19 nt, Artificial Sequence
  Description of Artificial Sequence: Synthetic oligonucleotide
gcaacucgugggagcccag

SEQ ID NO: 976099 - RNA, 19 nt, Artificial Sequence
  Description of Artificial Sequence: Synthetic oligonucleotide
cagcuuuugccgccugcau

SEQ ID NO: 976100 - RNA, 19 nt, Artificial Sequence
  Description of Artificial Sequence: Synthetic oligonucleotide
ggcuagagggcgucacuuu

SEQ ID NO: 976101 - RNA, 19 nt, Artificial Sequence
  Description of Artificial Sequence: Synthetic oligonucleotide
cccuugggcugagcacucg

SEQ ID NO: 976102 - RNA, 19 nt, Artificial Sequence
  Description of Artificial Sequence: Synthetic oligonucleotide
acaccgcaccaggccgcug

SEQ ID NO: 976103 - RNA, 19 nt, Artificial Sequence
  Description of Artificial Sequence: Synthetic oligonucleotide
gggcaacucgugggagccc

SEQ ID NO: 976104 - RNA, 19 nt, Artificial Sequence
  Description of Artificial Sequence: Synthetic oligonucleotide
ccugauggcgaguggggau

SEQ ID NO: 976105 - RNA, 19 nt, Artificial Sequence
  Description of Artificial Sequence: Synthetic oligonucleotide
ccacaccacggauccuuga

SEQ ID NO: 976106 - RNA, 19 nt, Artificial Sequence
  Description of Artificial Sequence: Synthetic oligonucleotide
ggucuucagcuaacuauuu

SEQ ID NO: 976107 - RNA, 19 nt, Artificial Sequence
  Description of Artificial Sequence: Synthetic oligonucleotide
ggauucacacggaguuccu

SEQ ID NO: 976108 - RNA, 19 nt, Artificial Sequence
  Description of Artificial Sequence: Synthetic oligonucleotide
ccucuucgggagucuggca

SEQ ID NO: 976109 - RNA, 19 nt, Artificial Sequence
  Description of Artificial Sequence: Synthetic oligonucleotide
gcgucacuuucaggacagc

SEQ ID NO: 976110 - RNA, 19 nt, Artificial Sequence
  Description of Artificial Sequence: Synthetic oligonucleotide
ccgccugcauugggagucc

SEQ ID NO: 976111 - RNA, 19 nt, Artificial Sequence
  Description of Artificial Sequence: Synthetic oligonucleotide
gggucgccccaggcugggg

SEQ ID NO: 976112 - RNA, 19 nt, Artificial Sequence
  Description of Artificial Sequence: Synthetic oligonucleotide
cccacggauuucagauuua

SEQ ID NO: 976113 - RNA, 19 nt, Artificial Sequence
  Description of Artificial Sequence: Synthetic oligonucleotide
gggcgacguccugcuuggg

SEQ ID NO: 976114 - RNA, 19 nt, Artificial Sequence
  Description of Artificial Sequence: Synthetic oligonucleotide
gccaugcgacgaucaugua

SEQ ID NO: 976115 - RNA, 19 nt, Artificial Sequence
  Description of Artificial Sequence: Synthetic oligonucleotide
auuuauaacacacagagcc

SEQ ID NO: 976116 - RNA, 19 nt, Artificial Sequence
  Description of Artificial Sequence: Synthetic oligonucleotide
ugugaaaucaggaucaugg

SEQ ID NO: 976117 - RNA, 19 nt, Artificial Sequence
  Description of Artificial Sequence: Synthetic oligonucleotide
acaauaauuucucaguagc

SEQ ID NO: 976118 - RNA, 19 nt, Artificial Sequence
  Description of Artificial Sequence: Synthetic oligonucleotide
uauaucacgaaguugauca

SEQ ID NO: 976119 - RNA, 19 nt, Artificial Sequence
  Description of Artificial Sequence: Synthetic oligonucleotide
aguggguuuauuuagauca

SEQ ID NO: 976120 - RNA, 19 nt, Artificial Sequence
  Description of Artificial Sequence: Synthetic oligonucleotide
ugaucuggugcuaacaugg

SEQ ID NO: 976121 - RNA, 19 nt, Artificial Sequence
  Description of Artificial Sequence: Synthetic oligonucleotide
uuucucaguagccauaggg

SEQ ID NO: 976122 - RNA, 19 nt, Artificial Sequence
  Description of Artificial Sequence: Synthetic oligonucleotide
aagcauaaaccacaggcac

SEQ ID NO: 976123 - RNA, 19 nt, Artificial Sequence
  Description of Artificial Sequence: Synthetic oligonucleotide
uuaacaauaaaaguuugcc

SEQ ID NO: 976124 - RNA, 19 nt, Artificial Sequence
  Description of Artificial Sequence: Synthetic oligonucleotide
ucgucuuagauucaucugg

SEQ ID NO: 976125 - RNA, 19 nt, Artificial Sequence
  Description of Artificial Sequence: Synthetic oligonucleotide
aaaaugggaauuaagguug

SEQ ID NO: 976126 - RNA, 19 nt, Artificial Sequence
  Description of Artificial Sequence: Synthetic oligonucleotide
ugggguaauaauuucgugg

SEQ ID NO: 976127 - RNA, 19 nt, Artificial Sequence
  Description of Artificial Sequence: Synthetic oligonucleotide
ugucauuaagacuucaagc

SEQ ID NO: 976128 - RNA, 19 nt, Artificial Sequence
  Description of Artificial Sequence: Synthetic oligonucleotide
uuugucauuacagaagucc

SEQ ID NO: 976129 - RNA, 19 nt, Artificial Sequence
  Description of Artificial Sequence: Synthetic oligonucleotide
ugggaauuaagguugaucu

SEQ ID NO: 976130 - RNA, 19 nt, Artificial Sequence
  Description of Artificial Sequence: Synthetic oligonucleotide
auuacuuccggucucugcg

SEQ ID NO: 976131 - RNA, 19 nt, Artificial Sequence
  Description of Artificial Sequence: Synthetic oligonucleotide
aacgacuuccggcugaagg

SEQ ID NO: 976132 - RNA, 19 nt, Artificial Sequence
  Description of Artificial Sequence: Synthetic oligonucleotide
ucucauucgucuuagauuc

SEQ ID NO: 976133 - RNA, 19 nt, Artificial Sequence
  Description of Artificial Sequence: Synthetic oligonucleotide
uuauuugagaaaauggcau

SEQ ID NO: 976134 - RNA, 19 nt, Artificial Sequence
  Description of Artificial Sequence: Synthetic oligonucleotide
aggaucaugggcuagcagg

SEQ ID NO: 976135 - RNA, 19 nt, Artificial Sequence
  Description of Artificial Sequence: Synthetic oligonucleotide
aaacuaacggaguuauaag

SEQ ID NO: 976136 - RNA, 19 nt, Artificial Sequence
  Description of Artificial Sequence: Synthetic oligonucleotide
ugccuuaugaagcuucugg

SEQ ID NO: 976137 - RNA, 19 nt, Artificial Sequence
  Description of Artificial Sequence: Synthetic oligonucleotide
uuaacauuacuuccggucu

SEQ ID NO: 976138 - RNA, 19 nt, Artificial Sequence
  Description of Artificial Sequence: Synthetic oligonucleotide
aacuaacggaguuauaagu

SEQ ID NO: 976139 - RNA, 19 nt, Artificial Sequence
  Description of Artificial Sequence: Synthetic oligonucleotide
ugaaaucaggaucaugggc

SEQ ID NO: 976140 - RNA, 19 nt, Artificial Sequence
  Description of Artificial Sequence: Synthetic oligonucleotide
ugugacagaaauuauucuc

SEQ ID NO: 976141 - RNA, 19 nt, Artificial Sequence
  Description of Artificial Sequence: Synthetic oligonucleotide
gacaauaauuucucaguag

SEQ ID NO: 976142 - RNA, 19 nt, Artificial Sequence
  Description of Artificial Sequence: Synthetic oligonucleotide
uaacauaaggcuuccuucc

SEQ ID NO: 976143 - RNA, 19 nt, Artificial Sequence
  Description of Artificial Sequence: Synthetic oligonucleotide
agcgcuucuaacauaaggc

SEQ ID NO: 976144 - RNA, 19 nt, Artificial Sequence
  Description of Artificial Sequence: Synthetic oligonucleotide
acucuuuuauaucacgaag

SEQ ID NO: 976145 - RNA, 19 nt, Artificial Sequence
  Description of Artificial Sequence: Synthetic oligonucleotide
gagauucagauuuggggcg

SEQ ID NO: 976146 - RNA, 19 nt, Artificial Sequence
  Description of Artificial Sequence: Synthetic oligonucleotide
accuugugaaaucaggauc

SEQ ID NO: 976147 - RNA, 19 nt, Artificial Sequence
  Description of Artificial Sequence: Synthetic oligonucleotide
ucacaagugccuuaugaag

SEQ ID NO: 976148 - RNA, 19 nt, Artificial Sequence
  Description of Artificial Sequence: Synthetic oligonucleotide
uuuauaacacacagagcca

SEQ ID NO: 976149 - RNA, 19 nt, Artificial Sequence
  Description of Artificial Sequence: Synthetic oligonucleotide
aaccgaagaguugaguugg

SEQ ID NO: 976150 - RNA, 19 nt, Artificial Sequence
  Description of Artificial Sequence: Synthetic oligonucleotide
uaaccaacaucgcugauaa

SEQ ID NO: 976151 - RNA, 19 nt, Artificial Sequence
  Description of Artificial Sequence: Synthetic oligonucleotide
caucauuaauaacaagugc

SEQ ID NO: 976152 - RNA, 19 nt, Artificial Sequence
  Description of Artificial Sequence: Synthetic oligonucleotide
ugguacaucagcauucaga

SEQ ID NO: 976153 - RNA, 19 nt, Artificial Sequence
  Description of Artificial Sequence: Synthetic oligonucleotide
ucgcaagcgagacauauca

SEQ ID NO: 976154 - RNA, 19 nt, Artificial Sequence
  Description of Artificial Sequence: Synthetic oligonucleotide
cuuauuugagaaaauggca

SEQ ID NO: 976155 - RNA, 19 nt, Artificial Sequence
  Description of Artificial Sequence: Synthetic oligonucleotide
aaguugaucaacaucuugu

SEQ ID NO: 976156 - RNA, 19 nt, Artificial Sequence
  Description of Artificial Sequence: Synthetic oligonucleotide
cacaagugccuuaugaagc

SEQ ID NO: 976157 - RNA, 19 nt, Artificial Sequence
  Description of Artificial Sequence: Synthetic oligonucleotide
uuucgugguagcaagguuc

SEQ ID NO: 976158 - RNA, 19 nt, Artificial Sequence
  Description of Artificial Sequence: Synthetic oligonucleotide
aucagauuuacugauccuc

SEQ ID NO: 976159 - RNA, 19 nt, Artificial Sequence
  Description of Artificial Sequence: Synthetic oligonucleotide
auucgucuuagauucaucu

SEQ ID NO: 976160 - RNA, 19 nt, Artificial Sequence
  Description of Artificial Sequence: Synthetic oligonucleotide
uaacggaguuauaaguugc

SEQ ID NO: 976161 - RNA, 19 nt, Artificial Sequence
  Description of Artificial Sequence: Synthetic oligonucleotide
uauggcacuaccagcagcu

SEQ ID NO: 976162 - RNA, 19 nt, Artificial Sequence
  Description of Artificial Sequence: Synthetic oligonucleotide
uucauaaaggcauggcugu

SEQ ID NO: 976163 - RNA, 19 nt, Artificial Sequence
  Description of Artificial Sequence: Synthetic oligonucleotide
ugcuaacauggaaaugugg

SEQ ID NO: 976164 - RNA, 19 nt, Artificial Sequence
  Description of Artificial Sequence: Synthetic oligonucleotide
gacauaucagauuuacuga

SEQ ID NO: 976165 - RNA, 19 nt, Artificial Sequence
  Description of Artificial Sequence: Synthetic oligonucleotide
ucagauuuacugauccucu

SEQ ID NO: 976166 - RNA, 19 nt, Artificial Sequence
  Description of Artificial Sequence: Synthetic oligonucleotide
ugcuaguggguuuauuuag

SEQ ID NO: 976167 - RNA, 19 nt, Artificial Sequence
  Description of Artificial Sequence: Synthetic oligonucleotide
ucuaacauaaggcuuccuu

SEQ ID NO: 976168 - RNA, 19 nt, Artificial Sequence
  Description of Artificial Sequence: Synthetic oligonucleotide
uuacaggugugacagaaau

SEQ ID NO: 976169 - RNA, 19 nt, Artificial Sequence
  Description of Artificial Sequence: Synthetic oligonucleotide
uuacauugcccugagauuc

SEQ ID NO: 976170 - RNA, 19 nt, Artificial Sequence
  Description of Artificial Sequence: Synthetic oligonucleotide
uuucgauuggagaagcaaa

SEQ ID NO: 976171 - RNA, 19 nt, Artificial Sequence
  Description of Artificial Sequence: Synthetic oligonucleotide
ugaccuugugaaaucagga

SEQ ID NO: 976172 - RNA, 19 nt, Artificial Sequence
  Description of Artificial Sequence: Synthetic oligonucleotide
cuaacggaguuauaaguug

SEQ ID NO: 976173 - RNA, 19 nt, Artificial Sequence
  Description of Artificial Sequence: Synthetic oligonucleotide
gaaguugaucaacaucuug

SEQ ID NO: 976174 - RNA, 19 nt, Artificial Sequence
  Description of Artificial Sequence: Synthetic oligonucleotide
uucgauuggagaagcaaac

SEQ ID NO: 976175 - RNA, 19 nt, Artificial Sequence
  Description of Artificial Sequence: Synthetic oligonucleotide
aaaucugugcaagcuggac

SEQ ID NO: 976176 - RNA, 19 nt, Artificial Sequence
  Description of Artificial Sequence: Synthetic oligonucleotide
uaccuagcacuccaguagg

SEQ ID NO: 976177 - RNA, 19 nt, Artificial Sequence
  Description of Artificial Sequence: Synthetic oligonucleotide
uaauuucgugguagcaagg

SEQ ID NO: 976178 - RNA, 19 nt, Artificial Sequence
  Description of Artificial Sequence: Synthetic oligonucleotide
ucauuauggcacuaccagc

SEQ ID NO: 976179 - RNA, 19 nt, Artificial Sequence
  Description of Artificial Sequence: Synthetic oligonucleotide
aucuuuggcacacaaggca

SEQ ID NO: 976180 - RNA, 19 nt, Artificial Sequence
  Description of Artificial Sequence: Synthetic oligonucleotide
cucuccuagguuuggaagg

SEQ ID NO: 976181 - RNA, 19 nt, Artificial Sequence
  Description of Artificial Sequence: Synthetic oligonucleotide
uguaugggaccacauacuc

SEQ ID NO: 976182 - RNA, 19 nt, Artificial Sequence
  Description of Artificial Sequence: Synthetic oligonucleotide
uugcacauagcacuuuuac

SEQ ID NO: 976183 - RNA, 19 nt, Artificial Sequence
  Description of Artificial Sequence: Synthetic oligonucleotide
auaaccgaagaguugaguu

SEQ ID NO: 976184 - RNA, 19 nt, Artificial Sequence
  Description of Artificial Sequence: Synthetic oligonucleotide
uguggaguaccccucuuug

SEQ ID NO: 976185 - RNA, 19 nt, Artificial Sequence
  Description of Artificial Sequence: Synthetic oligonucleotide
guaccuagcacuccaguag

SEQ ID NO: 976186 - RNA, 19 nt, Artificial Sequence
  Description of Artificial Sequence: Synthetic oligonucleotide
agauuucgauuggagaagc

SEQ ID NO: 976187 - RNA, 19 nt, Artificial Sequence
  Description of Artificial Sequence: Synthetic oligonucleotide
auaaaggcuuguuaacugu

SEQ ID NO: 976188 - RNA, 19 nt, Artificial Sequence
  Description of Artificial Sequence: Synthetic oligonucleotide
agaaguccuuuucagguug

SEQ ID NO: 976189 - RNA, 19 nt, Artificial Sequence
  Description of Artificial Sequence: Synthetic oligonucleotide
agcgagacauaucagauuu

SEQ ID NO: 976190 - RNA, 19 nt, Artificial Sequence
  Description of Artificial Sequence: Synthetic oligonucleotide
acaucgcugauaauaaccg

SEQ ID NO: 976191 - RNA, 19 nt, Artificial Sequence
  Description of Artificial Sequence: Synthetic oligonucleotide
cauuauggcacuaccagca

SEQ ID NO: 976192 - RNA, 19 nt, Artificial Sequence
  Description of Artificial Sequence: Synthetic oligonucleotide
uguuggauauucucaguac

SEQ ID NO: 976193 - RNA, 19 nt, Artificial Sequence
  Description of Artificial Sequence: Synthetic oligonucleotide
agcacucaucauuaauaac

SEQ ID NO: 976194 - RNA, 19 nt, Artificial Sequence
  Description of Artificial Sequence: Synthetic oligonucleotide
guaaaaugggaauuaaggu

SEQ ID NO: 976195 - RNA, 19 nt, Artificial Sequence
  Description of Artificial Sequence: Synthetic oligonucleotide
uguuaagagaagcacucuu

SEQ ID NO: 976196 - RNA, 19 nt, Artificial Sequence
  Description of Artificial Sequence: Synthetic oligonucleotide
uucgugguagcaagguucc

SEQ ID NO: 976197 - RNA, 19 nt, Artificial Sequence
  Description of Artificial Sequence: Synthetic oligonucleotide
cuuaugaagcuucugggca

SEQ ID NO: 976198 - RNA, 19 nt, Artificial Sequence
  Description of Artificial Sequence: Synthetic oligonucleotide
aauuucgugguagcaaggu

SEQ ID NO: 976199 - RNA, 19 nt, Artificial Sequence
  Description of Artificial Sequence: Synthetic oligonucleotide
aacauaaggcuuccuuccu

SEQ ID NO: 976200 - RNA, 19 nt, Artificial Sequence
  Description of Artificial Sequence: Synthetic oligonucleotide
uucaagcauaaaccacagg

SEQ ID NO: 976201 - RNA, 19 nt, Artificial Sequence
  Description of Artificial Sequence: Synthetic oligonucleotide
uucucauucgucuuagauu

SEQ ID NO: 976202 - RNA, 19 nt, Artificial Sequence
  Description of Artificial Sequence: Synthetic oligonucleotide
auguacucccugcguaugc

SEQ ID NO: 976203 - RNA, 19 nt, Artificial Sequence
  Description of Artificial Sequence: Synthetic oligonucleotide
ugugaccuugugaaaucag

SEQ ID NO: 976204 - RNA, 19 nt, Artificial Sequence
  Description of Artificial Sequence: Synthetic oligonucleotide
cauaggguucuguuuaaug

SEQ ID NO: 976205 - RNA, 19 nt, Artificial Sequence
  Description of Artificial Sequence: Synthetic oligonucleotide
aguuugauguucucugcca

SEQ ID NO: 976206 - RNA, 19 nt, Artificial Sequence
  Description of Artificial Sequence: Synthetic oligonucleotide
ugcacauagcacuuuuacu

SEQ ID NO: 976207 - RNA, 19 nt, Artificial Sequence
  Description of Artificial Sequence: Synthetic oligonucleotide
uaauaaccgaagaguugag

SEQ ID NO: 976208 - RNA, 19 nt, Artificial Sequence
  Description of Artificial Sequence: Synthetic oligonucleotide
uucgucuuagauucaucug

SEQ ID NO: 976209 - RNA, 19 nt, Artificial Sequence
  Description of Artificial Sequence: Synthetic oligonucleotide
aauaaccgaagaguugagu

SEQ ID NO: 976210 - RNA, 19 nt, Artificial Sequence
  Description of Artificial Sequence: Synthetic oligonucleotide
aauguagcuuuugucauua

SEQ ID NO: 976211 - RNA, 19 nt, Artificial Sequence
  Description of Artificial Sequence: Synthetic oligonucleotide
ugaucuuaucuggggaagg

SEQ ID NO: 976212 - RNA, 19 nt, Artificial Sequence
  Description of Artificial Sequence: Synthetic oligonucleotide
uggauauucucaguaccag

SEQ ID NO: 976213 - RNA, 19 nt, Artificial Sequence
  Description of Artificial Sequence: Synthetic oligonucleotide
uccuagguuuggaaggggc

SEQ ID NO: 976214 - RNA, 19 nt, Artificial Sequence
  Description of Artificial Sequence: Synthetic oligonucleotide
cagcgcuucuaacauaagg

SEQ ID NO: 976215 - RNA, 19 nt, Artificial Sequence
  Description of Artificial Sequence: Synthetic oligonucleotide
accaacaucgcugauaaua

SEQ ID NO: 976216 - RNA, 19 nt, Artificial Sequence
  Description of Artificial Sequence: Synthetic oligonucleotide
ucuccuagguuuggaaggg

SEQ ID NO: 976217 - RNA, 19 nt, Artificial Sequence
  Description of Artificial Sequence: Synthetic oligonucleotide
guuucuauuuuguggccug

SEQ ID NO: 976218 - RNA, 19 nt, Artificial Sequence
  Description of Artificial Sequence: Synthetic oligonucleotide
aaucgcaagcgagacauau

SEQ ID NO: 976219 - RNA, 19 nt, Artificial Sequence
  Description of Artificial Sequence: Synthetic oligonucleotide
cuuaggggagucugcauug

SEQ ID NO: 976220 - RNA, 19 nt, Artificial Sequence
  Description of Artificial Sequence: Synthetic oligonucleotide
aaauguagcuuuugucauu

SEQ ID NO: 976221 - RNA, 19 nt, Artificial Sequence
  Description of Artificial Sequence: Synthetic oligonucleotide
uugaucuuaucuggggaag

SEQ ID NO: 976222 - RNA, 19 nt, Artificial Sequence
  Description of Artificial Sequence: Synthetic oligonucleotide
uuaugaagcuucugggcaa

SEQ ID NO: 976223 - RNA, 19 nt, Artificial Sequence
  Description of Artificial Sequence: Synthetic oligonucleotide
uuuugguuacauugcccug

SEQ ID NO: 976224 - RNA, 19 nt, Artificial Sequence
  Description of Artificial Sequence: Synthetic oligonucleotide
ucugggcaaauauuugccu

SEQ ID NO: 976225 - RNA, 19 nt, Artificial Sequence
  Description of Artificial Sequence: Synthetic oligonucleotide
uuugagaaaauggcaugga

SEQ ID NO: 976226 - RNA, 19 nt, Artificial Sequence
  Description of Artificial Sequence: Synthetic oligonucleotide
uuuauaucacgaaguugau

SEQ ID NO: 976227 - RNA, 19 nt, Artificial Sequence
  Description of Artificial Sequence: Synthetic oligonucleotide
uugcaauccuuuucuuucc

SEQ ID NO: 976228 - RNA, 19 nt, Artificial Sequence
  Description of Artificial Sequence: Synthetic oligonucleotide
auuauggcacuaccagcag

SEQ ID NO: 976229 - RNA, 19 nt, Artificial Sequence
  Description of Artificial Sequence: Synthetic oligonucleotide
agcuaaucgcaagcgagac

SEQ ID NO: 976230 - RNA, 19 nt, Artificial Sequence
  Description of Artificial Sequence: Synthetic oligonucleotide
uuugccuuacuugguagca

SEQ ID NO: 976231 - RNA, 19 nt, Artificial Sequence
  Description of Artificial Sequence: Synthetic oligonucleotide
cuguuuaauguacucccug

SEQ ID NO: 976232 - RNA, 19 nt, Artificial Sequence
  Description of Artificial Sequence: Synthetic oligonucleotide
uguaccuagcacuccagua

SEQ ID NO: 976233 - RNA, 19 nt, Artificial Sequence
  Description of Artificial Sequence: Synthetic oligonucleotide
gugacagaaauuauucuca

SEQ ID NO: 976234 - RNA, 19 nt, Artificial Sequence
  Description of Artificial Sequence: Synthetic oligonucleotide
uguugcuugggcgcuuugg

SEQ ID NO: 976235 - RNA, 19 nt, Artificial Sequence
  Description of Artificial Sequence: Synthetic oligonucleotide
uaacauuacuuccggucuc

SEQ ID NO: 976236 - RNA, 19 nt, Artificial Sequence
  Description of Artificial Sequence: Synthetic oligonucleotide
acgacuuccggcugaagga

SEQ ID NO: 976237 - RNA, 19 nt, Artificial Sequence
  Description of Artificial Sequence: Synthetic oligonucleotide
aggaccggguccuuagggg

SEQ ID NO: 976238 - RNA, 19 nt, Artificial Sequence
  Description of Artificial Sequence: Synthetic oligonucleotide
uccgucuuguugcuugggc

SEQ ID NO: 976239 - RNA, 19 nt, Artificial Sequence
  Description of Artificial Sequence: Synthetic oligonucleotide
aauguacucccugcguaug

SEQ ID NO: 976240 - RNA, 19 nt, Artificial Sequence
  Description of Artificial Sequence: Synthetic oligonucleotide
cauuacuuccggucucugc

SEQ ID NO: 976241 - RNA, 19 nt, Artificial Sequence
  Description of Artificial Sequence: Synthetic oligonucleotide
uugaacgacuuccggcuga

SEQ ID NO: 976242 - RNA, 19 nt, Artificial Sequence
  Description of Artificial Sequence: Synthetic oligonucleotide
uguuaacauuacuuccggu

SEQ ID NO: 976243 - RNA, 19 nt, Artificial Sequence
  Description of Artificial Sequence: Synthetic oligonucleotide
uaauguacucccugcguau

SEQ ID NO: 976244 - RNA, 19 nt, Artificial Sequence
  Description of Artificial Sequence: Synthetic oligonucleotide
uucagguugugugaagaac

SEQ ID NO: 976245 - RNA, 19 nt, Artificial Sequence
  Description of Artificial Sequence: Synthetic oligonucleotide
gguugugugaagaacuuug

SEQ ID NO: 976246 - RNA, 19 nt, Artificial Sequence
  Description of Artificial Sequence: Synthetic oligonucleotide
acuccuuacugaguggcuc

SEQ ID NO: 976247 - RNA, 19 nt, Artificial Sequence
  Description of Artificial Sequence: Synthetic oligonucleotide
uuauaucacgaaguugauc

SEQ ID NO: 976248 - RNA, 19 nt, Artificial Sequence
  Description of Artificial Sequence: Synthetic oligonucleotide
ucacccucacuaaccaaca

SEQ ID NO: 976249 - RNA, 19 nt, Artificial Sequence
  Description of Artificial Sequence: Synthetic oligonucleotide
uugcuaguggguuuauuua

SEQ ID NO: 976250 - RNA, 19 nt, Artificial Sequence
  Description of Artificial Sequence: Synthetic oligonucleotide
auuucgauuggagaagcaa

SEQ ID NO: 976251 - RNA, 19 nt, Artificial Sequence
  Description of Artificial Sequence: Synthetic oligonucleotide
ggugugacagaaauuauuc

SEQ ID NO: 976252 - RNA, 19 nt, Artificial Sequence
  Description of Artificial Sequence: Synthetic oligonucleotide
ucccgacucaucaacuuuc

SEQ ID NO: 976253 - RNA, 19 nt, Artificial Sequence
  Description of Artificial Sequence: Synthetic oligonucleotide
cuagguuuggaaggggcag

SEQ ID NO: 976254 - RNA, 19 nt, Artificial Sequence
  Description of Artificial Sequence: Synthetic oligonucleotide
uuucagguugugugaagaa

SEQ ID NO: 976255 - RNA, 19 nt, Artificial Sequence
  Description of Artificial Sequence: Synthetic oligonucleotide
cagauuucgauuggagaag

SEQ ID NO: 976256 - RNA, 19 nt, Artificial Sequence
  Description of Artificial Sequence: Synthetic oligonucleotide
cagauuuggggcgucgucc

SEQ ID NO: 976257 - RNA, 19 nt, Artificial Sequence
  Description of Artificial Sequence: Synthetic oligonucleotide
gcacauagcacuuuuacua

SEQ ID NO: 976258 - RNA, 19 nt, Artificial Sequence
  Description of Artificial Sequence: Synthetic oligonucleotide
agccauaggguucuguuua

SEQ ID NO: 976259 - RNA, 19 nt, Artificial Sequence
  Description of Artificial Sequence: Synthetic oligonucleotide
ugcaauccuuuucuuuccu

SEQ ID NO: 976260 - RNA, 19 nt, Artificial Sequence
  Description of Artificial Sequence: Synthetic oligonucleotide
ggauauucucaguaccagc

SEQ ID NO: 976261 - RNA, 19 nt, Artificial Sequence
  Description of Artificial Sequence: Synthetic oligonucleotide
uuacuuccggucucugcgc

SEQ ID NO: 976262 - RNA, 19 nt, Artificial Sequence
  Description of Artificial Sequence: Synthetic oligonucleotide
aagcgagacauaucagauu

SEQ ID NO: 976263 - RNA, 19 nt, Artificial Sequence
  Description of Artificial Sequence: Synthetic oligonucleotide
acuaacggaguuauaaguu

SEQ ID NO: 976264 - RNA, 19 nt, Artificial Sequence
  Description of Artificial Sequence: Synthetic oligonucleotide
ucagauuuggggcgucguc

SEQ ID NO: 976265 - RNA, 19 nt, Artificial Sequence
  Description of Artificial Sequence: Synthetic oligonucleotide
ccuuaugaagcuucugggc

SEQ ID NO: 976266 - RNA, 19 nt, Artificial Sequence
  Description of Artificial Sequence: Synthetic oligonucleotide
acuguucugggguaauaau

SEQ ID NO: 976267 - RNA, 19 nt, Artificial Sequence
  Description of Artificial Sequence: Synthetic oligonucleotide
cacuaccagcagcuaaucg

SEQ ID NO: 976268 - RNA, 19 nt, Artificial Sequence
  Description of Artificial Sequence: Synthetic oligonucleotide
aguaccagcugcuguugca

SEQ ID NO: 976269 - RNA, 19 nt, Artificial Sequence
  Description of Artificial Sequence: Synthetic oligonucleotide
aacggaguuauaaguugcu

SEQ ID NO: 976270 - RNA, 19 nt, Artificial Sequence
  Description of Artificial Sequence: Synthetic oligonucleotide
agaguugaccugucauuca

SEQ ID NO: 976271 - RNA, 19 nt, Artificial Sequence
  Description of Artificial Sequence: Synthetic oligonucleotide
ucgauuggagaagcaaacu

SEQ ID NO: 976272 - RNA, 19 nt, Artificial Sequence
  Description of Artificial Sequence: Synthetic oligonucleotide
ugcgugugcucuucuuucc

SEQ ID NO: 976273 - RNA, 19 nt, Artificial Sequence
  Description of Artificial Sequence: Synthetic oligonucleotide
auaaaccacaggcacucuu

SEQ ID NO: 976274 - RNA, 19 nt, Artificial Sequence
  Description of Artificial Sequence: Synthetic oligonucleotide
cuuacugaguggcucaaaa

SEQ ID NO: 976275 - RNA, 19 nt, Artificial Sequence
  Description of Artificial Sequence: Synthetic oligonucleotide
ugccgauaaaggcuuguua

SEQ ID NO: 976276 - RNA, 19 nt, Artificial Sequence
  Description of Artificial Sequence: Synthetic oligonucleotide
uacuuccggucucugcgcc

SEQ ID NO: 976277 - RNA, 19 nt, Artificial Sequence
  Description of Artificial Sequence: Synthetic oligonucleotide
cagaguugaccugucauuc

SEQ ID NO: 976278 - RNA, 19 nt, Artificial Sequence
  Description of Artificial Sequence: Synthetic oligonucleotide
acggaguuauaaguugcuc

SEQ ID NO: 976279 - RNA, 19 nt, Artificial Sequence
  Description of Artificial Sequence: Synthetic oligonucleotide
agcagcuaaucgcaagcga

SEQ ID NO: 976280 - RNA, 19 nt, Artificial Sequence
  Description of Artificial Sequence: Synthetic oligonucleotide
gucacccucacuaaccaac

SEQ ID NO: 976281 - RNA, 19 nt, Artificial Sequence
  Description of Artificial Sequence: Synthetic oligonucleotide
ggugcuaacauggaaaugu

SEQ ID NO: 976282 - RNA, 19 nt, Artificial Sequence
  Description of Artificial Sequence: Synthetic oligonucleotide
ccuugugaaaucaggauca

SEQ ID NO: 976283 - RNA, 19 nt, Artificial Sequence
  Description of Artificial Sequence: Synthetic oligonucleotide
aucgcugauaauaaccgaa

SEQ ID NO: 976284 - RNA, 19 nt, Artificial Sequence
  Description of Artificial Sequence: Synthetic oligonucleotide
uugugaccuugugaaauca

SEQ ID NO: 976285 - RNA, 19 nt, Artificial Sequence
  Description of Artificial Sequence: Synthetic oligonucleotide
uacugauccucuucugcuc

SEQ ID NO: 976286 - RNA, 19 nt, Artificial Sequence
  Description of Artificial Sequence: Synthetic oligonucleotide
ucaugggcuagcaggugaa

SEQ ID NO: 976287 - RNA, 19 nt, Artificial Sequence
  Description of Artificial Sequence: Synthetic oligonucleotide
cugggguaauaauuucgug

SEQ ID NO: 976288 - RNA, 19 nt, Artificial Sequence
  Description of Artificial Sequence: Synthetic oligonucleotide
cucaacucugaauuggugu

SEQ ID NO: 976289 - RNA, 19 nt, Artificial Sequence
  Description of Artificial Sequence: Synthetic oligonucleotide
acauacucaggcagcagug

SEQ ID NO: 976290 - RNA, 19 nt, Artificial Sequence
  Description of Artificial Sequence: Synthetic oligonucleotide
agugaaacuaacggaguua

SEQ ID NO: 976291 - RNA, 19 nt, Artificial Sequence
  Description of Artificial Sequence: Synthetic oligonucleotide
caacaucgcugauaauaac

SEQ ID NO: 976292 - RNA, 19 nt, Artificial Sequence
  Description of Artificial Sequence: Synthetic oligonucleotide
ucguccucuccuagguuug

SEQ ID NO: 976293 - RNA, 19 nt, Artificial Sequence
  Description of Artificial Sequence: Synthetic oligonucleotide
ucccugcguaugcugaugu

SEQ ID NO: 976294 - RNA, 19 nt, Artificial Sequence
  Description of Artificial Sequence: Synthetic oligonucleotide
gcagcuaaucgcaagcgag

SEQ ID NO: 976295 - RNA, 19 nt, Artificial Sequence
  Description of Artificial Sequence: Synthetic oligonucleotide
ccugagauucagauuuggg

SEQ ID NO: 976296 - RNA, 19 nt, Artificial Sequence
  Description of Artificial Sequence: Synthetic oligonucleotide
gcaagcgagacauaucaga

SEQ ID NO: 976297 - RNA, 19 nt, Artificial Sequence
  Description of Artificial Sequence: Synthetic oligonucleotide
auaaguugcucugguacau

SEQ ID NO: 976298 - RNA, 19 nt, Artificial Sequence
  Description of Artificial Sequence: Synthetic oligonucleotide
ucauucgucuuagauucau

SEQ ID NO: 976299 - RNA, 19 nt, Artificial Sequence
  Description of Artificial Sequence: Synthetic oligonucleotide
cuaaucgcaagcgagacau

SEQ ID NO: 976300 - RNA, 19 nt, Artificial Sequence
  Description of Artificial Sequence: Synthetic oligonucleotide
uggggcgucguccucuccu

SEQ ID NO: 976301 - RNA, 19 nt, Artificial Sequence
  Description of Artificial Sequence: Synthetic oligonucleotide
uacaggugugacagaaauu

SEQ ID NO: 976302 - RNA, 19 nt, Artificial Sequence
  Description of Artificial Sequence: Synthetic oligonucleotide
auuucgugguagcaagguu

SEQ ID NO: 976303 - RNA, 19 nt, Artificial Sequence
  Description of Artificial Sequence: Synthetic oligonucleotide
cacucuuuuauaucacgaa

SEQ ID NO: 976304 - RNA, 19 nt, Artificial Sequence
  Description of Artificial Sequence: Synthetic oligonucleotide
uugguguggaguaccccuc

SEQ ID NO: 976305 - RNA, 19 nt, Artificial Sequence
  Description of Artificial Sequence: Synthetic oligonucleotide
cacuaaccaacaucgcuga

SEQ ID NO: 976306 - RNA, 19 nt, Artificial Sequence
  Description of Artificial Sequence: Synthetic oligonucleotide
cauucgucuuagauucauc

SEQ ID NO: 976307 - RNA, 19 nt, Artificial Sequence
  Description of Artificial Sequence: Synthetic oligonucleotide
agcauaaaccacaggcacu

SEQ ID NO: 976308 - RNA, 19 nt, Artificial Sequence
  Description of Artificial Sequence: Synthetic oligonucleotide
uguacucccugcguaugcu

SEQ ID NO: 976309 - RNA, 19 nt, Artificial Sequence
  Description of Artificial Sequence: Synthetic oligonucleotide
aguugaccugucauucauc

SEQ ID NO: 976310 - RNA, 19 nt, Artificial Sequence
  Description of Artificial Sequence: Synthetic oligonucleotide
uuaggggagucugcauugc

SEQ ID NO: 976311 - RNA, 19 nt, Artificial Sequence
  Description of Artificial Sequence: Synthetic oligonucleotide
ugaaacuaacggaguuaua

SEQ ID NO: 976312 - RNA, 19 nt, Artificial Sequence
  Description of Artificial Sequence: Synthetic oligonucleotide
cucacuaaccaacaucgcu

SEQ ID NO: 976313 - RNA, 19 nt, Artificial Sequence
  Description of Artificial Sequence: Synthetic oligonucleotide
gggguaauaauuucguggu

SEQ ID NO: 976314 - RNA, 19 nt, Artificial Sequence
  Description of Artificial Sequence: Synthetic oligonucleotide
ugggcugaucagaauuaau

SEQ ID NO: 976315 - RNA, 19 nt, Artificial Sequence
  Description of Artificial Sequence: Synthetic oligonucleotide
cagcagcuaaucgcaagcg

SEQ ID NO: 976316 - RNA, 19 nt, Artificial Sequence
  Description of Artificial Sequence: Synthetic oligonucleotide
uuucuauuuuguggccugu

SEQ ID NO: 976317 - RNA, 19 nt, Artificial Sequence
  Description of Artificial Sequence: Synthetic oligonucleotide
cuugaacgacuuccggcug

SEQ ID NO: 976318 - RNA, 19 nt, Artificial Sequence
  Description of Artificial Sequence: Synthetic oligonucleotide
uugucucuucugaaaugua

SEQ ID NO: 976319 - RNA, 19 nt, Artificial Sequence
  Description of Artificial Sequence: Synthetic oligonucleotide
uccggucucugcgccagcg

SEQ ID NO: 976320 - RNA, 19 nt, Artificial Sequence
  Description of Artificial Sequence: Synthetic oligonucleotide
accuagcacuccaguaggc

SEQ ID NO: 976321 - RNA, 19 nt, Artificial Sequence
  Description of Artificial Sequence: Synthetic oligonucleotide
aucgcaagcgagacauauc

SEQ ID NO: 976322 - RNA, 19 nt, Artificial Sequence
  Description of Artificial Sequence: Synthetic oligonucleotide
aggcacucuuuuauaucac

SEQ ID NO: 976323 - RNA, 19 nt, Artificial Sequence
  Description of Artificial Sequence: Synthetic oligonucleotide
ucugcgccagcgcuucuaa

SEQ ID NO: 976324 - RNA, 19 nt, Artificial Sequence
  Description of Artificial Sequence: Synthetic oligonucleotide
gaccuugugaaaucaggau

SEQ ID NO: 976325 - RNA, 19 nt, Artificial Sequence
  Description of Artificial Sequence: Synthetic oligonucleotide
uggugcuaacauggaaaug

SEQ ID NO: 976326 - RNA, 19 nt, Artificial Sequence
  Description of Artificial Sequence: Synthetic oligonucleotide
agauucagauuuggggcgu

SEQ ID NO: 976327 - RNA, 19 nt, Artificial Sequence
  Description of Artificial Sequence: Synthetic oligonucleotide
uucucacaggauucuccuc

SEQ ID NO: 976328 - RNA, 19 nt, Artificial Sequence
  Description of Artificial Sequence: Synthetic oligonucleotide
gugcgugugcucuucuuuc

SEQ ID NO: 976329 - RNA, 19 nt, Artificial Sequence
  Description of Artificial Sequence: Synthetic oligonucleotide
cuaaccaacaucgcugaua

SEQ ID NO: 976330 - RNA, 19 nt, Artificial Sequence
  Description of Artificial Sequence: Synthetic oligonucleotide
cagcuaaucgcaagcgaga

SEQ ID NO: 976331 - RNA, 19 nt, Artificial Sequence
  Description of Artificial Sequence: Synthetic oligonucleotide
aggugugacagaaauuauu

SEQ ID NO: 976332 - RNA, 19 nt, Artificial Sequence
  Description of Artificial Sequence: Synthetic oligonucleotide
gaaucauguaugggaccac

SEQ ID NO: 976333 - RNA, 19 nt, Artificial Sequence
  Description of Artificial Sequence: Synthetic oligonucleotide
uacagugcacagccuguuu

SEQ ID NO: 976334 - RNA, 19 nt, Artificial Sequence
  Description of Artificial Sequence: Synthetic oligonucleotide
caucgcugauaauaaccga

SEQ ID NO: 976335 - RNA, 19 nt, Artificial Sequence
  Description of Artificial Sequence: Synthetic oligonucleotide
ggcuccgucuuguugcuug

SEQ ID NO: 976336 - RNA, 19 nt, Artificial Sequence
  Description of Artificial Sequence: Synthetic oligonucleotide
ccucuccuagguuuggaag

SEQ ID NO: 976337 - RNA, 19 nt, Artificial Sequence
  Description of Artificial Sequence: Synthetic oligonucleotide
accgaagaguugaguuggc

SEQ ID NO: 976338 - RNA, 19 nt, Artificial Sequence
  Description of Artificial Sequence: Synthetic oligonucleotide
agugccuuaugaagcuucu

SEQ ID NO: 976339 - RNA, 19 nt, Artificial Sequence
  Description of Artificial Sequence: Synthetic oligonucleotide
uucuauuuuguggccugua

SEQ ID NO: 976340 - RNA, 19 nt, Artificial Sequence
  Description of Artificial Sequence: Synthetic oligonucleotide
guuacauugcccugagauu

SEQ ID NO: 976341 - RNA, 19 nt, Artificial Sequence
  Description of Artificial Sequence: Synthetic oligonucleotide
gaucuuaucuggggaaggu

SEQ ID NO: 976342 - RNA, 19 nt, Artificial Sequence
  Description of Artificial Sequence: Synthetic oligonucleotide
gugaaacuaacggaguuau

SEQ ID NO: 976343 - RNA, 19 nt, Artificial Sequence
  Description of Artificial Sequence: Synthetic oligonucleotide
ugaacgacuuccggcugaa

SEQ ID NO: 976344 - RNA, 19 nt, Artificial Sequence
  Description of Artificial Sequence: Synthetic oligonucleotide
gaccggguccuuaggggag

SEQ ID NO: 976345 - RNA, 19 nt, Artificial Sequence
  Description of Artificial Sequence: Synthetic oligonucleotide
gaguugaguuggcagaguu

SEQ ID NO: 976346 - RNA, 19 nt, Artificial Sequence
  Description of Artificial Sequence: Synthetic oligonucleotide
uuaagacuucaagcauaaa

SEQ ID NO: 976347 - RNA, 19 nt, Artificial Sequence
  Description of Artificial Sequence: Synthetic oligonucleotide
ccaacaucgcugauaauaa

SEQ ID NO: 976348 - RNA, 19 nt, Artificial Sequence
  Description of Artificial Sequence: Synthetic oligonucleotide
guuugauguucucugccau

SEQ ID NO: 976349 - RNA, 19 nt, Artificial Sequence
  Description of Artificial Sequence: Synthetic oligonucleotide
caagcuucauuauggcacu

SEQ ID NO: 976350 - RNA, 19 nt, Artificial Sequence
  Description of Artificial Sequence: Synthetic oligonucleotide
cugcguaugcugauguucu

SEQ ID NO: 976351 - RNA, 19 nt, Artificial Sequence
  Description of Artificial Sequence: Synthetic oligonucleotide
acuaaccaacaucgcugau

SEQ ID NO: 976352 - RNA, 19 nt, Artificial Sequence
  Description of Artificial Sequence: Synthetic oligonucleotide
ucauaaaggcauggcuguu

SEQ ID NO: 976353 - RNA, 19 nt, Artificial Sequence
  Description of Artificial Sequence: Synthetic oligonucleotide
gcaaagauugccauauacu

SEQ ID NO: 976354 - RNA, 19 nt, Artificial Sequence
  Description of Artificial Sequence: Synthetic oligonucleotide
uuuggggcgucguccucuc

SEQ ID NO: 976355 - RNA, 19 nt, Artificial Sequence
  Description of Artificial Sequence: Synthetic oligonucleotide
cugaauugguguuaacauu

SEQ ID NO: 976356 - RNA, 19 nt, Artificial Sequence
  Description of Artificial Sequence: Synthetic oligonucleotide
cgagacauaucagauuuac

SEQ ID NO: 976357 - RNA, 19 nt, Artificial Sequence
  Description of Artificial Sequence: Synthetic oligonucleotide
cgucuuguugcuugggcgc

SEQ ID NO: 976358 - RNA, 19 nt, Artificial Sequence
  Description of Artificial Sequence: Synthetic oligonucleotide
gaucuggugcuaacaugga

SEQ ID NO: 976359 - RNA, 19 nt, Artificial Sequence
  Description of Artificial Sequence: Synthetic oligonucleotide
cuguucugggguaauaauu

SEQ ID NO: 976360 - RNA, 19 nt, Artificial Sequence
  Description of Artificial Sequence: Synthetic oligonucleotide
cauacucaggcagcaguga

SEQ ID NO: 976361 - RNA, 19 nt, Artificial Sequence
  Description of Artificial Sequence: Synthetic oligonucleotide
acuuccggucucugcgcca

SEQ ID NO: 976362 - RNA, 19 nt, Artificial Sequence
  Description of Artificial Sequence: Synthetic oligonucleotide
uaaucgcaagcgagacaua

SEQ ID NO: 976363 - RNA, 19 nt, Artificial Sequence
  Description of Artificial Sequence: Synthetic oligonucleotide
gauuuggggcgucguccuc

SEQ ID NO: 976364 - RNA, 19 nt, Artificial Sequence
  Description of Artificial Sequence: Synthetic oligonucleotide
gauucagauuuggggcguc

SEQ ID NO: 976365 - RNA, 19 nt, Artificial Sequence
  Description of Artificial Sequence: Synthetic oligonucleotide
aaccaacaucgcugauaau

SEQ ID NO: 976366 - RNA, 19 nt, Artificial Sequence
  Description of Artificial Sequence: Synthetic oligonucleotide
ugggcgcuuuggcauuccu

SEQ ID NO: 976367 - RNA, 19 nt, Artificial Sequence
  Description of Artificial Sequence: Synthetic oligonucleotide
uugccgauaaaggcuuguu

SEQ ID NO: 976368 - RNA, 19 nt, Artificial Sequence
  Description of Artificial Sequence: Synthetic oligonucleotide
ugcguaugcugauguucuu

SEQ ID NO: 976369 - RNA, 19 nt, Artificial Sequence
  Description of Artificial Sequence: Synthetic oligonucleotide
ccugcguaugcugauguuc

SEQ ID NO: 976370 - RNA, 19 nt, Artificial Sequence
  Description of Artificial Sequence: Synthetic oligonucleotide
gcuaguggguuuauuuaga

SEQ ID NO: 976371 - RNA, 19 nt, Artificial Sequence
  Description of Artificial Sequence: Synthetic oligonucleotide
auacagugcacagccuguu

SEQ ID NO: 976372 - RNA, 19 nt, Artificial Sequence
  Description of Artificial Sequence: Synthetic oligonucleotide
cucauucgucuuagauuca

SEQ ID NO: 976373 - RNA, 19 nt, Artificial Sequence
  Description of Artificial Sequence: Synthetic oligonucleotide
ccucacuaaccaacaucgc

SEQ ID NO: 976374 - RNA, 19 nt, Artificial Sequence
  Description of Artificial Sequence: Synthetic oligonucleotide
gaguaccccucuuugcuuu

SEQ ID NO: 976375 - RNA, 19 nt, Artificial Sequence
  Description of Artificial Sequence: Synthetic oligonucleotide
gcuaaucgcaagcgagaca

SEQ ID NO: 976376 - RNA, 19 nt, Artificial Sequence
  Description of Artificial Sequence: Synthetic oligonucleotide
ccuagguuuggaaggggca

SEQ ID NO: 976377 - RNA, 19 nt, Artificial Sequence
  Description of Artificial Sequence: Synthetic oligonucleotide
gcgcuucuaacauaaggcu

SEQ ID NO: 976378 - RNA, 19 nt, Artificial Sequence
  Description of Artificial Sequence: Synthetic oligonucleotide
ccuugaacgacuuccggcu

SEQ ID NO: 976379 - RNA, 19 nt, Artificial Sequence
  Description of Artificial Sequence: Synthetic oligonucleotide
gggcaaauauuugccuuac

SEQ ID NO: 976380 - RNA, 19 nt, Artificial Sequence
  Description of Artificial Sequence: Synthetic oligonucleotide
cugggcaaauauuugccuu

SEQ ID NO: 976381 - RNA, 19 nt, Artificial Sequence
  Description of Artificial Sequence: Synthetic oligonucleotide
gugccuuaugaagcuucug

SEQ ID NO: 976382 - RNA, 19 nt, Artificial Sequence
  Description of Artificial Sequence: Synthetic oligonucleotide
gaacgacuuccggcugaag

SEQ ID NO: 976383 - RNA, 19 nt, Artificial Sequence
  Description of Artificial Sequence: Synthetic oligonucleotide
aggucccgacucaucaacu

SEQ ID NO: 976384 - RNA, 19 nt, Artificial Sequence
  Description of Artificial Sequence: Synthetic oligonucleotide
uuggggcgucguccucucc

SEQ ID NO: 976385 - RNA, 19 nt, Artificial Sequence
  Description of Artificial Sequence: Synthetic oligonucleotide
gguccuuaggggagucugc

SEQ ID NO: 976386 - RNA, 19 nt, Artificial Sequence
  Description of Artificial Sequence: Synthetic oligonucleotide
gguuuggaaggggcaggag

SEQ ID NO: 976387 - RNA, 19 nt, Artificial Sequence
  Description of Artificial Sequence: Synthetic oligonucleotide
aggcaaagauugccauaua

SEQ ID NO: 976388 - RNA, 19 nt, Artificial Sequence
  Description of Artificial Sequence: Synthetic oligonucleotide
cucccugcguaugcugaug

SEQ ID NO: 976389 - RNA, 19 nt, Artificial Sequence
  Description of Artificial Sequence: Synthetic oligonucleotide
ggcagaguugaccugucau

SEQ ID NO: 976390 - RNA, 19 nt, Artificial Sequence
  Description of Artificial Sequence: Synthetic oligonucleotide
cuugggcgcuuuggcauuc

SEQ ID NO: 976391 - RNA, 19 nt, Artificial Sequence
  Description of Artificial Sequence: Synthetic oligonucleotide
gugggcugaucagaauuaa

SEQ ID NO: 976392 - RNA, 19 nt, Artificial Sequence
  Description of Artificial Sequence: Synthetic oligonucleotide
gcaagcuggacuuccuuau

SEQ ID NO: 976393 - RNA, 19 nt, Artificial Sequence
  Description of Artificial Sequence: Synthetic oligonucleotide
caacucugaauugguguua

SEQ ID NO: 976394 - RNA, 19 nt, Artificial Sequence
  Description of Artificial Sequence: Synthetic oligonucleotide
cugcgccagcgcuucuaac

SEQ ID NO: 976395 - RNA, 19 nt, Artificial Sequence
  Description of Artificial Sequence: Synthetic oligonucleotide
ucgugguagcaagguuccu

SEQ ID NO: 976396 - RNA, 19 nt, Artificial Sequence
  Description of Artificial Sequence: Synthetic oligonucleotide
cuguaccuagcacuccagu

SEQ ID NO: 976397 - RNA, 19 nt, Artificial Sequence
  Description of Artificial Sequence: Synthetic oligonucleotide
ucucugcgccagcgcuucu

SEQ ID NO: 976398 - RNA, 19 nt, Artificial Sequence
  Description of Artificial Sequence: Synthetic oligonucleotide
gcagaguugaccugucauu

SEQ ID NO: 976399 - RNA, 19 nt, Artificial Sequence
  Description of Artificial Sequence: Synthetic oligonucleotide
cgcaagcgagacauaucag

SEQ ID NO: 976400 - RNA, 19 nt, Artificial Sequence
  Description of Artificial Sequence: Synthetic oligonucleotide
ccuuacuugguagcacuca

SEQ ID NO: 976401 - RNA, 19 nt, Artificial Sequence
  Description of Artificial Sequence: Synthetic oligonucleotide
gucccgacucaucaacuuu

SEQ ID NO: 976402 - RNA, 19 nt, Artificial Sequence
  Description of Artificial Sequence: Synthetic oligonucleotide
caggugugacagaaauuau

SEQ ID NO: 976403 - RNA, 19 nt, Artificial Sequence
  Description of Artificial Sequence: Synthetic oligonucleotide
guguggaguaccccucuuu

SEQ ID NO: 976404 - RNA, 19 nt, Artificial Sequence
  Description of Artificial Sequence: Synthetic oligonucleotide
uggcgugcgugugcucuuc

SEQ ID NO: 976405 - RNA, 19 nt, Artificial Sequence
  Description of Artificial Sequence: Synthetic oligonucleotide
ggcacuaccagcagcuaau

SEQ ID NO: 976406 - RNA, 19 nt, Artificial Sequence
  Description of Artificial Sequence: Synthetic oligonucleotide
gggcgucguccucuccuag

SEQ ID NO: 976407 - RNA, 19 nt, Artificial Sequence
  Description of Artificial Sequence: Synthetic oligonucleotide
ccgacucaucaacuuucuc

SEQ ID NO: 976408 - RNA, 19 nt, Artificial Sequence
  Description of Artificial Sequence: Synthetic oligonucleotide
ggaguaccccucuuugcuu

SEQ ID NO: 976409 - RNA, 19 nt, Artificial Sequence
  Description of Artificial Sequence: Synthetic oligonucleotide
ggucccgacucaucaacuu

SEQ ID NO: 976410 - RNA, 19 nt, Artificial Sequence
  Description of Artificial Sequence: Synthetic oligonucleotide
ccuuaggggagucugcauu

SEQ ID NO: 976411 - RNA, 19 nt, Artificial Sequence
  Description of Artificial Sequence: Synthetic oligonucleotide
ccggucucugcgccagcgc

SEQ ID NO: 976412 - RNA, 19 nt, Artificial Sequence
  Description of Artificial Sequence: Synthetic oligonucleotide
ccgaagaguugaguuggca

SEQ ID NO: 976413 - RNA, 19 nt, Artificial Sequence
  Description of Artificial Sequence: Synthetic oligonucleotide
gcaaacugaucuggugcua

SEQ ID NO: 976414 - RNA, 19 nt, Artificial Sequence
  Description of Artificial Sequence: Synthetic oligonucleotide
gcgugugcucuucuuuccu

SEQ ID NO: 976415 - RNA, 19 nt, Artificial Sequence
  Description of Artificial Sequence: Synthetic oligonucleotide
ccaguaggcuuuggcuuuc

SEQ ID NO: 976416 - RNA, 19 nt, Artificial Sequence
  Description of Artificial Sequence: Synthetic oligonucleotide
guaccccucuuugcuuucu

SEQ ID NO: 976417 - RNA, 19 nt, Artificial Sequence
  Description of Artificial Sequence: Synthetic oligonucleotide
cacccucacuaaccaacau

SEQ ID NO: 976418 - RNA, 19 nt, Artificial Sequence
  Description of Artificial Sequence: Synthetic oligonucleotide
ccuagcacuccaguaggcu

SEQ ID NO: 976419 - RNA, 19 nt, Artificial Sequence
  Description of Artificial Sequence: Synthetic oligonucleotide
ggggcgucguccucuccua

SEQ ID NO: 976420 - RNA, 19 nt, Artificial Sequence
  Description of Artificial Sequence: Synthetic oligonucleotide
cgcuucuaacauaaggcuu

SEQ ID NO: 976421 - RNA, 19 nt, Artificial Sequence
  Description of Artificial Sequence: Synthetic oligonucleotide
ccaaugggagcaguaacuu

SEQ ID NO: 976422 - RNA, 19 nt, Artificial Sequence
  Description of Artificial Sequence: Synthetic oligonucleotide
caagugccuuaugaagcuu

SEQ ID NO: 976423 - RNA, 19 nt, Artificial Sequence
  Description of Artificial Sequence: Synthetic oligonucleotide
gcgagacauaucagauuua

SEQ ID NO: 976424 - RNA, 19 nt, Artificial Sequence
  Description of Artificial Sequence: Synthetic oligonucleotide
gguguggaguaccccucuu

SEQ ID NO: 976425 - RNA, 19 nt, Artificial Sequence
  Description of Artificial Sequence: Synthetic oligonucleotide
gggcuagcaggugaaucau

SEQ ID NO: 976426 - RNA, 19 nt, Artificial Sequence
  Description of Artificial Sequence: Synthetic oligonucleotide
caugggcuagcaggugaau

SEQ ID NO: 976427 - RNA, 19 nt, Artificial Sequence
  Description of Artificial Sequence: Synthetic oligonucleotide
cuggcgugcgugugcucuu

SEQ ID NO: 976428 - RNA, 19 nt, Artificial Sequence
  Description of Artificial Sequence: Synthetic oligonucleotide
aauucaaggagucuggauc

SEQ ID NO: 976429 - RNA, 19 nt, Artificial Sequence
  Description of Artificial Sequence: Synthetic oligonucleotide
uguaacugccaucaaaucg

SEQ ID NO: 976430 - RNA, 19 nt, Artificial Sequence
  Description of Artificial Sequence: Synthetic oligonucleotide
gauuauaccaauguugugg

SEQ ID NO: 976431 - RNA, 19 nt, Artificial Sequence
  Description of Artificial Sequence: Synthetic oligonucleotide
cauuuuaugcacauuaggg

SEQ ID NO: 976432 - RNA, 19 nt, Artificial Sequence
  Description of Artificial Sequence: Synthetic oligonucleotide
uucacgaauaucacaaucg

SEQ ID NO: 976433 - RNA, 19 nt, Artificial Sequence
  Description of Artificial Sequence: Synthetic oligonucleotide
uguuccaucuuccacauag

SEQ ID NO: 976434 - RNA, 19 nt, Artificial Sequence
  Description of Artificial Sequence: Synthetic oligonucleotide
ugcuguacaacuaauguag

SEQ ID NO: 976435 - RNA, 19 nt, Artificial Sequence
  Description of Artificial Sequence: Synthetic oligonucleotide
acaaucaucaguucgaugu

SEQ ID NO: 976436 - RNA, 19 nt, Artificial Sequence
  Description of Artificial Sequence: Synthetic oligonucleotide
acaccuauguuccaaacac

SEQ ID NO: 976437 - RNA, 19 nt, Artificial Sequence
  Description of Artificial Sequence: Synthetic oligonucleotide
uuugauaaaaucccuccug

SEQ ID NO: 976438 - RNA, 19 nt, Artificial Sequence
  Description of Artificial Sequence: Synthetic oligonucleotide
aauucauucacgccuccuc

SEQ ID NO: 976439 - RNA, 19 nt, Artificial Sequence
  Description of Artificial Sequence: Synthetic oligonucleotide
aaugagagagcccauuuga

SEQ ID NO: 976440 - RNA, 19 nt, Artificial Sequence
  Description of Artificial Sequence: Synthetic oligonucleotide
aauuauuccuauuaugaua

SEQ ID NO: 976441 - RNA, 19 nt, Artificial Sequence
  Description of Artificial Sequence: Synthetic oligonucleotide
aauaucacaaucguugacu

SEQ ID NO: 976442 - RNA, 19 nt, Artificial Sequence
  Description of Artificial Sequence: Synthetic oligonucleotide
aaagcaaauucccugagua

SEQ ID NO: 976443 - RNA, 19 nt, Artificial Sequence
  Description of Artificial Sequence: Synthetic oligonucleotide
aguagugccacaaucacac

SEQ ID NO: 976444 - RNA, 19 nt, Artificial Sequence
  Description of Artificial Sequence: Synthetic oligonucleotide
cucgauaguucuuauaacc

SEQ ID NO: 976445 - RNA, 19 nt, Artificial Sequence
  Description of Artificial Sequence: Synthetic oligonucleotide
uaugauauuagugccagca

SEQ ID NO: 976446 - RNA, 19 nt, Artificial Sequence
  Description of Artificial Sequence: Synthetic oligonucleotide
cucauuacugcaaacuccg

SEQ ID NO: 976447 - RNA, 19 nt, Artificial Sequence
  Description of Artificial Sequence: Synthetic oligonucleotide
uaauaugagggccagcacu

SEQ ID NO: 976448 - RNA, 19 nt, Artificial Sequence
  Description of Artificial Sequence: Synthetic oligonucleotide
aaaagauggaccgcgucac

SEQ ID NO: 976449 - RNA, 19 nt, Artificial Sequence
  Description of Artificial Sequence: Synthetic oligonucleotide
uguauuucaugaacucacg

SEQ ID NO: 976450 - RNA, 19 nt, Artificial Sequence
  Description of Artificial Sequence: Synthetic oligonucleotide
uaaaccgaguagaaaauga

SEQ ID NO: 976451 - RNA, 19 nt, Artificial Sequence
  Description of Artificial Sequence: Synthetic oligonucleotide
ucgauaguucuuauaaccc

SEQ ID NO: 976452 - RNA, 19 nt, Artificial Sequence
  Description of Artificial Sequence: Synthetic oligonucleotide
uauuaugauauuagugcca

SEQ ID NO: 976453 - RNA, 19 nt, Artificial Sequence
  Description of Artificial Sequence: Synthetic oligonucleotide
uacauuacggggaagucga

SEQ ID NO: 976454 - RNA, 19 nt, Artificial Sequence
  Description of Artificial Sequence: Synthetic oligonucleotide
augcuguuaccuuuugucc

SEQ ID NO: 976455 - RNA, 19 nt, Artificial Sequence
  Description of Artificial Sequence: Synthetic oligonucleotide
ugauauuagugccagcaac

SEQ ID NO: 976456 - RNA, 19 nt, Artificial Sequence
  Description of Artificial Sequence: Synthetic oligonucleotide
acgaauaucacaaucguug

SEQ ID NO: 976457 - RNA, 19 nt, Artificial Sequence
  Description of Artificial Sequence: Synthetic oligonucleotide
auuugcacucgccacuugc

SEQ ID NO: 976458 - RNA, 19 nt, Artificial Sequence
  Description of Artificial Sequence: Synthetic oligonucleotide
uuaacauugacucguugaa

SEQ ID NO: 976459 - RNA, 19 nt, Artificial Sequence
  Description of Artificial Sequence: Synthetic oligonucleotide
guggaguuaacauugacuc

SEQ ID NO: 976460 - RNA, 19 nt, Artificial Sequence
  Description of Artificial Sequence: Synthetic oligonucleotide
uccugaacagauuucacga

SEQ ID NO: 976461 - RNA, 19 nt, Artificial Sequence
  Description of Artificial Sequence: Synthetic oligonucleotide
accaauguaagcugcgccg

SEQ ID NO: 976462 - RNA, 19 nt, Artificial Sequence
  Description of Artificial Sequence: Synthetic oligonucleotide
aaggauaaauuuuggugga

SEQ ID NO: 976463 - RNA, 19 nt, Artificial Sequence
  Description of Artificial Sequence: Synthetic oligonucleotide
uacaacggaaagccgaugc

SEQ ID NO: 976464 - RNA, 19 nt, Artificial Sequence
  Description of Artificial Sequence: Synthetic oligonucleotide
aaauugaaggaagccacag

SEQ ID NO: 976465 - RNA, 19 nt, Artificial Sequence
  Description of Artificial Sequence: Synthetic oligonucleotide
ucuggaucuguaaaccgag

SEQ ID NO: 976466 - RNA, 19 nt, Artificial Sequence
  Description of Artificial Sequence: Synthetic oligonucleotide
auuaugauauuagugccag

SEQ ID NO: 976467 - RNA, 19 nt, Artificial Sequence
  Description of Artificial Sequence: Synthetic oligonucleotide
cuugucagagauuauacca

SEQ ID NO: 976468 - RNA, 19 nt, Artificial Sequence
  Description of Artificial Sequence: Synthetic oligonucleotide
auaauagccggugucuccc

SEQ ID NO: 976469 - RNA, 19 nt, Artificial Sequence
  Description of Artificial Sequence: Synthetic oligonucleotide
agcaauuauuccuauuaug

SEQ ID NO: 976470 - RNA, 19 nt, Artificial Sequence
  Description of Artificial Sequence: Synthetic oligonucleotide
gauuucacgaauaucacaa

SEQ ID NO: 976471 - RNA, 19 nt, Artificial Sequence
  Description of Artificial Sequence: Synthetic oligonucleotide
ugcaguagugccacaauca

SEQ ID NO: 976472 - RNA, 19 nt, Artificial Sequence
  Description of Artificial Sequence: Synthetic oligonucleotide
uauaccaauguugugggcu

SEQ ID NO: 976473 - RNA, 19 nt, Artificial Sequence
  Description of Artificial Sequence: Synthetic oligonucleotide
accguugccagauagggug

SEQ ID NO: 976474 - RNA, 19 nt, Artificial Sequence
  Description of Artificial Sequence: Synthetic oligonucleotide
auuauuccuauuaugauau

SEQ ID NO: 976475 - RNA, 19 nt, Artificial Sequence
  Description of Artificial Sequence: Synthetic oligonucleotide
cuauccuagucuuaaguug

SEQ ID NO: 976476 - RNA, 19 nt, Artificial Sequence
  Description of Artificial Sequence: Synthetic oligonucleotide
uguauguacaacggaaagc

SEQ ID NO: 976477 - RNA, 19 nt, Artificial Sequence
  Description of Artificial Sequence: Synthetic oligonucleotide
uccggcuacucucaaauug

SEQ ID NO: 976478 - RNA, 19 nt, Artificial Sequence
  Description of Artificial Sequence: Synthetic oligonucleotide
auuccuauuaugauauuag

SEQ ID NO: 976479 - RNA, 19 nt, Artificial Sequence
  Description of Artificial Sequence: Synthetic oligonucleotide
accaacacuauccuagucu

SEQ ID NO: 976480 - RNA, 19 nt, Artificial Sequence
  Description of Artificial Sequence: Synthetic oligonucleotide
aauuuugguggaguuaaca

SEQ ID NO: 976481 - RNA, 19 nt, Artificial Sequence
  Description of Artificial Sequence: Synthetic oligonucleotide
uugcauagguauuuguaug

SEQ ID NO: 976482 - RNA, 19 nt, Artificial Sequence
  Description of Artificial Sequence: Synthetic oligonucleotide
guauuuguauguacaacgg

SEQ ID NO: 976483 - RNA, 19 nt, Artificial Sequence
  Description of Artificial Sequence: Synthetic oligonucleotide
ucuuauaaccccaggcagu

SEQ ID NO: 976484 - RNA, 19 nt, Artificial Sequence
  Description of Artificial Sequence: Synthetic oligonucleotide
gaaauggcgaauuuguugu

SEQ ID NO: 976485 - RNA, 19 nt, Artificial Sequence
  Description of Artificial Sequence: Synthetic oligonucleotide
auaucacaaucguugacug

SEQ ID NO: 976486 - RNA, 19 nt, Artificial Sequence
  Description of Artificial Sequence: Synthetic oligonucleotide
ugcuguuaccuuuuguccc

SEQ ID NO: 976487 - RNA, 19 nt, Artificial Sequence
  Description of Artificial Sequence: Synthetic oligonucleotide
gaaaagauggaccgcguca

SEQ ID NO: 976488 - RNA, 19 nt, Artificial Sequence
  Description of Artificial Sequence: Synthetic oligonucleotide
aaaccgaguagaaaaugag

SEQ ID NO: 976489 - RNA, 19 nt, Artificial Sequence
  Description of Artificial Sequence: Synthetic oligonucleotide
uuuacaccuuccuccaaag

SEQ ID NO: 976490 - RNA, 19 nt, Artificial Sequence
  Description of Artificial Sequence: Synthetic oligonucleotide
uggaguuaacauugacucg

SEQ ID NO: 976491 - RNA, 19 nt, Artificial Sequence
  Description of Artificial Sequence: Synthetic oligonucleotide
ucacgaauaucacaaucgu

SEQ ID NO: 976492 - RNA, 19 nt, Artificial Sequence
  Description of Artificial Sequence: Synthetic oligonucleotide
gauaauagccggugucucc

SEQ ID NO: 976493 - RNA, 19 nt, Artificial Sequence
  Description of Artificial Sequence: Synthetic oligonucleotide
ugcauagguauuuguaugu

SEQ ID NO: 976494 - RNA, 19 nt, Artificial Sequence
  Description of Artificial Sequence: Synthetic oligonucleotide
agaaaagauggaccgcguc

SEQ ID NO: 976495 - RNA, 19 nt, Artificial Sequence
  Description of Artificial Sequence: Synthetic oligonucleotide
uauaaccccaggcaguuau

SEQ ID NO: 976496 - RNA, 19 nt, Artificial Sequence
  Description of Artificial Sequence: Synthetic oligonucleotide
uuuuacaccuuccuccaaa

SEQ ID NO: 976497 - RNA, 19 nt, Artificial Sequence
  Description of Artificial Sequence: Synthetic oligonucleotide
acugccaucaaaucgguuu

SEQ ID NO: 976498 - RNA, 19 nt, Artificial Sequence
  Description of Artificial Sequence: Synthetic oligonucleotide
ugagaguccugagucaagg

SEQ ID NO: 976499 - RNA, 19 nt, Artificial Sequence
  Description of Artificial Sequence: Synthetic oligonucleotide
aaauucaaggagucuggau

SEQ ID NO: 976500 - RNA, 19 nt, Artificial Sequence
  Description of Artificial Sequence: Synthetic oligonucleotide
uauuagugccagcaacacc

SEQ ID NO: 976501 - RNA, 19 nt, Artificial Sequence
  Description of Artificial Sequence: Synthetic oligonucleotide
aaauggcgaauuuguuguc

SEQ ID NO: 976502 - RNA, 19 nt, Artificial Sequence
  Description of Artificial Sequence: Synthetic oligonucleotide
gauauuagugccagcaaca

SEQ ID NO: 976503 - RNA, 19 nt, Artificial Sequence
  Description of Artificial Sequence: Synthetic oligonucleotide
cuguaaaccgaguagaaaa

SEQ ID NO: 976504 - RNA, 19 nt, Artificial Sequence
  Description of Artificial Sequence: Synthetic oligonucleotide
uguugugggcuaacgacug

SEQ ID NO: 976505 - RNA, 19 nt, Artificial Sequence
  Description of Artificial Sequence: Synthetic oligonucleotide
aguucgauguauuuaguuu

SEQ ID NO: 976506 - RNA, 19 nt, Artificial Sequence
  Description of Artificial Sequence: Synthetic oligonucleotide
augauaugaucauucacaa

SEQ ID NO: 976507 - RNA, 19 nt, Artificial Sequence
  Description of Artificial Sequence: Synthetic oligonucleotide
auauuagugccagcaacac

SEQ ID NO: 976508 - RNA, 19 nt, Artificial Sequence
  Description of Artificial Sequence: Synthetic oligonucleotide
ucaaggugcacuucuuaca

SEQ ID NO: 976509 - RNA, 19 nt, Artificial Sequence
  Description of Artificial Sequence: Synthetic oligonucleotide
aacacuauccuagucuuaa

SEQ ID NO: 976510 - RNA, 19 nt, Artificial Sequence
  Description of Artificial Sequence: Synthetic oligonucleotide
ugaacagauuucacgaaua

SEQ ID NO: 976511 - RNA, 19 nt, Artificial Sequence
  Description of Artificial Sequence: Synthetic oligonucleotide
aaccaacacuauccuaguc

SEQ ID NO: 976512 - RNA, 19 nt, Artificial Sequence
  Description of Artificial Sequence: Synthetic oligonucleotide
uugacuucccgagaaaaga

SEQ ID NO: 976513 - RNA, 19 nt, Artificial Sequence
  Description of Artificial Sequence: Synthetic oligonucleotide
ugggaaggucauccgaggg

SEQ ID NO: 976514 - RNA, 19 nt, Artificial Sequence
  Description of Artificial Sequence: Synthetic oligonucleotide
aaucguugacugccucucg

SEQ ID NO: 976515 - RNA, 19 nt, Artificial Sequence
  Description of Artificial Sequence: Synthetic oligonucleotide
ucaugauacuccucaauau

SEQ ID NO: 976516 - RNA, 19 nt, Artificial Sequence
  Description of Artificial Sequence: Synthetic oligonucleotide
aucccgaccacguauccuc

SEQ ID NO: 976517 - RNA, 19 nt, Artificial Sequence
  Description of Artificial Sequence: Synthetic oligonucleotide
cuacauuacggggaagucg

SEQ ID NO: 976518 - RNA, 19 nt, Artificial Sequence
  Description of Artificial Sequence: Synthetic oligonucleotide
acacucggcuccuucaagg

SEQ ID NO: 976519 - RNA, 19 nt, Artificial Sequence
  Description of Artificial Sequence: Synthetic oligonucleotide
agguauuuguauguacaac

SEQ ID NO: 976520 - RNA, 19 nt, Artificial Sequence
  Description of Artificial Sequence: Synthetic oligonucleotide
ucaagcuugacaugcccac

SEQ ID NO: 976521 - RNA, 19 nt, Artificial Sequence
  Description of Artificial Sequence: Synthetic oligonucleotide
ggaucgagaagcuuagaag

SEQ ID NO: 976522 - RNA, 19 nt, Artificial Sequence
  Description of Artificial Sequence: Synthetic oligonucleotide
auuuguauguacaacggaa

SEQ ID NO: 976523 - RNA, 19 nt, Artificial Sequence
  Description of Artificial Sequence: Synthetic oligonucleotide
aucgagaagcuuagaaggc

SEQ ID NO: 976524 - RNA, 19 nt, Artificial Sequence
  Description of Artificial Sequence: Synthetic oligonucleotide
uccgcuuuagucuuggcuu

SEQ ID NO: 976525 - RNA, 19 nt, Artificial Sequence
  Description of Artificial Sequence: Synthetic oligonucleotide
acuauccuagucuuaaguu

SEQ ID NO: 976526 - RNA, 19 nt, Artificial Sequence
  Description of Artificial Sequence: Synthetic oligonucleotide
uggugcauaaaagguaacc

SEQ ID NO: 976527 - RNA, 19 nt, Artificial Sequence
  Description of Artificial Sequence: Synthetic oligonucleotide
aauguaagcugcgccgcuc

SEQ ID NO: 976528 - RNA, 19 nt, Artificial Sequence
  Description of Artificial Sequence: Synthetic oligonucleotide
uccgagggaaauucaagga

SEQ ID NO: 976529 - RNA, 19 nt, Artificial Sequence
  Description of Artificial Sequence: Synthetic oligonucleotide
uugcacuguauccacgugu

SEQ ID NO: 976530 - RNA, 19 nt, Artificial Sequence
  Description of Artificial Sequence: Synthetic oligonucleotide
uauuccuauuaugauauua

SEQ ID NO: 976531 - RNA, 19 nt, Artificial Sequence
  Description of Artificial Sequence: Synthetic oligonucleotide
uuuacuccgcuuuagucuu

SEQ ID NO: 976532 - RNA, 19 nt, Artificial Sequence
  Description of Artificial Sequence: Synthetic oligonucleotide
gaauaucacaaucguugac

SEQ ID NO: 976533 - RNA, 19 nt, Artificial Sequence
  Description of Artificial Sequence: Synthetic oligonucleotide
auacuccucaauauugcac

SEQ ID NO: 976534 - RNA, 19 nt, Artificial Sequence
  Description of Artificial Sequence: Synthetic oligonucleotide
uucaagggcgcauucugca

SEQ ID NO: 976535 - RNA, 19 nt, Artificial Sequence
  Description of Artificial Sequence: Synthetic oligonucleotide
ugagcaaguguaacugcca

SEQ ID NO: 976536 - RNA, 19 nt, Artificial Sequence
  Description of Artificial Sequence: Synthetic oligonucleotide
acuaaaauggugccagcaa

SEQ ID NO: 976537 - RNA, 19 nt, Artificial Sequence
  Description of Artificial Sequence: Synthetic oligonucleotide
guugaaacucagugggaag

SEQ ID NO: 976538 - RNA, 19 nt, Artificial Sequence
  Description of Artificial Sequence: Synthetic oligonucleotide
uauccacgugucuuuaucu

SEQ ID NO: 976539 - RNA, 19 nt, Artificial Sequence
  Description of Artificial Sequence: Synthetic oligonucleotide
aggguguuccaucuuccac

SEQ ID NO: 976540 - RNA, 19 nt, Artificial Sequence
  Description of Artificial Sequence: Synthetic oligonucleotide
gauuucaccgucaaguucu

SEQ ID NO: 976541 - RNA, 19 nt, Artificial Sequence
  Description of Artificial Sequence: Synthetic oligonucleotide
uagugccacaaucacacuc

SEQ ID NO: 976542 - RNA, 19 nt, Artificial Sequence
  Description of Artificial Sequence: Synthetic oligonucleotide
aucguugacugccucucgg

SEQ ID NO: 976543 - RNA, 19 nt, Artificial Sequence
  Description of Artificial Sequence: Synthetic oligonucleotide
cacguauccucacauuugc

SEQ ID NO: 976544 - RNA, 19 nt, Artificial Sequence
  Description of Artificial Sequence: Synthetic oligonucleotide
aauggcgaauuuguuguca

SEQ ID NO: 976545 - RNA, 19 nt, Artificial Sequence
  Description of Artificial Sequence: Synthetic oligonucleotide
uguacaacggaaagccgau

SEQ ID NO: 976546 - RNA, 19 nt, Artificial Sequence
  Description of Artificial Sequence: Synthetic oligonucleotide
aaacuccguuuccugaaca

SEQ ID NO: 976547 - RNA, 19 nt, Artificial Sequence
  Description of Artificial Sequence: Synthetic oligonucleotide
ucuucaagcuugacaugcc

SEQ ID NO: 976548 - RNA, 19 nt, Artificial Sequence
  Description of Artificial Sequence: Synthetic oligonucleotide
acaccguugccagauaggg

SEQ ID NO: 976549 - RNA, 19 nt, Artificial Sequence
  Description of Artificial Sequence: Synthetic oligonucleotide
gagaguguauacugcaguc

SEQ ID NO: 976550 - RNA, 19 nt, Artificial Sequence
  Description of Artificial Sequence: Synthetic oligonucleotide
aacacucggcuccuucaag

SEQ ID NO: 976551 - RNA, 19 nt, Artificial Sequence
  Description of Artificial Sequence: Synthetic oligonucleotide
cucucaaauugacuucccg

SEQ ID NO: 976552 - RNA, 19 nt, Artificial Sequence
  Description of Artificial Sequence: Synthetic oligonucleotide
guauacugcagucggcacc

SEQ ID NO: 976553 - RNA, 19 nt, Artificial Sequence
  Description of Artificial Sequence: Synthetic oligonucleotide
uauacugcagucggcaccu

SEQ ID NO: 976554 - RNA, 19 nt, Artificial Sequence
  Description of Artificial Sequence: Synthetic oligonucleotide
acuauucaggaagucauga

SEQ ID NO: 976555 - RNA, 19 nt, Artificial Sequence
  Description of Artificial Sequence: Synthetic oligonucleotide
agauagggugaugccagcc

SEQ ID NO: 976556 - RNA, 19 nt, Artificial Sequence
  Description of Artificial Sequence: Synthetic oligonucleotide
cuccguuuccugaacaaac

SEQ ID NO: 976557 - RNA, 19 nt, Artificial Sequence
  Description of Artificial Sequence: Synthetic oligonucleotide
ugcacuguauccacguguc

SEQ ID NO: 976558 - RNA, 19 nt, Artificial Sequence
  Description of Artificial Sequence: Synthetic oligonucleotide
ugaguaccaucacaggaau

SEQ ID NO: 976559 - RNA, 19 nt, Artificial Sequence
  Description of Artificial Sequence: Synthetic oligonucleotide
aggaucgagaagcuuagaa

SEQ ID NO: 976560 - RNA, 19 nt, Artificial Sequence
  Description of Artificial Sequence: Synthetic oligonucleotide
aaauuuugguggaguuaac

SEQ ID NO: 976561 - RNA, 19 nt, Artificial Sequence
  Description of Artificial Sequence: Synthetic oligonucleotide
auggcgaauuuguugucag

SEQ ID NO: 976562 - RNA, 19 nt, Artificial Sequence
  Description of Artificial Sequence: Synthetic oligonucleotide
uuugcacucgccacuugcu

SEQ ID NO: 976563 - RNA, 19 nt, Artificial Sequence
  Description of Artificial Sequence: Synthetic oligonucleotide
agauaauagccggugucuc

SEQ ID NO: 976564 - RNA, 19 nt, Artificial Sequence
  Description of Artificial Sequence: Synthetic oligonucleotide
aaccgaguagaaaaugaga

SEQ ID NO: 976565 - RNA, 19 nt, Artificial Sequence
  Description of Artificial Sequence: Synthetic oligonucleotide
caauauugcacugagugaa

SEQ ID NO: 976566 - RNA, 19 nt, Artificial Sequence
  Description of Artificial Sequence: Synthetic oligonucleotide
uguucaagcaagugcugaa

SEQ ID NO: 976567 - RNA, 19 nt, Artificial Sequence
  Description of Artificial Sequence: Synthetic oligonucleotide
guuuacuccgcuuuagucu

SEQ ID NO: 976568 - RNA, 19 nt, Artificial Sequence
  Description of Artificial Sequence: Synthetic oligonucleotide
gcaguuauuccuaauauga

SEQ ID NO: 976569 - RNA, 19 nt, Artificial Sequence
  Description of Artificial Sequence: Synthetic oligonucleotide
gagagagcccauuugaccu

SEQ ID NO: 976570 - RNA, 19 nt, Artificial Sequence
  Description of Artificial Sequence: Synthetic oligonucleotide
gaggagaguguauacugca

SEQ ID NO: 976571 - RNA, 19 nt, Artificial Sequence
  Description of Artificial Sequence: Synthetic oligonucleotide
aacaccguugccagauagg

SEQ ID NO: 976572 - RNA, 19 nt, Artificial Sequence
  Description of Artificial Sequence: Synthetic oligonucleotide
ugaccucucucuguucucg

SEQ ID NO: 976573 - RNA, 19 nt, Artificial Sequence
  Description of Artificial Sequence: Synthetic oligonucleotide
uugacucguugaaacucag

SEQ ID NO: 976574 - RNA, 19 nt, Artificial Sequence
  Description of Artificial Sequence: Synthetic oligonucleotide
acauugacucguugaaacu

SEQ ID NO: 976575 - RNA, 19 nt, Artificial Sequence
  Description of Artificial Sequence: Synthetic oligonucleotide
aguuaacauugacucguug

SEQ ID NO: 976576 - RNA, 19 nt, Artificial Sequence
  Description of Artificial Sequence: Synthetic oligonucleotide
cccgagaaaagauggaccg

SEQ ID NO: 976577 - RNA, 19 nt, Artificial Sequence
  Description of Artificial Sequence: Synthetic oligonucleotide
auaugaucauucacaauca

SEQ ID NO: 976578 - RNA, 19 nt, Artificial Sequence
  Description of Artificial Sequence: Synthetic oligonucleotide
aauuuccucuugucagaga

SEQ ID NO: 976579 - RNA, 19 nt, Artificial Sequence
  Description of Artificial Sequence: Synthetic oligonucleotide
ucguagcaguauuugucag

SEQ ID NO: 976580 - RNA, 19 nt, Artificial Sequence
  Description of Artificial Sequence: Synthetic oligonucleotide
uaagcugcgccgcuccggc

SEQ ID NO: 976581 - RNA, 19 nt, Artificial Sequence
  Description of Artificial Sequence: Synthetic oligonucleotide
guaaaccgaguagaaaaug

SEQ ID NO: 976582 - RNA, 19 nt, Artificial Sequence
  Description of Artificial Sequence: Synthetic oligonucleotide
aacuccguuuccugaacaa

SEQ ID NO: 976583 - RNA, 19 nt, Artificial Sequence
  Description of Artificial Sequence: Synthetic oligonucleotide
aguguauacugcagucggc

SEQ ID NO: 976584 - RNA, 19 nt, Artificial Sequence
  Description of Artificial Sequence: Synthetic oligonucleotide
gaagucgaagaagcugccg

SEQ ID NO: 976585 - RNA, 19 nt, Artificial Sequence
  Description of Artificial Sequence: Synthetic oligonucleotide
uguauacugcagucggcac

SEQ ID NO: 976586 - RNA, 19 nt, Artificial Sequence
  Description of Artificial Sequence: Synthetic oligonucleotide
ugugggcuaacgacugagc

SEQ ID NO: 976587 - RNA, 19 nt, Artificial Sequence
  Description of Artificial Sequence: Synthetic oligonucleotide
caaauugacuucccgagaa

SEQ ID NO: 976588 - RNA, 19 nt, Artificial Sequence
  Description of Artificial Sequence: Synthetic oligonucleotide
cuacucucaaauugacuuc

SEQ ID NO: 976589 - RNA, 19 nt, Artificial Sequence
  Description of Artificial Sequence: Synthetic oligonucleotide
agagagcccauuugaccuc

SEQ ID NO: 976590 - RNA, 19 nt, Artificial Sequence
  Description of Artificial Sequence: Synthetic oligonucleotide
uccucuacauuacggggaa

SEQ ID NO: 976591 - RNA, 19 nt, Artificial Sequence
  Description of Artificial Sequence: Synthetic oligonucleotide
uuaugauauuagugccagc

SEQ ID NO: 976592 - RNA, 19 nt, Artificial Sequence
  Description of Artificial Sequence: Synthetic oligonucleotide
caccaauguaagcugcgcc

SEQ ID NO: 976593 - RNA, 19 nt, Artificial Sequence
  Description of Artificial Sequence: Synthetic oligonucleotide
uuauaccaauguugugggc

SEQ ID NO: 976594 - RNA, 19 nt, Artificial Sequence
  Description of Artificial Sequence: Synthetic oligonucleotide
cuucuuacaacacucggcu

SEQ ID NO: 976595 - RNA, 19 nt, Artificial Sequence
  Description of Artificial Sequence: Synthetic oligonucleotide
cucguagcaguauuuguca

SEQ ID NO: 976596 - RNA, 19 nt, Artificial Sequence
  Description of Artificial Sequence: Synthetic oligonucleotide
uuuguccccagauguauuu

SEQ ID NO: 976597 - RNA, 19 nt, Artificial Sequence
  Description of Artificial Sequence: Synthetic oligonucleotide
gagggccagcacuaaaaug

SEQ ID NO: 976598 - RNA, 19 nt, Artificial Sequence
  Description of Artificial Sequence: Synthetic oligonucleotide
cauaucugccauguucacc

SEQ ID NO: 976599 - RNA, 19 nt, Artificial Sequence
  Description of Artificial Sequence: Synthetic oligonucleotide
ucggcaccuguccagugcc

SEQ ID NO: 976600 - RNA, 19 nt, Artificial Sequence
  Description of Artificial Sequence: Synthetic oligonucleotide
aaagauggaccgcgucacu

SEQ ID NO: 976601 - RNA, 19 nt, Artificial Sequence
  Description of Artificial Sequence: Synthetic oligonucleotide
gauaaauuuugguggaguu

SEQ ID NO: 976602 - RNA, 19 nt, Artificial Sequence
  Description of Artificial Sequence: Synthetic oligonucleotide
ucaguucgauguauuuagu

SEQ ID NO: 976603 - RNA, 19 nt, Artificial Sequence
  Description of Artificial Sequence: Synthetic oligonucleotide
ucgagaagcuuagaaggcu

SEQ ID NO: 976604 - RNA, 19 nt, Artificial Sequence
  Description of Artificial Sequence: Synthetic oligonucleotide
uuaggggcacacuggcuug

SEQ ID NO: 976605 - RNA, 19 nt, Artificial Sequence
  Description of Artificial Sequence: Synthetic oligonucleotide
ggcaguuauuccuaauaug

SEQ ID NO: 976606 - RNA, 19 nt, Artificial Sequence
  Description of Artificial Sequence: Synthetic oligonucleotide
aagccuugggauauugcca

SEQ ID NO: 976607 - RNA, 19 nt, Artificial Sequence
  Description of Artificial Sequence: Synthetic oligonucleotide
guagaugugauuucaccgu

SEQ ID NO: 976608 - RNA, 19 nt, Artificial Sequence
  Description of Artificial Sequence: Synthetic oligonucleotide
acaacggaaagccgaugcu

SEQ ID NO: 976609 - RNA, 19 nt, Artificial Sequence
  Description of Artificial Sequence: Synthetic oligonucleotide
acagaaagacaccuauguu

SEQ ID NO: 976610 - RNA, 19 nt, Artificial Sequence
  Description of Artificial Sequence: Synthetic oligonucleotide
ugauaugaucauucacaau

SEQ ID NO: 976611 - RNA, 19 nt, Artificial Sequence
  Description of Artificial Sequence: Synthetic oligonucleotide
uccugagucaaggugcacu

SEQ ID NO: 976612 - RNA, 19 nt, Artificial Sequence
  Description of Artificial Sequence: Synthetic oligonucleotide
agugccagcaacaccguug

SEQ ID NO: 976613 - RNA, 19 nt, Artificial Sequence
  Description of Artificial Sequence: Synthetic oligonucleotide
augauauuagugccagcaa

SEQ ID NO: 976614 - RNA, 19 nt, Artificial Sequence
  Description of Artificial Sequence: Synthetic oligonucleotide
uauuugcauugucugucuc

SEQ ID NO: 976615 - RNA, 19 nt, Artificial Sequence
  Description of Artificial Sequence: Synthetic oligonucleotide
ugggcuaacgacugagcaa

SEQ ID NO: 976616 - RNA, 19 nt, Artificial Sequence
  Description of Artificial Sequence: Synthetic oligonucleotide
caacaccguugccagauag

SEQ ID NO: 976617 - RNA, 19 nt, Artificial Sequence
  Description of Artificial Sequence: Synthetic oligonucleotide
auggugccagcaauuauuc

SEQ ID NO: 976618 - RNA, 19 nt, Artificial Sequence
  Description of Artificial Sequence: Synthetic oligonucleotide
auucacgccuccuccucuc

SEQ ID NO: 976619 - RNA, 19 nt, Artificial Sequence
  Description of Artificial Sequence: Synthetic oligonucleotide
cuaauaugagggccagcac

SEQ ID NO: 976620 - RNA, 19 nt, Artificial Sequence
  Description of Artificial Sequence: Synthetic oligonucleotide
aagucaugauacuccucaa

SEQ ID NO: 976621 - RNA, 19 nt, Artificial Sequence
  Description of Artificial Sequence: Synthetic oligonucleotide
ucguugacugccucucggc

SEQ ID NO: 976622 - RNA, 19 nt, Artificial Sequence
  Description of Artificial Sequence: Synthetic oligonucleotide
ucguugaaacucaguggga

SEQ ID NO: 976623 - RNA, 19 nt, Artificial Sequence
  Description of Artificial Sequence: Synthetic oligonucleotide
cucgccacuugcuaauuuc

SEQ ID NO: 976624 - RNA, 19 nt, Artificial Sequence
  Description of Artificial Sequence: Synthetic oligonucleotide
auugugaggagaguguaua

SEQ ID NO: 976625 - RNA, 19 nt, Artificial Sequence
  Description of Artificial Sequence: Synthetic oligonucleotide
cacagaaagacaccuaugu

SEQ ID NO: 976626 - RNA, 19 nt, Artificial Sequence
  Description of Artificial Sequence: Synthetic oligonucleotide
guauccacgugucuuuauc

SEQ ID NO: 976627 - RNA, 19 nt, Artificial Sequence
  Description of Artificial Sequence: Synthetic oligonucleotide
uggaccgcgucacucuucu

SEQ ID NO: 976628 - RNA, 19 nt, Artificial Sequence
  Description of Artificial Sequence: Synthetic oligonucleotide
uaugagggccagcacuaaa

SEQ ID NO: 976629 - RNA, 19 nt, Artificial Sequence
  Description of Artificial Sequence: Synthetic oligonucleotide
auugacucguugaaacuca

SEQ ID NO: 976630 - RNA, 19 nt, Artificial Sequence
  Description of Artificial Sequence: Synthetic oligonucleotide
agauggaccgcgucacucu

SEQ ID NO: 976631 - RNA, 19 nt, Artificial Sequence
  Description of Artificial Sequence: Synthetic oligonucleotide
ggagauaauagccgguguc

SEQ ID NO: 976632 - RNA, 19 nt, Artificial Sequence
  Description of Artificial Sequence: Synthetic oligonucleotide
uuccuaauaugagggccag

SEQ ID NO: 976633 - RNA, 19 nt, Artificial Sequence
  Description of Artificial Sequence: Synthetic oligonucleotide
caacagaggccaucacugc

SEQ ID NO: 976634 - RNA, 19 nt, Artificial Sequence
  Description of Artificial Sequence: Synthetic oligonucleotide
auagccggugucucccauc

SEQ ID NO: 976635 - RNA, 19 nt, Artificial Sequence
  Description of Artificial Sequence: Synthetic oligonucleotide
ucuacauuacggggaaguc

SEQ ID NO: 976636 - RNA, 19 nt, Artificial Sequence
  Description of Artificial Sequence: Synthetic oligonucleotide
gggcuaacgacugagcaag

SEQ ID NO: 976637 - RNA, 19 nt, Artificial Sequence
  Description of Artificial Sequence: Synthetic oligonucleotide
acacuauccuagucuuaag

SEQ ID NO: 976638 - RNA, 19 nt, Artificial Sequence
  Description of Artificial Sequence: Synthetic oligonucleotide
gcacauuaggggcacacug

SEQ ID NO: 976639 - RNA, 19 nt, Artificial Sequence
  Description of Artificial Sequence: Synthetic oligonucleotide
ggugcauaaaagguaacca

SEQ ID NO: 976640 - RNA, 19 nt, Artificial Sequence
  Description of Artificial Sequence: Synthetic oligonucleotide
auuucacgaauaucacaau

SEQ ID NO: 976641 - RNA, 19 nt, Artificial Sequence
  Description of Artificial Sequence: Synthetic oligonucleotide
gaaauucaaggagucugga

SEQ ID NO: 976642 - RNA, 19 nt, Artificial Sequence
  Description of Artificial Sequence: Synthetic oligonucleotide
ucauucacgccuccuccuc

SEQ ID NO: 976643 - RNA, 19 nt, Artificial Sequence
  Description of Artificial Sequence: Synthetic oligonucleotide
ugcacucgccacuugcuaa

SEQ ID NO: 976644 - RNA, 19 nt, Artificial Sequence
  Description of Artificial Sequence: Synthetic oligonucleotide
ucacaaucguugacugccu

SEQ ID NO: 976645 - RNA, 19 nt, Artificial Sequence
  Description of Artificial Sequence: Synthetic oligonucleotide
caaauucauucacgccucc

SEQ ID NO: 976646 - RNA, 19 nt, Artificial Sequence
  Description of Artificial Sequence: Synthetic oligonucleotide
acucucaaauugacuuccc

SEQ ID NO: 976647 - RNA, 19 nt, Artificial Sequence
  Description of Artificial Sequence: Synthetic oligonucleotide
aggauaaauuuugguggag

SEQ ID NO: 976648 - RNA, 19 nt, Artificial Sequence
  Description of Artificial Sequence: Synthetic oligonucleotide
uuaugcacauuaggggcac

SEQ ID NO: 976649 - RNA, 19 nt, Artificial Sequence
  Description of Artificial Sequence: Synthetic oligonucleotide
uacuccgcuuuagucuugg

SEQ ID NO: 976650 - RNA, 19 nt, Artificial Sequence
  Description of Artificial Sequence: Synthetic oligonucleotide
ucauugugaggagagugua

SEQ ID NO: 976651 - RNA, 19 nt, Artificial Sequence
  Description of Artificial Sequence: Synthetic oligonucleotide
cauuacggggaagucgaag

SEQ ID NO: 976652 - RNA, 19 nt, Artificial Sequence
  Description of Artificial Sequence: Synthetic oligonucleotide
ucauuacugcaaacuccgu

SEQ ID NO: 976653 - RNA, 19 nt, Artificial Sequence
  Description of Artificial Sequence: Synthetic oligonucleotide
cugcaguagugccacaauc

SEQ ID NO: 976654 - RNA, 19 nt, Artificial Sequence
  Description of Artificial Sequence: Synthetic oligonucleotide
ugacucguugaaacucagu

SEQ ID NO: 976655 - RNA, 19 nt, Artificial Sequence
  Description of Artificial Sequence: Synthetic oligonucleotide
gugggcuaacgacugagca

SEQ ID NO: 976656 - RNA, 19 nt, Artificial Sequence
  Description of Artificial Sequence: Synthetic oligonucleotide
auaccaauguugugggcua

SEQ ID NO: 976657 - RNA, 19 nt, Artificial Sequence
  Description of Artificial Sequence: Synthetic oligonucleotide
aacggaaagccgaugcuuu

SEQ ID NO: 976658 - RNA, 19 nt, Artificial Sequence
  Description of Artificial Sequence: Synthetic oligonucleotide
uugggauauugccaauguu

SEQ ID NO: 976659 - RNA, 19 nt, Artificial Sequence
  Description of Artificial Sequence: Synthetic oligonucleotide
gaggccaucacugcacuga

SEQ ID NO: 976660 - RNA, 19 nt, Artificial Sequence
  Description of Artificial Sequence: Synthetic oligonucleotide
uggggagauaauagccggu

SEQ ID NO: 976661 - RNA, 19 nt, Artificial Sequence
  Description of Artificial Sequence: Synthetic oligonucleotide
aauagccggugucucccau

SEQ ID NO: 976662 - RNA, 19 nt, Artificial Sequence
  Description of Artificial Sequence: Synthetic oligonucleotide
cuccucuacauuacgggga

SEQ ID NO: 976663 - RNA, 19 nt, Artificial Sequence
  Description of Artificial Sequence: Synthetic oligonucleotide
uccacgugucuuuaucuuu

SEQ ID NO: 976664 - RNA, 19 nt, Artificial Sequence
  Description of Artificial Sequence: Synthetic oligonucleotide
caauguugugggcuaacga

SEQ ID NO: 976665 - RNA, 19 nt, Artificial Sequence
  Description of Artificial Sequence: Synthetic oligonucleotide
uggcgaauuuguugucagc

SEQ ID NO: 976666 - RNA, 19 nt, Artificial Sequence
  Description of Artificial Sequence: Synthetic oligonucleotide
gcucauuacugcaaacucc

SEQ ID NO: 976667 - RNA, 19 nt, Artificial Sequence
  Description of Artificial Sequence: Synthetic oligonucleotide
uucuuacaacacucggcuc

SEQ ID NO: 976668 - RNA, 19 nt, Artificial Sequence
  Description of Artificial Sequence: Synthetic oligonucleotide
cacgcagggugaucagugg

SEQ ID NO: 976669 - RNA, 19 nt, Artificial Sequence
  Description of Artificial Sequence: Synthetic oligonucleotide
agcaacaccguugccagau

SEQ ID NO: 976670 - RNA, 19 nt, Artificial Sequence
  Description of Artificial Sequence: Synthetic oligonucleotide
uguuaccuuuuguccccag

SEQ ID NO: 976671 - RNA, 19 nt, Artificial Sequence
  Description of Artificial Sequence: Synthetic oligonucleotide
gauagggugaugccagccu

SEQ ID NO: 976672 - RNA, 19 nt, Artificial Sequence
  Description of Artificial Sequence: Synthetic oligonucleotide
accaauguugugggcuaac

SEQ ID NO: 976673 - RNA, 19 nt, Artificial Sequence
  Description of Artificial Sequence: Synthetic oligonucleotide
caaucguugacugccucuc

SEQ ID NO: 976674 - RNA, 19 nt, Artificial Sequence
  Description of Artificial Sequence: Synthetic oligonucleotide
guguaacugccaucaaauc

SEQ ID NO: 976675 - RNA, 19 nt, Artificial Sequence
  Description of Artificial Sequence: Synthetic oligonucleotide
cuaacgacugagcaagugu

SEQ ID NO: 976676 - RNA, 19 nt, Artificial Sequence
  Description of Artificial Sequence: Synthetic oligonucleotide
agaagcuuagaaggcuugu

SEQ ID NO: 976677 - RNA, 19 nt, Artificial Sequence
  Description of Artificial Sequence: Synthetic oligonucleotide
aggagaguguauacugcag

SEQ ID NO: 976678 - RNA, 19 nt, Artificial Sequence
  Description of Artificial Sequence: Synthetic oligonucleotide
ccgagggaaauucaaggag

SEQ ID NO: 976679 - RNA, 19 nt, Artificial Sequence
  Description of Artificial Sequence: Synthetic oligonucleotide
ucccaucacacaucccgac

SEQ ID NO: 976680 - RNA, 19 nt, Artificial Sequence
  Description of Artificial Sequence: Synthetic oligonucleotide
gcgaauuuguugucagcag

SEQ ID NO: 976681 - RNA, 19 nt, Artificial Sequence
  Description of Artificial Sequence: Synthetic oligonucleotide
uguauccacgugucuuuau

SEQ ID NO: 976682 - RNA, 19 nt, Artificial Sequence
  Description of Artificial Sequence: Synthetic oligonucleotide
cgagaaaagauggaccgcg

SEQ ID NO: 976683 - RNA, 19 nt, Artificial Sequence
  Description of Artificial Sequence: Synthetic oligonucleotide
cguuuguugcacuguaucc

SEQ ID NO: 976684 - RNA, 19 nt, Artificial Sequence
  Description of Artificial Sequence: Synthetic oligonucleotide
acucgggaggaucgagaag

SEQ ID NO: 976685 - RNA, 19 nt, Artificial Sequence
  Description of Artificial Sequence: Synthetic oligonucleotide
ggcgaauuuguugucagca

SEQ ID NO: 976686 - RNA, 19 nt, Artificial Sequence
  Description of Artificial Sequence: Synthetic oligonucleotide
acuccgcuuuagucuuggc

SEQ ID NO: 976687 - RNA, 19 nt, Artificial Sequence
  Description of Artificial Sequence: Synthetic oligonucleotide
cugcuguacaacuaaugua

SEQ ID NO: 976688 - RNA, 19 nt, Artificial Sequence
  Description of Artificial Sequence: Synthetic oligonucleotide
aucaguggguucucagaaa

SEQ ID NO: 976689 - RNA, 19 nt, Artificial Sequence
  Description of Artificial Sequence: Synthetic oligonucleotide
ggaguuaacauugacucgu

SEQ ID NO: 976690 - RNA, 19 nt, Artificial Sequence
  Description of Artificial Sequence: Synthetic oligonucleotide
gcagcgagcaaaucccacc

SEQ ID NO: 976691 - RNA, 19 nt, Artificial Sequence
  Description of Artificial Sequence: Synthetic oligonucleotide
ggucuuuauagaucauauc

SEQ ID NO: 976692 - RNA, 19 nt, Artificial Sequence
  Description of Artificial Sequence: Synthetic oligonucleotide
ucccguuuguugcacugua

SEQ ID NO: 976693 - RNA, 19 nt, Artificial Sequence
  Description of Artificial Sequence: Synthetic oligonucleotide
guaagcugcgccgcuccgg

SEQ ID NO: 976694 - RNA, 19 nt, Artificial Sequence
  Description of Artificial Sequence: Synthetic oligonucleotide
uaauagccggugucuccca

SEQ ID NO: 976695 - RNA, 19 nt, Artificial Sequence
  Description of Artificial Sequence: Synthetic oligonucleotide
cguauccucacauuugcac

SEQ ID NO: 976696 - RNA, 19 nt, Artificial Sequence
  Description of Artificial Sequence: Synthetic oligonucleotide
ccuaauaugagggccagca

SEQ ID NO: 976697 - RNA, 19 nt, Artificial Sequence
  Description of Artificial Sequence: Synthetic oligonucleotide
gucggcaccuguccagugc

SEQ ID NO: 976698 - RNA, 19 nt, Artificial Sequence
  Description of Artificial Sequence: Synthetic oligonucleotide
caagcuugacaugcccacc

SEQ ID NO: 976699 - RNA, 19 nt, Artificial Sequence
  Description of Artificial Sequence: Synthetic oligonucleotide
ugcacauuaggggcacacu

SEQ ID NO: 976700 - RNA, 19 nt, Artificial Sequence
  Description of Artificial Sequence: Synthetic oligonucleotide
ugccacaaucacacucuuc

SEQ ID NO: 976701 - RNA, 19 nt, Artificial Sequence
  Description of Artificial Sequence: Synthetic oligonucleotide
cuuggcuucaaggauaaau

SEQ ID NO: 976702 - RNA, 19 nt, Artificial Sequence
  Description of Artificial Sequence: Synthetic oligonucleotide
caguagugccacaaucaca

SEQ ID NO: 976703 - RNA, 19 nt, Artificial Sequence
  Description of Artificial Sequence: Synthetic oligonucleotide
caucacacaucccgaccac

SEQ ID NO: 976704 - RNA, 19 nt, Artificial Sequence
  Description of Artificial Sequence: Synthetic oligonucleotide
uuacuccgcuuuagucuug

SEQ ID NO: 976705 - RNA, 19 nt, Artificial Sequence
  Description of Artificial Sequence: Synthetic oligonucleotide
uuauuccuauuaugauauu

SEQ ID NO: 976706 - RNA, 19 nt, Artificial Sequence
  Description of Artificial Sequence: Synthetic oligonucleotide
cuugggauauugccaaugu

SEQ ID NO: 976707 - RNA, 19 nt, Artificial Sequence
  Description of Artificial Sequence: Synthetic oligonucleotide
cuagucuuaaguuggucuu

SEQ ID NO: 976708 - RNA, 19 nt, Artificial Sequence
  Description of Artificial Sequence: Synthetic oligonucleotide
uccuagucuuaaguugguc

SEQ ID NO: 976709 - RNA, 19 nt, Artificial Sequence
  Description of Artificial Sequence: Synthetic oligonucleotide
cuguucaagcaagugcuga

SEQ ID NO: 976710 - RNA, 19 nt, Artificial Sequence
  Description of Artificial Sequence: Synthetic oligonucleotide
ggggagauaauagccggug

SEQ ID NO: 976711 - RNA, 19 nt, Artificial Sequence
  Description of Artificial Sequence: Synthetic oligonucleotide
auuucaccgucaaguucuc

SEQ ID NO: 976712 - RNA, 19 nt, Artificial Sequence
  Description of Artificial Sequence: Synthetic oligonucleotide
cagcgagcaaaucccacca

SEQ ID NO: 976713 - RNA, 19 nt, Artificial Sequence
  Description of Artificial Sequence: Synthetic oligonucleotide
cacaaucguugacugccuc

SEQ ID NO: 976714 - RNA, 19 nt, Artificial Sequence
  Description of Artificial Sequence: Synthetic oligonucleotide
uccuaauaugagggccagc

SEQ ID NO: 976715 - RNA, 19 nt, Artificial Sequence
  Description of Artificial Sequence: Synthetic oligonucleotide
gaauauccauccauuuuau

SEQ ID NO: 976716 - RNA, 19 nt, Artificial Sequence
  Description of Artificial Sequence: Synthetic oligonucleotide
ugccguuuacuccgcuuua

SEQ ID NO: 976717 - RNA, 19 nt, Artificial Sequence
  Description of Artificial Sequence: Synthetic oligonucleotide
acgccuccuccucucagca

SEQ ID NO: 976718 - RNA, 19 nt, Artificial Sequence
  Description of Artificial Sequence: Synthetic oligonucleotide
acaucccguuuguugcacu

SEQ ID NO: 976719 - RNA, 19 nt, Artificial Sequence
  Description of Artificial Sequence: Synthetic oligonucleotide
ugucugucucugguuuuac

SEQ ID NO: 976720 - RNA, 19 nt, Artificial Sequence
  Description of Artificial Sequence: Synthetic oligonucleotide
cugaacagauuucacgaau

SEQ ID NO: 976721 - RNA, 19 nt, Artificial Sequence
  Description of Artificial Sequence: Synthetic oligonucleotide
guucaagcaagugcugaaa

SEQ ID NO: 976722 - RNA, 19 nt, Artificial Sequence
  Description of Artificial Sequence: Synthetic oligonucleotide
guugaacaggcaggcacca

SEQ ID NO: 976723 - RNA, 19 nt, Artificial Sequence
  Description of Artificial Sequence: Synthetic oligonucleotide
ccacguauccucacauuug

SEQ ID NO: 976724 - RNA, 19 nt, Artificial Sequence
  Description of Artificial Sequence: Synthetic oligonucleotide
ucucaguccccucgauguu

SEQ ID NO: 976725 - RNA, 19 nt, Artificial Sequence
  Description of Artificial Sequence: Synthetic oligonucleotide
cauuugagggccacagggu

SEQ ID NO: 976726 - RNA, 19 nt, Artificial Sequence
  Description of Artificial Sequence: Synthetic oligonucleotide
uagccaaggucaacaucuu

SEQ ID NO: 976727 - RNA, 19 nt, Artificial Sequence
  Description of Artificial Sequence: Synthetic oligonucleotide
cucuacauuacggggaagu

SEQ ID NO: 976728 - RNA, 19 nt, Artificial Sequence
  Description of Artificial Sequence: Synthetic oligonucleotide
acaucauuugagggccaca

SEQ ID NO: 976729 - RNA, 19 nt, Artificial Sequence
  Description of Artificial Sequence: Synthetic oligonucleotide
ccuauguuccaaacacauc

SEQ ID NO: 976730 - RNA, 19 nt, Artificial Sequence
  Description of Artificial Sequence: Synthetic oligonucleotide
ccaauguaagcugcgccgc

SEQ ID NO: 976731 - RNA, 19 nt, Artificial Sequence
  Description of Artificial Sequence: Synthetic oligonucleotide
ggcgcauucugcaguagug

SEQ ID NO: 976732 - RNA, 19 nt, Artificial Sequence
  Description of Artificial Sequence: Synthetic oligonucleotide
cacucgggaggaucgagaa

SEQ ID NO: 976733 - RNA, 19 nt, Artificial Sequence
  Description of Artificial Sequence: Synthetic oligonucleotide
guaccaucacaggaauauc

SEQ ID NO: 976734 - RNA, 19 nt, Artificial Sequence
  Description of Artificial Sequence: Synthetic oligonucleotide
cacacucgggaggaucgag

SEQ ID NO: 976735 - RNA, 19 nt, Artificial Sequence
  Description of Artificial Sequence: Synthetic oligonucleotide
gcuaacgacugagcaagug

SEQ ID NO: 976736 - RNA, 19 nt, Artificial Sequence
  Description of Artificial Sequence: Synthetic oligonucleotide
gugcacuucuuacaacacu

SEQ ID NO: 976737 - RNA, 19 nt, Artificial Sequence
  Description of Artificial Sequence: Synthetic oligonucleotide
agucggcaccuguccagug

SEQ ID NO: 976738 - RNA, 19 nt, Artificial Sequence
  Description of Artificial Sequence: Synthetic oligonucleotide
ccuagucuuaaguuggucu

SEQ ID NO: 976739 - RNA, 19 nt, Artificial Sequence
  Description of Artificial Sequence: Synthetic oligonucleotide
guacaacggaaagccgaug

SEQ ID NO: 976740 - RNA, 19 nt, Artificial Sequence
  Description of Artificial Sequence: Synthetic oligonucleotide
cauuacugcaaacuccguu

SEQ ID NO: 976741 - RNA, 19 nt, Artificial Sequence
  Description of Artificial Sequence: Synthetic oligonucleotide
accgcgucacucuucucuu

SEQ ID NO: 976742 - RNA, 19 nt, Artificial Sequence
  Description of Artificial Sequence: Synthetic oligonucleotide
ggauaaauuuugguggagu

SEQ ID NO: 976743 - RNA, 19 nt, Artificial Sequence
  Description of Artificial Sequence: Synthetic oligonucleotide
acggaaagccgaugcuuuu

SEQ ID NO: 976744 - RNA, 19 nt, Artificial Sequence
  Description of Artificial Sequence: Synthetic oligonucleotide
cuauucaggaagucaugau

SEQ ID NO: 976745 - RNA, 19 nt, Artificial Sequence
  Description of Artificial Sequence: Synthetic oligonucleotide
gagaguccugagucaaggu

SEQ ID NO: 976746 - RNA, 19 nt, Artificial Sequence
  Description of Artificial Sequence: Synthetic oligonucleotide
agcgagcaaaucccaccaa

SEQ ID NO: 976747 - RNA, 19 nt, Artificial Sequence
  Description of Artificial Sequence: Synthetic oligonucleotide
acucgccacuugcuaauuu

SEQ ID NO: 976748 - RNA, 19 nt, Artificial Sequence
  Description of Artificial Sequence: Synthetic oligonucleotide
ccaagccuugggauauugc

SEQ ID NO: 976749 - RNA, 19 nt, Artificial Sequence
  Description of Artificial Sequence: Synthetic oligonucleotide
cagagauuauaccaauguu

SEQ ID NO: 976750 - RNA, 19 nt, Artificial Sequence
  Description of Artificial Sequence: Synthetic oligonucleotide
ugccuguugcacacacauu

SEQ ID NO: 976751 - RNA, 19 nt, Artificial Sequence
  Description of Artificial Sequence: Synthetic oligonucleotide
guugccagauagggugaug

SEQ ID NO: 976752 - RNA, 19 nt, Artificial Sequence
  Description of Artificial Sequence: Synthetic oligonucleotide
acacucgggaggaucgaga

SEQ ID NO: 976753 - RNA, 19 nt, Artificial Sequence
  Description of Artificial Sequence: Synthetic oligonucleotide
cccugaguaccaucacagg

SEQ ID NO: 976754 - RNA, 19 nt, Artificial Sequence
  Description of Artificial Sequence: Synthetic oligonucleotide
cacaucccguuuguugcac

SEQ ID NO: 976755 - RNA, 19 nt, Artificial Sequence
  Description of Artificial Sequence: Synthetic oligonucleotide
ccugcuguacaacuaaugu

SEQ ID NO: 976756 - RNA, 19 nt, Artificial Sequence
  Description of Artificial Sequence: Synthetic oligonucleotide
cgaauaucacaaucguuga

SEQ ID NO: 976757 - RNA, 19 nt, Artificial Sequence
  Description of Artificial Sequence: Synthetic oligonucleotide
ccuguauuucaugaacuca

SEQ ID NO: 976758 - RNA, 19 nt, Artificial Sequence
  Description of Artificial Sequence: Synthetic oligonucleotide
uaggggcacacuggcuuga

SEQ ID NO: 976759 - RNA, 19 nt, Artificial Sequence
  Description of Artificial Sequence: Synthetic oligonucleotide
uaccaauguugugggcuaa

SEQ ID NO: 976760 - RNA, 19 nt, Artificial Sequence
  Description of Artificial Sequence: Synthetic oligonucleotide
gccagauagggugaugcca

SEQ ID NO: 976761 - RNA, 19 nt, Artificial Sequence
  Description of Artificial Sequence: Synthetic oligonucleotide
gcgcauucugcaguagugc

SEQ ID NO: 976762 - RNA, 19 nt, Artificial Sequence
  Description of Artificial Sequence: Synthetic oligonucleotide
caguucgauguauuuaguu

SEQ ID NO: 976763 - RNA, 19 nt, Artificial Sequence
  Description of Artificial Sequence: Synthetic oligonucleotide
cuuuuguccccagauguau

SEQ ID NO: 976764 - RNA, 19 nt, Artificial Sequence
  Description of Artificial Sequence: Synthetic oligonucleotide
auccuagucuuaaguuggu

SEQ ID NO: 976765 - RNA, 19 nt, Artificial Sequence
  Description of Artificial Sequence: Synthetic oligonucleotide
auggaccgcgucacucuuc

SEQ ID NO: 976766 - RNA, 19 nt, Artificial Sequence
  Description of Artificial Sequence: Synthetic oligonucleotide
acguauccucacauuugca

SEQ ID NO: 976767 - RNA, 19 nt, Artificial Sequence
  Description of Artificial Sequence: Synthetic oligonucleotide
gagaaaagauggaccgcgu

SEQ ID NO: 976768 - RNA, 19 nt, Artificial Sequence
  Description of Artificial Sequence: Synthetic oligonucleotide
ccggcuacucucaaauuga

SEQ ID NO: 976769 - RNA, 19 nt, Artificial Sequence
  Description of Artificial Sequence: Synthetic oligonucleotide
cagcaauuauuccuauuau

SEQ ID NO: 976770 - RNA, 19 nt, Artificial Sequence
  Description of Artificial Sequence: Synthetic oligonucleotide
caaccaacacuauccuagu

SEQ ID NO: 976771 - RNA, 19 nt, Artificial Sequence
  Description of Artificial Sequence: Synthetic oligonucleotide
cacgaauaucacaaucguu

SEQ ID NO: 976772 - RNA, 19 nt, Artificial Sequence
  Description of Artificial Sequence: Synthetic oligonucleotide
gccguuuacuccgcuuuag

SEQ ID NO: 976773 - RNA, 19 nt, Artificial Sequence
  Description of Artificial Sequence: Synthetic oligonucleotide
cagcacuaaaauggugcca

SEQ ID NO: 976774 - RNA, 19 nt, Artificial Sequence
  Description of Artificial Sequence: Synthetic oligonucleotide
cauugugaggagaguguau

SEQ ID NO: 976775 - RNA, 19 nt, Artificial Sequence
  Description of Artificial Sequence: Synthetic oligonucleotide
ccaccaauguaagcugcgc

SEQ ID NO: 976776 - RNA, 19 nt, Artificial Sequence
  Description of Artificial Sequence: Synthetic oligonucleotide
caacacuauccuagucuua

SEQ ID NO: 976777 - RNA, 19 nt, Artificial Sequence
  Description of Artificial Sequence: Synthetic oligonucleotide
gagcccauuugaccucucu

SEQ ID NO: 976778 - RNA, 19 nt, Artificial Sequence
  Description of Artificial Sequence: Synthetic oligonucleotide
cagcagcgagcaaauccca

SEQ ID NO: 976779 - RNA, 19 nt, Artificial Sequence
  Description of Artificial Sequence: Synthetic oligonucleotide
gaggaucgagaagcuuaga

SEQ ID NO: 976780 - RNA, 19 nt, Artificial Sequence
  Description of Artificial Sequence: Synthetic oligonucleotide
ccgagaaaagauggaccgc

SEQ ID NO: 976781 - RNA, 19 nt, Artificial Sequence
  Description of Artificial Sequence: Synthetic oligonucleotide
agcugccguuuacuccgcu

SEQ ID NO: 976782 - RNA, 19 nt, Artificial Sequence
  Description of Artificial Sequence: Synthetic oligonucleotide
gauggaccgcgucacucuu

SEQ ID NO: 976783 - RNA, 19 nt, Artificial Sequence
  Description of Artificial Sequence: Synthetic oligonucleotide
gcuccggcuacucucaaau

SEQ ID NO: 976784 - RNA, 19 nt, Artificial Sequence
  Description of Artificial Sequence: Synthetic oligonucleotide
ccugaacagauuucacgaa

SEQ ID NO: 976785 - RNA, 19 nt, Artificial Sequence
  Description of Artificial Sequence: Synthetic oligonucleotide
cuggaucuguaaaccgagu

SEQ ID NO: 976786 - RNA, 19 nt, Artificial Sequence
  Description of Artificial Sequence: Synthetic oligonucleotide
gggagauaauagccggugu

SEQ ID NO: 976787 - RNA, 19 nt, Artificial Sequence
  Description of Artificial Sequence: Synthetic oligonucleotide
agagcccauuugaccucuc

SEQ ID NO: 976788 - RNA, 19 nt, Artificial Sequence
  Description of Artificial Sequence: Synthetic oligonucleotide
gaccacguauccucacauu

SEQ ID NO: 976789 - RNA, 19 nt, Artificial Sequence
  Description of Artificial Sequence: Synthetic oligonucleotide
guagugccacaaucacacu

SEQ ID NO: 976790 - RNA, 19 nt, Artificial Sequence
  Description of Artificial Sequence: Synthetic oligonucleotide
cugccguuuacuccgcuuu

SEQ ID NO: 976791 - RNA, 19 nt, Artificial Sequence
  Description of Artificial Sequence: Synthetic oligonucleotide
uccccucgauguucagcuu

SEQ ID NO: 976792 - RNA, 19 nt, Artificial Sequence
  Description of Artificial Sequence: Synthetic oligonucleotide
caacggaaagccgaugcuu

SEQ ID NO: 976793 - RNA, 19 nt, Artificial Sequence
  Description of Artificial Sequence: Synthetic oligonucleotide
ccaacacuauccuagucuu

SEQ ID NO: 976794 - RNA, 19 nt, Artificial Sequence
  Description of Artificial Sequence: Synthetic oligonucleotide
gaguuaacauugacucguu

SEQ ID NO: 976795 - RNA, 19 nt, Artificial Sequence
  Description of Artificial Sequence: Synthetic oligonucleotide
cgcgucacucuucucuuug

SEQ ID NO: 976796 - RNA, 19 nt, Artificial Sequence
  Description of Artificial Sequence: Synthetic oligonucleotide
cuguuaccuuuugucccca

SEQ ID NO: 976797 - RNA, 19 nt, Artificial Sequence
  Description of Artificial Sequence: Synthetic oligonucleotide
cguugaaacucagugggaa

SEQ ID NO: 976798 - RNA, 19 nt, Artificial Sequence
  Description of Artificial Sequence: Synthetic oligonucleotide
caccguugccagauagggu

SEQ ID NO: 976799 - RNA, 19 nt, Artificial Sequence
  Description of Artificial Sequence: Synthetic oligonucleotide
cuguauccacgugucuuua

SEQ ID NO: 976800 - RNA, 19 nt, Artificial Sequence
  Description of Artificial Sequence: Synthetic oligonucleotide
gucgaagaagcugccguuu

SEQ ID NO: 976801 - RNA, 19 nt, Artificial Sequence
  Description of Artificial Sequence: Synthetic oligonucleotide
auacugcagucggcaccug

SEQ ID NO: 976802 - RNA, 19 nt, Artificial Sequence
  Description of Artificial Sequence: Synthetic oligonucleotide
caugcccaccacugcaguu

SEQ ID NO: 976803 - RNA, 19 nt, Artificial Sequence
  Description of Artificial Sequence: Synthetic oligonucleotide
cccgaccacguauccucac

SEQ ID NO: 976804 - RNA, 19 nt, Artificial Sequence
  Description of Artificial Sequence: Synthetic oligonucleotide
caucccgaccacguauccu

SEQ ID NO: 976805 - RNA, 19 nt, Artificial Sequence
  Description of Artificial Sequence: Synthetic oligonucleotide
gcugcgccgcuccggcuac

SEQ ID NO: 976806 - RNA, 19 nt, Artificial Sequence
  Description of Artificial Sequence: Synthetic oligonucleotide
ccacaaagcacaucccguu

SEQ ID NO: 976807 - RNA, 19 nt, Artificial Sequence
  Description of Artificial Sequence: Synthetic oligonucleotide
ccguugccagauaggguga

SEQ ID NO: 976808 - RNA, 19 nt, Artificial Sequence
  Description of Artificial Sequence: Synthetic oligonucleotide
ccucuacauuacggggaag

SEQ ID NO: 976809 - RNA, 19 nt, Artificial Sequence
  Description of Artificial Sequence: Synthetic oligonucleotide
ccccagauguauuugcauu

SEQ ID NO: 976810 - RNA, 19 nt, Artificial Sequence
  Description of Artificial Sequence: Synthetic oligonucleotide
gcacucgccacuugcuaau

SEQ ID NO: 976811 - RNA, 19 nt, Artificial Sequence
  Description of Artificial Sequence: Synthetic oligonucleotide
cgacugagcaaguguaacu

SEQ ID NO: 976812 - RNA, 19 nt, Artificial Sequence
  Description of Artificial Sequence: Synthetic oligonucleotide
cagucggcaccuguccagu

SEQ ID NO: 976813 - RNA, 19 nt, Artificial Sequence
  Description of Artificial Sequence: Synthetic oligonucleotide
cuccggcuacucucaaauu

SEQ ID NO: 976814 - RNA, 19 nt, Artificial Sequence
  Description of Artificial Sequence: Synthetic oligonucleotide
ccguuuacuccgcuuuagu

SEQ ID NO: 976815 - RNA, 19 nt, Artificial Sequence
  Description of Artificial Sequence: Synthetic oligonucleotide
gcugccguuuacuccgcuu

SEQ ID NO: 976816 - RNA, 19 nt, Artificial Sequence
  Description of Artificial Sequence: Synthetic oligonucleotide
ggaccgcgucacucuucuc

SEQ ID NO: 976817 - RNA, 19 nt, Artificial Sequence
  Description of Artificial Sequence: Synthetic oligonucleotide
cccguuuguugcacuguau

SEQ ID NO: 976818 - RNA, 19 nt, Artificial Sequence
  Description of Artificial Sequence: Synthetic oligonucleotide
ggcuaacgacugagcaagu

SEQ ID NO: 976819 - RNA, 19 nt, Artificial Sequence
  Description of Artificial Sequence: Synthetic oligonucleotide
ccacacucgggaggaucga

SEQ ID NO: 976820 - RNA, 19 nt, Artificial Sequence
  Description of Artificial Sequence: Synthetic oligonucleotide
cacucgccacuugcuaauu

SEQ ID NO: 976821 - RNA, 19 nt, Artificial Sequence
  Description of Artificial Sequence: Synthetic oligonucleotide
ccauggcaaccaacacuau

SEQ ID NO: 976822 - RNA, 19 nt, Artificial Sequence
  Description of Artificial Sequence: Synthetic oligonucleotide
ccgcuccggcuacucucaa

SEQ ID NO: 976823 - RNA, 19 nt, Artificial Sequence
  Description of Artificial Sequence: Synthetic oligonucleotide
ccgcgucacucuucucuuu

SEQ ID NO: 976824 - RNA, 19 nt, Artificial Sequence
  Description of Artificial Sequence: Synthetic oligonucleotide
cguugccagauagggugau

SEQ ID NO: 976825 - RNA, 19 nt, Artificial Sequence
  Description of Artificial Sequence: Synthetic oligonucleotide
cugcgccgcuccggcuacu

SEQ ID NO: 976826 - RNA, 19 nt, Artificial Sequence
  Description of Artificial Sequence: Synthetic oligonucleotide
cggcuccuucaagggcgca

SEQ ID NO: 976827 - RNA, 19 nt, Artificial Sequence
  Description of Artificial Sequence: Synthetic oligonucleotide
uuaauaauaauaauaauaa

SEQ ID NO: 976828 - RNA, 19 nt, Artificial Sequence
  Description of Artificial Sequence: Synthetic oligonucleotide
uuuaauaauaauaauaaua

SEQ ID NO: 976829 - RNA, 19 nt, Artificial Sequence
  Description of Artificial Sequence: Synthetic oligonucleotide
uuuacaaacgcucucgugg

SEQ ID NO: 976830 - RNA, 19 nt, Artificial Sequence
  Description of Artificial Sequence: Synthetic oligonucleotide
aauaauaauaauaauaaaa

SEQ ID NO: 976831 - RNA, 19 nt, Artificial Sequence
  Description of Artificial Sequence: Synthetic oligonucleotide
aagccgaaaagccucaucc

SEQ ID NO: 976832 - RNA, 19 nt, Artificial Sequence
  Description of Artificial Sequence: Synthetic oligonucleotide
uuugagauaaugccaaacg

SEQ ID NO: 976833 - RNA, 19 nt, Artificial Sequence
  Description of Artificial Sequence: Synthetic oligonucleotide
agauaauauuuacaaacgc

SEQ ID NO: 976834 - RNA, 19 nt, Artificial Sequence
  Description of Artificial Sequence: Synthetic oligonucleotide
agaaguuucggcuugagug

SEQ ID NO: 976835 - RNA, 19 nt, Artificial Sequence
  Description of Artificial Sequence: Synthetic oligonucleotide
ugagauaaugccaaacgag

SEQ ID NO: 976836 - RNA, 19 nt, Artificial Sequence
  Description of Artificial Sequence: Synthetic oligonucleotide
uauacuuucucuaugccac

SEQ ID NO: 976837 - RNA, 19 nt, Artificial Sequence
  Description of Artificial Sequence: Synthetic oligonucleotide
uuuaauccuguuuucaaag

SEQ ID NO: 976838 - RNA, 19 nt, Artificial Sequence
  Description of Artificial Sequence: Synthetic oligonucleotide
guuuauaugacuuucgauc

SEQ ID NO: 976839 - RNA, 19 nt, Artificial Sequence
  Description of Artificial Sequence: Synthetic oligonucleotide
aauucuacgcucuaccuca

SEQ ID NO: 976840 - RNA, 19 nt, Artificial Sequence
  Description of Artificial Sequence: Synthetic oligonucleotide
ugaauacuaacuuuuaauc

SEQ ID NO: 976841 - RNA, 19 nt, Artificial Sequence
  Description of Artificial Sequence: Synthetic oligonucleotide
uuuauaugacuuucgaucu

SEQ ID NO: 976842 - RNA, 19 nt, Artificial Sequence
  Description of Artificial Sequence: Synthetic oligonucleotide
uauuuguaaacaauuccgc

SEQ ID NO: 976843 - RNA, 19 nt, Artificial Sequence
  Description of Artificial Sequence: Synthetic oligonucleotide
ucuaauucuacgcucuacc

SEQ ID NO: 976844 - RNA, 19 nt, Artificial Sequence
  Description of Artificial Sequence: Synthetic oligonucleotide
aaaacuuucaauagucgag

SEQ ID NO: 976845 - RNA, 19 nt, Artificial Sequence
  Description of Artificial Sequence: Synthetic oligonucleotide
aaacuuucaauagucgagg

SEQ ID NO: 976846 - RNA, 19 nt, Artificial Sequence
  Description of Artificial Sequence: Synthetic oligonucleotide
aaucugguaggucacaaca

SEQ ID NO: 976847 - RNA, 19 nt, Artificial Sequence
  Description of Artificial Sequence: Synthetic oligonucleotide
uguguuuauaugacuuucg

SEQ ID NO: 976848 - RNA, 19 nt, Artificial Sequence
  Description of Artificial Sequence: Synthetic oligonucleotide
uaaacacucagcaagccac

SEQ ID NO: 976849 - RNA, 19 nt, Artificial Sequence
  Description of Artificial Sequence: Synthetic oligonucleotide
acuauagcuuucuuucacc

SEQ ID NO: 976850 - RNA, 19 nt, Artificial Sequence
  Description of Artificial Sequence: Synthetic oligonucleotide
agaucgaguauuuguaaac

SEQ ID NO: 976851 - RNA, 19 nt, Artificial Sequence
  Description of Artificial Sequence: Synthetic oligonucleotide
cuuuaauuuuggcauagcc

SEQ ID NO: 976852 - RNA, 19 nt, Artificial Sequence
  Description of Artificial Sequence: Synthetic oligonucleotide
uaugauacaggaccuaagu

SEQ ID NO: 976853 - RNA, 19 nt, Artificial Sequence
  Description of Artificial Sequence: Synthetic oligonucleotide
ugccaaacgagcaugaccu

SEQ ID NO: 976854 - RNA, 19 nt, Artificial Sequence
  Description of Artificial Sequence: Synthetic oligonucleotide
ucuuuuauggucccgggac

SEQ ID NO: 976855 - RNA, 19 nt, Artificial Sequence
  Description of Artificial Sequence: Synthetic oligonucleotide
uguuuagguaauuauuucu

SEQ ID NO: 976856 - RNA, 19 nt, Artificial Sequence
  Description of Artificial Sequence: Synthetic oligonucleotide
ugaucuucacuguaugccg

SEQ ID NO: 976857 - RNA, 19 nt, Artificial Sequence
  Description of Artificial Sequence: Synthetic oligonucleotide
ucaacaguaguccucuuca

SEQ ID NO: 976858 - RNA, 19 nt, Artificial Sequence
  Description of Artificial Sequence: Synthetic oligonucleotide
uauaugacuuucgaucucg

SEQ ID NO: 976859 - RNA, 19 nt, Artificial Sequence
  Description of Artificial Sequence: Synthetic oligonucleotide
uuaguaucacuuuccuucg

SEQ ID NO: 976860 - RNA, 19 nt, Artificial Sequence
  Description of Artificial Sequence: Synthetic oligonucleotide
uugagauaaugccaaacga

SEQ ID NO: 976861 - RNA, 19 nt, Artificial Sequence
  Description of Artificial Sequence: Synthetic oligonucleotide
aggaccuaaguuuucaaag

SEQ ID NO: 976862 - RNA, 19 nt, Artificial Sequence
  Description of Artificial Sequence: Synthetic oligonucleotide
auauuuacaaacgcucucg

SEQ ID NO: 976863 - RNA, 19 nt, Artificial Sequence
  Description of Artificial Sequence: Synthetic oligonucleotide
uguagaagcacaucaauuu

SEQ ID NO: 976864 - RNA, 19 nt, Artificial Sequence
  Description of Artificial Sequence: Synthetic oligonucleotide
uuuauacuuucucuaugcc

SEQ ID NO: 976865 - RNA, 19 nt, Artificial Sequence
  Description of Artificial Sequence: Synthetic oligonucleotide
agugucuacuucgugaucg

SEQ ID NO: 976866 - RNA, 19 nt, Artificial Sequence
  Description of Artificial Sequence: Synthetic oligonucleotide
uucucuaugccacuauagc

SEQ ID NO: 976867 - RNA, 19 nt, Artificial Sequence
  Description of Artificial Sequence: Synthetic oligonucleotide
uaauaauaauaauaauaaa

SEQ ID NO: 976868 - RNA, 19 nt, Artificial Sequence
  Description of Artificial Sequence: Synthetic oligonucleotide
augccaaacgagcaugacc

SEQ ID NO: 976869 - RNA, 19 nt, Artificial Sequence
  Description of Artificial Sequence: Synthetic oligonucleotide
acuccgugaucuuuuaugg

SEQ ID NO: 976870 - RNA, 19 nt, Artificial Sequence
  Description of Artificial Sequence: Synthetic oligonucleotide
aaaguccgagacugaaaac

SEQ ID NO: 976871 - RNA, 19 nt, Artificial Sequence
  Description of Artificial Sequence: Synthetic oligonucleotide
uuuugagacguucaucccu

SEQ ID NO: 976872 - RNA, 19 nt, Artificial Sequence
  Description of Artificial Sequence: Synthetic oligonucleotide
ucuacuucuucgucgaucu

SEQ ID NO: 976873 - RNA, 19 nt, Artificial Sequence
  Description of Artificial Sequence: Synthetic oligonucleotide
gagauaaugccaaacgagc

SEQ ID NO: 976874 - RNA, 19 nt, Artificial Sequence
  Description of Artificial Sequence: Synthetic oligonucleotide
aaaucauggugcuuccucu

SEQ ID NO: 976875 - RNA, 19 nt, Artificial Sequence
  Description of Artificial Sequence: Synthetic oligonucleotide
aaacuugcaauuaaacacu

SEQ ID NO: 976876 - RNA, 19 nt, Artificial Sequence
  Description of Artificial Sequence: Synthetic oligonucleotide
ucuaucacgagcucuuucu

SEQ ID NO: 976877 - RNA, 19 nt, Artificial Sequence
  Description of Artificial Sequence: Synthetic oligonucleotide
aucuuagcaauucucucuc

SEQ ID NO: 976878 - RNA, 19 nt, Artificial Sequence
  Description of Artificial Sequence: Synthetic oligonucleotide
ugcgcggccgaaaucaugg

SEQ ID NO: 976879 - RNA, 19 nt, Artificial Sequence
  Description of Artificial Sequence: Synthetic oligonucleotide
aaaauaugauacaggaccu

SEQ ID NO: 976880 - RNA, 19 nt, Artificial Sequence
  Description of Artificial Sequence: Synthetic oligonucleotide
gagguuguagaucuuagca

SEQ ID NO: 976881 - RNA, 19 nt, Artificial Sequence
  Description of Artificial Sequence: Synthetic oligonucleotide
aaguccgagacugaaaacu

SEQ ID NO: 976882 - RNA, 19 nt, Artificial Sequence
  Description of Artificial Sequence: Synthetic oligonucleotide
aucacgagcucuuucuuuc

SEQ ID NO: 976883 - RNA, 19 nt, Artificial Sequence
  Description of Artificial Sequence: Synthetic oligonucleotide
ucucuaugccacuauagcu

SEQ ID NO: 976884 - RNA, 19 nt, Artificial Sequence
  Description of Artificial Sequence: Synthetic oligonucleotide
ucaauagucgagguuguag

SEQ ID NO: 976885 - RNA, 19 nt, Artificial Sequence
  Description of Artificial Sequence: Synthetic oligonucleotide
uccgagacugaaaacuugc

SEQ ID NO: 976886 - RNA, 19 nt, Artificial Sequence
  Description of Artificial Sequence: Synthetic oligonucleotide
guaaacucuguaaguaucg

SEQ ID NO: 976887 - RNA, 19 nt, Artificial Sequence
  Description of Artificial Sequence: Synthetic oligonucleotide
uagccaacuuucaugaaac

SEQ ID NO: 976888 - RNA, 19 nt, Artificial Sequence
  Description of Artificial Sequence: Synthetic oligonucleotide
uacuccgugaucuuuuaug

SEQ ID NO: 976889 - RNA, 19 nt, Artificial Sequence
  Description of Artificial Sequence: Synthetic oligonucleotide
uguuggaccagcagccccg

SEQ ID NO: 976890 - RNA, 19 nt, Artificial Sequence
  Description of Artificial Sequence: Synthetic oligonucleotide
uuucaugaaacgagaacuc

SEQ ID NO: 976891 - RNA, 19 nt, Artificial Sequence
  Description of Artificial Sequence: Synthetic oligonucleotide
aaaucucucucguagccaa

SEQ ID NO: 976892 - RNA, 19 nt, Artificial Sequence
  Description of Artificial Sequence: Synthetic oligonucleotide
acucucaagccgaaaagcc

SEQ ID NO: 976893 - RNA, 19 nt, Artificial Sequence
  Description of Artificial Sequence: Synthetic oligonucleotide
ucuacgcucuaccucagca

SEQ ID NO: 976894 - RNA, 19 nt, Artificial Sequence
  Description of Artificial Sequence: Synthetic oligonucleotide
uacgcucuaccucagcaag

SEQ ID NO: 976895 - RNA, 19 nt, Artificial Sequence
  Description of Artificial Sequence: Synthetic oligonucleotide
ucguagccaacuuucauga

SEQ ID NO: 976896 - RNA, 19 nt, Artificial Sequence
  Description of Artificial Sequence: Synthetic oligonucleotide
uguagaucuuagcaauucu

SEQ ID NO: 976897 - RNA, 19 nt, Artificial Sequence
  Description of Artificial Sequence: Synthetic oligonucleotide
auugaccucauucuuagua

SEQ ID NO: 976898 - RNA, 19 nt, Artificial Sequence
  Description of Artificial Sequence: Synthetic oligonucleotide
acaaacgcucucguggucc

SEQ ID NO: 976899 - RNA, 19 nt, Artificial Sequence
  Description of Artificial Sequence: Synthetic oligonucleotide
uaauucuacgcucuaccuc

SEQ ID NO: 976900 - RNA, 19 nt, Artificial Sequence
  Description of Artificial Sequence: Synthetic oligonucleotide
caugaaacgagaacucuuc

SEQ ID NO: 976901 - RNA, 19 nt, Artificial Sequence
  Description of Artificial Sequence: Synthetic oligonucleotide
aauagucgagguuguagau

SEQ ID NO: 976902 - RNA, 19 nt, Artificial Sequence
  Description of Artificial Sequence: Synthetic oligonucleotide
cauucuuaguaucacuuuc

SEQ ID NO: 976903 - RNA, 19 nt, Artificial Sequence
  Description of Artificial Sequence: Synthetic oligonucleotide
ucgaguauuuguaaacaau

SEQ ID NO: 976904 - RNA, 19 nt, Artificial Sequence
  Description of Artificial Sequence: Synthetic oligonucleotide
ucucaagccgaaaagccuc

SEQ ID NO: 976905 - RNA, 19 nt, Artificial Sequence
  Description of Artificial Sequence: Synthetic oligonucleotide
uuaauccuguuuucaaagu

SEQ ID NO: 976906 - RNA, 19 nt, Artificial Sequence
  Description of Artificial Sequence: Synthetic oligonucleotide
uggcauaugugcuaauaac

SEQ ID NO: 976907 - RNA, 19 nt, Artificial Sequence
  Description of Artificial Sequence: Synthetic oligonucleotide
gaucuuuuauggucccggg

SEQ ID NO: 976908 - RNA, 19 nt, Artificial Sequence
  Description of Artificial Sequence: Synthetic oligonucleotide
ucgacuacuggacuucaca

SEQ ID NO: 976909 - RNA, 19 nt, Artificial Sequence
  Description of Artificial Sequence: Synthetic oligonucleotide
auaugugcuaauaacacau

SEQ ID NO: 976910 - RNA, 19 nt, Artificial Sequence
  Description of Artificial Sequence: Synthetic oligonucleotide
uuuugagauaaugccaaac

SEQ ID NO: 976911 - RNA, 19 nt, Artificial Sequence
  Description of Artificial Sequence: Synthetic oligonucleotide
augugcuaauaacacaugu

SEQ ID NO: 976912 - RNA, 19 nt, Artificial Sequence
  Description of Artificial Sequence: Synthetic oligonucleotide
ugugcuaauaacacauguu

SEQ ID NO: 976913 - RNA, 19 nt, Artificial Sequence
  Description of Artificial Sequence: Synthetic oligonucleotide
ucagucucuaacagucugc

SEQ ID NO: 976914 - RNA, 19 nt, Artificial Sequence
  Description of Artificial Sequence: Synthetic oligonucleotide
uaugugcuaauaacacaug

SEQ ID NO: 976915 - RNA, 19 nt, Artificial Sequence
  Description of Artificial Sequence: Synthetic oligonucleotide
ucauggugcuuccucuggg

SEQ ID NO: 976916 - RNA, 19 nt, Artificial Sequence
  Description of Artificial Sequence: Synthetic oligonucleotide
acugaaaacuugcaauuaa

SEQ ID NO: 976917 - RNA, 19 nt, Artificial Sequence
  Description of Artificial Sequence: Synthetic oligonucleotide
aaugccaaacgagcaugac

SEQ ID NO: 976918 - RNA, 19 nt, Artificial Sequence
  Description of Artificial Sequence: Synthetic oligonucleotide
uuuucucgacuacuggacu

SEQ ID NO: 976919 - RNA, 19 nt, Artificial Sequence
  Description of Artificial Sequence: Synthetic oligonucleotide
ugaaacgagaacucuucuc

SEQ ID NO: 976920 - RNA, 19 nt, Artificial Sequence
  Description of Artificial Sequence: Synthetic oligonucleotide
ucgucuaauucuacgcucu

SEQ ID NO: 976921 - RNA, 19 nt, Artificial Sequence
  Description of Artificial Sequence: Synthetic oligonucleotide
accuaaguuuucaaagugg

SEQ ID NO: 976922 - RNA, 19 nt, Artificial Sequence
  Description of Artificial Sequence: Synthetic oligonucleotide
ucgagguuguagaucuuag

SEQ ID NO: 976923 - RNA, 19 nt, Artificial Sequence
  Description of Artificial Sequence: Synthetic oligonucleotide
ugucucuacuccgugaucu

SEQ ID NO: 976924 - RNA, 19 nt, Artificial Sequence
  Description of Artificial Sequence: Synthetic oligonucleotide
uccuuagauuuucaucgug

SEQ ID NO: 976925 - RNA, 19 nt, Artificial Sequence
  Description of Artificial Sequence: Synthetic oligonucleotide
uucaacaguaguccucuuc

SEQ ID NO: 976926 - RNA, 19 nt, Artificial Sequence
  Description of Artificial Sequence: Synthetic oligonucleotide
uuugagacguucaucccua

SEQ ID NO: 976927 - RNA, 19 nt, Artificial Sequence
  Description of Artificial Sequence: Synthetic oligonucleotide
cacccggucaccaaagccc

SEQ ID NO: 976928 - RNA, 19 nt, Artificial Sequence
  Description of Artificial Sequence: Synthetic oligonucleotide
auaaugccaaacgagcaug

SEQ ID NO: 976929 - RNA, 19 nt, Artificial Sequence
  Description of Artificial Sequence: Synthetic oligonucleotide
ugggcaucgccuacuauca

SEQ ID NO: 976930 - RNA, 19 nt, Artificial Sequence
  Description of Artificial Sequence: Synthetic oligonucleotide
uggaccaagaucagaucga

SEQ ID NO: 976931 - RNA, 19 nt, Artificial Sequence
  Description of Artificial Sequence: Synthetic oligonucleotide
ucuucgucgaucucuacuu

SEQ ID NO: 976932 - RNA, 19 nt, Artificial Sequence
  Description of Artificial Sequence: Synthetic oligonucleotide
uaugacuuucgaucucggc

SEQ ID NO: 976933 - RNA, 19 nt, Artificial Sequence
  Description of Artificial Sequence: Synthetic oligonucleotide
gaucagaucgaguauuugu

SEQ ID NO: 976934 - RNA, 19 nt, Artificial Sequence
  Description of Artificial Sequence: Synthetic oligonucleotide
uaaugccaaacgagcauga

SEQ ID NO: 976935 - RNA, 19 nt, Artificial Sequence
  Description of Artificial Sequence: Synthetic oligonucleotide
aaauggucaucuacccggg

SEQ ID NO: 976936 - RNA, 19 nt, Artificial Sequence
  Description of Artificial Sequence: Synthetic oligonucleotide
ucagaucgaguauuuguaa

SEQ ID NO: 976937 - RNA, 19 nt, Artificial Sequence
  Description of Artificial Sequence: Synthetic oligonucleotide
cucauccaacaauugcgcg

SEQ ID NO: 976938 - RNA, 19 nt, Artificial Sequence
  Description of Artificial Sequence: Synthetic oligonucleotide
cuuuuauggucccgggacc

SEQ ID NO: 976939 - RNA, 19 nt, Artificial Sequence
  Description of Artificial Sequence: Synthetic oligonucleotide
gcugauuuugagauaaugc

SEQ ID NO: 976940 - RNA, 19 nt, Artificial Sequence
  Description of Artificial Sequence: Synthetic oligonucleotide
uugaccucauucuuaguau

SEQ ID NO: 976941 - RNA, 19 nt, Artificial Sequence
  Description of Artificial Sequence: Synthetic oligonucleotide
cacuguaugccguuuucag

SEQ ID NO: 976942 - RNA, 19 nt, Artificial Sequence
  Description of Artificial Sequence: Synthetic oligonucleotide
gagguuucggucccggccc

SEQ ID NO: 976943 - RNA, 19 nt, Artificial Sequence
  Description of Artificial Sequence: Synthetic oligonucleotide
ucacaugaauacuaacuuu

SEQ ID NO: 976944 - RNA, 19 nt, Artificial Sequence
  Description of Artificial Sequence: Synthetic oligonucleotide
agacguucaucccuaucag

SEQ ID NO: 976945 - RNA, 19 nt, Artificial Sequence
  Description of Artificial Sequence: Synthetic oligonucleotide
uuauaugacuuucgaucuc

SEQ ID NO: 976946 - RNA, 19 nt, Artificial Sequence
  Description of Artificial Sequence: Synthetic oligonucleotide
aaacgagaacucuucucau

SEQ ID NO: 976947 - RNA, 19 nt, Artificial Sequence
  Description of Artificial Sequence: Synthetic oligonucleotide
cauccaacaauugcgcggc

SEQ ID NO: 976948 - RNA, 19 nt, Artificial Sequence
  Description of Artificial Sequence: Synthetic oligonucleotide
aaacgagcaugaccucguc

SEQ ID NO: 976949 - RNA, 19 nt, Artificial Sequence
  Description of Artificial Sequence: Synthetic oligonucleotide
aagcccgcggcccacucuc

SEQ ID NO: 976950 - RNA, 19 nt, Artificial Sequence
  Description of Artificial Sequence: Synthetic oligonucleotide
cugggcaucgccuacuauc

SEQ ID NO: 976951 - RNA, 19 nt, Artificial Sequence
  Description of Artificial Sequence: Synthetic oligonucleotide
caauagucgagguuguaga

SEQ ID NO: 976952 - RNA, 19 nt, Artificial Sequence
  Description of Artificial Sequence: Synthetic oligonucleotide
gaucgaguauuuguaaaca

SEQ ID NO: 976953 - RNA, 19 nt, Artificial Sequence
  Description of Artificial Sequence: Synthetic oligonucleotide
gaucgacuucucuuucucc

SEQ ID NO: 976954 - RNA, 19 nt, Artificial Sequence
  Description of Artificial Sequence: Synthetic oligonucleotide
aaaguggcauaugugcuaa

SEQ ID NO: 976955 - RNA, 19 nt, Artificial Sequence
  Description of Artificial Sequence: Synthetic oligonucleotide
ucgucgaucucuacuucug

SEQ ID NO: 976956 - RNA, 19 nt, Artificial Sequence
  Description of Artificial Sequence: Synthetic oligonucleotide
aucgaguauuuguaaacaa

SEQ ID NO: 976957 - RNA, 19 nt, Artificial Sequence
  Description of Artificial Sequence: Synthetic oligonucleotide
uccaacaauugcgcggccg

SEQ ID NO: 976958 - RNA, 19 nt, Artificial Sequence
  Description of Artificial Sequence: Synthetic oligonucleotide
uuuuaucaucagauccccu

SEQ ID NO: 976959 - RNA, 19 nt, Artificial Sequence
  Description of Artificial Sequence: Synthetic oligonucleotide
ugcgagaucuauguuuucu

SEQ ID NO: 976960 - RNA, 19 nt, Artificial Sequence
  Description of Artificial Sequence: Synthetic oligonucleotide
aacgagaacucuucucaua

SEQ ID NO: 976961 - RNA, 19 nt, Artificial Sequence
  Description of Artificial Sequence: Synthetic oligonucleotide
uuguagaucuuagcaauuc

SEQ ID NO: 976962 - RNA, 19 nt, Artificial Sequence
  Description of Artificial Sequence: Synthetic oligonucleotide
uaugccacuauagcuuucu

SEQ ID NO: 976963 - RNA, 19 nt, Artificial Sequence
  Description of Artificial Sequence: Synthetic oligonucleotide
cuuuuaauccuguuuucaa

SEQ ID NO: 976964 - RNA, 19 nt, Artificial Sequence
  Description of Artificial Sequence: Synthetic oligonucleotide
uucgucgaucucuacuucu

SEQ ID NO: 976965 - RNA, 19 nt, Artificial Sequence
  Description of Artificial Sequence: Synthetic oligonucleotide
agauaaugccaaacgagca

SEQ ID NO: 976966 - RNA, 19 nt, Artificial Sequence
  Description of Artificial Sequence: Synthetic oligonucleotide
ucauucuuaguaucacuuu

SEQ ID NO: 976967 - RNA, 19 nt, Artificial Sequence
  Description of Artificial Sequence: Synthetic oligonucleotide
uuuuauggucccgggaccu

SEQ ID NO: 976968 - RNA, 19 nt, Artificial Sequence
  Description of Artificial Sequence: Synthetic oligonucleotide
guagccaacuuucaugaaa

SEQ ID NO: 976969 - RNA, 19 nt, Artificial Sequence
  Description of Artificial Sequence: Synthetic oligonucleotide
uaacugagcuuuauacuuu

SEQ ID NO: 976970 - RNA, 19 nt, Artificial Sequence
  Description of Artificial Sequence: Synthetic oligonucleotide
ucuaugccacuauagcuuu

SEQ ID NO: 976971 - RNA, 19 nt, Artificial Sequence
  Description of Artificial Sequence: Synthetic oligonucleotide
cucgucuaauucuacgcuc

SEQ ID NO: 976972 - RNA, 19 nt, Artificial Sequence
  Description of Artificial Sequence: Synthetic oligonucleotide
augaaacgagaacucuucu

SEQ ID NO: 976973 - RNA, 19 nt, Artificial Sequence
  Description of Artificial Sequence: Synthetic oligonucleotide
ugaccucauucuuaguauc

SEQ ID NO: 976974 - RNA, 19 nt, Artificial Sequence
  Description of Artificial Sequence: Synthetic oligonucleotide
gaaguuucggcuugagugu

SEQ ID NO: 976975 - RNA, 19 nt, Artificial Sequence
  Description of Artificial Sequence: Synthetic oligonucleotide
caucagauccccucuuuuc

SEQ ID NO: 976976 - RNA, 19 nt, Artificial Sequence
  Description of Artificial Sequence: Synthetic oligonucleotide
aacgcucucguggucccac

SEQ ID NO: 976977 - RNA, 19 nt, Artificial Sequence
  Description of Artificial Sequence: Synthetic oligonucleotide
uucggcuugagugucuacu

SEQ ID NO: 976978 - RNA, 19 nt, Artificial Sequence
  Description of Artificial Sequence: Synthetic oligonucleotide
aucuuuuauggucccggga

SEQ ID NO: 976979 - RNA, 19 nt, Artificial Sequence
  Description of Artificial Sequence: Synthetic oligonucleotide
gauaaugccaaacgagcau

SEQ ID NO: 976980 - RNA, 19 nt, Artificial Sequence
  Description of Artificial Sequence: Synthetic oligonucleotide
caacuuucaugaaacgaga

SEQ ID NO: 976981 - RNA, 19 nt, Artificial Sequence
  Description of Artificial Sequence: Synthetic oligonucleotide
ccuucuucgaucccgacug

SEQ ID NO: 976982 - RNA, 19 nt, Artificial Sequence
  Description of Artificial Sequence: Synthetic oligonucleotide
accucagcaaguaaacucu

SEQ ID NO: 976983 - RNA, 19 nt, Artificial Sequence
  Description of Artificial Sequence: Synthetic oligonucleotide
cugaaaacuugcaauuaaa

SEQ ID NO: 976984 - RNA, 19 nt, Artificial Sequence
  Description of Artificial Sequence: Synthetic oligonucleotide
cuguguuuauaugacuuuc

SEQ ID NO: 976985 - RNA, 19 nt, Artificial Sequence
  Description of Artificial Sequence: Synthetic oligonucleotide
ucagauccuaacucuucaa

SEQ ID NO: 976986 - RNA, 19 nt, Artificial Sequence
  Description of Artificial Sequence: Synthetic oligonucleotide
acaauugcgcggccgaaau

SEQ ID NO: 976987 - RNA, 19 nt, Artificial Sequence
  Description of Artificial Sequence: Synthetic oligonucleotide
uuucucgacuacuggacuu

SEQ ID NO: 976988 - RNA, 19 nt, Artificial Sequence
  Description of Artificial Sequence: Synthetic oligonucleotide
aacaauuccgcaggacaaa

SEQ ID NO: 976989 - RNA, 19 nt, Artificial Sequence
  Description of Artificial Sequence: Synthetic oligonucleotide
aauggucaucuacccggga

SEQ ID NO: 976990 - RNA, 19 nt, Artificial Sequence
  Description of Artificial Sequence: Synthetic oligonucleotide
ucccaucaaauggucaucu

SEQ ID NO: 976991 - RNA, 19 nt, Artificial Sequence
  Description of Artificial Sequence: Synthetic oligonucleotide
auaacuaacugagcuuuau

SEQ ID NO: 976992 - RNA, 19 nt, Artificial Sequence
  Description of Artificial Sequence: Synthetic oligonucleotide
uucuacuucuucgucgauc

SEQ ID NO: 976993 - RNA, 19 nt, Artificial Sequence
  Description of Artificial Sequence: Synthetic oligonucleotide
ucacuguaugccguuuuca

SEQ ID NO: 976994 - RNA, 19 nt, Artificial Sequence
  Description of Artificial Sequence: Synthetic oligonucleotide
ucgugaucgacuucucuuu

SEQ ID NO: 976995 - RNA, 19 nt, Artificial Sequence
  Description of Artificial Sequence: Synthetic oligonucleotide
acgagcucuuucuuucucu

SEQ ID NO: 976996 - RNA, 19 nt, Artificial Sequence
  Description of Artificial Sequence: Synthetic oligonucleotide
aaucucucucguagccaac

SEQ ID NO: 976997 - RNA, 19 nt, Artificial Sequence
  Description of Artificial Sequence: Synthetic oligonucleotide
ucuuagcaauucucucucu

SEQ ID NO: 976998 - RNA, 19 nt, Artificial Sequence
  Description of Artificial Sequence: Synthetic oligonucleotide
auuuugagauaaugccaaa

SEQ ID NO: 976999 - RNA, 19 nt, Artificial Sequence
  Description of Artificial Sequence: Synthetic oligonucleotide
uaucacgagcucuuucuuu

SEQ ID NO: 977000 - RNA, 19 nt, Artificial Sequence
  Description of Artificial Sequence: Synthetic oligonucleotide
guggcauaugugcuaauaa

SEQ ID NO: 977001 - RNA, 19 nt, Artificial Sequence
  Description of Artificial Sequence: Synthetic oligonucleotide
cuguuggaccagcagcccc

SEQ ID NO: 977002 - RNA, 19 nt, Artificial Sequence
  Description of Artificial Sequence: Synthetic oligonucleotide
aucagaucgaguauuugua

SEQ ID NO: 977003 - RNA, 19 nt, Artificial Sequence
  Description of Artificial Sequence: Synthetic oligonucleotide
uuauggucccgggaccugc

SEQ ID NO: 977004 - RNA, 19 nt, Artificial Sequence
  Description of Artificial Sequence: Synthetic oligonucleotide
agcaugaccucgucuaauu

SEQ ID NO: 977005 - RNA, 19 nt, Artificial Sequence
  Description of Artificial Sequence: Synthetic oligonucleotide
uguaugccguuuucaguau

SEQ ID NO: 977006 - RNA, 19 nt, Artificial Sequence
  Description of Artificial Sequence: Synthetic oligonucleotide
cucguggucccaccgcacg

SEQ ID NO: 977007 - RNA, 19 nt, Artificial Sequence
  Description of Artificial Sequence: Synthetic oligonucleotide
cauggaccaagaucagauc

SEQ ID NO: 977008 - RNA, 19 nt, Artificial Sequence
  Description of Artificial Sequence: Synthetic oligonucleotide
caaacgcucucgugguccc

SEQ ID NO: 977009 - RNA, 19 nt, Artificial Sequence
  Description of Artificial Sequence: Synthetic oligonucleotide
aucuacccgggacugggca

SEQ ID NO: 977010 - RNA, 19 nt, Artificial Sequence
  Description of Artificial Sequence: Synthetic oligonucleotide
gguuugugucuucacuuug

SEQ ID NO: 977011 - RNA, 19 nt, Artificial Sequence
  Description of Artificial Sequence: Synthetic oligonucleotide
auaugacuuucgaucucgg

SEQ ID NO: 977012 - RNA, 19 nt, Artificial Sequence
  Description of Artificial Sequence: Synthetic oligonucleotide
aagaucagaucgaguauuu

SEQ ID NO: 977013 - RNA, 19 nt, Artificial Sequence
  Description of Artificial Sequence: Synthetic oligonucleotide
gacugcgagaucuauguuu

SEQ ID NO: 977014 - RNA, 19 nt, Artificial Sequence
  Description of Artificial Sequence: Synthetic oligonucleotide
uucuacgcucuaccucagc

SEQ ID NO: 977015 - RNA, 19 nt, Artificial Sequence
  Description of Artificial Sequence: Synthetic oligonucleotide
agaucagaucgaguauuug

SEQ ID NO: 977016 - RNA, 19 nt, Artificial Sequence
  Description of Artificial Sequence: Synthetic oligonucleotide
cagaucgaguauuuguaaa

SEQ ID NO: 977017 - RNA, 19 nt, Artificial Sequence
  Description of Artificial Sequence: Synthetic oligonucleotide
auccaacaauugcgcggcc

SEQ ID NO: 977018 - RNA, 19 nt, Artificial Sequence
  Description of Artificial Sequence: Synthetic oligonucleotide
cuauagcuuucuuucaccu

SEQ ID NO: 977019 - RNA, 19 nt, Artificial Sequence
  Description of Artificial Sequence: Synthetic oligonucleotide
acugcgagaucuauguuuu

SEQ ID NO: 977020 - RNA, 19 nt, Artificial Sequence
  Description of Artificial Sequence: Synthetic oligonucleotide
caagccacauguuuaggua

SEQ ID NO: 977021 - RNA, 19 nt, Artificial Sequence
  Description of Artificial Sequence: Synthetic oligonucleotide
gaucccgacugcgagaucu

SEQ ID NO: 977022 - RNA, 19 nt, Artificial Sequence
  Description of Artificial Sequence: Synthetic oligonucleotide
aaagcccgcggcccacucu

SEQ ID NO: 977023 - RNA, 19 nt, Artificial Sequence
  Description of Artificial Sequence: Synthetic oligonucleotide
uucucgacuacuggacuuc

SEQ ID NO: 977024 - RNA, 19 nt, Artificial Sequence
  Description of Artificial Sequence: Synthetic oligonucleotide
ugaucugucauggcuucua

SEQ ID NO: 977025 - RNA, 19 nt, Artificial Sequence
  Description of Artificial Sequence: Synthetic oligonucleotide
accugcuccgguccagaag

SEQ ID NO: 977026 - RNA, 19 nt, Artificial Sequence
  Description of Artificial Sequence: Synthetic oligonucleotide
ucacgagcucuuucuuucu

SEQ ID NO: 977027 - RNA, 19 nt, Artificial Sequence
  Description of Artificial Sequence: Synthetic oligonucleotide
cucauucuuaguaucacuu

SEQ ID NO: 977028 - RNA, 19 nt, Artificial Sequence
  Description of Artificial Sequence: Synthetic oligonucleotide
gccguuuucaguauucuuc

SEQ ID NO: 977029 - RNA, 19 nt, Artificial Sequence
  Description of Artificial Sequence: Synthetic oligonucleotide
uuuauggucccgggaccug

SEQ ID NO: 977030 - RNA, 19 nt, Artificial Sequence
  Description of Artificial Sequence: Synthetic oligonucleotide
cuagcacccgccaacgaaa

SEQ ID NO: 977031 - RNA, 19 nt, Artificial Sequence
  Description of Artificial Sequence: Synthetic oligonucleotide
agcaagccacauguuuagg

SEQ ID NO: 977032 - RNA, 19 nt, Artificial Sequence
  Description of Artificial Sequence: Synthetic oligonucleotide
caaaguggcauaugugcua

SEQ ID NO: 977033 - RNA, 19 nt, Artificial Sequence
  Description of Artificial Sequence: Synthetic oligonucleotide
ucggcuugagugucuacuu

SEQ ID NO: 977034 - RNA, 19 nt, Artificial Sequence
  Description of Artificial Sequence: Synthetic oligonucleotide
ccuuagauuuucaucguga

SEQ ID NO: 977035 - RNA, 19 nt, Artificial Sequence
  Description of Artificial Sequence: Synthetic oligonucleotide
acaggaccuaaguuuucaa

SEQ ID NO: 977036 - RNA, 19 nt, Artificial Sequence
  Description of Artificial Sequence: Synthetic oligonucleotide
auagcccauguguuguuuu

SEQ ID NO: 977037 - RNA, 19 nt, Artificial Sequence
  Description of Artificial Sequence: Synthetic oligonucleotide
gucuaauucuacgcucuac

SEQ ID NO: 977038 - RNA, 19 nt, Artificial Sequence
  Description of Artificial Sequence: Synthetic oligonucleotide
uucugaaaucugguagguc

SEQ ID NO: 977039 - RNA, 19 nt, Artificial Sequence
  Description of Artificial Sequence: Synthetic oligonucleotide
uacaaacgcucucgugguc

SEQ ID NO: 977040 - RNA, 19 nt, Artificial Sequence
  Description of Artificial Sequence: Synthetic oligonucleotide
acaauuccgcaggacaaaa

SEQ ID NO: 977041 - RNA, 19 nt, Artificial Sequence
  Description of Artificial Sequence: Synthetic oligonucleotide
ggcccauuaacucauccaa

SEQ ID NO: 977042 - RNA, 19 nt, Artificial Sequence
  Description of Artificial Sequence: Synthetic oligonucleotide
aucucucucguagccaacu

SEQ ID NO: 977043 - RNA, 19 nt, Artificial Sequence
  Description of Artificial Sequence: Synthetic oligonucleotide
cucuaugccacuauagcuu

SEQ ID NO: 977044 - RNA, 19 nt, Artificial Sequence
  Description of Artificial Sequence: Synthetic oligonucleotide
ccaaacgagcaugaccucg

SEQ ID NO: 977045 - RNA, 19 nt, Artificial Sequence
  Description of Artificial Sequence: Synthetic oligonucleotide
uauggucccgggaccugcu

SEQ ID NO: 977046 - RNA, 19 nt, Artificial Sequence
  Description of Artificial Sequence: Synthetic oligonucleotide
cccauuaacucauccaaca

SEQ ID NO: 977047 - RNA, 19 nt, Artificial Sequence
  Description of Artificial Sequence: Synthetic oligonucleotide
uugcgcggccgaaaucaug

SEQ ID NO: 977048 - RNA, 19 nt, Artificial Sequence
  Description of Artificial Sequence: Synthetic oligonucleotide
cugcuucacaugaauacua

SEQ ID NO: 977049 - RNA, 19 nt, Artificial Sequence
  Description of Artificial Sequence: Synthetic oligonucleotide
uucucguccggggcgaggu

SEQ ID NO: 977050 - RNA, 19 nt, Artificial Sequence
  Description of Artificial Sequence: Synthetic oligonucleotide
gcggccgaaaucauggugc

SEQ ID NO: 977051 - RNA, 19 nt, Artificial Sequence
  Description of Artificial Sequence: Synthetic oligonucleotide
ugucccgacuuuugcuccu

SEQ ID NO: 977052 - RNA, 19 nt, Artificial Sequence
  Description of Artificial Sequence: Synthetic oligonucleotide
uuucggucccggcccauua

SEQ ID NO: 977053 - RNA, 19 nt, Artificial Sequence
  Description of Artificial Sequence: Synthetic oligonucleotide
guagaagcacaucaauuuu

SEQ ID NO: 977054 - RNA, 19 nt, Artificial Sequence
  Description of Artificial Sequence: Synthetic oligonucleotide
guaggucacaacaguccug

SEQ ID NO: 977055 - RNA, 19 nt, Artificial Sequence
  Description of Artificial Sequence: Synthetic oligonucleotide
ucuacccgggacugggcau

SEQ ID NO: 977056 - RNA, 19 nt, Artificial Sequence
  Description of Artificial Sequence: Synthetic oligonucleotide
ugcuucgccuccugucucu

SEQ ID NO: 977057 - RNA, 19 nt, Artificial Sequence
  Description of Artificial Sequence: Synthetic oligonucleotide
ucguggucccaccgcacgu

SEQ ID NO: 977058 - RNA, 19 nt, Artificial Sequence
  Description of Artificial Sequence: Synthetic oligonucleotide
caggaccuaaguuuucaaa

SEQ ID NO: 977059 - RNA, 19 nt, Artificial Sequence
  Description of Artificial Sequence: Synthetic oligonucleotide
ucucucucguagccaacuu

SEQ ID NO: 977060 - RNA, 19 nt, Artificial Sequence
  Description of Artificial Sequence: Synthetic oligonucleotide
uucccaucaaauggucauc

SEQ ID NO: 977061 - RNA, 19 nt, Artificial Sequence
  Description of Artificial Sequence: Synthetic oligonucleotide
cuucgucgaucucuacuuc

SEQ ID NO: 977062 - RNA, 19 nt, Artificial Sequence
  Description of Artificial Sequence: Synthetic oligonucleotide
uacuuucucuaugccacua

SEQ ID NO: 977063 - RNA, 19 nt, Artificial Sequence
  Description of Artificial Sequence: Synthetic oligonucleotide
ucucgacuacuggacuuca

SEQ ID NO: 977064 - RNA, 19 nt, Artificial Sequence
  Description of Artificial Sequence: Synthetic oligonucleotide
guccgagacugaaaacuug

SEQ ID NO: 977065 - RNA, 19 nt, Artificial Sequence
  Description of Artificial Sequence: Synthetic oligonucleotide
ggacugcugauuuugagau

SEQ ID NO: 977066 - RNA, 19 nt, Artificial Sequence
  Description of Artificial Sequence: Synthetic oligonucleotide
ggaccuaaguuuucaaagu

SEQ ID NO: 977067 - RNA, 19 nt, Artificial Sequence
  Description of Artificial Sequence: Synthetic oligonucleotide
cucucaagccgaaaagccu

SEQ ID NO: 977068 - RNA, 19 nt, Artificial Sequence
  Description of Artificial Sequence: Synthetic oligonucleotide
uucggucccggcccauuaa

SEQ ID NO: 977069 - RNA, 19 nt, Artificial Sequence
  Description of Artificial Sequence: Synthetic oligonucleotide
cucgacuacuggacuucac

SEQ ID NO: 977070 - RNA, 19 nt, Artificial Sequence
  Description of Artificial Sequence: Synthetic oligonucleotide
gagugucuacuucgugauc

SEQ ID NO: 977071 - RNA, 19 nt, Artificial Sequence
  Description of Artificial Sequence: Synthetic oligonucleotide
aguccgagacugaaaacuu

SEQ ID NO: 977072 - RNA, 19 nt, Artificial Sequence
  Description of Artificial Sequence: Synthetic oligonucleotide
ucucuacuccgugaucuuu

SEQ ID NO: 977073 - RNA, 19 nt, Artificial Sequence
  Description of Artificial Sequence: Synthetic oligonucleotide
cuaugccacuauagcuuuc

SEQ ID NO: 977074 - RNA, 19 nt, Artificial Sequence
  Description of Artificial Sequence: Synthetic oligonucleotide
uuucggcuugagugucuac

SEQ ID NO: 977075 - RNA, 19 nt, Artificial Sequence
  Description of Artificial Sequence: Synthetic oligonucleotide
cuacgcucuaccucagcaa

SEQ ID NO: 977076 - RNA, 19 nt, Artificial Sequence
  Description of Artificial Sequence: Synthetic oligonucleotide
uccuucgauucaggguuug

SEQ ID NO: 977077 - RNA, 19 nt, Artificial Sequence
  Description of Artificial Sequence: Synthetic oligonucleotide
cucucguagccaacuuuca

SEQ ID NO: 977078 - RNA, 19 nt, Artificial Sequence
  Description of Artificial Sequence: Synthetic oligonucleotide
auggucccgggaccugcuc

SEQ ID NO: 977079 - RNA, 19 nt, Artificial Sequence
  Description of Artificial Sequence: Synthetic oligonucleotide
caaacgagcaugaccucgu

SEQ ID NO: 977080 - RNA, 19 nt, Artificial Sequence
  Description of Artificial Sequence: Synthetic oligonucleotide
cgacuacuggacuucacac

SEQ ID NO: 977081 - RNA, 19 nt, Artificial Sequence
  Description of Artificial Sequence: Synthetic oligonucleotide
uuccuucgauucaggguuu

SEQ ID NO: 977082 - RNA, 19 nt, Artificial Sequence
  Description of Artificial Sequence: Synthetic oligonucleotide
guuggaccagcagccccgg

SEQ ID NO: 977083 - RNA, 19 nt, Artificial Sequence
  Description of Artificial Sequence: Synthetic oligonucleotide
cucauacuguuuccuuaga

SEQ ID NO: 977084 - RNA, 19 nt, Artificial Sequence
  Description of Artificial Sequence: Synthetic oligonucleotide
caauugcgcggccgaaauc

SEQ ID NO: 977085 - RNA, 19 nt, Artificial Sequence
  Description of Artificial Sequence: Synthetic oligonucleotide
gaucuucacuguaugccgu

SEQ ID NO: 977086 - RNA, 19 nt, Artificial Sequence
  Description of Artificial Sequence: Synthetic oligonucleotide
acguugcugcgcuucucgu

SEQ ID NO: 977087 - RNA, 19 nt, Artificial Sequence
  Description of Artificial Sequence: Synthetic oligonucleotide
uugagacguucaucccuau

SEQ ID NO: 977088 - RNA, 19 nt, Artificial Sequence
  Description of Artificial Sequence: Synthetic oligonucleotide
ggcaucgccuacuaucaaa

SEQ ID NO: 977089 - RNA, 19 nt, Artificial Sequence
  Description of Artificial Sequence: Synthetic oligonucleotide
gacuuuugcuccuguguuu

SEQ ID NO: 977090 - RNA, 19 nt, Artificial Sequence
  Description of Artificial Sequence: Synthetic oligonucleotide
auucuacgcucuaccucag

SEQ ID NO: 977091 - RNA, 19 nt, Artificial Sequence
  Description of Artificial Sequence: Synthetic oligonucleotide
ucguccggggcgagguuuc

SEQ ID NO: 977092 - RNA, 19 nt, Artificial Sequence
  Description of Artificial Sequence: Synthetic oligonucleotide
ucccgacuuuugcuccugu

SEQ ID NO: 977093 - RNA, 19 nt, Artificial Sequence
  Description of Artificial Sequence: Synthetic oligonucleotide
gcaagccacauguuuaggu

SEQ ID NO: 977094 - RNA, 19 nt, Artificial Sequence
  Description of Artificial Sequence: Synthetic oligonucleotide
ccgaaaucauggugcuucc

SEQ ID NO: 977095 - RNA, 19 nt, Artificial Sequence
  Description of Artificial Sequence: Synthetic oligonucleotide
guucugaaaucugguaggu

SEQ ID NO: 977096 - RNA, 19 nt, Artificial Sequence
  Description of Artificial Sequence: Synthetic oligonucleotide
caagaucagaucgaguauu

SEQ ID NO: 977097 - RNA, 19 nt, Artificial Sequence
  Description of Artificial Sequence: Synthetic oligonucleotide
gucgagguuguagaucuua

SEQ ID NO: 977098 - RNA, 19 nt, Artificial Sequence
  Description of Artificial Sequence: Synthetic oligonucleotide
caggguuugugucuucacu

SEQ ID NO: 977099 - RNA, 19 nt, Artificial Sequence
  Description of Artificial Sequence: Synthetic oligonucleotide
cagauccuaacucuucaau

SEQ ID NO: 977100 - RNA, 19 nt, Artificial Sequence
  Description of Artificial Sequence: Synthetic oligonucleotide
ucaagccgaaaagccucau

SEQ ID NO: 977101 - RNA, 19 nt, Artificial Sequence
  Description of Artificial Sequence: Synthetic oligonucleotide
aguuucggcuugagugucu

SEQ ID NO: 977102 - RNA, 19 nt, Artificial Sequence
  Description of Artificial Sequence: Synthetic oligonucleotide
agguuucggucccggccca

SEQ ID NO: 977103 - RNA, 19 nt, Artificial Sequence
  Description of Artificial Sequence: Synthetic oligonucleotide
cuacuucuucgucgaucuc

SEQ ID NO: 977104 - RNA, 19 nt, Artificial Sequence
  Description of Artificial Sequence: Synthetic oligonucleotide
cugcgagaucuauguuuuc

SEQ ID NO: 977105 - RNA, 19 nt, Artificial Sequence
  Description of Artificial Sequence: Synthetic oligonucleotide
cugcuucgccuccugucuc

SEQ ID NO: 977106 - RNA, 19 nt, Artificial Sequence
  Description of Artificial Sequence: Synthetic oligonucleotide
agccacccggucaccaaag

SEQ ID NO: 977107 - RNA, 19 nt, Artificial Sequence
  Description of Artificial Sequence: Synthetic oligonucleotide
ccaacaauugcgcggccga

SEQ ID NO: 977108 - RNA, 19 nt, Artificial Sequence
  Description of Artificial Sequence: Synthetic oligonucleotide
ugcuccgguccagaaguuu

SEQ ID NO: 977109 - RNA, 19 nt, Artificial Sequence
  Description of Artificial Sequence: Synthetic oligonucleotide
ggggcgagguuucgguccc

SEQ ID NO: 977110 - RNA, 19 nt, Artificial Sequence
  Description of Artificial Sequence: Synthetic oligonucleotide
augccacuauagcuuucuu

SEQ ID NO: 977111 - RNA, 19 nt, Artificial Sequence
  Description of Artificial Sequence: Synthetic oligonucleotide
gcccauuaacucauccaac

SEQ ID NO: 977112 - RNA, 19 nt, Artificial Sequence
  Description of Artificial Sequence: Synthetic oligonucleotide
cagucucuaacagucugcu

SEQ ID NO: 977113 - RNA, 19 nt, Artificial Sequence
  Description of Artificial Sequence: Synthetic oligonucleotide
ccgguccagaaguuucggc

SEQ ID NO: 977114 - RNA, 19 nt, Artificial Sequence
  Description of Artificial Sequence: Synthetic oligonucleotide
ccgacugcgagaucuaugu

SEQ ID NO: 977115 - RNA, 19 nt, Artificial Sequence
  Description of Artificial Sequence: Synthetic oligonucleotide
ccacuauagcuuucuuuca

SEQ ID NO: 977116 - RNA, 19 nt, Artificial Sequence
  Description of Artificial Sequence: Synthetic oligonucleotide
cucuacuccgugaucuuuu

SEQ ID NO: 977117 - RNA, 19 nt, Artificial Sequence
  Description of Artificial Sequence: Synthetic oligonucleotide
cuccgugaucuuuuauggu

SEQ ID NO: 977118 - RNA, 19 nt, Artificial Sequence
  Description of Artificial Sequence: Synthetic oligonucleotide
guuucggcuugagugucua

SEQ ID NO: 977119 - RNA, 19 nt, Artificial Sequence
  Description of Artificial Sequence: Synthetic oligonucleotide
cagucugcuucacaugaau

SEQ ID NO: 977120 - RNA, 19 nt, Artificial Sequence
  Description of Artificial Sequence: Synthetic oligonucleotide
cccgacugcgagaucuaug

SEQ ID NO: 977121 - RNA, 19 nt, Artificial Sequence
  Description of Artificial Sequence: Synthetic oligonucleotide
ggcgagguuucggucccgg

SEQ ID NO: 977122 - RNA, 19 nt, Artificial Sequence
  Description of Artificial Sequence: Synthetic oligonucleotide
gggacugggcaucgccuac

SEQ ID NO: 977123 - RNA, 19 nt, Artificial Sequence
  Description of Artificial Sequence: Synthetic oligonucleotide
ucccgacugcgagaucuau

SEQ ID NO: 977124 - RNA, 19 nt, Artificial Sequence
  Description of Artificial Sequence: Synthetic oligonucleotide
cggggcgagguuucggucc

SEQ ID NO: 977125 - RNA, 19 nt, Artificial Sequence
  Description of Artificial Sequence: Synthetic oligonucleotide
gaccaagaucagaucgagu

SEQ ID NO: 977126 - RNA, 19 nt, Artificial Sequence
  Description of Artificial Sequence: Synthetic oligonucleotide
cccaccgcacguugcugcg

SEQ ID NO: 977127 - RNA, 19 nt, Artificial Sequence
  Description of Artificial Sequence: Synthetic oligonucleotide
ccuagcacccgccaacgaa

SEQ ID NO: 977128 - RNA, 19 nt, Artificial Sequence
  Description of Artificial Sequence: Synthetic oligonucleotide
cggaggacugcugauuuug

SEQ ID NO: 977129 - RNA, 19 nt, Artificial Sequence
  Description of Artificial Sequence: Synthetic oligonucleotide
ccgagacugaaaacuugca

SEQ ID NO: 977130 - RNA, 19 nt, Artificial Sequence
  Description of Artificial Sequence: Synthetic oligonucleotide
cccgacuuuugcuccugug

SEQ ID NO: 977131 - RNA, 19 nt, Artificial Sequence
  Description of Artificial Sequence: Synthetic oligonucleotide
auugcgcggccgaaaucau

SEQ ID NO: 977132 - RNA, 19 nt, Artificial Sequence
  Description of Artificial Sequence: Synthetic oligonucleotide
gucccgacuuuugcuccug

SEQ ID NO: 977133 - RNA, 19 nt, Artificial Sequence
  Description of Artificial Sequence: Synthetic oligonucleotide
gagcaugaccucgucuaau

SEQ ID NO: 977134 - RNA, 19 nt, Artificial Sequence
  Description of Artificial Sequence: Synthetic oligonucleotide
gucccaccgcacguugcug

SEQ ID NO: 977135 - RNA, 19 nt, Artificial Sequence
  Description of Artificial Sequence: Synthetic oligonucleotide
cgugaucgacuucucuuuc

SEQ ID NO: 977136 - RNA, 19 nt, Artificial Sequence
  Description of Artificial Sequence: Synthetic oligonucleotide
caacaauugcgcggccgaa

SEQ ID NO: 977137 - RNA, 19 nt, Artificial Sequence
  Description of Artificial Sequence: Synthetic oligonucleotide
gccaaacgagcaugaccuc

SEQ ID NO: 977138 - RNA, 19 nt, Artificial Sequence
  Description of Artificial Sequence: Synthetic oligonucleotide
ccgacuuuugcuccugugu

SEQ ID NO: 977139 - RNA, 19 nt, Artificial Sequence
  Description of Artificial Sequence: Synthetic oligonucleotide
gcgagaucuauguuuucuu

SEQ ID NO: 977140 - RNA, 19 nt, Artificial Sequence
  Description of Artificial Sequence: Synthetic oligonucleotide
ccucgucuaauucuacgcu

SEQ ID NO: 977141 - RNA, 19 nt, Artificial Sequence
  Description of Artificial Sequence: Synthetic oligonucleotide
cgcggccgaaaucauggug

SEQ ID NO: 977142 - RNA, 19 nt, Artificial Sequence
  Description of Artificial Sequence: Synthetic oligonucleotide
ggucccaccgcacguugcu

SEQ ID NO: 977143 - RNA, 19 nt, Artificial Sequence
  Description of Artificial Sequence: Synthetic oligonucleotide
cgguggcuuuaauuuuggc

SEQ ID NO: 977144 - RNA, 19 nt, Artificial Sequence
  Description of Artificial Sequence: Synthetic oligonucleotide
cuacuccgugaucuuuuau

SEQ ID NO: 977145 - RNA, 19 nt, Artificial Sequence
  Description of Artificial Sequence: Synthetic oligonucleotide
caccgcacguugcugcgcu

SEQ ID NO: 977146 - RNA, 19 nt, Artificial Sequence
  Description of Artificial Sequence: Synthetic oligonucleotide
cagcccuagcacccgccaa

SEQ ID NO: 977147 - RNA, 19 nt, Artificial Sequence
  Description of Artificial Sequence: Synthetic oligonucleotide
agucgagguuguagaucuu

SEQ ID NO: 977148 - RNA, 19 nt, Artificial Sequence
  Description of Artificial Sequence: Synthetic oligonucleotide
accgcacguugcugcgcuu

SEQ ID NO: 977149 - RNA, 19 nt, Artificial Sequence
  Description of Artificial Sequence: Synthetic oligonucleotide
cuuucccgcucuucccuuu

SEQ ID NO: 977150 - RNA, 19 nt, Artificial Sequence
  Description of Artificial Sequence: Synthetic oligonucleotide
cgcggcccacucucaagcc

SEQ ID NO: 977151 - RNA, 19 nt, Artificial Sequence
  Description of Artificial Sequence: Synthetic oligonucleotide
gggcaucgccuacuaucaa

SEQ ID NO: 977152 - RNA, 19 nt, Artificial Sequence
  Description of Artificial Sequence: Synthetic oligonucleotide
ccggggcgagguuucgguc

SEQ ID NO: 977153 - RNA, 19 nt, Artificial Sequence
  Description of Artificial Sequence: Synthetic oligonucleotide
ccagcccuagcacccgcca

SEQ ID NO: 977154 - RNA, 19 nt, Artificial Sequence
  Description of Artificial Sequence: Synthetic oligonucleotide
cuucaacaguaguccucuu

SEQ ID NO: 977155 - RNA, 19 nt, Artificial Sequence
  Description of Artificial Sequence: Synthetic oligonucleotide
cggcccacucucaagccga

SEQ ID NO: 977156 - RNA, 19 nt, Artificial Sequence
  Description of Artificial Sequence: Synthetic oligonucleotide
gggcgagguuucggucccg

SEQ ID NO: 977157 - RNA, 19 nt, Artificial Sequence
  Description of Artificial Sequence: Synthetic oligonucleotide
ccaccgcacguugcugcgc

SEQ ID NO: 977158 - RNA, 19 nt, Artificial Sequence
  Description of Artificial Sequence: Synthetic oligonucleotide
guuucggucccggcccauu

SEQ ID NO: 977159 - RNA, 19 nt, Artificial Sequence
  Description of Artificial Sequence: Synthetic oligonucleotide
agcccgcggcccacucuca

SEQ ID NO: 977160 - RNA, 19 nt, Artificial Sequence
  Description of Artificial Sequence: Synthetic oligonucleotide
cguagccaacuuucaugaa

SEQ ID NO: 977161 - RNA, 19 nt, Artificial Sequence
  Description of Artificial Sequence: Synthetic oligonucleotide
gcauagcccauguguuguu

SEQ ID NO: 977162 - RNA, 19 nt, Artificial Sequence
  Description of Artificial Sequence: Synthetic oligonucleotide
cgucuaauucuacgcucua

SEQ ID NO: 977163 - RNA, 19 nt, Artificial Sequence
  Description of Artificial Sequence: Synthetic oligonucleotide
ccgggacugggcaucgccu

SEQ ID NO: 977164 - RNA, 19 nt, Artificial Sequence
  Description of Artificial Sequence: Synthetic oligonucleotide
cccggaggacugcugauuu

SEQ ID NO: 977165 - RNA, 19 nt, Artificial Sequence
  Description of Artificial Sequence: Synthetic oligonucleotide
cccuagcacccgccaacga

SEQ ID NO: 977166 - RNA, 19 nt, Artificial Sequence
  Description of Artificial Sequence: Synthetic oligonucleotide
ggcccacucucaagccgaa

SEQ ID NO: 977167 - RNA, 19 nt, Artificial Sequence
  Description of Artificial Sequence: Synthetic oligonucleotide
ccuucgauucaggguuugu

SEQ ID NO: 977168 - RNA, 19 nt, Artificial Sequence
  Description of Artificial Sequence: Synthetic oligonucleotide
gcgcggccgaaaucauggu

SEQ ID NO: 977169 - RNA, 19 nt, Artificial Sequence
  Description of Artificial Sequence: Synthetic oligonucleotide
cggccgaaaucauggugcu

SEQ ID NO: 977170 - RNA, 19 nt, Artificial Sequence
  Description of Artificial Sequence: Synthetic oligonucleotide
gguuucggucccggcccau

SEQ ID NO: 977171 - RNA, 19 nt, Artificial Sequence
  Description of Artificial Sequence: Synthetic oligonucleotide
ccggaggacugcugauuuu

SEQ ID NO: 977172 - RNA, 19 nt, Artificial Sequence
  Description of Artificial Sequence: Synthetic oligonucleotide
cgacugcgagaucuauguu

SEQ ID NO: 977173 - RNA, 19 nt, Artificial Sequence
  Description of Artificial Sequence: Synthetic oligonucleotide
ccccggaggacugcugauu

SEQ ID NO: 977174 - RNA, 19 nt, Artificial Sequence
  Description of Artificial Sequence: Synthetic oligonucleotide
cguggucccaccgcacguu

SEQ ID NO: 977175 - RNA, 19 nt, Artificial Sequence
  Description of Artificial Sequence: Synthetic oligonucleotide
uguggcacuauaaagauga

SEQ ID NO: 977176 - RNA, 19 nt, Artificial Sequence
  Description of Artificial Sequence: Synthetic oligonucleotide
agauucuugggauaaagac

SEQ ID NO: 977177 - RNA, 19 nt, Artificial Sequence
  Description of Artificial Sequence: Synthetic oligonucleotide
uuuacuugagaccaaaccu

SEQ ID NO: 977178 - RNA, 19 nt, Artificial Sequence
  Description of Artificial Sequence: Synthetic oligonucleotide
uaaaccauugguuaccccg

SEQ ID NO: 977179 - RNA, 19 nt, Artificial Sequence
  Description of Artificial Sequence: Synthetic oligonucleotide
aaagacucaaccuuccgag

SEQ ID NO: 977180 - RNA, 19 nt, Artificial Sequence
  Description of Artificial Sequence: Synthetic oligonucleotide
uugacuuucauucuuaaaa

SEQ ID NO: 977181 - RNA, 19 nt, Artificial Sequence
  Description of Artificial Sequence: Synthetic oligonucleotide
aaauuguggcacuauaaag

SEQ ID NO: 977182 - RNA, 19 nt, Artificial Sequence
  Description of Artificial Sequence: Synthetic oligonucleotide
aaucuaaaccauugguuac

SEQ ID NO: 977183 - RNA, 19 nt, Artificial Sequence
  Description of Artificial Sequence: Synthetic oligonucleotide
cacacauaauuuaugaugg

SEQ ID NO: 977184 - RNA, 19 nt, Artificial Sequence
  Description of Artificial Sequence: Synthetic oligonucleotide
uauaaagcgucucuugggg

SEQ ID NO: 977185 - RNA, 19 nt, Artificial Sequence
  Description of Artificial Sequence: Synthetic oligonucleotide
auuaaauaacuauguacac

SEQ ID NO: 977186 - RNA, 19 nt, Artificial Sequence
  Description of Artificial Sequence: Synthetic oligonucleotide
aauaagacuuguuugacuu

SEQ ID NO: 977187 - RNA, 19 nt, Artificial Sequence
  Description of Artificial Sequence: Synthetic oligonucleotide
gugaagacaaaccuaacgg

SEQ ID NO: 977188 - RNA, 19 nt, Artificial Sequence
  Description of Artificial Sequence: Synthetic oligonucleotide
gaccccaacauccacaucg

SEQ ID NO: 977189 - RNA, 19 nt, Artificial Sequence
  Description of Artificial Sequence: Synthetic oligonucleotide
ugagaugcucuccagaucc

SEQ ID NO: 977190 - RNA, 19 nt, Artificial Sequence
  Description of Artificial Sequence: Synthetic oligonucleotide
auagaugcgauccaggaug

SEQ ID NO: 977191 - RNA, 19 nt, Artificial Sequence
  Description of Artificial Sequence: Synthetic oligonucleotide
acacacauaauuuaugaug

SEQ ID NO: 977192 - RNA, 19 nt, Artificial Sequence
  Description of Artificial Sequence: Synthetic oligonucleotide
acauaauuuaugauggggc

SEQ ID NO: 977193 - RNA, 19 nt, Artificial Sequence
  Description of Artificial Sequence: Synthetic oligonucleotide
ucucauuaaauaacuaugu

SEQ ID NO: 977194 - RNA, 19 nt, Artificial Sequence
  Description of Artificial Sequence: Synthetic oligonucleotide
agagacgacggucaaacac

SEQ ID NO: 977195 - RNA, 19 nt, Artificial Sequence
  Description of Artificial Sequence: Synthetic oligonucleotide
ucuuaaaaucucaggagug

SEQ ID NO: 977196 - RNA, 19 nt, Artificial Sequence
  Description of Artificial Sequence: Synthetic oligonucleotide
cauaauuuaugauggggcc

SEQ ID NO: 977197 - RNA, 19 nt, Artificial Sequence
  Description of Artificial Sequence: Synthetic oligonucleotide
gaguacucagcucugacag

SEQ ID NO: 977198 - RNA, 19 nt, Artificial Sequence
  Description of Artificial Sequence: Synthetic oligonucleotide
uuggagauuuacuugagac

SEQ ID NO: 977199 - RNA, 19 nt, Artificial Sequence
  Description of Artificial Sequence: Synthetic oligonucleotide
uuuuaauuauuuaccagau

SEQ ID NO: 977200 - RNA, 19 nt, Artificial Sequence
  Description of Artificial Sequence: Synthetic oligonucleotide
aacaacuucucaguguuuc

SEQ ID NO: 977201 - RNA, 19 nt, Artificial Sequence
  Description of Artificial Sequence: Synthetic oligonucleotide
aagacaaaccuaacggagc

SEQ ID NO: 977202 - RNA, 19 nt, Artificial Sequence
  Description of Artificial Sequence: Synthetic oligonucleotide
uccagauccgaacagggag

SEQ ID NO: 977203 - RNA, 19 nt, Artificial Sequence
  Description of Artificial Sequence: Synthetic oligonucleotide
auaaagaugagaagguagg

SEQ ID NO: 977204 - RNA, 19 nt, Artificial Sequence
  Description of Artificial Sequence: Synthetic oligonucleotide
accuaacggagccaaaggc

SEQ ID NO: 977205 - RNA, 19 nt, Artificial Sequence
  Description of Artificial Sequence: Synthetic oligonucleotide
cauucuuaaaaucucagga

SEQ ID NO: 977206 - RNA, 19 nt, Artificial Sequence
  Description of Artificial Sequence: Synthetic oligonucleotide
aaucucaggaguggaagac

SEQ ID NO: 977207 - RNA, 19 nt, Artificial Sequence
  Description of Artificial Sequence: Synthetic oligonucleotide
uaaagacucaaccuuccga

SEQ ID NO: 977208 - RNA, 19 nt, Artificial Sequence
  Description of Artificial Sequence: Synthetic oligonucleotide
uguuugccaaagcugagug

SEQ ID NO: 977209 - RNA, 19 nt, Artificial Sequence
  Description of Artificial Sequence: Synthetic oligonucleotide
ugauauggacaguuucucg

SEQ ID NO: 977210 - RNA, 19 nt, Artificial Sequence
  Description of Artificial Sequence: Synthetic oligonucleotide
agauacuuuggcauguggc

SEQ ID NO: 977211 - RNA, 19 nt, Artificial Sequence
  Description of Artificial Sequence: Synthetic oligonucleotide
agguagaagguccuuucgc

SEQ ID NO: 977212 - RNA, 19 nt, Artificial Sequence
  Description of Artificial Sequence: Synthetic oligonucleotide
uccaacgguucuuuggugg

SEQ ID NO: 977213 - RNA, 19 nt, Artificial Sequence
  Description of Artificial Sequence: Synthetic oligonucleotide
cuugagagaccucagugcc

SEQ ID NO: 977214 - RNA, 19 nt, Artificial Sequence
  Description of Artificial Sequence: Synthetic oligonucleotide
guauaaagcgucucuuggg

SEQ ID NO: 977215 - RNA, 19 nt, Artificial Sequence
  Description of Artificial Sequence: Synthetic oligonucleotide
cuuaaaaucucaggagugg

SEQ ID NO: 977216 - RNA, 19 nt, Artificial Sequence
  Description of Artificial Sequence: Synthetic oligonucleotide
cugguagaccccaacaucc

SEQ ID NO: 977217 - RNA, 19 nt, Artificial Sequence
  Description of Artificial Sequence: Synthetic oligonucleotide
agaacugcaggcuaugaga

SEQ ID NO: 977218 - RNA, 19 nt, Artificial Sequence
  Description of Artificial Sequence: Synthetic oligonucleotide
cauugaacgugauucgugc

SEQ ID NO: 977219 - RNA, 19 nt, Artificial Sequence
  Description of Artificial Sequence: Synthetic oligonucleotide
ugggauaaagacucaaccu

SEQ ID NO: 977220 - RNA, 19 nt, Artificial Sequence
  Description of Artificial Sequence: Synthetic oligonucleotide
aaaccauugguuaccccgc

SEQ ID NO: 977221 - RNA, 19 nt, Artificial Sequence
  Description of Artificial Sequence: Synthetic oligonucleotide
ugauucgugcuccaggcug

SEQ ID NO: 977222 - RNA, 19 nt, Artificial Sequence
  Description of Artificial Sequence: Synthetic oligonucleotide
ggugaagacaaaccuaacg

SEQ ID NO: 977223 - RNA, 19 nt, Artificial Sequence
  Description of Artificial Sequence: Synthetic oligonucleotide
ugagcauucagaccucccc

SEQ ID NO: 977224 - RNA, 19 nt, Artificial Sequence
  Description of Artificial Sequence: Synthetic oligonucleotide
cuggcuggaacgaagcugg

SEQ ID NO: 977225 - RNA, 19 nt, Artificial Sequence
  Description of Artificial Sequence: Synthetic oligonucleotide
cacauaauuuaugaugggg

SEQ ID NO: 977226 - RNA, 19 nt, Artificial Sequence
  Description of Artificial Sequence: Synthetic oligonucleotide
aucuaaaccauugguuacc

SEQ ID NO: 977227 - RNA, 19 nt, Artificial Sequence
  Description of Artificial Sequence: Synthetic oligonucleotide
gguauaaagcgucucuugg

SEQ ID NO: 977228 - RNA, 19 nt, Artificial Sequence
  Description of Artificial Sequence: Synthetic oligonucleotide
caggcuaugagagacgacg

SEQ ID NO: 977229 - RNA, 19 nt, Artificial Sequence
  Description of Artificial Sequence: Synthetic oligonucleotide
ucauugaacgugauucgug

SEQ ID NO: 977230 - RNA, 19 nt, Artificial Sequence
  Description of Artificial Sequence: Synthetic oligonucleotide
cugagaaacuucauccugc

SEQ ID NO: 977231 - RNA, 19 nt, Artificial Sequence
  Description of Artificial Sequence: Synthetic oligonucleotide
acucauugaacgugauucg

SEQ ID NO: 977232 - RNA, 19 nt, Artificial Sequence
  Description of Artificial Sequence: Synthetic oligonucleotide
cuggacaacagacuggcag

SEQ ID NO: 977233 - RNA, 19 nt, Artificial Sequence
  Description of Artificial Sequence: Synthetic oligonucleotide
auaaagacucaaccuuccg

SEQ ID NO: 977234 - RNA, 19 nt, Artificial Sequence
  Description of Artificial Sequence: Synthetic oligonucleotide
uguugggucucucugaaua

SEQ ID NO: 977235 - RNA, 19 nt, Artificial Sequence
  Description of Artificial Sequence: Synthetic oligonucleotide
cacugucaaaaucuaaacc

SEQ ID NO: 977236 - RNA, 19 nt, Artificial Sequence
  Description of Artificial Sequence: Synthetic oligonucleotide
uggauacaugaugagaugc

SEQ ID NO: 977237 - RNA, 19 nt, Artificial Sequence
  Description of Artificial Sequence: Synthetic oligonucleotide
auugguuaccccgccagcc

SEQ ID NO: 977238 - RNA, 19 nt, Artificial Sequence
  Description of Artificial Sequence: Synthetic oligonucleotide
aaugcguuucucuguccuc

SEQ ID NO: 977239 - RNA, 19 nt, Artificial Sequence
  Description of Artificial Sequence: Synthetic oligonucleotide
ugaaggaggauguccaacu

SEQ ID NO: 977240 - RNA, 19 nt, Artificial Sequence
  Description of Artificial Sequence: Synthetic oligonucleotide
acuguugguauaaagcguc

SEQ ID NO: 977241 - RNA, 19 nt, Artificial Sequence
  Description of Artificial Sequence: Synthetic oligonucleotide
ucccucuguuacaugaggg

SEQ ID NO: 977242 - RNA, 19 nt, Artificial Sequence
  Description of Artificial Sequence: Synthetic oligonucleotide
aaccauugguuaccccgcc

SEQ ID NO: 977243 - RNA, 19 nt, Artificial Sequence
  Description of Artificial Sequence: Synthetic oligonucleotide
agacaauguuucuccagac

SEQ ID NO: 977244 - RNA, 19 nt, Artificial Sequence
  Description of Artificial Sequence: Synthetic oligonucleotide
agagagucggcuccaauug

SEQ ID NO: 977245 - RNA, 19 nt, Artificial Sequence
  Description of Artificial Sequence: Synthetic oligonucleotide
agacucaaccuuccgagag

SEQ ID NO: 977246 - RNA, 19 nt, Artificial Sequence
  Description of Artificial Sequence: Synthetic oligonucleotide
uucugauauggacaguuuc

SEQ ID NO: 977247 - RNA, 19 nt, Artificial Sequence
  Description of Artificial Sequence: Synthetic oligonucleotide
gagugggagagacucauug

SEQ ID NO: 977248 - RNA, 19 nt, Artificial Sequence
  Description of Artificial Sequence: Synthetic oligonucleotide
auauggacaguuucucgag

SEQ ID NO: 977249 - RNA, 19 nt, Artificial Sequence
  Description of Artificial Sequence: Synthetic oligonucleotide
ugagagacgacggucaaac

SEQ ID NO: 977250 - RNA, 19 nt, Artificial Sequence
  Description of Artificial Sequence: Synthetic oligonucleotide
cugaauaagacuuguuuga

SEQ ID NO: 977251 - RNA, 19 nt, Artificial Sequence
  Description of Artificial Sequence: Synthetic oligonucleotide
auuguggcacuauaaagau

SEQ ID NO: 977252 - RNA, 19 nt, Artificial Sequence
  Description of Artificial Sequence: Synthetic oligonucleotide
ucacacagcucuuggaucu

SEQ ID NO: 977253 - RNA, 19 nt, Artificial Sequence
  Description of Artificial Sequence: Synthetic oligonucleotide
agagauccaggagucaucg

SEQ ID NO: 977254 - RNA, 19 nt, Artificial Sequence
  Description of Artificial Sequence: Synthetic oligonucleotide
acuauaaagaugagaaggu

SEQ ID NO: 977255 - RNA, 19 nt, Artificial Sequence
  Description of Artificial Sequence: Synthetic oligonucleotide
ugguauaaagcgucucuug

SEQ ID NO: 977256 - RNA, 19 nt, Artificial Sequence
  Description of Artificial Sequence: Synthetic oligonucleotide
uuuaauuauuuaccagauu

SEQ ID NO: 977257 - RNA, 19 nt, Artificial Sequence
  Description of Artificial Sequence: Synthetic oligonucleotide
uacaugaggguccuucacu

SEQ ID NO: 977258 - RNA, 19 nt, Artificial Sequence
  Description of Artificial Sequence: Synthetic oligonucleotide
gaacugcaggcuaugagag

SEQ ID NO: 977259 - RNA, 19 nt, Artificial Sequence
  Description of Artificial Sequence: Synthetic oligonucleotide
aaaagcaugcagagaaaca

SEQ ID NO: 977260 - RNA, 19 nt, Artificial Sequence
  Description of Artificial Sequence: Synthetic oligonucleotide
auggaaaguuucaaggcuc

SEQ ID NO: 977261 - RNA, 19 nt, Artificial Sequence
  Description of Artificial Sequence: Synthetic oligonucleotide
agguccaacgguucuuugg

SEQ ID NO: 977262 - RNA, 19 nt, Artificial Sequence
  Description of Artificial Sequence: Synthetic oligonucleotide
ugaauaagacuuguuugac

SEQ ID NO: 977263 - RNA, 19 nt, Artificial Sequence
  Description of Artificial Sequence: Synthetic oligonucleotide
ugggagcacaccuccauag

SEQ ID NO: 977264 - RNA, 19 nt, Artificial Sequence
  Description of Artificial Sequence: Synthetic oligonucleotide
cauccugcgugucacacag

SEQ ID NO: 977265 - RNA, 19 nt, Artificial Sequence
  Description of Artificial Sequence: Synthetic oligonucleotide
uaauuuaugauggggccaa

SEQ ID NO: 977266 - RNA, 19 nt, Artificial Sequence
  Description of Artificial Sequence: Synthetic oligonucleotide
uccugcgugucacacagcu

SEQ ID NO: 977267 - RNA, 19 nt, Artificial Sequence
  Description of Artificial Sequence: Synthetic oligonucleotide
uugaacgugauucgugcuc

SEQ ID NO: 977268 - RNA, 19 nt, Artificial Sequence
  Description of Artificial Sequence: Synthetic oligonucleotide
ugaacgugauucgugcucc

SEQ ID NO: 977269 - RNA, 19 nt, Artificial Sequence
  Description of Artificial Sequence: Synthetic oligonucleotide
uugucggggagguccaacg

SEQ ID NO: 977270 - RNA, 19 nt, Artificial Sequence
  Description of Artificial Sequence: Synthetic oligonucleotide
uaagacuuguuugacuuuc

SEQ ID NO: 977271 - RNA, 19 nt, Artificial Sequence
  Description of Artificial Sequence: Synthetic oligonucleotide
uggacaacagacuggcagu

SEQ ID NO: 977272 - RNA, 19 nt, Artificial Sequence
  Description of Artificial Sequence: Synthetic oligonucleotide
ucuaaaccauugguuaccc

SEQ ID NO: 977273 - RNA, 19 nt, Artificial Sequence
  Description of Artificial Sequence: Synthetic oligonucleotide
ggagauuuacuugagacca

SEQ ID NO: 977274 - RNA, 19 nt, Artificial Sequence
  Description of Artificial Sequence: Synthetic oligonucleotide
ggcacuauaaagaugagaa

SEQ ID NO: 977275 - RNA, 19 nt, Artificial Sequence
  Description of Artificial Sequence: Synthetic oligonucleotide
auaauuuaugauggggcca

SEQ ID NO: 977276 - RNA, 19 nt, Artificial Sequence
  Description of Artificial Sequence: Synthetic oligonucleotide
ugcucuccagauccgaaca

SEQ ID NO: 977277 - RNA, 19 nt, Artificial Sequence
  Description of Artificial Sequence: Synthetic oligonucleotide
ucaucguccuggacaacag

SEQ ID NO: 977278 - RNA, 19 nt, Artificial Sequence
  Description of Artificial Sequence: Synthetic oligonucleotide
acaugaugagaugcucucc

SEQ ID NO: 977279 - RNA, 19 nt, Artificial Sequence
  Description of Artificial Sequence: Synthetic oligonucleotide
acgugauucgugcuccagg

SEQ ID NO: 977280 - RNA, 19 nt, Artificial Sequence
  Description of Artificial Sequence: Synthetic oligonucleotide
gagagacucauugaacgug

SEQ ID NO: 977281 - RNA, 19 nt, Artificial Sequence
  Description of Artificial Sequence: Synthetic oligonucleotide
uugagaccaaaccuccuuc

SEQ ID NO: 977282 - RNA, 19 nt, Artificial Sequence
  Description of Artificial Sequence: Synthetic oligonucleotide
guuugccaaagcugagugg

SEQ ID NO: 977283 - RNA, 19 nt, Artificial Sequence
  Description of Artificial Sequence: Synthetic oligonucleotide
uagaugcgauccaggaugc

SEQ ID NO: 977284 - RNA, 19 nt, Artificial Sequence
  Description of Artificial Sequence: Synthetic oligonucleotide
agaccaaaccuccuucuga

SEQ ID NO: 977285 - RNA, 19 nt, Artificial Sequence
  Description of Artificial Sequence: Synthetic oligonucleotide
ugucggggagguccaacgg

SEQ ID NO: 977286 - RNA, 19 nt, Artificial Sequence
  Description of Artificial Sequence: Synthetic oligonucleotide
uuacaugaggguccuucac

SEQ ID NO: 977287 - RNA, 19 nt, Artificial Sequence
  Description of Artificial Sequence: Synthetic oligonucleotide
cuauugcacauccuggcuc

SEQ ID NO: 977288 - RNA, 19 nt, Artificial Sequence
  Description of Artificial Sequence: Synthetic oligonucleotide
aguacucagcucugacagg

SEQ ID NO: 977289 - RNA, 19 nt, Artificial Sequence
  Description of Artificial Sequence: Synthetic oligonucleotide
uagaguacucagcucugac

SEQ ID NO: 977290 - RNA, 19 nt, Artificial Sequence
  Description of Artificial Sequence: Synthetic oligonucleotide
aagagauccaggagucauc

SEQ ID NO: 977291 - RNA, 19 nt, Artificial Sequence
  Description of Artificial Sequence: Synthetic oligonucleotide
ugagaccaaaccuccuucu

SEQ ID NO: 977292 - RNA, 19 nt, Artificial Sequence
  Description of Artificial Sequence: Synthetic oligonucleotide
ugagaagguagguccguga

SEQ ID NO: 977293 - RNA, 19 nt, Artificial Sequence
  Description of Artificial Sequence: Synthetic oligonucleotide
uccacaucguugacaggag

SEQ ID NO: 977294 - RNA, 19 nt, Artificial Sequence
  Description of Artificial Sequence: Synthetic oligonucleotide
gauucuugggauaaagacu

SEQ ID NO: 977295 - RNA, 19 nt, Artificial Sequence
  Description of Artificial Sequence: Synthetic oligonucleotide
cuaugagagacgacgguca

SEQ ID NO: 977296 - RNA, 19 nt, Artificial Sequence
  Description of Artificial Sequence: Synthetic oligonucleotide
ugucccucuguuacaugag

SEQ ID NO: 977297 - RNA, 19 nt, Artificial Sequence
  Description of Artificial Sequence: Synthetic oligonucleotide
ggagucaucguccuggaca

SEQ ID NO: 977298 - RNA, 19 nt, Artificial Sequence
  Description of Artificial Sequence: Synthetic oligonucleotide
uuguggcacuauaaagaug

SEQ ID NO: 977299 - RNA, 19 nt, Artificial Sequence
  Description of Artificial Sequence: Synthetic oligonucleotide
ggauccuaggcucaggcac

SEQ ID NO: 977300 - RNA, 19 nt, Artificial Sequence
  Description of Artificial Sequence: Synthetic oligonucleotide
uccaggacgguaacucucu

SEQ ID NO: 977301 - RNA, 19 nt, Artificial Sequence
  Description of Artificial Sequence: Synthetic oligonucleotide
caucguugacaggagauac

SEQ ID NO: 977302 - RNA, 19 nt, Artificial Sequence
  Description of Artificial Sequence: Synthetic oligonucleotide
gagaccaaaccuccuucug

SEQ ID NO: 977303 - RNA, 19 nt, Artificial Sequence
  Description of Artificial Sequence: Synthetic oligonucleotide
auugaacgugauucgugcu

SEQ ID NO: 977304 - RNA, 19 nt, Artificial Sequence
  Description of Artificial Sequence: Synthetic oligonucleotide
gagacgacggucaaacaca

SEQ ID NO: 977305 - RNA, 19 nt, Artificial Sequence
  Description of Artificial Sequence: Synthetic oligonucleotide
agguccgugacaucagcug

SEQ ID NO: 977306 - RNA, 19 nt, Artificial Sequence
  Description of Artificial Sequence: Synthetic oligonucleotide
caugaugagaugcucucca

SEQ ID NO: 977307 - RNA, 19 nt, Artificial Sequence
  Description of Artificial Sequence: Synthetic oligonucleotide
uaacggagccaaaggcaag

SEQ ID NO: 977308 - RNA, 19 nt, Artificial Sequence
  Description of Artificial Sequence: Synthetic oligonucleotide
gaauaagacuuguuugacu

SEQ ID NO: 977309 - RNA, 19 nt, Artificial Sequence
  Description of Artificial Sequence: Synthetic oligonucleotide
acucaaccuuccgagagag

SEQ ID NO: 977310 - RNA, 19 nt, Artificial Sequence
  Description of Artificial Sequence: Synthetic oligonucleotide
aacggagccaaaggcaaga

SEQ ID NO: 977311 - RNA, 19 nt, Artificial Sequence
  Description of Artificial Sequence: Synthetic oligonucleotide
gaaacuucauccugcgugu

SEQ ID NO: 977312 - RNA, 19 nt, Artificial Sequence
  Description of Artificial Sequence: Synthetic oligonucleotide
cagguagaagguccuuucg

SEQ ID NO: 977313 - RNA, 19 nt, Artificial Sequence
  Description of Artificial Sequence: Synthetic oligonucleotide
cucaaugcguuucucuguc

SEQ ID NO: 977314 - RNA, 19 nt, Artificial Sequence
  Description of Artificial Sequence: Synthetic oligonucleotide
cauagaguacucagcucug

SEQ ID NO: 977315 - RNA, 19 nt, Artificial Sequence
  Description of Artificial Sequence: Synthetic oligonucleotide
ugagugguggauacaugau

SEQ ID NO: 977316 - RNA, 19 nt, Artificial Sequence
  Description of Artificial Sequence: Synthetic oligonucleotide
ugcaccucucagauucuug

SEQ ID NO: 977317 - RNA, 19 nt, Artificial Sequence
  Description of Artificial Sequence: Synthetic oligonucleotide
guggauacaugaugagaug

SEQ ID NO: 977318 - RNA, 19 nt, Artificial Sequence
  Description of Artificial Sequence: Synthetic oligonucleotide
cuaacggagccaaaggcaa

SEQ ID NO: 977319 - RNA, 19 nt, Artificial Sequence
  Description of Artificial Sequence: Synthetic oligonucleotide
gucccucuguuacaugagg

SEQ ID NO: 977320 - RNA, 19 nt, Artificial Sequence
  Description of Artificial Sequence: Synthetic oligonucleotide
uugguuaccccgccagcca

SEQ ID NO: 977321 - RNA, 19 nt, Artificial Sequence
  Description of Artificial Sequence: Synthetic oligonucleotide
uaugagagacgacggucaa

SEQ ID NO: 977322 - RNA, 19 nt, Artificial Sequence
  Description of Artificial Sequence: Synthetic oligonucleotide
gguccgugacaucagcugg

SEQ ID NO: 977323 - RNA, 19 nt, Artificial Sequence
  Description of Artificial Sequence: Synthetic oligonucleotide
agaagguagguccgugaca

SEQ ID NO: 977324 - RNA, 19 nt, Artificial Sequence
  Description of Artificial Sequence: Synthetic oligonucleotide
uggcacuauaaagaugaga

SEQ ID NO: 977325 - RNA, 19 nt, Artificial Sequence
  Description of Artificial Sequence: Synthetic oligonucleotide
ugagagaccucagugccaa

SEQ ID NO: 977326 - RNA, 19 nt, Artificial Sequence
  Description of Artificial Sequence: Synthetic oligonucleotide
uuccaggacgguaacucuc

SEQ ID NO: 977327 - RNA, 19 nt, Artificial Sequence
  Description of Artificial Sequence: Synthetic oligonucleotide
cuaaaccauugguuacccc

SEQ ID NO: 977328 - RNA, 19 nt, Artificial Sequence
  Description of Artificial Sequence: Synthetic oligonucleotide
cauucaacaacuucucagu

SEQ ID NO: 977329 - RNA, 19 nt, Artificial Sequence
  Description of Artificial Sequence: Synthetic oligonucleotide
gcuuuagagagucggcucc

SEQ ID NO: 977330 - RNA, 19 nt, Artificial Sequence
  Description of Artificial Sequence: Synthetic oligonucleotide
agugccucaaugcguuucu

SEQ ID NO: 977331 - RNA, 19 nt, Artificial Sequence
  Description of Artificial Sequence: Synthetic oligonucleotide
aaacuucauccugcguguc

SEQ ID NO: 977332 - RNA, 19 nt, Artificial Sequence
  Description of Artificial Sequence: Synthetic oligonucleotide
gggcagugcaaagagaucc

SEQ ID NO: 977333 - RNA, 19 nt, Artificial Sequence
  Description of Artificial Sequence: Synthetic oligonucleotide
gacgguaacucucuucucu

SEQ ID NO: 977334 - RNA, 19 nt, Artificial Sequence
  Description of Artificial Sequence: Synthetic oligonucleotide
ugcaggcuaugagagacga

SEQ ID NO: 977335 - RNA, 19 nt, Artificial Sequence
  Description of Artificial Sequence: Synthetic oligonucleotide
ugguagaccccaacaucca

SEQ ID NO: 977336 - RNA, 19 nt, Artificial Sequence
  Description of Artificial Sequence: Synthetic oligonucleotide
caaaccuccuucugauaug

SEQ ID NO: 977337 - RNA, 19 nt, Artificial Sequence
  Description of Artificial Sequence: Synthetic oligonucleotide
uggcuuuagagagucggcu

SEQ ID NO: 977338 - RNA, 19 nt, Artificial Sequence
  Description of Artificial Sequence: Synthetic oligonucleotide
ucaaugcguuucucugucc

SEQ ID NO: 977339 - RNA, 19 nt, Artificial Sequence
  Description of Artificial Sequence: Synthetic oligonucleotide
uagguccgugacaucagcu

SEQ ID NO: 977340 - RNA, 19 nt, Artificial Sequence
  Description of Artificial Sequence: Synthetic oligonucleotide
agcugguagaccccaacau

SEQ ID NO: 977341 - RNA, 19 nt, Artificial Sequence
  Description of Artificial Sequence: Synthetic oligonucleotide
guugguauaaagcgucucu

SEQ ID NO: 977342 - RNA, 19 nt, Artificial Sequence
  Description of Artificial Sequence: Synthetic oligonucleotide
cuccuccuauugcacaucc

SEQ ID NO: 977343 - RNA, 19 nt, Artificial Sequence
  Description of Artificial Sequence: Synthetic oligonucleotide
cagacgcucagcuguuggg

SEQ ID NO: 977344 - RNA, 19 nt, Artificial Sequence
  Description of Artificial Sequence: Synthetic oligonucleotide
aacgugauucgugcuccag

SEQ ID NO: 977345 - RNA, 19 nt, Artificial Sequence
  Description of Artificial Sequence: Synthetic oligonucleotide
caaccuuccgagagagaag

SEQ ID NO: 977346 - RNA, 19 nt, Artificial Sequence
  Description of Artificial Sequence: Synthetic oligonucleotide
ucguugacaggagauacuu

SEQ ID NO: 977347 - RNA, 19 nt, Artificial Sequence
  Description of Artificial Sequence: Synthetic oligonucleotide
gcacuauaaagaugagaag

SEQ ID NO: 977348 - RNA, 19 nt, Artificial Sequence
  Description of Artificial Sequence: Synthetic oligonucleotide
gugguggauacaugaugag

SEQ ID NO: 977349 - RNA, 19 nt, Artificial Sequence
  Description of Artificial Sequence: Synthetic oligonucleotide
cagauucuugggauaaaga

SEQ ID NO: 977350 - RNA, 19 nt, Artificial Sequence
  Description of Artificial Sequence: Synthetic oligonucleotide
aggaggauguccaacuccu

SEQ ID NO: 977351 - RNA, 19 nt, Artificial Sequence
  Description of Artificial Sequence: Synthetic oligonucleotide
cacuugaguuccugcaaug

SEQ ID NO: 977352 - RNA, 19 nt, Artificial Sequence
  Description of Artificial Sequence: Synthetic oligonucleotide
cccaacauccacaucguug

SEQ ID NO: 977353 - RNA, 19 nt, Artificial Sequence
  Description of Artificial Sequence: Synthetic oligonucleotide
agauuuacuugagaccaaa

SEQ ID NO: 977354 - RNA, 19 nt, Artificial Sequence
  Description of Artificial Sequence: Synthetic oligonucleotide
cacauagaguacucagcuc

SEQ ID NO: 977355 - RNA, 19 nt, Artificial Sequence
  Description of Artificial Sequence: Synthetic oligonucleotide
uggcaaacuucacaaucuu

SEQ ID NO: 977356 - RNA, 19 nt, Artificial Sequence
  Description of Artificial Sequence: Synthetic oligonucleotide
uguugguauaaagcgucuc

SEQ ID NO: 977357 - RNA, 19 nt, Artificial Sequence
  Description of Artificial Sequence: Synthetic oligonucleotide
uucauccugcgugucacac

SEQ ID NO: 977358 - RNA, 19 nt, Artificial Sequence
  Description of Artificial Sequence: Synthetic oligonucleotide
uuagagagucggcuccaau

SEQ ID NO: 977359 - RNA, 19 nt, Artificial Sequence
  Description of Artificial Sequence: Synthetic oligonucleotide
aguucauggacagcacaca

SEQ ID NO: 977360 - RNA, 19 nt, Artificial Sequence
  Description of Artificial Sequence: Synthetic oligonucleotide
agacuuguuugacuuucau

SEQ ID NO: 977361 - RNA, 19 nt, Artificial Sequence
  Description of Artificial Sequence: Synthetic oligonucleotide
ucauccugcgugucacaca

SEQ ID NO: 977362 - RNA, 19 nt, Artificial Sequence
  Description of Artificial Sequence: Synthetic oligonucleotide
gaagguagguccgugacau

SEQ ID NO: 977363 - RNA, 19 nt, Artificial Sequence
  Description of Artificial Sequence: Synthetic oligonucleotide
guagguccgugacaucagc

SEQ ID NO: 977364 - RNA, 19 nt, Artificial Sequence
  Description of Artificial Sequence: Synthetic oligonucleotide
aggcuaugagagacgacgg

SEQ ID NO: 977365 - RNA, 19 nt, Artificial Sequence
  Description of Artificial Sequence: Synthetic oligonucleotide
acagggccuaccgacgagg

SEQ ID NO: 977366 - RNA, 19 nt, Artificial Sequence
  Description of Artificial Sequence: Synthetic oligonucleotide
accgacgaggggugggagg

SEQ ID NO: 977367 - RNA, 19 nt, Artificial Sequence
  Description of Artificial Sequence: Synthetic oligonucleotide
cauugguuaccccgccagc

SEQ ID NO: 977368 - RNA, 19 nt, Artificial Sequence
  Description of Artificial Sequence: Synthetic oligonucleotide
gacucaaccuuccgagaga

SEQ ID NO: 977369 - RNA, 19 nt, Artificial Sequence
  Description of Artificial Sequence: Synthetic oligonucleotide
ccaagugguucuuuccucc

SEQ ID NO: 977370 - RNA, 19 nt, Artificial Sequence
  Description of Artificial Sequence: Synthetic oligonucleotide
ggauaaagacucaaccuuc

SEQ ID NO: 977371 - RNA, 19 nt, Artificial Sequence
  Description of Artificial Sequence: Synthetic oligonucleotide
uuugcaccucucagauucu

SEQ ID NO: 977372 - RNA, 19 nt, Artificial Sequence
  Description of Artificial Sequence: Synthetic oligonucleotide
gaacgaagcugguggguga

SEQ ID NO: 977373 - RNA, 19 nt, Artificial Sequence
  Description of Artificial Sequence: Synthetic oligonucleotide
aggagcuguaccuguccug

SEQ ID NO: 977374 - RNA, 19 nt, Artificial Sequence
  Description of Artificial Sequence: Synthetic oligonucleotide
uacucagcucugacagggc

SEQ ID NO: 977375 - RNA, 19 nt, Artificial Sequence
  Description of Artificial Sequence: Synthetic oligonucleotide
accuguccugucaugagug

SEQ ID NO: 977376 - RNA, 19 nt, Artificial Sequence
  Description of Artificial Sequence: Synthetic oligonucleotide
cagauccgaacagggagcc

SEQ ID NO: 977377 - RNA, 19 nt, Artificial Sequence
  Description of Artificial Sequence: Synthetic oligonucleotide
cacaccuccauagcauggc

SEQ ID NO: 977378 - RNA, 19 nt, Artificial Sequence
  Description of Artificial Sequence: Synthetic oligonucleotide
ccuccuauugcacauccug

SEQ ID NO: 977379 - RNA, 19 nt, Artificial Sequence
  Description of Artificial Sequence: Synthetic oligonucleotide
auuuaugauggggccaaaa

SEQ ID NO: 977380 - RNA, 19 nt, Artificial Sequence
  Description of Artificial Sequence: Synthetic oligonucleotide
cugcaggcuaugagagacg

SEQ ID NO: 977381 - RNA, 19 nt, Artificial Sequence
  Description of Artificial Sequence: Synthetic oligonucleotide
aggauccuaggcucaggca

SEQ ID NO: 977382 - RNA, 19 nt, Artificial Sequence
  Description of Artificial Sequence: Synthetic oligonucleotide
gucaucguccuggacaaca

SEQ ID NO: 977383 - RNA, 19 nt, Artificial Sequence
  Description of Artificial Sequence: Synthetic oligonucleotide
agacgacggucaaacacag

SEQ ID NO: 977384 - RNA, 19 nt, Artificial Sequence
  Description of Artificial Sequence: Synthetic oligonucleotide
gcuugggccagggaguugg

SEQ ID NO: 977385 - RNA, 19 nt, Artificial Sequence
  Description of Artificial Sequence: Synthetic oligonucleotide
guccgugacaucagcuggg

SEQ ID NO: 977386 - RNA, 19 nt, Artificial Sequence
  Description of Artificial Sequence: Synthetic oligonucleotide
cuauaaagaugagaaggua

SEQ ID NO: 977387 - RNA, 19 nt, Artificial Sequence
  Description of Artificial Sequence: Synthetic oligonucleotide
gagagaagcuguucacucu

SEQ ID NO: 977388 - RNA, 19 nt, Artificial Sequence
  Description of Artificial Sequence: Synthetic oligonucleotide
cagggccuaccgacgaggg

SEQ ID NO: 977389 - RNA, 19 nt, Artificial Sequence
  Description of Artificial Sequence: Synthetic oligonucleotide
ugcguuucucuguccucug

SEQ ID NO: 977390 - RNA, 19 nt, Artificial Sequence
  Description of Artificial Sequence: Synthetic oligonucleotide
ccagauccgaacagggagc

SEQ ID NO: 977391 - RNA, 19 nt, Artificial Sequence
  Description of Artificial Sequence: Synthetic oligonucleotide
acgguaacucucuucucuu

SEQ ID NO: 977392 - RNA, 19 nt, Artificial Sequence
  Description of Artificial Sequence: Synthetic oligonucleotide
agacucauugaacgugauu

SEQ ID NO: 977393 - RNA, 19 nt, Artificial Sequence
  Description of Artificial Sequence: Synthetic oligonucleotide
gacagggccuaccgacgag

SEQ ID NO: 977394 - RNA, 19 nt, Artificial Sequence
  Description of Artificial Sequence: Synthetic oligonucleotide
uccaggagcuguaccuguc

SEQ ID NO: 977395 - RNA, 19 nt, Artificial Sequence
  Description of Artificial Sequence: Synthetic oligonucleotide
guaacucucuucucuuucu

SEQ ID NO: 977396 - RNA, 19 nt, Artificial Sequence
  Description of Artificial Sequence: Synthetic oligonucleotide
guagaccccaacauccaca

SEQ ID NO: 977397 - RNA, 19 nt, Artificial Sequence
  Description of Artificial Sequence: Synthetic oligonucleotide
cgugauucgugcuccaggc

SEQ ID NO: 977398 - RNA, 19 nt, Artificial Sequence
  Description of Artificial Sequence: Synthetic oligonucleotide
gaccaaaccuccuucugau

SEQ ID NO: 977399 - RNA, 19 nt, Artificial Sequence
  Description of Artificial Sequence: Synthetic oligonucleotide
ggaacgaagcuggugggug

SEQ ID NO: 977400 - RNA, 19 nt, Artificial Sequence
  Description of Artificial Sequence: Synthetic oligonucleotide
agggccuaccgacgagggg

SEQ ID NO: 977401 - RNA, 19 nt, Artificial Sequence
  Description of Artificial Sequence: Synthetic oligonucleotide
ccagaaaacacacauaauu

SEQ ID NO: 977402 - RNA, 19 nt, Artificial Sequence
  Description of Artificial Sequence: Synthetic oligonucleotide
uccuccuauugcacauccu

SEQ ID NO: 977403 - RNA, 19 nt, Artificial Sequence
  Description of Artificial Sequence: Synthetic oligonucleotide
accauugguuaccccgcca

SEQ ID NO: 977404 - RNA, 19 nt, Artificial Sequence
  Description of Artificial Sequence: Synthetic oligonucleotide
gcacauagaguacucagcu

SEQ ID NO: 977405 - RNA, 19 nt, Artificial Sequence
  Description of Artificial Sequence: Synthetic oligonucleotide
gguggauacaugaugagau

SEQ ID NO: 977406 - RNA, 19 nt, Artificial Sequence
  Description of Artificial Sequence: Synthetic oligonucleotide
gggauaaagacucaaccuu

SEQ ID NO: 977407 - RNA, 19 nt, Artificial Sequence
  Description of Artificial Sequence: Synthetic oligonucleotide
agacgcucagcuguugggu

SEQ ID NO: 977408 - RNA, 19 nt, Artificial Sequence
  Description of Artificial Sequence: Synthetic oligonucleotide
ccuaacggagccaaaggca

SEQ ID NO: 977409 - RNA, 19 nt, Artificial Sequence
  Description of Artificial Sequence: Synthetic oligonucleotide
acgguucuuuggugguauc

SEQ ID NO: 977410 - RNA, 19 nt, Artificial Sequence
  Description of Artificial Sequence: Synthetic oligonucleotide
gugguauccugaaggagga

SEQ ID NO: 977411 - RNA, 19 nt, Artificial Sequence
  Description of Artificial Sequence: Synthetic oligonucleotide
uuuagagagucggcuccaa

SEQ ID NO: 977412 - RNA, 19 nt, Artificial Sequence
  Description of Artificial Sequence: Synthetic oligonucleotide
ccauugguuaccccgccag

SEQ ID NO: 977413 - RNA, 19 nt, Artificial Sequence
  Description of Artificial Sequence: Synthetic oligonucleotide
guccaacgguucuuuggug

SEQ ID NO: 977414 - RNA, 19 nt, Artificial Sequence
  Description of Artificial Sequence: Synthetic oligonucleotide
ggcuuuagagagucggcuc

SEQ ID NO: 977415 - RNA, 19 nt, Artificial Sequence
  Description of Artificial Sequence: Synthetic oligonucleotide
aauuuaugauggggccaaa

SEQ ID NO: 977416 - RNA, 19 nt, Artificial Sequence
  Description of Artificial Sequence: Synthetic oligonucleotide
acaucguugacaggagaua

SEQ ID NO: 977417 - RNA, 19 nt, Artificial Sequence
  Description of Artificial Sequence: Synthetic oligonucleotide
guuaccccgccagccagag

SEQ ID NO: 977418 - RNA, 19 nt, Artificial Sequence
  Description of Artificial Sequence: Synthetic oligonucleotide
aucguugacaggagauacu

SEQ ID NO: 977419 - RNA, 19 nt, Artificial Sequence
  Description of Artificial Sequence: Synthetic oligonucleotide
gguagaccccaacauccac

SEQ ID NO: 977420 - RNA, 19 nt, Artificial Sequence
  Description of Artificial Sequence: Synthetic oligonucleotide
guuuuggccuugagagacc

SEQ ID NO: 977421 - RNA, 19 nt, Artificial Sequence
  Description of Artificial Sequence: Synthetic oligonucleotide
cacuguugguauaaagcgu

SEQ ID NO: 977422 - RNA, 19 nt, Artificial Sequence
  Description of Artificial Sequence: Synthetic oligonucleotide
gagagacgacggucaaaca

SEQ ID NO: 977423 - RNA, 19 nt, Artificial Sequence
  Description of Artificial Sequence: Synthetic oligonucleotide
auucuguuccaggacggua

SEQ ID NO: 977424 - RNA, 19 nt, Artificial Sequence
  Description of Artificial Sequence: Synthetic oligonucleotide
cauguggcuugcuccagaa

SEQ ID NO: 977425 - RNA, 19 nt, Artificial Sequence
  Description of Artificial Sequence: Synthetic oligonucleotide
ucuuugcaccucucagauu

SEQ ID NO: 977426 - RNA, 19 nt, Artificial Sequence
  Description of Artificial Sequence: Synthetic oligonucleotide
ucugucugggaggcauaga

SEQ ID NO: 977427 - RNA, 19 nt, Artificial Sequence
  Description of Artificial Sequence: Synthetic oligonucleotide
cacaucguugacaggagau

SEQ ID NO: 977428 - RNA, 19 nt, Artificial Sequence
  Description of Artificial Sequence: Synthetic oligonucleotide
gaacgugauucgugcucca

SEQ ID NO: 977429 - RNA, 19 nt, Artificial Sequence
  Description of Artificial Sequence: Synthetic oligonucleotide
caaugcguuucucuguccu

SEQ ID NO: 977430 - RNA, 19 nt, Artificial Sequence
  Description of Artificial Sequence: Synthetic oligonucleotide
agucggcuccaauugccuu

SEQ ID NO: 977431 - RNA, 19 nt, Artificial Sequence
  Description of Artificial Sequence: Synthetic oligonucleotide
cuuuagagagucggcucca

SEQ ID NO: 977432 - RNA, 19 nt, Artificial Sequence
  Description of Artificial Sequence: Synthetic oligonucleotide
gagauuuacuugagaccaa

SEQ ID NO: 977433 - RNA, 19 nt, Artificial Sequence
  Description of Artificial Sequence: Synthetic oligonucleotide
uggcaugcagugccucaau

SEQ ID NO: 977434 - RNA, 19 nt, Artificial Sequence
  Description of Artificial Sequence: Synthetic oligonucleotide
gguagguccgugacaucag

SEQ ID NO: 977435 - RNA, 19 nt, Artificial Sequence
  Description of Artificial Sequence: Synthetic oligonucleotide
ggcuuugaugggcaaagcu

SEQ ID NO: 977436 - RNA, 19 nt, Artificial Sequence
  Description of Artificial Sequence: Synthetic oligonucleotide
cagugccucaaugcguuuc

SEQ ID NO: 977437 - RNA, 19 nt, Artificial Sequence
  Description of Artificial Sequence: Synthetic oligonucleotide
cuugggccagggaguuggc

SEQ ID NO: 977438 - RNA, 19 nt, Artificial Sequence
  Description of Artificial Sequence: Synthetic oligonucleotide
guccuuucgcuugggccag

SEQ ID NO: 977439 - RNA, 19 nt, Artificial Sequence
  Description of Artificial Sequence: Synthetic oligonucleotide
uaccgacgaggggugggag

SEQ ID NO: 977440 - RNA, 19 nt, Artificial Sequence
  Description of Artificial Sequence: Synthetic oligonucleotide
cauagaugcgauccaggau

SEQ ID NO: 977441 - RNA, 19 nt, Artificial Sequence
  Description of Artificial Sequence: Synthetic oligonucleotide
guggcacuauaaagaugag

SEQ ID NO: 977442 - RNA, 19 nt, Artificial Sequence
  Description of Artificial Sequence: Synthetic oligonucleotide
ggagagacucauugaacgu

SEQ ID NO: 977443 - RNA, 19 nt, Artificial Sequence
  Description of Artificial Sequence: Synthetic oligonucleotide
ccgagagagaagcuguuca

SEQ ID NO: 977444 - RNA, 19 nt, Artificial Sequence
  Description of Artificial Sequence: Synthetic oligonucleotide
uccagacgcucagcuguug

SEQ ID NO: 977445 - RNA, 19 nt, Artificial Sequence
  Description of Artificial Sequence: Synthetic oligonucleotide
agucaucguccuggacaac

SEQ ID NO: 977446 - RNA, 19 nt, Artificial Sequence
  Description of Artificial Sequence: Synthetic oligonucleotide
gcgggcuuccucuuugcac

SEQ ID NO: 977447 - RNA, 19 nt, Artificial Sequence
  Description of Artificial Sequence: Synthetic oligonucleotide
caucguccuggacaacaga

SEQ ID NO: 977448 - RNA, 19 nt, Artificial Sequence
  Description of Artificial Sequence: Synthetic oligonucleotide
ugcgugucacacagcucuu

SEQ ID NO: 977449 - RNA, 19 nt, Artificial Sequence
  Description of Artificial Sequence: Synthetic oligonucleotide
cucauugaacgugauucgu

SEQ ID NO: 977450 - RNA, 19 nt, Artificial Sequence
  Description of Artificial Sequence: Synthetic oligonucleotide
gagcuguaccuguccuguc

SEQ ID NO: 977451 - RNA, 19 nt, Artificial Sequence
  Description of Artificial Sequence: Synthetic oligonucleotide
uccuucugauauggacagu

SEQ ID NO: 977452 - RNA, 19 nt, Artificial Sequence
  Description of Artificial Sequence: Synthetic oligonucleotide
ggauacaugaugagaugcu

SEQ ID NO: 977453 - RNA, 19 nt, Artificial Sequence
  Description of Artificial Sequence: Synthetic oligonucleotide
uggcuggaacgaagcuggu

SEQ ID NO: 977454 - RNA, 19 nt, Artificial Sequence
  Description of Artificial Sequence: Synthetic oligonucleotide
ucggcuccaauugccuuuu

SEQ ID NO: 977455 - RNA, 19 nt, Artificial Sequence
  Description of Artificial Sequence: Synthetic oligonucleotide
auccugcgugucacacagc

SEQ ID NO: 977456 - RNA, 19 nt, Artificial Sequence
  Description of Artificial Sequence: Synthetic oligonucleotide
gucggggagguccaacggu

SEQ ID NO: 977457 - RNA, 19 nt, Artificial Sequence
  Description of Artificial Sequence: Synthetic oligonucleotide
uugcaccucucagauucuu

SEQ ID NO: 977458 - RNA, 19 nt, Artificial Sequence
  Description of Artificial Sequence: Synthetic oligonucleotide
uuaccccgccagccagagu

SEQ ID NO: 977459 - RNA, 19 nt, Artificial Sequence
  Description of Artificial Sequence: Synthetic oligonucleotide
uccuuucgcuugggccagg

SEQ ID NO: 977460 - RNA, 19 nt, Artificial Sequence
  Description of Artificial Sequence: Synthetic oligonucleotide
cacgcugccaucugagcau

SEQ ID NO: 977461 - RNA, 19 nt, Artificial Sequence
  Description of Artificial Sequence: Synthetic oligonucleotide
ccgcuuucuccacugugac

SEQ ID NO: 977462 - RNA, 19 nt, Artificial Sequence
  Description of Artificial Sequence: Synthetic oligonucleotide
cuguuugccaaagcugagu

SEQ ID NO: 977463 - RNA, 19 nt, Artificial Sequence
  Description of Artificial Sequence: Synthetic oligonucleotide
ggagcuguaccuguccugu

SEQ ID NO: 977464 - RNA, 19 nt, Artificial Sequence
  Description of Artificial Sequence: Synthetic oligonucleotide
gugauucgugcuccaggcu

SEQ ID NO: 977465 - RNA, 19 nt, Artificial Sequence
  Description of Artificial Sequence: Synthetic oligonucleotide
cuuucgcuugggccaggga

SEQ ID NO: 977466 - RNA, 19 nt, Artificial Sequence
  Description of Artificial Sequence: Synthetic oligonucleotide
ucgcuugggccagggaguu

SEQ ID NO: 977467 - RNA, 19 nt, Artificial Sequence
  Description of Artificial Sequence: Synthetic oligonucleotide
ccuaccgacgagggguggg

SEQ ID NO: 977468 - RNA, 19 nt, Artificial Sequence
  Description of Artificial Sequence: Synthetic oligonucleotide
gagauccaggagucaucgu

SEQ ID NO: 977469 - RNA, 19 nt, Artificial Sequence
  Description of Artificial Sequence: Synthetic oligonucleotide
gagucggcuccaauugccu

SEQ ID NO: 977470 - RNA, 19 nt, Artificial Sequence
  Description of Artificial Sequence: Synthetic oligonucleotide
gucggcuccaauugccuuu

SEQ ID NO: 977471 - RNA, 19 nt, Artificial Sequence
  Description of Artificial Sequence: Synthetic oligonucleotide
cuaccgacgagggguggga

SEQ ID NO: 977472 - RNA, 19 nt, Artificial Sequence
  Description of Artificial Sequence: Synthetic oligonucleotide
gggccuaccgacgaggggu

SEQ ID NO: 977473 - RNA, 19 nt, Artificial Sequence
  Description of Artificial Sequence: Synthetic oligonucleotide
ggcuaugagagacgacggu

SEQ ID NO: 977474 - RNA, 19 nt, Artificial Sequence
  Description of Artificial Sequence: Synthetic oligonucleotide
gggugaagacaaaccuaac

SEQ ID NO: 977475 - RNA, 19 nt, Artificial Sequence
  Description of Artificial Sequence: Synthetic oligonucleotide
accuuccgagagagaagcu

SEQ ID NO: 977476 - RNA, 19 nt, Artificial Sequence
  Description of Artificial Sequence: Synthetic oligonucleotide
uccuaggcucaggcacacu

SEQ ID NO: 977477 - RNA, 19 nt, Artificial Sequence
  Description of Artificial Sequence: Synthetic oligonucleotide
ccuuucgcuugggccaggg

SEQ ID NO: 977478 - RNA, 19 nt, Artificial Sequence
  Description of Artificial Sequence: Synthetic oligonucleotide
gcgugucacacagcucuug

SEQ ID NO: 977479 - RNA, 19 nt, Artificial Sequence
  Description of Artificial Sequence: Synthetic oligonucleotide
ccuauugcacauccuggcu

SEQ ID NO: 977480 - RNA, 19 nt, Artificial Sequence
  Description of Artificial Sequence: Synthetic oligonucleotide
gugccucaaugcguuucuc

SEQ ID NO: 977481 - RNA, 19 nt, Artificial Sequence
  Description of Artificial Sequence: Synthetic oligonucleotide
cauucuguuccaggacggu

SEQ ID NO: 977482 - RNA, 19 nt, Artificial Sequence
  Description of Artificial Sequence: Synthetic oligonucleotide
ccacaucguugacaggaga

SEQ ID NO: 977483 - RNA, 19 nt, Artificial Sequence
  Description of Artificial Sequence: Synthetic oligonucleotide
ggggcagugcaaagagauc

SEQ ID NO: 977484 - RNA, 19 nt, Artificial Sequence
  Description of Artificial Sequence: Synthetic oligonucleotide
ggccuaccgacgaggggug

SEQ ID NO: 977485 - RNA, 19 nt, Artificial Sequence
  Description of Artificial Sequence: Synthetic oligonucleotide
caccuccauagcauggcuu

SEQ ID NO: 977486 - RNA, 19 nt, Artificial Sequence
  Description of Artificial Sequence: Synthetic oligonucleotide
caacgguucuuugguggua

SEQ ID NO: 977487 - RNA, 19 nt, Artificial Sequence
  Description of Artificial Sequence: Synthetic oligonucleotide
ccggcgggcuuccucuuug

SEQ ID NO: 977488 - RNA, 19 nt, Artificial Sequence
  Description of Artificial Sequence: Synthetic oligonucleotide
ccaacgguucuuugguggu

SEQ ID NO: 977489 - RNA, 19 nt, Artificial Sequence
  Description of Artificial Sequence: Synthetic oligonucleotide
gaccuccccucuccugccu

SEQ ID NO: 977490 - RNA, 19 nt, Artificial Sequence
  Description of Artificial Sequence: Synthetic oligonucleotide
gguuaccccgccagccaga

SEQ ID NO: 977491 - RNA, 19 nt, Artificial Sequence
  Description of Artificial Sequence: Synthetic oligonucleotide
cugcccugagugguggaua

SEQ ID NO: 977492 - RNA, 19 nt, Artificial Sequence
  Description of Artificial Sequence: Synthetic oligonucleotide
gcaggcuaugagagacgac

SEQ ID NO: 977493 - RNA, 19 nt, Artificial Sequence
  Description of Artificial Sequence: Synthetic oligonucleotide
ccgacgaggggugggagga

SEQ ID NO: 977494 - RNA, 19 nt, Artificial Sequence
  Description of Artificial Sequence: Synthetic oligonucleotide
ggcacacuguugguauaaa

SEQ ID NO: 977495 - RNA, 19 nt, Artificial Sequence
  Description of Artificial Sequence: Synthetic oligonucleotide
gccuaccgacgaggggugg

SEQ ID NO: 977496 - RNA, 19 nt, Artificial Sequence
  Description of Artificial Sequence: Synthetic oligonucleotide
ggguugucggggaggucca

SEQ ID NO: 977497 - RNA, 19 nt, Artificial Sequence
  Description of Artificial Sequence: Synthetic oligonucleotide
ggcuggcuuugaugggcaa

SEQ ID NO: 977498 - RNA, 19 nt, Artificial Sequence
  Description of Artificial Sequence: Synthetic oligonucleotide
cggggagguccaacgguuc

SEQ ID NO: 977499 - RNA, 19 nt, Artificial Sequence
  Description of Artificial Sequence: Synthetic oligonucleotide
gcgauccaggaugccuuga

SEQ ID NO: 977500 - RNA, 19 nt, Artificial Sequence
  Description of Artificial Sequence: Synthetic oligonucleotide
ggcaugcccggcgggcuuc

SEQ ID NO: 977501 - RNA, 19 nt, Artificial Sequence
  Description of Artificial Sequence: Synthetic oligonucleotide
cggcgggcuuccucuuugc

SEQ ID NO: 977502 - RNA, 19 nt, Artificial Sequence
  Description of Artificial Sequence: Synthetic oligonucleotide
gcaugcccggcgggcuucc

SEQ ID NO: 977503 - RNA, 19 nt, Artificial Sequence
  Description of Artificial Sequence: Synthetic oligonucleotide
gcccugagugguggauaca

SEQ ID NO: 977504 - RNA, 19 nt, Artificial Sequence
  Description of Artificial Sequence: Synthetic oligonucleotide
cguugacaggagauacuuu

SEQ ID NO: 977505 - RNA, 19 nt, Artificial Sequence
  Description of Artificial Sequence: Synthetic oligonucleotide
cuguuacaugaggguccuu

SEQ ID NO: 977506 - RNA, 19 nt, Artificial Sequence
  Description of Artificial Sequence: Synthetic oligonucleotide
ccaggacgguaacucucuu

SEQ ID NO: 977507 - RNA, 19 nt, Artificial Sequence
  Description of Artificial Sequence: Synthetic oligonucleotide
caugcccggcgggcuuccu

SEQ ID NO: 977508 - RNA, 19 nt, Artificial Sequence
  Description of Artificial Sequence: Synthetic oligonucleotide
cccggcgggcuuccucuuu

SEQ ID NO: 977509 - RNA, 19 nt, Artificial Sequence
  Description of Artificial Sequence: Synthetic oligonucleotide
ugagaaugaccucagagag

SEQ ID NO: 977510 - RNA, 19 nt, Artificial Sequence
  Description of Artificial Sequence: Synthetic oligonucleotide
ucuagaaaggccuucacgc

SEQ ID NO: 977511 - RNA, 19 nt, Artificial Sequence
  Description of Artificial Sequence: Synthetic oligonucleotide
uaauacagcgcucagcaag

SEQ ID NO: 977512 - RNA, 19 nt, Artificial Sequence
  Description of Artificial Sequence: Synthetic oligonucleotide
aagauugaggcgcagcgag

SEQ ID NO: 977513 - RNA, 19 nt, Artificial Sequence
  Description of Artificial Sequence: Synthetic oligonucleotide
cuguagauaaguugggugg

SEQ ID NO: 977514 - RNA, 19 nt, Artificial Sequence
  Description of Artificial Sequence: Synthetic oligonucleotide
ucuguaaugugcuccgugg

SEQ ID NO: 977515 - RNA, 19 nt, Artificial Sequence
  Description of Artificial Sequence: Synthetic oligonucleotide
cugacuuucggccacaggc

SEQ ID NO: 977516 - RNA, 19 nt, Artificial Sequence
  Description of Artificial Sequence: Synthetic oligonucleotide
agugucuccgaccugcagc

SEQ ID NO: 977517 - RNA, 19 nt, Artificial Sequence
  Description of Artificial Sequence: Synthetic oligonucleotide
gaugaugcuauccuuggug

SEQ ID NO: 977518 - RNA, 19 nt, Artificial Sequence
  Description of Artificial Sequence: Synthetic oligonucleotide
ucuguagauaaguugggug

SEQ ID NO: 977519 - RNA, 19 nt, Artificial Sequence
  Description of Artificial Sequence: Synthetic oligonucleotide
uaagcuagggcacuggccu

SEQ ID NO: 977520 - RNA, 19 nt, Artificial Sequence
  Description of Artificial Sequence: Synthetic oligonucleotide
agccacagcauccagucgc

SEQ ID NO: 977521 - RNA, 19 nt, Artificial Sequence
  Description of Artificial Sequence: Synthetic oligonucleotide
guaagauugaggcgcagcg

SEQ ID NO: 977522 - RNA, 19 nt, Artificial Sequence
  Description of Artificial Sequence: Synthetic oligonucleotide
gaggccacgagucaagagg

SEQ ID NO: 977523 - RNA, 19 nt, Artificial Sequence
  Description of Artificial Sequence: Synthetic oligonucleotide
acgcuuaggucccagagac

SEQ ID NO: 977524 - RNA, 19 nt, Artificial Sequence
  Description of Artificial Sequence: Synthetic oligonucleotide
ugcuguaagauugaggcgc

SEQ ID NO: 977525 - RNA, 19 nt, Artificial Sequence
  Description of Artificial Sequence: Synthetic oligonucleotide
aagaucuguguccucguag

SEQ ID NO: 977526 - RNA, 19 nt, Artificial Sequence
  Description of Artificial Sequence: Synthetic oligonucleotide
aagacggccuaaucgcccc

SEQ ID NO: 977527 - RNA, 19 nt, Artificial Sequence
  Description of Artificial Sequence: Synthetic oligonucleotide
uagccuguugaucucagag

SEQ ID NO: 977528 - RNA, 19 nt, Artificial Sequence
  Description of Artificial Sequence: Synthetic oligonucleotide
cucaagacggccuaaucgc

SEQ ID NO: 977529 - RNA, 19 nt, Artificial Sequence
  Description of Artificial Sequence: Synthetic oligonucleotide
uguaaugugcuccguggcc

SEQ ID NO: 977530 - RNA, 19 nt, Artificial Sequence
  Description of Artificial Sequence: Synthetic oligonucleotide
acucucuguaaugugcucc

SEQ ID NO: 977531 - RNA, 19 nt, Artificial Sequence
  Description of Artificial Sequence: Synthetic oligonucleotide
cuguucaagaucugugucc

SEQ ID NO: 977532 - RNA, 19 nt, Artificial Sequence
  Description of Artificial Sequence: Synthetic oligonucleotide
uccuguuguagccuguuga

SEQ ID NO: 977533 - RNA, 19 nt, Artificial Sequence
  Description of Artificial Sequence: Synthetic oligonucleotide
gucuagaaaggccuucacg

SEQ ID NO: 977534 - RNA, 19 nt, Artificial Sequence
  Description of Artificial Sequence: Synthetic oligonucleotide
aggagcaacguuccacacc

SEQ ID NO: 977535 - RNA, 19 nt, Artificial Sequence
  Description of Artificial Sequence: Synthetic oligonucleotide
uagauaaguuggguggucg

SEQ ID NO: 977536 - RNA, 19 nt, Artificial Sequence
  Description of Artificial Sequence: Synthetic oligonucleotide
accaaacacacugaagccg

SEQ ID NO: 977537 - RNA, 19 nt, Artificial Sequence
  Description of Artificial Sequence: Synthetic oligonucleotide
gaagguuccucuuccgcag

SEQ ID NO: 977538 - RNA, 19 nt, Artificial Sequence
  Description of Artificial Sequence: Synthetic oligonucleotide
aggaguggcccucuggacg

SEQ ID NO: 977539 - RNA, 19 nt, Artificial Sequence
  Description of Artificial Sequence: Synthetic oligonucleotide
ucuaagcuagggcacuggc

SEQ ID NO: 977540 - RNA, 19 nt, Artificial Sequence
  Description of Artificial Sequence: Synthetic oligonucleotide
agcaggacccugucgaagg

SEQ ID NO: 977541 - RNA, 19 nt, Artificial Sequence
  Description of Artificial Sequence: Synthetic oligonucleotide
cuucacgcaagccuuguag

SEQ ID NO: 977542 - RNA, 19 nt, Artificial Sequence
  Description of Artificial Sequence: Synthetic oligonucleotide
acgcaagccuuguaguccc

SEQ ID NO: 977543 - RNA, 19 nt, Artificial Sequence
  Description of Artificial Sequence: Synthetic oligonucleotide
acgagucaagaggagacgc

SEQ ID NO: 977544 - RNA, 19 nt, Artificial Sequence
  Description of Artificial Sequence: Synthetic oligonucleotide
aaugccacucuaggcacgg

SEQ ID NO: 977545 - RNA, 19 nt, Artificial Sequence
  Description of Artificial Sequence: Synthetic oligonucleotide
gcuaaacugcugcagacgg

SEQ ID NO: 977546 - RNA, 19 nt, Artificial Sequence
  Description of Artificial Sequence: Synthetic oligonucleotide
uguucaagaucuguguccu

SEQ ID NO: 977547 - RNA, 19 nt, Artificial Sequence
  Description of Artificial Sequence: Synthetic oligonucleotide
ucaagacggccuaaucgcc

SEQ ID NO: 977548 - RNA, 19 nt, Artificial Sequence
  Description of Artificial Sequence: Synthetic oligonucleotide
cuaagcuagggcacuggcc

SEQ ID NO: 977549 - RNA, 19 nt, Artificial Sequence
  Description of Artificial Sequence: Synthetic oligonucleotide
acgaagugaggaguggccc

SEQ ID NO: 977550 - RNA, 19 nt, Artificial Sequence
  Description of Artificial Sequence: Synthetic oligonucleotide
aaaggccuucacgcaagcc

SEQ ID NO: 977551 - RNA, 19 nt, Artificial Sequence
  Description of Artificial Sequence: Synthetic oligonucleotide
uguaagauugaggcgcagc

SEQ ID NO: 977552 - RNA, 19 nt, Artificial Sequence
  Description of Artificial Sequence: Synthetic oligonucleotide
gauugaggcgcagcgagag

SEQ ID NO: 977553 - RNA, 19 nt, Artificial Sequence
  Description of Artificial Sequence: Synthetic oligonucleotide
agaucuguguccucguaga

SEQ ID NO: 977554 - RNA, 19 nt, Artificial Sequence
  Description of Artificial Sequence: Synthetic oligonucleotide
aagccgucugcccaggccu

SEQ ID NO: 977555 - RNA, 19 nt, Artificial Sequence
  Description of Artificial Sequence: Synthetic oligonucleotide
agacgcuuaggucccagag

SEQ ID NO: 977556 - RNA, 19 nt, Artificial Sequence
  Description of Artificial Sequence: Synthetic oligonucleotide
cacagacucccucaagacg

SEQ ID NO: 977557 - RNA, 19 nt, Artificial Sequence
  Description of Artificial Sequence: Synthetic oligonucleotide
uuggagucccuccaacaug

SEQ ID NO: 977558 - RNA, 19 nt, Artificial Sequence
  Description of Artificial Sequence: Synthetic oligonucleotide
gugucuccgaccugcagcg

SEQ ID NO: 977559 - RNA, 19 nt, Artificial Sequence
  Description of Artificial Sequence: Synthetic oligonucleotide
aaguuggguggucgggccg

SEQ ID NO: 977560 - RNA, 19 nt, Artificial Sequence
  Description of Artificial Sequence: Synthetic oligonucleotide
cugaaggugagaaugaccu

SEQ ID NO: 977561 - RNA, 19 nt, Artificial Sequence
  Description of Artificial Sequence: Synthetic oligonucleotide
ugcccaguuaauacagcgc

SEQ ID NO: 977562 - RNA, 19 nt, Artificial Sequence
  Description of Artificial Sequence: Synthetic oligonucleotide
agucccuccggcucauagc

SEQ ID NO: 977563 - RNA, 19 nt, Artificial Sequence
  Description of Artificial Sequence: Synthetic oligonucleotide
ucgaaggggacugugccag

SEQ ID NO: 977564 - RNA, 19 nt, Artificial Sequence
  Description of Artificial Sequence: Synthetic oligonucleotide
agagaugaugcuauccuug

SEQ ID NO: 977565 - RNA, 19 nt, Artificial Sequence
  Description of Artificial Sequence: Synthetic oligonucleotide
acugugccagguuccgacc

SEQ ID NO: 977566 - RNA, 19 nt, Artificial Sequence
  Description of Artificial Sequence: Synthetic oligonucleotide
uugcuuucccguagugccg

SEQ ID NO: 977567 - RNA, 19 nt, Artificial Sequence
  Description of Artificial Sequence: Synthetic oligonucleotide
uucacgcaagccuuguagu

SEQ ID NO: 977568 - RNA, 19 nt, Artificial Sequence
  Description of Artificial Sequence: Synthetic oligonucleotide
acucccagagcgccggggc

SEQ ID NO: 977569 - RNA, 19 nt, Artificial Sequence
  Description of Artificial Sequence: Synthetic oligonucleotide
cagacggucuuccaagagc

SEQ ID NO: 977570 - RNA, 19 nt, Artificial Sequence
  Description of Artificial Sequence: Synthetic oligonucleotide
gucuaugcgggccacgccc

SEQ ID NO: 977571 - RNA, 19 nt, Artificial Sequence
  Description of Artificial Sequence: Synthetic oligonucleotide
ugagcggcuccuccgagug

SEQ ID NO: 977572 - RNA, 19 nt, Artificial Sequence
  Description of Artificial Sequence: Synthetic oligonucleotide
uaaguuggguggucgggcc

SEQ ID NO: 977573 - RNA, 19 nt, Artificial Sequence
  Description of Artificial Sequence: Synthetic oligonucleotide
uguagauaaguuggguggu

SEQ ID NO: 977574 - RNA, 19 nt, Artificial Sequence
  Description of Artificial Sequence: Synthetic oligonucleotide
ugcuguugcuuucccguag

SEQ ID NO: 977575 - RNA, 19 nt, Artificial Sequence
  Description of Artificial Sequence: Synthetic oligonucleotide
agcggugcggugaauacac

SEQ ID NO: 977576 - RNA, 19 nt, Artificial Sequence
  Description of Artificial Sequence: Synthetic oligonucleotide
aaucgccccucuaagcuag

SEQ ID NO: 977577 - RNA, 19 nt, Artificial Sequence
  Description of Artificial Sequence: Synthetic oligonucleotide
ucuacgccuguucaagauc

SEQ ID NO: 977578 - RNA, 19 nt, Artificial Sequence
  Description of Artificial Sequence: Synthetic oligonucleotide
caacguuccacaccauccc

SEQ ID NO: 977579 - RNA, 19 nt, Artificial Sequence
  Description of Artificial Sequence: Synthetic oligonucleotide
ugaugcuauccuugguggc

SEQ ID NO: 977580 - RNA, 19 nt, Artificial Sequence
  Description of Artificial Sequence: Synthetic oligonucleotide
cguagugccgcccagagcc

SEQ ID NO: 977581 - RNA, 19 nt, Artificial Sequence
  Description of Artificial Sequence: Synthetic oligonucleotide
auugaggcgcagcgagagc

SEQ ID NO: 977582 - RNA, 19 nt, Artificial Sequence
  Description of Artificial Sequence: Synthetic oligonucleotide
gauccagguggcucugcgg

SEQ ID NO: 977583 - RNA, 19 nt, Artificial Sequence
  Description of Artificial Sequence: Synthetic oligonucleotide
ucaagaggagacgcuuagg

SEQ ID NO: 977584 - RNA, 19 nt, Artificial Sequence
  Description of Artificial Sequence: Synthetic oligonucleotide
agucuaugcgggccacgcc

SEQ ID NO: 977585 - RNA, 19 nt, Artificial Sequence
  Description of Artificial Sequence: Synthetic oligonucleotide
cacgaagugaggaguggcc

SEQ ID NO: 977586 - RNA, 19 nt, Artificial Sequence
  Description of Artificial Sequence: Synthetic oligonucleotide
cacaguagucuggagcucg

SEQ ID NO: 977587 - RNA, 19 nt, Artificial Sequence
  Description of Artificial Sequence: Synthetic oligonucleotide
ccucaagacggccuaaucg

SEQ ID NO: 977588 - RNA, 19 nt, Artificial Sequence
  Description of Artificial Sequence: Synthetic oligonucleotide
caagacggccuaaucgccc

SEQ ID NO: 977589 - RNA, 19 nt, Artificial Sequence
  Description of Artificial Sequence: Synthetic oligonucleotide
ggagcaacguuccacacca

SEQ ID NO: 977590 - RNA, 19 nt, Artificial Sequence
  Description of Artificial Sequence: Synthetic oligonucleotide
aacuuugugcaagccugag

SEQ ID NO: 977591 - RNA, 19 nt, Artificial Sequence
  Description of Artificial Sequence: Synthetic oligonucleotide
ucggcuugguccuccaaca

SEQ ID NO: 977592 - RNA, 19 nt, Artificial Sequence
  Description of Artificial Sequence: Synthetic oligonucleotide
cugugcuaggcccucuucc

SEQ ID NO: 977593 - RNA, 19 nt, Artificial Sequence
  Description of Artificial Sequence: Synthetic oligonucleotide
cuguaaugugcuccguggc

SEQ ID NO: 977594 - RNA, 19 nt, Artificial Sequence
  Description of Artificial Sequence: Synthetic oligonucleotide
uggguggucgggccgaccc

SEQ ID NO: 977595 - RNA, 19 nt, Artificial Sequence
  Description of Artificial Sequence: Synthetic oligonucleotide
cagagaguucuccuugaag

SEQ ID NO: 977596 - RNA, 19 nt, Artificial Sequence
  Description of Artificial Sequence: Synthetic oligonucleotide
aaaugccacucuaggcacg

SEQ ID NO: 977597 - RNA, 19 nt, Artificial Sequence
  Description of Artificial Sequence: Synthetic oligonucleotide
auagugggcaggagcaacg

SEQ ID NO: 977598 - RNA, 19 nt, Artificial Sequence
  Description of Artificial Sequence: Synthetic oligonucleotide
ucucugggucauaguagcc

SEQ ID NO: 977599 - RNA, 19 nt, Artificial Sequence
  Description of Artificial Sequence: Synthetic oligonucleotide
agcgcgacagcaccgccuc

SEQ ID NO: 977600 - RNA, 19 nt, Artificial Sequence
  Description of Artificial Sequence: Synthetic oligonucleotide
uuucccguagugccgccca

SEQ ID NO: 977601 - RNA, 19 nt, Artificial Sequence
  Description of Artificial Sequence: Synthetic oligonucleotide
agagaccacgaagugagga

SEQ ID NO: 977602 - RNA, 19 nt, Artificial Sequence
  Description of Artificial Sequence: Synthetic oligonucleotide
caucccuuggagucccucc

SEQ ID NO: 977603 - RNA, 19 nt, Artificial Sequence
  Description of Artificial Sequence: Synthetic oligonucleotide
ucacgcaagccuuguaguc

SEQ ID NO: 977604 - RNA, 19 nt, Artificial Sequence
  Description of Artificial Sequence: Synthetic oligonucleotide
cucuguaaugugcuccgug

SEQ ID NO: 977605 - RNA, 19 nt, Artificial Sequence
  Description of Artificial Sequence: Synthetic oligonucleotide
ucuaugcgggccacgccca

SEQ ID NO: 977606 - RNA, 19 nt, Artificial Sequence
  Description of Artificial Sequence: Synthetic oligonucleotide
cacgcaagccuuguagucc

SEQ ID NO: 977607 - RNA, 19 nt, Artificial Sequence
  Description of Artificial Sequence: Synthetic oligonucleotide
gcagcgagagcucugcugc

SEQ ID NO: 977608 - RNA, 19 nt, Artificial Sequence
  Description of Artificial Sequence: Synthetic oligonucleotide
cuugaggcccugguggucc

SEQ ID NO: 977609 - RNA, 19 nt, Artificial Sequence
  Description of Artificial Sequence: Synthetic oligonucleotide
ugucuacgccuguucaaga

SEQ ID NO: 977610 - RNA, 19 nt, Artificial Sequence
  Description of Artificial Sequence: Synthetic oligonucleotide
cugucuacgccuguucaag

SEQ ID NO: 977611 - RNA, 19 nt, Artificial Sequence
  Description of Artificial Sequence: Synthetic oligonucleotide
agaaaggccuucacgcaag

SEQ ID NO: 977612 - RNA, 19 nt, Artificial Sequence
  Description of Artificial Sequence: Synthetic oligonucleotide
gacgcuuaggucccagaga

SEQ ID NO: 977613 - RNA, 19 nt, Artificial Sequence
  Description of Artificial Sequence: Synthetic oligonucleotide
cugugccagguuccgaccg

SEQ ID NO: 977614 - RNA, 19 nt, Artificial Sequence
  Description of Artificial Sequence: Synthetic oligonucleotide
uccgaccgaggcaaacuca

SEQ ID NO: 977615 - RNA, 19 nt, Artificial Sequence
  Description of Artificial Sequence: Synthetic oligonucleotide
agccucccgagucuaugcg

SEQ ID NO: 977616 - RNA, 19 nt, Artificial Sequence
  Description of Artificial Sequence: Synthetic oligonucleotide
gagucuaugcgggccacgc

SEQ ID NO: 977617 - RNA, 19 nt, Artificial Sequence
  Description of Artificial Sequence: Synthetic oligonucleotide
agcuagggcacuggccugc

SEQ ID NO: 977618 - RNA, 19 nt, Artificial Sequence
  Description of Artificial Sequence: Synthetic oligonucleotide
agaugaugcuauccuuggu

SEQ ID NO: 977619 - RNA, 19 nt, Artificial Sequence
  Description of Artificial Sequence: Synthetic oligonucleotide
aagcuagggcacuggccug

SEQ ID NO: 977620 - RNA, 19 nt, Artificial Sequence
  Description of Artificial Sequence: Synthetic oligonucleotide
gugaggaguggcccucugg

SEQ ID NO: 977621 - RNA, 19 nt, Artificial Sequence
  Description of Artificial Sequence: Synthetic oligonucleotide
gaggagacgcuuagguccc

SEQ ID NO: 977622 - RNA, 19 nt, Artificial Sequence
  Description of Artificial Sequence: Synthetic oligonucleotide
cucuggacgccugagccgc

SEQ ID NO: 977623 - RNA, 19 nt, Artificial Sequence
  Description of Artificial Sequence: Synthetic oligonucleotide
gcaacguuccacaccaucc

SEQ ID NO: 977624 - RNA, 19 nt, Artificial Sequence
  Description of Artificial Sequence: Synthetic oligonucleotide
caggcuuguuuuccagucc

SEQ ID NO: 977625 - RNA, 19 nt, Artificial Sequence
  Description of Artificial Sequence: Synthetic oligonucleotide
ucuccgaccugcagcggca

SEQ ID NO: 977626 - RNA, 19 nt, Artificial Sequence
  Description of Artificial Sequence: Synthetic oligonucleotide
cuaaucgccccucuaagcu

SEQ ID NO: 977627 - RNA, 19 nt, Artificial Sequence
  Description of Artificial Sequence: Synthetic oligonucleotide
uccggagagggcucuggug

SEQ ID NO: 977628 - RNA, 19 nt, Artificial Sequence
  Description of Artificial Sequence: Synthetic oligonucleotide
uaaucgccccucuaagcua

SEQ ID NO: 977629 - RNA, 19 nt, Artificial Sequence
  Description of Artificial Sequence: Synthetic oligonucleotide
ugguccccggccuugcccc

SEQ ID NO: 977630 - RNA, 19 nt, Artificial Sequence
  Description of Artificial Sequence: Synthetic oligonucleotide
acccugucuacgccuguuc

SEQ ID NO: 977631 - RNA, 19 nt, Artificial Sequence
  Description of Artificial Sequence: Synthetic oligonucleotide
cacgagucaagaggagacg

SEQ ID NO: 977632 - RNA, 19 nt, Artificial Sequence
  Description of Artificial Sequence: Synthetic oligonucleotide
ugcuuucccguagugccgc

SEQ ID NO: 977633 - RNA, 19 nt, Artificial Sequence
  Description of Artificial Sequence: Synthetic oligonucleotide
gacgccugagccgcagugg

SEQ ID NO: 977634 - RNA, 19 nt, Artificial Sequence
  Description of Artificial Sequence: Synthetic oligonucleotide
caggucgaugcagacagug

SEQ ID NO: 977635 - RNA, 19 nt, Artificial Sequence
  Description of Artificial Sequence: Synthetic oligonucleotide
ccggagagggcucuggugg

SEQ ID NO: 977636 - RNA, 19 nt, Artificial Sequence
  Description of Artificial Sequence: Synthetic oligonucleotide
aguagcggcccgccagcgg

SEQ ID NO: 977637 - RNA, 19 nt, Artificial Sequence
  Description of Artificial Sequence: Synthetic oligonucleotide
cucgccguggucgggagcc

SEQ ID NO: 977638 - RNA, 19 nt, Artificial Sequence
  Description of Artificial Sequence: Synthetic oligonucleotide
cagucgcucacagacuccc

SEQ ID NO: 977639 - RNA, 19 nt, Artificial Sequence
  Description of Artificial Sequence: Synthetic oligonucleotide
ugaagccguccagaggccc

SEQ ID NO: 977640 - RNA, 19 nt, Artificial Sequence
  Description of Artificial Sequence: Synthetic oligonucleotide
ggcuaaacugcugcagacg

SEQ ID NO: 977641 - RNA, 19 nt, Artificial Sequence
  Description of Artificial Sequence: Synthetic oligonucleotide
ugccagguuccgaccgagg

SEQ ID NO: 977642 - RNA, 19 nt, Artificial Sequence
  Description of Artificial Sequence: Synthetic oligonucleotide
gagugugccagcugcccca

SEQ ID NO: 977643 - RNA, 19 nt, Artificial Sequence
  Description of Artificial Sequence: Synthetic oligonucleotide
ugggucauaguagccucca

SEQ ID NO: 977644 - RNA, 19 nt, Artificial Sequence
  Description of Artificial Sequence: Synthetic oligonucleotide
gcuuaggucccagagacca

SEQ ID NO: 977645 - RNA, 19 nt, Artificial Sequence
  Description of Artificial Sequence: Synthetic oligonucleotide
agcacccuggcccuccaca

SEQ ID NO: 977646 - RNA, 19 nt, Artificial Sequence
  Description of Artificial Sequence: Synthetic oligonucleotide
ccuaaucgccccucuaagc

SEQ ID NO: 977647 - RNA, 19 nt, Artificial Sequence
  Description of Artificial Sequence: Synthetic oligonucleotide
ggcucugcggccucuguag

SEQ ID NO: 977648 - RNA, 19 nt, Artificial Sequence
  Description of Artificial Sequence: Synthetic oligonucleotide
uggugagcggcuccuccga

SEQ ID NO: 977649 - RNA, 19 nt, Artificial Sequence
  Description of Artificial Sequence: Synthetic oligonucleotide
agacucccucaagacggcc

SEQ ID NO: 977650 - RNA, 19 nt, Artificial Sequence
  Description of Artificial Sequence: Synthetic oligonucleotide
guagagcaaggcuccgcug

SEQ ID NO: 977651 - RNA, 19 nt, Artificial Sequence
  Description of Artificial Sequence: Synthetic oligonucleotide
cuacgccuguucaagaucu

SEQ ID NO: 977652 - RNA, 19 nt, Artificial Sequence
  Description of Artificial Sequence: Synthetic oligonucleotide
ugcggugaauacaccuguc

SEQ ID NO: 977653 - RNA, 19 nt, Artificial Sequence
  Description of Artificial Sequence: Synthetic oligonucleotide
agugaggccacgagucaag

SEQ ID NO: 977654 - RNA, 19 nt, Artificial Sequence
  Description of Artificial Sequence: Synthetic oligonucleotide
uaggucccagagaccacga

SEQ ID NO: 977655 - RNA, 19 nt, Artificial Sequence
  Description of Artificial Sequence: Synthetic oligonucleotide
uggagggccgagccugagc

SEQ ID NO: 977656 - RNA, 19 nt, Artificial Sequence
  Description of Artificial Sequence: Synthetic oligonucleotide
cuuaggucccagagaccac

SEQ ID NO: 977657 - RNA, 19 nt, Artificial Sequence
  Description of Artificial Sequence: Synthetic oligonucleotide
ccacgagucaagaggagac

SEQ ID NO: 977658 - RNA, 19 nt, Artificial Sequence
  Description of Artificial Sequence: Synthetic oligonucleotide
ccucguagagcaaggcucc

SEQ ID NO: 977659 - RNA, 19 nt, Artificial Sequence
  Description of Artificial Sequence: Synthetic oligonucleotide
auagccucccgagucuaug

SEQ ID NO: 977660 - RNA, 19 nt, Artificial Sequence
  Description of Artificial Sequence: Synthetic oligonucleotide
ucguagagcaaggcuccgc

SEQ ID NO: 977661 - RNA, 19 nt, Artificial Sequence
  Description of Artificial Sequence: Synthetic oligonucleotide
accucagagaguucuccuu

SEQ ID NO: 977662 - RNA, 19 nt, Artificial Sequence
  Description of Artificial Sequence: Synthetic oligonucleotide
caugccggugcccaguuaa

SEQ ID NO: 977663 - RNA, 19 nt, Artificial Sequence
  Description of Artificial Sequence: Synthetic oligonucleotide
uggagcucgugcagugagu

SEQ ID NO: 977664 - RNA, 19 nt, Artificial Sequence
  Description of Artificial Sequence: Synthetic oligonucleotide
uacgccuguucaagaucug

SEQ ID NO: 977665 - RNA, 19 nt, Artificial Sequence
  Description of Artificial Sequence: Synthetic oligonucleotide
uuccggagagggcucuggu

SEQ ID NO: 977666 - RNA, 19 nt, Artificial Sequence
  Description of Artificial Sequence: Synthetic oligonucleotide
ucccgagucuaugcgggcc

SEQ ID NO: 977667 - RNA, 19 nt, Artificial Sequence
  Description of Artificial Sequence: Synthetic oligonucleotide
guggucgggagccuugauc

SEQ ID NO: 977668 - RNA, 19 nt, Artificial Sequence
  Description of Artificial Sequence: Synthetic oligonucleotide
cucagagaguucuccuuga

SEQ ID NO: 977669 - RNA, 19 nt, Artificial Sequence
  Description of Artificial Sequence: Synthetic oligonucleotide
cugaagccguccagaggcc

SEQ ID NO: 977670 - RNA, 19 nt, Artificial Sequence
  Description of Artificial Sequence: Synthetic oligonucleotide
gagccuugauccagguggc

SEQ ID NO: 977671 - RNA, 19 nt, Artificial Sequence
  Description of Artificial Sequence: Synthetic oligonucleotide
gccuaaucgccccucuaag

SEQ ID NO: 977672 - RNA, 19 nt, Artificial Sequence
  Description of Artificial Sequence: Synthetic oligonucleotide
gucgcucacagacucccuc

SEQ ID NO: 977673 - RNA, 19 nt, Artificial Sequence
  Description of Artificial Sequence: Synthetic oligonucleotide
cagagaccacgaagugagg

SEQ ID NO: 977674 - RNA, 19 nt, Artificial Sequence
  Description of Artificial Sequence: Synthetic oligonucleotide
guagauaaguugggugguc

SEQ ID NO: 977675 - RNA, 19 nt, Artificial Sequence
  Description of Artificial Sequence: Synthetic oligonucleotide
ggugcggugaauacaccug

SEQ ID NO: 977676 - RNA, 19 nt, Artificial Sequence
  Description of Artificial Sequence: Synthetic oligonucleotide
aggccacgagucaagagga

SEQ ID NO: 977677 - RNA, 19 nt, Artificial Sequence
  Description of Artificial Sequence: Synthetic oligonucleotide
gccgcuccaacuuugugca

SEQ ID NO: 977678 - RNA, 19 nt, Artificial Sequence
  Description of Artificial Sequence: Synthetic oligonucleotide
caccaagccgucugcccag

SEQ ID NO: 977679 - RNA, 19 nt, Artificial Sequence
  Description of Artificial Sequence: Synthetic oligonucleotide
cuguuguagccuguugauc

SEQ ID NO: 977680 - RNA, 19 nt, Artificial Sequence
  Description of Artificial Sequence: Synthetic oligonucleotide
uuccaggccucggaagcgc

SEQ ID NO: 977681 - RNA, 19 nt, Artificial Sequence
  Description of Artificial Sequence: Synthetic oligonucleotide
ucucaugccggugcccagu

SEQ ID NO: 977682 - RNA, 19 nt, Artificial Sequence
  Description of Artificial Sequence: Synthetic oligonucleotide
uggagcgcgacagcaccgc

SEQ ID NO: 977683 - RNA, 19 nt, Artificial Sequence
  Description of Artificial Sequence: Synthetic oligonucleotide
gacucccagagcgccgggg

SEQ ID NO: 977684 - RNA, 19 nt, Artificial Sequence
  Description of Artificial Sequence: Synthetic oligonucleotide
caacuuugugcaagccuga

SEQ ID NO: 977685 - RNA, 19 nt, Artificial Sequence
  Description of Artificial Sequence: Synthetic oligonucleotide
ugaggcgcagcgagagcuc

SEQ ID NO: 977686 - RNA, 19 nt, Artificial Sequence
  Description of Artificial Sequence: Synthetic oligonucleotide
guaaugugcuccguggccu

SEQ ID NO: 977687 - RNA, 19 nt, Artificial Sequence
  Description of Artificial Sequence: Synthetic oligonucleotide
ugcuauccuugguggcccc

SEQ ID NO: 977688 - RNA, 19 nt, Artificial Sequence
  Description of Artificial Sequence: Synthetic oligonucleotide
caggacccugucgaagggg

SEQ ID NO: 977689 - RNA, 19 nt, Artificial Sequence
  Description of Artificial Sequence: Synthetic oligonucleotide
ccgaccgaggcaaacucag

SEQ ID NO: 977690 - RNA, 19 nt, Artificial Sequence
  Description of Artificial Sequence: Synthetic oligonucleotide
agcaaguagcggcccgcca

SEQ ID NO: 977691 - RNA, 19 nt, Artificial Sequence
  Description of Artificial Sequence: Synthetic oligonucleotide
gagacgcuuaggucccaga

SEQ ID NO: 977692 - RNA, 19 nt, Artificial Sequence
  Description of Artificial Sequence: Synthetic oligonucleotide
ucgccccucuaagcuaggg

SEQ ID NO: 977693 - RNA, 19 nt, Artificial Sequence
  Description of Artificial Sequence: Synthetic oligonucleotide
acccugucgaaggggacug

SEQ ID NO: 977694 - RNA, 19 nt, Artificial Sequence
  Description of Artificial Sequence: Synthetic oligonucleotide
gcagacggucuuccaagag

SEQ ID NO: 977695 - RNA, 19 nt, Artificial Sequence
  Description of Artificial Sequence: Synthetic oligonucleotide
agccggagcuggccuucgc

SEQ ID NO: 977696 - RNA, 19 nt, Artificial Sequence
  Description of Artificial Sequence: Synthetic oligonucleotide
gucggccagaucagcaccc

SEQ ID NO: 977697 - RNA, 19 nt, Artificial Sequence
  Description of Artificial Sequence: Synthetic oligonucleotide
gccucccgagucuaugcgg

SEQ ID NO: 977698 - RNA, 19 nt, Artificial Sequence
  Description of Artificial Sequence: Synthetic oligonucleotide
acgccuguucaagaucugu

SEQ ID NO: 977699 - RNA, 19 nt, Artificial Sequence
  Description of Artificial Sequence: Synthetic oligonucleotide
aguuggguggucgggccga

SEQ ID NO: 977700 - RNA, 19 nt, Artificial Sequence
  Description of Artificial Sequence: Synthetic oligonucleotide
ucucuguaaugugcuccgu

SEQ ID NO: 977701 - RNA, 19 nt, Artificial Sequence
  Description of Artificial Sequence: Synthetic oligonucleotide
cucguagagcaaggcuccg

SEQ ID NO: 977702 - RNA, 19 nt, Artificial Sequence
  Description of Artificial Sequence: Synthetic oligonucleotide
acccugcgcuccaaggcac

SEQ ID NO: 977703 - RNA, 19 nt, Artificial Sequence
  Description of Artificial Sequence: Synthetic oligonucleotide
gcacccugcgcuccaaggc

SEQ ID NO: 977704 - RNA, 19 nt, Artificial Sequence
  Description of Artificial Sequence: Synthetic oligonucleotide
cucccgagucuaugcgggc

SEQ ID NO: 977705 - RNA, 19 nt, Artificial Sequence
  Description of Artificial Sequence: Synthetic oligonucleotide
agcgagagcucugcugcug

SEQ ID NO: 977706 - RNA, 19 nt, Artificial Sequence
  Description of Artificial Sequence: Synthetic oligonucleotide
gcccaguuaauacagcgcu

SEQ ID NO: 977707 - RNA, 19 nt, Artificial Sequence
  Description of Artificial Sequence: Synthetic oligonucleotide
caggucggccagaucagca

SEQ ID NO: 977708 - RNA, 19 nt, Artificial Sequence
  Description of Artificial Sequence: Synthetic oligonucleotide
cuggcccuccacaguaguc

SEQ ID NO: 977709 - RNA, 19 nt, Artificial Sequence
  Description of Artificial Sequence: Synthetic oligonucleotide
cuuggagucccuccaacau

SEQ ID NO: 977710 - RNA, 19 nt, Artificial Sequence
  Description of Artificial Sequence: Synthetic oligonucleotide
caccaucccuuggaguccc

SEQ ID NO: 977711 - RNA, 19 nt, Artificial Sequence
  Description of Artificial Sequence: Synthetic oligonucleotide
gcugacuuucggccacagg

SEQ ID NO: 977712 - RNA, 19 nt, Artificial Sequence
  Description of Artificial Sequence: Synthetic oligonucleotide
cagugucuccgaccugcag

SEQ ID NO: 977713 - RNA, 19 nt, Artificial Sequence
  Description of Artificial Sequence: Synthetic oligonucleotide
cacccugcgcuccaaggca

SEQ ID NO: 977714 - RNA, 19 nt, Artificial Sequence
  Description of Artificial Sequence: Synthetic oligonucleotide
cuuagcugggcugcuguaa

SEQ ID NO: 977715 - RNA, 19 nt, Artificial Sequence
  Description of Artificial Sequence: Synthetic oligonucleotide
gccucccucgccguggucg

SEQ ID NO: 977716 - RNA, 19 nt, Artificial Sequence
  Description of Artificial Sequence: Synthetic oligonucleotide
ugucuccgaccugcagcgg

SEQ ID NO: 977717 - RNA, 19 nt, Artificial Sequence
  Description of Artificial Sequence: Synthetic oligonucleotide
ggccccguggagguaauag

SEQ ID NO: 977718 - RNA, 19 nt, Artificial Sequence
  Description of Artificial Sequence: Synthetic oligonucleotide
agacucccagagcgccggg

SEQ ID NO: 977719 - RNA, 19 nt, Artificial Sequence
  Description of Artificial Sequence: Synthetic oligonucleotide
agucaagaggagacgcuua

SEQ ID NO: 977720 - RNA, 19 nt, Artificial Sequence
  Description of Artificial Sequence: Synthetic oligonucleotide
gugcggugaauacaccugu

SEQ ID NO: 977721 - RNA, 19 nt, Artificial Sequence
  Description of Artificial Sequence: Synthetic oligonucleotide
agauugaggcgcagcgaga

SEQ ID NO: 977722 - RNA, 19 nt, Artificial Sequence
  Description of Artificial Sequence: Synthetic oligonucleotide
acggccuaaucgccccucu

SEQ ID NO: 977723 - RNA, 19 nt, Artificial Sequence
  Description of Artificial Sequence: Synthetic oligonucleotide
gaacuguugagggcaccaa

SEQ ID NO: 977724 - RNA, 19 nt, Artificial Sequence
  Description of Artificial Sequence: Synthetic oligonucleotide
agcgcuccucacucucugu

SEQ ID NO: 977725 - RNA, 19 nt, Artificial Sequence
  Description of Artificial Sequence: Synthetic oligonucleotide
guagcggcccgccagcggu

SEQ ID NO: 977726 - RNA, 19 nt, Artificial Sequence
  Description of Artificial Sequence: Synthetic oligonucleotide
cuaugcgggccacgcccag

SEQ ID NO: 977727 - RNA, 19 nt, Artificial Sequence
  Description of Artificial Sequence: Synthetic oligonucleotide
cagcaaguagcggcccgcc

SEQ ID NO: 977728 - RNA, 19 nt, Artificial Sequence
  Description of Artificial Sequence: Synthetic oligonucleotide
ucuggacgccugagccgca

SEQ ID NO: 977729 - RNA, 19 nt, Artificial Sequence
  Description of Artificial Sequence: Synthetic oligonucleotide
ggccuaaucgccccucuaa

SEQ ID NO: 977730 - RNA, 19 nt, Artificial Sequence
  Description of Artificial Sequence: Synthetic oligonucleotide
gagucaagaggagacgcuu

SEQ ID NO: 977731 - RNA, 19 nt, Artificial Sequence
  Description of Artificial Sequence: Synthetic oligonucleotide
agcggcccgccagcggugc

SEQ ID NO: 977732 - RNA, 19 nt, Artificial Sequence
  Description of Artificial Sequence: Synthetic oligonucleotide
accaagccgucugcccagg

SEQ ID NO: 977733 - RNA, 19 nt, Artificial Sequence
  Description of Artificial Sequence: Synthetic oligonucleotide
gucuacgccuguucaagau

SEQ ID NO: 977734 - RNA, 19 nt, Artificial Sequence
  Description of Artificial Sequence: Synthetic oligonucleotide
ucccucaagacggccuaau

SEQ ID NO: 977735 - RNA, 19 nt, Artificial Sequence
  Description of Artificial Sequence: Synthetic oligonucleotide
uccguggccuccuguugua

SEQ ID NO: 977736 - RNA, 19 nt, Artificial Sequence
  Description of Artificial Sequence: Synthetic oligonucleotide
acaugucuagaaaggccuu

SEQ ID NO: 977737 - RNA, 19 nt, Artificial Sequence
  Description of Artificial Sequence: Synthetic oligonucleotide
gugccagguuccgaccgag

SEQ ID NO: 977738 - RNA, 19 nt, Artificial Sequence
  Description of Artificial Sequence: Synthetic oligonucleotide
gacuuucggccacaggcuu

SEQ ID NO: 977739 - RNA, 19 nt, Artificial Sequence
  Description of Artificial Sequence: Synthetic oligonucleotide
ucccguagugccgcccaga

SEQ ID NO: 977740 - RNA, 19 nt, Artificial Sequence
  Description of Artificial Sequence: Synthetic oligonucleotide
gcgggccacgcccagguug

SEQ ID NO: 977741 - RNA, 19 nt, Artificial Sequence
  Description of Artificial Sequence: Synthetic oligonucleotide
cggugcccaguuaauacag

SEQ ID NO: 977742 - RNA, 19 nt, Artificial Sequence
  Description of Artificial Sequence: Synthetic oligonucleotide
agacggccuaaucgccccu

SEQ ID NO: 977743 - RNA, 19 nt, Artificial Sequence
  Description of Artificial Sequence: Synthetic oligonucleotide
cggugaauacaccugucuc

SEQ ID NO: 977744 - RNA, 19 nt, Artificial Sequence
  Description of Artificial Sequence: Synthetic oligonucleotide
ggugcccaguuaauacagc

SEQ ID NO: 977745 - RNA, 19 nt, Artificial Sequence
  Description of Artificial Sequence: Synthetic oligonucleotide
ucggccagaucagcacccu

SEQ ID NO: 977746 - RNA, 19 nt, Artificial Sequence
  Description of Artificial Sequence: Synthetic oligonucleotide
gggccgacccugucuacgc

SEQ ID NO: 977747 - RNA, 19 nt, Artificial Sequence
  Description of Artificial Sequence: Synthetic oligonucleotide
uuccgcagcccggguuccg

SEQ ID NO: 977748 - RNA, 19 nt, Artificial Sequence
  Description of Artificial Sequence: Synthetic oligonucleotide
uagcggcccgccagcggug

SEQ ID NO: 977749 - RNA, 19 nt, Artificial Sequence
  Description of Artificial Sequence: Synthetic oligonucleotide
gagcccagccacaugucua

SEQ ID NO: 977750 - RNA, 19 nt, Artificial Sequence
  Description of Artificial Sequence: Synthetic oligonucleotide
auccagucgcucacagacu

SEQ ID NO: 977751 - RNA, 19 nt, Artificial Sequence
  Description of Artificial Sequence: Synthetic oligonucleotide
ccagcggugcggugaauac

SEQ ID NO: 977752 - RNA, 19 nt, Artificial Sequence
  Description of Artificial Sequence: Synthetic oligonucleotide
ucccucgccguggucggga

SEQ ID NO: 977753 - RNA, 19 nt, Artificial Sequence
  Description of Artificial Sequence: Synthetic oligonucleotide
cucuguagauaaguugggu

SEQ ID NO: 977754 - RNA, 19 nt, Artificial Sequence
  Description of Artificial Sequence: Synthetic oligonucleotide
gucgggccgacccugucua

SEQ ID NO: 977755 - RNA, 19 nt, Artificial Sequence
  Description of Artificial Sequence: Synthetic oligonucleotide
guagugccgcccagagccc

SEQ ID NO: 977756 - RNA, 19 nt, Artificial Sequence
  Description of Artificial Sequence: Synthetic oligonucleotide
ccccucuaagcuagggcac

SEQ ID NO: 977757 - RNA, 19 nt, Artificial Sequence
  Description of Artificial Sequence: Synthetic oligonucleotide
gguuggagcgcgacagcac

SEQ ID NO: 977758 - RNA, 19 nt, Artificial Sequence
  Description of Artificial Sequence: Synthetic oligonucleotide
gacggccuaaucgccccuc

SEQ ID NO: 977759 - RNA, 19 nt, Artificial Sequence
  Description of Artificial Sequence: Synthetic oligonucleotide
cccguagugccgcccagag

SEQ ID NO: 977760 - RNA, 19 nt, Artificial Sequence
  Description of Artificial Sequence: Synthetic oligonucleotide
cacucccuguucaccuuga

SEQ ID NO: 977761 - RNA, 19 nt, Artificial Sequence
  Description of Artificial Sequence: Synthetic oligonucleotide
gccacgagucaagaggaga

SEQ ID NO: 977762 - RNA, 19 nt, Artificial Sequence
  Description of Artificial Sequence: Synthetic oligonucleotide
cucggaagcgcuccucacu

SEQ ID NO: 977763 - RNA, 19 nt, Artificial Sequence
  Description of Artificial Sequence: Synthetic oligonucleotide
cuggacgccugagccgcag

SEQ ID NO: 977764 - RNA, 19 nt, Artificial Sequence
  Description of Artificial Sequence: Synthetic oligonucleotide
ccgcccagagcccagccac

SEQ ID NO: 977765 - RNA, 19 nt, Artificial Sequence
  Description of Artificial Sequence: Synthetic oligonucleotide
ggagacgcuuaggucccag

SEQ ID NO: 977766 - RNA, 19 nt, Artificial Sequence
  Description of Artificial Sequence: Synthetic oligonucleotide
gcggugaauacaccugucu

SEQ ID NO: 977767 - RNA, 19 nt, Artificial Sequence
  Description of Artificial Sequence: Synthetic oligonucleotide
gguggucgggccgacccug

SEQ ID NO: 977768 - RNA, 19 nt, Artificial Sequence
  Description of Artificial Sequence: Synthetic oligonucleotide
cagcugaaaaugccacucu

SEQ ID NO: 977769 - RNA, 19 nt, Artificial Sequence
  Description of Artificial Sequence: Synthetic oligonucleotide
gccuugauccagguggcuc

SEQ ID NO: 977770 - RNA, 19 nt, Artificial Sequence
  Description of Artificial Sequence: Synthetic oligonucleotide
cagcacccugcgcuccaag

SEQ ID NO: 977771 - RNA, 19 nt, Artificial Sequence
  Description of Artificial Sequence: Synthetic oligonucleotide
gaagccguccagaggcccu

SEQ ID NO: 977772 - RNA, 19 nt, Artificial Sequence
  Description of Artificial Sequence: Synthetic oligonucleotide
ccagagcccagccacaugu

SEQ ID NO: 977773 - RNA, 19 nt, Artificial Sequence
  Description of Artificial Sequence: Synthetic oligonucleotide
gccugagcugccaccaaac

SEQ ID NO: 977774 - RNA, 19 nt, Artificial Sequence
  Description of Artificial Sequence: Synthetic oligonucleotide
ggagcgcgacagcaccgcc

SEQ ID NO: 977775 - RNA, 19 nt, Artificial Sequence
  Description of Artificial Sequence: Synthetic oligonucleotide
ggugugguccccggccuug

SEQ ID NO: 977776 - RNA, 19 nt, Artificial Sequence
  Description of Artificial Sequence: Synthetic oligonucleotide
ccgcagugggguguggucc

SEQ ID NO: 977777 - RNA, 19 nt, Artificial Sequence
  Description of Artificial Sequence: Synthetic oligonucleotide
agccuugauccagguggcu

SEQ ID NO: 977778 - RNA, 19 nt, Artificial Sequence
  Description of Artificial Sequence: Synthetic oligonucleotide
cagugaggccacgagucaa

SEQ ID NO: 977779 - RNA, 19 nt, Artificial Sequence
  Description of Artificial Sequence: Synthetic oligonucleotide
agccguccagaggcccucg

SEQ ID NO: 977780 - RNA, 19 nt, Artificial Sequence
  Description of Artificial Sequence: Synthetic oligonucleotide
agccgcagugggguguggu

SEQ ID NO: 977781 - RNA, 19 nt, Artificial Sequence
  Description of Artificial Sequence: Synthetic oligonucleotide
cggcucauagccucccgag

SEQ ID NO: 977782 - RNA, 19 nt, Artificial Sequence
  Description of Artificial Sequence: Synthetic oligonucleotide
cgagugugccagcugcccc

SEQ ID NO: 977783 - RNA, 19 nt, Artificial Sequence
  Description of Artificial Sequence: Synthetic oligonucleotide
cgggccacgcccagguugg

SEQ ID NO: 977784 - RNA, 19 nt, Artificial Sequence
  Description of Artificial Sequence: Synthetic oligonucleotide
ucgggccgacccugucuac

SEQ ID NO: 977785 - RNA, 19 nt, Artificial Sequence
  Description of Artificial Sequence: Synthetic oligonucleotide
ccacucccuguucaccuug

SEQ ID NO: 977786 - RNA, 19 nt, Artificial Sequence
  Description of Artificial Sequence: Synthetic oligonucleotide
ccugucgaaggggacugug

SEQ ID NO: 977787 - RNA, 19 nt, Artificial Sequence
  Description of Artificial Sequence: Synthetic oligonucleotide
cuccgaccugcagcggcag

SEQ ID NO: 977788 - RNA, 19 nt, Artificial Sequence
  Description of Artificial Sequence: Synthetic oligonucleotide
aucgccccucuaagcuagg

SEQ ID NO: 977789 - RNA, 19 nt, Artificial Sequence
  Description of Artificial Sequence: Synthetic oligonucleotide
cacgcccagguuggagcgc

SEQ ID NO: 977790 - RNA, 19 nt, Artificial Sequence
  Description of Artificial Sequence: Synthetic oligonucleotide
ccuugauccagguggcucu

SEQ ID NO: 977791 - RNA, 19 nt, Artificial Sequence
  Description of Artificial Sequence: Synthetic oligonucleotide
cagcggugcggugaauaca

SEQ ID NO: 977792 - RNA, 19 nt, Artificial Sequence
  Description of Artificial Sequence: Synthetic oligonucleotide
cccucaagacggccuaauc

SEQ ID NO: 977793 - RNA, 19 nt, Artificial Sequence
  Description of Artificial Sequence: Synthetic oligonucleotide
ccgagugugccagcugccc

SEQ ID NO: 977794 - RNA, 19 nt, Artificial Sequence
  Description of Artificial Sequence: Synthetic oligonucleotide
cgaccgaggcaaacucagg

SEQ ID NO: 977795 - RNA, 19 nt, Artificial Sequence
  Description of Artificial Sequence: Synthetic oligonucleotide
ggccgacccugucuacgcc

SEQ ID NO: 977796 - RNA, 19 nt, Artificial Sequence
  Description of Artificial Sequence: Synthetic oligonucleotide
ccugucuacgccuguucaa

SEQ ID NO: 977797 - RNA, 19 nt, Artificial Sequence
  Description of Artificial Sequence: Synthetic oligonucleotide
ggccacgagucaagaggag

SEQ ID NO: 977798 - RNA, 19 nt, Artificial Sequence
  Description of Artificial Sequence: Synthetic oligonucleotide
gcccuccacaguagucugg

SEQ ID NO: 977799 - RNA, 19 nt, Artificial Sequence
  Description of Artificial Sequence: Synthetic oligonucleotide
gugagucauugagggagcu

SEQ ID NO: 977800 - RNA, 19 nt, Artificial Sequence
  Description of Artificial Sequence: Synthetic oligonucleotide
ccguccagaggcccucggc

SEQ ID NO: 977801 - RNA, 19 nt, Artificial Sequence
  Description of Artificial Sequence: Synthetic oligonucleotide
cccugucuacgccuguuca

SEQ ID NO: 977802 - RNA, 19 nt, Artificial Sequence
  Description of Artificial Sequence: Synthetic oligonucleotide
ccucuaagcuagggcacug

SEQ ID NO: 977803 - RNA, 19 nt, Artificial Sequence
  Description of Artificial Sequence: Synthetic oligonucleotide
cgccccucuaagcuagggc

SEQ ID NO: 977804 - RNA, 19 nt, Artificial Sequence
  Description of Artificial Sequence: Synthetic oligonucleotide
cagccggagcuggccuucg

SEQ ID NO: 977805 - RNA, 19 nt, Artificial Sequence
  Description of Artificial Sequence: Synthetic oligonucleotide
ccugugcuaggcccucuuc

SEQ ID NO: 977806 - RNA, 19 nt, Artificial Sequence
  Description of Artificial Sequence: Synthetic oligonucleotide
gagcgcgacagcaccgccu

SEQ ID NO: 977807 - RNA, 19 nt, Artificial Sequence
  Description of Artificial Sequence: Synthetic oligonucleotide
gccgcaguggggugugguc

SEQ ID NO: 977808 - RNA, 19 nt, Artificial Sequence
  Description of Artificial Sequence: Synthetic oligonucleotide
gcuuucccguagugccgcc

SEQ ID NO: 977809 - RNA, 19 nt, Artificial Sequence
  Description of Artificial Sequence: Synthetic oligonucleotide
ccuguuguagccuguugau

SEQ ID NO: 977810 - RNA, 19 nt, Artificial Sequence
  Description of Artificial Sequence: Synthetic oligonucleotide
guuggguggucgggccgac

SEQ ID NO: 977811 - RNA, 19 nt, Artificial Sequence
  Description of Artificial Sequence: Synthetic oligonucleotide
ccaggucggccagaucagc

SEQ ID NO: 977812 - RNA, 19 nt, Artificial Sequence
  Description of Artificial Sequence: Synthetic oligonucleotide
cgcuuaggucccagagacc

SEQ ID NO: 977813 - RNA, 19 nt, Artificial Sequence
  Description of Artificial Sequence: Synthetic oligonucleotide
gcggccucuguagauaagu

SEQ ID NO: 977814 - RNA, 19 nt, Artificial Sequence
  Description of Artificial Sequence: Synthetic oligonucleotide
gggacggcagugaggccac

SEQ ID NO: 977815 - RNA, 19 nt, Artificial Sequence
  Description of Artificial Sequence: Synthetic oligonucleotide
augccggugcccaguuaau

SEQ ID NO: 977816 - RNA, 19 nt, Artificial Sequence
  Description of Artificial Sequence: Synthetic oligonucleotide
aggagacgcuuagguccca

SEQ ID NO: 977817 - RNA, 19 nt, Artificial Sequence
  Description of Artificial Sequence: Synthetic oligonucleotide
ugcgggccacgcccagguu

SEQ ID NO: 977818 - RNA, 19 nt, Artificial Sequence
  Description of Artificial Sequence: Synthetic oligonucleotide
ccugagccgcaguggggug

SEQ ID NO: 977819 - RNA, 19 nt, Artificial Sequence
  Description of Artificial Sequence: Synthetic oligonucleotide
cccggguuccggagagggc

SEQ ID NO: 977820 - RNA, 19 nt, Artificial Sequence
  Description of Artificial Sequence: Synthetic oligonucleotide
cauagccucccgagucuau

SEQ ID NO: 977821 - RNA, 19 nt, Artificial Sequence
  Description of Artificial Sequence: Synthetic oligonucleotide
ggacccugucgaaggggac

SEQ ID NO: 977822 - RNA, 19 nt, Artificial Sequence
  Description of Artificial Sequence: Synthetic oligonucleotide
gguuccggagagggcucug

SEQ ID NO: 977823 - RNA, 19 nt, Artificial Sequence
  Description of Artificial Sequence: Synthetic oligonucleotide
cccgagucuaugcgggcca

SEQ ID NO: 977824 - RNA, 19 nt, Artificial Sequence
  Description of Artificial Sequence: Synthetic oligonucleotide
ggucgggccgacccugucu

SEQ ID NO: 977825 - RNA, 19 nt, Artificial Sequence
  Description of Artificial Sequence: Synthetic oligonucleotide
gccccguggagguaauagu

SEQ ID NO: 977826 - RNA, 19 nt, Artificial Sequence
  Description of Artificial Sequence: Synthetic oligonucleotide
gccgacccugucuacgccu

SEQ ID NO: 977827 - RNA, 19 nt, Artificial Sequence
  Description of Artificial Sequence: Synthetic oligonucleotide
gcaaggcuccgcugaagau

SEQ ID NO: 977828 - RNA, 19 nt, Artificial Sequence
  Description of Artificial Sequence: Synthetic oligonucleotide
cccgccucccucgccgugg

SEQ ID NO: 977829 - RNA, 19 nt, Artificial Sequence
  Description of Artificial Sequence: Synthetic oligonucleotide
gagcggcuccuccgagugu

SEQ ID NO: 977830 - RNA, 19 nt, Artificial Sequence
  Description of Artificial Sequence: Synthetic oligonucleotide
gacccugucuacgccuguu

SEQ ID NO: 977831 - RNA, 19 nt, Artificial Sequence
  Description of Artificial Sequence: Synthetic oligonucleotide
gccagcggugcggugaaua

SEQ ID NO: 977832 - RNA, 19 nt, Artificial Sequence
  Description of Artificial Sequence: Synthetic oligonucleotide
ccggcucauagccucccga

SEQ ID NO: 977833 - RNA, 19 nt, Artificial Sequence
  Description of Artificial Sequence: Synthetic oligonucleotide
cgagucuaugcgggccacg

SEQ ID NO: 977834 - RNA, 19 nt, Artificial Sequence
  Description of Artificial Sequence: Synthetic oligonucleotide
cggcuugguccuccaacac

SEQ ID NO: 977835 - RNA, 19 nt, Artificial Sequence
  Description of Artificial Sequence: Synthetic oligonucleotide
uuucggccacaggcuuguu

SEQ ID NO: 977836 - RNA, 19 nt, Artificial Sequence
  Description of Artificial Sequence: Synthetic oligonucleotide
gcggugcggugaauacacc

SEQ ID NO: 977837 - RNA, 19 nt, Artificial Sequence
  Description of Artificial Sequence: Synthetic oligonucleotide
cucuuccgcagcccggguu

SEQ ID NO: 977838 - RNA, 19 nt, Artificial Sequence
  Description of Artificial Sequence: Synthetic oligonucleotide
cacuggccugccugugcua

SEQ ID NO: 977839 - RNA, 19 nt, Artificial Sequence
  Description of Artificial Sequence: Synthetic oligonucleotide
ccuccccugccgcuccaac

SEQ ID NO: 977840 - RNA, 19 nt, Artificial Sequence
  Description of Artificial Sequence: Synthetic oligonucleotide
gccggagcuggccuucgcu

SEQ ID NO: 977841 - RNA, 19 nt, Artificial Sequence
  Description of Artificial Sequence: Synthetic oligonucleotide
cucccucaagacggccuaa

SEQ ID NO: 977842 - RNA, 19 nt, Artificial Sequence
  Description of Artificial Sequence: Synthetic oligonucleotide
cgaagugaggaguggcccu

SEQ ID NO: 977843 - RNA, 19 nt, Artificial Sequence
  Description of Artificial Sequence: Synthetic oligonucleotide
ccggguuccggagagggcu

SEQ ID NO: 977844 - RNA, 19 nt, Artificial Sequence
  Description of Artificial Sequence: Synthetic oligonucleotide
ccucgccguggucgggagc

SEQ ID NO: 977845 - RNA, 19 nt, Artificial Sequence
  Description of Artificial Sequence: Synthetic oligonucleotide
ccgagucuaugcgggccac

SEQ ID NO: 977846 - RNA, 19 nt, Artificial Sequence
  Description of Artificial Sequence: Synthetic oligonucleotide
cggugcggugaauacaccu

SEQ ID NO: 977847 - RNA, 19 nt, Artificial Sequence
  Description of Artificial Sequence: Synthetic oligonucleotide
cccgccagcggugcgguga

SEQ ID NO: 977848 - RNA, 19 nt, Artificial Sequence
  Description of Artificial Sequence: Synthetic oligonucleotide
agguuccgaccgaggcaaa

SEQ ID NO: 977849 - RNA, 19 nt, Artificial Sequence
  Description of Artificial Sequence: Synthetic oligonucleotide
gcgcgacagcaccgccucc

SEQ ID NO: 977850 - RNA, 19 nt, Artificial Sequence
  Description of Artificial Sequence: Synthetic oligonucleotide
ccuucacgcaagccuugua

SEQ ID NO: 977851 - RNA, 19 nt, Artificial Sequence
  Description of Artificial Sequence: Synthetic oligonucleotide
cggccagaucagcacccug

SEQ ID NO: 977852 - RNA, 19 nt, Artificial Sequence
  Description of Artificial Sequence: Synthetic oligonucleotide
cggguuccggagagggcuc

SEQ ID NO: 977853 - RNA, 19 nt, Artificial Sequence
  Description of Artificial Sequence: Synthetic oligonucleotide
aggcuccgcugaagauggu

SEQ ID NO: 977854 - RNA, 19 nt, Artificial Sequence
  Description of Artificial Sequence: Synthetic oligonucleotide
gccggggcugggcugacuu

SEQ ID NO: 977855 - RNA, 19 nt, Artificial Sequence
  Description of Artificial Sequence: Synthetic oligonucleotide
cccggccuugccccgccuc

SEQ ID NO: 977856 - RNA, 19 nt, Artificial Sequence
  Description of Artificial Sequence: Synthetic oligonucleotide
gagcaacguuccacaccau

SEQ ID NO: 977857 - RNA, 19 nt, Artificial Sequence
  Description of Artificial Sequence: Synthetic oligonucleotide
ggguggucgggccgacccu

SEQ ID NO: 977858 - RNA, 19 nt, Artificial Sequence
  Description of Artificial Sequence: Synthetic oligonucleotide
cuucgcuguccagcacccu

SEQ ID NO: 977859 - RNA, 19 nt, Artificial Sequence
  Description of Artificial Sequence: Synthetic oligonucleotide
ccuggcccuccacaguagu

SEQ ID NO: 977860 - RNA, 19 nt, Artificial Sequence
  Description of Artificial Sequence: Synthetic oligonucleotide
guggucgggccgacccugu

SEQ ID NO: 977861 - RNA, 19 nt, Artificial Sequence
  Description of Artificial Sequence: Synthetic oligonucleotide
ggccuggagggccgagccu

SEQ ID NO: 977862 - RNA, 19 nt, Artificial Sequence
  Description of Artificial Sequence: Synthetic oligonucleotide
ggccuugccccgccucccu

SEQ ID NO: 977863 - RNA, 19 nt, Artificial Sequence
  Description of Artificial Sequence: Synthetic oligonucleotide
ccguggucgggagccuuga

SEQ ID NO: 977864 - RNA, 19 nt, Artificial Sequence
  Description of Artificial Sequence: Synthetic oligonucleotide
ccagagcgccggggcuggg

SEQ ID NO: 977865 - RNA, 19 nt, Artificial Sequence
  Description of Artificial Sequence: Synthetic oligonucleotide
gcgcagcgagagcucugcu

SEQ ID NO: 977866 - RNA, 19 nt, Artificial Sequence
  Description of Artificial Sequence: Synthetic oligonucleotide
gcccgccagcggugcggug

SEQ ID NO: 977867 - RNA, 19 nt, Artificial Sequence
  Description of Artificial Sequence: Synthetic oligonucleotide
ccgccagcggugcggugaa

SEQ ID NO: 977868 - RNA, 19 nt, Artificial Sequence
  Description of Artificial Sequence: Synthetic oligonucleotide
gcucgugcagugagucauu

SEQ ID NO: 977869 - RNA, 19 nt, Artificial Sequence
  Description of Artificial Sequence: Synthetic oligonucleotide
cggaagcgcuccucacucu

SEQ ID NO: 977870 - RNA, 19 nt, Artificial Sequence
  Description of Artificial Sequence: Synthetic oligonucleotide
ggcccgccagcggugcggu

SEQ ID NO: 977871 - RNA, 19 nt, Artificial Sequence
  Description of Artificial Sequence: Synthetic oligonucleotide
gggccacgcccagguugga

SEQ ID NO: 977872 - RNA, 19 nt, Artificial Sequence
  Description of Artificial Sequence: Synthetic oligonucleotide
cggccuaaucgccccucua

SEQ ID NO: 977873 - RNA, 19 nt, Artificial Sequence
  Description of Artificial Sequence: Synthetic oligonucleotide
ccucuuccgcagcccgggu

SEQ ID NO: 977874 - RNA, 19 nt, Artificial Sequence
  Description of Artificial Sequence: Synthetic oligonucleotide
gggccccguggagguaaua

SEQ ID NO: 977875 - RNA, 19 nt, Artificial Sequence
  Description of Artificial Sequence: Synthetic oligonucleotide
cguggucgggagccuugau

SEQ ID NO: 977876 - RNA, 19 nt, Artificial Sequence
  Description of Artificial Sequence: Synthetic oligonucleotide
ccccggccuugccccgccu

SEQ ID NO: 977877 - RNA, 19 nt, Artificial Sequence
  Description of Artificial Sequence: Synthetic oligonucleotide
cgccguggucgggagccuu

SEQ ID NO: 977878 - RNA, 19 nt, Artificial Sequence
  Description of Artificial Sequence: Synthetic oligonucleotide
cgccagcggugcggugaau

SEQ ID NO: 977879 - RNA, 19 nt, Artificial Sequence
  Description of Artificial Sequence: Synthetic oligonucleotide
aauuacgguagucugacac

SEQ ID NO: 977880 - RNA, 19 nt, Artificial Sequence
  Description of Artificial Sequence: Synthetic oligonucleotide
auuaaaaucggcucggcgg

SEQ ID NO: 977881 - RNA, 19 nt, Artificial Sequence
  Description of Artificial Sequence: Synthetic oligonucleotide
ugauccuugaucccgaggg

SEQ ID NO: 977882 - RNA, 19 nt, Artificial Sequence
  Description of Artificial Sequence: Synthetic oligonucleotide
cuuaauaauuccaaucugc

SEQ ID NO: 977883 - RNA, 19 nt, Artificial Sequence
  Description of Artificial Sequence: Synthetic oligonucleotide
auagccuccacucuggggc

SEQ ID NO: 977884 - RNA, 19 nt, Artificial Sequence
  Description of Artificial Sequence: Synthetic oligonucleotide
augacgugauccuugaucc

SEQ ID NO: 977885 - RNA, 19 nt, Artificial Sequence
  Description of Artificial Sequence: Synthetic oligonucleotide
gauacgguuacaauuacgg

SEQ ID NO: 977886 - RNA, 19 nt, Artificial Sequence
  Description of Artificial Sequence: Synthetic oligonucleotide
uuguccauaacccugaggu

SEQ ID NO: 977887 - RNA, 19 nt, Artificial Sequence
  Description of Artificial Sequence: Synthetic oligonucleotide
guuguaaccaccuccaccg

SEQ ID NO: 977888 - RNA, 19 nt, Artificial Sequence
  Description of Artificial Sequence: Synthetic oligonucleotide
aacucugcuggccauaggg

SEQ ID NO: 977889 - RNA, 19 nt, Artificial Sequence
  Description of Artificial Sequence: Synthetic oligonucleotide
uuaaaaucggcucggcggg

SEQ ID NO: 977890 - RNA, 19 nt, Artificial Sequence
  Description of Artificial Sequence: Synthetic oligonucleotide
uaugagaaccuccuggucc

SEQ ID NO: 977891 - RNA, 19 nt, Artificial Sequence
  Description of Artificial Sequence: Synthetic oligonucleotide
ucauauucucacauguagg

SEQ ID NO: 977892 - RNA, 19 nt, Artificial Sequence
  Description of Artificial Sequence: Synthetic oligonucleotide
uuaauaauuccaaucugcu

SEQ ID NO: 977893 - RNA, 19 nt, Artificial Sequence
  Description of Artificial Sequence: Synthetic oligonucleotide
cuugccagggccaaaaccg

SEQ ID NO: 977894 - RNA, 19 nt, Artificial Sequence
  Description of Artificial Sequence: Synthetic oligonucleotide
ugaauuauccuguucagaa

SEQ ID NO: 977895 - RNA, 19 nt, Artificial Sequence
  Description of Artificial Sequence: Synthetic oligonucleotide
uauuaaaaucggcucggcg

SEQ ID NO: 977896 - RNA, 19 nt, Artificial Sequence
  Description of Artificial Sequence: Synthetic oligonucleotide
uagucugacacacacacac

SEQ ID NO: 977897 - RNA, 19 nt, Artificial Sequence
  Description of Artificial Sequence: Synthetic oligonucleotide
auuaggacacuuccagucc

SEQ ID NO: 977898 - RNA, 19 nt, Artificial Sequence
  Description of Artificial Sequence: Synthetic oligonucleotide
ugcuuguuggguauagucg

SEQ ID NO: 977899 - RNA, 19 nt, Artificial Sequence
  Description of Artificial Sequence: Synthetic oligonucleotide
ucaauagcugcuuuagcag

SEQ ID NO: 977900 - RNA, 19 nt, Artificial Sequence
  Description of Artificial Sequence: Synthetic oligonucleotide
ucuuaauaauuccaaucug

SEQ ID NO: 977901 - RNA, 19 nt, Artificial Sequence
  Description of Artificial Sequence: Synthetic oligonucleotide
gaugguuuuaaugggaacc

SEQ ID NO: 977902 - RNA, 19 nt, Artificial Sequence
  Description of Artificial Sequence: Synthetic oligonucleotide
aaccauagcugcucuggcc

SEQ ID NO: 977903 - RNA, 19 nt, Artificial Sequence
  Description of Artificial Sequence: Synthetic oligonucleotide
aguucauauucucacaugu

SEQ ID NO: 977904 - RNA, 19 nt, Artificial Sequence
  Description of Artificial Sequence: Synthetic oligonucleotide
agggccaccaaauuuauug

SEQ ID NO: 977905 - RNA, 19 nt, Artificial Sequence
  Description of Artificial Sequence: Synthetic oligonucleotide
ucuuauuugucuuaauaau

SEQ ID NO: 977906 - RNA, 19 nt, Artificial Sequence
  Description of Artificial Sequence: Synthetic oligonucleotide
ugucuuaauaauuccaauc

SEQ ID NO: 977907 - RNA, 19 nt, Artificial Sequence
  Description of Artificial Sequence: Synthetic oligonucleotide
aauauggccucucccugcg

SEQ ID NO: 977908 - RNA, 19 nt, Artificial Sequence
  Description of Artificial Sequence: Synthetic oligonucleotide
aaaccuuaauaggauuccc

SEQ ID NO: 977909 - RNA, 19 nt, Artificial Sequence
  Description of Artificial Sequence: Synthetic oligonucleotide
uuugggucuguccauaaga

SEQ ID NO: 977910 - RNA, 19 nt, Artificial Sequence
  Description of Artificial Sequence: Synthetic oligonucleotide
gaaguaaucagccacagau

SEQ ID NO: 977911 - RNA, 19 nt, Artificial Sequence
  Description of Artificial Sequence: Synthetic oligonucleotide
acauguaggauuaggacac

SEQ ID NO: 977912 - RNA, 19 nt, Artificial Sequence
  Description of Artificial Sequence: Synthetic oligonucleotide
ugaaaccuuaauaggauuc

SEQ ID NO: 977913 - RNA, 19 nt, Artificial Sequence
  Description of Artificial Sequence: Synthetic oligonucleotide
guauacaaguuaaucauag

SEQ ID NO: 977914 - RNA, 19 nt, Artificial Sequence
  Description of Artificial Sequence: Synthetic oligonucleotide
gucacuuccgcccaugccg

SEQ ID NO: 977915 - RNA, 19 nt, Artificial Sequence
  Description of Artificial Sequence: Synthetic oligonucleotide
auagccuguguuuuggguc

SEQ ID NO: 977916 - RNA, 19 nt, Artificial Sequence
  Description of Artificial Sequence: Synthetic oligonucleotide
uuacaauuacgguagucug

SEQ ID NO: 977917 - RNA, 19 nt, Artificial Sequence
  Description of Artificial Sequence: Synthetic oligonucleotide
caaaccagucaauagcugc

SEQ ID NO: 977918 - RNA, 19 nt, Artificial Sequence
  Description of Artificial Sequence: Synthetic oligonucleotide
agauucaauuguaacauuc

SEQ ID NO: 977919 - RNA, 19 nt, Artificial Sequence
  Description of Artificial Sequence: Synthetic oligonucleotide
gaagauugggaacuuuggc

SEQ ID NO: 977920 - RNA, 19 nt, Artificial Sequence
  Description of Artificial Sequence: Synthetic oligonucleotide
acaauuacgguagucugac

SEQ ID NO: 977921 - RNA, 19 nt, Artificial Sequence
  Description of Artificial Sequence: Synthetic oligonucleotide
guaggauuaggacacuucc

SEQ ID NO: 977922 - RNA, 19 nt, Artificial Sequence
  Description of Artificial Sequence: Synthetic oligonucleotide
aaguuaaucauaggcuguc

SEQ ID NO: 977923 - RNA, 19 nt, Artificial Sequence
  Description of Artificial Sequence: Synthetic oligonucleotide
cacacacacacauacacac

SEQ ID NO: 977924 - RNA, 19 nt, Artificial Sequence
  Description of Artificial Sequence: Synthetic oligonucleotide
gucguuugaagccaugucc

SEQ ID NO: 977925 - RNA, 19 nt, Artificial Sequence
  Description of Artificial Sequence: Synthetic oligonucleotide
accuuaauaggauucccag

SEQ ID NO: 977926 - RNA, 19 nt, Artificial Sequence
  Description of Artificial Sequence: Synthetic oligonucleotide
uaacaaggguaacacuggg

SEQ ID NO: 977927 - RNA, 19 nt, Artificial Sequence
  Description of Artificial Sequence: Synthetic oligonucleotide
uacgguuacaauuacggua

SEQ ID NO: 977928 - RNA, 19 nt, Artificial Sequence
  Description of Artificial Sequence: Synthetic oligonucleotide
ugggccaucuggcuuaggg

SEQ ID NO: 977929 - RNA, 19 nt, Artificial Sequence
  Description of Artificial Sequence: Synthetic oligonucleotide
acucauggaggacugaucu

SEQ ID NO: 977930 - RNA, 19 nt, Artificial Sequence
  Description of Artificial Sequence: Synthetic oligonucleotide
cugacugagugccauagcc

SEQ ID NO: 977931 - RNA, 19 nt, Artificial Sequence
  Description of Artificial Sequence: Synthetic oligonucleotide
cacacacacacacacauac

SEQ ID NO: 977932 - RNA, 19 nt, Artificial Sequence
  Description of Artificial Sequence: Synthetic oligonucleotide
ucacauguaggauuaggac

SEQ ID NO: 977933 - RNA, 19 nt, Artificial Sequence
  Description of Artificial Sequence: Synthetic oligonucleotide
agucaauagcugcuuuagc

SEQ ID NO: 977934 - RNA, 19 nt, Artificial Sequence
  Description of Artificial Sequence: Synthetic oligonucleotide
uacaauuacgguagucuga

SEQ ID NO: 977935 - RNA, 19 nt, Artificial Sequence
  Description of Artificial Sequence: Synthetic oligonucleotide
gucugaauuauccuguuca

SEQ ID NO: 977936 - RNA, 19 nt, Artificial Sequence
  Description of Artificial Sequence: Synthetic oligonucleotide
gaaaccuuaauaggauucc

SEQ ID NO: 977937 - RNA, 19 nt, Artificial Sequence
  Description of Artificial Sequence: Synthetic oligonucleotide
guccauaacccugaggugg

SEQ ID NO: 977938 - RNA, 19 nt, Artificial Sequence
  Description of Artificial Sequence: Synthetic oligonucleotide
uauucucacauguaggauu

SEQ ID NO: 977939 - RNA, 19 nt, Artificial Sequence
  Description of Artificial Sequence: Synthetic oligonucleotide
cacacacacacacauacac

SEQ ID NO: 977940 - RNA, 19 nt, Artificial Sequence
  Description of Artificial Sequence: Synthetic oligonucleotide
agaaccauagcugcucugg

SEQ ID NO: 977941 - RNA, 19 nt, Artificial Sequence
  Description of Artificial Sequence: Synthetic oligonucleotide
cugacacacacacacacac

SEQ ID NO: 977942 - RNA, 19 nt, Artificial Sequence
  Description of Artificial Sequence: Synthetic oligonucleotide
uccauaacccugagguggg

SEQ ID NO: 977943 - RNA, 19 nt, Artificial Sequence
  Description of Artificial Sequence: Synthetic oligonucleotide
acgguuacaauuacgguag

SEQ ID NO: 977944 - RNA, 19 nt, Artificial Sequence
  Description of Artificial Sequence: Synthetic oligonucleotide
cacacacacauacacacac

SEQ ID NO: 977945 - RNA, 19 nt, Artificial Sequence
  Description of Artificial Sequence: Synthetic oligonucleotide
uguugccucacccuucagc

SEQ ID NO: 977946 - RNA, 19 nt, Artificial Sequence
  Description of Artificial Sequence: Synthetic oligonucleotide
acaaggguaacacugggua

SEQ ID NO: 977947 - RNA, 19 nt, Artificial Sequence
  Description of Artificial Sequence: Synthetic oligonucleotide
ugugcucaccccuugaguc

SEQ ID NO: 977948 - RNA, 19 nt, Artificial Sequence
  Description of Artificial Sequence: Synthetic oligonucleotide
cuggccauagggcugauug

SEQ ID NO: 977949 - RNA, 19 nt, Artificial Sequence
  Description of Artificial Sequence: Synthetic oligonucleotide
uguccaguuuucuuauuug

SEQ ID NO: 977950 - RNA, 19 nt, Artificial Sequence
  Description of Artificial Sequence: Synthetic oligonucleotide
cacauguaggauuaggaca

SEQ ID NO: 977951 - RNA, 19 nt, Artificial Sequence
  Description of Artificial Sequence: Synthetic oligonucleotide
caugacgugauccuugauc

SEQ ID NO: 977952 - RNA, 19 nt, Artificial Sequence
  Description of Artificial Sequence: Synthetic oligonucleotide
uccugauugccauagccac

SEQ ID NO: 977953 - RNA, 19 nt, Artificial Sequence
  Description of Artificial Sequence: Synthetic oligonucleotide
gacgugauccuugaucccg

SEQ ID NO: 977954 - RNA, 19 nt, Artificial Sequence
  Description of Artificial Sequence: Synthetic oligonucleotide
aguuucccugucuguauac

SEQ ID NO: 977955 - RNA, 19 nt, Artificial Sequence
  Description of Artificial Sequence: Synthetic oligonucleotide
aguuaaucauaggcugucc

SEQ ID NO: 977956 - RNA, 19 nt, Artificial Sequence
  Description of Artificial Sequence: Synthetic oligonucleotide
agaagauugggaacuuugg

SEQ ID NO: 977957 - RNA, 19 nt, Artificial Sequence
  Description of Artificial Sequence: Synthetic oligonucleotide
agucguuugaagccauguc

SEQ ID NO: 977958 - RNA, 19 nt, Artificial Sequence
  Description of Artificial Sequence: Synthetic oligonucleotide
auaugagaaccuccugguc

SEQ ID NO: 977959 - RNA, 19 nt, Artificial Sequence
  Description of Artificial Sequence: Synthetic oligonucleotide
uggguauagucguuugaag

SEQ ID NO: 977960 - RNA, 19 nt, Artificial Sequence
  Description of Artificial Sequence: Synthetic oligonucleotide
uguaggagcuuuguuguug

SEQ ID NO: 977961 - RNA, 19 nt, Artificial Sequence
  Description of Artificial Sequence: Synthetic oligonucleotide
uaauauggccucucccugc

SEQ ID NO: 977962 - RNA, 19 nt, Artificial Sequence
  Description of Artificial Sequence: Synthetic oligonucleotide
aaucauaggcuguccaguu

SEQ ID NO: 977963 - RNA, 19 nt, Artificial Sequence
  Description of Artificial Sequence: Synthetic oligonucleotide
uuuugggucuguccauaag

SEQ ID NO: 977964 - RNA, 19 nt, Artificial Sequence
  Description of Artificial Sequence: Synthetic oligonucleotide
ggcaauccugaauugaaag

SEQ ID NO: 977965 - RNA, 19 nt, Artificial Sequence
  Description of Artificial Sequence: Synthetic oligonucleotide
guuguauugguucuguugu

SEQ ID NO: 977966 - RNA, 19 nt, Artificial Sequence
  Description of Artificial Sequence: Synthetic oligonucleotide
gaagccauguccgcgcacg

SEQ ID NO: 977967 - RNA, 19 nt, Artificial Sequence
  Description of Artificial Sequence: Synthetic oligonucleotide
auagccaccacugcuucgg

SEQ ID NO: 977968 - RNA, 19 nt, Artificial Sequence
  Description of Artificial Sequence: Synthetic oligonucleotide
acugcuucgguuguaacca

SEQ ID NO: 977969 - RNA, 19 nt, Artificial Sequence
  Description of Artificial Sequence: Synthetic oligonucleotide
auaacccugagguggguug

SEQ ID NO: 977970 - RNA, 19 nt, Artificial Sequence
  Description of Artificial Sequence: Synthetic oligonucleotide
auuacgguagucugacaca

SEQ ID NO: 977971 - RNA, 19 nt, Artificial Sequence
  Description of Artificial Sequence: Synthetic oligonucleotide
auccuugaucccgagggcc

SEQ ID NO: 977972 - RNA, 19 nt, Artificial Sequence
  Description of Artificial Sequence: Synthetic oligonucleotide
uguuguuguccauagcuuu

SEQ ID NO: 977973 - RNA, 19 nt, Artificial Sequence
  Description of Artificial Sequence: Synthetic oligonucleotide
gaaccauaucccuggggag

SEQ ID NO: 977974 - RNA, 19 nt, Artificial Sequence
  Description of Artificial Sequence: Synthetic oligonucleotide
ucugacacacacacacaca

SEQ ID NO: 977975 - RNA, 19 nt, Artificial Sequence
  Description of Artificial Sequence: Synthetic oligonucleotide
gaaccagagauacgguuac

SEQ ID NO: 977976 - RNA, 19 nt, Artificial Sequence
  Description of Artificial Sequence: Synthetic oligonucleotide
ucugagaacugccaccaua

SEQ ID NO: 977977 - RNA, 19 nt, Artificial Sequence
  Description of Artificial Sequence: Synthetic oligonucleotide
uaaucauaggcuguccagu

SEQ ID NO: 977978 - RNA, 19 nt, Artificial Sequence
  Description of Artificial Sequence: Synthetic oligonucleotide
auagccagacuguuggcca

SEQ ID NO: 977979 - RNA, 19 nt, Artificial Sequence
  Description of Artificial Sequence: Synthetic oligonucleotide
ucuuuaccaucaaaccagu

SEQ ID NO: 977980 - RNA, 19 nt, Artificial Sequence
  Description of Artificial Sequence: Synthetic oligonucleotide
acugaucuuggccauaguu

SEQ ID NO: 977981 - RNA, 19 nt, Artificial Sequence
  Description of Artificial Sequence: Synthetic oligonucleotide
cuaauauggccucucccug

SEQ ID NO: 977982 - RNA, 19 nt, Artificial Sequence
  Description of Artificial Sequence: Synthetic oligonucleotide
gucugacacacacacacac

SEQ ID NO: 977983 - RNA, 19 nt, Artificial Sequence
  Description of Artificial Sequence: Synthetic oligonucleotide
guuaaucauaggcugucca

SEQ ID NO: 977984 - RNA, 19 nt, Artificial Sequence
  Description of Artificial Sequence: Synthetic oligonucleotide
ugcucuguugggaguagcc

SEQ ID NO: 977985 - RNA, 19 nt, Artificial Sequence
  Description of Artificial Sequence: Synthetic oligonucleotide
ugggcaauccugaauugaa

SEQ ID NO: 977986 - RNA, 19 nt, Artificial Sequence
  Description of Artificial Sequence: Synthetic oligonucleotide
uguuggguauagucguuug

SEQ ID NO: 977987 - RNA, 19 nt, Artificial Sequence
  Description of Artificial Sequence: Synthetic oligonucleotide
cucacauguaggauuagga

SEQ ID NO: 977988 - RNA, 19 nt, Artificial Sequence
  Description of Artificial Sequence: Synthetic oligonucleotide
aaccuuaauaggauuccca

SEQ ID NO: 977989 - RNA, 19 nt, Artificial Sequence
  Description of Artificial Sequence: Synthetic oligonucleotide
cagacgacugcgaaggauc

SEQ ID NO: 977990 - RNA, 19 nt, Artificial Sequence
  Description of Artificial Sequence: Synthetic oligonucleotide
uuacgguagucugacacac

SEQ ID NO: 977991 - RNA, 19 nt, Artificial Sequence
  Description of Artificial Sequence: Synthetic oligonucleotide
guuacaauuacgguagucu

SEQ ID NO: 977992 - RNA, 19 nt, Artificial Sequence
  Description of Artificial Sequence: Synthetic oligonucleotide
agagauacgguuacaauua

SEQ ID NO: 977993 - RNA, 19 nt, Artificial Sequence
  Description of Artificial Sequence: Synthetic oligonucleotide
acgacugcgaaggaucccg

SEQ ID NO: 977994 - RNA, 19 nt, Artificial Sequence
  Description of Artificial Sequence: Synthetic oligonucleotide
aguagcccugcccaggcug

SEQ ID NO: 977995 - RNA, 19 nt, Artificial Sequence
  Description of Artificial Sequence: Synthetic oligonucleotide
cucguugcuguccaccacc

SEQ ID NO: 977996 - RNA, 19 nt, Artificial Sequence
  Description of Artificial Sequence: Synthetic oligonucleotide
auacgguuacaauuacggu

SEQ ID NO: 977997 - RNA, 19 nt, Artificial Sequence
  Description of Artificial Sequence: Synthetic oligonucleotide
acggccucuggguucauag

SEQ ID NO: 977998 - RNA, 19 nt, Artificial Sequence
  Description of Artificial Sequence: Synthetic oligonucleotide
aaaucggcucggcggguag

SEQ ID NO: 977999 - RNA, 19 nt, Artificial Sequence
  Description of Artificial Sequence: Synthetic oligonucleotide
aucccgaagugucagcuga

SEQ ID NO: 978000 - RNA, 19 nt, Artificial Sequence
  Description of Artificial Sequence: Synthetic oligonucleotide
agauacgguuacaauuacg

SEQ ID NO: 978001 - RNA, 19 nt, Artificial Sequence
  Description of Artificial Sequence: Synthetic oligonucleotide
uggggaauccuccccggcc

SEQ ID NO: 978002 - RNA, 19 nt, Artificial Sequence
  Description of Artificial Sequence: Synthetic oligonucleotide
uguccauaacccugaggug

SEQ ID NO: 978003 - RNA, 19 nt, Artificial Sequence
  Description of Artificial Sequence: Synthetic oligonucleotide
gucuguauacaaguuaauc

SEQ ID NO: 978004 - RNA, 19 nt, Artificial Sequence
  Description of Artificial Sequence: Synthetic oligonucleotide
ugguguuguugucugaauu

SEQ ID NO: 978005 - RNA, 19 nt, Artificial Sequence
  Description of Artificial Sequence: Synthetic oligonucleotide
uggguucauagccaccacu

SEQ ID NO: 978006 - RNA, 19 nt, Artificial Sequence
  Description of Artificial Sequence: Synthetic oligonucleotide
cccuauuaaaaucggcucg

SEQ ID NO: 978007 - RNA, 19 nt, Artificial Sequence
  Description of Artificial Sequence: Synthetic oligonucleotide
augguuuuaaugggaacca

SEQ ID NO: 978008 - RNA, 19 nt, Artificial Sequence
  Description of Artificial Sequence: Synthetic oligonucleotide
guccaccauagccagacug

SEQ ID NO: 978009 - RNA, 19 nt, Artificial Sequence
  Description of Artificial Sequence: Synthetic oligonucleotide
gaaccauagcugcucuggc

SEQ ID NO: 978010 - RNA, 19 nt, Artificial Sequence
  Description of Artificial Sequence: Synthetic oligonucleotide
ugacacacacacacacaca

SEQ ID NO: 978011 - RNA, 19 nt, Artificial Sequence
  Description of Artificial Sequence: Synthetic oligonucleotide
accccuauuaaaaucggcu

SEQ ID NO: 978012 - RNA, 19 nt, Artificial Sequence
  Description of Artificial Sequence: Synthetic oligonucleotide
ucacuuccgcccaugccgc

SEQ ID NO: 978013 - RNA, 19 nt, Artificial Sequence
  Description of Artificial Sequence: Synthetic oligonucleotide
cagucaauagcugcuuuag

SEQ ID NO: 978014 - RNA, 19 nt, Artificial Sequence
  Description of Artificial Sequence: Synthetic oligonucleotide
cauagccuccacucugggg

SEQ ID NO: 978015 - RNA, 19 nt, Artificial Sequence
  Description of Artificial Sequence: Synthetic oligonucleotide
uauagucguuugaagccau

SEQ ID NO: 978016 - RNA, 19 nt, Artificial Sequence
  Description of Artificial Sequence: Synthetic oligonucleotide
gacacacacacacacacau

SEQ ID NO: 978017 - RNA, 19 nt, Artificial Sequence
  Description of Artificial Sequence: Synthetic oligonucleotide
caaggguaacacuggguac

SEQ ID NO: 978018 - RNA, 19 nt, Artificial Sequence
  Description of Artificial Sequence: Synthetic oligonucleotide
ugaguugcuuguuggguau

SEQ ID NO: 978019 - RNA, 19 nt, Artificial Sequence
  Description of Artificial Sequence: Synthetic oligonucleotide
uccacuggggaauccuccc

SEQ ID NO: 978020 - RNA, 19 nt, Artificial Sequence
  Description of Artificial Sequence: Synthetic oligonucleotide
aucaugacgugauccuuga

SEQ ID NO: 978021 - RNA, 19 nt, Artificial Sequence
  Description of Artificial Sequence: Synthetic oligonucleotide
gauccuugaucccgagggc

SEQ ID NO: 978022 - RNA, 19 nt, Artificial Sequence
  Description of Artificial Sequence: Synthetic oligonucleotide
gagauacgguuacaauuac

SEQ ID NO: 978023 - RNA, 19 nt, Artificial Sequence
  Description of Artificial Sequence: Synthetic oligonucleotide
uccuugaucccgagggcca

SEQ ID NO: 978024 - RNA, 19 nt, Artificial Sequence
  Description of Artificial Sequence: Synthetic oligonucleotide
augaaaccuuaauaggauu

SEQ ID NO: 978025 - RNA, 19 nt, Artificial Sequence
  Description of Artificial Sequence: Synthetic oligonucleotide
guuccagacgacugcgaag

SEQ ID NO: 978026 - RNA, 19 nt, Artificial Sequence
  Description of Artificial Sequence: Synthetic oligonucleotide
gguaggaggacuguugccc

SEQ ID NO: 978027 - RNA, 19 nt, Artificial Sequence
  Description of Artificial Sequence: Synthetic oligonucleotide
uggccauagccacuguaac

SEQ ID NO: 978028 - RNA, 19 nt, Artificial Sequence
  Description of Artificial Sequence: Synthetic oligonucleotide
agacgacugcgaaggaucc

SEQ ID NO: 978029 - RNA, 19 nt, Artificial Sequence
  Description of Artificial Sequence: Synthetic oligonucleotide
ugguuuuaaugggaaccag

SEQ ID NO: 978030 - RNA, 19 nt, Artificial Sequence
  Description of Artificial Sequence: Synthetic oligonucleotide
acacacauacacacacaac

SEQ ID NO: 978031 - RNA, 19 nt, Artificial Sequence
  Description of Artificial Sequence: Synthetic oligonucleotide
cugagaacugccaccauaa

SEQ ID NO: 978032 - RNA, 19 nt, Artificial Sequence
  Description of Artificial Sequence: Synthetic oligonucleotide
aaucggcucggcggguagc

SEQ ID NO: 978033 - RNA, 19 nt, Artificial Sequence
  Description of Artificial Sequence: Synthetic oligonucleotide
caggccgccaagcaacagg

SEQ ID NO: 978034 - RNA, 19 nt, Artificial Sequence
  Description of Artificial Sequence: Synthetic oligonucleotide
acuggggaauccuccccgg

SEQ ID NO: 978035 - RNA, 19 nt, Artificial Sequence
  Description of Artificial Sequence: Synthetic oligonucleotide
gaguccaucuugccagggc

SEQ ID NO: 978036 - RNA, 19 nt, Artificial Sequence
  Description of Artificial Sequence: Synthetic oligonucleotide
cacuggggaauccuccccg

SEQ ID NO: 978037 - RNA, 19 nt, Artificial Sequence
  Description of Artificial Sequence: Synthetic oligonucleotide
guagccgccccgaucauag

SEQ ID NO: 978038 - RNA, 19 nt, Artificial Sequence
  Description of Artificial Sequence: Synthetic oligonucleotide
gcggguagcaaaugaaacc

SEQ ID NO: 978039 - RNA, 19 nt, Artificial Sequence
  Description of Artificial Sequence: Synthetic oligonucleotide
cuauuaaaaucggcucggc

SEQ ID NO: 978040 - RNA, 19 nt, Artificial Sequence
  Description of Artificial Sequence: Synthetic oligonucleotide
uagucguuugaagccaugu

SEQ ID NO: 978041 - RNA, 19 nt, Artificial Sequence
  Description of Artificial Sequence: Synthetic oligonucleotide
ugagaacugccaccauaac

SEQ ID NO: 978042 - RNA, 19 nt, Artificial Sequence
  Description of Artificial Sequence: Synthetic oligonucleotide
aguugcuuguuggguauag

SEQ ID NO: 978043 - RNA, 19 nt, Artificial Sequence
  Description of Artificial Sequence: Synthetic oligonucleotide
uaacucugcuggccauagg

SEQ ID NO: 978044 - RNA, 19 nt, Artificial Sequence
  Description of Artificial Sequence: Synthetic oligonucleotide
cacacacauacacacacaa

SEQ ID NO: 978045 - RNA, 19 nt, Artificial Sequence
  Description of Artificial Sequence: Synthetic oligonucleotide
uauugguucuguuguccau

SEQ ID NO: 978046 - RNA, 19 nt, Artificial Sequence
  Description of Artificial Sequence: Synthetic oligonucleotide
caccccuauuaaaaucggc

SEQ ID NO: 978047 - RNA, 19 nt, Artificial Sequence
  Description of Artificial Sequence: Synthetic oligonucleotide
guauagucguuugaagcca

SEQ ID NO: 978048 - RNA, 19 nt, Artificial Sequence
  Description of Artificial Sequence: Synthetic oligonucleotide
guaacucugcuggccauag

SEQ ID NO: 978049 - RNA, 19 nt, Artificial Sequence
  Description of Artificial Sequence: Synthetic oligonucleotide
aaguaaucagccacagauu

SEQ ID NO: 978050 - RNA, 19 nt, Artificial Sequence
  Description of Artificial Sequence: Synthetic oligonucleotide
ucggcggguagcaaaugaa

SEQ ID NO: 978051 - RNA, 19 nt, Artificial Sequence
  Description of Artificial Sequence: Synthetic oligonucleotide
ugacgugauccuugauccc

SEQ ID NO: 978052 - RNA, 19 nt, Artificial Sequence
  Description of Artificial Sequence: Synthetic oligonucleotide
caccauaacuuccugaggu

SEQ ID NO: 978053 - RNA, 19 nt, Artificial Sequence
  Description of Artificial Sequence: Synthetic oligonucleotide
aggguuccagacgacugcg

SEQ ID NO: 978054 - RNA, 19 nt, Artificial Sequence
  Description of Artificial Sequence: Synthetic oligonucleotide
uggccauagggcugauugc

SEQ ID NO: 978055 - RNA, 19 nt, Artificial Sequence
  Description of Artificial Sequence: Synthetic oligonucleotide
uugaagccauguccgcgca

SEQ ID NO: 978056 - RNA, 19 nt, Artificial Sequence
  Description of Artificial Sequence: Synthetic oligonucleotide
uggggagcugacugagugc

SEQ ID NO: 978057 - RNA, 19 nt, Artificial Sequence
  Description of Artificial Sequence: Synthetic oligonucleotide
ccauaagaagauugggaac

SEQ ID NO: 978058 - RNA, 19 nt, Artificial Sequence
  Description of Artificial Sequence: Synthetic oligonucleotide
uccaccgccccugccacgg

SEQ ID NO: 978059 - RNA, 19 nt, Artificial Sequence
  Description of Artificial Sequence: Synthetic oligonucleotide
auauucucacauguaggau

SEQ ID NO: 978060 - RNA, 19 nt, Artificial Sequence
  Description of Artificial Sequence: Synthetic oligonucleotide
guuggguauagucguuuga

SEQ ID NO: 978061 - RNA, 19 nt, Artificial Sequence
  Description of Artificial Sequence: Synthetic oligonucleotide
agacuguugccucacccuu

SEQ ID NO: 978062 - RNA, 19 nt, Artificial Sequence
  Description of Artificial Sequence: Synthetic oligonucleotide
auucucacauguaggauua

SEQ ID NO: 978063 - RNA, 19 nt, Artificial Sequence
  Description of Artificial Sequence: Synthetic oligonucleotide
cagagauacgguuacaauu

SEQ ID NO: 978064 - RNA, 19 nt, Artificial Sequence
  Description of Artificial Sequence: Synthetic oligonucleotide
uaccaucaaaccagucaau

SEQ ID NO: 978065 - RNA, 19 nt, Artificial Sequence
  Description of Artificial Sequence: Synthetic oligonucleotide
gcuaauauggccucucccu

SEQ ID NO: 978066 - RNA, 19 nt, Artificial Sequence
  Description of Artificial Sequence: Synthetic oligonucleotide
ccacagauucaauuguaac

SEQ ID NO: 978067 - RNA, 19 nt, Artificial Sequence
  Description of Artificial Sequence: Synthetic oligonucleotide
uaggcuguccaguuuucuu

SEQ ID NO: 978068 - RNA, 19 nt, Artificial Sequence
  Description of Artificial Sequence: Synthetic oligonucleotide
cuggccauagccacuguaa

SEQ ID NO: 978069 - RNA, 19 nt, Artificial Sequence
  Description of Artificial Sequence: Synthetic oligonucleotide
caaguuaaucauaggcugu

SEQ ID NO: 978070 - RNA, 19 nt, Artificial Sequence
  Description of Artificial Sequence: Synthetic oligonucleotide
gguuuuaaugggaaccaga

SEQ ID NO: 978071 - RNA, 19 nt, Artificial Sequence
  Description of Artificial Sequence: Synthetic oligonucleotide
acacacacacacauacaca

SEQ ID NO: 978072 - RNA, 19 nt, Artificial Sequence
  Description of Artificial Sequence: Synthetic oligonucleotide
cacucauggaggacugauc

SEQ ID NO: 978073 - RNA, 19 nt, Artificial Sequence
  Description of Artificial Sequence: Synthetic oligonucleotide
aaaccgccucuguccccac

SEQ ID NO: 978074 - RNA, 19 nt, Artificial Sequence
  Description of Artificial Sequence: Synthetic oligonucleotide
uggguuguaggagcuuugu

SEQ ID NO: 978075 - RNA, 19 nt, Artificial Sequence
  Description of Artificial Sequence: Synthetic oligonucleotide
gaucccgagggccaccaaa

SEQ ID NO: 978076 - RNA, 19 nt, Artificial Sequence
  Description of Artificial Sequence: Synthetic oligonucleotide
gugggucaucaaaugagac

SEQ ID NO: 978077 - RNA, 19 nt, Artificial Sequence
  Description of Artificial Sequence: Synthetic oligonucleotide
uuccaccaccccuauuaaa

SEQ ID NO: 978078 - RNA, 19 nt, Artificial Sequence
  Description of Artificial Sequence: Synthetic oligonucleotide
aggguaacacuggguacag

SEQ ID NO: 978079 - RNA, 19 nt, Artificial Sequence
  Description of Artificial Sequence: Synthetic oligonucleotide
cugagugccauagccugug

SEQ ID NO: 978080 - RNA, 19 nt, Artificial Sequence
  Description of Artificial Sequence: Synthetic oligonucleotide
ugcucaccccuugagucca

SEQ ID NO: 978081 - RNA, 19 nt, Artificial Sequence
  Description of Artificial Sequence: Synthetic oligonucleotide
cuccacggcccaugggucc

SEQ ID NO: 978082 - RNA, 19 nt, Artificial Sequence
  Description of Artificial Sequence: Synthetic oligonucleotide
ccauaacuuccugaggugc

SEQ ID NO: 978083 - RNA, 19 nt, Artificial Sequence
  Description of Artificial Sequence: Synthetic oligonucleotide
ugaagccauguccgcgcac

SEQ ID NO: 978084 - RNA, 19 nt, Artificial Sequence
  Description of Artificial Sequence: Synthetic oligonucleotide
agggccaaaaccgccucug

SEQ ID NO: 978085 - RNA, 19 nt, Artificial Sequence
  Description of Artificial Sequence: Synthetic oligonucleotide
ccauaagaagaaccauagc

SEQ ID NO: 978086 - RNA, 19 nt, Artificial Sequence
  Description of Artificial Sequence: Synthetic oligonucleotide
augguguuguugucugaau

SEQ ID NO: 978087 - RNA, 19 nt, Artificial Sequence
  Description of Artificial Sequence: Synthetic oligonucleotide
uuguuggguauagucguuu

SEQ ID NO: 978088 - RNA, 19 nt, Artificial Sequence
  Description of Artificial Sequence: Synthetic oligonucleotide
auaagaagauugggaacuu

SEQ ID NO: 978089 - RNA, 19 nt, Artificial Sequence
  Description of Artificial Sequence: Synthetic oligonucleotide
ccccuauuaaaaucggcuc

SEQ ID NO: 978090 - RNA, 19 nt, Artificial Sequence
  Description of Artificial Sequence: Synthetic oligonucleotide
uguaacucugcuggccaua

SEQ ID NO: 978091 - RNA, 19 nt, Artificial Sequence
  Description of Artificial Sequence: Synthetic oligonucleotide
aaaaucggcucggcgggua

SEQ ID NO: 978092 - RNA, 19 nt, Artificial Sequence
  Description of Artificial Sequence: Synthetic oligonucleotide
auagggcugauugcucugu

SEQ ID NO: 978093 - RNA, 19 nt, Artificial Sequence
  Description of Artificial Sequence: Synthetic oligonucleotide
auaggcuguccaguuuucu

SEQ ID NO: 978094 - RNA, 19 nt, Artificial Sequence
  Description of Artificial Sequence: Synthetic oligonucleotide
uaacccugagguggguugu

SEQ ID NO: 978095 - RNA, 19 nt, Artificial Sequence
  Description of Artificial Sequence: Synthetic oligonucleotide
ugguccugauugccauagc

SEQ ID NO: 978096 - RNA, 19 nt, Artificial Sequence
  Description of Artificial Sequence: Synthetic oligonucleotide
ucccgaagugucagcugac

SEQ ID NO: 978097 - RNA, 19 nt, Artificial Sequence
  Description of Artificial Sequence: Synthetic oligonucleotide
gauaggccccauagcuuug

SEQ ID NO: 978098 - RNA, 19 nt, Artificial Sequence
  Description of Artificial Sequence: Synthetic oligonucleotide
uugaucccgagggccacca

SEQ ID NO: 978099 - RNA, 19 nt, Artificial Sequence
  Description of Artificial Sequence: Synthetic oligonucleotide
ggacugaucuuggccauag

SEQ ID NO: 978100 - RNA, 19 nt, Artificial Sequence
  Description of Artificial Sequence: Synthetic oligonucleotide
ugggcuaauauggccucuc

SEQ ID NO: 978101 - RNA, 19 nt, Artificial Sequence
  Description of Artificial Sequence: Synthetic oligonucleotide
aggccccauagcuuugagu

SEQ ID NO: 978102 - RNA, 19 nt, Artificial Sequence
  Description of Artificial Sequence: Synthetic oligonucleotide
aaccagagauacgguuaca

SEQ ID NO: 978103 - RNA, 19 nt, Artificial Sequence
  Description of Artificial Sequence: Synthetic oligonucleotide
ggcggguagcaaaugaaac

SEQ ID NO: 978104 - RNA, 19 nt, Artificial Sequence
  Description of Artificial Sequence: Synthetic oligonucleotide
uccgcgcacgcgcgcacag

SEQ ID NO: 978105 - RNA, 19 nt, Artificial Sequence
  Description of Artificial Sequence: Synthetic oligonucleotide
uccagacgacugcgaagga

SEQ ID NO: 978106 - RNA, 19 nt, Artificial Sequence
  Description of Artificial Sequence: Synthetic oligonucleotide
gccauguccgcgcacgcgc

SEQ ID NO: 978107 - RNA, 19 nt, Artificial Sequence
  Description of Artificial Sequence: Synthetic oligonucleotide
ucaugacgugauccuugau

SEQ ID NO: 978108 - RNA, 19 nt, Artificial Sequence
  Description of Artificial Sequence: Synthetic oligonucleotide
uugcucuguugggaguagc

SEQ ID NO: 978109 - RNA, 19 nt, Artificial Sequence
  Description of Artificial Sequence: Synthetic oligonucleotide
cuggggaauccuccccggc

SEQ ID NO: 978110 - RNA, 19 nt, Artificial Sequence
  Description of Artificial Sequence: Synthetic oligonucleotide
gacgacugcgaaggauccc

SEQ ID NO: 978111 - RNA, 19 nt, Artificial Sequence
  Description of Artificial Sequence: Synthetic oligonucleotide
gucagcugacuggccauag

SEQ ID NO: 978112 - RNA, 19 nt, Artificial Sequence
  Description of Artificial Sequence: Synthetic oligonucleotide
uuguaggagcuuuguuguu

SEQ ID NO: 978113 - RNA, 19 nt, Artificial Sequence
  Description of Artificial Sequence: Synthetic oligonucleotide
cagcucguugcuguccacc

SEQ ID NO: 978114 - RNA, 19 nt, Artificial Sequence
  Description of Artificial Sequence: Synthetic oligonucleotide
acacacacacauacacaca

SEQ ID NO: 978115 - RNA, 19 nt, Artificial Sequence
  Description of Artificial Sequence: Synthetic oligonucleotide
acacacacauacacacaca

SEQ ID NO: 978116 - RNA, 19 nt, Artificial Sequence
  Description of Artificial Sequence: Synthetic oligonucleotide
agccauguccgcgcacgcg

SEQ ID NO: 978117 - RNA, 19 nt, Artificial Sequence
  Description of Artificial Sequence: Synthetic oligonucleotide
ggccccauagcuuugaguu

SEQ ID NO: 978118 - RNA, 19 nt, Artificial Sequence
  Description of Artificial Sequence: Synthetic oligonucleotide
gcaauccugaauugaaagu

SEQ ID NO: 978119 - RNA, 19 nt, Artificial Sequence
  Description of Artificial Sequence: Synthetic oligonucleotide
ugcgauccugucugugcuc

SEQ ID NO: 978120 - RNA, 19 nt, Artificial Sequence
  Description of Artificial Sequence: Synthetic oligonucleotide
ggugggucaucaaaugaga

SEQ ID NO: 978121 - RNA, 19 nt, Artificial Sequence
  Description of Artificial Sequence: Synthetic oligonucleotide
auaucccuggggagcugac

SEQ ID NO: 978122 - RNA, 19 nt, Artificial Sequence
  Description of Artificial Sequence: Synthetic oligonucleotide
gguuacaauuacgguaguc

SEQ ID NO: 978123 - RNA, 19 nt, Artificial Sequence
  Description of Artificial Sequence: Synthetic oligonucleotide
cucggcggguagcaaauga

SEQ ID NO: 978124 - RNA, 19 nt, Artificial Sequence
  Description of Artificial Sequence: Synthetic oligonucleotide
acacacacacacacauaca

SEQ ID NO: 978125 - RNA, 19 nt, Artificial Sequence
  Description of Artificial Sequence: Synthetic oligonucleotide
ccuuaauaggauucccaga

SEQ ID NO: 978126 - RNA, 19 nt, Artificial Sequence
  Description of Artificial Sequence: Synthetic oligonucleotide
agucugacacacacacaca

SEQ ID NO: 978127 - RNA, 19 nt, Artificial Sequence
  Description of Artificial Sequence: Synthetic oligonucleotide
gcccauaagaagauuggga

SEQ ID NO: 978128 - RNA, 19 nt, Artificial Sequence
  Description of Artificial Sequence: Synthetic oligonucleotide
auagucguuugaagccaug

SEQ ID NO: 978129 - RNA, 19 nt, Artificial Sequence
  Description of Artificial Sequence: Synthetic oligonucleotide
ccuugcacaaagauggugu

SEQ ID NO: 978130 - RNA, 19 nt, Artificial Sequence
  Description of Artificial Sequence: Synthetic oligonucleotide
ggacuguugcccauaagaa

SEQ ID NO: 978131 - RNA, 19 nt, Artificial Sequence
  Description of Artificial Sequence: Synthetic oligonucleotide
gcugcuaggagcuggcugu

SEQ ID NO: 978132 - RNA, 19 nt, Artificial Sequence
  Description of Artificial Sequence: Synthetic oligonucleotide
auaggccccauagcuuuga

SEQ ID NO: 978133 - RNA, 19 nt, Artificial Sequence
  Description of Artificial Sequence: Synthetic oligonucleotide
gggccaccaaauuuauuga

SEQ ID NO: 978134 - RNA, 19 nt, Artificial Sequence
  Description of Artificial Sequence: Synthetic oligonucleotide
cuggguucauagccaccac

SEQ ID NO: 978135 - RNA, 19 nt, Artificial Sequence
  Description of Artificial Sequence: Synthetic oligonucleotide
cugcuucgguuguaaccac

SEQ ID NO: 978136 - RNA, 19 nt, Artificial Sequence
  Description of Artificial Sequence: Synthetic oligonucleotide
gcucuguugggaguagccc

SEQ ID NO: 978137 - RNA, 19 nt, Artificial Sequence
  Description of Artificial Sequence: Synthetic oligonucleotide
acugagugccauagccugu

SEQ ID NO: 978138 - RNA, 19 nt, Artificial Sequence
  Description of Artificial Sequence: Synthetic oligonucleotide
cauguccgcgcacgcgcgc

SEQ ID NO: 978139 - RNA, 19 nt, Artificial Sequence
  Description of Artificial Sequence: Synthetic oligonucleotide
ccauagccuguguuuuggg

SEQ ID NO: 978140 - RNA, 19 nt, Artificial Sequence
  Description of Artificial Sequence: Synthetic oligonucleotide
ccauaucccgaagugucag

SEQ ID NO: 978141 - RNA, 19 nt, Artificial Sequence
  Description of Artificial Sequence: Synthetic oligonucleotide
guggguuguaggagcuuug

SEQ ID NO: 978142 - RNA, 19 nt, Artificial Sequence
  Description of Artificial Sequence: Synthetic oligonucleotide
caacaggguuccagacgac

SEQ ID NO: 978143 - RNA, 19 nt, Artificial Sequence
  Description of Artificial Sequence: Synthetic oligonucleotide
agccuccacggcccauggg

SEQ ID NO: 978144 - RNA, 19 nt, Artificial Sequence
  Description of Artificial Sequence: Synthetic oligonucleotide
cauaucccuggggagcuga

SEQ ID NO: 978145 - RNA, 19 nt, Artificial Sequence
  Description of Artificial Sequence: Synthetic oligonucleotide
guagucugacacacacaca

SEQ ID NO: 978146 - RNA, 19 nt, Artificial Sequence
  Description of Artificial Sequence: Synthetic oligonucleotide
ggccaccaaauuuauugaa

SEQ ID NO: 978147 - RNA, 19 nt, Artificial Sequence
  Description of Artificial Sequence: Synthetic oligonucleotide
ccgaagugucagcugacug

SEQ ID NO: 978148 - RNA, 19 nt, Artificial Sequence
  Description of Artificial Sequence: Synthetic oligonucleotide
cuguugggaguagcccugc

SEQ ID NO: 978149 - RNA, 19 nt, Artificial Sequence
  Description of Artificial Sequence: Synthetic oligonucleotide
ccgccaagcaacaggguuc

SEQ ID NO: 978150 - RNA, 19 nt, Artificial Sequence
  Description of Artificial Sequence: Synthetic oligonucleotide
gcugacugagugccauagc

SEQ ID NO: 978151 - RNA, 19 nt, Artificial Sequence
  Description of Artificial Sequence: Synthetic oligonucleotide
auauggccucucccugcga

SEQ ID NO: 978152 - RNA, 19 nt, Artificial Sequence
  Description of Artificial Sequence: Synthetic oligonucleotide
caauuacgguagucugaca

SEQ ID NO: 978153 - RNA, 19 nt, Artificial Sequence
  Description of Artificial Sequence: Synthetic oligonucleotide
ccucuggguucauagccac

SEQ ID NO: 978154 - RNA, 19 nt, Artificial Sequence
  Description of Artificial Sequence: Synthetic oligonucleotide
cgaucauagccuccucugc

SEQ ID NO: 978155 - RNA, 19 nt, Artificial Sequence
  Description of Artificial Sequence: Synthetic oligonucleotide
ggauaggccccauagcuuu

SEQ ID NO: 978156 - RNA, 19 nt, Artificial Sequence
  Description of Artificial Sequence: Synthetic oligonucleotide
aucggcucggcggguagca

SEQ ID NO: 978157 - RNA, 19 nt, Artificial Sequence
  Description of Artificial Sequence: Synthetic oligonucleotide
uguccgcgcacgcgcgcac

SEQ ID NO: 978158 - RNA, 19 nt, Artificial Sequence
  Description of Artificial Sequence: Synthetic oligonucleotide
acgugauccuugaucccga

SEQ ID NO: 978159 - RNA, 19 nt, Artificial Sequence
  Description of Artificial Sequence: Synthetic oligonucleotide
cuuccgcccaugccgccuc

SEQ ID NO: 978160 - RNA, 19 nt, Artificial Sequence
  Description of Artificial Sequence: Synthetic oligonucleotide
acaggccgccaagcaacag

SEQ ID NO: 978161 - RNA, 19 nt, Artificial Sequence
  Description of Artificial Sequence: Synthetic oligonucleotide
ccccguagccaccaccgcc

SEQ ID NO: 978162 - RNA, 19 nt, Artificial Sequence
  Description of Artificial Sequence: Synthetic oligonucleotide
cacuuccgcccaugccgcc

SEQ ID NO: 978163 - RNA, 19 nt, Artificial Sequence
  Description of Artificial Sequence: Synthetic oligonucleotide
ugaucccgagggccaccaa

SEQ ID NO: 978164 - RNA, 19 nt, Artificial Sequence
  Description of Artificial Sequence: Synthetic oligonucleotide
ccauguccgcgcacgcgcg

SEQ ID NO: 978165 - RNA, 19 nt, Artificial Sequence
  Description of Artificial Sequence: Synthetic oligonucleotide
ccacuguaacucugcuggc

SEQ ID NO: 978166 - RNA, 19 nt, Artificial Sequence
  Description of Artificial Sequence: Synthetic oligonucleotide
ccgccaccacucauggagg

SEQ ID NO: 978167 - RNA, 19 nt, Artificial Sequence
  Description of Artificial Sequence: Synthetic oligonucleotide
ccgguagccgccccgauca

SEQ ID NO: 978168 - RNA, 19 nt, Artificial Sequence
  Description of Artificial Sequence: Synthetic oligonucleotide
acacacacacacacacaua

SEQ ID NO: 978169 - RNA, 19 nt, Artificial Sequence
  Description of Artificial Sequence: Synthetic oligonucleotide
cuccaccgccccugccacg

SEQ ID NO: 978170 - RNA, 19 nt, Artificial Sequence
  Description of Artificial Sequence: Synthetic oligonucleotide
gccacagauucaauuguaa

SEQ ID NO: 978171 - RNA, 19 nt, Artificial Sequence
  Description of Artificial Sequence: Synthetic oligonucleotide
ccgagggccaccaaauuua

SEQ ID NO: 978172 - RNA, 19 nt, Artificial Sequence
  Description of Artificial Sequence: Synthetic oligonucleotide
cgcacgcgcgcacaggccg

SEQ ID NO: 978173 - RNA, 19 nt, Artificial Sequence
  Description of Artificial Sequence: Synthetic oligonucleotide
auguccgcgcacgcgcgca

SEQ ID NO: 978174 - RNA, 19 nt, Artificial Sequence
  Description of Artificial Sequence: Synthetic oligonucleotide
gccuccacggcccaugggu

SEQ ID NO: 978175 - RNA, 19 nt, Artificial Sequence
  Description of Artificial Sequence: Synthetic oligonucleotide
cagauucaauuguaacauu

SEQ ID NO: 978176 - RNA, 19 nt, Artificial Sequence
  Description of Artificial Sequence: Synthetic oligonucleotide
ucccugcgauccugucugu

SEQ ID NO: 978177 - RNA, 19 nt, Artificial Sequence
  Description of Artificial Sequence: Synthetic oligonucleotide
cacccuucagcuugccagu

SEQ ID NO: 978178 - RNA, 19 nt, Artificial Sequence
  Description of Artificial Sequence: Synthetic oligonucleotide
cuuguuggguauagucguu

SEQ ID NO: 978179 - RNA, 19 nt, Artificial Sequence
  Description of Artificial Sequence: Synthetic oligonucleotide
gccauaucccgaaguguca

SEQ ID NO: 978180 - RNA, 19 nt, Artificial Sequence
  Description of Artificial Sequence: Synthetic oligonucleotide
gcgauccugucugugcuca

SEQ ID NO: 978181 - RNA, 19 nt, Artificial Sequence
  Description of Artificial Sequence: Synthetic oligonucleotide
cacucuggggcuguccaua

SEQ ID NO: 978182 - RNA, 19 nt, Artificial Sequence
  Description of Artificial Sequence: Synthetic oligonucleotide
gggcaauccugaauugaaa

SEQ ID NO: 978183 - RNA, 19 nt, Artificial Sequence
  Description of Artificial Sequence: Synthetic oligonucleotide
ggaauccuccccggccacc

SEQ ID NO: 978184 - RNA, 19 nt, Artificial Sequence
  Description of Artificial Sequence: Synthetic oligonucleotide
gcuucgguuguaaccaccu

SEQ ID NO: 978185 - RNA, 19 nt, Artificial Sequence
  Description of Artificial Sequence: Synthetic oligonucleotide
ccccauaugagaaccuccu

SEQ ID NO: 978186 - RNA, 19 nt, Artificial Sequence
  Description of Artificial Sequence: Synthetic oligonucleotide
cacgcgcgcacaggccgcc

SEQ ID NO: 978187 - RNA, 19 nt, Artificial Sequence
  Description of Artificial Sequence: Synthetic oligonucleotide
gaguagcccugcccaggcu

SEQ ID NO: 978188 - RNA, 19 nt, Artificial Sequence
  Description of Artificial Sequence: Synthetic oligonucleotide
ccaguggaaccauaucccu

SEQ ID NO: 978189 - RNA, 19 nt, Artificial Sequence
  Description of Artificial Sequence: Synthetic oligonucleotide
cacggcccauggguccucc

SEQ ID NO: 978190 - RNA, 19 nt, Artificial Sequence
  Description of Artificial Sequence: Synthetic oligonucleotide
gccauagggcugauugcuc

SEQ ID NO: 978191 - RNA, 19 nt, Artificial Sequence
  Description of Artificial Sequence: Synthetic oligonucleotide
cgugauccuugaucccgag

SEQ ID NO: 978192 - RNA, 19 nt, Artificial Sequence
  Description of Artificial Sequence: Synthetic oligonucleotide
cacggcgaucaucuccaua

SEQ ID NO: 978193 - RNA, 19 nt, Artificial Sequence
  Description of Artificial Sequence: Synthetic oligonucleotide
uggguaggauaggccccau

SEQ ID NO: 978194 - RNA, 19 nt, Artificial Sequence
  Description of Artificial Sequence: Synthetic oligonucleotide
gccgccaagcaacaggguu

SEQ ID NO: 978195 - RNA, 19 nt, Artificial Sequence
  Description of Artificial Sequence: Synthetic oligonucleotide
ucggcucggcggguagcaa

SEQ ID NO: 978196 - RNA, 19 nt, Artificial Sequence
  Description of Artificial Sequence: Synthetic oligonucleotide
cauguaggauuaggacacu

SEQ ID NO: 978197 - RNA, 19 nt, Artificial Sequence
  Description of Artificial Sequence: Synthetic oligonucleotide
cauaacccugagguggguu

SEQ ID NO: 978198 - RNA, 19 nt, Artificial Sequence
  Description of Artificial Sequence: Synthetic oligonucleotide
ccacgguccugcuggccuc

SEQ ID NO: 978199 - RNA, 19 nt, Artificial Sequence
  Description of Artificial Sequence: Synthetic oligonucleotide
ggguuguaggagcuuuguu

SEQ ID NO: 978200 - RNA, 19 nt, Artificial Sequence
  Description of Artificial Sequence: Synthetic oligonucleotide
cgcccaugccgccucugcc

SEQ ID NO: 978201 - RNA, 19 nt, Artificial Sequence
  Description of Artificial Sequence: Synthetic oligonucleotide
cgguuguaaccaccuccac

SEQ ID NO: 978202 - RNA, 19 nt, Artificial Sequence
  Description of Artificial Sequence: Synthetic oligonucleotide
gcucggcggguagcaaaug

SEQ ID NO: 978203 - RNA, 19 nt, Artificial Sequence
  Description of Artificial Sequence: Synthetic oligonucleotide
ccgccccgaucauagccuc

SEQ ID NO: 978204 - RNA, 19 nt, Artificial Sequence
  Description of Artificial Sequence: Synthetic oligonucleotide
cugggcuaauauggccucu

SEQ ID NO: 978205 - RNA, 19 nt, Artificial Sequence
  Description of Artificial Sequence: Synthetic oligonucleotide
gagggccaccaaauuuauu

SEQ ID NO: 978206 - RNA, 19 nt, Artificial Sequence
  Description of Artificial Sequence: Synthetic oligonucleotide
gguagccgccccgaucaua

SEQ ID NO: 978207 - RNA, 19 nt, Artificial Sequence
  Description of Artificial Sequence: Synthetic oligonucleotide
ccaccaccccuauuaaaau

SEQ ID NO: 978208 - RNA, 19 nt, Artificial Sequence
  Description of Artificial Sequence: Synthetic oligonucleotide
gcacgcgcgcacaggccgc

SEQ ID NO: 978209 - RNA, 19 nt, Artificial Sequence
  Description of Artificial Sequence: Synthetic oligonucleotide
guccgcgcacgcgcgcaca

SEQ ID NO: 978210 - RNA, 19 nt, Artificial Sequence
  Description of Artificial Sequence: Synthetic oligonucleotide
cgauccugucugugcucac

SEQ ID NO: 978211 - RNA, 19 nt, Artificial Sequence
  Description of Artificial Sequence: Synthetic oligonucleotide
cgccccgaucauagccucc

SEQ ID NO: 978212 - RNA, 19 nt, Artificial Sequence
  Description of Artificial Sequence: Synthetic oligonucleotide
gcgcacgcgcgcacaggcc

SEQ ID NO: 978213 - RNA, 19 nt, Artificial Sequence
  Description of Artificial Sequence: Synthetic oligonucleotide
cccgagggccaccaaauuu

SEQ ID NO: 978214 - RNA, 19 nt, Artificial Sequence
  Description of Artificial Sequence: Synthetic oligonucleotide
gccgccccgaucauagccu

SEQ ID NO: 978215 - RNA, 19 nt, Artificial Sequence
  Description of Artificial Sequence: Synthetic oligonucleotide
ggcucggcggguagcaaau

SEQ ID NO: 978216 - RNA, 19 nt, Artificial Sequence
  Description of Artificial Sequence: Synthetic oligonucleotide
cgccaccacucauggagga

SEQ ID NO: 978217 - RNA, 19 nt, Artificial Sequence
  Description of Artificial Sequence: Synthetic oligonucleotide
cccugucuguauacaaguu

SEQ ID NO: 978218 - RNA, 19 nt, Artificial Sequence
  Description of Artificial Sequence: Synthetic oligonucleotide
ccagacgacugcgaaggau

SEQ ID NO: 978219 - RNA, 19 nt, Artificial Sequence
  Description of Artificial Sequence: Synthetic oligonucleotide
caccacugcuucgguugua

SEQ ID NO: 978220 - RNA, 19 nt, Artificial Sequence
  Description of Artificial Sequence: Synthetic oligonucleotide
ggccuugcacaaagauggu

SEQ ID NO: 978221 - RNA, 19 nt, Artificial Sequence
  Description of Artificial Sequence: Synthetic oligonucleotide
ccgccucggccccgguagc

SEQ ID NO: 978222 - RNA, 19 nt, Artificial Sequence
  Description of Artificial Sequence: Synthetic oligonucleotide
cccgaagugucagcugacu

SEQ ID NO: 978223 - RNA, 19 nt, Artificial Sequence
  Description of Artificial Sequence: Synthetic oligonucleotide
cugcuaggagcuggcuguu

SEQ ID NO: 978224 - RNA, 19 nt, Artificial Sequence
  Description of Artificial Sequence: Synthetic oligonucleotide
cgagggccaccaaauuuau

SEQ ID NO: 978225 - RNA, 19 nt, Artificial Sequence
  Description of Artificial Sequence: Synthetic oligonucleotide
ggccgccaagcaacagggu

SEQ ID NO: 978226 - RNA, 19 nt, Artificial Sequence
  Description of Artificial Sequence: Synthetic oligonucleotide
ccauaacccugaggugggu

SEQ ID NO: 978227 - RNA, 19 nt, Artificial Sequence
  Description of Artificial Sequence: Synthetic oligonucleotide
ccacggcccauggguccuc

SEQ ID NO: 978228 - RNA, 19 nt, Artificial Sequence
  Description of Artificial Sequence: Synthetic oligonucleotide
cgguuacaauuacgguagu

SEQ ID NO: 978229 - RNA, 19 nt, Artificial Sequence
  Description of Artificial Sequence: Synthetic oligonucleotide
cgccgccaccacucaugga

SEQ ID NO: 978230 - RNA, 19 nt, Artificial Sequence
  Description of Artificial Sequence: Synthetic oligonucleotide
ccgccgccaccacucuggu

SEQ ID NO: 978231 - RNA, 19 nt, Artificial Sequence
  Description of Artificial Sequence: Synthetic oligonucleotide
gcucaccccuugaguccau

SEQ ID NO: 978232 - RNA, 19 nt, Artificial Sequence
  Description of Artificial Sequence: Synthetic oligonucleotide
ccccgguagccgccccgau

SEQ ID NO: 978233 - RNA, 19 nt, Artificial Sequence
  Description of Artificial Sequence: Synthetic oligonucleotide
aaggaaucaugucagaccc

SEQ ID NO: 978234 - RNA, 19 nt, Artificial Sequence
  Description of Artificial Sequence: Synthetic oligonucleotide
ugucguaugagauucaggg

SEQ ID NO: 978235 - RNA, 19 nt, Artificial Sequence
  Description of Artificial Sequence: Synthetic oligonucleotide
gaaauaacagcguucaacc

SEQ ID NO: 978236 - RNA, 19 nt, Artificial Sequence
  Description of Artificial Sequence: Synthetic oligonucleotide
caaaaguugaauuagugac

SEQ ID NO: 978237 - RNA, 19 nt, Artificial Sequence
  Description of Artificial Sequence: Synthetic oligonucleotide
aauaucuccuccaucaugg

SEQ ID NO: 978238 - RNA, 19 nt, Artificial Sequence
  Description of Artificial Sequence: Synthetic oligonucleotide
uauuagacucacaugaagc

SEQ ID NO: 978239 - RNA, 19 nt, Artificial Sequence
  Description of Artificial Sequence: Synthetic oligonucleotide
uuagugacugccauguagg

SEQ ID NO: 978240 - RNA, 19 nt, Artificial Sequence
  Description of Artificial Sequence: Synthetic oligonucleotide
aguuaggacaguuacaucu

SEQ ID NO: 978241 - RNA, 19 nt, Artificial Sequence
  Description of Artificial Sequence: Synthetic oligonucleotide
aagauuuugcucuaagccu

SEQ ID NO: 978242 - RNA, 19 nt, Artificial Sequence
  Description of Artificial Sequence: Synthetic oligonucleotide
uguuaugggaccaaucuug

SEQ ID NO: 978243 - RNA, 19 nt, Artificial Sequence
  Description of Artificial Sequence: Synthetic oligonucleotide
aguugaauuagugacugcc

SEQ ID NO: 978244 - RNA, 19 nt, Artificial Sequence
  Description of Artificial Sequence: Synthetic oligonucleotide
agaaauaacagcguucaac

SEQ ID NO: 978245 - RNA, 19 nt, Artificial Sequence
  Description of Artificial Sequence: Synthetic oligonucleotide
aaucaugucagacccgauc

SEQ ID NO: 978246 - RNA, 19 nt, Artificial Sequence
  Description of Artificial Sequence: Synthetic oligonucleotide
ugcuaagagauccugagcu

SEQ ID NO: 978247 - RNA, 19 nt, Artificial Sequence
  Description of Artificial Sequence: Synthetic oligonucleotide
ucuuguguagcugagaucu

SEQ ID NO: 978248 - RNA, 19 nt, Artificial Sequence
  Description of Artificial Sequence: Synthetic oligonucleotide
agcauaaagcaucuuuccc

SEQ ID NO: 978249 - RNA, 19 nt, Artificial Sequence
  Description of Artificial Sequence: Synthetic oligonucleotide
cuuacuacaaauacaaaga

SEQ ID NO: 978250 - RNA, 19 nt, Artificial Sequence
  Description of Artificial Sequence: Synthetic oligonucleotide
uuccauauugaagagaggc

SEQ ID NO: 978251 - RNA, 19 nt, Artificial Sequence
  Description of Artificial Sequence: Synthetic oligonucleotide
gaugcuaagagauccugag

SEQ ID NO: 978252 - RNA, 19 nt, Artificial Sequence
  Description of Artificial Sequence: Synthetic oligonucleotide
auuagugacugccauguag

SEQ ID NO: 978253 - RNA, 19 nt, Artificial Sequence
  Description of Artificial Sequence: Synthetic oligonucleotide
aucagaaagaaugagcguc

SEQ ID NO: 978254 - RNA, 19 nt, Artificial Sequence
  Description of Artificial Sequence: Synthetic oligonucleotide
uucaaauccuagcuaaccc

SEQ ID NO: 978255 - RNA, 19 nt, Artificial Sequence
  Description of Artificial Sequence: Synthetic oligonucleotide
aacugcaaggguguuaugg

SEQ ID NO: 978256 - RNA, 19 nt, Artificial Sequence
  Description of Artificial Sequence: Synthetic oligonucleotide
uuacuacaaauacaaagac

SEQ ID NO: 978257 - RNA, 19 nt, Artificial Sequence
  Description of Artificial Sequence: Synthetic oligonucleotide
ugguaaaacugcaagggug

SEQ ID NO: 978258 - RNA, 19 nt, Artificial Sequence
  Description of Artificial Sequence: Synthetic oligonucleotide
aauccuagcuaacccuccc

SEQ ID NO: 978259 - RNA, 19 nt, Artificial Sequence
  Description of Artificial Sequence: Synthetic oligonucleotide
uuugucucgauacucccag

SEQ ID NO: 978260 - RNA, 19 nt, Artificial Sequence
  Description of Artificial Sequence: Synthetic oligonucleotide
aaauacugcaccagccucc

SEQ ID NO: 978261 - RNA, 19 nt, Artificial Sequence
  Description of Artificial Sequence: Synthetic oligonucleotide
aauaacagcguucaaccuu

SEQ ID NO: 978262 - RNA, 19 nt, Artificial Sequence
  Description of Artificial Sequence: Synthetic oligonucleotide
ugcaaaaguugaauuagug

SEQ ID NO: 978263 - RNA, 19 nt, Artificial Sequence
  Description of Artificial Sequence: Synthetic oligonucleotide
ugagcuguuagagaugagg

SEQ ID NO: 978264 - RNA, 19 nt, Artificial Sequence
  Description of Artificial Sequence: Synthetic oligonucleotide
ucguaugagauucagggaa

SEQ ID NO: 978265 - RNA, 19 nt, Artificial Sequence
  Description of Artificial Sequence: Synthetic oligonucleotide
ugguggguuacccaaacag

SEQ ID NO: 978266 - RNA, 19 nt, Artificial Sequence
  Description of Artificial Sequence: Synthetic oligonucleotide
acucaaguggagcugugcc

SEQ ID NO: 978267 - RNA, 19 nt, Artificial Sequence
  Description of Artificial Sequence: Synthetic oligonucleotide
uuuuaagcugacucaagug

SEQ ID NO: 978268 - RNA, 19 nt, Artificial Sequence
  Description of Artificial Sequence: Synthetic oligonucleotide
agagcagacaguguggccc

SEQ ID NO: 978269 - RNA, 19 nt, Artificial Sequence
  Description of Artificial Sequence: Synthetic oligonucleotide
acagguaaccuuuguggcc

SEQ ID NO: 978270 - RNA, 19 nt, Artificial Sequence
  Description of Artificial Sequence: Synthetic oligonucleotide
augagcgucacuuucucuc

SEQ ID NO: 978271 - RNA, 19 nt, Artificial Sequence
  Description of Artificial Sequence: Synthetic oligonucleotide
aaggacagugaccugugag

SEQ ID NO: 978272 - RNA, 19 nt, Artificial Sequence
  Description of Artificial Sequence: Synthetic oligonucleotide
aggguucauaagcaaauac

SEQ ID NO: 978273 - RNA, 19 nt, Artificial Sequence
  Description of Artificial Sequence: Synthetic oligonucleotide
ugacaguuaggacaguuac

SEQ ID NO: 978274 - RNA, 19 nt, Artificial Sequence
  Description of Artificial Sequence: Synthetic oligonucleotide
ucaugagugacucaccaaa

SEQ ID NO: 978275 - RNA, 19 nt, Artificial Sequence
  Description of Artificial Sequence: Synthetic oligonucleotide
aagaagaaauaacagcguu

SEQ ID NO: 978276 - RNA, 19 nt, Artificial Sequence
  Description of Artificial Sequence: Synthetic oligonucleotide
ucacaaaugcaccauccug

SEQ ID NO: 978277 - RNA, 19 nt, Artificial Sequence
  Description of Artificial Sequence: Synthetic oligonucleotide
ugagaguucaaauccuagc

SEQ ID NO: 978278 - RNA, 19 nt, Artificial Sequence
  Description of Artificial Sequence: Synthetic oligonucleotide
agagacucaagcuaaccug

SEQ ID NO: 978279 - RNA, 19 nt, Artificial Sequence
  Description of Artificial Sequence: Synthetic oligonucleotide
uccugguaaaacugcaagg

SEQ ID NO: 978280 - RNA, 19 nt, Artificial Sequence
  Description of Artificial Sequence: Synthetic oligonucleotide
ucucgauacucccagguga

SEQ ID NO: 978281 - RNA, 19 nt, Artificial Sequence
  Description of Artificial Sequence: Synthetic oligonucleotide
gagaucuccccuuugguug

SEQ ID NO: 978282 - RNA, 19 nt, Artificial Sequence
  Description of Artificial Sequence: Synthetic oligonucleotide
aauacugcaccagccuccc

SEQ ID NO: 978283 - RNA, 19 nt, Artificial Sequence
  Description of Artificial Sequence: Synthetic oligonucleotide
ucagaaagaaugagcguca

SEQ ID NO: 978284 - RNA, 19 nt, Artificial Sequence
  Description of Artificial Sequence: Synthetic oligonucleotide
aucuguuuguucuccguac

SEQ ID NO: 978285 - RNA, 19 nt, Artificial Sequence
  Description of Artificial Sequence: Synthetic oligonucleotide
caaacacuaacucaugguc

SEQ ID NO: 978286 - RNA, 19 nt, Artificial Sequence
  Description of Artificial Sequence: Synthetic oligonucleotide
aguguuuuccaacaucaca

SEQ ID NO: 978287 - RNA, 19 nt, Artificial Sequence
  Description of Artificial Sequence: Synthetic oligonucleotide
aaaaguugaauuagugacu

SEQ ID NO: 978288 - RNA, 19 nt, Artificial Sequence
  Description of Artificial Sequence: Synthetic oligonucleotide
acugcaaggguguuauggg

SEQ ID NO: 978289 - RNA, 19 nt, Artificial Sequence
  Description of Artificial Sequence: Synthetic oligonucleotide
agacaccaaacacuaacuc

SEQ ID NO: 978290 - RNA, 19 nt, Artificial Sequence
  Description of Artificial Sequence: Synthetic oligonucleotide
ucaucuuauucucuuacua

SEQ ID NO: 978291 - RNA, 19 nt, Artificial Sequence
  Description of Artificial Sequence: Synthetic oligonucleotide
aaauaacagcguucaaccu

SEQ ID NO: 978292 - RNA, 19 nt, Artificial Sequence
  Description of Artificial Sequence: Synthetic oligonucleotide
caagcauaucccauugucc

SEQ ID NO: 978293 - RNA, 19 nt, Artificial Sequence
  Description of Artificial Sequence: Synthetic oligonucleotide
ucuacucuaggaacaggag

SEQ ID NO: 978294 - RNA, 19 nt, Artificial Sequence
  Description of Artificial Sequence: Synthetic oligonucleotide
cucuaaggcuauuagacuc

SEQ ID NO: 978295 - RNA, 19 nt, Artificial Sequence
  Description of Artificial Sequence: Synthetic oligonucleotide
uguaccagguuccguagcc

SEQ ID NO: 978296 - RNA, 19 nt, Artificial Sequence
  Description of Artificial Sequence: Synthetic oligonucleotide
uagacucacaugaagcaac

SEQ ID NO: 978297 - RNA, 19 nt, Artificial Sequence
  Description of Artificial Sequence: Synthetic oligonucleotide
ucuaaggcuauuagacuca

SEQ ID NO: 978298 - RNA, 19 nt, Artificial Sequence
  Description of Artificial Sequence: Synthetic oligonucleotide
caucuuauucucuuacuac

SEQ ID NO: 978299 - RNA, 19 nt, Artificial Sequence
  Description of Artificial Sequence: Synthetic oligonucleotide
aaauccuagcuaacccucc

SEQ ID NO: 978300 - RNA, 19 nt, Artificial Sequence
  Description of Artificial Sequence: Synthetic oligonucleotide
ggcuauuagacucacauga

SEQ ID NO: 978301 - RNA, 19 nt, Artificial Sequence
  Description of Artificial Sequence: Synthetic oligonucleotide
uguuuuaagcugacucaag

SEQ ID NO: 978302 - RNA, 19 nt, Artificial Sequence
  Description of Artificial Sequence: Synthetic oligonucleotide
ucuuauucucuuacuacaa

SEQ ID NO: 978303 - RNA, 19 nt, Artificial Sequence
  Description of Artificial Sequence: Synthetic oligonucleotide
agcaccaucgaguuaucag

SEQ ID NO: 978304 - RNA, 19 nt, Artificial Sequence
  Description of Artificial Sequence: Synthetic oligonucleotide
ugggucauucacaaaacaa

SEQ ID NO: 978305 - RNA, 19 nt, Artificial Sequence
  Description of Artificial Sequence: Synthetic oligonucleotide
gacaccaaacacuaacuca

SEQ ID NO: 978306 - RNA, 19 nt, Artificial Sequence
  Description of Artificial Sequence: Synthetic oligonucleotide
aauucucuacucuccauuu

SEQ ID NO: 978307 - RNA, 19 nt, Artificial Sequence
  Description of Artificial Sequence: Synthetic oligonucleotide
ugaaguguuuuccaacauc

SEQ ID NO: 978308 - RNA, 19 nt, Artificial Sequence
  Description of Artificial Sequence: Synthetic oligonucleotide
uugugauucagaauaucau

SEQ ID NO: 978309 - RNA, 19 nt, Artificial Sequence
  Description of Artificial Sequence: Synthetic oligonucleotide
uuaucuuugucucgauacu

SEQ ID NO: 978310 - RNA, 19 nt, Artificial Sequence
  Description of Artificial Sequence: Synthetic oligonucleotide
uaagcaaauacugcaccag

SEQ ID NO: 978311 - RNA, 19 nt, Artificial Sequence
  Description of Artificial Sequence: Synthetic oligonucleotide
acccauguaacuuugguuu

SEQ ID NO: 978312 - RNA, 19 nt, Artificial Sequence
  Description of Artificial Sequence: Synthetic oligonucleotide
augcuaagagauccugagc

SEQ ID NO: 978313 - RNA, 19 nt, Artificial Sequence
  Description of Artificial Sequence: Synthetic oligonucleotide
uauugacaagcauauccca

SEQ ID NO: 978314 - RNA, 19 nt, Artificial Sequence
  Description of Artificial Sequence: Synthetic oligonucleotide
ugaauuagugacugccaug

SEQ ID NO: 978315 - RNA, 19 nt, Artificial Sequence
  Description of Artificial Sequence: Synthetic oligonucleotide
ugacaagcauaucccauug

SEQ ID NO: 978316 - RNA, 19 nt, Artificial Sequence
  Description of Artificial Sequence: Synthetic oligonucleotide
acucacaugaagcaacccu

SEQ ID NO: 978317 - RNA, 19 nt, Artificial Sequence
  Description of Artificial Sequence: Synthetic oligonucleotide
auagacauucaugucacug

SEQ ID NO: 978318 - RNA, 19 nt, Artificial Sequence
  Description of Artificial Sequence: Synthetic oligonucleotide
uguguacaauuuauuguac

SEQ ID NO: 978319 - RNA, 19 nt, Artificial Sequence
  Description of Artificial Sequence: Synthetic oligonucleotide
acagcguucaaccuuguaa

SEQ ID NO: 978320 - RNA, 19 nt, Artificial Sequence
  Description of Artificial Sequence: Synthetic oligonucleotide
uaagcugacucaaguggag

SEQ ID NO: 978321 - RNA, 19 nt, Artificial Sequence
  Description of Artificial Sequence: Synthetic oligonucleotide
caagcuaaccugucagugg

SEQ ID NO: 978322 - RNA, 19 nt, Artificial Sequence
  Description of Artificial Sequence: Synthetic oligonucleotide
uugaauuagugacugccau

SEQ ID NO: 978323 - RNA, 19 nt, Artificial Sequence
  Description of Artificial Sequence: Synthetic oligonucleotide
gacccgaucaaccuucccc

SEQ ID NO: 978324 - RNA, 19 nt, Artificial Sequence
  Description of Artificial Sequence: Synthetic oligonucleotide
cuguuagagaugaggagag

SEQ ID NO: 978325 - RNA, 19 nt, Artificial Sequence
  Description of Artificial Sequence: Synthetic oligonucleotide
ugcacagguaaccuuugug

SEQ ID NO: 978326 - RNA, 19 nt, Artificial Sequence
  Description of Artificial Sequence: Synthetic oligonucleotide
uauugcucaaguagucuac

SEQ ID NO: 978327 - RNA, 19 nt, Artificial Sequence
  Description of Artificial Sequence: Synthetic oligonucleotide
uccguagccguauacagaa

SEQ ID NO: 978328 - RNA, 19 nt, Artificial Sequence
  Description of Artificial Sequence: Synthetic oligonucleotide
ucaagcuaaccugucagug

SEQ ID NO: 978329 - RNA, 19 nt, Artificial Sequence
  Description of Artificial Sequence: Synthetic oligonucleotide
uucuccguacaccucagcu

SEQ ID NO: 978330 - RNA, 19 nt, Artificial Sequence
  Description of Artificial Sequence: Synthetic oligonucleotide
aggacaguuacaucugaug

SEQ ID NO: 978331 - RNA, 19 nt, Artificial Sequence
  Description of Artificial Sequence: Synthetic oligonucleotide
uuacccaaacagaugcaca

SEQ ID NO: 978332 - RNA, 19 nt, Artificial Sequence
  Description of Artificial Sequence: Synthetic oligonucleotide
gguucauaagcaaauacug

SEQ ID NO: 978333 - RNA, 19 nt, Artificial Sequence
  Description of Artificial Sequence: Synthetic oligonucleotide
uacucagagaaccacucau

SEQ ID NO: 978334 - RNA, 19 nt, Artificial Sequence
  Description of Artificial Sequence: Synthetic oligonucleotide
uauuguacuugugcugggg

SEQ ID NO: 978335 - RNA, 19 nt, Artificial Sequence
  Description of Artificial Sequence: Synthetic oligonucleotide
ucaaguagucuacugugua

SEQ ID NO: 978336 - RNA, 19 nt, Artificial Sequence
  Description of Artificial Sequence: Synthetic oligonucleotide
guuccguagccguauacag

SEQ ID NO: 978337 - RNA, 19 nt, Artificial Sequence
  Description of Artificial Sequence: Synthetic oligonucleotide
cucaccaaaagccaaccuc

SEQ ID NO: 978338 - RNA, 19 nt, Artificial Sequence
  Description of Artificial Sequence: Synthetic oligonucleotide
ucuguuuguucuccguaca

SEQ ID NO: 978339 - RNA, 19 nt, Artificial Sequence
  Description of Artificial Sequence: Synthetic oligonucleotide
cuccguacaccucagcugc

SEQ ID NO: 978340 - RNA, 19 nt, Artificial Sequence
  Description of Artificial Sequence: Synthetic oligonucleotide
acaaaucuuaucuuccaua

SEQ ID NO: 978341 - RNA, 19 nt, Artificial Sequence
  Description of Artificial Sequence: Synthetic oligonucleotide
agcuuuauucauguucuuc

SEQ ID NO: 978342 - RNA, 19 nt, Artificial Sequence
  Description of Artificial Sequence: Synthetic oligonucleotide
gaugaagaugcuaagagau

SEQ ID NO: 978343 - RNA, 19 nt, Artificial Sequence
  Description of Artificial Sequence: Synthetic oligonucleotide
ggguuacccaaacagaugc

SEQ ID NO: 978344 - RNA, 19 nt, Artificial Sequence
  Description of Artificial Sequence: Synthetic oligonucleotide
uuggaggagacugggaacc

SEQ ID NO: 978345 - RNA, 19 nt, Artificial Sequence
  Description of Artificial Sequence: Synthetic oligonucleotide
ugucucgauacucccaggu

SEQ ID NO: 978346 - RNA, 19 nt, Artificial Sequence
  Description of Artificial Sequence: Synthetic oligonucleotide
gugaccacagcugagcucc

SEQ ID NO: 978347 - RNA, 19 nt, Artificial Sequence
  Description of Artificial Sequence: Synthetic oligonucleotide
cacaaaugcaccauccuga

SEQ ID NO: 978348 - RNA, 19 nt, Artificial Sequence
  Description of Artificial Sequence: Synthetic oligonucleotide
uguuuguucuccguacacc

SEQ ID NO: 978349 - RNA, 19 nt, Artificial Sequence
  Description of Artificial Sequence: Synthetic oligonucleotide
guaaccuuuguggccaugg

SEQ ID NO: 978350 - RNA, 19 nt, Artificial Sequence
  Description of Artificial Sequence: Synthetic oligonucleotide
ucuccguacaccucagcug

SEQ ID NO: 978351 - RNA, 19 nt, Artificial Sequence
  Description of Artificial Sequence: Synthetic oligonucleotide
auucucuacucuccauuuc

SEQ ID NO: 978352 - RNA, 19 nt, Artificial Sequence
  Description of Artificial Sequence: Synthetic oligonucleotide
auccuagcuaacccucccc

SEQ ID NO: 978353 - RNA, 19 nt, Artificial Sequence
  Description of Artificial Sequence: Synthetic oligonucleotide
ugaucauccuucucugaga

SEQ ID NO: 978354 - RNA, 19 nt, Artificial Sequence
  Description of Artificial Sequence: Synthetic oligonucleotide
cuucaaggagacaccaaac

SEQ ID NO: 978355 - RNA, 19 nt, Artificial Sequence
  Description of Artificial Sequence: Synthetic oligonucleotide
auaacagcguucaaccuug

SEQ ID NO: 978356 - RNA, 19 nt, Artificial Sequence
  Description of Artificial Sequence: Synthetic oligonucleotide
cugagaguucaaauccuag

SEQ ID NO: 978357 - RNA, 19 nt, Artificial Sequence
  Description of Artificial Sequence: Synthetic oligonucleotide
auauugcucaaguagucua

SEQ ID NO: 978358 - RNA, 19 nt, Artificial Sequence
  Description of Artificial Sequence: Synthetic oligonucleotide
aaguguuuuccaacaucac

SEQ ID NO: 978359 - RNA, 19 nt, Artificial Sequence
  Description of Artificial Sequence: Synthetic oligonucleotide
auucacaaaacaaaucuua

SEQ ID NO: 978360 - RNA, 19 nt, Artificial Sequence
  Description of Artificial Sequence: Synthetic oligonucleotide
ucuuccgggacaugcuucc

SEQ ID NO: 978361 - RNA, 19 nt, Artificial Sequence
  Description of Artificial Sequence: Synthetic oligonucleotide
caaguagucuacuguguac

SEQ ID NO: 978362 - RNA, 19 nt, Artificial Sequence
  Description of Artificial Sequence: Synthetic oligonucleotide
aaugagcgucacuuucucu

SEQ ID NO: 978363 - RNA, 19 nt, Artificial Sequence
  Description of Artificial Sequence: Synthetic oligonucleotide
ucugucguaugagauucag

SEQ ID NO: 978364 - RNA, 19 nt, Artificial Sequence
  Description of Artificial Sequence: Synthetic oligonucleotide
agcgucacuuucucucccc

SEQ ID NO: 978365 - RNA, 19 nt, Artificial Sequence
  Description of Artificial Sequence: Synthetic oligonucleotide
agacugggaacccaagagu

SEQ ID NO: 978366 - RNA, 19 nt, Artificial Sequence
  Description of Artificial Sequence: Synthetic oligonucleotide
gaauuagugacugccaugu

SEQ ID NO: 978367 - RNA, 19 nt, Artificial Sequence
  Description of Artificial Sequence: Synthetic oligonucleotide
ugacucaccaaaagccaac

SEQ ID NO: 978368 - RNA, 19 nt, Artificial Sequence
  Description of Artificial Sequence: Synthetic oligonucleotide
ugucagacccgaucaaccu

SEQ ID NO: 978369 - RNA, 19 nt, Artificial Sequence
  Description of Artificial Sequence: Synthetic oligonucleotide
ugagcgucacuuucucucc

SEQ ID NO: 978370 - RNA, 19 nt, Artificial Sequence
  Description of Artificial Sequence: Synthetic oligonucleotide
agacucacaugaagcaacc

SEQ ID NO: 978371 - RNA, 19 nt, Artificial Sequence
  Description of Artificial Sequence: Synthetic oligonucleotide
aucuuguguagcugagauc

SEQ ID NO: 978372 - RNA, 19 nt, Artificial Sequence
  Description of Artificial Sequence: Synthetic oligonucleotide
uuagggacaacaccauauu

SEQ ID NO: 978373 - RNA, 19 nt, Artificial Sequence
  Description of Artificial Sequence: Synthetic oligonucleotide
uccccucuaaggcuauuag

SEQ ID NO: 978374 - RNA, 19 nt, Artificial Sequence
  Description of Artificial Sequence: Synthetic oligonucleotide
cucccuccaaccauauugc

SEQ ID NO: 978375 - RNA, 19 nt, Artificial Sequence
  Description of Artificial Sequence: Synthetic oligonucleotide
uuagacucacaugaagcaa

SEQ ID NO: 978376 - RNA, 19 nt, Artificial Sequence
  Description of Artificial Sequence: Synthetic oligonucleotide
aaggucucugguggguuac

SEQ ID NO: 978377 - RNA, 19 nt, Artificial Sequence
  Description of Artificial Sequence: Synthetic oligonucleotide
gauucagggaagcauuucu

SEQ ID NO: 978378 - RNA, 19 nt, Artificial Sequence
  Description of Artificial Sequence: Synthetic oligonucleotide
gcauaaagcaucuuuccca

SEQ ID NO: 978379 - RNA, 19 nt, Artificial Sequence
  Description of Artificial Sequence: Synthetic oligonucleotide
ggaacagccacccauguaa

SEQ ID NO: 978380 - RNA, 19 nt, Artificial Sequence
  Description of Artificial Sequence: Synthetic oligonucleotide
uacucccaggugaaggucu

SEQ ID NO: 978381 - RNA, 19 nt, Artificial Sequence
  Description of Artificial Sequence: Synthetic oligonucleotide
augcacaccacucggaaua

SEQ ID NO: 978382 - RNA, 19 nt, Artificial Sequence
  Description of Artificial Sequence: Synthetic oligonucleotide
uaaccugucaguggggcac

SEQ ID NO: 978383 - RNA, 19 nt, Artificial Sequence
  Description of Artificial Sequence: Synthetic oligonucleotide
aucgaguuaucagaaagaa

SEQ ID NO: 978384 - RNA, 19 nt, Artificial Sequence
  Description of Artificial Sequence: Synthetic oligonucleotide
uuccguagccguauacaga

SEQ ID NO: 978385 - RNA, 19 nt, Artificial Sequence
  Description of Artificial Sequence: Synthetic oligonucleotide
cugucguaugagauucagg

SEQ ID NO: 978386 - RNA, 19 nt, Artificial Sequence
  Description of Artificial Sequence: Synthetic oligonucleotide
aagcauuucuuagggacaa

SEQ ID NO: 978387 - RNA, 19 nt, Artificial Sequence
  Description of Artificial Sequence: Synthetic oligonucleotide
gcucaaguagucuacugug

SEQ ID NO: 978388 - RNA, 19 nt, Artificial Sequence
  Description of Artificial Sequence: Synthetic oligonucleotide
agcauucaagaagaaauaa

SEQ ID NO: 978389 - RNA, 19 nt, Artificial Sequence
  Description of Artificial Sequence: Synthetic oligonucleotide
uugcucaaguagucuacug

SEQ ID NO: 978390 - RNA, 19 nt, Artificial Sequence
  Description of Artificial Sequence: Synthetic oligonucleotide
ccaucgaguuaucagaaag

SEQ ID NO: 978391 - RNA, 19 nt, Artificial Sequence
  Description of Artificial Sequence: Synthetic oligonucleotide
gagcuguuagagaugagga

SEQ ID NO: 978392 - RNA, 19 nt, Artificial Sequence
  Description of Artificial Sequence: Synthetic oligonucleotide
uuaugggaccaaucuugug

SEQ ID NO: 978393 - RNA, 19 nt, Artificial Sequence
  Description of Artificial Sequence: Synthetic oligonucleotide
gaaugagcgucacuuucuc

SEQ ID NO: 978394 - RNA, 19 nt, Artificial Sequence
  Description of Artificial Sequence: Synthetic oligonucleotide
cacucaucagucaugcaca

SEQ ID NO: 978395 - RNA, 19 nt, Artificial Sequence
  Description of Artificial Sequence: Synthetic oligonucleotide
caucgaguuaucagaaaga

SEQ ID NO: 978396 - RNA, 19 nt, Artificial Sequence
  Description of Artificial Sequence: Synthetic oligonucleotide
aucaaccuuccccucuaag

SEQ ID NO: 978397 - RNA, 19 nt, Artificial Sequence
  Description of Artificial Sequence: Synthetic oligonucleotide
acccgaucaaccuuccccu

SEQ ID NO: 978398 - RNA, 19 nt, Artificial Sequence
  Description of Artificial Sequence: Synthetic oligonucleotide
gaagcauuucuuagggaca

SEQ ID NO: 978399 - RNA, 19 nt, Artificial Sequence
  Description of Artificial Sequence: Synthetic oligonucleotide
aggcuauuagacucacaug

SEQ ID NO: 978400 - RNA, 19 nt, Artificial Sequence
  Description of Artificial Sequence: Synthetic oligonucleotide
gugaaggucauggcguggg

SEQ ID NO: 978401 - RNA, 19 nt, Artificial Sequence
  Description of Artificial Sequence: Synthetic oligonucleotide
augagauucagggaagcau

SEQ ID NO: 978402 - RNA, 19 nt, Artificial Sequence
  Description of Artificial Sequence: Synthetic oligonucleotide
auggcgugggucaugagug

SEQ ID NO: 978403 - RNA, 19 nt, Artificial Sequence
  Description of Artificial Sequence: Synthetic oligonucleotide
augccggcaggacaauggg

SEQ ID NO: 978404 - RNA, 19 nt, Artificial Sequence
  Description of Artificial Sequence: Synthetic oligonucleotide
uucuuagggacaacaccau

SEQ ID NO: 978405 - RNA, 19 nt, Artificial Sequence
  Description of Artificial Sequence: Synthetic oligonucleotide
caaucuacucuaggaacag

SEQ ID NO: 978406 - RNA, 19 nt, Artificial Sequence
  Description of Artificial Sequence: Synthetic oligonucleotide
uagggacaacaccauauuu

SEQ ID NO: 978407 - RNA, 19 nt, Artificial Sequence
  Description of Artificial Sequence: Synthetic oligonucleotide
cagucaugcacagguaacc

SEQ ID NO: 978408 - RNA, 19 nt, Artificial Sequence
  Description of Artificial Sequence: Synthetic oligonucleotide
uuuguucuccguacaccuc

SEQ ID NO: 978409 - RNA, 19 nt, Artificial Sequence
  Description of Artificial Sequence: Synthetic oligonucleotide
cacucggaauaucuccucc

SEQ ID NO: 978410 - RNA, 19 nt, Artificial Sequence
  Description of Artificial Sequence: Synthetic oligonucleotide
agguuccguagccguauac

SEQ ID NO: 978411 - RNA, 19 nt, Artificial Sequence
  Description of Artificial Sequence: Synthetic oligonucleotide
uagccguauacagaauucu

SEQ ID NO: 978412 - RNA, 19 nt, Artificial Sequence
  Description of Artificial Sequence: Synthetic oligonucleotide
uugguugcuccacugugua

SEQ ID NO: 978413 - RNA, 19 nt, Artificial Sequence
  Description of Artificial Sequence: Synthetic oligonucleotide
uaccaccucguagacauac

SEQ ID NO: 978414 - RNA, 19 nt, Artificial Sequence
  Description of Artificial Sequence: Synthetic oligonucleotide
uaggacaguuacaucugau

SEQ ID NO: 978415 - RNA, 19 nt, Artificial Sequence
  Description of Artificial Sequence: Synthetic oligonucleotide
acuaacucauggucauaga

SEQ ID NO: 978416 - RNA, 19 nt, Artificial Sequence
  Description of Artificial Sequence: Synthetic oligonucleotide
agccguauacagaauucuc

SEQ ID NO: 978417 - RNA, 19 nt, Artificial Sequence
  Description of Artificial Sequence: Synthetic oligonucleotide
uugucucgauacucccagg

SEQ ID NO: 978418 - RNA, 19 nt, Artificial Sequence
  Description of Artificial Sequence: Synthetic oligonucleotide
agugccacucacucagcca

SEQ ID NO: 978419 - RNA, 19 nt, Artificial Sequence
  Description of Artificial Sequence: Synthetic oligonucleotide
cagagaaccacucaucagu

SEQ ID NO: 978420 - RNA, 19 nt, Artificial Sequence
  Description of Artificial Sequence: Synthetic oligonucleotide
cuguuuguucuccguacac

SEQ ID NO: 978421 - RNA, 19 nt, Artificial Sequence
  Description of Artificial Sequence: Synthetic oligonucleotide
aaugcaccauccugaucau

SEQ ID NO: 978422 - RNA, 19 nt, Artificial Sequence
  Description of Artificial Sequence: Synthetic oligonucleotide
guauacagaauucucucau

SEQ ID NO: 978423 - RNA, 19 nt, Artificial Sequence
  Description of Artificial Sequence: Synthetic oligonucleotide
ugccucugucguaugagau

SEQ ID NO: 978424 - RNA, 19 nt, Artificial Sequence
  Description of Artificial Sequence: Synthetic oligonucleotide
gucaguggggcaccccacg

SEQ ID NO: 978425 - RNA, 19 nt, Artificial Sequence
  Description of Artificial Sequence: Synthetic oligonucleotide
ccuccaaccauauugcuca

SEQ ID NO: 978426 - RNA, 19 nt, Artificial Sequence
  Description of Artificial Sequence: Synthetic oligonucleotide
uaaggcuauuagacucaca

SEQ ID NO: 978427 - RNA, 19 nt, Artificial Sequence
  Description of Artificial Sequence: Synthetic oligonucleotide
cagcguucaaccuuguaaa

SEQ ID NO: 978428 - RNA, 19 nt, Artificial Sequence
  Description of Artificial Sequence: Synthetic oligonucleotide
gaucuguuuguucuccgua

SEQ ID NO: 978429 - RNA, 19 nt, Artificial Sequence
  Description of Artificial Sequence: Synthetic oligonucleotide
cuuagggacaacaccauau

SEQ ID NO: 978430 - RNA, 19 nt, Artificial Sequence
  Description of Artificial Sequence: Synthetic oligonucleotide
uguuagagaugaggagagc

SEQ ID NO: 978431 - RNA, 19 nt, Artificial Sequence
  Description of Artificial Sequence: Synthetic oligonucleotide
uacauccgaugggaggagg

SEQ ID NO: 978432 - RNA, 19 nt, Artificial Sequence
  Description of Artificial Sequence: Synthetic oligonucleotide
acauacucagagaaccacu

SEQ ID NO: 978433 - RNA, 19 nt, Artificial Sequence
  Description of Artificial Sequence: Synthetic oligonucleotide
agggacaacaccauauuuu

SEQ ID NO: 978434 - RNA, 19 nt, Artificial Sequence
  Description of Artificial Sequence: Synthetic oligonucleotide
gcuguuagagaugaggaga

SEQ ID NO: 978435 - RNA, 19 nt, Artificial Sequence
  Description of Artificial Sequence: Synthetic oligonucleotide
gucucgauacucccaggug

SEQ ID NO: 978436 - RNA, 19 nt, Artificial Sequence
  Description of Artificial Sequence: Synthetic oligonucleotide
ugggaacccaagagucugc

SEQ ID NO: 978437 - RNA, 19 nt, Artificial Sequence
  Description of Artificial Sequence: Synthetic oligonucleotide
cccaaucuacucuaggaac

SEQ ID NO: 978438 - RNA, 19 nt, Artificial Sequence
  Description of Artificial Sequence: Synthetic oligonucleotide
aauuagugacugccaugua

SEQ ID NO: 978439 - RNA, 19 nt, Artificial Sequence
  Description of Artificial Sequence: Synthetic oligonucleotide
caugcacagguaaccuuug

SEQ ID NO: 978440 - RNA, 19 nt, Artificial Sequence
  Description of Artificial Sequence: Synthetic oligonucleotide
agucaugcacagguaaccu

SEQ ID NO: 978441 - RNA, 19 nt, Artificial Sequence
  Description of Artificial Sequence: Synthetic oligonucleotide
cacgugaccacagcugagc

SEQ ID NO: 978442 - RNA, 19 nt, Artificial Sequence
  Description of Artificial Sequence: Synthetic oligonucleotide
cugggaacccaagagucug

SEQ ID NO: 978443 - RNA, 19 nt, Artificial Sequence
  Description of Artificial Sequence: Synthetic oligonucleotide
gucguaugagauucaggga

SEQ ID NO: 978444 - RNA, 19 nt, Artificial Sequence
  Description of Artificial Sequence: Synthetic oligonucleotide
gacaguuaggacaguuaca

SEQ ID NO: 978445 - RNA, 19 nt, Artificial Sequence
  Description of Artificial Sequence: Synthetic oligonucleotide
gcucaucuuauucucuuac

SEQ ID NO: 978446 - RNA, 19 nt, Artificial Sequence
  Description of Artificial Sequence: Synthetic oligonucleotide
agugaaggucauggcgugg

SEQ ID NO: 978447 - RNA, 19 nt, Artificial Sequence
  Description of Artificial Sequence: Synthetic oligonucleotide
aaacugcaaggguguuaug

SEQ ID NO: 978448 - RNA, 19 nt, Artificial Sequence
  Description of Artificial Sequence: Synthetic oligonucleotide
ggugaaggucucugguggg

SEQ ID NO: 978449 - RNA, 19 nt, Artificial Sequence
  Description of Artificial Sequence: Synthetic oligonucleotide
guagccguauacagaauuc

SEQ ID NO: 978450 - RNA, 19 nt, Artificial Sequence
  Description of Artificial Sequence: Synthetic oligonucleotide
gagaaccacucaucaguca

SEQ ID NO: 978451 - RNA, 19 nt, Artificial Sequence
  Description of Artificial Sequence: Synthetic oligonucleotide
gugggucauucacaaaaca

SEQ ID NO: 978452 - RNA, 19 nt, Artificial Sequence
  Description of Artificial Sequence: Synthetic oligonucleotide
ugguuguuauacagcguuu

SEQ ID NO: 978453 - RNA, 19 nt, Artificial Sequence
  Description of Artificial Sequence: Synthetic oligonucleotide
ccugacaagauuuugcucu

SEQ ID NO: 978454 - RNA, 19 nt, Artificial Sequence
  Description of Artificial Sequence: Synthetic oligonucleotide
cagugaaggucauggcgug

SEQ ID NO: 978455 - RNA, 19 nt, Artificial Sequence
  Description of Artificial Sequence: Synthetic oligonucleotide
agcaacccugcaaaaguug

SEQ ID NO: 978456 - RNA, 19 nt, Artificial Sequence
  Description of Artificial Sequence: Synthetic oligonucleotide
agaugcuaagagauccuga

SEQ ID NO: 978457 - RNA, 19 nt, Artificial Sequence
  Description of Artificial Sequence: Synthetic oligonucleotide
cuaaggcuauuagacucac

SEQ ID NO: 978458 - RNA, 19 nt, Artificial Sequence
  Description of Artificial Sequence: Synthetic oligonucleotide
ugcucaucuuauucucuua

SEQ ID NO: 978459 - RNA, 19 nt, Artificial Sequence
  Description of Artificial Sequence: Synthetic oligonucleotide
uggggcaccccacgugacc

SEQ ID NO: 978460 - RNA, 19 nt, Artificial Sequence
  Description of Artificial Sequence: Synthetic oligonucleotide
guaccagguuccguagccg

SEQ ID NO: 978461 - RNA, 19 nt, Artificial Sequence
  Description of Artificial Sequence: Synthetic oligonucleotide
gacucacaugaagcaaccc

SEQ ID NO: 978462 - RNA, 19 nt, Artificial Sequence
  Description of Artificial Sequence: Synthetic oligonucleotide
aacagcguucaaccuugua

SEQ ID NO: 978463 - RNA, 19 nt, Artificial Sequence
  Description of Artificial Sequence: Synthetic oligonucleotide
gcaaggguguuaugggacc

SEQ ID NO: 978464 - RNA, 19 nt, Artificial Sequence
  Description of Artificial Sequence: Synthetic oligonucleotide
caccucguagacauacuca

SEQ ID NO: 978465 - RNA, 19 nt, Artificial Sequence
  Description of Artificial Sequence: Synthetic oligonucleotide
ccguauacagaauucucuc

SEQ ID NO: 978466 - RNA, 19 nt, Artificial Sequence
  Description of Artificial Sequence: Synthetic oligonucleotide
cagguaaccuuuguggcca

SEQ ID NO: 978467 - RNA, 19 nt, Artificial Sequence
  Description of Artificial Sequence: Synthetic oligonucleotide
gagacucaagcuaaccugu

SEQ ID NO: 978468 - RNA, 19 nt, Artificial Sequence
  Description of Artificial Sequence: Synthetic oligonucleotide
ggaaucaugucagacccga

SEQ ID NO: 978469 - RNA, 19 nt, Artificial Sequence
  Description of Artificial Sequence: Synthetic oligonucleotide
cuguguaccagguuccgua

SEQ ID NO: 978470 - RNA, 19 nt, Artificial Sequence
  Description of Artificial Sequence: Synthetic oligonucleotide
gggucauucacaaaacaaa

SEQ ID NO: 978471 - RNA, 19 nt, Artificial Sequence
  Description of Artificial Sequence: Synthetic oligonucleotide
cuguuuuaagcugacucaa

SEQ ID NO: 978472 - RNA, 19 nt, Artificial Sequence
  Description of Artificial Sequence: Synthetic oligonucleotide
aagcaacccugcaaaaguu

SEQ ID NO: 978473 - RNA, 19 nt, Artificial Sequence
  Description of Artificial Sequence: Synthetic oligonucleotide
cacaccacucggaauaucu

SEQ ID NO: 978474 - RNA, 19 nt, Artificial Sequence
  Description of Artificial Sequence: Synthetic oligonucleotide
agcauuucuuagggacaac

SEQ ID NO: 978475 - RNA, 19 nt, Artificial Sequence
  Description of Artificial Sequence: Synthetic oligonucleotide
aagagauccugagcuguua

SEQ ID NO: 978476 - RNA, 19 nt, Artificial Sequence
  Description of Artificial Sequence: Synthetic oligonucleotide
aggaaucaugucagacccg

SEQ ID NO: 978477 - RNA, 19 nt, Artificial Sequence
  Description of Artificial Sequence: Synthetic oligonucleotide
uaggguucauaagcaaaua

SEQ ID NO: 978478 - RNA, 19 nt, Artificial Sequence
  Description of Artificial Sequence: Synthetic oligonucleotide
agcuccugacaagauuuug

SEQ ID NO: 978479 - RNA, 19 nt, Artificial Sequence
  Description of Artificial Sequence: Synthetic oligonucleotide
cugcaaggguguuauggga

SEQ ID NO: 978480 - RNA, 19 nt, Artificial Sequence
  Description of Artificial Sequence: Synthetic oligonucleotide
gcuacauccgaugggagga

SEQ ID NO: 978481 - RNA, 19 nt, Artificial Sequence
  Description of Artificial Sequence: Synthetic oligonucleotide
ucccuccaaccauauugcu

SEQ ID NO: 978482 - RNA, 19 nt, Artificial Sequence
  Description of Artificial Sequence: Synthetic oligonucleotide
caucuuguguagcugagau

SEQ ID NO: 978483 - RNA, 19 nt, Artificial Sequence
  Description of Artificial Sequence: Synthetic oligonucleotide
caguuaggacaguuacauc

SEQ ID NO: 978484 - RNA, 19 nt, Artificial Sequence
  Description of Artificial Sequence: Synthetic oligonucleotide
cauaucccauuguccacca

SEQ ID NO: 978485 - RNA, 19 nt, Artificial Sequence
  Description of Artificial Sequence: Synthetic oligonucleotide
gaaggacagugaccuguga

SEQ ID NO: 978486 - RNA, 19 nt, Artificial Sequence
  Description of Artificial Sequence: Synthetic oligonucleotide
cucgauacucccaggugaa

SEQ ID NO: 978487 - RNA, 19 nt, Artificial Sequence
  Description of Artificial Sequence: Synthetic oligonucleotide
cagagacucaagcuaaccu

SEQ ID NO: 978488 - RNA, 19 nt, Artificial Sequence
  Description of Artificial Sequence: Synthetic oligonucleotide
cuuguguagcugagaucuc

SEQ ID NO: 978489 - RNA, 19 nt, Artificial Sequence
  Description of Artificial Sequence: Synthetic oligonucleotide
caccaucgaguuaucagaa

SEQ ID NO: 978490 - RNA, 19 nt, Artificial Sequence
  Description of Artificial Sequence: Synthetic oligonucleotide
caaaugcaccauccugauc

SEQ ID NO: 978491 - RNA, 19 nt, Artificial Sequence
  Description of Artificial Sequence: Synthetic oligonucleotide
aauccccaagacagagacu

SEQ ID NO: 978492 - RNA, 19 nt, Artificial Sequence
  Description of Artificial Sequence: Synthetic oligonucleotide
ugguugcuccacuguguac

SEQ ID NO: 978493 - RNA, 19 nt, Artificial Sequence
  Description of Artificial Sequence: Synthetic oligonucleotide
cacuguguaccagguuccg

SEQ ID NO: 978494 - RNA, 19 nt, Artificial Sequence
  Description of Artificial Sequence: Synthetic oligonucleotide
cagcuacauccgaugggag

SEQ ID NO: 978495 - RNA, 19 nt, Artificial Sequence
  Description of Artificial Sequence: Synthetic oligonucleotide
cguaugagauucagggaag

SEQ ID NO: 978496 - RNA, 19 nt, Artificial Sequence
  Description of Artificial Sequence: Synthetic oligonucleotide
acugagaguucaaauccua

SEQ ID NO: 978497 - RNA, 19 nt, Artificial Sequence
  Description of Artificial Sequence: Synthetic oligonucleotide
cuaagagauccugagcugu

SEQ ID NO: 978498 - RNA, 19 nt, Artificial Sequence
  Description of Artificial Sequence: Synthetic oligonucleotide
gcauuucuuagggacaaca

SEQ ID NO: 978499 - RNA, 19 nt, Artificial Sequence
  Description of Artificial Sequence: Synthetic oligonucleotide
cuaaccugucaguggggca

SEQ ID NO: 978500 - RNA, 19 nt, Artificial Sequence
  Description of Artificial Sequence: Synthetic oligonucleotide
gcuaaccugucaguggggc

SEQ ID NO: 978501 - RNA, 19 nt, Artificial Sequence
  Description of Artificial Sequence: Synthetic oligonucleotide
cguagacauacucagagaa

SEQ ID NO: 978502 - RNA, 19 nt, Artificial Sequence
  Description of Artificial Sequence: Synthetic oligonucleotide
auucagggaagcauuucuu

SEQ ID NO: 978503 - RNA, 19 nt, Artificial Sequence
  Description of Artificial Sequence: Synthetic oligonucleotide
uccccuuugguugcuccac

SEQ ID NO: 978504 - RNA, 19 nt, Artificial Sequence
  Description of Artificial Sequence: Synthetic oligonucleotide
ccaugggaucccaugccgg

SEQ ID NO: 978505 - RNA, 19 nt, Artificial Sequence
  Description of Artificial Sequence: Synthetic oligonucleotide
aguggagcugugccccaca

SEQ ID NO: 978506 - RNA, 19 nt, Artificial Sequence
  Description of Artificial Sequence: Synthetic oligonucleotide
gaaggucucugguggguua

SEQ ID NO: 978507 - RNA, 19 nt, Artificial Sequence
  Description of Artificial Sequence: Synthetic oligonucleotide
aaggguguuaugggaccaa

SEQ ID NO: 978508 - RNA, 19 nt, Artificial Sequence
  Description of Artificial Sequence: Synthetic oligonucleotide
gcagcuacauccgauggga

SEQ ID NO: 978509 - RNA, 19 nt, Artificial Sequence
  Description of Artificial Sequence: Synthetic oligonucleotide
ccucugucguaugagauuc

SEQ ID NO: 978510 - RNA, 19 nt, Artificial Sequence
  Description of Artificial Sequence: Synthetic oligonucleotide
cauggcgugggucaugagu

SEQ ID NO: 978511 - RNA, 19 nt, Artificial Sequence
  Description of Artificial Sequence: Synthetic oligonucleotide
cagacccgaucaaccuucc

SEQ ID NO: 978512 - RNA, 19 nt, Artificial Sequence
  Description of Artificial Sequence: Synthetic oligonucleotide
gaacaggagcacagaucug

SEQ ID NO: 978513 - RNA, 19 nt, Artificial Sequence
  Description of Artificial Sequence: Synthetic oligonucleotide
gacaagcauaucccauugu

SEQ ID NO: 978514 - RNA, 19 nt, Artificial Sequence
  Description of Artificial Sequence: Synthetic oligonucleotide
uaacagcguucaaccuugu

SEQ ID NO: 978515 - RNA, 19 nt, Artificial Sequence
  Description of Artificial Sequence: Synthetic oligonucleotide
aucuugugauucagaauau

SEQ ID NO: 978516 - RNA, 19 nt, Artificial Sequence
  Description of Artificial Sequence: Synthetic oligonucleotide
cauggucuucaccccagga

SEQ ID NO: 978517 - RNA, 19 nt, Artificial Sequence
  Description of Artificial Sequence: Synthetic oligonucleotide
uggcgugggucaugaguga

SEQ ID NO: 978518 - RNA, 19 nt, Artificial Sequence
  Description of Artificial Sequence: Synthetic oligonucleotide
cagcugagcuccugacaag

SEQ ID NO: 978519 - RNA, 19 nt, Artificial Sequence
  Description of Artificial Sequence: Synthetic oligonucleotide
gguggguuacccaaacaga

SEQ ID NO: 978520 - RNA, 19 nt, Artificial Sequence
  Description of Artificial Sequence: Synthetic oligonucleotide
agcuaaccugucagugggg

SEQ ID NO: 978521 - RNA, 19 nt, Artificial Sequence
  Description of Artificial Sequence: Synthetic oligonucleotide
gucucugguggguuaccca

SEQ ID NO: 978522 - RNA, 19 nt, Artificial Sequence
  Description of Artificial Sequence: Synthetic oligonucleotide
cugguaaaacugcaagggu

SEQ ID NO: 978523 - RNA, 19 nt, Artificial Sequence
  Description of Artificial Sequence: Synthetic oligonucleotide
caccccaauccccaagaca

SEQ ID NO: 978524 - RNA, 19 nt, Artificial Sequence
  Description of Artificial Sequence: Synthetic oligonucleotide
acauccgaugggaggagga

SEQ ID NO: 978525 - RNA, 19 nt, Artificial Sequence
  Description of Artificial Sequence: Synthetic oligonucleotide
acuguguaccagguuccgu

SEQ ID NO: 978526 - RNA, 19 nt, Artificial Sequence
  Description of Artificial Sequence: Synthetic oligonucleotide
cuacauccgaugggaggag

SEQ ID NO: 978527 - RNA, 19 nt, Artificial Sequence
  Description of Artificial Sequence: Synthetic oligonucleotide
gaugcacaccacucggaau

SEQ ID NO: 978528 - RNA, 19 nt, Artificial Sequence
  Description of Artificial Sequence: Synthetic oligonucleotide
cugagcuguuagagaugag

SEQ ID NO: 978529 - RNA, 19 nt, Artificial Sequence
  Description of Artificial Sequence: Synthetic oligonucleotide
uccguacaccucagcugcu

SEQ ID NO: 978530 - RNA, 19 nt, Artificial Sequence
  Description of Artificial Sequence: Synthetic oligonucleotide
guuaugggaccaaucuugu

SEQ ID NO: 978531 - RNA, 19 nt, Artificial Sequence
  Description of Artificial Sequence: Synthetic oligonucleotide
gguuccguagccguauaca

SEQ ID NO: 978532 - RNA, 19 nt, Artificial Sequence
  Description of Artificial Sequence: Synthetic oligonucleotide
guagcugagaucuccccuu

SEQ ID NO: 978533 - RNA, 19 nt, Artificial Sequence
  Description of Artificial Sequence: Synthetic oligonucleotide
ggggccgugggucauucac

SEQ ID NO: 978534 - RNA, 19 nt, Artificial Sequence
  Description of Artificial Sequence: Synthetic oligonucleotide
auccgaugggaggaggaaa

SEQ ID NO: 978535 - RNA, 19 nt, Artificial Sequence
  Description of Artificial Sequence: Synthetic oligonucleotide
ucccauuguccaccaucau

SEQ ID NO: 978536 - RNA, 19 nt, Artificial Sequence
  Description of Artificial Sequence: Synthetic oligonucleotide
ugcacaccacucggaauau

SEQ ID NO: 978537 - RNA, 19 nt, Artificial Sequence
  Description of Artificial Sequence: Synthetic oligonucleotide
gaucaaccuuccccucuaa

SEQ ID NO: 978538 - RNA, 19 nt, Artificial Sequence
  Description of Artificial Sequence: Synthetic oligonucleotide
cccuccaaccauauugcuc

SEQ ID NO: 978539 - RNA, 19 nt, Artificial Sequence
  Description of Artificial Sequence: Synthetic oligonucleotide
gcaacccugcaaaaguuga

SEQ ID NO: 978540 - RNA, 19 nt, Artificial Sequence
  Description of Artificial Sequence: Synthetic oligonucleotide
ccgugggucauucacaaaa

SEQ ID NO: 978541 - RNA, 19 nt, Artificial Sequence
  Description of Artificial Sequence: Synthetic oligonucleotide
caguggggcaccccacgug

SEQ ID NO: 978542 - RNA, 19 nt, Artificial Sequence
  Description of Artificial Sequence: Synthetic oligonucleotide
cucaagcuaaccugucagu

SEQ ID NO: 978543 - RNA, 19 nt, Artificial Sequence
  Description of Artificial Sequence: Synthetic oligonucleotide
ugcuugccucugucguaug

SEQ ID NO: 978544 - RNA, 19 nt, Artificial Sequence
  Description of Artificial Sequence: Synthetic oligonucleotide
ccaccucguagacauacuc

SEQ ID NO: 978545 - RNA, 19 nt, Artificial Sequence
  Description of Artificial Sequence: Synthetic oligonucleotide
guguuaugggaccaaucuu

SEQ ID NO: 978546 - RNA, 19 nt, Artificial Sequence
  Description of Artificial Sequence: Synthetic oligonucleotide
cuuggcagcuacauccgau

SEQ ID NO: 978547 - RNA, 19 nt, Artificial Sequence
  Description of Artificial Sequence: Synthetic oligonucleotide
ugggaccaaucuuguggua

SEQ ID NO: 978548 - RNA, 19 nt, Artificial Sequence
  Description of Artificial Sequence: Synthetic oligonucleotide
gggaccaaucuugugguaa

SEQ ID NO: 978549 - RNA, 19 nt, Artificial Sequence
  Description of Artificial Sequence: Synthetic oligonucleotide
caaggguguuaugggacca

SEQ ID NO: 978550 - RNA, 19 nt, Artificial Sequence
  Description of Artificial Sequence: Synthetic oligonucleotide
gcagugaaggucauggcgu

SEQ ID NO: 978551 - RNA, 19 nt, Artificial Sequence
  Description of Artificial Sequence: Synthetic oligonucleotide
cgugggucauucacaaaac

SEQ ID NO: 978552 - RNA, 19 nt, Artificial Sequence
  Description of Artificial Sequence: Synthetic oligonucleotide
gcuauuagacucacaugaa

SEQ ID NO: 978553 - RNA, 19 nt, Artificial Sequence
  Description of Artificial Sequence: Synthetic oligonucleotide
aggguguuaugggaccaau

SEQ ID NO: 978554 - RNA, 19 nt, Artificial Sequence
  Description of Artificial Sequence: Synthetic oligonucleotide
ccaaacacuaacucauggu

SEQ ID NO: 978555 - RNA, 19 nt, Artificial Sequence
  Description of Artificial Sequence: Synthetic oligonucleotide
cugguggguuacccaaaca

SEQ ID NO: 978556 - RNA, 19 nt, Artificial Sequence
  Description of Artificial Sequence: Synthetic oligonucleotide
cccugcaaaaguugaauua

SEQ ID NO: 978557 - RNA, 19 nt, Artificial Sequence
  Description of Artificial Sequence: Synthetic oligonucleotide
cucugucguaugagauuca

SEQ ID NO: 978558 - RNA, 19 nt, Artificial Sequence
  Description of Artificial Sequence: Synthetic oligonucleotide
gccguauacagaauucucu

SEQ ID NO: 978559 - RNA, 19 nt, Artificial Sequence
  Description of Artificial Sequence: Synthetic oligonucleotide
gagauucagggaagcauuu

SEQ ID NO: 978560 - RNA, 19 nt, Artificial Sequence
  Description of Artificial Sequence: Synthetic oligonucleotide
cacccauguaacuuugguu

SEQ ID NO: 978561 - RNA, 19 nt, Artificial Sequence
  Description of Artificial Sequence: Synthetic oligonucleotide
gucaugcacagguaaccuu

SEQ ID NO: 978562 - RNA, 19 nt, Artificial Sequence
  Description of Artificial Sequence: Synthetic oligonucleotide
gguuacccaaacagaugca

SEQ ID NO: 978563 - RNA, 19 nt, Artificial Sequence
  Description of Artificial Sequence: Synthetic oligonucleotide
ggccgugggucauucacaa

SEQ ID NO: 978564 - RNA, 19 nt, Artificial Sequence
  Description of Artificial Sequence: Synthetic oligonucleotide
gggaucccaugccggcagg

SEQ ID NO: 978565 - RNA, 19 nt, Artificial Sequence
  Description of Artificial Sequence: Synthetic oligonucleotide
auacugcaccagccuccca

SEQ ID NO: 978566 - RNA, 19 nt, Artificial Sequence
  Description of Artificial Sequence: Synthetic oligonucleotide
gcuugccucugucguauga

SEQ ID NO: 978567 - RNA, 19 nt, Artificial Sequence
  Description of Artificial Sequence: Synthetic oligonucleotide
cucggaauaucuccuccau

SEQ ID NO: 978568 - RNA, 19 nt, Artificial Sequence
  Description of Artificial Sequence: Synthetic oligonucleotide
gugggucaugagugacuca

SEQ ID NO: 978569 - RNA, 19 nt, Artificial Sequence
  Description of Artificial Sequence: Synthetic oligonucleotide
gucagacccgaucaaccuu

SEQ ID NO: 978570 - RNA, 19 nt, Artificial Sequence
  Description of Artificial Sequence: Synthetic oligonucleotide
ccccaaucuacucuaggaa

SEQ ID NO: 978571 - RNA, 19 nt, Artificial Sequence
  Description of Artificial Sequence: Synthetic oligonucleotide
gguuguuauacagcguuuu

SEQ ID NO: 978572 - RNA, 19 nt, Artificial Sequence
  Description of Artificial Sequence: Synthetic oligonucleotide
ggguguuaugggaccaauc

SEQ ID NO: 978573 - RNA, 19 nt, Artificial Sequence
  Description of Artificial Sequence: Synthetic oligonucleotide
uacuugugcuggggccgug

SEQ ID NO: 978574 - RNA, 19 nt, Artificial Sequence
  Description of Artificial Sequence: Synthetic oligonucleotide
cguucaaccuuguaaauuu

SEQ ID NO: 978575 - RNA, 19 nt, Artificial Sequence
  Description of Artificial Sequence: Synthetic oligonucleotide
cauccgaugggaggaggaa

SEQ ID NO: 978576 - RNA, 19 nt, Artificial Sequence
  Description of Artificial Sequence: Synthetic oligonucleotide
ccccucuaaggcuauuaga

SEQ ID NO: 978577 - RNA, 19 nt, Artificial Sequence
  Description of Artificial Sequence: Synthetic oligonucleotide
ggaccaaucuugugguaau

SEQ ID NO: 978578 - RNA, 19 nt, Artificial Sequence
  Description of Artificial Sequence: Synthetic oligonucleotide
guacaccucagcugcucau

SEQ ID NO: 978579 - RNA, 19 nt, Artificial Sequence
  Description of Artificial Sequence: Synthetic oligonucleotide
ggcgugggucaugagugac

SEQ ID NO: 978580 - RNA, 19 nt, Artificial Sequence
  Description of Artificial Sequence: Synthetic oligonucleotide
agcuugccauugaaguguu

SEQ ID NO: 978581 - RNA, 19 nt, Artificial Sequence
  Description of Artificial Sequence: Synthetic oligonucleotide
ccauguaacuuugguuuca

SEQ ID NO: 978582 - RNA, 19 nt, Artificial Sequence
  Description of Artificial Sequence: Synthetic oligonucleotide
gcucuaagccucuguuuua

SEQ ID NO: 978583 - RNA, 19 nt, Artificial Sequence
  Description of Artificial Sequence: Synthetic oligonucleotide
ggggcaccccacgugacca

SEQ ID NO: 978584 - RNA, 19 nt, Artificial Sequence
  Description of Artificial Sequence: Synthetic oligonucleotide
gaucuguccuuggcagcua

SEQ ID NO: 978585 - RNA, 19 nt, Artificial Sequence
  Description of Artificial Sequence: Synthetic oligonucleotide
gcgucacuuucucucccca

SEQ ID NO: 978586 - RNA, 19 nt, Artificial Sequence
  Description of Artificial Sequence: Synthetic oligonucleotide
cuccaaccauauugcucaa

SEQ ID NO: 978587 - RNA, 19 nt, Artificial Sequence
  Description of Artificial Sequence: Synthetic oligonucleotide
gaaucaugucagacccgau

SEQ ID NO: 978588 - RNA, 19 nt, Artificial Sequence
  Description of Artificial Sequence: Synthetic oligonucleotide
gagguucuuggaggagacu

SEQ ID NO: 978589 - RNA, 19 nt, Artificial Sequence
  Description of Artificial Sequence: Synthetic oligonucleotide
caccaucauuuguaggguu

SEQ ID NO: 978590 - RNA, 19 nt, Artificial Sequence
  Description of Artificial Sequence: Synthetic oligonucleotide
ggucauggcgugggucaug

SEQ ID NO: 978591 - RNA, 19 nt, Artificial Sequence
  Description of Artificial Sequence: Synthetic oligonucleotide
ggaacccaagagucugccu

SEQ ID NO: 978592 - RNA, 19 nt, Artificial Sequence
  Description of Artificial Sequence: Synthetic oligonucleotide
cagccacccauguaacuuu

SEQ ID NO: 978593 - RNA, 19 nt, Artificial Sequence
  Description of Artificial Sequence: Synthetic oligonucleotide
ccaggugaaggucucuggu

SEQ ID NO: 978594 - RNA, 19 nt, Artificial Sequence
  Description of Artificial Sequence: Synthetic oligonucleotide
cugcuugccucugucguau

SEQ ID NO: 978595 - RNA, 19 nt, Artificial Sequence
  Description of Artificial Sequence: Synthetic oligonucleotide
cccgaucaaccuuccccuc

SEQ ID NO: 978596 - RNA, 19 nt, Artificial Sequence
  Description of Artificial Sequence: Synthetic oligonucleotide
ggaucccaugccggcagga

SEQ ID NO: 978597 - RNA, 19 nt, Artificial Sequence
  Description of Artificial Sequence: Synthetic oligonucleotide
ccacccauguaacuuuggu

SEQ ID NO: 978598 - RNA, 19 nt, Artificial Sequence
  Description of Artificial Sequence: Synthetic oligonucleotide
ccugucaguggggcacccc

SEQ ID NO: 978599 - RNA, 19 nt, Artificial Sequence
  Description of Artificial Sequence: Synthetic oligonucleotide
gccucugucguaugagauu

SEQ ID NO: 978600 - RNA, 19 nt, Artificial Sequence
  Description of Artificial Sequence: Synthetic oligonucleotide
ccuuugguugcuccacugu

SEQ ID NO: 978601 - RNA, 19 nt, Artificial Sequence
  Description of Artificial Sequence: Synthetic oligonucleotide
cuaccaccucguagacaua

SEQ ID NO: 978602 - RNA, 19 nt, Artificial Sequence
  Description of Artificial Sequence: Synthetic oligonucleotide
ccccaagacagagacucaa

SEQ ID NO: 978603 - RNA, 19 nt, Artificial Sequence
  Description of Artificial Sequence: Synthetic oligonucleotide
cagguuccguagccguaua

SEQ ID NO: 978604 - RNA, 19 nt, Artificial Sequence
  Description of Artificial Sequence: Synthetic oligonucleotide
ccaugccggcaggacaaug

SEQ ID NO: 978605 - RNA, 19 nt, Artificial Sequence
  Description of Artificial Sequence: Synthetic oligonucleotide
ccguacaccucagcugcuc

SEQ ID NO: 978606 - RNA, 19 nt, Artificial Sequence
  Description of Artificial Sequence: Synthetic oligonucleotide
ccgggacaugcuuccuguc

SEQ ID NO: 978607 - RNA, 19 nt, Artificial Sequence
  Description of Artificial Sequence: Synthetic oligonucleotide
ccgaucaaccuuccccucu

SEQ ID NO: 978608 - RNA, 19 nt, Artificial Sequence
  Description of Artificial Sequence: Synthetic oligonucleotide
gcacaccacucggaauauc

SEQ ID NO: 978609 - RNA, 19 nt, Artificial Sequence
  Description of Artificial Sequence: Synthetic oligonucleotide
cgaucaaccuuccccucua

SEQ ID NO: 978610 - RNA, 19 nt, Artificial Sequence
  Description of Artificial Sequence: Synthetic oligonucleotide
cuuccgggacaugcuuccu

SEQ ID NO: 978611 - RNA, 19 nt, Artificial Sequence
  Description of Artificial Sequence: Synthetic oligonucleotide
gcgugggucaugagugacu

SEQ ID NO: 978612 - RNA, 19 nt, Artificial Sequence
  Description of Artificial Sequence: Synthetic oligonucleotide
ccagguuccguagccguau

SEQ ID NO: 978613 - RNA, 19 nt, Artificial Sequence
  Description of Artificial Sequence: Synthetic oligonucleotide
ccaaccucucagcuuuauu

SEQ ID NO: 978614 - RNA, 19 nt, Artificial Sequence
  Description of Artificial Sequence: Synthetic oligonucleotide
ccccuuugguugcuccacu

SEQ ID NO: 978615 - RNA, 19 nt, Artificial Sequence
  Description of Artificial Sequence: Synthetic oligonucleotide
gccaaccucucagcuuuau

SEQ ID NO: 978616 - RNA, 19 nt, Artificial Sequence
  Description of Artificial Sequence: Synthetic oligonucleotide
cuuccccucuaaggcuauu

SEQ ID NO: 978617 - RNA, 19 nt, Artificial Sequence
  Description of Artificial Sequence: Synthetic oligonucleotide
cccaugccggcaggacaau

SEQ ID NO: 978618 - RNA, 19 nt, Artificial Sequence
  Description of Artificial Sequence: Synthetic oligonucleotide
ugauauaauguccugaugg

SEQ ID NO: 978619 - RNA, 19 nt, Artificial Sequence
  Description of Artificial Sequence: Synthetic oligonucleotide
gauauuaucaucaaauaag

SEQ ID NO: 978620 - RNA, 19 nt, Artificial Sequence
  Description of Artificial Sequence: Synthetic oligonucleotide
ucuuuagagaaacaggccg

SEQ ID NO: 978621 - RNA, 19 nt, Artificial Sequence
  Description of Artificial Sequence: Synthetic oligonucleotide
aauaaguuggguuccaaag

SEQ ID NO: 978622 - RNA, 19 nt, Artificial Sequence
  Description of Artificial Sequence: Synthetic oligonucleotide
aauccugugguguuucugc

SEQ ID NO: 978623 - RNA, 19 nt, Artificial Sequence
  Description of Artificial Sequence: Synthetic oligonucleotide
uuuaaauggagugagaccu

SEQ ID NO: 978624 - RNA, 19 nt, Artificial Sequence
  Description of Artificial Sequence: Synthetic oligonucleotide
ucaaacaaacuaaggacgg

SEQ ID NO: 978625 - RNA, 19 nt, Artificial Sequence
  Description of Artificial Sequence: Synthetic oligonucleotide
uggccauuugguaagaugg

SEQ ID NO: 978626 - RNA, 19 nt, Artificial Sequence
  Description of Artificial Sequence: Synthetic oligonucleotide
uuccguagcaaauauauca

SEQ ID NO: 978627 - RNA, 19 nt, Artificial Sequence
  Description of Artificial Sequence: Synthetic oligonucleotide
uuuaacacgacucuuguuu

SEQ ID NO: 978628 - RNA, 19 nt, Artificial Sequence
  Description of Artificial Sequence: Synthetic oligonucleotide
uauaauguccugauggcug

SEQ ID NO: 978629 - RNA, 19 nt, Artificial Sequence
  Description of Artificial Sequence: Synthetic oligonucleotide
aaaagaucaacauccgggu

SEQ ID NO: 978630 - RNA, 19 nt, Artificial Sequence
  Description of Artificial Sequence: Synthetic oligonucleotide
cuaauucacaugaagcagg

SEQ ID NO: 978631 - RNA, 19 nt, Artificial Sequence
  Description of Artificial Sequence: Synthetic oligonucleotide
aaaaggucagccucauuuc

SEQ ID NO: 978632 - RNA, 19 nt, Artificial Sequence
  Description of Artificial Sequence: Synthetic oligonucleotide
uaauugcuaaauuugcuug

SEQ ID NO: 978633 - RNA, 19 nt, Artificial Sequence
  Description of Artificial Sequence: Synthetic oligonucleotide
aauggagugagaccugaag

SEQ ID NO: 978634 - RNA, 19 nt, Artificial Sequence
  Description of Artificial Sequence: Synthetic oligonucleotide
ugcagauuggucuuuuggg

SEQ ID NO: 978635 - RNA, 19 nt, Artificial Sequence
  Description of Artificial Sequence: Synthetic oligonucleotide
aucaaacaaacuaaggacg

SEQ ID NO: 978636 - RNA, 19 nt, Artificial Sequence
  Description of Artificial Sequence: Synthetic oligonucleotide
gauauaauguccugauggc

SEQ ID NO: 978637 - RNA, 19 nt, Artificial Sequence
  Description of Artificial Sequence: Synthetic oligonucleotide
uucgcaauugcaaacagau

SEQ ID NO: 978638 - RNA, 19 nt, Artificial Sequence
  Description of Artificial Sequence: Synthetic oligonucleotide
auggcugucagauuucaac

SEQ ID NO: 978639 - RNA, 19 nt, Artificial Sequence
  Description of Artificial Sequence: Synthetic oligonucleotide
aagauaucgauauuaucau

SEQ ID NO: 978640 - RNA, 19 nt, Artificial Sequence
  Description of Artificial Sequence: Synthetic oligonucleotide
aauugcuaaauuugcuugu

SEQ ID NO: 978641 - RNA, 19 nt, Artificial Sequence
  Description of Artificial Sequence: Synthetic oligonucleotide
uuugcuuguauuuucccga

SEQ ID NO: 978642 - RNA, 19 nt, Artificial Sequence
  Description of Artificial Sequence: Synthetic oligonucleotide
cuaaggacgguuuugguuc

SEQ ID NO: 978643 - RNA, 19 nt, Artificial Sequence
  Description of Artificial Sequence: Synthetic oligonucleotide
uuugauauaauguccugau

SEQ ID NO: 978644 - RNA, 19 nt, Artificial Sequence
  Description of Artificial Sequence: Synthetic oligonucleotide
uuugcuaccuucaguagac

SEQ ID NO: 978645 - RNA, 19 nt, Artificial Sequence
  Description of Artificial Sequence: Synthetic oligonucleotide
agaucgucaguacugcugg

SEQ ID NO: 978646 - RNA, 19 nt, Artificial Sequence
  Description of Artificial Sequence: Synthetic oligonucleotide
agcuaauucacaugaagca

SEQ ID NO: 978647 - RNA, 19 nt, Artificial Sequence
  Description of Artificial Sequence: Synthetic oligonucleotide
uuuccauaagcuuuucucu

SEQ ID NO: 978648 - RNA, 19 nt, Artificial Sequence
  Description of Artificial Sequence: Synthetic oligonucleotide
aagagaucgucaguacugc

SEQ ID NO: 978649 - RNA, 19 nt, Artificial Sequence
  Description of Artificial Sequence: Synthetic oligonucleotide
uauuuucccgauccgacug

SEQ ID NO: 978650 - RNA, 19 nt, Artificial Sequence
  Description of Artificial Sequence: Synthetic oligonucleotide
uuuccgaucugcaaagaga

SEQ ID NO: 978651 - RNA, 19 nt, Artificial Sequence
  Description of Artificial Sequence: Synthetic oligonucleotide
ucucacuuuaacacgacuc

SEQ ID NO: 978652 - RNA, 19 nt, Artificial Sequence
  Description of Artificial Sequence: Synthetic oligonucleotide
uggacugugauccuaugcu

SEQ ID NO: 978653 - RNA, 19 nt, Artificial Sequence
  Description of Artificial Sequence: Synthetic oligonucleotide
gaaaaggucauaaucuuca

SEQ ID NO: 978654 - RNA, 19 nt, Artificial Sequence
  Description of Artificial Sequence: Synthetic oligonucleotide
uaauucacaugaagcaggc

SEQ ID NO: 978655 - RNA, 19 nt, Artificial Sequence
  Description of Artificial Sequence: Synthetic oligonucleotide
cuuguuugcacuguguaag

SEQ ID NO: 978656 - RNA, 19 nt, Artificial Sequence
  Description of Artificial Sequence: Synthetic oligonucleotide
ugugaucagaucuuaguuc

SEQ ID NO: 978657 - RNA, 19 nt, Artificial Sequence
  Description of Artificial Sequence: Synthetic oligonucleotide
guaagaugggacuacuggc

SEQ ID NO: 978658 - RNA, 19 nt, Artificial Sequence
  Description of Artificial Sequence: Synthetic oligonucleotide
aucauacaaacacagacuu

SEQ ID NO: 978659 - RNA, 19 nt, Artificial Sequence
  Description of Artificial Sequence: Synthetic oligonucleotide
gagguugauggccauuugg

SEQ ID NO: 978660 - RNA, 19 nt, Artificial Sequence
  Description of Artificial Sequence: Synthetic oligonucleotide
uuuugauauaauguccuga

SEQ ID NO: 978661 - RNA, 19 nt, Artificial Sequence
  Description of Artificial Sequence: Synthetic oligonucleotide
gaucagaugcagucaaaag

SEQ ID NO: 978662 - RNA, 19 nt, Artificial Sequence
  Description of Artificial Sequence: Synthetic oligonucleotide
gaccugaagaauccugugg

SEQ ID NO: 978663 - RNA, 19 nt, Artificial Sequence
  Description of Artificial Sequence: Synthetic oligonucleotide
gacgguuuugguucuaccc

SEQ ID NO: 978664 - RNA, 19 nt, Artificial Sequence
  Description of Artificial Sequence: Synthetic oligonucleotide
aucgauauuaucaucaaau

SEQ ID NO: 978665 - RNA, 19 nt, Artificial Sequence
  Description of Artificial Sequence: Synthetic oligonucleotide
uugauggccauuugguaag

SEQ ID NO: 978666 - RNA, 19 nt, Artificial Sequence
  Description of Artificial Sequence: Synthetic oligonucleotide
auaaguuggguuccaaagu

SEQ ID NO: 978667 - RNA, 19 nt, Artificial Sequence
  Description of Artificial Sequence: Synthetic oligonucleotide
aaauaaguuggguuccaaa

SEQ ID NO: 978668 - RNA, 19 nt, Artificial Sequence
  Description of Artificial Sequence: Synthetic oligonucleotide
auauuaucaucaaauaagu

SEQ ID NO: 978669 - RNA, 19 nt, Artificial Sequence
  Description of Artificial Sequence: Synthetic oligonucleotide
uuaacacgacucuuguuug

SEQ ID NO: 978670 - RNA, 19 nt, Artificial Sequence
  Description of Artificial Sequence: Synthetic oligonucleotide
gaagagaucgucaguacug

SEQ ID NO: 978671 - RNA, 19 nt, Artificial Sequence
  Description of Artificial Sequence: Synthetic oligonucleotide
uuuucugguaccacaggcu

SEQ ID NO: 978672 - RNA, 19 nt, Artificial Sequence
  Description of Artificial Sequence: Synthetic oligonucleotide
uuccucucacuuuaacacg

SEQ ID NO: 978673 - RNA, 19 nt, Artificial Sequence
  Description of Artificial Sequence: Synthetic oligonucleotide
ucccgauccgacuggaugg

SEQ ID NO: 978674 - RNA, 19 nt, Artificial Sequence
  Description of Artificial Sequence: Synthetic oligonucleotide
uuccgaucugcaaagagau

SEQ ID NO: 978675 - RNA, 19 nt, Artificial Sequence
  Description of Artificial Sequence: Synthetic oligonucleotide
uccuaugcucuuuggaaag

SEQ ID NO: 978676 - RNA, 19 nt, Artificial Sequence
  Description of Artificial Sequence: Synthetic oligonucleotide
uugauauaauguccugaug

SEQ ID NO: 978677 - RNA, 19 nt, Artificial Sequence
  Description of Artificial Sequence: Synthetic oligonucleotide
ugauccuaugcucuuugga

SEQ ID NO: 978678 - RNA, 19 nt, Artificial Sequence
  Description of Artificial Sequence: Synthetic oligonucleotide
ugugauccuaugcucuuug

SEQ ID NO: 978679 - RNA, 19 nt, Artificial Sequence
  Description of Artificial Sequence: Synthetic oligonucleotide
auauccucacucucacugg

SEQ ID NO: 978680 - RNA, 19 nt, Artificial Sequence
  Description of Artificial Sequence: Synthetic oligonucleotide
gauccuaugcucuuuggaa

SEQ ID NO: 978681 - RNA, 19 nt, Artificial Sequence
  Description of Artificial Sequence: Synthetic oligonucleotide
gacacucauauccucacuc

SEQ ID NO: 978682 - RNA, 19 nt, Artificial Sequence
  Description of Artificial Sequence: Synthetic oligonucleotide
uccaaacaggcucccauca

SEQ ID NO: 978683 - RNA, 19 nt, Artificial Sequence
  Description of Artificial Sequence: Synthetic oligonucleotide
acuuuaacacgacucuugu

SEQ ID NO: 978684 - RNA, 19 nt, Artificial Sequence
  Description of Artificial Sequence: Synthetic oligonucleotide
uucuucgacacaugggugu

SEQ ID NO: 978685 - RNA, 19 nt, Artificial Sequence
  Description of Artificial Sequence: Synthetic oligonucleotide
uggguuuggacuucuuagc

SEQ ID NO: 978686 - RNA, 19 nt, Artificial Sequence
  Description of Artificial Sequence: Synthetic oligonucleotide
ucgauauuaucaucaaaua

SEQ ID NO: 978687 - RNA, 19 nt, Artificial Sequence
  Description of Artificial Sequence: Synthetic oligonucleotide
uccuuuccgaucugcaaag

SEQ ID NO: 978688 - RNA, 19 nt, Artificial Sequence
  Description of Artificial Sequence: Synthetic oligonucleotide
agagucggcacgcuuuccg

SEQ ID NO: 978689 - RNA, 19 nt, Artificial Sequence
  Description of Artificial Sequence: Synthetic oligonucleotide
uguaagguaucugccuggg

SEQ ID NO: 978690 - RNA, 19 nt, Artificial Sequence
  Description of Artificial Sequence: Synthetic oligonucleotide
cacuuuaacacgacucuug

SEQ ID NO: 978691 - RNA, 19 nt, Artificial Sequence
  Description of Artificial Sequence: Synthetic oligonucleotide
ucauuguccuuuuguagcu

SEQ ID NO: 978692 - RNA, 19 nt, Artificial Sequence
  Description of Artificial Sequence: Synthetic oligonucleotide
gaagaucgaagcucacacc

SEQ ID NO: 978693 - RNA, 19 nt, Artificial Sequence
  Description of Artificial Sequence: Synthetic oligonucleotide
uucccgauccgacuggaug

SEQ ID NO: 978694 - RNA, 19 nt, Artificial Sequence
  Description of Artificial Sequence: Synthetic oligonucleotide
aaacaaacuaaggacgguu

SEQ ID NO: 978695 - RNA, 19 nt, Artificial Sequence
  Description of Artificial Sequence: Synthetic oligonucleotide
gucagauuucaacucauuc

SEQ ID NO: 978696 - RNA, 19 nt, Artificial Sequence
  Description of Artificial Sequence: Synthetic oligonucleotide
uccguagcaaauauaucau

SEQ ID NO: 978697 - RNA, 19 nt, Artificial Sequence
  Description of Artificial Sequence: Synthetic oligonucleotide
acuacuggccaacugugca

SEQ ID NO: 978698 - RNA, 19 nt, Artificial Sequence
  Description of Artificial Sequence: Synthetic oligonucleotide
ucaaagaggagggacguuc

SEQ ID NO: 978699 - RNA, 19 nt, Artificial Sequence
  Description of Artificial Sequence: Synthetic oligonucleotide
uugguucuacccuugguuc

SEQ ID NO: 978700 - RNA, 19 nt, Artificial Sequence
  Description of Artificial Sequence: Synthetic oligonucleotide
ggaagaucgaagcucacac

SEQ ID NO: 978701 - RNA, 19 nt, Artificial Sequence
  Description of Artificial Sequence: Synthetic oligonucleotide
cuuuccgaucugcaaagag

SEQ ID NO: 978702 - RNA, 19 nt, Artificial Sequence
  Description of Artificial Sequence: Synthetic oligonucleotide
ucuuguuugcacuguguaa

SEQ ID NO: 978703 - RNA, 19 nt, Artificial Sequence
  Description of Artificial Sequence: Synthetic oligonucleotide
aucgucaguacugcuggcc

SEQ ID NO: 978704 - RNA, 19 nt, Artificial Sequence
  Description of Artificial Sequence: Synthetic oligonucleotide
uuguccaauggagaugaag

SEQ ID NO: 978705 - RNA, 19 nt, Artificial Sequence
  Description of Artificial Sequence: Synthetic oligonucleotide
auaauguccugauggcugu

SEQ ID NO: 978706 - RNA, 19 nt, Artificial Sequence
  Description of Artificial Sequence: Synthetic oligonucleotide
acuaaggacgguuuugguu

SEQ ID NO: 978707 - RNA, 19 nt, Artificial Sequence
  Description of Artificial Sequence: Synthetic oligonucleotide
uggaaagauguccccagaa

SEQ ID NO: 978708 - RNA, 19 nt, Artificial Sequence
  Description of Artificial Sequence: Synthetic oligonucleotide
uccuuuguccaauggagau

SEQ ID NO: 978709 - RNA, 19 nt, Artificial Sequence
  Description of Artificial Sequence: Synthetic oligonucleotide
auggccauuugguaagaug

SEQ ID NO: 978710 - RNA, 19 nt, Artificial Sequence
  Description of Artificial Sequence: Synthetic oligonucleotide
cuuuagagaaacaggccga

SEQ ID NO: 978711 - RNA, 19 nt, Artificial Sequence
  Description of Artificial Sequence: Synthetic oligonucleotide
aacuaaggacgguuuuggu

SEQ ID NO: 978712 - RNA, 19 nt, Artificial Sequence
  Description of Artificial Sequence: Synthetic oligonucleotide
cagaugcagucaaaagucc

SEQ ID NO: 978713 - RNA, 19 nt, Artificial Sequence
  Description of Artificial Sequence: Synthetic oligonucleotide
guguaagguaucugccugg

SEQ ID NO: 978714 - RNA, 19 nt, Artificial Sequence
  Description of Artificial Sequence: Synthetic oligonucleotide
ugaucagaugcagucaaaa

SEQ ID NO: 978715 - RNA, 19 nt, Artificial Sequence
  Description of Artificial Sequence: Synthetic oligonucleotide
aucagaucuuaguucagau

SEQ ID NO: 978716 - RNA, 19 nt, Artificial Sequence
  Description of Artificial Sequence: Synthetic oligonucleotide
agaggagggacguucucug

SEQ ID NO: 978717 - RNA, 19 nt, Artificial Sequence
  Description of Artificial Sequence: Synthetic oligonucleotide
gcugccuugacuuuuguuc

SEQ ID NO: 978718 - RNA, 19 nt, Artificial Sequence
  Description of Artificial Sequence: Synthetic oligonucleotide
ugguucuacccuugguucc

SEQ ID NO: 978719 - RNA, 19 nt, Artificial Sequence
  Description of Artificial Sequence: Synthetic oligonucleotide
gagaucgucaguacugcug

SEQ ID NO: 978720 - RNA, 19 nt, Artificial Sequence
  Description of Artificial Sequence: Synthetic oligonucleotide
gagacacucauauccucac

SEQ ID NO: 978721 - RNA, 19 nt, Artificial Sequence
  Description of Artificial Sequence: Synthetic oligonucleotide
uccaauggagaugaagaaa

SEQ ID NO: 978722 - RNA, 19 nt, Artificial Sequence
  Description of Artificial Sequence: Synthetic oligonucleotide
uaacacgacucuuguuugc

SEQ ID NO: 978723 - RNA, 19 nt, Artificial Sequence
  Description of Artificial Sequence: Synthetic oligonucleotide
cucauauccucacucucac

SEQ ID NO: 978724 - RNA, 19 nt, Artificial Sequence
  Description of Artificial Sequence: Synthetic oligonucleotide
caacagguccucuggagac

SEQ ID NO: 978725 - RNA, 19 nt, Artificial Sequence
  Description of Artificial Sequence: Synthetic oligonucleotide
caaacuaaggacgguuuug

SEQ ID NO: 978726 - RNA, 19 nt, Artificial Sequence
  Description of Artificial Sequence: Synthetic oligonucleotide
aacacgacucuuguuugca

SEQ ID NO: 978727 - RNA, 19 nt, Artificial Sequence
  Description of Artificial Sequence: Synthetic oligonucleotide
gcuaauucacaugaagcag

SEQ ID NO: 978728 - RNA, 19 nt, Artificial Sequence
  Description of Artificial Sequence: Synthetic oligonucleotide
aggagggacguucucugag

SEQ ID NO: 978729 - RNA, 19 nt, Artificial Sequence
  Description of Artificial Sequence: Synthetic oligonucleotide
ucgucaguacugcuggccu

SEQ ID NO: 978730 - RNA, 19 nt, Artificial Sequence
  Description of Artificial Sequence: Synthetic oligonucleotide
ucuacccuugguuccuuug

SEQ ID NO: 978731 - RNA, 19 nt, Artificial Sequence
  Description of Artificial Sequence: Synthetic oligonucleotide
cauucuucgacacaugggu

SEQ ID NO: 978732 - RNA, 19 nt, Artificial Sequence
  Description of Artificial Sequence: Synthetic oligonucleotide
uuccauaagcuuuucucuu

SEQ ID NO: 978733 - RNA, 19 nt, Artificial Sequence
  Description of Artificial Sequence: Synthetic oligonucleotide
cuugguuugacagucugga

SEQ ID NO: 978734 - RNA, 19 nt, Artificial Sequence
  Description of Artificial Sequence: Synthetic oligonucleotide
caauugcaaacagaucagc

SEQ ID NO: 978735 - RNA, 19 nt, Artificial Sequence
  Description of Artificial Sequence: Synthetic oligonucleotide
ugcuggauuaauugcuaaa

SEQ ID NO: 978736 - RNA, 19 nt, Artificial Sequence
  Description of Artificial Sequence: Synthetic oligonucleotide
gacuuggccuccuacuuuc

SEQ ID NO: 978737 - RNA, 19 nt, Artificial Sequence
  Description of Artificial Sequence: Synthetic oligonucleotide
acacgacucuuguuugcac

SEQ ID NO: 978738 - RNA, 19 nt, Artificial Sequence
  Description of Artificial Sequence: Synthetic oligonucleotide
gcuaccuucaguagacucg

SEQ ID NO: 978739 - RNA, 19 nt, Artificial Sequence
  Description of Artificial Sequence: Synthetic oligonucleotide
cuuugcuaccuucaguaga

SEQ ID NO: 978740 - RNA, 19 nt, Artificial Sequence
  Description of Artificial Sequence: Synthetic oligonucleotide
agaccugaagaauccugug

SEQ ID NO: 978741 - RNA, 19 nt, Artificial Sequence
  Description of Artificial Sequence: Synthetic oligonucleotide
uccuucgcaauugcaaaca

SEQ ID NO: 978742 - RNA, 19 nt, Artificial Sequence
  Description of Artificial Sequence: Synthetic oligonucleotide
ugcuaccuucaguagacuc

SEQ ID NO: 978743 - RNA, 19 nt, Artificial Sequence
  Description of Artificial Sequence: Synthetic oligonucleotide
gacucuuguuugcacugug

SEQ ID NO: 978744 - RNA, 19 nt, Artificial Sequence
  Description of Artificial Sequence: Synthetic oligonucleotide
uggaagagaucgucaguac

SEQ ID NO: 978745 - RNA, 19 nt, Artificial Sequence
  Description of Artificial Sequence: Synthetic oligonucleotide
agucggcacgcuuuccggg

SEQ ID NO: 978746 - RNA, 19 nt, Artificial Sequence
  Description of Artificial Sequence: Synthetic oligonucleotide
uggaagaucgaagcucaca

SEQ ID NO: 978747 - RNA, 19 nt, Artificial Sequence
  Description of Artificial Sequence: Synthetic oligonucleotide
uguggccucugcagauugg

SEQ ID NO: 978748 - RNA, 19 nt, Artificial Sequence
  Description of Artificial Sequence: Synthetic oligonucleotide
uuuagagaaacaggccgau

SEQ ID NO: 978749 - RNA, 19 nt, Artificial Sequence
  Description of Artificial Sequence: Synthetic oligonucleotide
aagagucggcacgcuuucc

SEQ ID NO: 978750 - RNA, 19 nt, Artificial Sequence
  Description of Artificial Sequence: Synthetic oligonucleotide
cgcaauugcaaacagauca

SEQ ID NO: 978751 - RNA, 19 nt, Artificial Sequence
  Description of Artificial Sequence: Synthetic oligonucleotide
uaucugccugggcuggaag

SEQ ID NO: 978752 - RNA, 19 nt, Artificial Sequence
  Description of Artificial Sequence: Synthetic oligonucleotide
guuggacacuuugugauca

SEQ ID NO: 978753 - RNA, 19 nt, Artificial Sequence
  Description of Artificial Sequence: Synthetic oligonucleotide
aguagacucgggagcuucc

SEQ ID NO: 978754 - RNA, 19 nt, Artificial Sequence
  Description of Artificial Sequence: Synthetic oligonucleotide
cuuuccgggccauggcucc

SEQ ID NO: 978755 - RNA, 19 nt, Artificial Sequence
  Description of Artificial Sequence: Synthetic oligonucleotide
ugacuuuuguucccuccau

SEQ ID NO: 978756 - RNA, 19 nt, Artificial Sequence
  Description of Artificial Sequence: Synthetic oligonucleotide
uuggcuguccuucgcaauu

SEQ ID NO: 978757 - RNA, 19 nt, Artificial Sequence
  Description of Artificial Sequence: Synthetic oligonucleotide
acucauauccucacucuca

SEQ ID NO: 978758 - RNA, 19 nt, Artificial Sequence
  Description of Artificial Sequence: Synthetic oligonucleotide
ugggacuacuggccaacug

SEQ ID NO: 978759 - RNA, 19 nt, Artificial Sequence
  Description of Artificial Sequence: Synthetic oligonucleotide
uguuugcacuguguaaggu

SEQ ID NO: 978760 - RNA, 19 nt, Artificial Sequence
  Description of Artificial Sequence: Synthetic oligonucleotide
agaccagaggagaaaauau

SEQ ID NO: 978761 - RNA, 19 nt, Artificial Sequence
  Description of Artificial Sequence: Synthetic oligonucleotide
aauucacaugaagcaggcu

SEQ ID NO: 978762 - RNA, 19 nt, Artificial Sequence
  Description of Artificial Sequence: Synthetic oligonucleotide
uuggacacuuugugaucag

SEQ ID NO: 978763 - RNA, 19 nt, Artificial Sequence
  Description of Artificial Sequence: Synthetic oligonucleotide
uacgcuuuccucucacuuu

SEQ ID NO: 978764 - RNA, 19 nt, Artificial Sequence
  Description of Artificial Sequence: Synthetic oligonucleotide
ccauuugguaagaugggac

SEQ ID NO: 978765 - RNA, 19 nt, Artificial Sequence
  Description of Artificial Sequence: Synthetic oligonucleotide
gaauccugugguguuucug

SEQ ID NO: 978766 - RNA, 19 nt, Artificial Sequence
  Description of Artificial Sequence: Synthetic oligonucleotide
guuugcacuguguaaggua

SEQ ID NO: 978767 - RNA, 19 nt, Artificial Sequence
  Description of Artificial Sequence: Synthetic oligonucleotide
ugccuugacuuuuguuccc

SEQ ID NO: 978768 - RNA, 19 nt, Artificial Sequence
  Description of Artificial Sequence: Synthetic oligonucleotide
uccucguucuuuagagaaa

SEQ ID NO: 978769 - RNA, 19 nt, Artificial Sequence
  Description of Artificial Sequence: Synthetic oligonucleotide
acgcuuuccgggccauggc

SEQ ID NO: 978770 - RNA, 19 nt, Artificial Sequence
  Description of Artificial Sequence: Synthetic oligonucleotide
uaaggacgguuuugguucu

SEQ ID NO: 978771 - RNA, 19 nt, Artificial Sequence
  Description of Artificial Sequence: Synthetic oligonucleotide
agaugcagucaaaaguccu

SEQ ID NO: 978772 - RNA, 19 nt, Artificial Sequence
  Description of Artificial Sequence: Synthetic oligonucleotide
cauuugguaagaugggacu

SEQ ID NO: 978773 - RNA, 19 nt, Artificial Sequence
  Description of Artificial Sequence: Synthetic oligonucleotide
uguccugauggcugucaga

SEQ ID NO: 978774 - RNA, 19 nt, Artificial Sequence
  Description of Artificial Sequence: Synthetic oligonucleotide
gcaauugcaaacagaucag

SEQ ID NO: 978775 - RNA, 19 nt, Artificial Sequence
  Description of Artificial Sequence: Synthetic oligonucleotide
agagaucgucaguacugcu

SEQ ID NO: 978776 - RNA, 19 nt, Artificial Sequence
  Description of Artificial Sequence: Synthetic oligonucleotide
uugguaagaugggacuacu

SEQ ID NO: 978777 - RNA, 19 nt, Artificial Sequence
  Description of Artificial Sequence: Synthetic oligonucleotide
uuggccuccuacuuucuuu

SEQ ID NO: 978778 - RNA, 19 nt, Artificial Sequence
  Description of Artificial Sequence: Synthetic oligonucleotide
gagggacguucucugaguc

SEQ ID NO: 978779 - RNA, 19 nt, Artificial Sequence
  Description of Artificial Sequence: Synthetic oligonucleotide
cacgcuuuccgggccaugg

SEQ ID NO: 978780 - RNA, 19 nt, Artificial Sequence
  Description of Artificial Sequence: Synthetic oligonucleotide
cucacuuuaacacgacucu

SEQ ID NO: 978781 - RNA, 19 nt, Artificial Sequence
  Description of Artificial Sequence: Synthetic oligonucleotide
guccuucgcaauugcaaac

SEQ ID NO: 978782 - RNA, 19 nt, Artificial Sequence
  Description of Artificial Sequence: Synthetic oligonucleotide
cuucgcaauugcaaacaga

SEQ ID NO: 978783 - RNA, 19 nt, Artificial Sequence
  Description of Artificial Sequence: Synthetic oligonucleotide
caacauccgggucauuguc

SEQ ID NO: 978784 - RNA, 19 nt, Artificial Sequence
  Description of Artificial Sequence: Synthetic oligonucleotide
aggacgguuuugguucuac

SEQ ID NO: 978785 - RNA, 19 nt, Artificial Sequence
  Description of Artificial Sequence: Synthetic oligonucleotide
aggggaaaaggguuccuuu

SEQ ID NO: 978786 - RNA, 19 nt, Artificial Sequence
  Description of Artificial Sequence: Synthetic oligonucleotide
agacacucauauccucacu

SEQ ID NO: 978787 - RNA, 19 nt, Artificial Sequence
  Description of Artificial Sequence: Synthetic oligonucleotide
auucuucgacacaugggug

SEQ ID NO: 978788 - RNA, 19 nt, Artificial Sequence
  Description of Artificial Sequence: Synthetic oligonucleotide
acgcuuuccucucacuuua

SEQ ID NO: 978789 - RNA, 19 nt, Artificial Sequence
  Description of Artificial Sequence: Synthetic oligonucleotide
guaagguaucugccugggc

SEQ ID NO: 978790 - RNA, 19 nt, Artificial Sequence
  Description of Artificial Sequence: Synthetic oligonucleotide
ugcuggucuugguuugaca

SEQ ID NO: 978791 - RNA, 19 nt, Artificial Sequence
  Description of Artificial Sequence: Synthetic oligonucleotide
gaucgucaguacugcuggc

SEQ ID NO: 978792 - RNA, 19 nt, Artificial Sequence
  Description of Artificial Sequence: Synthetic oligonucleotide
ucacuuuaacacgacucuu

SEQ ID NO: 978793 - RNA, 19 nt, Artificial Sequence
  Description of Artificial Sequence: Synthetic oligonucleotide
agaucgaagcucacaccag

SEQ ID NO: 978794 - RNA, 19 nt, Artificial Sequence
  Description of Artificial Sequence: Synthetic oligonucleotide
caagagucggcacgcuuuc

SEQ ID NO: 978795 - RNA, 19 nt, Artificial Sequence
  Description of Artificial Sequence: Synthetic oligonucleotide
uuagagaaacaggccgauc

SEQ ID NO: 978796 - RNA, 19 nt, Artificial Sequence
  Description of Artificial Sequence: Synthetic oligonucleotide
gcuaaauuugcuuguauuu

SEQ ID NO: 978797 - RNA, 19 nt, Artificial Sequence
  Description of Artificial Sequence: Synthetic oligonucleotide
cucgggagcuuccucguuc

SEQ ID NO: 978798 - RNA, 19 nt, Artificial Sequence
  Description of Artificial Sequence: Synthetic oligonucleotide
agggacguucucugagucu

SEQ ID NO: 978799 - RNA, 19 nt, Artificial Sequence
  Description of Artificial Sequence: Synthetic oligonucleotide
gaagacgccugugcucuug

SEQ ID NO: 978800 - RNA, 19 nt, Artificial Sequence
  Description of Artificial Sequence: Synthetic oligonucleotide
gagaccugaagaauccugu

SEQ ID NO: 978801 - RNA, 19 nt, Artificial Sequence
  Description of Artificial Sequence: Synthetic oligonucleotide
uccgaucugcaaagagauc

SEQ ID NO: 978802 - RNA, 19 nt, Artificial Sequence
  Description of Artificial Sequence: Synthetic oligonucleotide
guauuuucccgauccgacu

SEQ ID NO: 978803 - RNA, 19 nt, Artificial Sequence
  Description of Artificial Sequence: Synthetic oligonucleotide
agacgccugugcucuuggg

SEQ ID NO: 978804 - RNA, 19 nt, Artificial Sequence
  Description of Artificial Sequence: Synthetic oligonucleotide
gauccgacuggauggcucu

SEQ ID NO: 978805 - RNA, 19 nt, Artificial Sequence
  Description of Artificial Sequence: Synthetic oligonucleotide
agaugggacuacuggccaa

SEQ ID NO: 978806 - RNA, 19 nt, Artificial Sequence
  Description of Artificial Sequence: Synthetic oligonucleotide
gguguugcuuugaucuucc

SEQ ID NO: 978807 - RNA, 19 nt, Artificial Sequence
  Description of Artificial Sequence: Synthetic oligonucleotide
acuuugugaucagaucuua

SEQ ID NO: 978808 - RNA, 19 nt, Artificial Sequence
  Description of Artificial Sequence: Synthetic oligonucleotide
aaauggagugagaccugaa

SEQ ID NO: 978809 - RNA, 19 nt, Artificial Sequence
  Description of Artificial Sequence: Synthetic oligonucleotide
cuuccucguucuuuagaga

SEQ ID NO: 978810 - RNA, 19 nt, Artificial Sequence
  Description of Artificial Sequence: Synthetic oligonucleotide
ccucguucuuuagagaaac

SEQ ID NO: 978811 - RNA, 19 nt, Artificial Sequence
  Description of Artificial Sequence: Synthetic oligonucleotide
ggcacugacacccugguuu

SEQ ID NO: 978812 - RNA, 19 nt, Artificial Sequence
  Description of Artificial Sequence: Synthetic oligonucleotide
agcaagagucggcacgcuu

SEQ ID NO: 978813 - RNA, 19 nt, Artificial Sequence
  Description of Artificial Sequence: Synthetic oligonucleotide
ucuucgacacauggguguu

SEQ ID NO: 978814 - RNA, 19 nt, Artificial Sequence
  Description of Artificial Sequence: Synthetic oligonucleotide
ggacuacuggccaacugug

SEQ ID NO: 978815 - RNA, 19 nt, Artificial Sequence
  Description of Artificial Sequence: Synthetic oligonucleotide
ggaagagaucgucaguacu

SEQ ID NO: 978816 - RNA, 19 nt, Artificial Sequence
  Description of Artificial Sequence: Synthetic oligonucleotide
uuuguccaauggagaugaa

SEQ ID NO: 978817 - RNA, 19 nt, Artificial Sequence
  Description of Artificial Sequence: Synthetic oligonucleotide
gggaucugcagagcugccg

SEQ ID NO: 978818 - RNA, 19 nt, Artificial Sequence
  Description of Artificial Sequence: Synthetic oligonucleotide
uuucccgauccgacuggau

SEQ ID NO: 978819 - RNA, 19 nt, Artificial Sequence
  Description of Artificial Sequence: Synthetic oligonucleotide
cuggaagaucgaagcucac

SEQ ID NO: 978820 - RNA, 19 nt, Artificial Sequence
  Description of Artificial Sequence: Synthetic oligonucleotide
gggacuacuggccaacugu

SEQ ID NO: 978821 - RNA, 19 nt, Artificial Sequence
  Description of Artificial Sequence: Synthetic oligonucleotide
caguagacucgggagcuuc

SEQ ID NO: 978822 - RNA, 19 nt, Artificial Sequence
  Description of Artificial Sequence: Synthetic oligonucleotide
uucccuccauggacuguga

SEQ ID NO: 978823 - RNA, 19 nt, Artificial Sequence
  Description of Artificial Sequence: Synthetic oligonucleotide
ggacgguuuugguucuacc

SEQ ID NO: 978824 - RNA, 19 nt, Artificial Sequence
  Description of Artificial Sequence: Synthetic oligonucleotide
uccgacuggauggcucucu

SEQ ID NO: 978825 - RNA, 19 nt, Artificial Sequence
  Description of Artificial Sequence: Synthetic oligonucleotide
cucguucuuuagagaaaca

SEQ ID NO: 978826 - RNA, 19 nt, Artificial Sequence
  Description of Artificial Sequence: Synthetic oligonucleotide
gguuuugguucuacccuug

SEQ ID NO: 978827 - RNA, 19 nt, Artificial Sequence
  Description of Artificial Sequence: Synthetic oligonucleotide
gggucauuguccuuuugua

SEQ ID NO: 978828 - RNA, 19 nt, Artificial Sequence
  Description of Artificial Sequence: Synthetic oligonucleotide
cucuuggggcuuccaucag

SEQ ID NO: 978829 - RNA, 19 nt, Artificial Sequence
  Description of Artificial Sequence: Synthetic oligonucleotide
cugcuggauuaauugcuaa

SEQ ID NO: 978830 - RNA, 19 nt, Artificial Sequence
  Description of Artificial Sequence: Synthetic oligonucleotide
gggaacacgaggcucuucu

SEQ ID NO: 978831 - RNA, 19 nt, Artificial Sequence
  Description of Artificial Sequence: Synthetic oligonucleotide
ccguagcaaauauaucauc

SEQ ID NO: 978832 - RNA, 19 nt, Artificial Sequence
  Description of Artificial Sequence: Synthetic oligonucleotide
gccgugggcagcaaggcug

SEQ ID NO: 978833 - RNA, 19 nt, Artificial Sequence
  Description of Artificial Sequence: Synthetic oligonucleotide
cacgacucuuguuugcacu

SEQ ID NO: 978834 - RNA, 19 nt, Artificial Sequence
  Description of Artificial Sequence: Synthetic oligonucleotide
uguucccuccauggacugu

SEQ ID NO: 978835 - RNA, 19 nt, Artificial Sequence
  Description of Artificial Sequence: Synthetic oligonucleotide
ggaaagauguccccagaau

SEQ ID NO: 978836 - RNA, 19 nt, Artificial Sequence
  Description of Artificial Sequence: Synthetic oligonucleotide
ccagcaagagucggcacgc

SEQ ID NO: 978837 - RNA, 19 nt, Artificial Sequence
  Description of Artificial Sequence: Synthetic oligonucleotide
uucaaagaggagggacguu

SEQ ID NO: 978838 - RNA, 19 nt, Artificial Sequence
  Description of Artificial Sequence: Synthetic oligonucleotide
uugcuaccuucaguagacu

SEQ ID NO: 978839 - RNA, 19 nt, Artificial Sequence
  Description of Artificial Sequence: Synthetic oligonucleotide
gagcugaaaaggucauaau

SEQ ID NO: 978840 - RNA, 19 nt, Artificial Sequence
  Description of Artificial Sequence: Synthetic oligonucleotide
cugaucagaugcagucaaa

SEQ ID NO: 978841 - RNA, 19 nt, Artificial Sequence
  Description of Artificial Sequence: Synthetic oligonucleotide
uccugacaagugggcuggg

SEQ ID NO: 978842 - RNA, 19 nt, Artificial Sequence
  Description of Artificial Sequence: Synthetic oligonucleotide
cccaucaaguggcacugac

SEQ ID NO: 978843 - RNA, 19 nt, Artificial Sequence
  Description of Artificial Sequence: Synthetic oligonucleotide
gcuggauuaauugcuaaau

SEQ ID NO: 978844 - RNA, 19 nt, Artificial Sequence
  Description of Artificial Sequence: Synthetic oligonucleotide
uucuacccuugguuccuuu

SEQ ID NO: 978845 - RNA, 19 nt, Artificial Sequence
  Description of Artificial Sequence: Synthetic oligonucleotide
cuacccuugguuccuuugu

SEQ ID NO: 978846 - RNA, 19 nt, Artificial Sequence
  Description of Artificial Sequence: Synthetic oligonucleotide
cagcaaggcugcuggauua

SEQ ID NO: 978847 - RNA, 19 nt, Artificial Sequence
  Description of Artificial Sequence: Synthetic oligonucleotide
cuucuucaaagaggaggga

SEQ ID NO: 978848 - RNA, 19 nt, Artificial Sequence
  Description of Artificial Sequence: Synthetic oligonucleotide
gacguucucugagucuucu

SEQ ID NO: 978849 - RNA, 19 nt, Artificial Sequence
  Description of Artificial Sequence: Synthetic oligonucleotide
ggguguugcuuugaucuuc

SEQ ID NO: 978850 - RNA, 19 nt, Artificial Sequence
  Description of Artificial Sequence: Synthetic oligonucleotide
cucucacuuuaacacgacu

SEQ ID NO: 978851 - RNA, 19 nt, Artificial Sequence
  Description of Artificial Sequence: Synthetic oligonucleotide
acugugcaacagguccucu

SEQ ID NO: 978852 - RNA, 19 nt, Artificial Sequence
  Description of Artificial Sequence: Synthetic oligonucleotide
gacucgggagcuuccucgu

SEQ ID NO: 978853 - RNA, 19 nt, Artificial Sequence
  Description of Artificial Sequence: Synthetic oligonucleotide
caaacaaacuaaggacggu

SEQ ID NO: 978854 - RNA, 19 nt, Artificial Sequence
  Description of Artificial Sequence: Synthetic oligonucleotide
auccgacuggauggcucuc

SEQ ID NO: 978855 - RNA, 19 nt, Artificial Sequence
  Description of Artificial Sequence: Synthetic oligonucleotide
gaagaauccugugguguuu

SEQ ID NO: 978856 - RNA, 19 nt, Artificial Sequence
  Description of Artificial Sequence: Synthetic oligonucleotide
cuacgcuuuccucucacuu

SEQ ID NO: 978857 - RNA, 19 nt, Artificial Sequence
  Description of Artificial Sequence: Synthetic oligonucleotide
ccaucaaguggcacugaca

SEQ ID NO: 978858 - RNA, 19 nt, Artificial Sequence
  Description of Artificial Sequence: Synthetic oligonucleotide
ucaguagacucgggagcuu

SEQ ID NO: 978859 - RNA, 19 nt, Artificial Sequence
  Description of Artificial Sequence: Synthetic oligonucleotide
ccugauggcugucagauuu

SEQ ID NO: 978860 - RNA, 19 nt, Artificial Sequence
  Description of Artificial Sequence: Synthetic oligonucleotide
agccgccuagcagcgcggg

SEQ ID NO: 978861 - RNA, 19 nt, Artificial Sequence
  Description of Artificial Sequence: Synthetic oligonucleotide
agcuuccguagcaaauaua

SEQ ID NO: 978862 - RNA, 19 nt, Artificial Sequence
  Description of Artificial Sequence: Synthetic oligonucleotide
acucgggagcuuccucguu

SEQ ID NO: 978863 - RNA, 19 nt, Artificial Sequence
  Description of Artificial Sequence: Synthetic oligonucleotide
gccuacgcuuuccucucac

SEQ ID NO: 978864 - RNA, 19 nt, Artificial Sequence
  Description of Artificial Sequence: Synthetic oligonucleotide
ggagggacguucucugagu

SEQ ID NO: 978865 - RNA, 19 nt, Artificial Sequence
  Description of Artificial Sequence: Synthetic oligonucleotide
gcagacaaugcaggaccac

SEQ ID NO: 978866 - RNA, 19 nt, Artificial Sequence
  Description of Artificial Sequence: Synthetic oligonucleotide
aaggacgguuuugguucua

SEQ ID NO: 978867 - RNA, 19 nt, Artificial Sequence
  Description of Artificial Sequence: Synthetic oligonucleotide
gaggggaaaaggguuccuu

SEQ ID NO: 978868 - RNA, 19 nt, Artificial Sequence
  Description of Artificial Sequence: Synthetic oligonucleotide
guagacucgggagcuuccu

SEQ ID NO: 978869 - RNA, 19 nt, Artificial Sequence
  Description of Artificial Sequence: Synthetic oligonucleotide
cgauccgacuggauggcuc

SEQ ID NO: 978870 - RNA, 19 nt, Artificial Sequence
  Description of Artificial Sequence: Synthetic oligonucleotide
ggcugagucuuggcagagc

SEQ ID NO: 978871 - RNA, 19 nt, Artificial Sequence
  Description of Artificial Sequence: Synthetic oligonucleotide
gcagggaacacgaggcucu

SEQ ID NO: 978872 - RNA, 19 nt, Artificial Sequence
  Description of Artificial Sequence: Synthetic oligonucleotide
cagcuuccguagcaaauau

SEQ ID NO: 978873 - RNA, 19 nt, Artificial Sequence
  Description of Artificial Sequence: Synthetic oligonucleotide
gguucuacccuugguuccu

SEQ ID NO: 978874 - RNA, 19 nt, Artificial Sequence
  Description of Artificial Sequence: Synthetic oligonucleotide
ccgacuggauggcucucug

SEQ ID NO: 978875 - RNA, 19 nt, Artificial Sequence
  Description of Artificial Sequence: Synthetic oligonucleotide
gggacguucucugagucuu

SEQ ID NO: 978876 - RNA, 19 nt, Artificial Sequence
  Description of Artificial Sequence: Synthetic oligonucleotide
ggccaacugugcaacaggu

SEQ ID NO: 978877 - RNA, 19 nt, Artificial Sequence
  Description of Artificial Sequence: Synthetic oligonucleotide
ccaagguggggccauggcu

SEQ ID NO: 978878 - RNA, 19 nt, Artificial Sequence
  Description of Artificial Sequence: Synthetic oligonucleotide
ccuaugcucuuuggaaaga

SEQ ID NO: 978879 - RNA, 19 nt, Artificial Sequence
  Description of Artificial Sequence: Synthetic oligonucleotide
gggcuggaagaucgaagcu

SEQ ID NO: 978880 - RNA, 19 nt, Artificial Sequence
  Description of Artificial Sequence: Synthetic oligonucleotide
gcaagagucggcacgcuuu

SEQ ID NO: 978881 - RNA, 19 nt, Artificial Sequence
  Description of Artificial Sequence: Synthetic oligonucleotide
uuccgggccauggcuccuu

SEQ ID NO: 978882 - RNA, 19 nt, Artificial Sequence
  Description of Artificial Sequence: Synthetic oligonucleotide
ggacguucucugagucuuc

SEQ ID NO: 978883 - RNA, 19 nt, Artificial Sequence
  Description of Artificial Sequence: Synthetic oligonucleotide
cauuguccuuuuguagcuu

SEQ ID NO: 978884 - RNA, 19 nt, Artificial Sequence
  Description of Artificial Sequence: Synthetic oligonucleotide
gguggggccauggcuuucu

SEQ ID NO: 978885 - RNA, 19 nt, Artificial Sequence
  Description of Artificial Sequence: Synthetic oligonucleotide
ccgggucauuguccuuuug

SEQ ID NO: 978886 - RNA, 19 nt, Artificial Sequence
  Description of Artificial Sequence: Synthetic oligonucleotide
ccuuuccgaucugcaaaga

SEQ ID NO: 978887 - RNA, 19 nt, Artificial Sequence
  Description of Artificial Sequence: Synthetic oligonucleotide
cugugauccuaugcucuuu

SEQ ID NO: 978888 - RNA, 19 nt, Artificial Sequence
  Description of Artificial Sequence: Synthetic oligonucleotide
ggucuguggccuacgcuuu

SEQ ID NO: 978889 - RNA, 19 nt, Artificial Sequence
  Description of Artificial Sequence: Synthetic oligonucleotide
gcacgcuuuccgggccaug

SEQ ID NO: 978890 - RNA, 19 nt, Artificial Sequence
  Description of Artificial Sequence: Synthetic oligonucleotide
caagugggcuggggucucu

SEQ ID NO: 978891 - RNA, 19 nt, Artificial Sequence
  Description of Artificial Sequence: Synthetic oligonucleotide
cagcaagagucggcacgcu

SEQ ID NO: 978892 - RNA, 19 nt, Artificial Sequence
  Description of Artificial Sequence: Synthetic oligonucleotide
cgcgggucuguggccuacg

SEQ ID NO: 978893 - RNA, 19 nt, Artificial Sequence
  Description of Artificial Sequence: Synthetic oligonucleotide
gcgcgggucuguggccuac

SEQ ID NO: 978894 - RNA, 19 nt, Artificial Sequence
  Description of Artificial Sequence: Synthetic oligonucleotide
ccuagcagcgcgggucugu

SEQ ID NO: 978895 - RNA, 19 nt, Artificial Sequence
  Description of Artificial Sequence: Synthetic oligonucleotide
cagggaacacgaggcucuu

SEQ ID NO: 978896 - RNA, 19 nt, Artificial Sequence
  Description of Artificial Sequence: Synthetic oligonucleotide
ggaagacgccugugcucuu

SEQ ID NO: 978897 - RNA, 19 nt, Artificial Sequence
  Description of Artificial Sequence: Synthetic oligonucleotide
cggcacgcuuuccgggcca

SEQ ID NO: 978898 - RNA, 19 nt, Artificial Sequence
  Description of Artificial Sequence: Synthetic oligonucleotide
cgggagcuuccucguucuu

SEQ ID NO: 978899 - RNA, 19 nt, Artificial Sequence
  Description of Artificial Sequence: Synthetic oligonucleotide
uuaagaagcagaauucugc

SEQ ID NO: 978900 - RNA, 19 nt, Artificial Sequence
  Description of Artificial Sequence: Synthetic oligonucleotide
aacaaggacucccuggccc

SEQ ID NO: 978901 - RNA, 19 nt, Artificial Sequence
  Description of Artificial Sequence: Synthetic oligonucleotide
uggaauauuccccacccgg

SEQ ID NO: 978902 - RNA, 19 nt, Artificial Sequence
  Description of Artificial Sequence: Synthetic oligonucleotide
ugucgguagagaaagaaca

SEQ ID NO: 978903 - RNA, 19 nt, Artificial Sequence
  Description of Artificial Sequence: Synthetic oligonucleotide
aauauuccccacccggucg

SEQ ID NO: 978904 - RNA, 19 nt, Artificial Sequence
  Description of Artificial Sequence: Synthetic oligonucleotide
agucucggaucucagagcc

SEQ ID NO: 978905 - RNA, 19 nt, Artificial Sequence
  Description of Artificial Sequence: Synthetic oligonucleotide
cuaaagucagcucucauac

SEQ ID NO: 978906 - RNA, 19 nt, Artificial Sequence
  Description of Artificial Sequence: Synthetic oligonucleotide
aauccuucuucuauugacc

SEQ ID NO: 978907 - RNA, 19 nt, Artificial Sequence
  Description of Artificial Sequence: Synthetic oligonucleotide
auugagaaaaggguagccc

SEQ ID NO: 978908 - RNA, 19 nt, Artificial Sequence
  Description of Artificial Sequence: Synthetic oligonucleotide
aagggcucaguuuaagaag

SEQ ID NO: 978909 - RNA, 19 nt, Artificial Sequence
  Description of Artificial Sequence: Synthetic oligonucleotide
aaagcuguccuggauacuc

SEQ ID NO: 978910 - RNA, 19 nt, Artificial Sequence
  Description of Artificial Sequence: Synthetic oligonucleotide
acaaccagagccgaguagc

SEQ ID NO: 978911 - RNA, 19 nt, Artificial Sequence
  Description of Artificial Sequence: Synthetic oligonucleotide
ucucacaaagccacuuugg

SEQ ID NO: 978912 - RNA, 19 nt, Artificial Sequence
  Description of Artificial Sequence: Synthetic oligonucleotide
agaucggguugguagaggc

SEQ ID NO: 978913 - RNA, 19 nt, Artificial Sequence
  Description of Artificial Sequence: Synthetic oligonucleotide
ucuucgagaagcaaagguc

SEQ ID NO: 978914 - RNA, 19 nt, Artificial Sequence
  Description of Artificial Sequence: Synthetic oligonucleotide
aguuuaagaagcagaauuc

SEQ ID NO: 978915 - RNA, 19 nt, Artificial Sequence
  Description of Artificial Sequence: Synthetic oligonucleotide
aagaggcugaggcauugac

SEQ ID NO: 978916 - RNA, 19 nt, Artificial Sequence
  Description of Artificial Sequence: Synthetic oligonucleotide
aggaauucauuccaguaug

SEQ ID NO: 978917 - RNA, 19 nt, Artificial Sequence
  Description of Artificial Sequence: Synthetic oligonucleotide
ugaggaaacauugcagagg

SEQ ID NO: 978918 - RNA, 19 nt, Artificial Sequence
  Description of Artificial Sequence: Synthetic oligonucleotide
uuugguuggaucuggauuu

SEQ ID NO: 978919 - RNA, 19 nt, Artificial Sequence
  Description of Artificial Sequence: Synthetic oligonucleotide
cuucuauugaccagcacug

SEQ ID NO: 978920 - RNA, 19 nt, Artificial Sequence
  Description of Artificial Sequence: Synthetic oligonucleotide
auacaggccugguaagucc

SEQ ID NO: 978921 - RNA, 19 nt, Artificial Sequence
  Description of Artificial Sequence: Synthetic oligonucleotide
ugaggcauugacagggucc

SEQ ID NO: 978922 - RNA, 19 nt, Artificial Sequence
  Description of Artificial Sequence: Synthetic oligonucleotide
agcaagcccaaacagagca

SEQ ID NO: 978923 - RNA, 19 nt, Artificial Sequence
  Description of Artificial Sequence: Synthetic oligonucleotide
agggauucccaacucaguc

SEQ ID NO: 978924 - RNA, 19 nt, Artificial Sequence
  Description of Artificial Sequence: Synthetic oligonucleotide
uggauaaguccccuggagc

SEQ ID NO: 978925 - RNA, 19 nt, Artificial Sequence
  Description of Artificial Sequence: Synthetic oligonucleotide
cacuacuccagaaugggag

SEQ ID NO: 978926 - RNA, 19 nt, Artificial Sequence
  Description of Artificial Sequence: Synthetic oligonucleotide
ucucauaccacagagucuc

SEQ ID NO: 978927 - RNA, 19 nt, Artificial Sequence
  Description of Artificial Sequence: Synthetic oligonucleotide
cucugcugaacauucacag

SEQ ID NO: 978928 - RNA, 19 nt, Artificial Sequence
  Description of Artificial Sequence: Synthetic oligonucleotide
uuggauaaguccccuggag

SEQ ID NO: 978929 - RNA, 19 nt, Artificial Sequence
  Description of Artificial Sequence: Synthetic oligonucleotide
guaacacacggcaagaggc

SEQ ID NO: 978930 - RNA, 19 nt, Artificial Sequence
  Description of Artificial Sequence: Synthetic oligonucleotide
ucuauugaccagcacugga

SEQ ID NO: 978931 - RNA, 19 nt, Artificial Sequence
  Description of Artificial Sequence: Synthetic oligonucleotide
cuugcacuacuccagaaug

SEQ ID NO: 978932 - RNA, 19 nt, Artificial Sequence
  Description of Artificial Sequence: Synthetic oligonucleotide
uugcacuacuccagaaugg

SEQ ID NO: 978933 - RNA, 19 nt, Artificial Sequence
  Description of Artificial Sequence: Synthetic oligonucleotide
agcggccacagauacgucc

SEQ ID NO: 978934 - RNA, 19 nt, Artificial Sequence
  Description of Artificial Sequence: Synthetic oligonucleotide
acuacuccagaaugggagg

SEQ ID NO: 978935 - RNA, 19 nt, Artificial Sequence
  Description of Artificial Sequence: Synthetic oligonucleotide
ucuaaagucagcucucaua

SEQ ID NO: 978936 - RNA, 19 nt, Artificial Sequence
  Description of Artificial Sequence: Synthetic oligonucleotide
uucucugaccaggaaaagg

SEQ ID NO: 978937 - RNA, 19 nt, Artificial Sequence
  Description of Artificial Sequence: Synthetic oligonucleotide
aggcauacaacagucccgc

SEQ ID NO: 978938 - RNA, 19 nt, Artificial Sequence
  Description of Artificial Sequence: Synthetic oligonucleotide
agggcucaguuuaagaagc

SEQ ID NO: 978939 - RNA, 19 nt, Artificial Sequence
  Description of Artificial Sequence: Synthetic oligonucleotide
ugcacuacuccagaauggg

SEQ ID NO: 978940 - RNA, 19 nt, Artificial Sequence
  Description of Artificial Sequence: Synthetic oligonucleotide
uucuguugcaaacuccccu

SEQ ID NO: 978941 - RNA, 19 nt, Artificial Sequence
  Description of Artificial Sequence: Synthetic oligonucleotide
auauuccccacccggucgc

SEQ ID NO: 978942 - RNA, 19 nt, Artificial Sequence
  Description of Artificial Sequence: Synthetic oligonucleotide
ugcaccguggcacauucgc

SEQ ID NO: 978943 - RNA, 19 nt, Artificial Sequence
  Description of Artificial Sequence: Synthetic oligonucleotide
auuuguuugcauggcuugc

SEQ ID NO: 978944 - RNA, 19 nt, Artificial Sequence
  Description of Artificial Sequence: Synthetic oligonucleotide
cauacaacagucccgcaug

SEQ ID NO: 978945 - RNA, 19 nt, Artificial Sequence
  Description of Artificial Sequence: Synthetic oligonucleotide
ggagcuauccgacagggcc

SEQ ID NO: 978946 - RNA, 19 nt, Artificial Sequence
  Description of Artificial Sequence: Synthetic oligonucleotide
acuaagagcaggucaccag

SEQ ID NO: 978947 - RNA, 19 nt, Artificial Sequence
  Description of Artificial Sequence: Synthetic oligonucleotide
accauugaguggucgaguc

SEQ ID NO: 978948 - RNA, 19 nt, Artificial Sequence
  Description of Artificial Sequence: Synthetic oligonucleotide
aaaggucuagcugaccucu

SEQ ID NO: 978949 - RNA, 19 nt, Artificial Sequence
  Description of Artificial Sequence: Synthetic oligonucleotide
uguugcaaacuccccuggg

SEQ ID NO: 978950 - RNA, 19 nt, Artificial Sequence
  Description of Artificial Sequence: Synthetic oligonucleotide
cacggcaagaggcugaggc

SEQ ID NO: 978951 - RNA, 19 nt, Artificial Sequence
  Description of Artificial Sequence: Synthetic oligonucleotide
guggucgagucucaggugg

SEQ ID NO: 978952 - RNA, 19 nt, Artificial Sequence
  Description of Artificial Sequence: Synthetic oligonucleotide
uuuggauaaguccccugga

SEQ ID NO: 978953 - RNA, 19 nt, Artificial Sequence
  Description of Artificial Sequence: Synthetic oligonucleotide
acucgagauguguugauga

SEQ ID NO: 978954 - RNA, 19 nt, Artificial Sequence
  Description of Artificial Sequence: Synthetic oligonucleotide
aguugucucuuaaacaaag

SEQ ID NO: 978955 - RNA, 19 nt, Artificial Sequence
  Description of Artificial Sequence: Synthetic oligonucleotide
ucccacuaagagcagguca

SEQ ID NO: 978956 - RNA, 19 nt, Artificial Sequence
  Description of Artificial Sequence: Synthetic oligonucleotide
gguagacuaggccaguggg

SEQ ID NO: 978957 - RNA, 19 nt, Artificial Sequence
  Description of Artificial Sequence: Synthetic oligonucleotide
agccuagucgaacucgggg

SEQ ID NO: 978958 - RNA, 19 nt, Artificial Sequence
  Description of Artificial Sequence: Synthetic oligonucleotide
auugacaggguccccguug

SEQ ID NO: 978959 - RNA, 19 nt, Artificial Sequence
  Description of Artificial Sequence: Synthetic oligonucleotide
uguacaaccagagccgagu

SEQ ID NO: 978960 - RNA, 19 nt, Artificial Sequence
  Description of Artificial Sequence: Synthetic oligonucleotide
gguaaguccaggaauuggg

SEQ ID NO: 978961 - RNA, 19 nt, Artificial Sequence
  Description of Artificial Sequence: Synthetic oligonucleotide
ugaucucuugagcccacag

SEQ ID NO: 978962 - RNA, 19 nt, Artificial Sequence
  Description of Artificial Sequence: Synthetic oligonucleotide
guggguaacacacggcaag

SEQ ID NO: 978963 - RNA, 19 nt, Artificial Sequence
  Description of Artificial Sequence: Synthetic oligonucleotide
accaggguuguguucuucg

SEQ ID NO: 978964 - RNA, 19 nt, Artificial Sequence
  Description of Artificial Sequence: Synthetic oligonucleotide
auacaacagucccgcaugg

SEQ ID NO: 978965 - RNA, 19 nt, Artificial Sequence
  Description of Artificial Sequence: Synthetic oligonucleotide
ugcaguuggcuacuggcac

SEQ ID NO: 978966 - RNA, 19 nt, Artificial Sequence
  Description of Artificial Sequence: Synthetic oligonucleotide
aggagacaccuccacaaag

SEQ ID NO: 978967 - RNA, 19 nt, Artificial Sequence
  Description of Artificial Sequence: Synthetic oligonucleotide
uuuguuugcauggcuugcc

SEQ ID NO: 978968 - RNA, 19 nt, Artificial Sequence
  Description of Artificial Sequence: Synthetic oligonucleotide
ugguucucugaccaggaaa

SEQ ID NO: 978969 - RNA, 19 nt, Artificial Sequence
  Description of Artificial Sequence: Synthetic oligonucleotide
uggauuuguuugcauggcu

SEQ ID NO: 978970 - RNA, 19 nt, Artificial Sequence
  Description of Artificial Sequence: Synthetic oligonucleotide
ugucagcggccacagauac

SEQ ID NO: 978971 - RNA, 19 nt, Artificial Sequence
  Description of Artificial Sequence: Synthetic oligonucleotide
uaacacacggcaagaggcu

SEQ ID NO: 978972 - RNA, 19 nt, Artificial Sequence
  Description of Artificial Sequence: Synthetic oligonucleotide
gguagccacaucuaaaguc

SEQ ID NO: 978973 - RNA, 19 nt, Artificial Sequence
  Description of Artificial Sequence: Synthetic oligonucleotide
ucauaccacagagucucgg

SEQ ID NO: 978974 - RNA, 19 nt, Artificial Sequence
  Description of Artificial Sequence: Synthetic oligonucleotide
ggaggcauacaacaguccc

SEQ ID NO: 978975 - RNA, 19 nt, Artificial Sequence
  Description of Artificial Sequence: Synthetic oligonucleotide
uaaagucagcucucauacc

SEQ ID NO: 978976 - RNA, 19 nt, Artificial Sequence
  Description of Artificial Sequence: Synthetic oligonucleotide
uuggcuacuggcacuugca

SEQ ID NO: 978977 - RNA, 19 nt, Artificial Sequence
  Description of Artificial Sequence: Synthetic oligonucleotide
guagccacaucuaaaguca

SEQ ID NO: 978978 - RNA, 19 nt, Artificial Sequence
  Description of Artificial Sequence: Synthetic oligonucleotide
gaauucauuccaguaugac

SEQ ID NO: 978979 - RNA, 19 nt, Artificial Sequence
  Description of Artificial Sequence: Synthetic oligonucleotide
augucgguagagaaagaac

SEQ ID NO: 978980 - RNA, 19 nt, Artificial Sequence
  Description of Artificial Sequence: Synthetic oligonucleotide
ggcaccauaauccggggcc

SEQ ID NO: 978981 - RNA, 19 nt, Artificial Sequence
  Description of Artificial Sequence: Synthetic oligonucleotide
auucccaacucagucucac

SEQ ID NO: 978982 - RNA, 19 nt, Artificial Sequence
  Description of Artificial Sequence: Synthetic oligonucleotide
gaauauuccccacccgguc

SEQ ID NO: 978983 - RNA, 19 nt, Artificial Sequence
  Description of Artificial Sequence: Synthetic oligonucleotide
agaaugggaggaggcauac

SEQ ID NO: 978984 - RNA, 19 nt, Artificial Sequence
  Description of Artificial Sequence: Synthetic oligonucleotide
auaauccggggccuggcug

SEQ ID NO: 978985 - RNA, 19 nt, Artificial Sequence
  Description of Artificial Sequence: Synthetic oligonucleotide
acaucuaaagucagcucuc

SEQ ID NO: 978986 - RNA, 19 nt, Artificial Sequence
  Description of Artificial Sequence: Synthetic oligonucleotide
ucgagaagcaaaggucuag

SEQ ID NO: 978987 - RNA, 19 nt, Artificial Sequence
  Description of Artificial Sequence: Synthetic oligonucleotide
gaggcauugacaggguccc

SEQ ID NO: 978988 - RNA, 19 nt, Artificial Sequence
  Description of Artificial Sequence: Synthetic oligonucleotide
caccguggcacauucgccc

SEQ ID NO: 978989 - RNA, 19 nt, Artificial Sequence
  Description of Artificial Sequence: Synthetic oligonucleotide
ucgagucucaggugggagc

SEQ ID NO: 978990 - RNA, 19 nt, Artificial Sequence
  Description of Artificial Sequence: Synthetic oligonucleotide
cauugaguggucgagucuc

SEQ ID NO: 978991 - RNA, 19 nt, Artificial Sequence
  Description of Artificial Sequence: Synthetic oligonucleotide
gcaguugucucuuaaacaa

SEQ ID NO: 978992 - RNA, 19 nt, Artificial Sequence
  Description of Artificial Sequence: Synthetic oligonucleotide
guagacuaggccagugggg

SEQ ID NO: 978993 - RNA, 19 nt, Artificial Sequence
  Description of Artificial Sequence: Synthetic oligonucleotide
ucgguggucaaguggggug

SEQ ID NO: 978994 - RNA, 19 nt, Artificial Sequence
  Description of Artificial Sequence: Synthetic oligonucleotide
guuaggacugugauaccag

SEQ ID NO: 978995 - RNA, 19 nt, Artificial Sequence
  Description of Artificial Sequence: Synthetic oligonucleotide
gucucgagcaaggaggcag

SEQ ID NO: 978996 - RNA, 19 nt, Artificial Sequence
  Description of Artificial Sequence: Synthetic oligonucleotide
auguuaggacugugauacc

SEQ ID NO: 978997 - RNA, 19 nt, Artificial Sequence
  Description of Artificial Sequence: Synthetic oligonucleotide
cuugagggaagaccugcag

SEQ ID NO: 978998 - RNA, 19 nt, Artificial Sequence
  Description of Artificial Sequence: Synthetic oligonucleotide
uggggagcuauccgacagg

SEQ ID NO: 978999 - RNA, 19 nt, Artificial Sequence
  Description of Artificial Sequence: Synthetic oligonucleotide
gaugucgguagagaaagaa

SEQ ID NO: 979000 - RNA, 19 nt, Artificial Sequence
  Description of Artificial Sequence: Synthetic oligonucleotide
uaauccggggccuggcuga

SEQ ID NO: 979001 - RNA, 19 nt, Artificial Sequence
  Description of Artificial Sequence: Synthetic oligonucleotide
uuguacaaccagagccgag

SEQ ID NO: 979002 - RNA, 19 nt, Artificial Sequence
  Description of Artificial Sequence: Synthetic oligonucleotide
caggaauugggcccaggcc

SEQ ID NO: 979003 - RNA, 19 nt, Artificial Sequence
  Description of Artificial Sequence: Synthetic oligonucleotide
uagccacaucuaaagucag

SEQ ID NO: 979004 - RNA, 19 nt, Artificial Sequence
  Description of Artificial Sequence: Synthetic oligonucleotide
agacucgaggcccugggga

SEQ ID NO: 979005 - RNA, 19 nt, Artificial Sequence
  Description of Artificial Sequence: Synthetic oligonucleotide
cacaucuaaagucagcucu

SEQ ID NO: 979006 - RNA, 19 nt, Artificial Sequence
  Description of Artificial Sequence: Synthetic oligonucleotide
uucgcccugcuuuaggaaa

SEQ ID NO: 979007 - RNA, 19 nt, Artificial Sequence
  Description of Artificial Sequence: Synthetic oligonucleotide
aguccccuggagcccaggc

SEQ ID NO: 979008 - RNA, 19 nt, Artificial Sequence
  Description of Artificial Sequence: Synthetic oligonucleotide
gacucgaggcccuggggag

SEQ ID NO: 979009 - RNA, 19 nt, Artificial Sequence
  Description of Artificial Sequence: Synthetic oligonucleotide
cuccagaaugggaggaggc

SEQ ID NO: 979010 - RNA, 19 nt, Artificial Sequence
  Description of Artificial Sequence: Synthetic oligonucleotide
aacacacggcaagaggcug

SEQ ID NO: 979011 - RNA, 19 nt, Artificial Sequence
  Description of Artificial Sequence: Synthetic oligonucleotide
uccccguuguacaaccaga

SEQ ID NO: 979012 - RNA, 19 nt, Artificial Sequence
  Description of Artificial Sequence: Synthetic oligonucleotide
uggucgagucucagguggg

SEQ ID NO: 979013 - RNA, 19 nt, Artificial Sequence
  Description of Artificial Sequence: Synthetic oligonucleotide
cacuggaauauuccccacc

SEQ ID NO: 979014 - RNA, 19 nt, Artificial Sequence
  Description of Artificial Sequence: Synthetic oligonucleotide
acuacagggcgagucuugg

SEQ ID NO: 979015 - RNA, 19 nt, Artificial Sequence
  Description of Artificial Sequence: Synthetic oligonucleotide
ggccagaucggguugguag

SEQ ID NO: 979016 - RNA, 19 nt, Artificial Sequence
  Description of Artificial Sequence: Synthetic oligonucleotide
gacaccauugaguggucga

SEQ ID NO: 979017 - RNA, 19 nt, Artificial Sequence
  Description of Artificial Sequence: Synthetic oligonucleotide
gauacaggccugguaaguc

SEQ ID NO: 979018 - RNA, 19 nt, Artificial Sequence
  Description of Artificial Sequence: Synthetic oligonucleotide
cugauacaggccugguaag

SEQ ID NO: 979019 - RNA, 19 nt, Artificial Sequence
  Description of Artificial Sequence: Synthetic oligonucleotide
agcacuacagggcgagucu

SEQ ID NO: 979020 - RNA, 19 nt, Artificial Sequence
  Description of Artificial Sequence: Synthetic oligonucleotide
cuucgagaagcaaaggucu

SEQ ID NO: 979021 - RNA, 19 nt, Artificial Sequence
  Description of Artificial Sequence: Synthetic oligonucleotide
aagcccaaacagagcacac

SEQ ID NO: 979022 - RNA, 19 nt, Artificial Sequence
  Description of Artificial Sequence: Synthetic oligonucleotide
aucacgcuggucguuuugg

SEQ ID NO: 979023 - RNA, 19 nt, Artificial Sequence
  Description of Artificial Sequence: Synthetic oligonucleotide
uccuggguuggcuggagcu

SEQ ID NO: 979024 - RNA, 19 nt, Artificial Sequence
  Description of Artificial Sequence: Synthetic oligonucleotide
ucgguagagaaagaacaaa

SEQ ID NO: 979025 - RNA, 19 nt, Artificial Sequence
  Description of Artificial Sequence: Synthetic oligonucleotide
cuggggagcuauccgacag

SEQ ID NO: 979026 - RNA, 19 nt, Artificial Sequence
  Description of Artificial Sequence: Synthetic oligonucleotide
agucuuggggugcaccgug

SEQ ID NO: 979027 - RNA, 19 nt, Artificial Sequence
  Description of Artificial Sequence: Synthetic oligonucleotide
agagccuagucgaacucgg

SEQ ID NO: 979028 - RNA, 19 nt, Artificial Sequence
  Description of Artificial Sequence: Synthetic oligonucleotide
uggucaaguggggugcuag

SEQ ID NO: 979029 - RNA, 19 nt, Artificial Sequence
  Description of Artificial Sequence: Synthetic oligonucleotide
gaauuggaguggcuguguc

SEQ ID NO: 979030 - RNA, 19 nt, Artificial Sequence
  Description of Artificial Sequence: Synthetic oligonucleotide
cuggaauauuccccacccg

SEQ ID NO: 979031 - RNA, 19 nt, Artificial Sequence
  Description of Artificial Sequence: Synthetic oligonucleotide
gcugaacauucacagcccg

SEQ ID NO: 979032 - RNA, 19 nt, Artificial Sequence
  Description of Artificial Sequence: Synthetic oligonucleotide
gaguggucgagucucaggu

SEQ ID NO: 979033 - RNA, 19 nt, Artificial Sequence
  Description of Artificial Sequence: Synthetic oligonucleotide
ucaguuuaagaagcagaau

SEQ ID NO: 979034 - RNA, 19 nt, Artificial Sequence
  Description of Artificial Sequence: Synthetic oligonucleotide
aggaggcauacaacagucc

SEQ ID NO: 979035 - RNA, 19 nt, Artificial Sequence
  Description of Artificial Sequence: Synthetic oligonucleotide
gaugaugacugggauucca

SEQ ID NO: 979036 - RNA, 19 nt, Artificial Sequence
  Description of Artificial Sequence: Synthetic oligonucleotide
uccagaaugggaggaggca

SEQ ID NO: 979037 - RNA, 19 nt, Artificial Sequence
  Description of Artificial Sequence: Synthetic oligonucleotide
auuccaucacgcuggucgu

SEQ ID NO: 979038 - RNA, 19 nt, Artificial Sequence
  Description of Artificial Sequence: Synthetic oligonucleotide
ugaauuggaguggcugugu

SEQ ID NO: 979039 - RNA, 19 nt, Artificial Sequence
  Description of Artificial Sequence: Synthetic oligonucleotide
caaaggucuagcugaccuc

SEQ ID NO: 979040 - RNA, 19 nt, Artificial Sequence
  Description of Artificial Sequence: Synthetic oligonucleotide
cagagccuagucgaacucg

SEQ ID NO: 979041 - RNA, 19 nt, Artificial Sequence
  Description of Artificial Sequence: Synthetic oligonucleotide
cuggauuuguuugcauggc

SEQ ID NO: 979042 - RNA, 19 nt, Artificial Sequence
  Description of Artificial Sequence: Synthetic oligonucleotide
acaccauugaguggucgag

SEQ ID NO: 979043 - RNA, 19 nt, Artificial Sequence
  Description of Artificial Sequence: Synthetic oligonucleotide
aguaggggucucgagcaag

SEQ ID NO: 979044 - RNA, 19 nt, Artificial Sequence
  Description of Artificial Sequence: Synthetic oligonucleotide
auacguccuggguuggcug

SEQ ID NO: 979045 - RNA, 19 nt, Artificial Sequence
  Description of Artificial Sequence: Synthetic oligonucleotide
aguggucgagucucaggug

SEQ ID NO: 979046 - RNA, 19 nt, Artificial Sequence
  Description of Artificial Sequence: Synthetic oligonucleotide
guucuucgagaagcaaagg

SEQ ID NO: 979047 - RNA, 19 nt, Artificial Sequence
  Description of Artificial Sequence: Synthetic oligonucleotide
uggcuacuggcacuugcac

SEQ ID NO: 979048 - RNA, 19 nt, Artificial Sequence
  Description of Artificial Sequence: Synthetic oligonucleotide
cugucucucuucccucucg

SEQ ID NO: 979049 - RNA, 19 nt, Artificial Sequence
  Description of Artificial Sequence: Synthetic oligonucleotide
ucgcucuggcuucacauuu

SEQ ID NO: 979050 - RNA, 19 nt, Artificial Sequence
  Description of Artificial Sequence: Synthetic oligonucleotide
aaguuucaugccaucccga

SEQ ID NO: 979051 - RNA, 19 nt, Artificial Sequence
  Description of Artificial Sequence: Synthetic oligonucleotide
ggauucccaacucagucuc

SEQ ID NO: 979052 - RNA, 19 nt, Artificial Sequence
  Description of Artificial Sequence: Synthetic oligonucleotide
guccccguuguacaaccag

SEQ ID NO: 979053 - RNA, 19 nt, Artificial Sequence
  Description of Artificial Sequence: Synthetic oligonucleotide
uucugccacccaacaagga

SEQ ID NO: 979054 - RNA, 19 nt, Artificial Sequence
  Description of Artificial Sequence: Synthetic oligonucleotide
cccaacaaggacucccugg

SEQ ID NO: 979055 - RNA, 19 nt, Artificial Sequence
  Description of Artificial Sequence: Synthetic oligonucleotide
agccgaguagccagguucg

SEQ ID NO: 979056 - RNA, 19 nt, Artificial Sequence
  Description of Artificial Sequence: Synthetic oligonucleotide
cugaauuggaguggcugug

SEQ ID NO: 979057 - RNA, 19 nt, Artificial Sequence
  Description of Artificial Sequence: Synthetic oligonucleotide
gccuagucgaacucggggc

SEQ ID NO: 979058 - RNA, 19 nt, Artificial Sequence
  Description of Artificial Sequence: Synthetic oligonucleotide
cccacuaagagcaggucac

SEQ ID NO: 979059 - RNA, 19 nt, Artificial Sequence
  Description of Artificial Sequence: Synthetic oligonucleotide
caguaugacuugucugcac

SEQ ID NO: 979060 - RNA, 19 nt, Artificial Sequence
  Description of Artificial Sequence: Synthetic oligonucleotide
aacuccccuggggucacuc

SEQ ID NO: 979061 - RNA, 19 nt, Artificial Sequence
  Description of Artificial Sequence: Synthetic oligonucleotide
cuagucgaacucggggccg

SEQ ID NO: 979062 - RNA, 19 nt, Artificial Sequence
  Description of Artificial Sequence: Synthetic oligonucleotide
aucuaaagucagcucucau

SEQ ID NO: 979063 - RNA, 19 nt, Artificial Sequence
  Description of Artificial Sequence: Synthetic oligonucleotide
caccaguggguaacacacg

SEQ ID NO: 979064 - RNA, 19 nt, Artificial Sequence
  Description of Artificial Sequence: Synthetic oligonucleotide
cauucgcccugcuuuagga

SEQ ID NO: 979065 - RNA, 19 nt, Artificial Sequence
  Description of Artificial Sequence: Synthetic oligonucleotide
aguaaagacucgaggcccu

SEQ ID NO: 979066 - RNA, 19 nt, Artificial Sequence
  Description of Artificial Sequence: Synthetic oligonucleotide
uugaguggucgagucucag

SEQ ID NO: 979067 - RNA, 19 nt, Artificial Sequence
  Description of Artificial Sequence: Synthetic oligonucleotide
uagucgaacucggggccgg

SEQ ID NO: 979068 - RNA, 19 nt, Artificial Sequence
  Description of Artificial Sequence: Synthetic oligonucleotide
agucuccacagguugggua

SEQ ID NO: 979069 - RNA, 19 nt, Artificial Sequence
  Description of Artificial Sequence: Synthetic oligonucleotide
agggcgagucuuggggugc

SEQ ID NO: 979070 - RNA, 19 nt, Artificial Sequence
  Description of Artificial Sequence: Synthetic oligonucleotide
cuucuucuauugaccagca

SEQ ID NO: 979071 - RNA, 19 nt, Artificial Sequence
  Description of Artificial Sequence: Synthetic oligonucleotide
ucgcccugcuuuaggaaaa

SEQ ID NO: 979072 - RNA, 19 nt, Artificial Sequence
  Description of Artificial Sequence: Synthetic oligonucleotide
gccucgguggucaaguggg

SEQ ID NO: 979073 - RNA, 19 nt, Artificial Sequence
  Description of Artificial Sequence: Synthetic oligonucleotide
ucggguugguagaggcuga

SEQ ID NO: 979074 - RNA, 19 nt, Artificial Sequence
  Description of Artificial Sequence: Synthetic oligonucleotide
gagauguguugaugaugac

SEQ ID NO: 979075 - RNA, 19 nt, Artificial Sequence
  Description of Artificial Sequence: Synthetic oligonucleotide
cugugauaccagcugccuc

SEQ ID NO: 979076 - RNA, 19 nt, Artificial Sequence
  Description of Artificial Sequence: Synthetic oligonucleotide
gcaguagcuggccacuagc

SEQ ID NO: 979077 - RNA, 19 nt, Artificial Sequence
  Description of Artificial Sequence: Synthetic oligonucleotide
gcuacuggcacuugcacua

SEQ ID NO: 979078 - RNA, 19 nt, Artificial Sequence
  Description of Artificial Sequence: Synthetic oligonucleotide
cuggauacucaguggccuc

SEQ ID NO: 979079 - RNA, 19 nt, Artificial Sequence
  Description of Artificial Sequence: Synthetic oligonucleotide
gagcacuacagggcgaguc

SEQ ID NO: 979080 - RNA, 19 nt, Artificial Sequence
  Description of Artificial Sequence: Synthetic oligonucleotide
cgagauguguugaugauga

SEQ ID NO: 979081 - RNA, 19 nt, Artificial Sequence
  Description of Artificial Sequence: Synthetic oligonucleotide
caucaccccauccuccauc

SEQ ID NO: 979082 - RNA, 19 nt, Artificial Sequence
  Description of Artificial Sequence: Synthetic oligonucleotide
caggucaccaguggguaac

SEQ ID NO: 979083 - RNA, 19 nt, Artificial Sequence
  Description of Artificial Sequence: Synthetic oligonucleotide
auucgcccugcuuuaggaa

SEQ ID NO: 979084 - RNA, 19 nt, Artificial Sequence
  Description of Artificial Sequence: Synthetic oligonucleotide
ccuagucgaacucggggcc

SEQ ID NO: 979085 - RNA, 19 nt, Artificial Sequence
  Description of Artificial Sequence: Synthetic oligonucleotide
ugaugaugacugggauucc

SEQ ID NO: 979086 - RNA, 19 nt, Artificial Sequence
  Description of Artificial Sequence: Synthetic oligonucleotide
gagccuagucgaacucggg

SEQ ID NO: 979087 - RNA, 19 nt, Artificial Sequence
  Description of Artificial Sequence: Synthetic oligonucleotide
ggggagcuauccgacaggg

SEQ ID NO: 979088 - RNA, 19 nt, Artificial Sequence
  Description of Artificial Sequence: Synthetic oligonucleotide
cacaucaccaggaauucau

SEQ ID NO: 979089 - RNA, 19 nt, Artificial Sequence
  Description of Artificial Sequence: Synthetic oligonucleotide
gcucaguuuaagaagcaga

SEQ ID NO: 979090 - RNA, 19 nt, Artificial Sequence
  Description of Artificial Sequence: Synthetic oligonucleotide
cacucgagauguguugaug

SEQ ID NO: 979091 - RNA, 19 nt, Artificial Sequence
  Description of Artificial Sequence: Synthetic oligonucleotide
ucgagaggagugggcaggc

SEQ ID NO: 979092 - RNA, 19 nt, Artificial Sequence
  Description of Artificial Sequence: Synthetic oligonucleotide
ggcucaguuuaagaagcag

SEQ ID NO: 979093 - RNA, 19 nt, Artificial Sequence
  Description of Artificial Sequence: Synthetic oligonucleotide
ugggagcacuacagggcga

SEQ ID NO: 979094 - RNA, 19 nt, Artificial Sequence
  Description of Artificial Sequence: Synthetic oligonucleotide
accguggcacauucgcccu

SEQ ID NO: 979095 - RNA, 19 nt, Artificial Sequence
  Description of Artificial Sequence: Synthetic oligonucleotide
ggggucacucccuugaucu

SEQ ID NO: 979096 - RNA, 19 nt, Artificial Sequence
  Description of Artificial Sequence: Synthetic oligonucleotide
gucgagucucaggugggag

SEQ ID NO: 979097 - RNA, 19 nt, Artificial Sequence
  Description of Artificial Sequence: Synthetic oligonucleotide
ucggaucucagagccuagu

SEQ ID NO: 979098 - RNA, 19 nt, Artificial Sequence
  Description of Artificial Sequence: Synthetic oligonucleotide
uggggugcaccguggcaca

SEQ ID NO: 979099 - RNA, 19 nt, Artificial Sequence
  Description of Artificial Sequence: Synthetic oligonucleotide
cagggcgagucuuggggug

SEQ ID NO: 979100 - RNA, 19 nt, Artificial Sequence
  Description of Artificial Sequence: Synthetic oligonucleotide
gucgguagagaaagaacaa

SEQ ID NO: 979101 - RNA, 19 nt, Artificial Sequence
  Description of Artificial Sequence: Synthetic oligonucleotide
aggguccccguuguacaac

SEQ ID NO: 979102 - RNA, 19 nt, Artificial Sequence
  Description of Artificial Sequence: Synthetic oligonucleotide
cagaucggguugguagagg

SEQ ID NO: 979103 - RNA, 19 nt, Artificial Sequence
  Description of Artificial Sequence: Synthetic oligonucleotide
caucacgcuggucguuuug

SEQ ID NO: 979104 - RNA, 19 nt, Artificial Sequence
  Description of Artificial Sequence: Synthetic oligonucleotide
guccaucaccccauccucc

SEQ ID NO: 979105 - RNA, 19 nt, Artificial Sequence
  Description of Artificial Sequence: Synthetic oligonucleotide
agcuauccgacagggccug

SEQ ID NO: 979106 - RNA, 19 nt, Artificial Sequence
  Description of Artificial Sequence: Synthetic oligonucleotide
aauccggggccuggcugag

SEQ ID NO: 979107 - RNA, 19 nt, Artificial Sequence
  Description of Artificial Sequence: Synthetic oligonucleotide
aaggucuagcugaccucug

SEQ ID NO: 979108 - RNA, 19 nt, Artificial Sequence
  Description of Artificial Sequence: Synthetic oligonucleotide
ggugucagcggccacagau

SEQ ID NO: 979109 - RNA, 19 nt, Artificial Sequence
  Description of Artificial Sequence: Synthetic oligonucleotide
guaaagacucgaggcccug

SEQ ID NO: 979110 - RNA, 19 nt, Artificial Sequence
  Description of Artificial Sequence: Synthetic oligonucleotide
gccggggacacacaggaga

SEQ ID NO: 979111 - RNA, 19 nt, Artificial Sequence
  Description of Artificial Sequence: Synthetic oligonucleotide
uucaugccaucccgauguc

SEQ ID NO: 979112 - RNA, 19 nt, Artificial Sequence
  Description of Artificial Sequence: Synthetic oligonucleotide
caucuaaagucagcucuca

SEQ ID NO: 979113 - RNA, 19 nt, Artificial Sequence
  Description of Artificial Sequence: Synthetic oligonucleotide
uccaucacgcuggucguuu

SEQ ID NO: 979114 - RNA, 19 nt, Artificial Sequence
  Description of Artificial Sequence: Synthetic oligonucleotide
agggccccgacucugcauu

SEQ ID NO: 979115 - RNA, 19 nt, Artificial Sequence
  Description of Artificial Sequence: Synthetic oligonucleotide
ccccguuguacaaccagag

SEQ ID NO: 979116 - RNA, 19 nt, Artificial Sequence
  Description of Artificial Sequence: Synthetic oligonucleotide
cuacuccagaaugggagga

SEQ ID NO: 979117 - RNA, 19 nt, Artificial Sequence
  Description of Artificial Sequence: Synthetic oligonucleotide
gauacguccuggguuggcu

SEQ ID NO: 979118 - RNA, 19 nt, Artificial Sequence
  Description of Artificial Sequence: Synthetic oligonucleotide
aguggguaacacacggcaa

SEQ ID NO: 979119 - RNA, 19 nt, Artificial Sequence
  Description of Artificial Sequence: Synthetic oligonucleotide
cacacggcaagaggcugag

SEQ ID NO: 979120 - RNA, 19 nt, Artificial Sequence
  Description of Artificial Sequence: Synthetic oligonucleotide
cacuaagagcaggucacca

SEQ ID NO: 979121 - RNA, 19 nt, Artificial Sequence
  Description of Artificial Sequence: Synthetic oligonucleotide
agcucucauaccacagagu

SEQ ID NO: 979122 - RNA, 19 nt, Artificial Sequence
  Description of Artificial Sequence: Synthetic oligonucleotide
ggguccccguuguacaacc

SEQ ID NO: 979123 - RNA, 19 nt, Artificial Sequence
  Description of Artificial Sequence: Synthetic oligonucleotide
ugccucccaggcaggguac

SEQ ID NO: 979124 - RNA, 19 nt, Artificial Sequence
  Description of Artificial Sequence: Synthetic oligonucleotide
auugaguggucgagucuca

SEQ ID NO: 979125 - RNA, 19 nt, Artificial Sequence
  Description of Artificial Sequence: Synthetic oligonucleotide
agcccgaggccaggguagc

SEQ ID NO: 979126 - RNA, 19 nt, Artificial Sequence
  Description of Artificial Sequence: Synthetic oligonucleotide
guacaaccagagccgagua

SEQ ID NO: 979127 - RNA, 19 nt, Artificial Sequence
  Description of Artificial Sequence: Synthetic oligonucleotide
cuuggauccaaggccugga

SEQ ID NO: 979128 - RNA, 19 nt, Artificial Sequence
  Description of Artificial Sequence: Synthetic oligonucleotide
uucccacuaagagcagguc

SEQ ID NO: 979129 - RNA, 19 nt, Artificial Sequence
  Description of Artificial Sequence: Synthetic oligonucleotide
cagagucucggaucucaga

SEQ ID NO: 979130 - RNA, 19 nt, Artificial Sequence
  Description of Artificial Sequence: Synthetic oligonucleotide
ggguaacacacggcaagag

SEQ ID NO: 979131 - RNA, 19 nt, Artificial Sequence
  Description of Artificial Sequence: Synthetic oligonucleotide
gggagcacuacagggcgag

SEQ ID NO: 979132 - RNA, 19 nt, Artificial Sequence
  Description of Artificial Sequence: Synthetic oligonucleotide
cccggcagcagaguaaggc

SEQ ID NO: 979133 - RNA, 19 nt, Artificial Sequence
  Description of Artificial Sequence: Synthetic oligonucleotide
cagauacguccuggguugg

SEQ ID NO: 979134 - RNA, 19 nt, Artificial Sequence
  Description of Artificial Sequence: Synthetic oligonucleotide
uaggggucucgagcaagga

SEQ ID NO: 979135 - RNA, 19 nt, Artificial Sequence
  Description of Artificial Sequence: Synthetic oligonucleotide
cacucccuugaucucuuga

SEQ ID NO: 979136 - RNA, 19 nt, Artificial Sequence
  Description of Artificial Sequence: Synthetic oligonucleotide
cccgacucugcauugagaa

SEQ ID NO: 979137 - RNA, 19 nt, Artificial Sequence
  Description of Artificial Sequence: Synthetic oligonucleotide
gcugaauuggaguggcugu

SEQ ID NO: 979138 - RNA, 19 nt, Artificial Sequence
  Description of Artificial Sequence: Synthetic oligonucleotide
acacacggcaagaggcuga

SEQ ID NO: 979139 - RNA, 19 nt, Artificial Sequence
  Description of Artificial Sequence: Synthetic oligonucleotide
agcgggcgcgcucacucga

SEQ ID NO: 979140 - RNA, 19 nt, Artificial Sequence
  Description of Artificial Sequence: Synthetic oligonucleotide
cucucauaccacagagucu

SEQ ID NO: 979141 - RNA, 19 nt, Artificial Sequence
  Description of Artificial Sequence: Synthetic oligonucleotide
gaaugggaggaggcauaca

SEQ ID NO: 979142 - RNA, 19 nt, Artificial Sequence
  Description of Artificial Sequence: Synthetic oligonucleotide
gggauguuaggacugugau

SEQ ID NO: 979143 - RNA, 19 nt, Artificial Sequence
  Description of Artificial Sequence: Synthetic oligonucleotide
gggauucccaacucagucu

SEQ ID NO: 979144 - RNA, 19 nt, Artificial Sequence
  Description of Artificial Sequence: Synthetic oligonucleotide
gcuggcugggauguuagga

SEQ ID NO: 979145 - RNA, 19 nt, Artificial Sequence
  Description of Artificial Sequence: Synthetic oligonucleotide
gccagaucggguugguaga

SEQ ID NO: 979146 - RNA, 19 nt, Artificial Sequence
  Description of Artificial Sequence: Synthetic oligonucleotide
cccguuguacaaccagagc

SEQ ID NO: 979147 - RNA, 19 nt, Artificial Sequence
  Description of Artificial Sequence: Synthetic oligonucleotide
ccacaucuaaagucagcuc

SEQ ID NO: 979148 - RNA, 19 nt, Artificial Sequence
  Description of Artificial Sequence: Synthetic oligonucleotide
ugccaucccgaugucggua

SEQ ID NO: 979149 - RNA, 19 nt, Artificial Sequence
  Description of Artificial Sequence: Synthetic oligonucleotide
aucuucggccaggcacugg

SEQ ID NO: 979150 - RNA, 19 nt, Artificial Sequence
  Description of Artificial Sequence: Synthetic oligonucleotide
cagcgggcgcgcucacucg

SEQ ID NO: 979151 - RNA, 19 nt, Artificial Sequence
  Description of Artificial Sequence: Synthetic oligonucleotide
cgagaagcaaaggucuagc

SEQ ID NO: 979152 - RNA, 19 nt, Artificial Sequence
  Description of Artificial Sequence: Synthetic oligonucleotide
gaacucggggccggggaca

SEQ ID NO: 979153 - RNA, 19 nt, Artificial Sequence
  Description of Artificial Sequence: Synthetic oligonucleotide
cgcauggcuguccaagagc

SEQ ID NO: 979154 - RNA, 19 nt, Artificial Sequence
  Description of Artificial Sequence: Synthetic oligonucleotide
ccggggacacacaggagac

SEQ ID NO: 979155 - RNA, 19 nt, Artificial Sequence
  Description of Artificial Sequence: Synthetic oligonucleotide
cagacaccauugagugguc

SEQ ID NO: 979156 - RNA, 19 nt, Artificial Sequence
  Description of Artificial Sequence: Synthetic oligonucleotide
gagcuauccgacagggccu

SEQ ID NO: 979157 - RNA, 19 nt, Artificial Sequence
  Description of Artificial Sequence: Synthetic oligonucleotide
ggcgcgcucacucgagaug

SEQ ID NO: 979158 - RNA, 19 nt, Artificial Sequence
  Description of Artificial Sequence: Synthetic oligonucleotide
gcauacaacagucccgcau

SEQ ID NO: 979159 - RNA, 19 nt, Artificial Sequence
  Description of Artificial Sequence: Synthetic oligonucleotide
caaacuccccuggggucac

SEQ ID NO: 979160 - RNA, 19 nt, Artificial Sequence
  Description of Artificial Sequence: Synthetic oligonucleotide
caacagucuucuguugcaa

SEQ ID NO: 979161 - RNA, 19 nt, Artificial Sequence
  Description of Artificial Sequence: Synthetic oligonucleotide
gcucccucaaugucuugga

SEQ ID NO: 979162 - RNA, 19 nt, Artificial Sequence
  Description of Artificial Sequence: Synthetic oligonucleotide
ggaauauuccccacccggu

SEQ ID NO: 979163 - RNA, 19 nt, Artificial Sequence
  Description of Artificial Sequence: Synthetic oligonucleotide
cucgagauguguugaugau

SEQ ID NO: 979164 - RNA, 19 nt, Artificial Sequence
  Description of Artificial Sequence: Synthetic oligonucleotide
cgaguagccagguucgaga

SEQ ID NO: 979165 - RNA, 19 nt, Artificial Sequence
  Description of Artificial Sequence: Synthetic oligonucleotide
cccaggcaggcugaauugg

SEQ ID NO: 979166 - RNA, 19 nt, Artificial Sequence
  Description of Artificial Sequence: Synthetic oligonucleotide
cguuuugguccaucacccc

SEQ ID NO: 979167 - RNA, 19 nt, Artificial Sequence
  Description of Artificial Sequence: Synthetic oligonucleotide
aggucaccaguggguaaca

SEQ ID NO: 979168 - RNA, 19 nt, Artificial Sequence
  Description of Artificial Sequence: Synthetic oligonucleotide
acacggcaagaggcugagg

SEQ ID NO: 979169 - RNA, 19 nt, Artificial Sequence
  Description of Artificial Sequence: Synthetic oligonucleotide
ggaaccagcuggcugggau

SEQ ID NO: 979170 - RNA, 19 nt, Artificial Sequence
  Description of Artificial Sequence: Synthetic oligonucleotide
cuggucguuuugguccauc

SEQ ID NO: 979171 - RNA, 19 nt, Artificial Sequence
  Description of Artificial Sequence: Synthetic oligonucleotide
gaucggguugguagaggcu

SEQ ID NO: 979172 - RNA, 19 nt, Artificial Sequence
  Description of Artificial Sequence: Synthetic oligonucleotide
cauaauccggggccuggcu

SEQ ID NO: 979173 - RNA, 19 nt, Artificial Sequence
  Description of Artificial Sequence: Synthetic oligonucleotide
ggucuagcugaccucugcu

SEQ ID NO: 979174 - RNA, 19 nt, Artificial Sequence
  Description of Artificial Sequence: Synthetic oligonucleotide
cucgagcaaggaggcaguc

SEQ ID NO: 979175 - RNA, 19 nt, Artificial Sequence
  Description of Artificial Sequence: Synthetic oligonucleotide
ccagaucggguugguagag

SEQ ID NO: 979176 - RNA, 19 nt, Artificial Sequence
  Description of Artificial Sequence: Synthetic oligonucleotide
gccccgacucugcauugag

SEQ ID NO: 979177 - RNA, 19 nt, Artificial Sequence
  Description of Artificial Sequence: Synthetic oligonucleotide
gugcaccguggcacauucg

SEQ ID NO: 979178 - RNA, 19 nt, Artificial Sequence
  Description of Artificial Sequence: Synthetic oligonucleotide
ccacuaagagcaggucacc

SEQ ID NO: 979179 - RNA, 19 nt, Artificial Sequence
  Description of Artificial Sequence: Synthetic oligonucleotide
ccgcauggcuguccaagag

SEQ ID NO: 979180 - RNA, 19 nt, Artificial Sequence
  Description of Artificial Sequence: Synthetic oligonucleotide
gccugguaaguccaggaau

SEQ ID NO: 979181 - RNA, 19 nt, Artificial Sequence
  Description of Artificial Sequence: Synthetic oligonucleotide
agccugauacaggccuggu

SEQ ID NO: 979182 - RNA, 19 nt, Artificial Sequence
  Description of Artificial Sequence: Synthetic oligonucleotide
gugucagcggccacagaua

SEQ ID NO: 979183 - RNA, 19 nt, Artificial Sequence
  Description of Artificial Sequence: Synthetic oligonucleotide
uuccaucacgcuggucguu

SEQ ID NO: 979184 - RNA, 19 nt, Artificial Sequence
  Description of Artificial Sequence: Synthetic oligonucleotide
gcaccguggcacauucgcc

SEQ ID NO: 979185 - RNA, 19 nt, Artificial Sequence
  Description of Artificial Sequence: Synthetic oligonucleotide
ccugguaaguccaggaauu

SEQ ID NO: 979186 - RNA, 19 nt, Artificial Sequence
  Description of Artificial Sequence: Synthetic oligonucleotide
gcgagucuuggggugcacc

SEQ ID NO: 979187 - RNA, 19 nt, Artificial Sequence
  Description of Artificial Sequence: Synthetic oligonucleotide
cauuugcaguugucucuua

SEQ ID NO: 979188 - RNA, 19 nt, Artificial Sequence
  Description of Artificial Sequence: Synthetic oligonucleotide
ccuugagggaagaccugca

SEQ ID NO: 979189 - RNA, 19 nt, Artificial Sequence
  Description of Artificial Sequence: Synthetic oligonucleotide
ggucacucccuugaucucu

SEQ ID NO: 979190 - RNA, 19 nt, Artificial Sequence
  Description of Artificial Sequence: Synthetic oligonucleotide
ccgaguagccagguucgag

SEQ ID NO: 979191 - RNA, 19 nt, Artificial Sequence
  Description of Artificial Sequence: Synthetic oligonucleotide
ggguagccacaucuaaagu

SEQ ID NO: 979192 - RNA, 19 nt, Artificial Sequence
  Description of Artificial Sequence: Synthetic oligonucleotide
cccgaugucgguagagaaa

SEQ ID NO: 979193 - RNA, 19 nt, Artificial Sequence
  Description of Artificial Sequence: Synthetic oligonucleotide
ccaggguuguguucuucga

SEQ ID NO: 979194 - RNA, 19 nt, Artificial Sequence
  Description of Artificial Sequence: Synthetic oligonucleotide
ccaguaugacuugucugca

SEQ ID NO: 979195 - RNA, 19 nt, Artificial Sequence
  Description of Artificial Sequence: Synthetic oligonucleotide
ccaucuucggccaggcacu

SEQ ID NO: 979196 - RNA, 19 nt, Artificial Sequence
  Description of Artificial Sequence: Synthetic oligonucleotide
ccggucgcuggcuucccac

SEQ ID NO: 979197 - RNA, 19 nt, Artificial Sequence
  Description of Artificial Sequence: Synthetic oligonucleotide
ggucgagucucagguggga

SEQ ID NO: 979198 - RNA, 19 nt, Artificial Sequence
  Description of Artificial Sequence: Synthetic oligonucleotide
caccauugaguggucgagu

SEQ ID NO: 979199 - RNA, 19 nt, Artificial Sequence
  Description of Artificial Sequence: Synthetic oligonucleotide
gggccccgacucugcauug

SEQ ID NO: 979200 - RNA, 19 nt, Artificial Sequence
  Description of Artificial Sequence: Synthetic oligonucleotide
gguuggaucuggauuuguu

SEQ ID NO: 979201 - RNA, 19 nt, Artificial Sequence
  Description of Artificial Sequence: Synthetic oligonucleotide
cguggcacauucgcccugc

SEQ ID NO: 979202 - RNA, 19 nt, Artificial Sequence
  Description of Artificial Sequence: Synthetic oligonucleotide
cgaacucggggccggggac

SEQ ID NO: 979203 - RNA, 19 nt, Artificial Sequence
  Description of Artificial Sequence: Synthetic oligonucleotide
cgagucucaggugggagca

SEQ ID NO: 979204 - RNA, 19 nt, Artificial Sequence
  Description of Artificial Sequence: Synthetic oligonucleotide
accagcgggcgcgcucacu

SEQ ID NO: 979205 - RNA, 19 nt, Artificial Sequence
  Description of Artificial Sequence: Synthetic oligonucleotide
cccgcauggcuguccaaga

SEQ ID NO: 979206 - RNA, 19 nt, Artificial Sequence
  Description of Artificial Sequence: Synthetic oligonucleotide
cugcaccccagcuggcccu

SEQ ID NO: 979207 - RNA, 19 nt, Artificial Sequence
  Description of Artificial Sequence: Synthetic oligonucleotide
gcgcgcucacucgagaugu

SEQ ID NO: 979208 - RNA, 19 nt, Artificial Sequence
  Description of Artificial Sequence: Synthetic oligonucleotide
gaccugcagguuccucaau

SEQ ID NO: 979209 - RNA, 19 nt, Artificial Sequence
  Description of Artificial Sequence: Synthetic oligonucleotide
gccccaucuucggccaggc

SEQ ID NO: 979210 - RNA, 19 nt, Artificial Sequence
  Description of Artificial Sequence: Synthetic oligonucleotide
cugccaccagcgggcgcgc

SEQ ID NO: 979211 - RNA, 19 nt, Artificial Sequence
  Description of Artificial Sequence: Synthetic oligonucleotide
ccgacucugcauugagaaa

SEQ ID NO: 979212 - RNA, 19 nt, Artificial Sequence
  Description of Artificial Sequence: Synthetic oligonucleotide
ggucucgagcaaggaggca

SEQ ID NO: 979213 - RNA, 19 nt, Artificial Sequence
  Description of Artificial Sequence: Synthetic oligonucleotide
ccauugaguggucgagucu

SEQ ID NO: 979214 - RNA, 19 nt, Artificial Sequence
  Description of Artificial Sequence: Synthetic oligonucleotide
gaggccagaucggguuggu

SEQ ID NO: 979215 - RNA, 19 nt, Artificial Sequence
  Description of Artificial Sequence: Synthetic oligonucleotide
cauugacaggguccccguu

SEQ ID NO: 979216 - RNA, 19 nt, Artificial Sequence
  Description of Artificial Sequence: Synthetic oligonucleotide
gccaggguauucacugugu

SEQ ID NO: 979217 - RNA, 19 nt, Artificial Sequence
  Description of Artificial Sequence: Synthetic oligonucleotide
gcugggauguuaggacugu

SEQ ID NO: 979218 - RNA, 19 nt, Artificial Sequence
  Description of Artificial Sequence: Synthetic oligonucleotide
guggucaaguggggugcua

SEQ ID NO: 979219 - RNA, 19 nt, Artificial Sequence
  Description of Artificial Sequence: Synthetic oligonucleotide
ccccgacucugcauugaga

SEQ ID NO: 979220 - RNA, 19 nt, Artificial Sequence
  Description of Artificial Sequence: Synthetic oligonucleotide
gguccccguuguacaacca

SEQ ID NO: 979221 - RNA, 19 nt, Artificial Sequence
  Description of Artificial Sequence: Synthetic oligonucleotide
ccccggcagcagaguaagg

SEQ ID NO: 979222 - RNA, 19 nt, Artificial Sequence
  Description of Artificial Sequence: Synthetic oligonucleotide
ccacccggucgcuggcuuc

SEQ ID NO: 979223 - RNA, 19 nt, Artificial Sequence
  Description of Artificial Sequence: Synthetic oligonucleotide
guggcacauucgcccugcu

SEQ ID NO: 979224 - RNA, 19 nt, Artificial Sequence
  Description of Artificial Sequence: Synthetic oligonucleotide
ggccccgacucugcauuga

SEQ ID NO: 979225 - RNA, 19 nt, Artificial Sequence
  Description of Artificial Sequence: Synthetic oligonucleotide
caaggacucccuggccccu

SEQ ID NO: 979226 - RNA, 19 nt, Artificial Sequence
  Description of Artificial Sequence: Synthetic oligonucleotide
cgaugucgguagagaaaga

SEQ ID NO: 979227 - RNA, 19 nt, Artificial Sequence
  Description of Artificial Sequence: Synthetic oligonucleotide
gguggucaaguggggugcu

SEQ ID NO: 979228 - RNA, 19 nt, Artificial Sequence
  Description of Artificial Sequence: Synthetic oligonucleotide
acucggggccggggacaca

SEQ ID NO: 979229 - RNA, 19 nt, Artificial Sequence
  Description of Artificial Sequence: Synthetic oligonucleotide
ccaccagcgggcgcgcuca

SEQ ID NO: 979230 - RNA, 19 nt, Artificial Sequence
  Description of Artificial Sequence: Synthetic oligonucleotide
gggcgcgcucacucgagau

SEQ ID NO: 979231 - RNA, 19 nt, Artificial Sequence
  Description of Artificial Sequence: Synthetic oligonucleotide
gggcgagucuuggggugca

SEQ ID NO: 979232 - RNA, 19 nt, Artificial Sequence
  Description of Artificial Sequence: Synthetic oligonucleotide
gccgaguagccagguucga

SEQ ID NO: 979233 - RNA, 19 nt, Artificial Sequence
  Description of Artificial Sequence: Synthetic oligonucleotide
gcgcucacucgagaugugu

SEQ ID NO: 979234 - RNA, 19 nt, Artificial Sequence
  Description of Artificial Sequence: Synthetic oligonucleotide
ccaucccgaugucgguaga

SEQ ID NO: 979235 - RNA, 19 nt, Artificial Sequence
  Description of Artificial Sequence: Synthetic oligonucleotide
cgcgcucacucgagaugug

SEQ ID NO: 979236 - RNA, 19 nt, Artificial Sequence
  Description of Artificial Sequence: Synthetic oligonucleotide
ggagcacuacagggcgagu

SEQ ID NO: 979237 - RNA, 19 nt, Artificial Sequence
  Description of Artificial Sequence: Synthetic oligonucleotide
cgcucacucgagauguguu

SEQ ID NO: 979238 - RNA, 19 nt, Artificial Sequence
  Description of Artificial Sequence: Synthetic oligonucleotide
cccggucgcuggcuuccca

SEQ ID NO: 979239 - RNA, 19 nt, Artificial Sequence
  Description of Artificial Sequence: Synthetic oligonucleotide
cggucgcuggcuucccacu

SEQ ID NO: 979240 - RNA, 19 nt, Artificial Sequence
  Description of Artificial Sequence: Synthetic oligonucleotide
gcuggucguuuugguccau

SEQ ID NO: 979241 - RNA, 19 nt, Artificial Sequence
  Description of Artificial Sequence: Synthetic oligonucleotide
gcuugccugcuggcaccau

SEQ ID NO: 979242 - RNA, 19 nt, Artificial Sequence
  Description of Artificial Sequence: Synthetic oligonucleotide
uauacauuagcaaauaggc

SEQ ID NO: 979243 - RNA, 19 nt, Artificial Sequence
  Description of Artificial Sequence: Synthetic oligonucleotide
aaggcaucaacucagggac

SEQ ID NO: 979244 - RNA, 19 nt, Artificial Sequence
  Description of Artificial Sequence: Synthetic oligonucleotide
acuauuauaagccucuuuc

SEQ ID NO: 979245 - RNA, 19 nt, Artificial Sequence
  Description of Artificial Sequence: Synthetic oligonucleotide
auuauaagccucuuucucc

SEQ ID NO: 979246 - RNA, 19 nt, Artificial Sequence
  Description of Artificial Sequence: Synthetic oligonucleotide
gagaccauuacuuuuaccc

SEQ ID NO: 979247 - RNA, 19 nt, Artificial Sequence
  Description of Artificial Sequence: Synthetic oligonucleotide
aaauugucggguuagacga

SEQ ID NO: 979248 - RNA, 19 nt, Artificial Sequence
  Description of Artificial Sequence: Synthetic oligonucleotide
ucaauuaauccuaaucugc

SEQ ID NO: 979249 - RNA, 19 nt, Artificial Sequence
  Description of Artificial Sequence: Synthetic oligonucleotide
gagacugacaaauugucgg

SEQ ID NO: 979250 - RNA, 19 nt, Artificial Sequence
  Description of Artificial Sequence: Synthetic oligonucleotide
acgauuagcuccuuuauac

SEQ ID NO: 979251 - RNA, 19 nt, Artificial Sequence
  Description of Artificial Sequence: Synthetic oligonucleotide
auuaauccuaaucugcagg

SEQ ID NO: 979252 - RNA, 19 nt, Artificial Sequence
  Description of Artificial Sequence: Synthetic oligonucleotide
ucuuccaauaaaagaaggg

SEQ ID NO: 979253 - RNA, 19 nt, Artificial Sequence
  Description of Artificial Sequence: Synthetic oligonucleotide
ucagugauauuacagaagu

SEQ ID NO: 979254 - RNA, 19 nt, Artificial Sequence
  Description of Artificial Sequence: Synthetic oligonucleotide
uucguuauuuguuuuagcc

SEQ ID NO: 979255 - RNA, 19 nt, Artificial Sequence
  Description of Artificial Sequence: Synthetic oligonucleotide
uacauuagcaaauaggcuc

SEQ ID NO: 979256 - RNA, 19 nt, Artificial Sequence
  Description of Artificial Sequence: Synthetic oligonucleotide
uucaguaauacccugcugu

SEQ ID NO: 979257 - RNA, 19 nt, Artificial Sequence
  Description of Artificial Sequence: Synthetic oligonucleotide
uuugagucuuuucucaucc

SEQ ID NO: 979258 - RNA, 19 nt, Artificial Sequence
  Description of Artificial Sequence: Synthetic oligonucleotide
acuacucaaaagaaggucc

SEQ ID NO: 979259 - RNA, 19 nt, Artificial Sequence
  Description of Artificial Sequence: Synthetic oligonucleotide
uuucuugaauccacgaucc

SEQ ID NO: 979260 - RNA, 19 nt, Artificial Sequence
  Description of Artificial Sequence: Synthetic oligonucleotide
uguuucucugacuacaggc

SEQ ID NO: 979261 - RNA, 19 nt, Artificial Sequence
  Description of Artificial Sequence: Synthetic oligonucleotide
aagucaccgaacuucauug

SEQ ID NO: 979262 - RNA, 19 nt, Artificial Sequence
  Description of Artificial Sequence: Synthetic oligonucleotide
agugauauuacagaaguca

SEQ ID NO: 979263 - RNA, 19 nt, Artificial Sequence
  Description of Artificial Sequence: Synthetic oligonucleotide
caaauugucggguuagacg

SEQ ID NO: 979264 - RNA, 19 nt, Artificial Sequence
  Description of Artificial Sequence: Synthetic oligonucleotide
ucggguuagacgaaaaggc

SEQ ID NO: 979265 - RNA, 19 nt, Artificial Sequence
  Description of Artificial Sequence: Synthetic oligonucleotide
uuauauucacgaauuggug

SEQ ID NO: 979266 - RNA, 19 nt, Artificial Sequence
  Description of Artificial Sequence: Synthetic oligonucleotide
aucaaauccagagauccgc

SEQ ID NO: 979267 - RNA, 19 nt, Artificial Sequence
  Description of Artificial Sequence: Synthetic oligonucleotide
uguguaacucccaaaggca

SEQ ID NO: 979268 - RNA, 19 nt, Artificial Sequence
  Description of Artificial Sequence: Synthetic oligonucleotide
uaguguuagcagaaaaugc

SEQ ID NO: 979269 - RNA, 19 nt, Artificial Sequence
  Description of Artificial Sequence: Synthetic oligonucleotide
uauuauaagccucuuucuc

SEQ ID NO: 979270 - RNA, 19 nt, Artificial Sequence
  Description of Artificial Sequence: Synthetic oligonucleotide
uuagcaaauaggcuccagc

SEQ ID NO: 979271 - RNA, 19 nt, Artificial Sequence
  Description of Artificial Sequence: Synthetic oligonucleotide
aauaccgaggagccagugg

SEQ ID NO: 979272 - RNA, 19 nt, Artificial Sequence
  Description of Artificial Sequence: Synthetic oligonucleotide
auagcggauuuucugcugc

SEQ ID NO: 979273 - RNA, 19 nt, Artificial Sequence
  Description of Artificial Sequence: Synthetic oligonucleotide
aguuauaacugcuggguug

SEQ ID NO: 979274 - RNA, 19 nt, Artificial Sequence
  Description of Artificial Sequence: Synthetic oligonucleotide
aaucacgcugccugucucc

SEQ ID NO: 979275 - RNA, 19 nt, Artificial Sequence
  Description of Artificial Sequence: Synthetic oligonucleotide
agcacuaccgaguagauuu

SEQ ID NO: 979276 - RNA, 19 nt, Artificial Sequence
  Description of Artificial Sequence: Synthetic oligonucleotide
acgguaaguccuuaacugc

SEQ ID NO: 979277 - RNA, 19 nt, Artificial Sequence
  Description of Artificial Sequence: Synthetic oligonucleotide
ucuuucgacauacuacuca

SEQ ID NO: 979278 - RNA, 19 nt, Artificial Sequence
  Description of Artificial Sequence: Synthetic oligonucleotide
cuguguaacucccaaaggc

SEQ ID NO: 979279 - RNA, 19 nt, Artificial Sequence
  Description of Artificial Sequence: Synthetic oligonucleotide
uccaauaaaagaagggcuc

SEQ ID NO: 979280 - RNA, 19 nt, Artificial Sequence
  Description of Artificial Sequence: Synthetic oligonucleotide
auggccuagacguaacucg

SEQ ID NO: 979281 - RNA, 19 nt, Artificial Sequence
  Description of Artificial Sequence: Synthetic oligonucleotide
uuaacugcauguuucucug

SEQ ID NO: 979282 - RNA, 19 nt, Artificial Sequence
  Description of Artificial Sequence: Synthetic oligonucleotide
aaugguuugccccugccau

SEQ ID NO: 979283 - RNA, 19 nt, Artificial Sequence
  Description of Artificial Sequence: Synthetic oligonucleotide
agaccuguuucuuucauug

SEQ ID NO: 979284 - RNA, 19 nt, Artificial Sequence
  Description of Artificial Sequence: Synthetic oligonucleotide
agaccauuacuuuuacccg

SEQ ID NO: 979285 - RNA, 19 nt, Artificial Sequence
  Description of Artificial Sequence: Synthetic oligonucleotide
aacgaugcgcuuugguuuc

SEQ ID NO: 979286 - RNA, 19 nt, Artificial Sequence
  Description of Artificial Sequence: Synthetic oligonucleotide
cugacuacaggcagcaucc

SEQ ID NO: 979287 - RNA, 19 nt, Artificial Sequence
  Description of Artificial Sequence: Synthetic oligonucleotide
uuaauccuaaucugcaggu

SEQ ID NO: 979288 - RNA, 19 nt, Artificial Sequence
  Description of Artificial Sequence: Synthetic oligonucleotide
aagagaccauuacuuuuac

SEQ ID NO: 979289 - RNA, 19 nt, Artificial Sequence
  Description of Artificial Sequence: Synthetic oligonucleotide
cuuuaagaggucagcaggc

SEQ ID NO: 979290 - RNA, 19 nt, Artificial Sequence
  Description of Artificial Sequence: Synthetic oligonucleotide
augauauucaggcaauggu

SEQ ID NO: 979291 - RNA, 19 nt, Artificial Sequence
  Description of Artificial Sequence: Synthetic oligonucleotide
uucgacauacuacucaaaa

SEQ ID NO: 979292 - RNA, 19 nt, Artificial Sequence
  Description of Artificial Sequence: Synthetic oligonucleotide
ucaccgaacuucauuguag

SEQ ID NO: 979293 - RNA, 19 nt, Artificial Sequence
  Description of Artificial Sequence: Synthetic oligonucleotide
ucgacauacuacucaaaag

SEQ ID NO: 979294 - RNA, 19 nt, Artificial Sequence
  Description of Artificial Sequence: Synthetic oligonucleotide
aauaacgaugcgcuuuggu

SEQ ID NO: 979295 - RNA, 19 nt, Artificial Sequence
  Description of Artificial Sequence: Synthetic oligonucleotide
ugauauucaggcaaugguu

SEQ ID NO: 979296 - RNA, 19 nt, Artificial Sequence
  Description of Artificial Sequence: Synthetic oligonucleotide
uaggucauuaguguuagca

SEQ ID NO: 979297 - RNA, 19 nt, Artificial Sequence
  Description of Artificial Sequence: Synthetic oligonucleotide
uuucauuggcaacaugaga

SEQ ID NO: 979298 - RNA, 19 nt, Artificial Sequence
  Description of Artificial Sequence: Synthetic oligonucleotide
uagacgaaaaggcaucaac

SEQ ID NO: 979299 - RNA, 19 nt, Artificial Sequence
  Description of Artificial Sequence: Synthetic oligonucleotide
uagcaaauaggcuccagca

SEQ ID NO: 979300 - RNA, 19 nt, Artificial Sequence
  Description of Artificial Sequence: Synthetic oligonucleotide
ucguuauuuguuuuagcca

SEQ ID NO: 979301 - RNA, 19 nt, Artificial Sequence
  Description of Artificial Sequence: Synthetic oligonucleotide
aaagccgugacuguuucug

SEQ ID NO: 979302 - RNA, 19 nt, Artificial Sequence
  Description of Artificial Sequence: Synthetic oligonucleotide
aacagugcaugagagcuag

SEQ ID NO: 979303 - RNA, 19 nt, Artificial Sequence
  Description of Artificial Sequence: Synthetic oligonucleotide
gcagaaaaugccuuuaccc

SEQ ID NO: 979304 - RNA, 19 nt, Artificial Sequence
  Description of Artificial Sequence: Synthetic oligonucleotide
guuauaacugcuggguugg

SEQ ID NO: 979305 - RNA, 19 nt, Artificial Sequence
  Description of Artificial Sequence: Synthetic oligonucleotide
ucuaaauggccccagccau

SEQ ID NO: 979306 - RNA, 19 nt, Artificial Sequence
  Description of Artificial Sequence: Synthetic oligonucleotide
caugugugaaggucaaagg

SEQ ID NO: 979307 - RNA, 19 nt, Artificial Sequence
  Description of Artificial Sequence: Synthetic oligonucleotide
caggugacgauucauggcc

SEQ ID NO: 979308 - RNA, 19 nt, Artificial Sequence
  Description of Artificial Sequence: Synthetic oligonucleotide
uuccucuuagcauagcgga

SEQ ID NO: 979309 - RNA, 19 nt, Artificial Sequence
  Description of Artificial Sequence: Synthetic oligonucleotide
ugaguagcugauccaaaug

SEQ ID NO: 979310 - RNA, 19 nt, Artificial Sequence
  Description of Artificial Sequence: Synthetic oligonucleotide
ucacaaguuauaacugcug

SEQ ID NO: 979311 - RNA, 19 nt, Artificial Sequence
  Description of Artificial Sequence: Synthetic oligonucleotide
aggauauuggggucugugg

SEQ ID NO: 979312 - RNA, 19 nt, Artificial Sequence
  Description of Artificial Sequence: Synthetic oligonucleotide
gaccauuacuuuuacccgc

SEQ ID NO: 979313 - RNA, 19 nt, Artificial Sequence
  Description of Artificial Sequence: Synthetic oligonucleotide
gacgaaaaggcaucaacuc

SEQ ID NO: 979314 - RNA, 19 nt, Artificial Sequence
  Description of Artificial Sequence: Synthetic oligonucleotide
gucguaguauuuucaaucc

SEQ ID NO: 979315 - RNA, 19 nt, Artificial Sequence
  Description of Artificial Sequence: Synthetic oligonucleotide
agcggaaagcucucagugc

SEQ ID NO: 979316 - RNA, 19 nt, Artificial Sequence
  Description of Artificial Sequence: Synthetic oligonucleotide
cacgguaaguccuuaacug

SEQ ID NO: 979317 - RNA, 19 nt, Artificial Sequence
  Description of Artificial Sequence: Synthetic oligonucleotide
ugagcagaucugcacauga

SEQ ID NO: 979318 - RNA, 19 nt, Artificial Sequence
  Description of Artificial Sequence: Synthetic oligonucleotide
cuuccucuuagcauagcgg

SEQ ID NO: 979319 - RNA, 19 nt, Artificial Sequence
  Description of Artificial Sequence: Synthetic oligonucleotide
aauccagagauccgcacau

SEQ ID NO: 979320 - RNA, 19 nt, Artificial Sequence
  Description of Artificial Sequence: Synthetic oligonucleotide
caugauauucaggcaaugg

SEQ ID NO: 979321 - RNA, 19 nt, Artificial Sequence
  Description of Artificial Sequence: Synthetic oligonucleotide
aggucauuaguguuagcag

SEQ ID NO: 979322 - RNA, 19 nt, Artificial Sequence
  Description of Artificial Sequence: Synthetic oligonucleotide
uguacgauuagcuccuuua

SEQ ID NO: 979323 - RNA, 19 nt, Artificial Sequence
  Description of Artificial Sequence: Synthetic oligonucleotide
ucuucguuauuuguuuuag

SEQ ID NO: 979324 - RNA, 19 nt, Artificial Sequence
  Description of Artificial Sequence: Synthetic oligonucleotide
gacuggaagacacugagua

SEQ ID NO: 979325 - RNA, 19 nt, Artificial Sequence
  Description of Artificial Sequence: Synthetic oligonucleotide
auuacuuuuacccgcucau

SEQ ID NO: 979326 - RNA, 19 nt, Artificial Sequence
  Description of Artificial Sequence: Synthetic oligonucleotide
ucgucacaaguuauaacug

SEQ ID NO: 979327 - RNA, 19 nt, Artificial Sequence
  Description of Artificial Sequence: Synthetic oligonucleotide
uagugagucagugauauua

SEQ ID NO: 979328 - RNA, 19 nt, Artificial Sequence
  Description of Artificial Sequence: Synthetic oligonucleotide
cucuuuaagaggucagcag

SEQ ID NO: 979329 - RNA, 19 nt, Artificial Sequence
  Description of Artificial Sequence: Synthetic oligonucleotide
uuugccccugccaucauac

SEQ ID NO: 979330 - RNA, 19 nt, Artificial Sequence
  Description of Artificial Sequence: Synthetic oligonucleotide
caugagagcuagcaaagug

SEQ ID NO: 979331 - RNA, 19 nt, Artificial Sequence
  Description of Artificial Sequence: Synthetic oligonucleotide
agauccgcacaugauauuc

SEQ ID NO: 979332 - RNA, 19 nt, Artificial Sequence
  Description of Artificial Sequence: Synthetic oligonucleotide
acaaauugucggguuagac

SEQ ID NO: 979333 - RNA, 19 nt, Artificial Sequence
  Description of Artificial Sequence: Synthetic oligonucleotide
gucggguuagacgaaaagg

SEQ ID NO: 979334 - RNA, 19 nt, Artificial Sequence
  Description of Artificial Sequence: Synthetic oligonucleotide
uuucccgaaggccuguaug

SEQ ID NO: 979335 - RNA, 19 nt, Artificial Sequence
  Description of Artificial Sequence: Synthetic oligonucleotide
uucaucacucuuccaauaa

SEQ ID NO: 979336 - RNA, 19 nt, Artificial Sequence
  Description of Artificial Sequence: Synthetic oligonucleotide
ucaaauccagagauccgca

SEQ ID NO: 979337 - RNA, 19 nt, Artificial Sequence
  Description of Artificial Sequence: Synthetic oligonucleotide
gagcggaaagcucucagug

SEQ ID NO: 979338 - RNA, 19 nt, Artificial Sequence
  Description of Artificial Sequence: Synthetic oligonucleotide
ugucggguuagacgaaaag

SEQ ID NO: 979339 - RNA, 19 nt, Artificial Sequence
  Description of Artificial Sequence: Synthetic oligonucleotide
acucgucacaaguuauaac

SEQ ID NO: 979340 - RNA, 19 nt, Artificial Sequence
  Description of Artificial Sequence: Synthetic oligonucleotide
uccagagauccgcacauga

SEQ ID NO: 979341 - RNA, 19 nt, Artificial Sequence
  Description of Artificial Sequence: Synthetic oligonucleotide
caaaggcccucuuuaagag

SEQ ID NO: 979342 - RNA, 19 nt, Artificial Sequence
  Description of Artificial Sequence: Synthetic oligonucleotide
agucagugauauuacagaa

SEQ ID NO: 979343 - RNA, 19 nt, Artificial Sequence
  Description of Artificial Sequence: Synthetic oligonucleotide
caauuaauccuaaucugca

SEQ ID NO: 979344 - RNA, 19 nt, Artificial Sequence
  Description of Artificial Sequence: Synthetic oligonucleotide
auaacgaugcgcuuugguu

SEQ ID NO: 979345 - RNA, 19 nt, Artificial Sequence
  Description of Artificial Sequence: Synthetic oligonucleotide
aaggucguaguauuuucaa

SEQ ID NO: 979346 - RNA, 19 nt, Artificial Sequence
  Description of Artificial Sequence: Synthetic oligonucleotide
ugacaaauugucggguuag

SEQ ID NO: 979347 - RNA, 19 nt, Artificial Sequence
  Description of Artificial Sequence: Synthetic oligonucleotide
uugaaguuaguuaggucau

SEQ ID NO: 979348 - RNA, 19 nt, Artificial Sequence
  Description of Artificial Sequence: Synthetic oligonucleotide
accgaacuucauuguaggc

SEQ ID NO: 979349 - RNA, 19 nt, Artificial Sequence
  Description of Artificial Sequence: Synthetic oligonucleotide
uucacuugagucucuucug

SEQ ID NO: 979350 - RNA, 19 nt, Artificial Sequence
  Description of Artificial Sequence: Synthetic oligonucleotide
aguagugagucagugauau

SEQ ID NO: 979351 - RNA, 19 nt, Artificial Sequence
  Description of Artificial Sequence: Synthetic oligonucleotide
uagcauagcggauuuucug

SEQ ID NO: 979352 - RNA, 19 nt, Artificial Sequence
  Description of Artificial Sequence: Synthetic oligonucleotide
caccuuguggguuccaagg

SEQ ID NO: 979353 - RNA, 19 nt, Artificial Sequence
  Description of Artificial Sequence: Synthetic oligonucleotide
augagacugacaaauuguc

SEQ ID NO: 979354 - RNA, 19 nt, Artificial Sequence
  Description of Artificial Sequence: Synthetic oligonucleotide
agggguacuccuuuucauc

SEQ ID NO: 979355 - RNA, 19 nt, Artificial Sequence
  Description of Artificial Sequence: Synthetic oligonucleotide
aaagagaccauuacuuuua

SEQ ID NO: 979356 - RNA, 19 nt, Artificial Sequence
  Description of Artificial Sequence: Synthetic oligonucleotide
auauucaggcaaugguuug

SEQ ID NO: 979357 - RNA, 19 nt, Artificial Sequence
  Description of Artificial Sequence: Synthetic oligonucleotide
agugagucagugauauuac

SEQ ID NO: 979358 - RNA, 19 nt, Artificial Sequence
  Description of Artificial Sequence: Synthetic oligonucleotide
cugauccaaaugcaugucc

SEQ ID NO: 979359 - RNA, 19 nt, Artificial Sequence
  Description of Artificial Sequence: Synthetic oligonucleotide
caagcacuucacuugaguc

SEQ ID NO: 979360 - RNA, 19 nt, Artificial Sequence
  Description of Artificial Sequence: Synthetic oligonucleotide
aggucuaggagauccccuc

SEQ ID NO: 979361 - RNA, 19 nt, Artificial Sequence
  Description of Artificial Sequence: Synthetic oligonucleotide
caaauucuuucccgaaggc

SEQ ID NO: 979362 - RNA, 19 nt, Artificial Sequence
  Description of Artificial Sequence: Synthetic oligonucleotide
caucaaauccagagauccg

SEQ ID NO: 979363 - RNA, 19 nt, Artificial Sequence
  Description of Artificial Sequence: Synthetic oligonucleotide
cucgucacaaguuauaacu

SEQ ID NO: 979364 - RNA, 19 nt, Artificial Sequence
  Description of Artificial Sequence: Synthetic oligonucleotide
caccgaacuucauuguagg

SEQ ID NO: 979365 - RNA, 19 nt, Artificial Sequence
  Description of Artificial Sequence: Synthetic oligonucleotide
uggguuccaaggauugaag

SEQ ID NO: 979366 - RNA, 19 nt, Artificial Sequence
  Description of Artificial Sequence: Synthetic oligonucleotide
uccgcacaugauauucagg

SEQ ID NO: 979367 - RNA, 19 nt, Artificial Sequence
  Description of Artificial Sequence: Synthetic oligonucleotide
cagaucugcacaugagcgg

SEQ ID NO: 979368 - RNA, 19 nt, Artificial Sequence
  Description of Artificial Sequence: Synthetic oligonucleotide
ggucguaguauuuucaauc

SEQ ID NO: 979369 - RNA, 19 nt, Artificial Sequence
  Description of Artificial Sequence: Synthetic oligonucleotide
acacgguaaguccuuaacu

SEQ ID NO: 979370 - RNA, 19 nt, Artificial Sequence
  Description of Artificial Sequence: Synthetic oligonucleotide
acgauucauggccuagacg

SEQ ID NO: 979371 - RNA, 19 nt, Artificial Sequence
  Description of Artificial Sequence: Synthetic oligonucleotide
aauuggugccuugggauca

SEQ ID NO: 979372 - RNA, 19 nt, Artificial Sequence
  Description of Artificial Sequence: Synthetic oligonucleotide
uguuagcagaaaaugccuu

SEQ ID NO: 979373 - RNA, 19 nt, Artificial Sequence
  Description of Artificial Sequence: Synthetic oligonucleotide
aucauacuggccaggaauc

SEQ ID NO: 979374 - RNA, 19 nt, Artificial Sequence
  Description of Artificial Sequence: Synthetic oligonucleotide
uauucaggcaaugguuugc

SEQ ID NO: 979375 - RNA, 19 nt, Artificial Sequence
  Description of Artificial Sequence: Synthetic oligonucleotide
ugugcacgaauguuguggu

SEQ ID NO: 979376 - RNA, 19 nt, Artificial Sequence
  Description of Artificial Sequence: Synthetic oligonucleotide
aucacuauuauaagccucu

SEQ ID NO: 979377 - RNA, 19 nt, Artificial Sequence
  Description of Artificial Sequence: Synthetic oligonucleotide
cguuauuuguuuuagccag

SEQ ID NO: 979378 - RNA, 19 nt, Artificial Sequence
  Description of Artificial Sequence: Synthetic oligonucleotide
ucaaggucguaguauuuuc

SEQ ID NO: 979379 - RNA, 19 nt, Artificial Sequence
  Description of Artificial Sequence: Synthetic oligonucleotide
gacacgguaaguccuuaac

SEQ ID NO: 979380 - RNA, 19 nt, Artificial Sequence
  Description of Artificial Sequence: Synthetic oligonucleotide
agacgaaaaggcaucaacu

SEQ ID NO: 979381 - RNA, 19 nt, Artificial Sequence
  Description of Artificial Sequence: Synthetic oligonucleotide
cacucucuggcucuugugc

SEQ ID NO: 979382 - RNA, 19 nt, Artificial Sequence
  Description of Artificial Sequence: Synthetic oligonucleotide
aauaaaagaagggcuccuu

SEQ ID NO: 979383 - RNA, 19 nt, Artificial Sequence
  Description of Artificial Sequence: Synthetic oligonucleotide
ucacgaauuggugccuugg

SEQ ID NO: 979384 - RNA, 19 nt, Artificial Sequence
  Description of Artificial Sequence: Synthetic oligonucleotide
uuacccagugagccaaucu

SEQ ID NO: 979385 - RNA, 19 nt, Artificial Sequence
  Description of Artificial Sequence: Synthetic oligonucleotide
gugauauuacagaagucac

SEQ ID NO: 979386 - RNA, 19 nt, Artificial Sequence
  Description of Artificial Sequence: Synthetic oligonucleotide
uccuuaacugcauguuucu

SEQ ID NO: 979387 - RNA, 19 nt, Artificial Sequence
  Description of Artificial Sequence: Synthetic oligonucleotide
uuauuuguuuuagccaguc

SEQ ID NO: 979388 - RNA, 19 nt, Artificial Sequence
  Description of Artificial Sequence: Synthetic oligonucleotide
caaggauugaaguuaguua

SEQ ID NO: 979389 - RNA, 19 nt, Artificial Sequence
  Description of Artificial Sequence: Synthetic oligonucleotide
ugcauacaccaugacagca

SEQ ID NO: 979390 - RNA, 19 nt, Artificial Sequence
  Description of Artificial Sequence: Synthetic oligonucleotide
agucaauuccaaucacgcu

SEQ ID NO: 979391 - RNA, 19 nt, Artificial Sequence
  Description of Artificial Sequence: Synthetic oligonucleotide
uccugccaaggauauuggg

SEQ ID NO: 979392 - RNA, 19 nt, Artificial Sequence
  Description of Artificial Sequence: Synthetic oligonucleotide
uacgauuagcuccuuuaua

SEQ ID NO: 979393 - RNA, 19 nt, Artificial Sequence
  Description of Artificial Sequence: Synthetic oligonucleotide
ugccccugccaucauacug

SEQ ID NO: 979394 - RNA, 19 nt, Artificial Sequence
  Description of Artificial Sequence: Synthetic oligonucleotide
uuuaccaggaagggguacu

SEQ ID NO: 979395 - RNA, 19 nt, Artificial Sequence
  Description of Artificial Sequence: Synthetic oligonucleotide
auccgcacaugauauucag

SEQ ID NO: 979396 - RNA, 19 nt, Artificial Sequence
  Description of Artificial Sequence: Synthetic oligonucleotide
gaucacuauuauaagccuc

SEQ ID NO: 979397 - RNA, 19 nt, Artificial Sequence
  Description of Artificial Sequence: Synthetic oligonucleotide
aacucgucacaaguuauaa

SEQ ID NO: 979398 - RNA, 19 nt, Artificial Sequence
  Description of Artificial Sequence: Synthetic oligonucleotide
gaaggucuaggagaucccc

SEQ ID NO: 979399 - RNA, 19 nt, Artificial Sequence
  Description of Artificial Sequence: Synthetic oligonucleotide
augagcggaaagcucucag

SEQ ID NO: 979400 - RNA, 19 nt, Artificial Sequence
  Description of Artificial Sequence: Synthetic oligonucleotide
acccagugagccaaucugc

SEQ ID NO: 979401 - RNA, 19 nt, Artificial Sequence
  Description of Artificial Sequence: Synthetic oligonucleotide
acgaauuggugccuuggga

SEQ ID NO: 979402 - RNA, 19 nt, Artificial Sequence
  Description of Artificial Sequence: Synthetic oligonucleotide
gacgauucauggccuagac

SEQ ID NO: 979403 - RNA, 19 nt, Artificial Sequence
  Description of Artificial Sequence: Synthetic oligonucleotide
agacguaacucgucacaag

SEQ ID NO: 979404 - RNA, 19 nt, Artificial Sequence
  Description of Artificial Sequence: Synthetic oligonucleotide
ucuaggagauccccucagu

SEQ ID NO: 979405 - RNA, 19 nt, Artificial Sequence
  Description of Artificial Sequence: Synthetic oligonucleotide
agcaaauaggcuccagcau

SEQ ID NO: 979406 - RNA, 19 nt, Artificial Sequence
  Description of Artificial Sequence: Synthetic oligonucleotide
ucuuucuaaauggccccag

SEQ ID NO: 979407 - RNA, 19 nt, Artificial Sequence
  Description of Artificial Sequence: Synthetic oligonucleotide
ucgaauaacgaugcgcuuu

SEQ ID NO: 979408 - RNA, 19 nt, Artificial Sequence
  Description of Artificial Sequence: Synthetic oligonucleotide
cuuucgacauacuacucaa

SEQ ID NO: 979409 - RNA, 19 nt, Artificial Sequence
  Description of Artificial Sequence: Synthetic oligonucleotide
gucugucuccaauaccgag

SEQ ID NO: 979410 - RNA, 19 nt, Artificial Sequence
  Description of Artificial Sequence: Synthetic oligonucleotide
uaacucgucacaaguuaua

SEQ ID NO: 979411 - RNA, 19 nt, Artificial Sequence
  Description of Artificial Sequence: Synthetic oligonucleotide
cacgaauuggugccuuggg

SEQ ID NO: 979412 - RNA, 19 nt, Artificial Sequence
  Description of Artificial Sequence: Synthetic oligonucleotide
agaucugcacaugagcgga

SEQ ID NO: 979413 - RNA, 19 nt, Artificial Sequence
  Description of Artificial Sequence: Synthetic oligonucleotide
uuuacccgcucaucaaauc

SEQ ID NO: 979414 - RNA, 19 nt, Artificial Sequence
  Description of Artificial Sequence: Synthetic oligonucleotide
uggccuagacguaacucgu

SEQ ID NO: 979415 - RNA, 19 nt, Artificial Sequence
  Description of Artificial Sequence: Synthetic oligonucleotide
auauuacagaagucaccga

SEQ ID NO: 979416 - RNA, 19 nt, Artificial Sequence
  Description of Artificial Sequence: Synthetic oligonucleotide
ugcacgaauguugugguuu

SEQ ID NO: 979417 - RNA, 19 nt, Artificial Sequence
  Description of Artificial Sequence: Synthetic oligonucleotide
cuaaauggccccagccaug

SEQ ID NO: 979418 - RNA, 19 nt, Artificial Sequence
  Description of Artificial Sequence: Synthetic oligonucleotide
cagcuggugacucccacag

SEQ ID NO: 979419 - RNA, 19 nt, Artificial Sequence
  Description of Artificial Sequence: Synthetic oligonucleotide
gacuguuucuguacgauua

SEQ ID NO: 979420 - RNA, 19 nt, Artificial Sequence
  Description of Artificial Sequence: Synthetic oligonucleotide
uagacguaacucgucacaa

SEQ ID NO: 979421 - RNA, 19 nt, Artificial Sequence
  Description of Artificial Sequence: Synthetic oligonucleotide
agagauccgcacaugauau

SEQ ID NO: 979422 - RNA, 19 nt, Artificial Sequence
  Description of Artificial Sequence: Synthetic oligonucleotide
cauuaguguuagcagaaaa

SEQ ID NO: 979423 - RNA, 19 nt, Artificial Sequence
  Description of Artificial Sequence: Synthetic oligonucleotide
ggaguacucuuucagguuc

SEQ ID NO: 979424 - RNA, 19 nt, Artificial Sequence
  Description of Artificial Sequence: Synthetic oligonucleotide
auacuacucaaaagaaggu

SEQ ID NO: 979425 - RNA, 19 nt, Artificial Sequence
  Description of Artificial Sequence: Synthetic oligonucleotide
gucacccaaggacaguaug

SEQ ID NO: 979426 - RNA, 19 nt, Artificial Sequence
  Description of Artificial Sequence: Synthetic oligonucleotide
uuucgacauacuacucaaa

SEQ ID NO: 979427 - RNA, 19 nt, Artificial Sequence
  Description of Artificial Sequence: Synthetic oligonucleotide
cuagacguaacucgucaca

SEQ ID NO: 979428 - RNA, 19 nt, Artificial Sequence
  Description of Artificial Sequence: Synthetic oligonucleotide
uucauggccuagacguaac

SEQ ID NO: 979429 - RNA, 19 nt, Artificial Sequence
  Description of Artificial Sequence: Synthetic oligonucleotide
uucaaggucguaguauuuu

SEQ ID NO: 979430 - RNA, 19 nt, Artificial Sequence
  Description of Artificial Sequence: Synthetic oligonucleotide
gaauccacgauccuccuuu

SEQ ID NO: 979431 - RNA, 19 nt, Artificial Sequence
  Description of Artificial Sequence: Synthetic oligonucleotide
ggucaugggcaugacacgg

SEQ ID NO: 979432 - RNA, 19 nt, Artificial Sequence
  Description of Artificial Sequence: Synthetic oligonucleotide
cauuacuuuuacccgcuca

SEQ ID NO: 979433 - RNA, 19 nt, Artificial Sequence
  Description of Artificial Sequence: Synthetic oligonucleotide
auacccugcugucagugaa

SEQ ID NO: 979434 - RNA, 19 nt, Artificial Sequence
  Description of Artificial Sequence: Synthetic oligonucleotide
cauagcggauuuucugcug

SEQ ID NO: 979435 - RNA, 19 nt, Artificial Sequence
  Description of Artificial Sequence: Synthetic oligonucleotide
uucacgaauuggugccuug

SEQ ID NO: 979436 - RNA, 19 nt, Artificial Sequence
  Description of Artificial Sequence: Synthetic oligonucleotide
cugcuaacuuccucuuagc

SEQ ID NO: 979437 - RNA, 19 nt, Artificial Sequence
  Description of Artificial Sequence: Synthetic oligonucleotide
cuauuauaagccucuuucu

SEQ ID NO: 979438 - RNA, 19 nt, Artificial Sequence
  Description of Artificial Sequence: Synthetic oligonucleotide
cucaaugcgcugguccugg

SEQ ID NO: 979439 - RNA, 19 nt, Artificial Sequence
  Description of Artificial Sequence: Synthetic oligonucleotide
cauuguaggcagcuuagaa

SEQ ID NO: 979440 - RNA, 19 nt, Artificial Sequence
  Description of Artificial Sequence: Synthetic oligonucleotide
uucuugaauccacgauccu

SEQ ID NO: 979441 - RNA, 19 nt, Artificial Sequence
  Description of Artificial Sequence: Synthetic oligonucleotide
guccuuaacugcauguuuc

SEQ ID NO: 979442 - RNA, 19 nt, Artificial Sequence
  Description of Artificial Sequence: Synthetic oligonucleotide
ugcugcggguaccaauucu

SEQ ID NO: 979443 - RNA, 19 nt, Artificial Sequence
  Description of Artificial Sequence: Synthetic oligonucleotide
aagccgugacuguuucugu

SEQ ID NO: 979444 - RNA, 19 nt, Artificial Sequence
  Description of Artificial Sequence: Synthetic oligonucleotide
caaggucguaguauuuuca

SEQ ID NO: 979445 - RNA, 19 nt, Artificial Sequence
  Description of Artificial Sequence: Synthetic oligonucleotide
gaauaacgaugcgcuuugg

SEQ ID NO: 979446 - RNA, 19 nt, Artificial Sequence
  Description of Artificial Sequence: Synthetic oligonucleotide
aguggcugauacacaacag

SEQ ID NO: 979447 - RNA, 19 nt, Artificial Sequence
  Description of Artificial Sequence: Synthetic oligonucleotide
cagugauauuacagaaguc

SEQ ID NO: 979448 - RNA, 19 nt, Artificial Sequence
  Description of Artificial Sequence: Synthetic oligonucleotide
uugagucuuuucucauccu

SEQ ID NO: 979449 - RNA, 19 nt, Artificial Sequence
  Description of Artificial Sequence: Synthetic oligonucleotide
ugagcgaggauggcauuca

SEQ ID NO: 979450 - RNA, 19 nt, Artificial Sequence
  Description of Artificial Sequence: Synthetic oligonucleotide
ucgggcuacagcuguguaa

SEQ ID NO: 979451 - RNA, 19 nt, Artificial Sequence
  Description of Artificial Sequence: Synthetic oligonucleotide
ggaacgcagugccaggaag

SEQ ID NO: 979452 - RNA, 19 nt, Artificial Sequence
  Description of Artificial Sequence: Synthetic oligonucleotide
cgacauacuacucaaaaga

SEQ ID NO: 979453 - RNA, 19 nt, Artificial Sequence
  Description of Artificial Sequence: Synthetic oligonucleotide
uccucuuagcauagcggau

SEQ ID NO: 979454 - RNA, 19 nt, Artificial Sequence
  Description of Artificial Sequence: Synthetic oligonucleotide
aggucguaguauuuucaau

SEQ ID NO: 979455 - RNA, 19 nt, Artificial Sequence
  Description of Artificial Sequence: Synthetic oligonucleotide
uauucacgaauuggugccu

SEQ ID NO: 979456 - RNA, 19 nt, Artificial Sequence
  Description of Artificial Sequence: Synthetic oligonucleotide
uuacuuuuacccgcucauc

SEQ ID NO: 979457 - RNA, 19 nt, Artificial Sequence
  Description of Artificial Sequence: Synthetic oligonucleotide
ugagccaaucugccagcac

SEQ ID NO: 979458 - RNA, 19 nt, Artificial Sequence
  Description of Artificial Sequence: Synthetic oligonucleotide
acaugauauucaggcaaug

SEQ ID NO: 979459 - RNA, 19 nt, Artificial Sequence
  Description of Artificial Sequence: Synthetic oligonucleotide
ugacgauucauggccuaga

SEQ ID NO: 979460 - RNA, 19 nt, Artificial Sequence
  Description of Artificial Sequence: Synthetic oligonucleotide
guuagacgaaaaggcauca

SEQ ID NO: 979461 - RNA, 19 nt, Artificial Sequence
  Description of Artificial Sequence: Synthetic oligonucleotide
ucauuaguguuagcagaaa

SEQ ID NO: 979462 - RNA, 19 nt, Artificial Sequence
  Description of Artificial Sequence: Synthetic oligonucleotide
agcaaagugggaacgcagu

SEQ ID NO: 979463 - RNA, 19 nt, Artificial Sequence
  Description of Artificial Sequence: Synthetic oligonucleotide
gcggauuuucugcugcggg

SEQ ID NO: 979464 - RNA, 19 nt, Artificial Sequence
  Description of Artificial Sequence: Synthetic oligonucleotide
cucauccuucuaaguagug

SEQ ID NO: 979465 - RNA, 19 nt, Artificial Sequence
  Description of Artificial Sequence: Synthetic oligonucleotide
uuagacgaaaaggcaucaa

SEQ ID NO: 979466 - RNA, 19 nt, Artificial Sequence
  Description of Artificial Sequence: Synthetic oligonucleotide
auucauggccuagacguaa

SEQ ID NO: 979467 - RNA, 19 nt, Artificial Sequence
  Description of Artificial Sequence: Synthetic oligonucleotide
gugagucagugauauuaca

SEQ ID NO: 979468 - RNA, 19 nt, Artificial Sequence
  Description of Artificial Sequence: Synthetic oligonucleotide
cugccaaggauauuggggu

SEQ ID NO: 979469 - RNA, 19 nt, Artificial Sequence
  Description of Artificial Sequence: Synthetic oligonucleotide
uuaggucauuaguguuagc

SEQ ID NO: 979470 - RNA, 19 nt, Artificial Sequence
  Description of Artificial Sequence: Synthetic oligonucleotide
uugucggguuagacgaaaa

SEQ ID NO: 979471 - RNA, 19 nt, Artificial Sequence
  Description of Artificial Sequence: Synthetic oligonucleotide
uuccaaucacgcugccugu

SEQ ID NO: 979472 - RNA, 19 nt, Artificial Sequence
  Description of Artificial Sequence: Synthetic oligonucleotide
gcaaagugggaacgcagug

SEQ ID NO: 979473 - RNA, 19 nt, Artificial Sequence
  Description of Artificial Sequence: Synthetic oligonucleotide
cauggccuagacguaacuc

SEQ ID NO: 979474 - RNA, 19 nt, Artificial Sequence
  Description of Artificial Sequence: Synthetic oligonucleotide
cucuuucgacauacuacuc

SEQ ID NO: 979475 - RNA, 19 nt, Artificial Sequence
  Description of Artificial Sequence: Synthetic oligonucleotide
cuugugcacgaauguugug

SEQ ID NO: 979476 - RNA, 19 nt, Artificial Sequence
  Description of Artificial Sequence: Synthetic oligonucleotide
gguuagacgaaaaggcauc

SEQ ID NO: 979477 - RNA, 19 nt, Artificial Sequence
  Description of Artificial Sequence: Synthetic oligonucleotide
aauccacgauccuccuuuu

SEQ ID NO: 979478 - RNA, 19 nt, Artificial Sequence
  Description of Artificial Sequence: Synthetic oligonucleotide
ugacacgguaaguccuuaa

SEQ ID NO: 979479 - RNA, 19 nt, Artificial Sequence
  Description of Artificial Sequence: Synthetic oligonucleotide
cagagauccgcacaugaua

SEQ ID NO: 979480 - RNA, 19 nt, Artificial Sequence
  Description of Artificial Sequence: Synthetic oligonucleotide
gauccgcacaugauauuca

SEQ ID NO: 979481 - RNA, 19 nt, Artificial Sequence
  Description of Artificial Sequence: Synthetic oligonucleotide
ugccaaggauauugggguc

SEQ ID NO: 979482 - RNA, 19 nt, Artificial Sequence
  Description of Artificial Sequence: Synthetic oligonucleotide
gcggaaagcucucagugca

SEQ ID NO: 979483 - RNA, 19 nt, Artificial Sequence
  Description of Artificial Sequence: Synthetic oligonucleotide
cagugcaugagagcuagca

SEQ ID NO: 979484 - RNA, 19 nt, Artificial Sequence
  Description of Artificial Sequence: Synthetic oligonucleotide
cuacucaaaagaagguccu

SEQ ID NO: 979485 - RNA, 19 nt, Artificial Sequence
  Description of Artificial Sequence: Synthetic oligonucleotide
cacgcugccugucuccaug

SEQ ID NO: 979486 - RNA, 19 nt, Artificial Sequence
  Description of Artificial Sequence: Synthetic oligonucleotide
gugacgauucauggccuag

SEQ ID NO: 979487 - RNA, 19 nt, Artificial Sequence
  Description of Artificial Sequence: Synthetic oligonucleotide
cuggcggagguccucacca

SEQ ID NO: 979488 - RNA, 19 nt, Artificial Sequence
  Description of Artificial Sequence: Synthetic oligonucleotide
uaccgaggagccaguggcu

SEQ ID NO: 979489 - RNA, 19 nt, Artificial Sequence
  Description of Artificial Sequence: Synthetic oligonucleotide
gccucgaauaacgaugcgc

SEQ ID NO: 979490 - RNA, 19 nt, Artificial Sequence
  Description of Artificial Sequence: Synthetic oligonucleotide
cgauucauggccuagacgu

SEQ ID NO: 979491 - RNA, 19 nt, Artificial Sequence
  Description of Artificial Sequence: Synthetic oligonucleotide
gcggguaccaauucucuuc

SEQ ID NO: 979492 - RNA, 19 nt, Artificial Sequence
  Description of Artificial Sequence: Synthetic oligonucleotide
ggcaucaacucagggacug

SEQ ID NO: 979493 - RNA, 19 nt, Artificial Sequence
  Description of Artificial Sequence: Synthetic oligonucleotide
gaugcgcuuugguuuccuc

SEQ ID NO: 979494 - RNA, 19 nt, Artificial Sequence
  Description of Artificial Sequence: Synthetic oligonucleotide
gacaaauugucggguuaga

SEQ ID NO: 979495 - RNA, 19 nt, Artificial Sequence
  Description of Artificial Sequence: Synthetic oligonucleotide
auugucggguuagacgaaa

SEQ ID NO: 979496 - RNA, 19 nt, Artificial Sequence
  Description of Artificial Sequence: Synthetic oligonucleotide
caccaagcacuucacuuga

SEQ ID NO: 979497 - RNA, 19 nt, Artificial Sequence
  Description of Artificial Sequence: Synthetic oligonucleotide
gcauguuucucugacuaca

SEQ ID NO: 979498 - RNA, 19 nt, Artificial Sequence
  Description of Artificial Sequence: Synthetic oligonucleotide
gucaccgaacuucauugua

SEQ ID NO: 979499 - RNA, 19 nt, Artificial Sequence
  Description of Artificial Sequence: Synthetic oligonucleotide
aauugucggguuagacgaa

SEQ ID NO: 979500 - RNA, 19 nt, Artificial Sequence
  Description of Artificial Sequence: Synthetic oligonucleotide
ugcggguaccaauucucuu

SEQ ID NO: 979501 - RNA, 19 nt, Artificial Sequence
  Description of Artificial Sequence: Synthetic oligonucleotide
cugagcgaggauggcauuc

SEQ ID NO: 979502 - RNA, 19 nt, Artificial Sequence
  Description of Artificial Sequence: Synthetic oligonucleotide
acccaaggacaguaugcau

SEQ ID NO: 979503 - RNA, 19 nt, Artificial Sequence
  Description of Artificial Sequence: Synthetic oligonucleotide
guguuagcagaaaaugccu

SEQ ID NO: 979504 - RNA, 19 nt, Artificial Sequence
  Description of Artificial Sequence: Synthetic oligonucleotide
aaguagugagucagugaua

SEQ ID NO: 979505 - RNA, 19 nt, Artificial Sequence
  Description of Artificial Sequence: Synthetic oligonucleotide
ccaaucugccagcacuacc

SEQ ID NO: 979506 - RNA, 19 nt, Artificial Sequence
  Description of Artificial Sequence: Synthetic oligonucleotide
ggaucacuauuauaagccu

SEQ ID NO: 979507 - RNA, 19 nt, Artificial Sequence
  Description of Artificial Sequence: Synthetic oligonucleotide
guacgauuagcuccuuuau

SEQ ID NO: 979508 - RNA, 19 nt, Artificial Sequence
  Description of Artificial Sequence: Synthetic oligonucleotide
cgaauaacgaugcgcuuug

SEQ ID NO: 979509 - RNA, 19 nt, Artificial Sequence
  Description of Artificial Sequence: Synthetic oligonucleotide
caucaacucagggacugga

SEQ ID NO: 979510 - RNA, 19 nt, Artificial Sequence
  Description of Artificial Sequence: Synthetic oligonucleotide
gccuagacguaacucguca

SEQ ID NO: 979511 - RNA, 19 nt, Artificial Sequence
  Description of Artificial Sequence: Synthetic oligonucleotide
acgaugcgcuuugguuucc

SEQ ID NO: 979512 - RNA, 19 nt, Artificial Sequence
  Description of Artificial Sequence: Synthetic oligonucleotide
uccaccuuguggguuccaa

SEQ ID NO: 979513 - RNA, 19 nt, Artificial Sequence
  Description of Artificial Sequence: Synthetic oligonucleotide
gacugacaaauugucgggu

SEQ ID NO: 979514 - RNA, 19 nt, Artificial Sequence
  Description of Artificial Sequence: Synthetic oligonucleotide
ccucuuucgacauacuacu

SEQ ID NO: 979515 - RNA, 19 nt, Artificial Sequence
  Description of Artificial Sequence: Synthetic oligonucleotide
ggauugaaguuaguuaggu

SEQ ID NO: 979516 - RNA, 19 nt, Artificial Sequence
  Description of Artificial Sequence: Synthetic oligonucleotide
caauaccgaggagccagug

SEQ ID NO: 979517 - RNA, 19 nt, Artificial Sequence
  Description of Artificial Sequence: Synthetic oligonucleotide
ccgaacuucauuguaggca

SEQ ID NO: 979518 - RNA, 19 nt, Artificial Sequence
  Description of Artificial Sequence: Synthetic oligonucleotide
ccucgaauaacgaugcgcu

SEQ ID NO: 979519 - RNA, 19 nt, Artificial Sequence
  Description of Artificial Sequence: Synthetic oligonucleotide
cuaaaagccgugacuguuu

SEQ ID NO: 979520 - RNA, 19 nt, Artificial Sequence
  Description of Artificial Sequence: Synthetic oligonucleotide
cacaugauauucaggcaau

SEQ ID NO: 979521 - RNA, 19 nt, Artificial Sequence
  Description of Artificial Sequence: Synthetic oligonucleotide
gauucauggccuagacgua

SEQ ID NO: 979522 - RNA, 19 nt, Artificial Sequence
  Description of Artificial Sequence: Synthetic oligonucleotide
aucaacucagggacuggaa

SEQ ID NO: 979523 - RNA, 19 nt, Artificial Sequence
  Description of Artificial Sequence: Synthetic oligonucleotide
acguaacucgucacaaguu

SEQ ID NO: 979524 - RNA, 19 nt, Artificial Sequence
  Description of Artificial Sequence: Synthetic oligonucleotide
guaacucgucacaaguuau

SEQ ID NO: 979525 - RNA, 19 nt, Artificial Sequence
  Description of Artificial Sequence: Synthetic oligonucleotide
caugggcaugacacgguaa

SEQ ID NO: 979526 - RNA, 19 nt, Artificial Sequence
  Description of Artificial Sequence: Synthetic oligonucleotide
ugacuacaggcagcauccu

SEQ ID NO: 979527 - RNA, 19 nt, Artificial Sequence
  Description of Artificial Sequence: Synthetic oligonucleotide
auucacgaauuggugccuu

SEQ ID NO: 979528 - RNA, 19 nt, Artificial Sequence
  Description of Artificial Sequence: Synthetic oligonucleotide
ggcggagguccucaccacc

SEQ ID NO: 979529 - RNA, 19 nt, Artificial Sequence
  Description of Artificial Sequence: Synthetic oligonucleotide
ucuuagcauagcggauuuu

SEQ ID NO: 979530 - RNA, 19 nt, Artificial Sequence
  Description of Artificial Sequence: Synthetic oligonucleotide
gguccuucaaggucguagu

SEQ ID NO: 979531 - RNA, 19 nt, Artificial Sequence
  Description of Artificial Sequence: Synthetic oligonucleotide
ccaccuuguggguuccaag

SEQ ID NO: 979532 - RNA, 19 nt, Artificial Sequence
  Description of Artificial Sequence: Synthetic oligonucleotide
ggauuuucugcugcgggua

SEQ ID NO: 979533 - RNA, 19 nt, Artificial Sequence
  Description of Artificial Sequence: Synthetic oligonucleotide
gcaucaacucagggacugg

SEQ ID NO: 979534 - RNA, 19 nt, Artificial Sequence
  Description of Artificial Sequence: Synthetic oligonucleotide
aggucagcaggcacuuuau

SEQ ID NO: 979535 - RNA, 19 nt, Artificial Sequence
  Description of Artificial Sequence: Synthetic oligonucleotide
ggguuagacgaaaaggcau

SEQ ID NO: 979536 - RNA, 19 nt, Artificial Sequence
  Description of Artificial Sequence: Synthetic oligonucleotide
gaucugcacaugagcggaa

SEQ ID NO: 979537 - RNA, 19 nt, Artificial Sequence
  Description of Artificial Sequence: Synthetic oligonucleotide
gugagccaaucugccagca

SEQ ID NO: 979538 - RNA, 19 nt, Artificial Sequence
  Description of Artificial Sequence: Synthetic oligonucleotide
cguaacucgucacaaguua

SEQ ID NO: 979539 - RNA, 19 nt, Artificial Sequence
  Description of Artificial Sequence: Synthetic oligonucleotide
ccaaaugcauguccaaagu

SEQ ID NO: 979540 - RNA, 19 nt, Artificial Sequence
  Description of Artificial Sequence: Synthetic oligonucleotide
aggcaucaacucagggacu

SEQ ID NO: 979541 - RNA, 19 nt, Artificial Sequence
  Description of Artificial Sequence: Synthetic oligonucleotide
ggcuaccaugaaauuguuc

SEQ ID NO: 979542 - RNA, 19 nt, Artificial Sequence
  Description of Artificial Sequence: Synthetic oligonucleotide
ggguaccaauucucuucug

SEQ ID NO: 979543 - RNA, 19 nt, Artificial Sequence
  Description of Artificial Sequence: Synthetic oligonucleotide
cggguuagacgaaaaggca

SEQ ID NO: 979544 - RNA, 19 nt, Artificial Sequence
  Description of Artificial Sequence: Synthetic oligonucleotide
cuucaaggucguaguauuu

SEQ ID NO: 979545 - RNA, 19 nt, Artificial Sequence
  Description of Artificial Sequence: Synthetic oligonucleotide
uuggugccuugggaucacu

SEQ ID NO: 979546 - RNA, 19 nt, Artificial Sequence
  Description of Artificial Sequence: Synthetic oligonucleotide
ccuuaacugcauguuucuc

SEQ ID NO: 979547 - RNA, 19 nt, Artificial Sequence
  Description of Artificial Sequence: Synthetic oligonucleotide
ccaaggauauuggggucug

SEQ ID NO: 979548 - RNA, 19 nt, Artificial Sequence
  Description of Artificial Sequence: Synthetic oligonucleotide
gagauccgcacaugauauu

SEQ ID NO: 979549 - RNA, 19 nt, Artificial Sequence
  Description of Artificial Sequence: Synthetic oligonucleotide
ggugacgauucauggccua

SEQ ID NO: 979550 - RNA, 19 nt, Artificial Sequence
  Description of Artificial Sequence: Synthetic oligonucleotide
ccuuuucaucauggccucg

SEQ ID NO: 979551 - RNA, 19 nt, Artificial Sequence
  Description of Artificial Sequence: Synthetic oligonucleotide
ggcagcuuagaaccauuau

SEQ ID NO: 979552 - RNA, 19 nt, Artificial Sequence
  Description of Artificial Sequence: Synthetic oligonucleotide
cgaauuggugccuugggau

SEQ ID NO: 979553 - RNA, 19 nt, Artificial Sequence
  Description of Artificial Sequence: Synthetic oligonucleotide
cucgaauaacgaugcgcuu

SEQ ID NO: 979554 - RNA, 19 nt, Artificial Sequence
  Description of Artificial Sequence: Synthetic oligonucleotide
ccauuacuuuuacccgcuc

SEQ ID NO: 979555 - RNA, 19 nt, Artificial Sequence
  Description of Artificial Sequence: Synthetic oligonucleotide
gccaaggauauuggggucu

SEQ ID NO: 979556 - RNA, 19 nt, Artificial Sequence
  Description of Artificial Sequence: Synthetic oligonucleotide
ccaagcacuucacuugagu

SEQ ID NO: 979557 - RNA, 19 nt, Artificial Sequence
  Description of Artificial Sequence: Synthetic oligonucleotide
gccaaucugccagcacuac

SEQ ID NO: 979558 - RNA, 19 nt, Artificial Sequence
  Description of Artificial Sequence: Synthetic oligonucleotide
gcacuaccgaguagauuuc

SEQ ID NO: 979559 - RNA, 19 nt, Artificial Sequence
  Description of Artificial Sequence: Synthetic oligonucleotide
cucgggcuacagcugugua

SEQ ID NO: 979560 - RNA, 19 nt, Artificial Sequence
  Description of Artificial Sequence: Synthetic oligonucleotide
ggccuagacguaacucguc

SEQ ID NO: 979561 - RNA, 19 nt, Artificial Sequence
  Description of Artificial Sequence: Synthetic oligonucleotide
cuuucccgaaggccuguau

SEQ ID NO: 979562 - RNA, 19 nt, Artificial Sequence
  Description of Artificial Sequence: Synthetic oligonucleotide
gcaugagagcuagcaaagu

SEQ ID NO: 979563 - RNA, 19 nt, Artificial Sequence
  Description of Artificial Sequence: Synthetic oligonucleotide
cuguacgauuagcuccuuu

SEQ ID NO: 979564 - RNA, 19 nt, Artificial Sequence
  Description of Artificial Sequence: Synthetic oligonucleotide
gugcacgaauguugugguu

SEQ ID NO: 979565 - RNA, 19 nt, Artificial Sequence
  Description of Artificial Sequence: Synthetic oligonucleotide
ccaaucacgcugccugucu

SEQ ID NO: 979566 - RNA, 19 nt, Artificial Sequence
  Description of Artificial Sequence: Synthetic oligonucleotide
ccagagauccgcacaugau

SEQ ID NO: 979567 - RNA, 19 nt, Artificial Sequence
  Description of Artificial Sequence: Synthetic oligonucleotide
gccuugggaucacuauuau

SEQ ID NO: 979568 - RNA, 19 nt, Artificial Sequence
  Description of Artificial Sequence: Synthetic oligonucleotide
caaggauauuggggucugu

SEQ ID NO: 979569 - RNA, 19 nt, Artificial Sequence
  Description of Artificial Sequence: Synthetic oligonucleotide
caggguuggugcucaucuu

SEQ ID NO: 979570 - RNA, 19 nt, Artificial Sequence
  Description of Artificial Sequence: Synthetic oligonucleotide
gcggagguccucaccaccu

SEQ ID NO: 979571 - RNA, 19 nt, Artificial Sequence
  Description of Artificial Sequence: Synthetic oligonucleotide
cagcacuaccgaguagauu

SEQ ID NO: 979572 - RNA, 19 nt, Artificial Sequence
  Description of Artificial Sequence: Synthetic oligonucleotide
ccagcacuaccgaguagau

SEQ ID NO: 979573 - RNA, 19 nt, Artificial Sequence
  Description of Artificial Sequence: Synthetic oligonucleotide
cagcauccugagcgaggau

SEQ ID NO: 979574 - RNA, 19 nt, Artificial Sequence
  Description of Artificial Sequence: Synthetic oligonucleotide
cucugacuacaggcagcau

SEQ ID NO: 979575 - RNA, 19 nt, Artificial Sequence
  Description of Artificial Sequence: Synthetic oligonucleotide
cggaaagcucucagugcau

SEQ ID NO: 979576 - RNA, 19 nt, Artificial Sequence
  Description of Artificial Sequence: Synthetic oligonucleotide
cgaugcgcuuugguuuccu

SEQ ID NO: 979577 - RNA, 19 nt, Artificial Sequence
  Description of Artificial Sequence: Synthetic oligonucleotide
ucugcuacaacgcugaggg

SEQ ID NO: 979578 - RNA, 19 nt, Artificial Sequence
  Description of Artificial Sequence: Synthetic oligonucleotide
aauuuaugagcuuaaacug

SEQ ID NO: 979579 - RNA, 19 nt, Artificial Sequence
  Description of Artificial Sequence: Synthetic oligonucleotide
uaaucauggguacaaaucg

SEQ ID NO: 979580 - RNA, 19 nt, Artificial Sequence
  Description of Artificial Sequence: Synthetic oligonucleotide
aauacuauugcaugaucac

SEQ ID NO: 979581 - RNA, 19 nt, Artificial Sequence
  Description of Artificial Sequence: Synthetic oligonucleotide
  modified_base (4)..(4): a, c, u, g, unknown or other
aacnguuccauguguaagc

SEQ ID NO: 979582 - RNA, 19 nt, Artificial Sequence
  Description of Artificial Sequence: Synthetic oligonucleotide
aguuuaugacccuuaaugc

SEQ ID NO: 979583 - RNA, 19 nt, Artificial Sequence
  Description of Artificial Sequence: Synthetic oligonucleotide
auagaguuauauucaaugc

SEQ ID NO: 979584 - RNA, 19 nt, Artificial Sequence
  Description of Artificial Sequence: Synthetic oligonucleotide
uguuaaaugugucaagucc

SEQ ID NO: 979585 - RNA, 19 nt, Artificial Sequence
  Description of Artificial Sequence: Synthetic oligonucleotide
cauaauauaucacagauga

SEQ ID NO: 979586 - RNA, 19 nt, Artificial Sequence
  Description of Artificial Sequence: Synthetic oligonucleotide
agugguuucugcuacaacg

SEQ ID NO: 979587 - RNA, 19 nt, Artificial Sequence
  Description of Artificial Sequence: Synthetic oligonucleotide
uuacauacgaacuaaagau

SEQ ID NO: 979588 - RNA, 19 nt, Artificial Sequence
  Description of Artificial Sequence: Synthetic oligonucleotide
gauaauuacagagauacac

SEQ ID NO: 979589 - RNA, 19 nt, Artificial Sequence
  Description of Artificial Sequence: Synthetic oligonucleotide
ugguaaaugaacauaauau

SEQ ID NO: 979590 - RNA, 19 nt, Artificial Sequence
  Description of Artificial Sequence: Synthetic oligonucleotide
aaugugucaaguccccagc

SEQ ID NO: 979591 - RNA, 19 nt, Artificial Sequence
  Description of Artificial Sequence: Synthetic oligonucleotide
uuagcagaaugccauaucc

SEQ ID NO: 979592 - RNA, 19 nt, Artificial Sequence
  Description of Artificial Sequence: Synthetic oligonucleotide
ucaucauuaacccagggau

SEQ ID NO: 979593 - RNA, 19 nt, Artificial Sequence
  Description of Artificial Sequence: Synthetic oligonucleotide
cuuacugccauccuggugc

SEQ ID NO: 979594 - RNA, 19 nt, Artificial Sequence
  Description of Artificial Sequence: Synthetic oligonucleotide
cauagaguuauauucaaug

SEQ ID NO: 979595 - RNA, 19 nt, Artificial Sequence
  Description of Artificial Sequence: Synthetic oligonucleotide
augaacauaauauaucaca

SEQ ID NO: 979596 - RNA, 19 nt, Artificial Sequence
  Description of Artificial Sequence: Synthetic oligonucleotide
aaaauauggaaacacucau

SEQ ID NO: 979597 - RNA, 19 nt, Artificial Sequence
  Description of Artificial Sequence: Synthetic oligonucleotide
aaaccagacacuaaccuac

SEQ ID NO: 979598 - RNA, 19 nt, Artificial Sequence
  Description of Artificial Sequence: Synthetic oligonucleotide
aaacaggcaacaucaaaag

SEQ ID NO: 979599 - RNA, 19 nt, Artificial Sequence
  Description of Artificial Sequence: Synthetic oligonucleotide
auuacauacgaacuaaaga

SEQ ID NO: 979600 - RNA, 19 nt, Artificial Sequence
  Description of Artificial Sequence: Synthetic oligonucleotide
uucauuaauaugaacgggu

SEQ ID NO: 979601 - RNA, 19 nt, Artificial Sequence
  Description of Artificial Sequence: Synthetic oligonucleotide
uguauguaauuacauacga

SEQ ID NO: 979602 - RNA, 19 nt, Artificial Sequence
  Description of Artificial Sequence: Synthetic oligonucleotide
aaucuaaaaccuuuuggga

SEQ ID NO: 979603 - RNA, 19 nt, Artificial Sequence
  Description of Artificial Sequence: Synthetic oligonucleotide
aaauacgacagggcuaucc

SEQ ID NO: 979604 - RNA, 19 nt, Artificial Sequence
  Description of Artificial Sequence: Synthetic oligonucleotide
auuaauaugaacgggucuc

SEQ ID NO: 979605 - RNA, 19 nt, Artificial Sequence
  Description of Artificial Sequence: Synthetic oligonucleotide
uaucguucuguuauugugg

SEQ ID NO: 979606 - RNA, 19 nt, Artificial Sequence
  Description of Artificial Sequence: Synthetic oligonucleotide
ucuuaguaaaggaaagggc

SEQ ID NO: 979607 - RNA, 19 nt, Artificial Sequence
  Description of Artificial Sequence: Synthetic oligonucleotide
caguuuaugacccuuaaug

SEQ ID NO: 979608 - RNA, 19 nt, Artificial Sequence
  Description of Artificial Sequence: Synthetic oligonucleotide
ucgacauuuacuuuucuug

SEQ ID NO: 979609 - RNA, 19 nt, Artificial Sequence
  Description of Artificial Sequence: Synthetic oligonucleotide
aauaugaacgggucucauc

SEQ ID NO: 979610 - RNA, 19 nt, Artificial Sequence
  Description of Artificial Sequence: Synthetic oligonucleotide
gauuccaucugacaucccg

SEQ ID NO: 979611 - RNA, 19 nt, Artificial Sequence
  Description of Artificial Sequence: Synthetic oligonucleotide
uaagauagacaccucauuc

SEQ ID NO: 979612 - RNA, 19 nt, Artificial Sequence
  Description of Artificial Sequence: Synthetic oligonucleotide
aauggaaaggaaacguugg

SEQ ID NO: 979613 - RNA, 19 nt, Artificial Sequence
  Description of Artificial Sequence: Synthetic oligonucleotide
agcagaggcauucuaaccg

SEQ ID NO: 979614 - RNA, 19 nt, Artificial Sequence
  Description of Artificial Sequence: Synthetic oligonucleotide
auaugaacgggucucaucu

SEQ ID NO: 979615 - RNA, 19 nt, Artificial Sequence
  Description of Artificial Sequence: Synthetic oligonucleotide
aaaugugucaaguccccag

SEQ ID NO: 979616 - RNA, 19 nt, Artificial Sequence
  Description of Artificial Sequence: Synthetic oligonucleotide
caggaagcaaguaauaaag

SEQ ID NO: 979617 - RNA, 19 nt, Artificial Sequence
  Description of Artificial Sequence: Synthetic oligonucleotide
aauuacagagauacacagc

SEQ ID NO: 979618 - RNA, 19 nt, Artificial Sequence
  Description of Artificial Sequence: Synthetic oligonucleotide
uguaauuacauacgaacua

SEQ ID NO: 979619 - RNA, 19 nt, Artificial Sequence
  Description of Artificial Sequence: Synthetic oligonucleotide
aucauuaacccagggaugc

SEQ ID NO: 979620 - RNA, 19 nt, Artificial Sequence
  Description of Artificial Sequence: Synthetic oligonucleotide
auagaauugacugucagga

SEQ ID NO: 979621 - RNA, 19 nt, Artificial Sequence
  Description of Artificial Sequence: Synthetic oligonucleotide
aagauagacaccucauucu

SEQ ID NO: 979622 - RNA, 19 nt, Artificial Sequence
  Description of Artificial Sequence: Synthetic oligonucleotide
agaccgucaucauuaaccc

SEQ ID NO: 979623 - RNA, 19 nt, Artificial Sequence
  Description of Artificial Sequence: Synthetic oligonucleotide
aauuacauacgaacuaaag

SEQ ID NO: 979624 - RNA, 19 nt, Artificial Sequence
  Description of Artificial Sequence: Synthetic oligonucleotide
gguacaaaucguuugaaag

SEQ ID NO: 979625 - RNA, 19 nt, Artificial Sequence
  Description of Artificial Sequence: Synthetic oligonucleotide
ucguuugaaaguuauuuca

SEQ ID NO: 979626 - RNA, 19 nt, Artificial Sequence
  Description of Artificial Sequence: Synthetic oligonucleotide
aucguuugaaaguuauuuc

SEQ ID NO: 979627 - RNA, 19 nt, Artificial Sequence
  Description of Artificial Sequence: Synthetic oligonucleotide
uuaaaugugucaagucccc

SEQ ID NO: 979628 - RNA, 19 nt, Artificial Sequence
  Description of Artificial Sequence: Synthetic oligonucleotide
aaucguuugaaaguuauuu

SEQ ID NO: 979629 - RNA, 19 nt, Artificial Sequence
  Description of Artificial Sequence: Synthetic oligonucleotide
aucuauagaauugacuguc

SEQ ID NO: 979630 - RNA, 19 nt, Artificial Sequence
  Description of Artificial Sequence: Synthetic oligonucleotide
ugcuaugacagaaacucca

SEQ ID NO: 979631 - RNA, 19 nt, Artificial Sequence
  Description of Artificial Sequence: Synthetic oligonucleotide
ugagcuuaaacugaaggac

SEQ ID NO: 979632 - RNA, 19 nt, Artificial Sequence
  Description of Artificial Sequence: Synthetic oligonucleotide
aaauuuccgucuccuauug

SEQ ID NO: 979633 - RNA, 19 nt, Artificial Sequence
  Description of Artificial Sequence: Synthetic oligonucleotide
aauacgacagggcuauccu

SEQ ID NO: 979634 - RNA, 19 nt, Artificial Sequence
  Description of Artificial Sequence: Synthetic oligonucleotide
uugguaaaugaacauaaua

SEQ ID NO: 979635 - RNA, 19 nt, Artificial Sequence
  Description of Artificial Sequence: Synthetic oligonucleotide
uuuaaauacgacagggcua

SEQ ID NO: 979636 - RNA, 19 nt, Artificial Sequence
  Description of Artificial Sequence: Synthetic oligonucleotide
aacagcgaaauuuccgucu

SEQ ID NO: 979637 - RNA, 19 nt, Artificial Sequence
  Description of Artificial Sequence: Synthetic oligonucleotide
acauacgaacuaaagauuc

SEQ ID NO: 979638 - RNA, 19 nt, Artificial Sequence
  Description of Artificial Sequence: Synthetic oligonucleotide
uuaguaaaggaaagggcaa

SEQ ID NO: 979639 - RNA, 19 nt, Artificial Sequence
  Description of Artificial Sequence: Synthetic oligonucleotide
aaugugugugugugugugg

SEQ ID NO: 979640 - RNA, 19 nt, Artificial Sequence
  Description of Artificial Sequence: Synthetic oligonucleotide
ucauuaauaugaacggguc

SEQ ID NO: 979641 - RNA, 19 nt, Artificial Sequence
  Description of Artificial Sequence: Synthetic oligonucleotide
uuccuuuaaauacgacagg

SEQ ID NO: 979642 - RNA, 19 nt, Artificial Sequence
  Description of Artificial Sequence: Synthetic oligonucleotide
uuaaauacgacagggcuau

SEQ ID NO: 979643 - RNA, 19 nt, Artificial Sequence
  Description of Artificial Sequence: Synthetic oligonucleotide
acauuuacuuuucuugaug

SEQ ID NO: 979644 - RNA, 19 nt, Artificial Sequence
  Description of Artificial Sequence: Synthetic oligonucleotide
auucauuaauaugaacggg

SEQ ID NO: 979645 - RNA, 19 nt, Artificial Sequence
  Description of Artificial Sequence: Synthetic oligonucleotide
ugauccaugcagcaaguga

SEQ ID NO: 979646 - RNA, 19 nt, Artificial Sequence
  Description of Artificial Sequence: Synthetic oligonucleotide
cuuaaacugaaggacgggg

SEQ ID NO: 979647 - RNA, 19 nt, Artificial Sequence
  Description of Artificial Sequence: Synthetic oligonucleotide
ucaaaugugugugugugug

SEQ ID NO: 979648 - RNA, 19 nt, Artificial Sequence
  Description of Artificial Sequence: Synthetic oligonucleotide
gacaacagcgaaauuuccg

SEQ ID NO: 979649 - RNA, 19 nt, Artificial Sequence
  Description of Artificial Sequence: Synthetic oligonucleotide
uacucuacucucaaacuga

SEQ ID NO: 979650 - RNA, 19 nt, Artificial Sequence
  Description of Artificial Sequence: Synthetic oligonucleotide
aaaucucugguccacguua

SEQ ID NO: 979651 - RNA, 19 nt, Artificial Sequence
  Description of Artificial Sequence: Synthetic oligonucleotide
aaaugugugugugugugug

SEQ ID NO: 979652 - RNA, 19 nt, Artificial Sequence
  Description of Artificial Sequence: Synthetic oligonucleotide
guauauuugcuaguggaag

SEQ ID NO: 979653 - RNA, 19 nt, Artificial Sequence
  Description of Artificial Sequence: Synthetic oligonucleotide
caccaaacuaccaccauag

SEQ ID NO: 979654 - RNA, 19 nt, Artificial Sequence
  Description of Artificial Sequence: Synthetic oligonucleotide
guguaagcaccguagagcc

SEQ ID NO: 979655 - RNA, 19 nt, Artificial Sequence
  Description of Artificial Sequence: Synthetic oligonucleotide
  modified_base (9)..(9): a, c, u, g, unknown or other
uucuuaacnguuccaugug

SEQ ID NO: 979656 - RNA, 19 nt, Artificial Sequence
  Description of Artificial Sequence: Synthetic oligonucleotide
acuaauuccaugacgaggu

SEQ ID NO: 979657 - RNA, 19 nt, Artificial Sequence
  Description of Artificial Sequence: Synthetic oligonucleotide
uguauucauuaauaugaac

SEQ ID NO: 979658 - RNA, 19 nt, Artificial Sequence
  Description of Artificial Sequence: Synthetic oligonucleotide
aucucuucgaucaagagaa

SEQ ID NO: 979659 - RNA, 19 nt, Artificial Sequence
  Description of Artificial Sequence: Synthetic oligonucleotide
cuacucucaaacugaaaag

SEQ ID NO: 979660 - RNA, 19 nt, Artificial Sequence
  Description of Artificial Sequence: Synthetic oligonucleotide
gaauugacugucaggaagc

SEQ ID NO: 979661 - RNA, 19 nt, Artificial Sequence
  Description of Artificial Sequence: Synthetic oligonucleotide
  modified_base (8)..(8): a, c, u, g, unknown or other
ucuuaacnguuccaugugu

SEQ ID NO: 979662 - RNA, 19 nt, Artificial Sequence
  Description of Artificial Sequence: Synthetic oligonucleotide
guaucguucuguuauugug

SEQ ID NO: 979663 - RNA, 19 nt, Artificial Sequence
  Description of Artificial Sequence: Synthetic oligonucleotide
ucuauagaauugacuguca

SEQ ID NO: 979664 - RNA, 19 nt, Artificial Sequence
  Description of Artificial Sequence: Synthetic oligonucleotide
uuugcuaguggaagugaug

SEQ ID NO: 979665 - RNA, 19 nt, Artificial Sequence
  Description of Artificial Sequence: Synthetic oligonucleotide
acuaccaccauagaguuau

SEQ ID NO: 979666 - RNA, 19 nt, Artificial Sequence
  Description of Artificial Sequence: Synthetic oligonucleotide
cauggguacaaaucguuug

SEQ ID NO: 979667 - RNA, 19 nt, Artificial Sequence
  Description of Artificial Sequence: Synthetic oligonucleotide
agcuccuuagcagaaugcc

SEQ ID NO: 979668 - RNA, 19 nt, Artificial Sequence
  Description of Artificial Sequence: Synthetic oligonucleotide
gaacgggucucaucuauag

SEQ ID NO: 979669 - RNA, 19 nt, Artificial Sequence
  Description of Artificial Sequence: Synthetic oligonucleotide
aaacacucaugauggagaa

SEQ ID NO: 979670 - RNA, 19 nt, Artificial Sequence
  Description of Artificial Sequence: Synthetic oligonucleotide
ugggagaccgucaucauua

SEQ ID NO: 979671 - RNA, 19 nt, Artificial Sequence
  Description of Artificial Sequence: Synthetic oligonucleotide
  modified_base (11)..(11): a, c, u, g, unknown or other
aguucuuaacnguuccaug

SEQ ID NO: 979672 - RNA, 19 nt, Artificial Sequence
  Description of Artificial Sequence: Synthetic oligonucleotide
guccacguuaacuagcagc

SEQ ID NO: 979673 - RNA, 19 nt, Artificial Sequence
  Description of Artificial Sequence: Synthetic oligonucleotide
aagugguuucugcuacaac

SEQ ID NO: 979674 - RNA, 19 nt, Artificial Sequence
  Description of Artificial Sequence: Synthetic oligonucleotide
uacgacagggcuauccucu

SEQ ID NO: 979675 - RNA, 19 nt, Artificial Sequence
  Description of Artificial Sequence: Synthetic oligonucleotide
uuaagauagacaccucauu

SEQ ID NO: 979676 - RNA, 19 nt, Artificial Sequence
  Description of Artificial Sequence: Synthetic oligonucleotide
uccaacuuuguaucguucu

SEQ ID NO: 979677 - RNA, 19 nt, Artificial Sequence
  Description of Artificial Sequence: Synthetic oligonucleotide
  modified_base (10)..(10): a, c, u, g, unknown or other
guucuuaacnguuccaugu

SEQ ID NO: 979678 - RNA, 19 nt, Artificial Sequence
  Description of Artificial Sequence: Synthetic oligonucleotide
caaacuaccaccauagagu

SEQ ID NO: 979679 - RNA, 19 nt, Artificial Sequence
  Description of Artificial Sequence: Synthetic oligonucleotide
gauagacaccucauucugg

SEQ ID NO: 979680 - RNA, 19 nt, Artificial Sequence
  Description of Artificial Sequence: Synthetic oligonucleotide
uaauuacauacgaacuaaa

SEQ ID NO: 979681 - RNA, 19 nt, Artificial Sequence
  Description of Artificial Sequence: Synthetic oligonucleotide
accgucaucauuaacccag

SEQ ID NO: 979682 - RNA, 19 nt, Artificial Sequence
  Description of Artificial Sequence: Synthetic oligonucleotide
acuacucuacucucaaacu

SEQ ID NO: 979683 - RNA, 19 nt, Artificial Sequence
  Description of Artificial Sequence: Synthetic oligonucleotide
gacgagguacaguucagug

SEQ ID NO: 979684 - RNA, 19 nt, Artificial Sequence
  Description of Artificial Sequence: Synthetic oligonucleotide
ugagggguaaauguauuca

SEQ ID NO: 979685 - RNA, 19 nt, Artificial Sequence
  Description of Artificial Sequence: Synthetic oligonucleotide
uucccaucaccaaacuacc

SEQ ID NO: 979686 - RNA, 19 nt, Artificial Sequence
  Description of Artificial Sequence: Synthetic oligonucleotide
cacuaauuccaugacgagg

SEQ ID NO: 979687 - RNA, 19 nt, Artificial Sequence
  Description of Artificial Sequence: Synthetic oligonucleotide
  modified_base (6)..(6): a, c, u, g, unknown or other
uuaacnguuccauguguaa

SEQ ID NO: 979688 - RNA, 19 nt, Artificial Sequence
  Description of Artificial Sequence: Synthetic oligonucleotide
aaccuuuugggaaacuugu

SEQ ID NO: 979689 - RNA, 19 nt, Artificial Sequence
  Description of Artificial Sequence: Synthetic oligonucleotide
uaaugcuacuggcuggcug

SEQ ID NO: 979690 - RNA, 19 nt, Artificial Sequence
  Description of Artificial Sequence: Synthetic oligonucleotide
acagcgaaauuuccgucuc

SEQ ID NO: 979691 - RNA, 19 nt, Artificial Sequence
  Description of Artificial Sequence: Synthetic oligonucleotide
aaaggaaacguuggauucu

SEQ ID NO: 979692 - RNA, 19 nt, Artificial Sequence
  Description of Artificial Sequence: Synthetic oligonucleotide
gacccuuaaugcuacuggc

SEQ ID NO: 979693 - RNA, 19 nt, Artificial Sequence
  Description of Artificial Sequence: Synthetic oligonucleotide
acucaugauggagaagugg

SEQ ID NO: 979694 - RNA, 19 nt, Artificial Sequence
  Description of Artificial Sequence: Synthetic oligonucleotide
  modified_base (17)..(17): a, c, u, g, unknown or other
ugugugugugugugggngg

SEQ ID NO: 979695 - RNA, 19 nt, Artificial Sequence
  Description of Artificial Sequence: Synthetic oligonucleotide
ugcuguucggcuugggacc

SEQ ID NO: 979696 - RNA, 19 nt, Artificial Sequence
  Description of Artificial Sequence: Synthetic oligonucleotide
uguaucguucuguuauugu

SEQ ID NO: 979697 - RNA, 19 nt, Artificial Sequence
  Description of Artificial Sequence: Synthetic oligonucleotide
uacaaaucguuugaaaguu

SEQ ID NO: 979698 - RNA, 19 nt, Artificial Sequence
  Description of Artificial Sequence: Synthetic oligonucleotide
ucacuaauuccaugacgag

SEQ ID NO: 979699 - RNA, 19 nt, Artificial Sequence
  Description of Artificial Sequence: Synthetic oligonucleotide
ugacaacagcgaaauuucc

SEQ ID NO: 979700 - RNA, 19 nt, Artificial Sequence
  Description of Artificial Sequence: Synthetic oligonucleotide
auggguacaaaucguuuga

SEQ ID NO: 979701 - RNA, 19 nt, Artificial Sequence
  Description of Artificial Sequence: Synthetic oligonucleotide
uuaauaugaacgggucuca

SEQ ID NO: 979702 - RNA, 19 nt, Artificial Sequence
  Description of Artificial Sequence: Synthetic oligonucleotide
aaaaccuuuugggaaacuu

SEQ ID NO: 979703 - RNA, 19 nt, Artificial Sequence
  Description of Artificial Sequence: Synthetic oligonucleotide
cuuaaugcuacuggcuggc

SEQ ID NO: 979704 - RNA, 19 nt, Artificial Sequence
  Description of Artificial Sequence: Synthetic oligonucleotide
ggcugaaaaucucuggucc

SEQ ID NO: 979705 - RNA, 19 nt, Artificial Sequence
  Description of Artificial Sequence: Synthetic oligonucleotide
uugcuaugacagaaacucc

SEQ ID NO: 979706 - RNA, 19 nt, Artificial Sequence
  Description of Artificial Sequence: Synthetic oligonucleotide
aauucccaucaccaaacua

SEQ ID NO: 979707 - RNA, 19 nt, Artificial Sequence
  Description of Artificial Sequence: Synthetic oligonucleotide
ucucaucuauagaauugac

SEQ ID NO: 979708 - RNA, 19 nt, Artificial Sequence
  Description of Artificial Sequence: Synthetic oligonucleotide
caucaaaugugugugugug

SEQ ID NO: 979709 - RNA, 19 nt, Artificial Sequence
  Description of Artificial Sequence: Synthetic oligonucleotide
aggaagcaaguaauaaagg

SEQ ID NO: 979710 - RNA, 19 nt, Artificial Sequence
  Description of Artificial Sequence: Synthetic oligonucleotide
caucauuaacccagggaug

SEQ ID NO: 979711 - RNA, 19 nt, Artificial Sequence
  Description of Artificial Sequence: Synthetic oligonucleotide
aaucauggguacaaaucgu

SEQ ID NO: 979712 - RNA, 19 nt, Artificial Sequence
  Description of Artificial Sequence: Synthetic oligonucleotide
uccaucugacaucccgggg

SEQ ID NO: 979713 - RNA, 19 nt, Artificial Sequence
  Description of Artificial Sequence: Synthetic oligonucleotide
aaagggcaauucccaucac

SEQ ID NO: 979714 - RNA, 19 nt, Artificial Sequence
  Description of Artificial Sequence: Synthetic oligonucleotide
ucaccaaacuaccaccaua

SEQ ID NO: 979715 - RNA, 19 nt, Artificial Sequence
  Description of Artificial Sequence: Synthetic oligonucleotide
cugcaaugauuucuggagc

SEQ ID NO: 979716 - RNA, 19 nt, Artificial Sequence
  Description of Artificial Sequence: Synthetic oligonucleotide
auacgaacuaaagauucca

SEQ ID NO: 979717 - RNA, 19 nt, Artificial Sequence
  Description of Artificial Sequence: Synthetic oligonucleotide
caacuugagugacuuacug

SEQ ID NO: 979718 - RNA, 19 nt, Artificial Sequence
  Description of Artificial Sequence: Synthetic oligonucleotide
auacgacagggcuauccuc

SEQ ID NO: 979719 - RNA, 19 nt, Artificial Sequence
  Description of Artificial Sequence: Synthetic oligonucleotide
ccaaacuaccaccauagag

SEQ ID NO: 979720 - RNA, 19 nt, Artificial Sequence
  Description of Artificial Sequence: Synthetic oligonucleotide
uccacccuucacuaauucc

SEQ ID NO: 979721 - RNA, 19 nt, Artificial Sequence
  Description of Artificial Sequence: Synthetic oligonucleotide
cuugccagguuguacagca

SEQ ID NO: 979722 - RNA, 19 nt, Artificial Sequence
  Description of Artificial Sequence: Synthetic oligonucleotide
auguguguguguguguggg

SEQ ID NO: 979723 - RNA, 19 nt, Artificial Sequence
  Description of Artificial Sequence: Synthetic oligonucleotide
ugugcucuuugccucgaca

SEQ ID NO: 979724 - RNA, 19 nt, Artificial Sequence
  Description of Artificial Sequence: Synthetic oligonucleotide
aaaaucucugguccacguu

SEQ ID NO: 979725 - RNA, 19 nt, Artificial Sequence
  Description of Artificial Sequence: Synthetic oligonucleotide
uacgaacuaaagauuccau

SEQ ID NO: 979726 - RNA, 19 nt, Artificial Sequence
  Description of Artificial Sequence: Synthetic oligonucleotide
uccuugacaacagcgaaau

SEQ ID NO: 979727 - RNA, 19 nt, Artificial Sequence
  Description of Artificial Sequence: Synthetic oligonucleotide
agguuguacagcaucccac

SEQ ID NO: 979728 - RNA, 19 nt, Artificial Sequence
  Description of Artificial Sequence: Synthetic oligonucleotide
cacguuaacuagcagcauc

SEQ ID NO: 979729 - RNA, 19 nt, Artificial Sequence
  Description of Artificial Sequence: Synthetic oligonucleotide
cauuccuugacaacagcga

SEQ ID NO: 979730 - RNA, 19 nt, Artificial Sequence
  Description of Artificial Sequence: Synthetic oligonucleotide
uaauggcacauugcuauga

SEQ ID NO: 979731 - RNA, 19 nt, Artificial Sequence
  Description of Artificial Sequence: Synthetic oligonucleotide
uauuugcuaguggaaguga

SEQ ID NO: 979732 - RNA, 19 nt, Artificial Sequence
  Description of Artificial Sequence: Synthetic oligonucleotide
aauuuccgucuccuauugu

SEQ ID NO: 979733 - RNA, 19 nt, Artificial Sequence
  Description of Artificial Sequence: Synthetic oligonucleotide
  modified_base (7)..(7): a, c, u, g, unknown or other
cuuaacnguuccaugugua

SEQ ID NO: 979734 - RNA, 19 nt, Artificial Sequence
  Description of Artificial Sequence: Synthetic oligonucleotide
caucucuucgaucaagaga

SEQ ID NO: 979735 - RNA, 19 nt, Artificial Sequence
  Description of Artificial Sequence: Synthetic oligonucleotide
uuccuugacaacagcgaaa

SEQ ID NO: 979736 - RNA, 19 nt, Artificial Sequence
  Description of Artificial Sequence: Synthetic oligonucleotide
ucauggguacaaaucguuu

SEQ ID NO: 979737 - RNA, 19 nt, Artificial Sequence
  Description of Artificial Sequence: Synthetic oligonucleotide
uaaagugguuucugcuaca

SEQ ID NO: 979738 - RNA, 19 nt, Artificial Sequence
  Description of Artificial Sequence: Synthetic oligonucleotide
agccuuaauggcacauugc

SEQ ID NO: 979739 - RNA, 19 nt, Artificial Sequence
  Description of Artificial Sequence: Synthetic oligonucleotide
guaagcaccguagagccca

SEQ ID NO: 979740 - RNA, 19 nt, Artificial Sequence
  Description of Artificial Sequence: Synthetic oligonucleotide
uggaaaggaaacguuggau

SEQ ID NO: 979741 - RNA, 19 nt, Artificial Sequence
  Description of Artificial Sequence: Synthetic oligonucleotide
caccuuuaaucauggguac

SEQ ID NO: 979742 - RNA, 19 nt, Artificial Sequence
  Description of Artificial Sequence: Synthetic oligonucleotide
aaagugguuucugcuacaa

SEQ ID NO: 979743 - RNA, 19 nt, Artificial Sequence
  Description of Artificial Sequence: Synthetic oligonucleotide
acucccgagcaguugaccu

SEQ ID NO: 979744 - RNA, 19 nt, Artificial Sequence
  Description of Artificial Sequence: Synthetic oligonucleotide
uuccgucuccuauuguucu

SEQ ID NO: 979745 - RNA, 19 nt, Artificial Sequence
  Description of Artificial Sequence: Synthetic oligonucleotide
aucaaaugugugugugugu

SEQ ID NO: 979746 - RNA, 19 nt, Artificial Sequence
  Description of Artificial Sequence: Synthetic oligonucleotide
  modified_base (16)..(16): a, c, u, g, unknown or other
gugugugugugugggnggg

SEQ ID NO: 979747 - RNA, 19 nt, Artificial Sequence
  Description of Artificial Sequence: Synthetic oligonucleotide
gggccaucgacaauggugg

SEQ ID NO: 979748 - RNA, 19 nt, Artificial Sequence
  Description of Artificial Sequence: Synthetic oligonucleotide
guuccauguguaagcaccg

SEQ ID NO: 979749 - RNA, 19 nt, Artificial Sequence
  Description of Artificial Sequence: Synthetic oligonucleotide
guuugcucaacuacucuac

SEQ ID NO: 979750 - RNA, 19 nt, Artificial Sequence
  Description of Artificial Sequence: Synthetic oligonucleotide
gugguuucugcuacaacgc

SEQ ID NO: 979751 - RNA, 19 nt, Artificial Sequence
  Description of Artificial Sequence: Synthetic oligonucleotide
uguuagagccugugcacaa

SEQ ID NO: 979752 - RNA, 19 nt, Artificial Sequence
  Description of Artificial Sequence: Synthetic oligonucleotide
agcccaauuguaaagcacu

SEQ ID NO: 979753 - RNA, 19 nt, Artificial Sequence
  Description of Artificial Sequence: Synthetic oligonucleotide
  modified_base (18)..(18): a, c, u, g, unknown or other
gugugugugugugugggng

SEQ ID NO: 979754 - RNA, 19 nt, Artificial Sequence
  Description of Artificial Sequence: Synthetic oligonucleotide
acguuaacuagcagcauca

SEQ ID NO: 979755 - RNA, 19 nt, Artificial Sequence
  Description of Artificial Sequence: Synthetic oligonucleotide
ggaagcaaguaauaaaggu

SEQ ID NO: 979756 - RNA, 19 nt, Artificial Sequence
  Description of Artificial Sequence: Synthetic oligonucleotide
cauauuugagaugauuaaa

SEQ ID NO: 979757 - RNA, 19 nt, Artificial Sequence
  Description of Artificial Sequence: Synthetic oligonucleotide
augaacgggucucaucuau

SEQ ID NO: 979758 - RNA, 19 nt, Artificial Sequence
  Description of Artificial Sequence: Synthetic oligonucleotide
uccauguguaagcaccgua

SEQ ID NO: 979759 - RNA, 19 nt, Artificial Sequence
  Description of Artificial Sequence: Synthetic oligonucleotide
acacuaaccuacaccaucu

SEQ ID NO: 979760 - RNA, 19 nt, Artificial Sequence
  Description of Artificial Sequence: Synthetic oligonucleotide
ccauguguaagcaccguag

SEQ ID NO: 979761 - RNA, 19 nt, Artificial Sequence
  Description of Artificial Sequence: Synthetic oligonucleotide
ucccuguuagagccugugc

SEQ ID NO: 979762 - RNA, 19 nt, Artificial Sequence
  Description of Artificial Sequence: Synthetic oligonucleotide
uccuauuguucuccaacuu

SEQ ID NO: 979763 - RNA, 19 nt, Artificial Sequence
  Description of Artificial Sequence: Synthetic oligonucleotide
uggcaucucgcucuguaua

SEQ ID NO: 979764 - RNA, 19 nt, Artificial Sequence
  Description of Artificial Sequence: Synthetic oligonucleotide
ggagaaguggauaauuaca

SEQ ID NO: 979765 - RNA, 19 nt, Artificial Sequence
  Description of Artificial Sequence: Synthetic oligonucleotide
ccaucaccaaacuaccacc

SEQ ID NO: 979766 - RNA, 19 nt, Artificial Sequence
  Description of Artificial Sequence: Synthetic oligonucleotide
agguuugcucaacuacucu

SEQ ID NO: 979767 - RNA, 19 nt, Artificial Sequence
  Description of Artificial Sequence: Synthetic oligonucleotide
auccucuuaguaaaggaaa

SEQ ID NO: 979768 - RNA, 19 nt, Artificial Sequence
  Description of Artificial Sequence: Synthetic oligonucleotide
  modified_base (3)..(3): a, c, u, g, unknown or other
acnguuccauguguaagca

SEQ ID NO: 979769 - RNA, 19 nt, Artificial Sequence
  Description of Artificial Sequence: Synthetic oligonucleotide
gaaaaucucugguccacgu

SEQ ID NO: 979770 - RNA, 19 nt, Artificial Sequence
  Description of Artificial Sequence: Synthetic oligonucleotide
augcaaaagcaaaauacua

SEQ ID NO: 979771 - RNA, 19 nt, Artificial Sequence
  Description of Artificial Sequence: Synthetic oligonucleotide
ggagccacauauguugggg

SEQ ID NO: 979772 - RNA, 19 nt, Artificial Sequence
  Description of Artificial Sequence: Synthetic oligonucleotide
agcgaaauuuccgucuccu

SEQ ID NO: 979773 - RNA, 19 nt, Artificial Sequence
  Description of Artificial Sequence: Synthetic oligonucleotide
gcaguugaccucucuauac

SEQ ID NO: 979774 - RNA, 19 nt, Artificial Sequence
  Description of Artificial Sequence: Synthetic oligonucleotide
cucaucuauagaauugacu

SEQ ID NO: 979775 - RNA, 19 nt, Artificial Sequence
  Description of Artificial Sequence: Synthetic oligonucleotide
  modified_base (19)..(19): a, c, u, g, unknown or other
ugugugugugugugugggn

SEQ ID NO: 979776 - RNA, 19 nt, Artificial Sequence
  Description of Artificial Sequence: Synthetic oligonucleotide
aaggaaacguuggauucuu

SEQ ID NO: 979777 - RNA, 19 nt, Artificial Sequence
  Description of Artificial Sequence: Synthetic oligonucleotide
ugggaccuguguugaaaug

SEQ ID NO: 979778 - RNA, 19 nt, Artificial Sequence
  Description of Artificial Sequence: Synthetic oligonucleotide
caacagcgaaauuuccguc

SEQ ID NO: 979779 - RNA, 19 nt, Artificial Sequence
  Description of Artificial Sequence: Synthetic oligonucleotide
agcaaguaauaaagguuug

SEQ ID NO: 979780 - RNA, 19 nt, Artificial Sequence
  Description of Artificial Sequence: Synthetic oligonucleotide
aagagcucauuugguaaau

SEQ ID NO: 979781 - RNA, 19 nt, Artificial Sequence
  Description of Artificial Sequence: Synthetic oligonucleotide
accaguuuaugacccuuaa

SEQ ID NO: 979782 - RNA, 19 nt, Artificial Sequence
  Description of Artificial Sequence: Synthetic oligonucleotide
ccaaaucuaaaaccuuuug

SEQ ID NO: 979783 - RNA, 19 nt, Artificial Sequence
  Description of Artificial Sequence: Synthetic oligonucleotide
uuggggugcuucacccucc

SEQ ID NO: 979784 - RNA, 19 nt, Artificial Sequence
  Description of Artificial Sequence: Synthetic oligonucleotide
uaacuagcagcaucauguu

SEQ ID NO: 979785 - RNA, 19 nt, Artificial Sequence
  Description of Artificial Sequence: Synthetic oligonucleotide
ugaacgggucucaucuaua

SEQ ID NO: 979786 - RNA, 19 nt, Artificial Sequence
  Description of Artificial Sequence: Synthetic oligonucleotide
cuacuggcuggcuggcugc

SEQ ID NO: 979787 - RNA, 19 nt, Artificial Sequence
  Description of Artificial Sequence: Synthetic oligonucleotide
cauguguaagcaccguaga

SEQ ID NO: 979788 - RNA, 19 nt, Artificial Sequence
  Description of Artificial Sequence: Synthetic oligonucleotide
ucacccaacuugagugacu

SEQ ID NO: 979789 - RNA, 19 nt, Artificial Sequence
  Description of Artificial Sequence: Synthetic oligonucleotide
cuacaauuuaugagcuuaa

SEQ ID NO: 979790 - RNA, 19 nt, Artificial Sequence
  Description of Artificial Sequence: Synthetic oligonucleotide
caaaucguuugaaaguuau

SEQ ID NO: 979791 - RNA, 19 nt, Artificial Sequence
  Description of Artificial Sequence: Synthetic oligonucleotide
gagcccaauuguaaagcac

SEQ ID NO: 979792 - RNA, 19 nt, Artificial Sequence
  Description of Artificial Sequence: Synthetic oligonucleotide
aaaucguuugaaaguuauu

SEQ ID NO: 979793 - RNA, 19 nt, Artificial Sequence
  Description of Artificial Sequence: Synthetic oligonucleotide
ccguuaaaugcucacuuac

SEQ ID NO: 979794 - RNA, 19 nt, Artificial Sequence
  Description of Artificial Sequence: Synthetic oligonucleotide
cauuaacccagggaugcuc

SEQ ID NO: 979795 - RNA, 19 nt, Artificial Sequence
  Description of Artificial Sequence: Synthetic oligonucleotide
cauuaauaugaacgggucu

SEQ ID NO: 979796 - RNA, 19 nt, Artificial Sequence
  Description of Artificial Sequence: Synthetic oligonucleotide
  modified_base (15)..(15): a, c, u, g, unknown or other
ugugugugugugggngggg

SEQ ID NO: 979797 - RNA, 19 nt, Artificial Sequence
  Description of Artificial Sequence: Synthetic oligonucleotide
ucgcucuguauauuugcua

SEQ ID NO: 979798 - RNA, 19 nt, Artificial Sequence
  Description of Artificial Sequence: Synthetic oligonucleotide
cuaaccgucuaccuuagau

SEQ ID NO: 979799 - RNA, 19 nt, Artificial Sequence
  Description of Artificial Sequence: Synthetic oligonucleotide
uaauaugaacgggucucau

SEQ ID NO: 979800 - RNA, 19 nt, Artificial Sequence
  Description of Artificial Sequence: Synthetic oligonucleotide
cuugagugacuuacugcca

SEQ ID NO: 979801 - RNA, 19 nt, Artificial Sequence
  Description of Artificial Sequence: Synthetic oligonucleotide
caucugacaucccgggguc

SEQ ID NO: 979802 - RNA, 19 nt, Artificial Sequence
  Description of Artificial Sequence: Synthetic oligonucleotide
auuugcuaguggaagugau

SEQ ID NO: 979803 - RNA, 19 nt, Artificial Sequence
  Description of Artificial Sequence: Synthetic oligonucleotide
ugacgagguacaguucagu

SEQ ID NO: 979804 - RNA, 19 nt, Artificial Sequence
  Description of Artificial Sequence: Synthetic oligonucleotide
caucuauagaauugacugu

SEQ ID NO: 979805 - RNA, 19 nt, Artificial Sequence
  Description of Artificial Sequence: Synthetic oligonucleotide
gcaccguagagcccaauug

SEQ ID NO: 979806 - RNA, 19 nt, Artificial Sequence
  Description of Artificial Sequence: Synthetic oligonucleotide
cccaacuugagugacuuac

SEQ ID NO: 979807 - RNA, 19 nt, Artificial Sequence
  Description of Artificial Sequence: Synthetic oligonucleotide
cucuucgaucaagagaaca

SEQ ID NO: 979808 - RNA, 19 nt, Artificial Sequence
  Description of Artificial Sequence: Synthetic oligonucleotide
gcuaugacagaaacuccag

SEQ ID NO: 979809 - RNA, 19 nt, Artificial Sequence
  Description of Artificial Sequence: Synthetic oligonucleotide
cccaucaccaaacuaccac

SEQ ID NO: 979810 - RNA, 19 nt, Artificial Sequence
  Description of Artificial Sequence: Synthetic oligonucleotide
aucugacaucccggggucc

SEQ ID NO: 979811 - RNA, 19 nt, Artificial Sequence
  Description of Artificial Sequence: Synthetic oligonucleotide
accaaacuaccaccauaga

SEQ ID NO: 979812 - RNA, 19 nt, Artificial Sequence
  Description of Artificial Sequence: Synthetic oligonucleotide
gcaauucccaucaccaaac

SEQ ID NO: 979813 - RNA, 19 nt, Artificial Sequence
  Description of Artificial Sequence: Synthetic oligonucleotide
uggguacaaaucguuugaa

SEQ ID NO: 979814 - RNA, 19 nt, Artificial Sequence
  Description of Artificial Sequence: Synthetic oligonucleotide
  modified_base (2)..(2): a, c, u, g, unknown or other
cnguuccauguguaagcac

SEQ ID NO: 979815 - RNA, 19 nt, Artificial Sequence
  Description of Artificial Sequence: Synthetic oligonucleotide
ucucuucgaucaagagaac

SEQ ID NO: 979816 - RNA, 19 nt, Artificial Sequence
  Description of Artificial Sequence: Synthetic oligonucleotide
ccuuaagauagacaccuca

SEQ ID NO: 979817 - RNA, 19 nt, Artificial Sequence
  Description of Artificial Sequence: Synthetic oligonucleotide
ucuaaccgucuaccuuaga

SEQ ID NO: 979818 - RNA, 19 nt, Artificial Sequence
  Description of Artificial Sequence: Synthetic oligonucleotide
uaccaccauagaguuauau

SEQ ID NO: 979819 - RNA, 19 nt, Artificial Sequence
  Description of Artificial Sequence: Synthetic oligonucleotide
gagggguaaauguauucau

SEQ ID NO: 979820 - RNA, 19 nt, Artificial Sequence
  Description of Artificial Sequence: Synthetic oligonucleotide
ccaccuuuaaucaugggua

SEQ ID NO: 979821 - RNA, 19 nt, Artificial Sequence
  Description of Artificial Sequence: Synthetic oligonucleotide
ccuguuagagccugugcac

SEQ ID NO: 979822 - RNA, 19 nt, Artificial Sequence
  Description of Artificial Sequence: Synthetic oligonucleotide
aaccagacacuaaccuaca

SEQ ID NO: 979823 - RNA, 19 nt, Artificial Sequence
  Description of Artificial Sequence: Synthetic oligonucleotide
agaggcauucuaaccgucu

SEQ ID NO: 979824 - RNA, 19 nt, Artificial Sequence
  Description of Artificial Sequence: Synthetic oligonucleotide
ucauuaacccagggaugcu

SEQ ID NO: 979825 - RNA, 19 nt, Artificial Sequence
  Description of Artificial Sequence: Synthetic oligonucleotide
aucauggguacaaaucguu

SEQ ID NO: 979826 - RNA, 19 nt, Artificial Sequence
  Description of Artificial Sequence: Synthetic oligonucleotide
ucccgagcaguugaccucu

SEQ ID NO: 979827 - RNA, 19 nt, Artificial Sequence
  Description of Artificial Sequence: Synthetic oligonucleotide
uaugacccuuaaugcuacu

SEQ ID NO: 979828 - RNA, 19 nt, Artificial Sequence
  Description of Artificial Sequence: Synthetic oligonucleotide
gguuugcucaacuacucua

SEQ ID NO: 979829 - RNA, 19 nt, Artificial Sequence
  Description of Artificial Sequence: Synthetic oligonucleotide
ucuccacccuucacuaauu

SEQ ID NO: 979830 - RNA, 19 nt, Artificial Sequence
  Description of Artificial Sequence: Synthetic oligonucleotide
acccuuaaugcuacuggcu

SEQ ID NO: 979831 - RNA, 19 nt, Artificial Sequence
  Description of Artificial Sequence: Synthetic oligonucleotide
gaccgucaucauuaaccca

SEQ ID NO: 979832 - RNA, 19 nt, Artificial Sequence
  Description of Artificial Sequence: Synthetic oligonucleotide
cacuaaccuacaccaucug

SEQ ID NO: 979833 - RNA, 19 nt, Artificial Sequence
  Description of Artificial Sequence: Synthetic oligonucleotide
cagcgaaauuuccgucucc

SEQ ID NO: 979834 - RNA, 19 nt, Artificial Sequence
  Description of Artificial Sequence: Synthetic oligonucleotide
uacucccgagcaguugacc

SEQ ID NO: 979835 - RNA, 19 nt, Artificial Sequence
  Description of Artificial Sequence: Synthetic oligonucleotide
uuaaugcuacuggcuggcu

SEQ ID NO: 979836 - RNA, 19 nt, Artificial Sequence
  Description of Artificial Sequence: Synthetic oligonucleotide
cauugcuaugacagaaacu

SEQ ID NO: 979837 - RNA, 19 nt, Artificial Sequence
  Description of Artificial Sequence: Synthetic oligonucleotide
auacucccgagcaguugac

SEQ ID NO: 979838 - RNA, 19 nt, Artificial Sequence
  Description of Artificial Sequence: Synthetic oligonucleotide
cgaacuaaagauuccaucu

SEQ ID NO: 979839 - RNA, 19 nt, Artificial Sequence
  Description of Artificial Sequence: Synthetic oligonucleotide
aucucgcucuguauauuug

SEQ ID NO: 979840 - RNA, 19 nt, Artificial Sequence
  Description of Artificial Sequence: Synthetic oligonucleotide
accgucuaccuuagauuuc

SEQ ID NO: 979841 - RNA, 19 nt, Artificial Sequence
  Description of Artificial Sequence: Synthetic oligonucleotide
cagaggcauucuaaccguc

SEQ ID NO: 979842 - RNA, 19 nt, Artificial Sequence
  Description of Artificial Sequence: Synthetic oligonucleotide
ccgucuaccuuagauuucc

SEQ ID NO: 979843 - RNA, 19 nt, Artificial Sequence
  Description of Artificial Sequence: Synthetic oligonucleotide
accuacaauuuaugagcuu

SEQ ID NO: 979844 - RNA, 19 nt, Artificial Sequence
  Description of Artificial Sequence: Synthetic oligonucleotide
cuccuauuguucuccaacu

SEQ ID NO: 979845 - RNA, 19 nt, Artificial Sequence
  Description of Artificial Sequence: Synthetic oligonucleotide
gggcuauccucuuaguaaa

SEQ ID NO: 979846 - RNA, 19 nt, Artificial Sequence
  Description of Artificial Sequence: Synthetic oligonucleotide
cucccgagcaguugaccuc

SEQ ID NO: 979847 - RNA, 19 nt, Artificial Sequence
  Description of Artificial Sequence: Synthetic oligonucleotide
ugacaucccggggucccag

SEQ ID NO: 979848 - RNA, 19 nt, Artificial Sequence
  Description of Artificial Sequence: Synthetic oligonucleotide
uuccauguguaagcaccgu

SEQ ID NO: 979849 - RNA, 19 nt, Artificial Sequence
  Description of Artificial Sequence: Synthetic oligonucleotide
cuccacccuucacuaauuc

SEQ ID NO: 979850 - RNA, 19 nt, Artificial Sequence
  Description of Artificial Sequence: Synthetic oligonucleotide
uguucggcuugggaccugu

SEQ ID NO: 979851 - RNA, 19 nt, Artificial Sequence
  Description of Artificial Sequence: Synthetic oligonucleotide
cuguuagagccugugcaca

SEQ ID NO: 979852 - RNA, 19 nt, Artificial Sequence
  Description of Artificial Sequence: Synthetic oligonucleotide
uggggugcuucacccuccu

SEQ ID NO: 979853 - RNA, 19 nt, Artificial Sequence
  Description of Artificial Sequence: Synthetic oligonucleotide
acucuacucucaaacugaa

SEQ ID NO: 979854 - RNA, 19 nt, Artificial Sequence
  Description of Artificial Sequence: Synthetic oligonucleotide
acaaaucguuugaaaguua

SEQ ID NO: 979855 - RNA, 19 nt, Artificial Sequence
  Description of Artificial Sequence: Synthetic oligonucleotide
ggguacaaaucguuugaaa

SEQ ID NO: 979856 - RNA, 19 nt, Artificial Sequence
  Description of Artificial Sequence: Synthetic oligonucleotide
acagagauacacagccuua

SEQ ID NO: 979857 - RNA, 19 nt, Artificial Sequence
  Description of Artificial Sequence: Synthetic oligonucleotide
cagcccacuuucuuuagua

SEQ ID NO: 979858 - RNA, 19 nt, Artificial Sequence
  Description of Artificial Sequence: Synthetic oligonucleotide
uugccucgacauuuacuuu

SEQ ID NO: 979859 - RNA, 19 nt, Artificial Sequence
  Description of Artificial Sequence: Synthetic oligonucleotide
cugauccaugcagcaagug

SEQ ID NO: 979860 - RNA, 19 nt, Artificial Sequence
  Description of Artificial Sequence: Synthetic oligonucleotide
acaacgcugagggguaaau

SEQ ID NO: 979861 - RNA, 19 nt, Artificial Sequence
  Description of Artificial Sequence: Synthetic oligonucleotide
cucccuguuagagccugug

SEQ ID NO: 979862 - RNA, 19 nt, Artificial Sequence
  Description of Artificial Sequence: Synthetic oligonucleotide
cacauauguuggggugccg

SEQ ID NO: 979863 - RNA, 19 nt, Artificial Sequence
  Description of Artificial Sequence: Synthetic oligonucleotide
caccguagagcccaauugu

SEQ ID NO: 979864 - RNA, 19 nt, Artificial Sequence
  Description of Artificial Sequence: Synthetic oligonucleotide
aucgacaaugguggccaga

SEQ ID NO: 979865 - RNA, 19 nt, Artificial Sequence
  Description of Artificial Sequence: Synthetic oligonucleotide
uaagcaccguagagcccaa

SEQ ID NO: 979866 - RNA, 19 nt, Artificial Sequence
  Description of Artificial Sequence: Synthetic oligonucleotide
uacaacgcugagggguaaa

SEQ ID NO: 979867 - RNA, 19 nt, Artificial Sequence
  Description of Artificial Sequence: Synthetic oligonucleotide
ccuguuucccaccaguuua

SEQ ID NO: 979868 - RNA, 19 nt, Artificial Sequence
  Description of Artificial Sequence: Synthetic oligonucleotide
ccgucaucauuaacccagg

SEQ ID NO: 979869 - RNA, 19 nt, Artificial Sequence
  Description of Artificial Sequence: Synthetic oligonucleotide
cucgacauuuacuuuucuu

SEQ ID NO: 979870 - RNA, 19 nt, Artificial Sequence
  Description of Artificial Sequence: Synthetic oligonucleotide
accguagagcccaauugua

SEQ ID NO: 979871 - RNA, 19 nt, Artificial Sequence
  Description of Artificial Sequence: Synthetic oligonucleotide
ggauaauuacagagauaca

SEQ ID NO: 979872 - RNA, 19 nt, Artificial Sequence
  Description of Artificial Sequence: Synthetic oligonucleotide
gccaucgacaaugguggcc

SEQ ID NO: 979873 - RNA, 19 nt, Artificial Sequence
  Description of Artificial Sequence: Synthetic oligonucleotide
cucuacucucaaacugaaa

SEQ ID NO: 979874 - RNA, 19 nt, Artificial Sequence
  Description of Artificial Sequence: Synthetic oligonucleotide
caaaugugugugugugugu

SEQ ID NO: 979875 - RNA, 19 nt, Artificial Sequence
  Description of Artificial Sequence: Synthetic oligonucleotide
ggagaccgucaucauuaac

SEQ ID NO: 979876 - RNA, 19 nt, Artificial Sequence
  Description of Artificial Sequence: Synthetic oligonucleotide
ccacauauguuggggugcc

SEQ ID NO: 979877 - RNA, 19 nt, Artificial Sequence
  Description of Artificial Sequence: Synthetic oligonucleotide
agacacuaaccuacaccau

SEQ ID NO: 979878 - RNA, 19 nt, Artificial Sequence
  Description of Artificial Sequence: Synthetic oligonucleotide
gucuccuauuguucuccaa

SEQ ID NO: 979879 - RNA, 19 nt, Artificial Sequence
  Description of Artificial Sequence: Synthetic oligonucleotide
acgacagggcuauccucuu

SEQ ID NO: 979880 - RNA, 19 nt, Artificial Sequence
  Description of Artificial Sequence: Synthetic oligonucleotide
caucugauccaugcagcaa

SEQ ID NO: 979881 - RNA, 19 nt, Artificial Sequence
  Description of Artificial Sequence: Synthetic oligonucleotide
caccaguuuaugacccuua

SEQ ID NO: 979882 - RNA, 19 nt, Artificial Sequence
  Description of Artificial Sequence: Synthetic oligonucleotide
gugccgcagacuguguaca

SEQ ID NO: 979883 - RNA, 19 nt, Artificial Sequence
  Description of Artificial Sequence: Synthetic oligonucleotide
caucucgcucuguauauuu

SEQ ID NO: 979884 - RNA, 19 nt, Artificial Sequence
  Description of Artificial Sequence: Synthetic oligonucleotide
gcagaggcauucuaaccgu

SEQ ID NO: 979885 - RNA, 19 nt, Artificial Sequence
  Description of Artificial Sequence: Synthetic oligonucleotide
cagugggcacauccaucuc

SEQ ID NO: 979886 - RNA, 19 nt, Artificial Sequence
  Description of Artificial Sequence: Synthetic oligonucleotide
ccaucugacaucccggggu

SEQ ID NO: 979887 - RNA, 19 nt, Artificial Sequence
  Description of Artificial Sequence: Synthetic oligonucleotide
guugaccucucuauacauu

SEQ ID NO: 979888 - RNA, 19 nt, Artificial Sequence
  Description of Artificial Sequence: Synthetic oligonucleotide
cgcagacuguguacagggg

SEQ ID NO: 979889 - RNA, 19 nt, Artificial Sequence
  Description of Artificial Sequence: Synthetic oligonucleotide
ggccaucgacaaugguggc

SEQ ID NO: 979890 - RNA, 19 nt, Artificial Sequence
  Description of Artificial Sequence: Synthetic oligonucleotide
ggaccuguguugaaaugcu

SEQ ID NO: 979891 - RNA, 19 nt, Artificial Sequence
  Description of Artificial Sequence: Synthetic oligonucleotide
ccuauuguucuccaacuuu

SEQ ID NO: 979892 - RNA, 19 nt, Artificial Sequence
  Description of Artificial Sequence: Synthetic oligonucleotide
uggcacuugccagguugua

SEQ ID NO: 979893 - RNA, 19 nt, Artificial Sequence
  Description of Artificial Sequence: Synthetic oligonucleotide
gcuacaacgcugaggggua

SEQ ID NO: 979894 - RNA, 19 nt, Artificial Sequence
  Description of Artificial Sequence: Synthetic oligonucleotide
cguuaaaugcucacuuacu

SEQ ID NO: 979895 - RNA, 19 nt, Artificial Sequence
  Description of Artificial Sequence: Synthetic oligonucleotide
aagcaccguagagcccaau

SEQ ID NO: 979896 - RNA, 19 nt, Artificial Sequence
  Description of Artificial Sequence: Synthetic oligonucleotide
gcccguuaaaugcucacuu

SEQ ID NO: 979897 - RNA, 19 nt, Artificial Sequence
  Description of Artificial Sequence: Synthetic oligonucleotide
guuagagccugugcacaau

SEQ ID NO: 979898 - RNA, 19 nt, Artificial Sequence
  Description of Artificial Sequence: Synthetic oligonucleotide
gcgaaauuuccgucuccua

SEQ ID NO: 979899 - RNA, 19 nt, Artificial Sequence
  Description of Artificial Sequence: Synthetic oligonucleotide
cccguuaaaugcucacuua

SEQ ID NO: 979900 - RNA, 19 nt, Artificial Sequence
  Description of Artificial Sequence: Synthetic oligonucleotide
aggaaacguuggauucuuu

SEQ ID NO: 979901 - RNA, 19 nt, Artificial Sequence
  Description of Artificial Sequence: Synthetic oligonucleotide
guucggcuugggaccugug

SEQ ID NO: 979902 - RNA, 19 nt, Artificial Sequence
  Description of Artificial Sequence: Synthetic oligonucleotide
gggagaccgucaucauuaa

SEQ ID NO: 979903 - RNA, 19 nt, Artificial Sequence
  Description of Artificial Sequence: Synthetic oligonucleotide
cugggagaccgucaucauu

SEQ ID NO: 979904 - RNA, 19 nt, Artificial Sequence
  Description of Artificial Sequence: Synthetic oligonucleotide
cuacaacgcugagggguaa

SEQ ID NO: 979905 - RNA, 19 nt, Artificial Sequence
  Description of Artificial Sequence: Synthetic oligonucleotide
cuaccaccauagaguuaua

SEQ ID NO: 979906 - RNA, 19 nt, Artificial Sequence
  Description of Artificial Sequence: Synthetic oligonucleotide
ucccggggucccaguucuu

SEQ ID NO: 979907 - RNA, 19 nt, Artificial Sequence
  Description of Artificial Sequence: Synthetic oligonucleotide
ccaguuuaugacccuuaau

SEQ ID NO: 979908 - RNA, 19 nt, Artificial Sequence
  Description of Artificial Sequence: Synthetic oligonucleotide
ccccaucuguauguaauua

SEQ ID NO: 979909 - RNA, 19 nt, Artificial Sequence
  Description of Artificial Sequence: Synthetic oligonucleotide
ccuuagcagaaugccauau

SEQ ID NO: 979910 - RNA, 19 nt, Artificial Sequence
  Description of Artificial Sequence: Synthetic oligonucleotide
gaacaauguuggggugcuu

SEQ ID NO: 979911 - RNA, 19 nt, Artificial Sequence
  Description of Artificial Sequence: Synthetic oligonucleotide
cgucuccuauuguucucca

SEQ ID NO: 979912 - RNA, 19 nt, Artificial Sequence
  Description of Artificial Sequence: Synthetic oligonucleotide
cgcugagggguaaauguau

SEQ ID NO: 979913 - RNA, 19 nt, Artificial Sequence
  Description of Artificial Sequence: Synthetic oligonucleotide
ccuacaccaucugauccau

SEQ ID NO: 979914 - RNA, 19 nt, Artificial Sequence
  Description of Artificial Sequence: Synthetic oligonucleotide
ccucgacauuuacuuuucu

SEQ ID NO: 979915 - RNA, 19 nt, Artificial Sequence
  Description of Artificial Sequence: Synthetic oligonucleotide
cccggggucccaguucuua

SEQ ID NO: 979916 - RNA, 19 nt, Artificial Sequence
  Description of Artificial Sequence: Synthetic oligonucleotide
cguuaacuagcagcaucau

SEQ ID NO: 979917 - RNA, 19 nt, Artificial Sequence
  Description of Artificial Sequence: Synthetic oligonucleotide
ccacguuaacuagcagcau

SEQ ID NO: 979918 - RNA, 19 nt, Artificial Sequence
  Description of Artificial Sequence: Synthetic oligonucleotide
ggggugcuucacccuccuu

SEQ ID NO: 979919 - RNA, 19 nt, Artificial Sequence
  Description of Artificial Sequence: Synthetic oligonucleotide
  modified_base (1)..(1): a, c, u, g, unknown or other
nguuccauguguaagcacc

SEQ ID NO: 979920 - RNA, 19 nt, Artificial Sequence
  Description of Artificial Sequence: Synthetic oligonucleotide
auuaaugauaauuacacac

SEQ ID NO: 979921 - RNA, 19 nt, Artificial Sequence
  Description of Artificial Sequence: Synthetic oligonucleotide
ugauuaaugauaauuacac

SEQ ID NO: 979922 - RNA, 19 nt, Artificial Sequence
  Description of Artificial Sequence: Synthetic oligonucleotide
augauaauuacacacaggu

SEQ ID NO: 979923 - RNA, 19 nt, Artificial Sequence
  Description of Artificial Sequence: Synthetic oligonucleotide
auagccuggaccuaaggcc

SEQ ID NO: 979924 - RNA, 19 nt, Artificial Sequence
  Description of Artificial Sequence: Synthetic oligonucleotide
uaaugauaauuacacacag

SEQ ID NO: 979925 - RNA, 19 nt, Artificial Sequence
  Description of Artificial Sequence: Synthetic oligonucleotide
uuaaugauaauuacacaca

SEQ ID NO: 979926 - RNA, 19 nt, Artificial Sequence
  Description of Artificial Sequence: Synthetic oligonucleotide
ucucauuaggauacuaagg

SEQ ID NO: 979927 - RNA, 19 nt, Artificial Sequence
  Description of Artificial Sequence: Synthetic oligonucleotide
ugacaguacaguaaugaag

SEQ ID NO: 979928 - RNA, 19 nt, Artificial Sequence
  Description of Artificial Sequence: Synthetic oligonucleotide
aacgacucggcacacacag

SEQ ID NO: 979929 - RNA, 19 nt, Artificial Sequence
  Description of Artificial Sequence: Synthetic oligonucleotide
aaucacagcucuccaaagg

SEQ ID NO: 979930 - RNA, 19 nt, Artificial Sequence
  Description of Artificial Sequence: Synthetic oligonucleotide
ugcaauaaccacauagacc

SEQ ID NO: 979931 - RNA, 19 nt, Artificial Sequence
  Description of Artificial Sequence: Synthetic oligonucleotide
ugcaaauccuaugugaggg

SEQ ID NO: 979932 - RNA, 19 nt, Artificial Sequence
  Description of Artificial Sequence: Synthetic oligonucleotide
uguucccaagggaagaugg

SEQ ID NO: 979933 - RNA, 19 nt, Artificial Sequence
  Description of Artificial Sequence: Synthetic oligonucleotide
ugaccaucuaaucacagcu

SEQ ID NO: 979934 - RNA, 19 nt, Artificial Sequence
  Description of Artificial Sequence: Synthetic oligonucleotide
gcaauaaccacauagacca

SEQ ID NO: 979935 - RNA, 19 nt, Artificial Sequence
  Description of Artificial Sequence: Synthetic oligonucleotide
uagagacccagauaaaucc

SEQ ID NO: 979936 - RNA, 19 nt, Artificial Sequence
  Description of Artificial Sequence: Synthetic oligonucleotide
ucaacaguugcucugucug

SEQ ID NO: 979937 - RNA, 19 nt, Artificial Sequence
  Description of Artificial Sequence: Synthetic oligonucleotide
uucucauuaggauacuaag

SEQ ID NO: 979938 - RNA, 19 nt, Artificial Sequence
  Description of Artificial Sequence: Synthetic oligonucleotide
gauaauuacacacagguuu

SEQ ID NO: 979939 - RNA, 19 nt, Artificial Sequence
  Description of Artificial Sequence: Synthetic oligonucleotide
aauccuaugugagggcucc

SEQ ID NO: 979940 - RNA, 19 nt, Artificial Sequence
  Description of Artificial Sequence: Synthetic oligonucleotide
aguaaugaaggcauccacc

SEQ ID NO: 979941 - RNA, 19 nt, Artificial Sequence
  Description of Artificial Sequence: Synthetic oligonucleotide
gaggcaaugggguagggag

SEQ ID NO: 979942 - RNA, 19 nt, Artificial Sequence
  Description of Artificial Sequence: Synthetic oligonucleotide
ucuaaagguugauuaauga

SEQ ID NO: 979943 - RNA, 19 nt, Artificial Sequence
  Description of Artificial Sequence: Synthetic oligonucleotide
gaggaagaaccauagagac

SEQ ID NO: 979944 - RNA, 19 nt, Artificial Sequence
  Description of Artificial Sequence: Synthetic oligonucleotide
aagccuugagaucugacca

SEQ ID NO: 979945 - RNA, 19 nt, Artificial Sequence
  Description of Artificial Sequence: Synthetic oligonucleotide
aaugauaauuacacacagg

SEQ ID NO: 979946 - RNA, 19 nt, Artificial Sequence
  Description of Artificial Sequence: Synthetic oligonucleotide
aucacagcucuccaaaggg

SEQ ID NO: 979947 - RNA, 19 nt, Artificial Sequence
  Description of Artificial Sequence: Synthetic oligonucleotide
uuuaggcuccagcuaaggg

SEQ ID NO: 979948 - RNA, 19 nt, Artificial Sequence
  Description of Artificial Sequence: Synthetic oligonucleotide
ucuucaggaaugugcaagg

SEQ ID NO: 979949 - RNA, 19 nt, Artificial Sequence
  Description of Artificial Sequence: Synthetic oligonucleotide
auuaggauacuaaggaggg

SEQ ID NO: 979950 - RNA, 19 nt, Artificial Sequence
  Description of Artificial Sequence: Synthetic oligonucleotide
aaaagugcacaugcaaauc

SEQ ID NO: 979951 - RNA, 19 nt, Artificial Sequence
  Description of Artificial Sequence: Synthetic oligonucleotide
guugauuaaugauaauuac

SEQ ID NO: 979952 - RNA, 19 nt, Artificial Sequence
  Description of Artificial Sequence: Synthetic oligonucleotide
aggagugugugauccaccc

SEQ ID NO: 979953 - RNA, 19 nt, Artificial Sequence
  Description of Artificial Sequence: Synthetic oligonucleotide
agaucugaccaucuaauca

SEQ ID NO: 979954 - RNA, 19 nt, Artificial Sequence
  Description of Artificial Sequence: Synthetic oligonucleotide
aaucccaucugggaggcac

SEQ ID NO: 979955 - RNA, 19 nt, Artificial Sequence
  Description of Artificial Sequence: Synthetic oligonucleotide
ugugugauccaccccaagc

SEQ ID NO: 979956 - RNA, 19 nt, Artificial Sequence
  Description of Artificial Sequence: Synthetic oligonucleotide
aggacgauuguucccaagg

SEQ ID NO: 979957 - RNA, 19 nt, Artificial Sequence
  Description of Artificial Sequence: Synthetic oligonucleotide
ugagcaacgacucggcaca

SEQ ID NO: 979958 - RNA, 19 nt, Artificial Sequence
  Description of Artificial Sequence: Synthetic oligonucleotide
ugcucugucuguuucgagg

SEQ ID NO: 979959 - RNA, 19 nt, Artificial Sequence
  Description of Artificial Sequence: Synthetic oligonucleotide
aaagguugauuaaugauaa

SEQ ID NO: 979960 - RNA, 19 nt, Artificial Sequence
  Description of Artificial Sequence: Synthetic oligonucleotide
uaggauacuaaggaggggc

SEQ ID NO: 979961 - RNA, 19 nt, Artificial Sequence
  Description of Artificial Sequence: Synthetic oligonucleotide
aggguuugcaucuucagga

SEQ ID NO: 979962 - RNA, 19 nt, Artificial Sequence
  Description of Artificial Sequence: Synthetic oligonucleotide
aagucaggaauguaaacua

SEQ ID NO: 979963 - RNA, 19 nt, Artificial Sequence
  Description of Artificial Sequence: Synthetic oligonucleotide
aagacauucuugcucuuga

SEQ ID NO: 979964 - RNA, 19 nt, Artificial Sequence
  Description of Artificial Sequence: Synthetic oligonucleotide
ggaauguaaacuauugggg

SEQ ID NO: 979965 - RNA, 19 nt, Artificial Sequence
  Description of Artificial Sequence: Synthetic oligonucleotide
gacuccagcaugugaaagg

SEQ ID NO: 979966 - RNA, 19 nt, Artificial Sequence
  Description of Artificial Sequence: Synthetic oligonucleotide
acuacccacagcaagaaag

SEQ ID NO: 979967 - RNA, 19 nt, Artificial Sequence
  Description of Artificial Sequence: Synthetic oligonucleotide
auacaacuuuuccuugggc

SEQ ID NO: 979968 - RNA, 19 nt, Artificial Sequence
  Description of Artificial Sequence: Synthetic oligonucleotide
auagguggguuguagccac

SEQ ID NO: 979969 - RNA, 19 nt, Artificial Sequence
  Description of Artificial Sequence: Synthetic oligonucleotide
aacugggauggcaaguccc

SEQ ID NO: 979970 - RNA, 19 nt, Artificial Sequence
  Description of Artificial Sequence: Synthetic oligonucleotide
gauaucagagcugucucag

SEQ ID NO: 979971 - RNA, 19 nt, Artificial Sequence
  Description of Artificial Sequence: Synthetic oligonucleotide
cauaagagcccaaggagug

SEQ ID NO: 979972 - RNA, 19 nt, Artificial Sequence
  Description of Artificial Sequence: Synthetic oligonucleotide
gaggguuugcaucuucagg

SEQ ID NO: 979973 - RNA, 19 nt, Artificial Sequence
  Description of Artificial Sequence: Synthetic oligonucleotide
aaaucccucauuuccugca

SEQ ID NO: 979974 - RNA, 19 nt, Artificial Sequence
  Description of Artificial Sequence: Synthetic oligonucleotide
ucugcacuagcccaggcgu

SEQ ID NO: 979975 - RNA, 19 nt, Artificial Sequence
  Description of Artificial Sequence: Synthetic oligonucleotide
auccgugguuuccagaacg

SEQ ID NO: 979976 - RNA, 19 nt, Artificial Sequence
  Description of Artificial Sequence: Synthetic oligonucleotide
gagcagaggccucuaaagg

SEQ ID NO: 979977 - RNA, 19 nt, Artificial Sequence
  Description of Artificial Sequence: Synthetic oligonucleotide
uccagaacgcacaaugcac

SEQ ID NO: 979978 - RNA, 19 nt, Artificial Sequence
  Description of Artificial Sequence: Synthetic oligonucleotide
uacaguaaugaaggcaucc

SEQ ID NO: 979979 - RNA, 19 nt, Artificial Sequence
  Description of Artificial Sequence: Synthetic oligonucleotide
ugguuugaggcugacagug

SEQ ID NO: 979980 - RNA, 19 nt, Artificial Sequence
  Description of Artificial Sequence: Synthetic oligonucleotide
uccguuucugcacuagccc

SEQ ID NO: 979981 - RNA, 19 nt, Artificial Sequence
  Description of Artificial Sequence: Synthetic oligonucleotide
uuccguuucugcacuagcc

SEQ ID NO: 979982 - RNA, 19 nt, Artificial Sequence
  Description of Artificial Sequence: Synthetic oligonucleotide
cucuaaagguugauuaaug

SEQ ID NO: 979983 - RNA, 19 nt, Artificial Sequence
  Description of Artificial Sequence: Synthetic oligonucleotide
augacaucccagaaacucc

SEQ ID NO: 979984 - RNA, 19 nt, Artificial Sequence
  Description of Artificial Sequence: Synthetic oligonucleotide
accaucuaaucacagcucu

SEQ ID NO: 979985 - RNA, 19 nt, Artificial Sequence
  Description of Artificial Sequence: Synthetic oligonucleotide
gagaugaugacaucccaga

SEQ ID NO: 979986 - RNA, 19 nt, Artificial Sequence
  Description of Artificial Sequence: Synthetic oligonucleotide
cuaugugaggguuugcauc

SEQ ID NO: 979987 - RNA, 19 nt, Artificial Sequence
  Description of Artificial Sequence: Synthetic oligonucleotide
cugaagaggacgauuguuc

SEQ ID NO: 979988 - RNA, 19 nt, Artificial Sequence
  Description of Artificial Sequence: Synthetic oligonucleotide
aggagugugugguuugagg

SEQ ID NO: 979989 - RNA, 19 nt, Artificial Sequence
  Description of Artificial Sequence: Synthetic oligonucleotide
auacuaaggaggggcagcc

SEQ ID NO: 979990 - RNA, 19 nt, Artificial Sequence
  Description of Artificial Sequence: Synthetic oligonucleotide
ugccugaugaccaggagau

SEQ ID NO: 979991 - RNA, 19 nt, Artificial Sequence
  Description of Artificial Sequence: Synthetic oligonucleotide
auaucagagcugucucagc

SEQ ID NO: 979992 - RNA, 19 nt, Artificial Sequence
  Description of Artificial Sequence: Synthetic oligonucleotide
aagaggacgauuguuccca

SEQ ID NO: 979993 - RNA, 19 nt, Artificial Sequence
  Description of Artificial Sequence: Synthetic oligonucleotide
gauggcacggcagacucgg

SEQ ID NO: 979994 - RNA, 19 nt, Artificial Sequence
  Description of Artificial Sequence: Synthetic oligonucleotide
agcuaagggccacuauagc

SEQ ID NO: 979995 - RNA, 19 nt, Artificial Sequence
  Description of Artificial Sequence: Synthetic oligonucleotide
agagccuagaaaagaggcc

SEQ ID NO: 979996 - RNA, 19 nt, Artificial Sequence
  Description of Artificial Sequence: Synthetic oligonucleotide
gugugauccaccccaagcc

SEQ ID NO: 979997 - RNA, 19 nt, Artificial Sequence
  Description of Artificial Sequence: Synthetic oligonucleotide
aaaagauccgugguuucca

SEQ ID NO: 979998 - RNA, 19 nt, Artificial Sequence
  Description of Artificial Sequence: Synthetic oligonucleotide
uuuacucugccacugccua

SEQ ID NO: 979999 - RNA, 19 nt, Artificial Sequence
  Description of Artificial Sequence: Synthetic oligonucleotide
cacuugacagcacaggcug

SEQ ID NO: 980000 - RNA, 19 nt, Artificial Sequence
  Description of Artificial Sequence: Synthetic oligonucleotide
aucuuuaggcuccagcuaa

SEQ ID NO: 980001 - RNA, 19 nt, Artificial Sequence
  Description of Artificial Sequence: Synthetic oligonucleotide
ggcauaagagcccaaggag

SEQ ID NO: 980002 - RNA, 19 nt, Artificial Sequence
  Description of Artificial Sequence: Synthetic oligonucleotide
aguugcucugucuguuucg

SEQ ID NO: 980003 - RNA, 19 nt, Artificial Sequence
  Description of Artificial Sequence: Synthetic oligonucleotide
gauacuaaggaggggcagc

SEQ ID NO: 980004 - RNA, 19 nt, Artificial Sequence
  Description of Artificial Sequence: Synthetic oligonucleotide
ggagaugggagccucaggc

SEQ ID NO: 980005 - RNA, 19 nt, Artificial Sequence
  Description of Artificial Sequence: Synthetic oligonucleotide
gacugcaccaggaagccag

SEQ ID NO: 980006 - RNA, 19 nt, Artificial Sequence
  Description of Artificial Sequence: Synthetic oligonucleotide
aaaggggagggguggauau

SEQ ID NO: 980007 - RNA, 19 nt, Artificial Sequence
  Description of Artificial Sequence: Synthetic oligonucleotide
aguaaacaaaagugcacau

SEQ ID NO: 980008 - RNA, 19 nt, Artificial Sequence
  Description of Artificial Sequence: Synthetic oligonucleotide
guggguuguagccacagac

SEQ ID NO: 980009 - RNA, 19 nt, Artificial Sequence
  Description of Artificial Sequence: Synthetic oligonucleotide
guaaacaaaagugcacaug

SEQ ID NO: 980010 - RNA, 19 nt, Artificial Sequence
  Description of Artificial Sequence: Synthetic oligonucleotide
gagcaaauggcuucuucac

SEQ ID NO: 980011 - RNA, 19 nt, Artificial Sequence
  Description of Artificial Sequence: Synthetic oligonucleotide
ucuaaucacagcucuccaa

SEQ ID NO: 980012 - RNA, 19 nt, Artificial Sequence
  Description of Artificial Sequence: Synthetic oligonucleotide
ugauaauuacacacagguu

SEQ ID NO: 980013 - RNA, 19 nt, Artificial Sequence
  Description of Artificial Sequence: Synthetic oligonucleotide
ugaggguuugcaucuucag

SEQ ID NO: 980014 - RNA, 19 nt, Artificial Sequence
  Description of Artificial Sequence: Synthetic oligonucleotide
ugcggaaaagauccguggu

SEQ ID NO: 980015 - RNA, 19 nt, Artificial Sequence
  Description of Artificial Sequence: Synthetic oligonucleotide
acuaaggaggggcagccca

SEQ ID NO: 980016 - RNA, 19 nt, Artificial Sequence
  Description of Artificial Sequence: Synthetic oligonucleotide
cugccuacuacccacagca

SEQ ID NO: 980017 - RNA, 19 nt, Artificial Sequence
  Description of Artificial Sequence: Synthetic oligonucleotide
cugaccaucuaaucacagc

SEQ ID NO: 980018 - RNA, 19 nt, Artificial Sequence
  Description of Artificial Sequence: Synthetic oligonucleotide
acucggcacacacagguug

SEQ ID NO: 980019 - RNA, 19 nt, Artificial Sequence
  Description of Artificial Sequence: Synthetic oligonucleotide
ggugacuuggcagaaaccc

SEQ ID NO: 980020 - RNA, 19 nt, Artificial Sequence
  Description of Artificial Sequence: Synthetic oligonucleotide
cuuggcagaaacccagcag

SEQ ID NO: 980021 - RNA, 19 nt, Artificial Sequence
  Description of Artificial Sequence: Synthetic oligonucleotide
ggugccuugggcuuggcag

SEQ ID NO: 980022 - RNA, 19 nt, Artificial Sequence
  Description of Artificial Sequence: Synthetic oligonucleotide
gcuaagggccacuauagcc

SEQ ID NO: 980023 - RNA, 19 nt, Artificial Sequence
  Description of Artificial Sequence: Synthetic oligonucleotide
uggguuguagccacagacu

SEQ ID NO: 980024 - RNA, 19 nt, Artificial Sequence
  Description of Artificial Sequence: Synthetic oligonucleotide
aaauccuaugugagggcuc

SEQ ID NO: 980025 - RNA, 19 nt, Artificial Sequence
  Description of Artificial Sequence: Synthetic oligonucleotide
cugaugaccaggagauggg

SEQ ID NO: 980026 - RNA, 19 nt, Artificial Sequence
  Description of Artificial Sequence: Synthetic oligonucleotide
aagaaccauagagacccag

SEQ ID NO: 980027 - RNA, 19 nt, Artificial Sequence
  Description of Artificial Sequence: Synthetic oligonucleotide
uggacagaagcuagcccag

SEQ ID NO: 980028 - RNA, 19 nt, Artificial Sequence
  Description of Artificial Sequence: Synthetic oligonucleotide
aggaucagaacaggacacc

SEQ ID NO: 980029 - RNA, 19 nt, Artificial Sequence
  Description of Artificial Sequence: Synthetic oligonucleotide
cugcggaaaagauccgugg

SEQ ID NO: 980030 - RNA, 19 nt, Artificial Sequence
  Description of Artificial Sequence: Synthetic oligonucleotide
uuaggauacuaaggagggg

SEQ ID NO: 980031 - RNA, 19 nt, Artificial Sequence
  Description of Artificial Sequence: Synthetic oligonucleotide
aaggcuggacagaagcuag

SEQ ID NO: 980032 - RNA, 19 nt, Artificial Sequence
  Description of Artificial Sequence: Synthetic oligonucleotide
ccucauuuccugcagaacc

SEQ ID NO: 980033 - RNA, 19 nt, Artificial Sequence
  Description of Artificial Sequence: Synthetic oligonucleotide
ucuuuaggcuccagcuaag

SEQ ID NO: 980034 - RNA, 19 nt, Artificial Sequence
  Description of Artificial Sequence: Synthetic oligonucleotide
cugagcaacgacucggcac

SEQ ID NO: 980035 - RNA, 19 nt, Artificial Sequence
  Description of Artificial Sequence: Synthetic oligonucleotide
agauccgugguuuccagaa

SEQ ID NO: 980036 - RNA, 19 nt, Artificial Sequence
  Description of Artificial Sequence: Synthetic oligonucleotide
cuuggcaggccuagggugc

SEQ ID NO: 980037 - RNA, 19 nt, Artificial Sequence
  Description of Artificial Sequence: Synthetic oligonucleotide
uguugcacccucuggggca

SEQ ID NO: 980038 - RNA, 19 nt, Artificial Sequence
  Description of Artificial Sequence: Synthetic oligonucleotide
cugauagguggguuguagc

SEQ ID NO: 980039 - RNA, 19 nt, Artificial Sequence
  Description of Artificial Sequence: Synthetic oligonucleotide
uuugaggcugacaguggga

SEQ ID NO: 980040 - RNA, 19 nt, Artificial Sequence
  Description of Artificial Sequence: Synthetic oligonucleotide
cuaugugagggcuccuccc

SEQ ID NO: 980041 - RNA, 19 nt, Artificial Sequence
  Description of Artificial Sequence: Synthetic oligonucleotide
cagguugugguuccgcugc

SEQ ID NO: 980042 - RNA, 19 nt, Artificial Sequence
  Description of Artificial Sequence: Synthetic oligonucleotide
gauggcagaggaucagaac

SEQ ID NO: 980043 - RNA, 19 nt, Artificial Sequence
  Description of Artificial Sequence: Synthetic oligonucleotide
ucuaugugaggguuugcau

SEQ ID NO: 980044 - RNA, 19 nt, Artificial Sequence
  Description of Artificial Sequence: Synthetic oligonucleotide
acaggagugugugauccac

SEQ ID NO: 980045 - RNA, 19 nt, Artificial Sequence
  Description of Artificial Sequence: Synthetic oligonucleotide
gacgauuguucccaaggga

SEQ ID NO: 980046 - RNA, 19 nt, Artificial Sequence
  Description of Artificial Sequence: Synthetic oligonucleotide
ggagcagaggccucuaaag

SEQ ID NO: 980047 - RNA, 19 nt, Artificial Sequence
  Description of Artificial Sequence: Synthetic oligonucleotide
ggaccuaaggccccuagag

SEQ ID NO: 980048 - RNA, 19 nt, Artificial Sequence
  Description of Artificial Sequence: Synthetic oligonucleotide
gaccuaaggccccuagagc

SEQ ID NO: 980049 - RNA, 19 nt, Artificial Sequence
  Description of Artificial Sequence: Synthetic oligonucleotide
cuugggcagcuuuggaugc

SEQ ID NO: 980050 - RNA, 19 nt, Artificial Sequence
  Description of Artificial Sequence: Synthetic oligonucleotide
cuagcccaggagcagagac

SEQ ID NO: 980051 - RNA, 19 nt, Artificial Sequence
  Description of Artificial Sequence: Synthetic oligonucleotide
gaggaucagaacaggacac

SEQ ID NO: 980052 - RNA, 19 nt, Artificial Sequence
  Description of Artificial Sequence: Synthetic oligonucleotide
gggacugucauccaugcca

SEQ ID NO: 980053 - RNA, 19 nt, Artificial Sequence
  Description of Artificial Sequence: Synthetic oligonucleotide
agacauucuugcucuugag

SEQ ID NO: 980054 - RNA, 19 nt, Artificial Sequence
  Description of Artificial Sequence: Synthetic oligonucleotide
aaccauagagacccagaua

SEQ ID NO: 980055 - RNA, 19 nt, Artificial Sequence
  Description of Artificial Sequence: Synthetic oligonucleotide
cuaaucacagcucuccaaa

SEQ ID NO: 980056 - RNA, 19 nt, Artificial Sequence
  Description of Artificial Sequence: Synthetic oligonucleotide
caggugacuuggcagaaac

SEQ ID NO: 980057 - RNA, 19 nt, Artificial Sequence
  Description of Artificial Sequence: Synthetic oligonucleotide
acaaaagugcacaugcaaa

SEQ ID NO: 980058 - RNA, 19 nt, Artificial Sequence
  Description of Artificial Sequence: Synthetic oligonucleotide
uccgugguuuccagaacgc

SEQ ID NO: 980059 - RNA, 19 nt, Artificial Sequence
  Description of Artificial Sequence: Synthetic oligonucleotide
gcaagaagcagggugagug

SEQ ID NO: 980060 - RNA, 19 nt, Artificial Sequence
  Description of Artificial Sequence: Synthetic oligonucleotide
gagcccaaggagugugugg

SEQ ID NO: 980061 - RNA, 19 nt, Artificial Sequence
  Description of Artificial Sequence: Synthetic oligonucleotide
gaagauggcagaggaucag

SEQ ID NO: 980062 - RNA, 19 nt, Artificial Sequence
  Description of Artificial Sequence: Synthetic oligonucleotide
uucccaagggaagauggca

SEQ ID NO: 980063 - RNA, 19 nt, Artificial Sequence
  Description of Artificial Sequence: Synthetic oligonucleotide
gaacugggauggcaagucc

SEQ ID NO: 980064 - RNA, 19 nt, Artificial Sequence
  Description of Artificial Sequence: Synthetic oligonucleotide
uagggugcacuucuccugu

SEQ ID NO: 980065 - RNA, 19 nt, Artificial Sequence
  Description of Artificial Sequence: Synthetic oligonucleotide
cucuaauuccuggaagcag

SEQ ID NO: 980066 - RNA, 19 nt, Artificial Sequence
  Description of Artificial Sequence: Synthetic oligonucleotide
aacgcacaaugcacagagc

SEQ ID NO: 980067 - RNA, 19 nt, Artificial Sequence
  Description of Artificial Sequence: Synthetic oligonucleotide
ugaggcaguuugcaauaac

SEQ ID NO: 980068 - RNA, 19 nt, Artificial Sequence
  Description of Artificial Sequence: Synthetic oligonucleotide
ugaggcccaucucugagua

SEQ ID NO: 980069 - RNA, 19 nt, Artificial Sequence
  Description of Artificial Sequence: Synthetic oligonucleotide
aagauccgugguuuccaga

SEQ ID NO: 980070 - RNA, 19 nt, Artificial Sequence
  Description of Artificial Sequence: Synthetic oligonucleotide
cagaacgcacaaugcacag

SEQ ID NO: 980071 - RNA, 19 nt, Artificial Sequence
  Description of Artificial Sequence: Synthetic oligonucleotide
cuucucauuaggauacuaa

SEQ ID NO: 980072 - RNA, 19 nt, Artificial Sequence
  Description of Artificial Sequence: Synthetic oligonucleotide
acauagaccacaggagugu

SEQ ID NO: 980073 - RNA, 19 nt, Artificial Sequence
  Description of Artificial Sequence: Synthetic oligonucleotide
ucgggacugucauccaugc

SEQ ID NO: 980074 - RNA, 19 nt, Artificial Sequence
  Description of Artificial Sequence: Synthetic oligonucleotide
auggaacugggauggcaag

SEQ ID NO: 980075 - RNA, 19 nt, Artificial Sequence
  Description of Artificial Sequence: Synthetic oligonucleotide
ggagggguggauaucagag

SEQ ID NO: 980076 - RNA, 19 nt, Artificial Sequence
  Description of Artificial Sequence: Synthetic oligonucleotide
acaguaaugaaggcaucca

SEQ ID NO: 980077 - RNA, 19 nt, Artificial Sequence
  Description of Artificial Sequence: Synthetic oligonucleotide
gaucagaacaggacaccug

SEQ ID NO: 980078 - RNA, 19 nt, Artificial Sequence
  Description of Artificial Sequence: Synthetic oligonucleotide
acuuggcagaaacccagca

SEQ ID NO: 980079 - RNA, 19 nt, Artificial Sequence
  Description of Artificial Sequence: Synthetic oligonucleotide
gauagguggguuguagcca

SEQ ID NO: 980080 - RNA, 19 nt, Artificial Sequence
  Description of Artificial Sequence: Synthetic oligonucleotide
gguugauuaaugauaauua

SEQ ID NO: 980081 - RNA, 19 nt, Artificial Sequence
  Description of Artificial Sequence: Synthetic oligonucleotide
aagauggcagaggaucaga

SEQ ID NO: 980082 - RNA, 19 nt, Artificial Sequence
  Description of Artificial Sequence: Synthetic oligonucleotide
gaagccaggguuccucuuc

SEQ ID NO: 980083 - RNA, 19 nt, Artificial Sequence
  Description of Artificial Sequence: Synthetic oligonucleotide
gguuccgcugcucagcacc

SEQ ID NO: 980084 - RNA, 19 nt, Artificial Sequence
  Description of Artificial Sequence: Synthetic oligonucleotide
cuuuaggcuccagcuaagg

SEQ ID NO: 980085 - RNA, 19 nt, Artificial Sequence
  Description of Artificial Sequence: Synthetic oligonucleotide
gaaggcauccaccugcccu

SEQ ID NO: 980086 - RNA, 19 nt, Artificial Sequence
  Description of Artificial Sequence: Synthetic oligonucleotide
ugcucauaagugggugugg

SEQ ID NO: 980087 - RNA, 19 nt, Artificial Sequence
  Description of Artificial Sequence: Synthetic oligonucleotide
aagguugauuaaugauaau

SEQ ID NO: 980088 - RNA, 19 nt, Artificial Sequence
  Description of Artificial Sequence: Synthetic oligonucleotide
cuuccguuucugcacuagc

SEQ ID NO: 980089 - RNA, 19 nt, Artificial Sequence
  Description of Artificial Sequence: Synthetic oligonucleotide
cuaaagguugauuaaugau

SEQ ID NO: 980090 - RNA, 19 nt, Artificial Sequence
  Description of Artificial Sequence: Synthetic oligonucleotide
cuaagggccacuauagccu

SEQ ID NO: 980091 - RNA, 19 nt, Artificial Sequence
  Description of Artificial Sequence: Synthetic oligonucleotide
gauggaacugggauggcaa

SEQ ID NO: 980092 - RNA, 19 nt, Artificial Sequence
  Description of Artificial Sequence: Synthetic oligonucleotide
agcugugcucuccacagaa

SEQ ID NO: 980093 - RNA, 19 nt, Artificial Sequence
  Description of Artificial Sequence: Synthetic oligonucleotide
gaagcuagcccaggagcag

SEQ ID NO: 980094 - RNA, 19 nt, Artificial Sequence
  Description of Artificial Sequence: Synthetic oligonucleotide
ccaguaaacaaaagugcac

SEQ ID NO: 980095 - RNA, 19 nt, Artificial Sequence
  Description of Artificial Sequence: Synthetic oligonucleotide
acgauuguucccaagggaa

SEQ ID NO: 980096 - RNA, 19 nt, Artificial Sequence
  Description of Artificial Sequence: Synthetic oligonucleotide
acaaugcacagagcaaaug

SEQ ID NO: 980097 - RNA, 19 nt, Artificial Sequence
  Description of Artificial Sequence: Synthetic oligonucleotide
ucuguuucgaggccaccuu

SEQ ID NO: 980098 - RNA, 19 nt, Artificial Sequence
  Description of Artificial Sequence: Synthetic oligonucleotide
aaggagugugugguuugag

SEQ ID NO: 980099 - RNA, 19 nt, Artificial Sequence
  Description of Artificial Sequence: Synthetic oligonucleotide
cagguuuuccagaugguaa

SEQ ID NO: 980100 - RNA, 19 nt, Artificial Sequence
  Description of Artificial Sequence: Synthetic oligonucleotide
uggaccuaaggccccuaga

SEQ ID NO: 980101 - RNA, 19 nt, Artificial Sequence
  Description of Artificial Sequence: Synthetic oligonucleotide
ugcugaagaggacgauugu

SEQ ID NO: 980102 - RNA, 19 nt, Artificial Sequence
  Description of Artificial Sequence: Synthetic oligonucleotide
cucgggacugucauccaug

SEQ ID NO: 980103 - RNA, 19 nt, Artificial Sequence
  Description of Artificial Sequence: Synthetic oligonucleotide
uccugaaagccuugagauc

SEQ ID NO: 980104 - RNA, 19 nt, Artificial Sequence
  Description of Artificial Sequence: Synthetic oligonucleotide
cuggggcucuaauuccugg

SEQ ID NO: 980105 - RNA, 19 nt, Artificial Sequence
  Description of Artificial Sequence: Synthetic oligonucleotide
uuggaagcugccugaugac

SEQ ID NO: 980106 - RNA, 19 nt, Artificial Sequence
  Description of Artificial Sequence: Synthetic oligonucleotide
ucuucacccaggcgccugc

SEQ ID NO: 980107 - RNA, 19 nt, Artificial Sequence
  Description of Artificial Sequence: Synthetic oligonucleotide
aacaguugcucugucuguu

SEQ ID NO: 980108 - RNA, 19 nt, Artificial Sequence
  Description of Artificial Sequence: Synthetic oligonucleotide
ugcagaaccuggguggccu

SEQ ID NO: 980109 - RNA, 19 nt, Artificial Sequence
  Description of Artificial Sequence: Synthetic oligonucleotide
cagugggaggcucaccagc

SEQ ID NO: 980110 - RNA, 19 nt, Artificial Sequence
  Description of Artificial Sequence: Synthetic oligonucleotide
uggcacggcagacucggga

SEQ ID NO: 980111 - RNA, 19 nt, Artificial Sequence
  Description of Artificial Sequence: Synthetic oligonucleotide
cacaacuggcggcaagaag

SEQ ID NO: 980112 - RNA, 19 nt, Artificial Sequence
  Description of Artificial Sequence: Synthetic oligonucleotide
uugugguuccgcugcucag

SEQ ID NO: 980113 - RNA, 19 nt, Artificial Sequence
  Description of Artificial Sequence: Synthetic oligonucleotide
gggaagauggcagaggauc

SEQ ID NO: 980114 - RNA, 19 nt, Artificial Sequence
  Description of Artificial Sequence: Synthetic oligonucleotide
aggcguuucuugguucagc

SEQ ID NO: 980115 - RNA, 19 nt, Artificial Sequence
  Description of Artificial Sequence: Synthetic oligonucleotide
gugaguggaaaggccauug

SEQ ID NO: 980116 - RNA, 19 nt, Artificial Sequence
  Description of Artificial Sequence: Synthetic oligonucleotide
aggugacuuggcagaaacc

SEQ ID NO: 980117 - RNA, 19 nt, Artificial Sequence
  Description of Artificial Sequence: Synthetic oligonucleotide
gaaccauagagacccagau

SEQ ID NO: 980118 - RNA, 19 nt, Artificial Sequence
  Description of Artificial Sequence: Synthetic oligonucleotide
cuucaggaaugugcaaggc

SEQ ID NO: 980119 - RNA, 19 nt, Artificial Sequence
  Description of Artificial Sequence: Synthetic oligonucleotide
uagcccaggagcagagacu

SEQ ID NO: 980120 - RNA, 19 nt, Artificial Sequence
  Description of Artificial Sequence: Synthetic oligonucleotide
gagaugggagccucaggca

SEQ ID NO: 980121 - RNA, 19 nt, Artificial Sequence
  Description of Artificial Sequence: Synthetic oligonucleotide
acugcggaaaagauccgug

SEQ ID NO: 980122 - RNA, 19 nt, Artificial Sequence
  Description of Artificial Sequence: Synthetic oligonucleotide
cuaaggaggggcagcccac

SEQ ID NO: 980123 - RNA, 19 nt, Artificial Sequence
  Description of Artificial Sequence: Synthetic oligonucleotide
gaggacgauuguucccaag

SEQ ID NO: 980124 - RNA, 19 nt, Artificial Sequence
  Description of Artificial Sequence: Synthetic oligonucleotide
cuguugcacccucuggggc

SEQ ID NO: 980125 - RNA, 19 nt, Artificial Sequence
  Description of Artificial Sequence: Synthetic oligonucleotide
agaaccauagagacccaga

SEQ ID NO: 980126 - RNA, 19 nt, Artificial Sequence
  Description of Artificial Sequence: Synthetic oligonucleotide
gcugguuggaagcugccug

SEQ ID NO: 980127 - RNA, 19 nt, Artificial Sequence
  Description of Artificial Sequence: Synthetic oligonucleotide
agcccaaggaguguguggu

SEQ ID NO: 980128 - RNA, 19 nt, Artificial Sequence
  Description of Artificial Sequence: Synthetic oligonucleotide
ugguaacacaggccacucu

SEQ ID NO: 980129 - RNA, 19 nt, Artificial Sequence
  Description of Artificial Sequence: Synthetic oligonucleotide
gccacuauagccuggaccu

SEQ ID NO: 980130 - RNA, 19 nt, Artificial Sequence
  Description of Artificial Sequence: Synthetic oligonucleotide
cuggcugagcaacgacucg

SEQ ID NO: 980131 - RNA, 19 nt, Artificial Sequence
  Description of Artificial Sequence: Synthetic oligonucleotide
ugaaggcauccaccugccc

SEQ ID NO: 980132 - RNA, 19 nt, Artificial Sequence
  Description of Artificial Sequence: Synthetic oligonucleotide
uuguucccaagggaagaug

SEQ ID NO: 980133 - RNA, 19 nt, Artificial Sequence
  Description of Artificial Sequence: Synthetic oligonucleotide
cacucuaugugaggguuug

SEQ ID NO: 980134 - RNA, 19 nt, Artificial Sequence
  Description of Artificial Sequence: Synthetic oligonucleotide
gguaacacaggccacucua

SEQ ID NO: 980135 - RNA, 19 nt, Artificial Sequence
  Description of Artificial Sequence: Synthetic oligonucleotide
uuacucugccacugccuac

SEQ ID NO: 980136 - RNA, 19 nt, Artificial Sequence
  Description of Artificial Sequence: Synthetic oligonucleotide
acucuaugugaggguuugc

SEQ ID NO: 980137 - RNA, 19 nt, Artificial Sequence
  Description of Artificial Sequence: Synthetic oligonucleotide
ccuugggcagcuuuggaug

SEQ ID NO: 980138 - RNA, 19 nt, Artificial Sequence
  Description of Artificial Sequence: Synthetic oligonucleotide
gauccgugguuuccagaac

SEQ ID NO: 980139 - RNA, 19 nt, Artificial Sequence
  Description of Artificial Sequence: Synthetic oligonucleotide
cugcucauaagugggugug

SEQ ID NO: 980140 - RNA, 19 nt, Artificial Sequence
  Description of Artificial Sequence: Synthetic oligonucleotide
agggugaguggaaaggcca

SEQ ID NO: 980141 - RNA, 19 nt, Artificial Sequence
  Description of Artificial Sequence: Synthetic oligonucleotide
caauaaccacauagaccac

SEQ ID NO: 980142 - RNA, 19 nt, Artificial Sequence
  Description of Artificial Sequence: Synthetic oligonucleotide
gaccaucuaaucacagcuc

SEQ ID NO: 980143 - RNA, 19 nt, Artificial Sequence
  Description of Artificial Sequence: Synthetic oligonucleotide
ggcccgauacaacuuuucc

SEQ ID NO: 980144 - RNA, 19 nt, Artificial Sequence
  Description of Artificial Sequence: Synthetic oligonucleotide
gcuuggcaggccuagggug

SEQ ID NO: 980145 - RNA, 19 nt, Artificial Sequence
  Description of Artificial Sequence: Synthetic oligonucleotide
gcaacgacucggcacacac

SEQ ID NO: 980146 - RNA, 19 nt, Artificial Sequence
  Description of Artificial Sequence: Synthetic oligonucleotide
cauagaccacaggagugug

SEQ ID NO: 980147 - RNA, 19 nt, Artificial Sequence
  Description of Artificial Sequence: Synthetic oligonucleotide
gggcucuaauuccuggaag

SEQ ID NO: 980148 - RNA, 19 nt, Artificial Sequence
  Description of Artificial Sequence: Synthetic oligonucleotide
uaaggaggggcagcccacc

SEQ ID NO: 980149 - RNA, 19 nt, Artificial Sequence
  Description of Artificial Sequence: Synthetic oligonucleotide
acaggcuggggcucuaauu

SEQ ID NO: 980150 - RNA, 19 nt, Artificial Sequence
  Description of Artificial Sequence: Synthetic oligonucleotide
auuguucccaagggaagau

SEQ ID NO: 980151 - RNA, 19 nt, Artificial Sequence
  Description of Artificial Sequence: Synthetic oligonucleotide
ggccucuaaagguugauua

SEQ ID NO: 980152 - RNA, 19 nt, Artificial Sequence
  Description of Artificial Sequence: Synthetic oligonucleotide
caguugcucugucuguuuc

SEQ ID NO: 980153 - RNA, 19 nt, Artificial Sequence
  Description of Artificial Sequence: Synthetic oligonucleotide
gcaaauccuaugugagggc

SEQ ID NO: 980154 - RNA, 19 nt, Artificial Sequence
  Description of Artificial Sequence: Synthetic oligonucleotide
caccaggaagccaggguuc

SEQ ID NO: 980155 - RNA, 19 nt, Artificial Sequence
  Description of Artificial Sequence: Synthetic oligonucleotide
augugaaaggggaggggug

SEQ ID NO: 980156 - RNA, 19 nt, Artificial Sequence
  Description of Artificial Sequence: Synthetic oligonucleotide
cuccaaaggggaagggaca

SEQ ID NO: 980157 - RNA, 19 nt, Artificial Sequence
  Description of Artificial Sequence: Synthetic oligonucleotide
aacuggcggcaagaagcag

SEQ ID NO: 980158 - RNA, 19 nt, Artificial Sequence
  Description of Artificial Sequence: Synthetic oligonucleotide
agccagacauugcuguuua

SEQ ID NO: 980159 - RNA, 19 nt, Artificial Sequence
  Description of Artificial Sequence: Synthetic oligonucleotide
aggcuggacagaagcuagc

SEQ ID NO: 980160 - RNA, 19 nt, Artificial Sequence
  Description of Artificial Sequence: Synthetic oligonucleotide
aggauacuaaggaggggca

SEQ ID NO: 980161 - RNA, 19 nt, Artificial Sequence
  Description of Artificial Sequence: Synthetic oligonucleotide
ggggcagcccaccaggggc

SEQ ID NO: 980162 - RNA, 19 nt, Artificial Sequence
  Description of Artificial Sequence: Synthetic oligonucleotide
guggcugguuggaagcugc

SEQ ID NO: 980163 - RNA, 19 nt, Artificial Sequence
  Description of Artificial Sequence: Synthetic oligonucleotide
agaacgcacaaugcacaga

SEQ ID NO: 980164 - RNA, 19 nt, Artificial Sequence
  Description of Artificial Sequence: Synthetic oligonucleotide
agaggcaaugggguaggga

SEQ ID NO: 980165 - RNA, 19 nt, Artificial Sequence
  Description of Artificial Sequence: Synthetic oligonucleotide
ggauacuaaggaggggcag

SEQ ID NO: 980166 - RNA, 19 nt, Artificial Sequence
  Description of Artificial Sequence: Synthetic oligonucleotide
uacuaaggaggggcagccc

SEQ ID NO: 980167 - RNA, 19 nt, Artificial Sequence
  Description of Artificial Sequence: Synthetic oligonucleotide
agguggguuguagccacag

SEQ ID NO: 980168 - RNA, 19 nt, Artificial Sequence
  Description of Artificial Sequence: Synthetic oligonucleotide
ugggauggcacggcagacu

SEQ ID NO: 980169 - RNA, 19 nt, Artificial Sequence
  Description of Artificial Sequence: Synthetic oligonucleotide
ccuaugugagggcuccucc

SEQ ID NO: 980170 - RNA, 19 nt, Artificial Sequence
  Description of Artificial Sequence: Synthetic oligonucleotide
agccuagaaaagaggccag

SEQ ID NO: 980171 - RNA, 19 nt, Artificial Sequence
  Description of Artificial Sequence: Synthetic oligonucleotide
aagggccacuauagccugg

SEQ ID NO: 980172 - RNA, 19 nt, Artificial Sequence
  Description of Artificial Sequence: Synthetic oligonucleotide
uccuaugugagggcuccuc

SEQ ID NO: 980173 - RNA, 19 nt, Artificial Sequence
  Description of Artificial Sequence: Synthetic oligonucleotide
cuggaccuaaggccccuag

SEQ ID NO: 980174 - RNA, 19 nt, Artificial Sequence
  Description of Artificial Sequence: Synthetic oligonucleotide
ccacaggagugugugaucc

SEQ ID NO: 980175 - RNA, 19 nt, Artificial Sequence
  Description of Artificial Sequence: Synthetic oligonucleotide
aucugaccaucuaaucaca

SEQ ID NO: 980176 - RNA, 19 nt, Artificial Sequence
  Description of Artificial Sequence: Synthetic oligonucleotide
cauagagacccagauaaau

SEQ ID NO: 980177 - RNA, 19 nt, Artificial Sequence
  Description of Artificial Sequence: Synthetic oligonucleotide
caggagaugggagccucag

SEQ ID NO: 980178 - RNA, 19 nt, Artificial Sequence
  Description of Artificial Sequence: Synthetic oligonucleotide
gaggcccaucucugaguag

SEQ ID NO: 980179 - RNA, 19 nt, Artificial Sequence
  Description of Artificial Sequence: Synthetic oligonucleotide
cuugagaucugaccaucua

SEQ ID NO: 980180 - RNA, 19 nt, Artificial Sequence
  Description of Artificial Sequence: Synthetic oligonucleotide
cacugccuacuacccacag

SEQ ID NO: 980181 - RNA, 19 nt, Artificial Sequence
  Description of Artificial Sequence: Synthetic oligonucleotide
gggauggcacggcagacuc

SEQ ID NO: 980182 - RNA, 19 nt, Artificial Sequence
  Description of Artificial Sequence: Synthetic oligonucleotide
ggaacugggauggcaaguc

SEQ ID NO: 980183 - RNA, 19 nt, Artificial Sequence
  Description of Artificial Sequence: Synthetic oligonucleotide
cgugguuuccagaacgcac

SEQ ID NO: 980184 - RNA, 19 nt, Artificial Sequence
  Description of Artificial Sequence: Synthetic oligonucleotide
ggcacggcagacucgggac

SEQ ID NO: 980185 - RNA, 19 nt, Artificial Sequence
  Description of Artificial Sequence: Synthetic oligonucleotide
caugugaaaggggaggggu

SEQ ID NO: 980186 - RNA, 19 nt, Artificial Sequence
  Description of Artificial Sequence: Synthetic oligonucleotide
aggccccuagagcugcuca

SEQ ID NO: 980187 - RNA, 19 nt, Artificial Sequence
  Description of Artificial Sequence: Synthetic oligonucleotide
ggaagauggcagaggauca

SEQ ID NO: 980188 - RNA, 19 nt, Artificial Sequence
  Description of Artificial Sequence: Synthetic oligonucleotide
auagaccacaggagugugu

SEQ ID NO: 980189 - RNA, 19 nt, Artificial Sequence
  Description of Artificial Sequence: Synthetic oligonucleotide
ugccuacuacccacagcaa

SEQ ID NO: 980190 - RNA, 19 nt, Artificial Sequence
  Description of Artificial Sequence: Synthetic oligonucleotide
gggugcacuucuccuguag

SEQ ID NO: 980191 - RNA, 19 nt, Artificial Sequence
  Description of Artificial Sequence: Synthetic oligonucleotide
ggagugugugauccacccc

SEQ ID NO: 980192 - RNA, 19 nt, Artificial Sequence
  Description of Artificial Sequence: Synthetic oligonucleotide
uagguggguuguagccaca

SEQ ID NO: 980193 - RNA, 19 nt, Artificial Sequence
  Description of Artificial Sequence: Synthetic oligonucleotide
ugucuguuucgaggccacc

SEQ ID NO: 980194 - RNA, 19 nt, Artificial Sequence
  Description of Artificial Sequence: Synthetic oligonucleotide
ccagaacgcacaaugcaca

SEQ ID NO: 980195 - RNA, 19 nt, Artificial Sequence
  Description of Artificial Sequence: Synthetic oligonucleotide
gccagaggcaaugggguag

SEQ ID NO: 980196 - RNA, 19 nt, Artificial Sequence
  Description of Artificial Sequence: Synthetic oligonucleotide
ggugcacuucuccuguaga

SEQ ID NO: 980197 - RNA, 19 nt, Artificial Sequence
  Description of Artificial Sequence: Synthetic oligonucleotide
gcccuugcugcugaagagg

SEQ ID NO: 980198 - RNA, 19 nt, Artificial Sequence
  Description of Artificial Sequence: Synthetic oligonucleotide
ccugaaagccuugagaucu

SEQ ID NO: 980199 - RNA, 19 nt, Artificial Sequence
  Description of Artificial Sequence: Synthetic oligonucleotide
caaauccuaugugagggcu

SEQ ID NO: 980200 - RNA, 19 nt, Artificial Sequence
  Description of Artificial Sequence: Synthetic oligonucleotide
ugcacuagcccaggcguuu

SEQ ID NO: 980201 - RNA, 19 nt, Artificial Sequence
  Description of Artificial Sequence: Synthetic oligonucleotide
gagcggggauggaacuggg

SEQ ID NO: 980202 - RNA, 19 nt, Artificial Sequence
  Description of Artificial Sequence: Synthetic oligonucleotide
gguuggaagcugccugaug

SEQ ID NO: 980203 - RNA, 19 nt, Artificial Sequence
  Description of Artificial Sequence: Synthetic oligonucleotide
agcuagcccaggagcagag

SEQ ID NO: 980204 - RNA, 19 nt, Artificial Sequence
  Description of Artificial Sequence: Synthetic oligonucleotide
ugugugguuugaggcugac

SEQ ID NO: 980205 - RNA, 19 nt, Artificial Sequence
  Description of Artificial Sequence: Synthetic oligonucleotide
gggccugauagguggguug

SEQ ID NO: 980206 - RNA, 19 nt, Artificial Sequence
  Description of Artificial Sequence: Synthetic oligonucleotide
aggagcggggauggaacug

SEQ ID NO: 980207 - RNA, 19 nt, Artificial Sequence
  Description of Artificial Sequence: Synthetic oligonucleotide
ugggcccgauacaacuuuu

SEQ ID NO: 980208 - RNA, 19 nt, Artificial Sequence
  Description of Artificial Sequence: Synthetic oligonucleotide
gcgccugcccaucuuuagg

SEQ ID NO: 980209 - RNA, 19 nt, Artificial Sequence
  Description of Artificial Sequence: Synthetic oligonucleotide
ccgauacaacuuuuccuug

SEQ ID NO: 980210 - RNA, 19 nt, Artificial Sequence
  Description of Artificial Sequence: Synthetic oligonucleotide
agaggacgauuguucccaa

SEQ ID NO: 980211 - RNA, 19 nt, Artificial Sequence
  Description of Artificial Sequence: Synthetic oligonucleotide
gccuagggugcacuucucc

SEQ ID NO: 980212 - RNA, 19 nt, Artificial Sequence
  Description of Artificial Sequence: Synthetic oligonucleotide
cacggcagacucgggacug

SEQ ID NO: 980213 - RNA, 19 nt, Artificial Sequence
  Description of Artificial Sequence: Synthetic oligonucleotide
cagacucgggacugucauc

SEQ ID NO: 980214 - RNA, 19 nt, Artificial Sequence
  Description of Artificial Sequence: Synthetic oligonucleotide
uuggcaggccuagggugca

SEQ ID NO: 980215 - RNA, 19 nt, Artificial Sequence
  Description of Artificial Sequence: Synthetic oligonucleotide
gccagaacagggugccuug

SEQ ID NO: 980216 - RNA, 19 nt, Artificial Sequence
  Description of Artificial Sequence: Synthetic oligonucleotide
cacuauagccuggaccuaa

SEQ ID NO: 980217 - RNA, 19 nt, Artificial Sequence
  Description of Artificial Sequence: Synthetic oligonucleotide
ccuaaggccccuagagcug

SEQ ID NO: 980218 - RNA, 19 nt, Artificial Sequence
  Description of Artificial Sequence: Synthetic oligonucleotide
gcauaagagcccaaggagu

SEQ ID NO: 980219 - RNA, 19 nt, Artificial Sequence
  Description of Artificial Sequence: Synthetic oligonucleotide
aguuugcaauaaccacaua

SEQ ID NO: 980220 - RNA, 19 nt, Artificial Sequence
  Description of Artificial Sequence: Synthetic oligonucleotide
ccaagggaagauggcagag

SEQ ID NO: 980221 - RNA, 19 nt, Artificial Sequence
  Description of Artificial Sequence: Synthetic oligonucleotide
ccaucuaaucacagcucuc

SEQ ID NO: 980222 - RNA, 19 nt, Artificial Sequence
  Description of Artificial Sequence: Synthetic oligonucleotide
agaggccucuaaagguuga

SEQ ID NO: 980223 - RNA, 19 nt, Artificial Sequence
  Description of Artificial Sequence: Synthetic oligonucleotide
gaggagcggggauggaacu

SEQ ID NO: 980224 - RNA, 19 nt, Artificial Sequence
  Description of Artificial Sequence: Synthetic oligonucleotide
ugguuggaagcugccugau

SEQ ID NO: 980225 - RNA, 19 nt, Artificial Sequence
  Description of Artificial Sequence: Synthetic oligonucleotide
cucauaaguggguguggcu

SEQ ID NO: 980226 - RNA, 19 nt, Artificial Sequence
  Description of Artificial Sequence: Synthetic oligonucleotide
ggcguuucuugguucagcu

SEQ ID NO: 980227 - RNA, 19 nt, Artificial Sequence
  Description of Artificial Sequence: Synthetic oligonucleotide
caacgacucggcacacaca

SEQ ID NO: 980228 - RNA, 19 nt, Artificial Sequence
  Description of Artificial Sequence: Synthetic oligonucleotide
acgacucggcacacacagg

SEQ ID NO: 980229 - RNA, 19 nt, Artificial Sequence
  Description of Artificial Sequence: Synthetic oligonucleotide
gcucaccagccagacauug

SEQ ID NO: 980230 - RNA, 19 nt, Artificial Sequence
  Description of Artificial Sequence: Synthetic oligonucleotide
gacucgggacugucaucca

SEQ ID NO: 980231 - RNA, 19 nt, Artificial Sequence
  Description of Artificial Sequence: Synthetic oligonucleotide
gucuguuucgaggccaccu

SEQ ID NO: 980232 - RNA, 19 nt, Artificial Sequence
  Description of Artificial Sequence: Synthetic oligonucleotide
cacaggagugugugaucca

SEQ ID NO: 980233 - RNA, 19 nt, Artificial Sequence
  Description of Artificial Sequence: Synthetic oligonucleotide
gcggcaagaagcaggguga

SEQ ID NO: 980234 - RNA, 19 nt, Artificial Sequence
  Description of Artificial Sequence: Synthetic oligonucleotide
gaggcucaccagccagaca

SEQ ID NO: 980235 - RNA, 19 nt, Artificial Sequence
  Description of Artificial Sequence: Synthetic oligonucleotide
ggggcucuaauuccuggaa

SEQ ID NO: 980236 - RNA, 19 nt, Artificial Sequence
  Description of Artificial Sequence: Synthetic oligonucleotide
ggcacaacuggcggcaaga

SEQ ID NO: 980237 - RNA, 19 nt, Artificial Sequence
  Description of Artificial Sequence: Synthetic oligonucleotide
agugugugauccaccccaa

SEQ ID NO: 980238 - RNA, 19 nt, Artificial Sequence
  Description of Artificial Sequence: Synthetic oligonucleotide
caacaguugcucugucugu

SEQ ID NO: 980239 - RNA, 19 nt, Artificial Sequence
  Description of Artificial Sequence: Synthetic oligonucleotide
cugcagaaccuggguggcc

SEQ ID NO: 980240 - RNA, 19 nt, Artificial Sequence
  Description of Artificial Sequence: Synthetic oligonucleotide
ccagaggcaaugggguagg

SEQ ID NO: 980241 - RNA, 19 nt, Artificial Sequence
  Description of Artificial Sequence: Synthetic oligonucleotide
cccuagagcugcucauaag

SEQ ID NO: 980242 - RNA, 19 nt, Artificial Sequence
  Description of Artificial Sequence: Synthetic oligonucleotide
caggcguuucuugguucag

SEQ ID NO: 980243 - RNA, 19 nt, Artificial Sequence
  Description of Artificial Sequence: Synthetic oligonucleotide
gggagcagaggccucuaaa

SEQ ID NO: 980244 - RNA, 19 nt, Artificial Sequence
  Description of Artificial Sequence: Synthetic oligonucleotide
gcccgauacaacuuuuccu

SEQ ID NO: 980245 - RNA, 19 nt, Artificial Sequence
  Description of Artificial Sequence: Synthetic oligonucleotide
ggcugagcaacgacucggc

SEQ ID NO: 980246 - RNA, 19 nt, Artificial Sequence
  Description of Artificial Sequence: Synthetic oligonucleotide
cuggcaggccuuggugggc

SEQ ID NO: 980247 - RNA, 19 nt, Artificial Sequence
  Description of Artificial Sequence: Synthetic oligonucleotide
agcaacgacucggcacaca

SEQ ID NO: 980248 - RNA, 19 nt, Artificial Sequence
  Description of Artificial Sequence: Synthetic oligonucleotide
uggguguggcugguuggaa

SEQ ID NO: 980249 - RNA, 19 nt, Artificial Sequence
  Description of Artificial Sequence: Synthetic oligonucleotide
uccuuccguuucugcacua

SEQ ID NO: 980250 - RNA, 19 nt, Artificial Sequence
  Description of Artificial Sequence: Synthetic oligonucleotide
ggauggcacggcagacucg

SEQ ID NO: 980251 - RNA, 19 nt, Artificial Sequence
  Description of Artificial Sequence: Synthetic oligonucleotide
cccgauacaacuuuuccuu

SEQ ID NO: 980252 - RNA, 19 nt, Artificial Sequence
  Description of Artificial Sequence: Synthetic oligonucleotide
agacugcaccaggaagcca

SEQ ID NO: 980253 - RNA, 19 nt, Artificial Sequence
  Description of Artificial Sequence: Synthetic oligonucleotide
caggccuagggugcacuuc

SEQ ID NO: 980254 - RNA, 19 nt, Artificial Sequence
  Description of Artificial Sequence: Synthetic oligonucleotide
ugcccaucuuuaggcucca

SEQ ID NO: 980255 - RNA, 19 nt, Artificial Sequence
  Description of Artificial Sequence: Synthetic oligonucleotide
cugaggcccaucucugagu

SEQ ID NO: 980256 - RNA, 19 nt, Artificial Sequence
  Description of Artificial Sequence: Synthetic oligonucleotide
gcguuucuugguucagcuc

SEQ ID NO: 980257 - RNA, 19 nt, Artificial Sequence
  Description of Artificial Sequence: Synthetic oligonucleotide
gguuugcaucuucaggaau

SEQ ID NO: 980258 - RNA, 19 nt, Artificial Sequence
  Description of Artificial Sequence: Synthetic oligonucleotide
ccaggcguuucuugguuca

SEQ ID NO: 980259 - RNA, 19 nt, Artificial Sequence
  Description of Artificial Sequence: Synthetic oligonucleotide
cccaagggaagauggcaga

SEQ ID NO: 980260 - RNA, 19 nt, Artificial Sequence
  Description of Artificial Sequence: Synthetic oligonucleotide
gcagacucgggacugucau

SEQ ID NO: 980261 - RNA, 19 nt, Artificial Sequence
  Description of Artificial Sequence: Synthetic oligonucleotide
cugaagaggguuggagacu

SEQ ID NO: 980262 - RNA, 19 nt, Artificial Sequence
  Description of Artificial Sequence: Synthetic oligonucleotide
gcggggauggaacugggau

SEQ ID NO: 980263 - RNA, 19 nt, Artificial Sequence
  Description of Artificial Sequence: Synthetic oligonucleotide
agcggggauggaacuggga

SEQ ID NO: 980264 - RNA, 19 nt, Artificial Sequence
  Description of Artificial Sequence: Synthetic oligonucleotide
agggugcacuucuccugua

SEQ ID NO: 980265 - RNA, 19 nt, Artificial Sequence
  Description of Artificial Sequence: Synthetic oligonucleotide
cugaggcaguuugcaauaa

SEQ ID NO: 980266 - RNA, 19 nt, Artificial Sequence
  Description of Artificial Sequence: Synthetic oligonucleotide
cccaggcguuucuugguuc

SEQ ID NO: 980267 - RNA, 19 nt, Artificial Sequence
  Description of Artificial Sequence: Synthetic oligonucleotide
cacugcggaaaagauccgu

SEQ ID NO: 980268 - RNA, 19 nt, Artificial Sequence
  Description of Artificial Sequence: Synthetic oligonucleotide
auccuaugugagggcuccu

SEQ ID NO: 980269 - RNA, 19 nt, Artificial Sequence
  Description of Artificial Sequence: Synthetic oligonucleotide
ggaaggcaggcuggcauaa

SEQ ID NO: 980270 - RNA, 19 nt, Artificial Sequence
  Description of Artificial Sequence: Synthetic oligonucleotide
ccuagggugcacuucuccu

SEQ ID NO: 980271 - RNA, 19 nt, Artificial Sequence
  Description of Artificial Sequence: Synthetic oligonucleotide
gcggaaaagauccgugguu

SEQ ID NO: 980272 - RNA, 19 nt, Artificial Sequence
  Description of Artificial Sequence: Synthetic oligonucleotide
acggcagacucgggacugu

SEQ ID NO: 980273 - RNA, 19 nt, Artificial Sequence
  Description of Artificial Sequence: Synthetic oligonucleotide
ugcacccucuggggcaguu

SEQ ID NO: 980274 - RNA, 19 nt, Artificial Sequence
  Description of Artificial Sequence: Synthetic oligonucleotide
ccauagagacccagauaaa

SEQ ID NO: 980275 - RNA, 19 nt, Artificial Sequence
  Description of Artificial Sequence: Synthetic oligonucleotide
augugaggguuugcaucuu

SEQ ID NO: 980276 - RNA, 19 nt, Artificial Sequence
  Description of Artificial Sequence: Synthetic oligonucleotide
gcugaagaggacgauuguu

SEQ ID NO: 980277 - RNA, 19 nt, Artificial Sequence
  Description of Artificial Sequence: Synthetic oligonucleotide
ggcagacucgggacuguca

SEQ ID NO: 980278 - RNA, 19 nt, Artificial Sequence
  Description of Artificial Sequence: Synthetic oligonucleotide
gcuguggcccucccuucuc

SEQ ID NO: 980279 - RNA, 19 nt, Artificial Sequence
  Description of Artificial Sequence: Synthetic oligonucleotide
gccaggguuccucuucugu

SEQ ID NO: 980280 - RNA, 19 nt, Artificial Sequence
  Description of Artificial Sequence: Synthetic oligonucleotide
gguugugguuccgcugcuc

SEQ ID NO: 980281 - RNA, 19 nt, Artificial Sequence
  Description of Artificial Sequence: Synthetic oligonucleotide
gguggauaucagagcuguc

SEQ ID NO: 980282 - RNA, 19 nt, Artificial Sequence
  Description of Artificial Sequence: Synthetic oligonucleotide
gggcccgauacaacuuuuc

SEQ ID NO: 980283 - RNA, 19 nt, Artificial Sequence
  Description of Artificial Sequence: Synthetic oligonucleotide
gaccaggagaugggagccu

SEQ ID NO: 980284 - RNA, 19 nt, Artificial Sequence
  Description of Artificial Sequence: Synthetic oligonucleotide
cugggcccgauacaacuuu

SEQ ID NO: 980285 - RNA, 19 nt, Artificial Sequence
  Description of Artificial Sequence: Synthetic oligonucleotide
ccucuaaagguugauuaau

SEQ ID NO: 980286 - RNA, 19 nt, Artificial Sequence
  Description of Artificial Sequence: Synthetic oligonucleotide
cccugaggcaguuugcaau

SEQ ID NO: 980287 - RNA, 19 nt, Artificial Sequence
  Description of Artificial Sequence: Synthetic oligonucleotide
cgacucggcacacacaggu

SEQ ID NO: 980288 - RNA, 19 nt, Artificial Sequence
  Description of Artificial Sequence: Synthetic oligonucleotide
guguggcugguuggaagcu

SEQ ID NO: 980289 - RNA, 19 nt, Artificial Sequence
  Description of Artificial Sequence: Synthetic oligonucleotide
ccuugagaucugaccaucu

SEQ ID NO: 980290 - RNA, 19 nt, Artificial Sequence
  Description of Artificial Sequence: Synthetic oligonucleotide
cauuggcugcuguggcccu

SEQ ID NO: 980291 - RNA, 19 nt, Artificial Sequence
  Description of Artificial Sequence: Synthetic oligonucleotide
gcagaggccucuaaagguu

SEQ ID NO: 980292 - RNA, 19 nt, Artificial Sequence
  Description of Artificial Sequence: Synthetic oligonucleotide
gcccugaggcaguuugcaa

SEQ ID NO: 980293 - RNA, 19 nt, Artificial Sequence
  Description of Artificial Sequence: Synthetic oligonucleotide
gggccacuauagccuggac

SEQ ID NO: 980294 - RNA, 19 nt, Artificial Sequence
  Description of Artificial Sequence: Synthetic oligonucleotide
ccccuagagcugcucauaa

SEQ ID NO: 980295 - RNA, 19 nt, Artificial Sequence
  Description of Artificial Sequence: Synthetic oligonucleotide
ggccugauagguggguugu

SEQ ID NO: 980296 - RNA, 19 nt, Artificial Sequence
  Description of Artificial Sequence: Synthetic oligonucleotide
ggccacucuaugugagggu

SEQ ID NO: 980297 - RNA, 19 nt, Artificial Sequence
  Description of Artificial Sequence: Synthetic oligonucleotide
gcugcugaagaggacgauu

SEQ ID NO: 980298 - RNA, 19 nt, Artificial Sequence
  Description of Artificial Sequence: Synthetic oligonucleotide
cuccagcuaagggccacua

SEQ ID NO: 980299 - RNA, 19 nt, Artificial Sequence
  Description of Artificial Sequence: Synthetic oligonucleotide
gacucggcacacacagguu

SEQ ID NO: 980300 - RNA, 19 nt, Artificial Sequence
  Description of Artificial Sequence: Synthetic oligonucleotide
ccacagcaagaaagugaca

SEQ ID NO: 980301 - RNA, 19 nt, Artificial Sequence
  Description of Artificial Sequence: Synthetic oligonucleotide
gccacucuaugugaggguu

SEQ ID NO: 980302 - RNA, 19 nt, Artificial Sequence
  Description of Artificial Sequence: Synthetic oligonucleotide
cacuagcccaggcguuucu

SEQ ID NO: 980303 - RNA, 19 nt, Artificial Sequence
  Description of Artificial Sequence: Synthetic oligonucleotide
ccacugccuacuacccaca

SEQ ID NO: 980304 - RNA, 19 nt, Artificial Sequence
  Description of Artificial Sequence: Synthetic oligonucleotide
aggcgccugcccaucuuua

SEQ ID NO: 980305 - RNA, 19 nt, Artificial Sequence
  Description of Artificial Sequence: Synthetic oligonucleotide
gcacuagcccaggcguuuc

SEQ ID NO: 980306 - RNA, 19 nt, Artificial Sequence
  Description of Artificial Sequence: Synthetic oligonucleotide
cugcacuagcccaggcguu

SEQ ID NO: 980307 - RNA, 19 nt, Artificial Sequence
  Description of Artificial Sequence: Synthetic oligonucleotide
cacaggcuggggcucuaau

SEQ ID NO: 980308 - RNA, 19 nt, Artificial Sequence
  Description of Artificial Sequence: Synthetic oligonucleotide
gggugaguggaaaggccau

SEQ ID NO: 980309 - RNA, 19 nt, Artificial Sequence
  Description of Artificial Sequence: Synthetic oligonucleotide
ggccccuagagcugcucau

SEQ ID NO: 980310 - RNA, 19 nt, Artificial Sequence
  Description of Artificial Sequence: Synthetic oligonucleotide
caggcgccugcccaucuuu

SEQ ID NO: 980311 - RNA, 19 nt, Artificial Sequence
  Description of Artificial Sequence: Synthetic oligonucleotide
ggccuagggugcacuucuc

SEQ ID NO: 980312 - RNA, 19 nt, Artificial Sequence
  Description of Artificial Sequence: Synthetic oligonucleotide
gccccuagagcugcucaua

SEQ ID NO: 980313 - RNA, 19 nt, Artificial Sequence
  Description of Artificial Sequence: Synthetic oligonucleotide
cccaaggagugugugguuu

SEQ ID NO: 980314 - RNA, 19 nt, Artificial Sequence
  Description of Artificial Sequence: Synthetic oligonucleotide
gcaggccuagggugcacuu

SEQ ID NO: 980315 - RNA, 19 nt, Artificial Sequence
  Description of Artificial Sequence: Synthetic oligonucleotide
ccacucuaugugaggguuu

SEQ ID NO: 980316 - RNA, 19 nt, Artificial Sequence
  Description of Artificial Sequence: Synthetic oligonucleotide
gccugauagguggguugua

SEQ ID NO: 980317 - RNA, 19 nt, Artificial Sequence
  Description of Artificial Sequence: Synthetic oligonucleotide
ggggccugauagguggguu

SEQ ID NO: 980318 - RNA, 19 nt, Artificial Sequence
  Description of Artificial Sequence: Synthetic oligonucleotide
gggugcuguugcacccucu

SEQ ID NO: 980319 - RNA, 19 nt, Artificial Sequence
  Description of Artificial Sequence: Synthetic oligonucleotide
gggugaggacagagaugau

SEQ ID NO: 980320 - RNA, 19 nt, Artificial Sequence
  Description of Artificial Sequence: Synthetic oligonucleotide
aaacuuucgaguuaaguac

SEQ ID NO: 980321 - RNA, 19 nt, Artificial Sequence
  Description of Artificial Sequence: Synthetic oligonucleotide
ucuaauaaguuauugaugc

SEQ ID NO: 980322 - RNA, 19 nt, Artificial Sequence
  Description of Artificial Sequence: Synthetic oligonucleotide
aauaacaaucugcucaugg

SEQ ID NO: 980323 - RNA, 19 nt, Artificial Sequence
  Description of Artificial Sequence: Synthetic oligonucleotide
ugaaccuaaauauacagca

SEQ ID NO: 980324 - RNA, 19 nt, Artificial Sequence
  Description of Artificial Sequence: Synthetic oligonucleotide
caauagcuaauuuugaacg

SEQ ID NO: 980325 - RNA, 19 nt, Artificial Sequence
  Description of Artificial Sequence: Synthetic oligonucleotide
uuuagaucgagaaugcccc

SEQ ID NO: 980326 - RNA, 19 nt, Artificial Sequence
  Description of Artificial Sequence: Synthetic oligonucleotide
acauaauucauccacgcag

SEQ ID NO: 980327 - RNA, 19 nt, Artificial Sequence
  Description of Artificial Sequence: Synthetic oligonucleotide
agcaauaacaaucugcuca

SEQ ID NO: 980328 - RNA, 19 nt, Artificial Sequence
  Description of Artificial Sequence: Synthetic oligonucleotide
aagagaacgagaccacgcc

SEQ ID NO: 980329 - RNA, 19 nt, Artificial Sequence
  Description of Artificial Sequence: Synthetic oligonucleotide
aaucaacucguccaaggcg

SEQ ID NO: 980330 - RNA, 19 nt, Artificial Sequence
  Description of Artificial Sequence: Synthetic oligonucleotide
agcaaucuaaacaugauac

SEQ ID NO: 980331 - RNA, 19 nt, Artificial Sequence
  Description of Artificial Sequence: Synthetic oligonucleotide
ugugaaccuaaauauacag

SEQ ID NO: 980332 - RNA, 19 nt, Artificial Sequence
  Description of Artificial Sequence: Synthetic oligonucleotide
uagaguaagagaacgagac

SEQ ID NO: 980333 - RNA, 19 nt, Artificial Sequence
  Description of Artificial Sequence: Synthetic oligonucleotide
uuaaucaacucguccaagg

SEQ ID NO: 980334 - RNA, 19 nt, Artificial Sequence
  Description of Artificial Sequence: Synthetic oligonucleotide
uacagauauguacaaaggc

SEQ ID NO: 980335 - RNA, 19 nt, Artificial Sequence
  Description of Artificial Sequence: Synthetic oligonucleotide
aagaauuagcaauagcuaa

SEQ ID NO: 980336 - RNA, 19 nt, Artificial Sequence
  Description of Artificial Sequence: Synthetic oligonucleotide
cucgaugccauccaaaacg

SEQ ID NO: 980337 - RNA, 19 nt, Artificial Sequence
  Description of Artificial Sequence: Synthetic oligonucleotide
cuuguuuagaucgagaaug

SEQ ID NO: 980338 - RNA, 19 nt, Artificial Sequence
  Description of Artificial Sequence: Synthetic oligonucleotide
ugauaaaaucaucucagga

SEQ ID NO: 980339 - RNA, 19 nt, Artificial Sequence
  Description of Artificial Sequence: Synthetic oligonucleotide
cuaaccgugaaugugagcc

SEQ ID NO: 980340 - RNA, 19 nt, Artificial Sequence
  Description of Artificial Sequence: Synthetic oligonucleotide
aauuuugaacguggaaacc

SEQ ID NO: 980341 - RNA, 19 nt, Artificial Sequence
  Description of Artificial Sequence: Synthetic oligonucleotide
uccguuaacuccaauagcu

SEQ ID NO: 980342 - RNA, 19 nt, Artificial Sequence
  Description of Artificial Sequence: Synthetic oligonucleotide
uuucgaguuaaguacacca

SEQ ID NO: 980343 - RNA, 19 nt, Artificial Sequence
  Description of Artificial Sequence: Synthetic oligonucleotide
aaggcaauucuucugagaa

SEQ ID NO: 980344 - RNA, 19 nt, Artificial Sequence
  Description of Artificial Sequence: Synthetic oligonucleotide
uaauaaguuauugaugcug

SEQ ID NO: 980345 - RNA, 19 nt, Artificial Sequence
  Description of Artificial Sequence: Synthetic oligonucleotide
aaugugagccaguguaagg

SEQ ID NO: 980346 - RNA, 19 nt, Artificial Sequence
  Description of Artificial Sequence: Synthetic oligonucleotide
uauuuuggcugaucuaggg

SEQ ID NO: 980347 - RNA, 19 nt, Artificial Sequence
  Description of Artificial Sequence: Synthetic oligonucleotide
acacuacuggccuucacgc

SEQ ID NO: 980348 - RNA, 19 nt, Artificial Sequence
  Description of Artificial Sequence: Synthetic oligonucleotide
uuugucguccguuaacucc

SEQ ID NO: 980349 - RNA, 19 nt, Artificial Sequence
  Description of Artificial Sequence: Synthetic oligonucleotide
agacuuauugcugaggauc

SEQ ID NO: 980350 - RNA, 19 nt, Artificial Sequence
  Description of Artificial Sequence: Synthetic oligonucleotide
agaguaagagaacgagacc

SEQ ID NO: 980351 - RNA, 19 nt, Artificial Sequence
  Description of Artificial Sequence: Synthetic oligonucleotide
uuauuuuggcugaucuagg

SEQ ID NO: 980352 - RNA, 19 nt, Artificial Sequence
  Description of Artificial Sequence: Synthetic oligonucleotide
ugcacuacaccuaaccgug

SEQ ID NO: 980353 - RNA, 19 nt, Artificial Sequence
  Description of Artificial Sequence: Synthetic oligonucleotide
aauaaguuauugaugcuga

SEQ ID NO: 980354 - RNA, 19 nt, Artificial Sequence
  Description of Artificial Sequence: Synthetic oligonucleotide
caaucuaaacaugauacag

SEQ ID NO: 980355 - RNA, 19 nt, Artificial Sequence
  Description of Artificial Sequence: Synthetic oligonucleotide
uaagagaacgagaccacgc

SEQ ID NO: 980356 - RNA, 19 nt, Artificial Sequence
  Description of Artificial Sequence: Synthetic oligonucleotide
ucuagauugauuccuuuau

SEQ ID NO: 980357 - RNA, 19 nt, Artificial Sequence
  Description of Artificial Sequence: Synthetic oligonucleotide
uuuaaguaugugaaccuaa

SEQ ID NO: 980358 - RNA, 19 nt, Artificial Sequence
  Description of Artificial Sequence: Synthetic oligonucleotide
ggcaaccuuguuuagaucg

SEQ ID NO: 980359 - RNA, 19 nt, Artificial Sequence
  Description of Artificial Sequence: Synthetic oligonucleotide
ucgaaugugguucuuggac

SEQ ID NO: 980360 - RNA, 19 nt, Artificial Sequence
  Description of Artificial Sequence: Synthetic oligonucleotide
aaccuaaauauacagcauu

SEQ ID NO: 980361 - RNA, 19 nt, Artificial Sequence
  Description of Artificial Sequence: Synthetic oligonucleotide
uaaucaacucguccaaggc

SEQ ID NO: 980362 - RNA, 19 nt, Artificial Sequence
  Description of Artificial Sequence: Synthetic oligonucleotide
agugcacuacaccuaaccg

SEQ ID NO: 980363 - RNA, 19 nt, Artificial Sequence
  Description of Artificial Sequence: Synthetic oligonucleotide
uacgaaucuagaguaagag

SEQ ID NO: 980364 - RNA, 19 nt, Artificial Sequence
  Description of Artificial Sequence: Synthetic oligonucleotide
gacacaucaaaacggggcc

SEQ ID NO: 980365 - RNA, 19 nt, Artificial Sequence
  Description of Artificial Sequence: Synthetic oligonucleotide
ucgaguuaaguacaccagc

SEQ ID NO: 980366 - RNA, 19 nt, Artificial Sequence
  Description of Artificial Sequence: Synthetic oligonucleotide
uucgaguuaaguacaccag

SEQ ID NO: 980367 - RNA, 19 nt, Artificial Sequence
  Description of Artificial Sequence: Synthetic oligonucleotide
aaaccuucacacuuggcau

SEQ ID NO: 980368 - RNA, 19 nt, Artificial Sequence
  Description of Artificial Sequence: Synthetic oligonucleotide
uucaggucggauccuaucc

SEQ ID NO: 980369 - RNA, 19 nt, Artificial Sequence
  Description of Artificial Sequence: Synthetic oligonucleotide
uccuauuguagcauuggga

SEQ ID NO: 980370 - RNA, 19 nt, Artificial Sequence
  Description of Artificial Sequence: Synthetic oligonucleotide
guuuagaucgagaaugccc

SEQ ID NO: 980371 - RNA, 19 nt, Artificial Sequence
  Description of Artificial Sequence: Synthetic oligonucleotide
gaagagguccgucucacug

SEQ ID NO: 980372 - RNA, 19 nt, Artificial Sequence
  Description of Artificial Sequence: Synthetic oligonucleotide
uuguuuagaucgagaaugc

SEQ ID NO: 980373 - RNA, 19 nt, Artificial Sequence
  Description of Artificial Sequence: Synthetic oligonucleotide
uuaaguacaccagcgacac

SEQ ID NO: 980374 - RNA, 19 nt, Artificial Sequence
  Description of Artificial Sequence: Synthetic oligonucleotide
cacacauaauucauccacg

SEQ ID NO: 980375 - RNA, 19 nt, Artificial Sequence
  Description of Artificial Sequence: Synthetic oligonucleotide
aaagcguugacaaugcuuu

SEQ ID NO: 980376 - RNA, 19 nt, Artificial Sequence
  Description of Artificial Sequence: Synthetic oligonucleotide
gcagcuuaaaaucaagaag

SEQ ID NO: 980377 - RNA, 19 nt, Artificial Sequence
  Description of Artificial Sequence: Synthetic oligonucleotide
uuaaguaugugaaccuaaa

SEQ ID NO: 980378 - RNA, 19 nt, Artificial Sequence
  Description of Artificial Sequence: Synthetic oligonucleotide
ucaccagugcacuacaccu

SEQ ID NO: 980379 - RNA, 19 nt, Artificial Sequence
  Description of Artificial Sequence: Synthetic oligonucleotide
uccucugugauaaaaucau

SEQ ID NO: 980380 - RNA, 19 nt, Artificial Sequence
  Description of Artificial Sequence: Synthetic oligonucleotide
agaaguauccaacuccuau

SEQ ID NO: 980381 - RNA, 19 nt, Artificial Sequence
  Description of Artificial Sequence: Synthetic oligonucleotide
uccuauccaucgaaugugg

SEQ ID NO: 980382 - RNA, 19 nt, Artificial Sequence
  Description of Artificial Sequence: Synthetic oligonucleotide
auauguacaaaggcgccac

SEQ ID NO: 980383 - RNA, 19 nt, Artificial Sequence
  Description of Artificial Sequence: Synthetic oligonucleotide
acuuuaaguaugugaaccu

SEQ ID NO: 980384 - RNA, 19 nt, Artificial Sequence
  Description of Artificial Sequence: Synthetic oligonucleotide
ugguacuucggauaugaac

SEQ ID NO: 980385 - RNA, 19 nt, Artificial Sequence
  Description of Artificial Sequence: Synthetic oligonucleotide
uagauugauuccuuuauuu

SEQ ID NO: 980386 - RNA, 19 nt, Artificial Sequence
  Description of Artificial Sequence: Synthetic oligonucleotide
gauaugaacugugauagaa

SEQ ID NO: 980387 - RNA, 19 nt, Artificial Sequence
  Description of Artificial Sequence: Synthetic oligonucleotide
uauccaucgaaugugguuc

SEQ ID NO: 980388 - RNA, 19 nt, Artificial Sequence
  Description of Artificial Sequence: Synthetic oligonucleotide
agauauguacaaaggcgcc

SEQ ID NO: 980389 - RNA, 19 nt, Artificial Sequence
  Description of Artificial Sequence: Synthetic oligonucleotide
uugcacaaagcguugacaa

SEQ ID NO: 980390 - RNA, 19 nt, Artificial Sequence
  Description of Artificial Sequence: Synthetic oligonucleotide
aagcaaucuaaacaugaua

SEQ ID NO: 980391 - RNA, 19 nt, Artificial Sequence
  Description of Artificial Sequence: Synthetic oligonucleotide
aguguaaggcaauucuucu

SEQ ID NO: 980392 - RNA, 19 nt, Artificial Sequence
  Description of Artificial Sequence: Synthetic oligonucleotide
agauacacgucaauggguc

SEQ ID NO: 980393 - RNA, 19 nt, Artificial Sequence
  Description of Artificial Sequence: Synthetic oligonucleotide
caucgaaugugguucuugg

SEQ ID NO: 980394 - RNA, 19 nt, Artificial Sequence
  Description of Artificial Sequence: Synthetic oligonucleotide
cauuucuauacuugucccc

SEQ ID NO: 980395 - RNA, 19 nt, Artificial Sequence
  Description of Artificial Sequence: Synthetic oligonucleotide
accaaacucacgguguggc

SEQ ID NO: 980396 - RNA, 19 nt, Artificial Sequence
  Description of Artificial Sequence: Synthetic oligonucleotide
ugugaaaugucuacaugua

SEQ ID NO: 980397 - RNA, 19 nt, Artificial Sequence
  Description of Artificial Sequence: Synthetic oligonucleotide
uuuccgaacucccaguuuu

SEQ ID NO: 980398 - RNA, 19 nt, Artificial Sequence
  Description of Artificial Sequence: Synthetic oligonucleotide
aaaacggggccucuucacu

SEQ ID NO: 980399 - RNA, 19 nt, Artificial Sequence
  Description of Artificial Sequence: Synthetic oligonucleotide
acuacuggccuucacgcug

SEQ ID NO: 980400 - RNA, 19 nt, Artificial Sequence
  Description of Artificial Sequence: Synthetic oligonucleotide
aaaacguuggugaugucau

SEQ ID NO: 980401 - RNA, 19 nt, Artificial Sequence
  Description of Artificial Sequence: Synthetic oligonucleotide
aucaaaacggggccucuuc

SEQ ID NO: 980402 - RNA, 19 nt, Artificial Sequence
  Description of Artificial Sequence: Synthetic oligonucleotide
guacauaauucauccacac

SEQ ID NO: 980403 - RNA, 19 nt, Artificial Sequence
  Description of Artificial Sequence: Synthetic oligonucleotide
augcuagucuuucauucuc

SEQ ID NO: 980404 - RNA, 19 nt, Artificial Sequence
  Description of Artificial Sequence: Synthetic oligonucleotide
aauuagcaauagcuaauuu

SEQ ID NO: 980405 - RNA, 19 nt, Artificial Sequence
  Description of Artificial Sequence: Synthetic oligonucleotide
ugucacucagacauauuuc

SEQ ID NO: 980406 - RNA, 19 nt, Artificial Sequence
  Description of Artificial Sequence: Synthetic oligonucleotide
auagcuaauuuugaacgug

SEQ ID NO: 980407 - RNA, 19 nt, Artificial Sequence
  Description of Artificial Sequence: Synthetic oligonucleotide
auaauucauccacgcagag

SEQ ID NO: 980408 - RNA, 19 nt, Artificial Sequence
  Description of Artificial Sequence: Synthetic oligonucleotide
aaguagagagcugucauuu

SEQ ID NO: 980409 - RNA, 19 nt, Artificial Sequence
  Description of Artificial Sequence: Synthetic oligonucleotide
uccugauagguuacguaug

SEQ ID NO: 980410 - RNA, 19 nt, Artificial Sequence
  Description of Artificial Sequence: Synthetic oligonucleotide
acguggaaaccauccaggg

SEQ ID NO: 980411 - RNA, 19 nt, Artificial Sequence
  Description of Artificial Sequence: Synthetic oligonucleotide
accuuguuuagaucgagaa

SEQ ID NO: 980412 - RNA, 19 nt, Artificial Sequence
  Description of Artificial Sequence: Synthetic oligonucleotide
cacgcugcuacgaaucuag

SEQ ID NO: 980413 - RNA, 19 nt, Artificial Sequence
  Description of Artificial Sequence: Synthetic oligonucleotide
agagguccgucucacugac

SEQ ID NO: 980414 - RNA, 19 nt, Artificial Sequence
  Description of Artificial Sequence: Synthetic oligonucleotide
auccauaaacuuucgaguu

SEQ ID NO: 980415 - RNA, 19 nt, Artificial Sequence
  Description of Artificial Sequence: Synthetic oligonucleotide
gauauccugauagguuacg

SEQ ID NO: 980416 - RNA, 19 nt, Artificial Sequence
  Description of Artificial Sequence: Synthetic oligonucleotide
aagagguccgucucacuga

SEQ ID NO: 980417 - RNA, 19 nt, Artificial Sequence
  Description of Artificial Sequence: Synthetic oligonucleotide
acgaaucuagaguaagaga

SEQ ID NO: 980418 - RNA, 19 nt, Artificial Sequence
  Description of Artificial Sequence: Synthetic oligonucleotide
cacaaagcguugacaaugc

SEQ ID NO: 980419 - RNA, 19 nt, Artificial Sequence
  Description of Artificial Sequence: Synthetic oligonucleotide
acgaccauggccaacuguc

SEQ ID NO: 980420 - RNA, 19 nt, Artificial Sequence
  Description of Artificial Sequence: Synthetic oligonucleotide
caguguaaggcaauucuuc

SEQ ID NO: 980421 - RNA, 19 nt, Artificial Sequence
  Description of Artificial Sequence: Synthetic oligonucleotide
aguaagagaacgagaccac

SEQ ID NO: 980422 - RNA, 19 nt, Artificial Sequence
  Description of Artificial Sequence: Synthetic oligonucleotide
cuacaccuaaccgugaaug

SEQ ID NO: 980423 - RNA, 19 nt, Artificial Sequence
  Description of Artificial Sequence: Synthetic oligonucleotide
ucgccgacagguccgagag

SEQ ID NO: 980424 - RNA, 19 nt, Artificial Sequence
  Description of Artificial Sequence: Synthetic oligonucleotide
cauaauucauccacgcaga

SEQ ID NO: 980425 - RNA, 19 nt, Artificial Sequence
  Description of Artificial Sequence: Synthetic oligonucleotide
gaagaauuagcaauagcua

SEQ ID NO: 980426 - RNA, 19 nt, Artificial Sequence
  Description of Artificial Sequence: Synthetic oligonucleotide
gcaauagcuaauuuugaac

SEQ ID NO: 980427 - RNA, 19 nt, Artificial Sequence
  Description of Artificial Sequence: Synthetic oligonucleotide
uuggcaguaggcuuuccac

SEQ ID NO: 980428 - RNA, 19 nt, Artificial Sequence
  Description of Artificial Sequence: Synthetic oligonucleotide
aacuuucgaguuaaguaca

SEQ ID NO: 980429 - RNA, 19 nt, Artificial Sequence
  Description of Artificial Sequence: Synthetic oligonucleotide
ugacaagauccauaaacuu

SEQ ID NO: 980430 - RNA, 19 nt, Artificial Sequence
  Description of Artificial Sequence: Synthetic oligonucleotide
ugaaugugagccaguguaa

SEQ ID NO: 980431 - RNA, 19 nt, Artificial Sequence
  Description of Artificial Sequence: Synthetic oligonucleotide
uccaauagcugcugggcac

SEQ ID NO: 980432 - RNA, 19 nt, Artificial Sequence
  Description of Artificial Sequence: Synthetic oligonucleotide
agaggguucuaauaaguua

SEQ ID NO: 980433 - RNA, 19 nt, Artificial Sequence
  Description of Artificial Sequence: Synthetic oligonucleotide
caagauccauaaacuuucg

SEQ ID NO: 980434 - RNA, 19 nt, Artificial Sequence
  Description of Artificial Sequence: Synthetic oligonucleotide
cuauuguagcauugggaac

SEQ ID NO: 980435 - RNA, 19 nt, Artificial Sequence
  Description of Artificial Sequence: Synthetic oligonucleotide
guaagagaacgagaccacg

SEQ ID NO: 980436 - RNA, 19 nt, Artificial Sequence
  Description of Artificial Sequence: Synthetic oligonucleotide
ucgaugccauccaaaacgu

SEQ ID NO: 980437 - RNA, 19 nt, Artificial Sequence
  Description of Artificial Sequence: Synthetic oligonucleotide
accuaaauauacagcauug

SEQ ID NO: 980438 - RNA, 19 nt, Artificial Sequence
  Description of Artificial Sequence: Synthetic oligonucleotide
agggaccuaagcaggaagc

SEQ ID NO: 980439 - RNA, 19 nt, Artificial Sequence
  Description of Artificial Sequence: Synthetic oligonucleotide
aagacuuauugcugaggau

SEQ ID NO: 980440 - RNA, 19 nt, Artificial Sequence
  Description of Artificial Sequence: Synthetic oligonucleotide
ugauccguugccagagggc

SEQ ID NO: 980441 - RNA, 19 nt, Artificial Sequence
  Description of Artificial Sequence: Synthetic oligonucleotide
ucaggucggauccuaucca

SEQ ID NO: 980442 - RNA, 19 nt, Artificial Sequence
  Description of Artificial Sequence: Synthetic oligonucleotide
auagguuacguaugcuagu

SEQ ID NO: 980443 - RNA, 19 nt, Artificial Sequence
  Description of Artificial Sequence: Synthetic oligonucleotide
uguuuagaucgagaaugcc

SEQ ID NO: 980444 - RNA, 19 nt, Artificial Sequence
  Description of Artificial Sequence: Synthetic oligonucleotide
agaacgagaccacgccacg

SEQ ID NO: 980445 - RNA, 19 nt, Artificial Sequence
  Description of Artificial Sequence: Synthetic oligonucleotide
guagagagcugucauuuuc

SEQ ID NO: 980446 - RNA, 19 nt, Artificial Sequence
  Description of Artificial Sequence: Synthetic oligonucleotide
uuccaucgccgacaggucc

SEQ ID NO: 980447 - RNA, 19 nt, Artificial Sequence
  Description of Artificial Sequence: Synthetic oligonucleotide
agcgacacaucaaaacggg

SEQ ID NO: 980448 - RNA, 19 nt, Artificial Sequence
  Description of Artificial Sequence: Synthetic oligonucleotide
gauccuauccaucgaaugu

SEQ ID NO: 980449 - RNA, 19 nt, Artificial Sequence
  Description of Artificial Sequence: Synthetic oligonucleotide
gugaaccuaaauauacagc

SEQ ID NO: 980450 - RNA, 19 nt, Artificial Sequence
  Description of Artificial Sequence: Synthetic oligonucleotide
ugcuagucuuucauucucu

SEQ ID NO: 980451 - RNA, 19 nt, Artificial Sequence
  Description of Artificial Sequence: Synthetic oligonucleotide
cugaucuagggcagaagug

SEQ ID NO: 980452 - RNA, 19 nt, Artificial Sequence
  Description of Artificial Sequence: Synthetic oligonucleotide
cuucacgcugcuacgaauc

SEQ ID NO: 980453 - RNA, 19 nt, Artificial Sequence
  Description of Artificial Sequence: Synthetic oligonucleotide
uacaccuaaccgugaaugu

SEQ ID NO: 980454 - RNA, 19 nt, Artificial Sequence
  Description of Artificial Sequence: Synthetic oligonucleotide
aacgagaccacgccacgaa

SEQ ID NO: 980455 - RNA, 19 nt, Artificial Sequence
  Description of Artificial Sequence: Synthetic oligonucleotide
cugauccguugccagaggg

SEQ ID NO: 980456 - RNA, 19 nt, Artificial Sequence
  Description of Artificial Sequence: Synthetic oligonucleotide
uggcgaacugauccguugc

SEQ ID NO: 980457 - RNA, 19 nt, Artificial Sequence
  Description of Artificial Sequence: Synthetic oligonucleotide
aaucuacugggaaguagug

SEQ ID NO: 980458 - RNA, 19 nt, Artificial Sequence
  Description of Artificial Sequence: Synthetic oligonucleotide
agucgcucacuuugagugg

SEQ ID NO: 980459 - RNA, 19 nt, Artificial Sequence
  Description of Artificial Sequence: Synthetic oligonucleotide
gauauguacaaaggcgcca

SEQ ID NO: 980460 - RNA, 19 nt, Artificial Sequence
  Description of Artificial Sequence: Synthetic oligonucleotide
aucaacucguccaaggcgu

SEQ ID NO: 980461 - RNA, 19 nt, Artificial Sequence
  Description of Artificial Sequence: Synthetic oligonucleotide
gaguuaaguacaccagcga

SEQ ID NO: 980462 - RNA, 19 nt, Artificial Sequence
  Description of Artificial Sequence: Synthetic oligonucleotide
auccuauccaucgaaugug

SEQ ID NO: 980463 - RNA, 19 nt, Artificial Sequence
  Description of Artificial Sequence: Synthetic oligonucleotide
agagaacgagaccacgcca

SEQ ID NO: 980464 - RNA, 19 nt, Artificial Sequence
  Description of Artificial Sequence: Synthetic oligonucleotide
aaacucacgguguggcgaa

SEQ ID NO: 980465 - RNA, 19 nt, Artificial Sequence
  Description of Artificial Sequence: Synthetic oligonucleotide
agaauuagcaauagcuaau

SEQ ID NO: 980466 - RNA, 19 nt, Artificial Sequence
  Description of Artificial Sequence: Synthetic oligonucleotide
uauccugauagguuacgua

SEQ ID NO: 980467 - RNA, 19 nt, Artificial Sequence
  Description of Artificial Sequence: Synthetic oligonucleotide
agguccgucucacugacaa

SEQ ID NO: 980468 - RNA, 19 nt, Artificial Sequence
  Description of Artificial Sequence: Synthetic oligonucleotide
acgaagacuuauugcugag

SEQ ID NO: 980469 - RNA, 19 nt, Artificial Sequence
  Description of Artificial Sequence: Synthetic oligonucleotide
uuugaguggcucugacuga

SEQ ID NO: 980470 - RNA, 19 nt, Artificial Sequence
  Description of Artificial Sequence: Synthetic oligonucleotide
acuuucgaguuaaguacac

SEQ ID NO: 980471 - RNA, 19 nt, Artificial Sequence
  Description of Artificial Sequence: Synthetic oligonucleotide
guauccaacuccuauugua

SEQ ID NO: 980472 - RNA, 19 nt, Artificial Sequence
  Description of Artificial Sequence: Synthetic oligonucleotide
uccugauauccucugugau

SEQ ID NO: 980473 - RNA, 19 nt, Artificial Sequence
  Description of Artificial Sequence: Synthetic oligonucleotide
gagaccacgccacgaagac

SEQ ID NO: 980474 - RNA, 19 nt, Artificial Sequence
  Description of Artificial Sequence: Synthetic oligonucleotide
gguacuucggauaugaacu

SEQ ID NO: 980475 - RNA, 19 nt, Artificial Sequence
  Description of Artificial Sequence: Synthetic oligonucleotide
aguauccaacuccuauugu

SEQ ID NO: 980476 - RNA, 19 nt, Artificial Sequence
  Description of Artificial Sequence: Synthetic oligonucleotide
guacuucggauaugaacug

SEQ ID NO: 980477 - RNA, 19 nt, Artificial Sequence
  Description of Artificial Sequence: Synthetic oligonucleotide
ucguccguuaacuccaaua

SEQ ID NO: 980478 - RNA, 19 nt, Artificial Sequence
  Description of Artificial Sequence: Synthetic oligonucleotide
ugacugagggacuugucuu

SEQ ID NO: 980479 - RNA, 19 nt, Artificial Sequence
  Description of Artificial Sequence: Synthetic oligonucleotide
aaacggggccucuucacuu

SEQ ID NO: 980480 - RNA, 19 nt, Artificial Sequence
  Description of Artificial Sequence: Synthetic oligonucleotide
uacaccagcgacacaucaa

SEQ ID NO: 980481 - RNA, 19 nt, Artificial Sequence
  Description of Artificial Sequence: Synthetic oligonucleotide
uggguccuuugguacuucg

SEQ ID NO: 980482 - RNA, 19 nt, Artificial Sequence
  Description of Artificial Sequence: Synthetic oligonucleotide
uagguuacguaugcuaguc

SEQ ID NO: 980483 - RNA, 19 nt, Artificial Sequence
  Description of Artificial Sequence: Synthetic oligonucleotide
uucacgcugcuacgaaucu

SEQ ID NO: 980484 - RNA, 19 nt, Artificial Sequence
  Description of Artificial Sequence: Synthetic oligonucleotide
caggaccaaacucacggug

SEQ ID NO: 980485 - RNA, 19 nt, Artificial Sequence
  Description of Artificial Sequence: Synthetic oligonucleotide
acguaugcuagucuuucau

SEQ ID NO: 980486 - RNA, 19 nt, Artificial Sequence
  Description of Artificial Sequence: Synthetic oligonucleotide
agcgaagaauuagcaauag

SEQ ID NO: 980487 - RNA, 19 nt, Artificial Sequence
  Description of Artificial Sequence: Synthetic oligonucleotide
ggcacaaucuuuaaucaac

SEQ ID NO: 980488 - RNA, 19 nt, Artificial Sequence
  Description of Artificial Sequence: Synthetic oligonucleotide
guccguuaacuccaauagc

SEQ ID NO: 980489 - RNA, 19 nt, Artificial Sequence
  Description of Artificial Sequence: Synthetic oligonucleotide
acaccuaaccgugaaugug

SEQ ID NO: 980490 - RNA, 19 nt, Artificial Sequence
  Description of Artificial Sequence: Synthetic oligonucleotide
ugucagucgcucacuuuga

SEQ ID NO: 980491 - RNA, 19 nt, Artificial Sequence
  Description of Artificial Sequence: Synthetic oligonucleotide
acacgcgccguuuccgaac

SEQ ID NO: 980492 - RNA, 19 nt, Artificial Sequence
  Description of Artificial Sequence: Synthetic oligonucleotide
acgccacgaagacuuauug

SEQ ID NO: 980493 - RNA, 19 nt, Artificial Sequence
  Description of Artificial Sequence: Synthetic oligonucleotide
uaaccgugaaugugagcca

SEQ ID NO: 980494 - RNA, 19 nt, Artificial Sequence
  Description of Artificial Sequence: Synthetic oligonucleotide
ggauccuauccaucgaaug

SEQ ID NO: 980495 - RNA, 19 nt, Artificial Sequence
  Description of Artificial Sequence: Synthetic oligonucleotide
ccuauuguagcauugggaa

SEQ ID NO: 980496 - RNA, 19 nt, Artificial Sequence
  Description of Artificial Sequence: Synthetic oligonucleotide
cuuucgaguuaaguacacc

SEQ ID NO: 980497 - RNA, 19 nt, Artificial Sequence
  Description of Artificial Sequence: Synthetic oligonucleotide
ucggcuguuuuaccacuug

SEQ ID NO: 980498 - RNA, 19 nt, Artificial Sequence
  Description of Artificial Sequence: Synthetic oligonucleotide
gguguggcgaacugauccg

SEQ ID NO: 980499 - RNA, 19 nt, Artificial Sequence
  Description of Artificial Sequence: Synthetic oligonucleotide
cggauaugaacugugauag

SEQ ID NO: 980500 - RNA, 19 nt, Artificial Sequence
  Description of Artificial Sequence: Synthetic oligonucleotide
uacguaugcuagucuuuca

SEQ ID NO: 980501 - RNA, 19 nt, Artificial Sequence
  Description of Artificial Sequence: Synthetic oligonucleotide
caccuaaccgugaauguga

SEQ ID NO: 980502 - RNA, 19 nt, Artificial Sequence
  Description of Artificial Sequence: Synthetic oligonucleotide
gaggguucuaauaaguuau

SEQ ID NO: 980503 - RNA, 19 nt, Artificial Sequence
  Description of Artificial Sequence: Synthetic oligonucleotide
acuucggauaugaacugug

SEQ ID NO: 980504 - RNA, 19 nt, Artificial Sequence
  Description of Artificial Sequence: Synthetic oligonucleotide
aucgaaugugguucuugga

SEQ ID NO: 980505 - RNA, 19 nt, Artificial Sequence
  Description of Artificial Sequence: Synthetic oligonucleotide
caagaaguauccaacuccu

SEQ ID NO: 980506 - RNA, 19 nt, Artificial Sequence
  Description of Artificial Sequence: Synthetic oligonucleotide
cuacgaaucuagaguaaga

SEQ ID NO: 980507 - RNA, 19 nt, Artificial Sequence
  Description of Artificial Sequence: Synthetic oligonucleotide
ccugauagguuacguaugc

SEQ ID NO: 980508 - RNA, 19 nt, Artificial Sequence
  Description of Artificial Sequence: Synthetic oligonucleotide
uuccgaacucccaguuuug

SEQ ID NO: 980509 - RNA, 19 nt, Artificial Sequence
  Description of Artificial Sequence: Synthetic oligonucleotide
cucuuugucguccguuaac

SEQ ID NO: 980510 - RNA, 19 nt, Artificial Sequence
  Description of Artificial Sequence: Synthetic oligonucleotide
acugauccguugccagagg

SEQ ID NO: 980511 - RNA, 19 nt, Artificial Sequence
  Description of Artificial Sequence: Synthetic oligonucleotide
ugcuacgaaucuagaguaa

SEQ ID NO: 980512 - RNA, 19 nt, Artificial Sequence
  Description of Artificial Sequence: Synthetic oligonucleotide
accagugcacuacaccuaa

SEQ ID NO: 980513 - RNA, 19 nt, Artificial Sequence
  Description of Artificial Sequence: Synthetic oligonucleotide
caaucuacugggaaguagu

SEQ ID NO: 980514 - RNA, 19 nt, Artificial Sequence
  Description of Artificial Sequence: Synthetic oligonucleotide
gcuacgaaucuagaguaag

SEQ ID NO: 980515 - RNA, 19 nt, Artificial Sequence
  Description of Artificial Sequence: Synthetic oligonucleotide
cugggaaguagugacucug

SEQ ID NO: 980516 - RNA, 19 nt, Artificial Sequence
  Description of Artificial Sequence: Synthetic oligonucleotide
aggccccuaccccaucggc

SEQ ID NO: 980517 - RNA, 19 nt, Artificial Sequence
  Description of Artificial Sequence: Synthetic oligonucleotide
augugaaccuaaauauaca

SEQ ID NO: 980518 - RNA, 19 nt, Artificial Sequence
  Description of Artificial Sequence: Synthetic oligonucleotide
auauccugauagguuacgu

SEQ ID NO: 980519 - RNA, 19 nt, Artificial Sequence
  Description of Artificial Sequence: Synthetic oligonucleotide
gaacugauccguugccaga

SEQ ID NO: 980520 - RNA, 19 nt, Artificial Sequence
  Description of Artificial Sequence: Synthetic oligonucleotide
cguuaacuccaauagcugc

SEQ ID NO: 980521 - RNA, 19 nt, Artificial Sequence
  Description of Artificial Sequence: Synthetic oligonucleotide
cuuugucguccguuaacuc

SEQ ID NO: 980522 - RNA, 19 nt, Artificial Sequence
  Description of Artificial Sequence: Synthetic oligonucleotide
ugucuguucuccugauauc

SEQ ID NO: 980523 - RNA, 19 nt, Artificial Sequence
  Description of Artificial Sequence: Synthetic oligonucleotide
cugcuacgaaucuagagua

SEQ ID NO: 980524 - RNA, 19 nt, Artificial Sequence
  Description of Artificial Sequence: Synthetic oligonucleotide
cuucuuucgaggggcauuc

SEQ ID NO: 980525 - RNA, 19 nt, Artificial Sequence
  Description of Artificial Sequence: Synthetic oligonucleotide
cgaagaauuagcaauagcu

SEQ ID NO: 980526 - RNA, 19 nt, Artificial Sequence
  Description of Artificial Sequence: Synthetic oligonucleotide
aagcuacucagggacacua

SEQ ID NO: 980527 - RNA, 19 nt, Artificial Sequence
  Description of Artificial Sequence: Synthetic oligonucleotide
acgagaccacgccacgaag

SEQ ID NO: 980528 - RNA, 19 nt, Artificial Sequence
  Description of Artificial Sequence: Synthetic oligonucleotide
gaagaaguagagagcuguc

SEQ ID NO: 980529 - RNA, 19 nt, Artificial Sequence
  Description of Artificial Sequence: Synthetic oligonucleotide
gcaaucuaaacaugauaca

SEQ ID NO: 980530 - RNA, 19 nt, Artificial Sequence
  Description of Artificial Sequence: Synthetic oligonucleotide
cacauaauucauccacgca

SEQ ID NO: 980531 - RNA, 19 nt, Artificial Sequence
  Description of Artificial Sequence: Synthetic oligonucleotide
guggcgaacugauccguug

SEQ ID NO: 980532 - RNA, 19 nt, Artificial Sequence
  Description of Artificial Sequence: Synthetic oligonucleotide
agguuacguaugcuagucu

SEQ ID NO: 980533 - RNA, 19 nt, Artificial Sequence
  Description of Artificial Sequence: Synthetic oligonucleotide
acuacaccuaaccgugaau

SEQ ID NO: 980534 - RNA, 19 nt, Artificial Sequence
  Description of Artificial Sequence: Synthetic oligonucleotide
cuucggauaugaacuguga

SEQ ID NO: 980535 - RNA, 19 nt, Artificial Sequence
  Description of Artificial Sequence: Synthetic oligonucleotide
acaaagcguugacaaugcu

SEQ ID NO: 980536 - RNA, 19 nt, Artificial Sequence
  Description of Artificial Sequence: Synthetic oligonucleotide
uuuuaccacuugagugggu

SEQ ID NO: 980537 - RNA, 19 nt, Artificial Sequence
  Description of Artificial Sequence: Synthetic oligonucleotide
gcugcuacgaaucuagagu

SEQ ID NO: 980538 - RNA, 19 nt, Artificial Sequence
  Description of Artificial Sequence: Synthetic oligonucleotide
agagggcauuucuauacuu

SEQ ID NO: 980539 - RNA, 19 nt, Artificial Sequence
  Description of Artificial Sequence: Synthetic oligonucleotide
gguacauaauucauccaca

SEQ ID NO: 980540 - RNA, 19 nt, Artificial Sequence
  Description of Artificial Sequence: Synthetic oligonucleotide
uguucaggucggauccuau

SEQ ID NO: 980541 - RNA, 19 nt, Artificial Sequence
  Description of Artificial Sequence: Synthetic oligonucleotide
cguccguuaacuccaauag

SEQ ID NO: 980542 - RNA, 19 nt, Artificial Sequence
  Description of Artificial Sequence: Synthetic oligonucleotide
aggaccaaacucacggugu

SEQ ID NO: 980543 - RNA, 19 nt, Artificial Sequence
  Description of Artificial Sequence: Synthetic oligonucleotide
gguccuuugguacuucgga

SEQ ID NO: 980544 - RNA, 19 nt, Artificial Sequence
  Description of Artificial Sequence: Synthetic oligonucleotide
ccaccaaucuacugggaag

SEQ ID NO: 980545 - RNA, 19 nt, Artificial Sequence
  Description of Artificial Sequence: Synthetic oligonucleotide
gccacgaagacuuauugcu

SEQ ID NO: 980546 - RNA, 19 nt, Artificial Sequence
  Description of Artificial Sequence: Synthetic oligonucleotide
uuguggcaaccuuguuuag

SEQ ID NO: 980547 - RNA, 19 nt, Artificial Sequence
  Description of Artificial Sequence: Synthetic oligonucleotide
gcagcgaagaauuagcaau

SEQ ID NO: 980548 - RNA, 19 nt, Artificial Sequence
  Description of Artificial Sequence: Synthetic oligonucleotide
agccaguguaaggcaauuc

SEQ ID NO: 980549 - RNA, 19 nt, Artificial Sequence
  Description of Artificial Sequence: Synthetic oligonucleotide
gugcacuacaccuaaccgu

SEQ ID NO: 980550 - RNA, 19 nt, Artificial Sequence
  Description of Artificial Sequence: Synthetic oligonucleotide
auacacgcgccguuuccga

SEQ ID NO: 980551 - RNA, 19 nt, Artificial Sequence
  Description of Artificial Sequence: Synthetic oligonucleotide
cuuuccacguugauggggu

SEQ ID NO: 980552 - RNA, 19 nt, Artificial Sequence
  Description of Artificial Sequence: Synthetic oligonucleotide
guacaaaggcgccacauuu

SEQ ID NO: 980553 - RNA, 19 nt, Artificial Sequence
  Description of Artificial Sequence: Synthetic oligonucleotide
uucgaggggcauucugggu

SEQ ID NO: 980554 - RNA, 19 nt, Artificial Sequence
  Description of Artificial Sequence: Synthetic oligonucleotide
uaccccaucggcuguuuua

SEQ ID NO: 980555 - RNA, 19 nt, Artificial Sequence
  Description of Artificial Sequence: Synthetic oligonucleotide
gacagguccgagagcucgg

SEQ ID NO: 980556 - RNA, 19 nt, Artificial Sequence
  Description of Artificial Sequence: Synthetic oligonucleotide
guucaggucggauccuauc

SEQ ID NO: 980557 - RNA, 19 nt, Artificial Sequence
  Description of Artificial Sequence: Synthetic oligonucleotide
aucgccgacagguccgaga

SEQ ID NO: 980558 - RNA, 19 nt, Artificial Sequence
  Description of Artificial Sequence: Synthetic oligonucleotide
gaauuagcaauagcuaauu

SEQ ID NO: 980559 - RNA, 19 nt, Artificial Sequence
  Description of Artificial Sequence: Synthetic oligonucleotide
cuuuaaguaugugaaccua

SEQ ID NO: 980560 - RNA, 19 nt, Artificial Sequence
  Description of Artificial Sequence: Synthetic oligonucleotide
ucaacucguccaaggcguc

SEQ ID NO: 980561 - RNA, 19 nt, Artificial Sequence
  Description of Artificial Sequence: Synthetic oligonucleotide
cacgucaauggguccuuug

SEQ ID NO: 980562 - RNA, 19 nt, Artificial Sequence
  Description of Artificial Sequence: Synthetic oligonucleotide
cacuuugaguggcucugac

SEQ ID NO: 980563 - RNA, 19 nt, Artificial Sequence
  Description of Artificial Sequence: Synthetic oligonucleotide
agcuacucagggacacuac

SEQ ID NO: 980564 - RNA, 19 nt, Artificial Sequence
  Description of Artificial Sequence: Synthetic oligonucleotide
gcuaauuuugaacguggaa

SEQ ID NO: 980565 - RNA, 19 nt, Artificial Sequence
  Description of Artificial Sequence: Synthetic oligonucleotide
cagcaauaacaaucugcuc

SEQ ID NO: 980566 - RNA, 19 nt, Artificial Sequence
  Description of Artificial Sequence: Synthetic oligonucleotide
aggcagcuuaaaaucaaga

SEQ ID NO: 980567 - RNA, 19 nt, Artificial Sequence
  Description of Artificial Sequence: Synthetic oligonucleotide
agcuuaaaaucaagaagua

SEQ ID NO: 980568 - RNA, 19 nt, Artificial Sequence
  Description of Artificial Sequence: Synthetic oligonucleotide
gaaccgucuccugcgccgg

SEQ ID NO: 980569 - RNA, 19 nt, Artificial Sequence
  Description of Artificial Sequence: Synthetic oligonucleotide
ugcuugcacaaagcguuga

SEQ ID NO: 980570 - RNA, 19 nt, Artificial Sequence
  Description of Artificial Sequence: Synthetic oligonucleotide
gccguuuccgaacucccag

SEQ ID NO: 980571 - RNA, 19 nt, Artificial Sequence
  Description of Artificial Sequence: Synthetic oligonucleotide
cacaucaaaacggggccuc

SEQ ID NO: 980572 - RNA, 19 nt, Artificial Sequence
  Description of Artificial Sequence: Synthetic oligonucleotide
gauggggucccggcagcgg

SEQ ID NO: 980573 - RNA, 19 nt, Artificial Sequence
  Description of Artificial Sequence: Synthetic oligonucleotide
aaccgucuccugcgccggg

SEQ ID NO: 980574 - RNA, 19 nt, Artificial Sequence
  Description of Artificial Sequence: Synthetic oligonucleotide
uccacgcagaggcuccaaa

SEQ ID NO: 980575 - RNA, 19 nt, Artificial Sequence
  Description of Artificial Sequence: Synthetic oligonucleotide
uccgaacucccaguuuugu

SEQ ID NO: 980576 - RNA, 19 nt, Artificial Sequence
  Description of Artificial Sequence: Synthetic oligonucleotide
aagcguugacaaugcuuuu

SEQ ID NO: 980577 - RNA, 19 nt, Artificial Sequence
  Description of Artificial Sequence: Synthetic oligonucleotide
aacucacgguguggcgaac

SEQ ID NO: 980578 - RNA, 19 nt, Artificial Sequence
  Description of Artificial Sequence: Synthetic oligonucleotide
accuaaccgugaaugugag

SEQ ID NO: 980579 - RNA, 19 nt, Artificial Sequence
  Description of Artificial Sequence: Synthetic oligonucleotide
cugcuugcacaaagcguug

SEQ ID NO: 980580 - RNA, 19 nt, Artificial Sequence
  Description of Artificial Sequence: Synthetic oligonucleotide
gaaguagagagcugucauu

SEQ ID NO: 980581 - RNA, 19 nt, Artificial Sequence
  Description of Artificial Sequence: Synthetic oligonucleotide
uguggcgaacugauccguu

SEQ ID NO: 980582 - RNA, 19 nt, Artificial Sequence
  Description of Artificial Sequence: Synthetic oligonucleotide
cucacgguguggcgaacug

SEQ ID NO: 980583 - RNA, 19 nt, Artificial Sequence
  Description of Artificial Sequence: Synthetic oligonucleotide
cgguguggcgaacugaucc

SEQ ID NO: 980584 - RNA, 19 nt, Artificial Sequence
  Description of Artificial Sequence: Synthetic oligonucleotide
cuuccaucgccgacagguc

SEQ ID NO: 980585 - RNA, 19 nt, Artificial Sequence
  Description of Artificial Sequence: Synthetic oligonucleotide
cagcgaagaauuagcaaua

SEQ ID NO: 980586 - RNA, 19 nt, Artificial Sequence
  Description of Artificial Sequence: Synthetic oligonucleotide
gucugugaaaugucuacau

SEQ ID NO: 980587 - RNA, 19 nt, Artificial Sequence
  Description of Artificial Sequence: Synthetic oligonucleotide
cacuugagugggucuguuc

SEQ ID NO: 980588 - RNA, 19 nt, Artificial Sequence
  Description of Artificial Sequence: Synthetic oligonucleotide
gucauacacgcgccguuuc

SEQ ID NO: 980589 - RNA, 19 nt, Artificial Sequence
  Description of Artificial Sequence: Synthetic oligonucleotide
gcugacucaugcugccccg

SEQ ID NO: 980590 - RNA, 19 nt, Artificial Sequence
  Description of Artificial Sequence: Synthetic oligonucleotide
uggccaacugucuguucuc

SEQ ID NO: 980591 - RNA, 19 nt, Artificial Sequence
  Description of Artificial Sequence: Synthetic oligonucleotide
agcguugacaaugcuuuua

SEQ ID NO: 980592 - RNA, 19 nt, Artificial Sequence
  Description of Artificial Sequence: Synthetic oligonucleotide
uguuguggugccgcuccga

SEQ ID NO: 980593 - RNA, 19 nt, Artificial Sequence
  Description of Artificial Sequence: Synthetic oligonucleotide
cacguugauggggucccgg

SEQ ID NO: 980594 - RNA, 19 nt, Artificial Sequence
  Description of Artificial Sequence: Synthetic oligonucleotide
caaagcguugacaaugcuu

SEQ ID NO: 980595 - RNA, 19 nt, Artificial Sequence
  Description of Artificial Sequence: Synthetic oligonucleotide
aggucggauccuauccauc

SEQ ID NO: 980596 - RNA, 19 nt, Artificial Sequence
  Description of Artificial Sequence: Synthetic oligonucleotide
ggcgaacugauccguugcc

SEQ ID NO: 980597 - RNA, 19 nt, Artificial Sequence
  Description of Artificial Sequence: Synthetic oligonucleotide
ccacgaagacuuauugcug

SEQ ID NO: 980598 - RNA, 19 nt, Artificial Sequence
  Description of Artificial Sequence: Synthetic oligonucleotide
ccguuaacuccaauagcug

SEQ ID NO: 980599 - RNA, 19 nt, Artificial Sequence
  Description of Artificial Sequence: Synthetic oligonucleotide
caccucaccagugcacuac

SEQ ID NO: 980600 - RNA, 19 nt, Artificial Sequence
  Description of Artificial Sequence: Synthetic oligonucleotide
cgaacugauccguugccag

SEQ ID NO: 980601 - RNA, 19 nt, Artificial Sequence
  Description of Artificial Sequence: Synthetic oligonucleotide
uacacgcgccguuuccgaa

SEQ ID NO: 980602 - RNA, 19 nt, Artificial Sequence
  Description of Artificial Sequence: Synthetic oligonucleotide
aggcagcgaagaauuagca

SEQ ID NO: 980603 - RNA, 19 nt, Artificial Sequence
  Description of Artificial Sequence: Synthetic oligonucleotide
ccaaucuacugggaaguag

SEQ ID NO: 980604 - RNA, 19 nt, Artificial Sequence
  Description of Artificial Sequence: Synthetic oligonucleotide
gaacgagaccacgccacga

SEQ ID NO: 980605 - RNA, 19 nt, Artificial Sequence
  Description of Artificial Sequence: Synthetic oligonucleotide
ugauauccucugugauaaa

SEQ ID NO: 980606 - RNA, 19 nt, Artificial Sequence
  Description of Artificial Sequence: Synthetic oligonucleotide
aauagcugcugggcacaau

SEQ ID NO: 980607 - RNA, 19 nt, Artificial Sequence
  Description of Artificial Sequence: Synthetic oligonucleotide
cuguuguggugccgcuccg

SEQ ID NO: 980608 - RNA, 19 nt, Artificial Sequence
  Description of Artificial Sequence: Synthetic oligonucleotide
gccaguguaaggcaauucu

SEQ ID NO: 980609 - RNA, 19 nt, Artificial Sequence
  Description of Artificial Sequence: Synthetic oligonucleotide
cuauccaucgaaugugguu

SEQ ID NO: 980610 - RNA, 19 nt, Artificial Sequence
  Description of Artificial Sequence: Synthetic oligonucleotide
ugccgcuccgaaguuguuc

SEQ ID NO: 980611 - RNA, 19 nt, Artificial Sequence
  Description of Artificial Sequence: Synthetic oligonucleotide
gaucaaacugguacauaau

SEQ ID NO: 980612 - RNA, 19 nt, Artificial Sequence
  Description of Artificial Sequence: Synthetic oligonucleotide
ggcagcgaagaauuagcaa

SEQ ID NO: 980613 - RNA, 19 nt, Artificial Sequence
  Description of Artificial Sequence: Synthetic oligonucleotide
gguuacguaugcuagucuu

SEQ ID NO: 980614 - RNA, 19 nt, Artificial Sequence
  Description of Artificial Sequence: Synthetic oligonucleotide
ugucguccguuaacuccaa

SEQ ID NO: 980615 - RNA, 19 nt, Artificial Sequence
  Description of Artificial Sequence: Synthetic oligonucleotide
cacuacaccuaaccgugaa

SEQ ID NO: 980616 - RNA, 19 nt, Artificial Sequence
  Description of Artificial Sequence: Synthetic oligonucleotide
ccaucggcuguuuuaccac

SEQ ID NO: 980617 - RNA, 19 nt, Artificial Sequence
  Description of Artificial Sequence: Synthetic oligonucleotide
gguccgagagcucggccug

SEQ ID NO: 980618 - RNA, 19 nt, Artificial Sequence
  Description of Artificial Sequence: Synthetic oligonucleotide
ggacacauacugcacauuu

SEQ ID NO: 980619 - RNA, 19 nt, Artificial Sequence
  Description of Artificial Sequence: Synthetic oligonucleotide
gggacuugucuucuuucga

SEQ ID NO: 980620 - RNA, 19 nt, Artificial Sequence
  Description of Artificial Sequence: Synthetic oligonucleotide
ggguccuuugguacuucgg

SEQ ID NO: 980621 - RNA, 19 nt, Artificial Sequence
  Description of Artificial Sequence: Synthetic oligonucleotide
cuagauugauuccuuuauu

SEQ ID NO: 980622 - RNA, 19 nt, Artificial Sequence
  Description of Artificial Sequence: Synthetic oligonucleotide
gcgacacaucaaaacgggg

SEQ ID NO: 980623 - RNA, 19 nt, Artificial Sequence
  Description of Artificial Sequence: Synthetic oligonucleotide
gccgcuccgaaguuguuca

SEQ ID NO: 980624 - RNA, 19 nt, Artificial Sequence
  Description of Artificial Sequence: Synthetic oligonucleotide
acucacgguguggcgaacu

SEQ ID NO: 980625 - RNA, 19 nt, Artificial Sequence
  Description of Artificial Sequence: Synthetic oligonucleotide
cgaaccgucuccugcgccg

SEQ ID NO: 980626 - RNA, 19 nt, Artificial Sequence
  Description of Artificial Sequence: Synthetic oligonucleotide
aggaagcuacucagggaca

SEQ ID NO: 980627 - RNA, 19 nt, Artificial Sequence
  Description of Artificial Sequence: Synthetic oligonucleotide
gcugggacguccagucugg

SEQ ID NO: 980628 - RNA, 19 nt, Artificial Sequence
  Description of Artificial Sequence: Synthetic oligonucleotide
gcggcgaaccgucuccugc

SEQ ID NO: 980629 - RNA, 19 nt, Artificial Sequence
  Description of Artificial Sequence: Synthetic oligonucleotide
ugggacguccagucugguu

SEQ ID NO: 980630 - RNA, 19 nt, Artificial Sequence
  Description of Artificial Sequence: Synthetic oligonucleotide
auggguccuuugguacuuc

SEQ ID NO: 980631 - RNA, 19 nt, Artificial Sequence
  Description of Artificial Sequence: Synthetic oligonucleotide
ucacgcugcuacgaaucua

SEQ ID NO: 980632 - RNA, 19 nt, Artificial Sequence
  Description of Artificial Sequence: Synthetic oligonucleotide
cgcugcuacgaaucuagag

SEQ ID NO: 980633 - RNA, 19 nt, Artificial Sequence
  Description of Artificial Sequence: Synthetic oligonucleotide
gggacguccagucugguuu

SEQ ID NO: 980634 - RNA, 19 nt, Artificial Sequence
  Description of Artificial Sequence: Synthetic oligonucleotide
agaccacgccacgaagacu

SEQ ID NO: 980635 - RNA, 19 nt, Artificial Sequence
  Description of Artificial Sequence: Synthetic oligonucleotide
caccaaucuacugggaagu

SEQ ID NO: 980636 - RNA, 19 nt, Artificial Sequence
  Description of Artificial Sequence: Synthetic oligonucleotide
gacguccagucugguuucc

SEQ ID NO: 980637 - RNA, 19 nt, Artificial Sequence
  Description of Artificial Sequence: Synthetic oligonucleotide
ccgaacucccaguuuugug

SEQ ID NO: 980638 - RNA, 19 nt, Artificial Sequence
  Description of Artificial Sequence: Synthetic oligonucleotide
uucuuucgaggggcauucu

SEQ ID NO: 980639 - RNA, 19 nt, Artificial Sequence
  Description of Artificial Sequence: Synthetic oligonucleotide
cgccacgaagacuuauugc

SEQ ID NO: 980640 - RNA, 19 nt, Artificial Sequence
  Description of Artificial Sequence: Synthetic oligonucleotide
aggcgucuuccaucgccga

SEQ ID NO: 980641 - RNA, 19 nt, Artificial Sequence
  Description of Artificial Sequence: Synthetic oligonucleotide
cagaggguucuaauaaguu

SEQ ID NO: 980642 - RNA, 19 nt, Artificial Sequence
  Description of Artificial Sequence: Synthetic oligonucleotide
aggguucuaauaaguuauu

SEQ ID NO: 980643 - RNA, 19 nt, Artificial Sequence
  Description of Artificial Sequence: Synthetic oligonucleotide
acgguguggcgaacugauc

SEQ ID NO: 980644 - RNA, 19 nt, Artificial Sequence
  Description of Artificial Sequence: Synthetic oligonucleotide
gcuacucagggacacuacu

SEQ ID NO: 980645 - RNA, 19 nt, Artificial Sequence
  Description of Artificial Sequence: Synthetic oligonucleotide
gcuuggaugcuguggauau

SEQ ID NO: 980646 - RNA, 19 nt, Artificial Sequence
  Description of Artificial Sequence: Synthetic oligonucleotide
caccagugcacuacaccua

SEQ ID NO: 980647 - RNA, 19 nt, Artificial Sequence
  Description of Artificial Sequence: Synthetic oligonucleotide
ccagaggguucuaauaagu

SEQ ID NO: 980648 - RNA, 19 nt, Artificial Sequence
  Description of Artificial Sequence: Synthetic oligonucleotide
ggcgucuuccaucgccgac

SEQ ID NO: 980649 - RNA, 19 nt, Artificial Sequence
  Description of Artificial Sequence: Synthetic oligonucleotide
ggcgaaccgucuccugcgc

SEQ ID NO: 980650 - RNA, 19 nt, Artificial Sequence
  Description of Artificial Sequence: Synthetic oligonucleotide
gaagcuacucagggacacu

SEQ ID NO: 980651 - RNA, 19 nt, Artificial Sequence
  Description of Artificial Sequence: Synthetic oligonucleotide
ccgugaaugugagccagug

SEQ ID NO: 980652 - RNA, 19 nt, Artificial Sequence
  Description of Artificial Sequence: Synthetic oligonucleotide
guuuccgaacucccaguuu

SEQ ID NO: 980653 - RNA, 19 nt, Artificial Sequence
  Description of Artificial Sequence: Synthetic oligonucleotide
uccaucgaaugugguucuu

SEQ ID NO: 980654 - RNA, 19 nt, Artificial Sequence
  Description of Artificial Sequence: Synthetic oligonucleotide
aucggcuguuuuaccacuu

SEQ ID NO: 980655 - RNA, 19 nt, Artificial Sequence
  Description of Artificial Sequence: Synthetic oligonucleotide
accgugaaugugagccagu

SEQ ID NO: 980656 - RNA, 19 nt, Artificial Sequence
  Description of Artificial Sequence: Synthetic oligonucleotide
gcgaaccgucuccugcgcc

SEQ ID NO: 980657 - RNA, 19 nt, Artificial Sequence
  Description of Artificial Sequence: Synthetic oligonucleotide
acgcgccguuuccgaacuc

SEQ ID NO: 980658 - RNA, 19 nt, Artificial Sequence
  Description of Artificial Sequence: Synthetic oligonucleotide
gcgucuuccaucgccgaca

SEQ ID NO: 980659 - RNA, 19 nt, Artificial Sequence
  Description of Artificial Sequence: Synthetic oligonucleotide
ccuaagcaggaagcuacuc

SEQ ID NO: 980660 - RNA, 19 nt, Artificial Sequence
  Description of Artificial Sequence: Synthetic oligonucleotide
ggacacuacuggccuucac

SEQ ID NO: 980661 - RNA, 19 nt, Artificial Sequence
  Description of Artificial Sequence: Synthetic oligonucleotide
gcgaacugauccguugcca

SEQ ID NO: 980662 - RNA, 19 nt, Artificial Sequence
  Description of Artificial Sequence: Synthetic oligonucleotide
cugauagguuacguaugcu

SEQ ID NO: 980663 - RNA, 19 nt, Artificial Sequence
  Description of Artificial Sequence: Synthetic oligonucleotide
caggucggauccuauccau

SEQ ID NO: 980664 - RNA, 19 nt, Artificial Sequence
  Description of Artificial Sequence: Synthetic oligonucleotide
guuuuguggcaaccuuguu

SEQ ID NO: 980665 - RNA, 19 nt, Artificial Sequence
  Description of Artificial Sequence: Synthetic oligonucleotide
cgcuccgaaguuguucagg

SEQ ID NO: 980666 - RNA, 19 nt, Artificial Sequence
  Description of Artificial Sequence: Synthetic oligonucleotide
cacgaccauggccaacugu

SEQ ID NO: 980667 - RNA, 19 nt, Artificial Sequence
  Description of Artificial Sequence: Synthetic oligonucleotide
ccuuugguacuucggauau

SEQ ID NO: 980668 - RNA, 19 nt, Artificial Sequence
  Description of Artificial Sequence: Synthetic oligonucleotide
cacgccacgaagacuuauu

SEQ ID NO: 980669 - RNA, 19 nt, Artificial Sequence
  Description of Artificial Sequence: Synthetic oligonucleotide
gcuagucuuucauucucuu

SEQ ID NO: 980670 - RNA, 19 nt, Artificial Sequence
  Description of Artificial Sequence: Synthetic oligonucleotide
acgcugcuacgaaucuaga

SEQ ID NO: 980671 - RNA, 19 nt, Artificial Sequence
  Description of Artificial Sequence: Synthetic oligonucleotide
ccacgcagaggcuccaaaa

SEQ ID NO: 980672 - RNA, 19 nt, Artificial Sequence
  Description of Artificial Sequence: Synthetic oligonucleotide
ccuuguuuagaucgagaau

SEQ ID NO: 980673 - RNA, 19 nt, Artificial Sequence
  Description of Artificial Sequence: Synthetic oligonucleotide
guguggcgaacugauccgu

SEQ ID NO: 980674 - RNA, 19 nt, Artificial Sequence
  Description of Artificial Sequence: Synthetic oligonucleotide
gcgccguuuccgaacuccc

SEQ ID NO: 980675 - RNA, 19 nt, Artificial Sequence
  Description of Artificial Sequence: Synthetic oligonucleotide
gagguccgucucacugaca

SEQ ID NO: 980676 - RNA, 19 nt, Artificial Sequence
  Description of Artificial Sequence: Synthetic oligonucleotide
gccuucacgcugcuacgaa

SEQ ID NO: 980677 - RNA, 19 nt, Artificial Sequence
  Description of Artificial Sequence: Synthetic oligonucleotide
cacgcgccguuuccgaacu

SEQ ID NO: 980678 - RNA, 19 nt, Artificial Sequence
  Description of Artificial Sequence: Synthetic oligonucleotide
caauagcugcugggcacaa

SEQ ID NO: 980679 - RNA, 19 nt, Artificial Sequence
  Description of Artificial Sequence: Synthetic oligonucleotide
ggccuucacgcugcuacga

SEQ ID NO: 980680 - RNA, 19 nt, Artificial Sequence
  Description of Artificial Sequence: Synthetic oligonucleotide
caucgccgacagguccgag

SEQ ID NO: 980681 - RNA, 19 nt, Artificial Sequence
  Description of Artificial Sequence: Synthetic oligonucleotide
ccaguguaaggcaauucuu

SEQ ID NO: 980682 - RNA, 19 nt, Artificial Sequence
  Description of Artificial Sequence: Synthetic oligonucleotide
gagccaguguaaggcaauu

SEQ ID NO: 980683 - RNA, 19 nt, Artificial Sequence
  Description of Artificial Sequence: Synthetic oligonucleotide
gguccgucucacugacaaa

SEQ ID NO: 980684 - RNA, 19 nt, Artificial Sequence
  Description of Artificial Sequence: Synthetic oligonucleotide
ccuauccaucgaauguggu

SEQ ID NO: 980685 - RNA, 19 nt, Artificial Sequence
  Description of Artificial Sequence: Synthetic oligonucleotide
ccgcuccgaaguuguucag

SEQ ID NO: 980686 - RNA, 19 nt, Artificial Sequence
  Description of Artificial Sequence: Synthetic oligonucleotide
caucagggaagggcagagu

SEQ ID NO: 980687 - RNA, 19 nt, Artificial Sequence
  Description of Artificial Sequence: Synthetic oligonucleotide
cggcuguuuuaccacuuga

SEQ ID NO: 980688 - RNA, 19 nt, Artificial Sequence
  Description of Artificial Sequence: Synthetic oligonucleotide
cuccugcgccggguccacc

SEQ ID NO: 980689 - RNA, 19 nt, Artificial Sequence
  Description of Artificial Sequence: Synthetic oligonucleotide
ccacguugauggggucccg

SEQ ID NO: 980690 - RNA, 19 nt, Artificial Sequence
  Description of Artificial Sequence: Synthetic oligonucleotide
gucguccguuaacuccaau

SEQ ID NO: 980691 - RNA, 19 nt, Artificial Sequence
  Description of Artificial Sequence: Synthetic oligonucleotide
ccgacagguccgagagcuc

SEQ ID NO: 980692 - RNA, 19 nt, Artificial Sequence
  Description of Artificial Sequence: Synthetic oligonucleotide
ggccccuaccccaucggcu

SEQ ID NO: 980693 - RNA, 19 nt, Artificial Sequence
  Description of Artificial Sequence: Synthetic oligonucleotide
gcgccggguccaccagcag

SEQ ID NO: 980694 - RNA, 19 nt, Artificial Sequence
  Description of Artificial Sequence: Synthetic oligonucleotide
ccguuuccgaacucccagu

SEQ ID NO: 980695 - RNA, 19 nt, Artificial Sequence
  Description of Artificial Sequence: Synthetic oligonucleotide
guggugccgcuccgaaguu

SEQ ID NO: 980696 - RNA, 19 nt, Artificial Sequence
  Description of Artificial Sequence: Synthetic oligonucleotide
cuaccccaucggcuguuuu

SEQ ID NO: 980697 - RNA, 19 nt, Artificial Sequence
  Description of Artificial Sequence: Synthetic oligonucleotide
cgccguuuccgaacuccca

SEQ ID NO: 980698 - RNA, 19 nt, Artificial Sequence
  Description of Artificial Sequence: Synthetic oligonucleotide
cggauccuauccaucgaau

SEQ ID NO: 980699 - RNA, 19 nt, Artificial Sequence
  Description of Artificial Sequence: Synthetic oligonucleotide
cugggacguccagucuggu

SEQ ID NO: 980700 - RNA, 19 nt, Artificial Sequence
  Description of Artificial Sequence: Synthetic oligonucleotide
ccaucgccgacagguccga

SEQ ID NO: 980701 - RNA, 19 nt, Artificial Sequence
  Description of Artificial Sequence: Synthetic oligonucleotide
gccggccgcugcugacuca

SEQ ID NO: 980702 - RNA, 19 nt, Artificial Sequence
  Description of Artificial Sequence: Synthetic oligonucleotide
cgaugccauccaaaacguu

SEQ ID NO: 980703 - RNA, 19 nt, Artificial Sequence
  Description of Artificial Sequence: Synthetic oligonucleotide
ccacgccacgaagacuuau

SEQ ID NO: 980704 - RNA, 19 nt, Artificial Sequence
  Description of Artificial Sequence: Synthetic oligonucleotide
gcgccggccgcugcugacu

SEQ ID NO: 980705 - RNA, 19 nt, Artificial Sequence
  Description of Artificial Sequence: Synthetic oligonucleotide
ccggccgcugcugacucau

SEQ ID NO: 980706 - RNA, 19 nt, Artificial Sequence
  Description of Artificial Sequence: Synthetic oligonucleotide
gugccgcuccgaaguuguu

SEQ ID NO: 980707 - RNA, 19 nt, Artificial Sequence
  Description of Artificial Sequence: Synthetic oligonucleotide
ccuaccccaucggcuguuu

SEQ ID NO: 980708 - RNA, 19 nt, Artificial Sequence
  Description of Artificial Sequence: Synthetic oligonucleotide
ccggguccaccagcaggcu

SEQ ID NO: 980709 - RNA, 19 nt, Artificial Sequence
  Description of Artificial Sequence: Synthetic oligonucleotide
cggcggcgaaccgucuccu

SEQ ID NO: 980710 - RNA, 19 nt, Artificial Sequence
  Description of Artificial Sequence: Synthetic oligonucleotide
uucuaauaaauuauuagcg

SEQ ID NO: 980711 - RNA, 19 nt, Artificial Sequence
  Description of Artificial Sequence: Synthetic oligonucleotide
acucaaaccgaauagcugc

SEQ ID NO: 980712 - RNA, 19 nt, Artificial Sequence
  Description of Artificial Sequence: Synthetic oligonucleotide
uguguguucaaucuuguag

SEQ ID NO: 980713 - RNA, 19 nt, Artificial Sequence
  Description of Artificial Sequence: Synthetic oligonucleotide
agaaacucugcauauuugg

SEQ ID NO: 980714 - RNA, 19 nt, Artificial Sequence
  Description of Artificial Sequence: Synthetic oligonucleotide
aagagaguccgcuugacca

SEQ ID NO: 980715 - RNA, 19 nt, Artificial Sequence
  Description of Artificial Sequence: Synthetic oligonucleotide
uguacaugagcccgaaggg

SEQ ID NO: 980716 - RNA, 19 nt, Artificial Sequence
  Description of Artificial Sequence: Synthetic oligonucleotide
uaaauuauuagcguuuugu

SEQ ID NO: 980717 - RNA, 19 nt, Artificial Sequence
  Description of Artificial Sequence: Synthetic oligonucleotide
uuggagauuccauugauga

SEQ ID NO: 980718 - RNA, 19 nt, Artificial Sequence
  Description of Artificial Sequence: Synthetic oligonucleotide
uauuugaaguguccgaagc

SEQ ID NO: 980719 - RNA, 19 nt, Artificial Sequence
  Description of Artificial Sequence: Synthetic oligonucleotide
gaugccuacagagaggacg

SEQ ID NO: 980720 - RNA, 19 nt, Artificial Sequence
  Description of Artificial Sequence: Synthetic oligonucleotide
aaaccgaauagcugccucg

SEQ ID NO: 980721 - RNA, 19 nt, Artificial Sequence
  Description of Artificial Sequence: Synthetic oligonucleotide
uuucaaguuggcaauggug

SEQ ID NO: 980722 - RNA, 19 nt, Artificial Sequence
  Description of Artificial Sequence: Synthetic oligonucleotide
aauuucugugccuuguggu

SEQ ID NO: 980723 - RNA, 19 nt, Artificial Sequence
  Description of Artificial Sequence: Synthetic oligonucleotide
gaacucguaggccugaugc

SEQ ID NO: 980724 - RNA, 19 nt, Artificial Sequence
  Description of Artificial Sequence: Synthetic oligonucleotide
uaccgauaaaugcugaggc

SEQ ID NO: 980725 - RNA, 19 nt, Artificial Sequence
  Description of Artificial Sequence: Synthetic oligonucleotide
uuaaugaaagcaggggacg

SEQ ID NO: 980726 - RNA, 19 nt, Artificial Sequence
  Description of Artificial Sequence: Synthetic oligonucleotide
ugaacauagacgugggagc

SEQ ID NO: 980727 - RNA, 19 nt, Artificial Sequence
  Description of Artificial Sequence: Synthetic oligonucleotide
aacucguaggccugaugcc

SEQ ID NO: 980728 - RNA, 19 nt, Artificial Sequence
  Description of Artificial Sequence: Synthetic oligonucleotide
uucgaagaaggcagaauag

SEQ ID NO: 980729 - RNA, 19 nt, Artificial Sequence
  Description of Artificial Sequence: Synthetic oligonucleotide
aaguguccgaagcagacgu

SEQ ID NO: 980730 - RNA, 19 nt, Artificial Sequence
  Description of Artificial Sequence: Synthetic oligonucleotide
gaagaaagcgccguugucc

SEQ ID NO: 980731 - RNA, 19 nt, Artificial Sequence
  Description of Artificial Sequence: Synthetic oligonucleotide
agacgcacaucauccaagc

SEQ ID NO: 980732 - RNA, 19 nt, Artificial Sequence
  Description of Artificial Sequence: Synthetic oligonucleotide
cauugaugaagagaguccg

SEQ ID NO: 980733 - RNA, 19 nt, Artificial Sequence
  Description of Artificial Sequence: Synthetic oligonucleotide
cuuguagcgcaucuuagag

SEQ ID NO: 980734 - RNA, 19 nt, Artificial Sequence
  Description of Artificial Sequence: Synthetic oligonucleotide
caacacgaugccuacagag

SEQ ID NO: 980735 - RNA, 19 nt, Artificial Sequence
  Description of Artificial Sequence: Synthetic oligonucleotide
uacaugagcccgaagggca

SEQ ID NO: 980736 - RNA, 19 nt, Artificial Sequence
  Description of Artificial Sequence: Synthetic oligonucleotide
uggcguuaccgauaaaugc

SEQ ID NO: 980737 - RNA, 19 nt, Artificial Sequence
  Description of Artificial Sequence: Synthetic oligonucleotide
gugaacauagacgugggag

SEQ ID NO: 980738 - RNA, 19 nt, Artificial Sequence
  Description of Artificial Sequence: Synthetic oligonucleotide
cuugucccggaucucaucg

SEQ ID NO: 980739 - RNA, 19 nt, Artificial Sequence
  Description of Artificial Sequence: Synthetic oligonucleotide
uuguagcgcaucuuagagg

SEQ ID NO: 980740 - RNA, 19 nt, Artificial Sequence
  Description of Artificial Sequence: Synthetic oligonucleotide
uaaaugcugaggcaaugac

SEQ ID NO: 980741 - RNA, 19 nt, Artificial Sequence
  Description of Artificial Sequence: Synthetic oligonucleotide
gauuucaaguuggcaaugg

SEQ ID NO: 980742 - RNA, 19 nt, Artificial Sequence
  Description of Artificial Sequence: Synthetic oligonucleotide
auggugguucucccgaagc

SEQ ID NO: 980743 - RNA, 19 nt, Artificial Sequence
  Description of Artificial Sequence: Synthetic oligonucleotide
guaggcguaguagagauug

SEQ ID NO: 980744 - RNA, 19 nt, Artificial Sequence
  Description of Artificial Sequence: Synthetic oligonucleotide
uaaugaaagcaggggacgg

SEQ ID NO: 980745 - RNA, 19 nt, Artificial Sequence
  Description of Artificial Sequence: Synthetic oligonucleotide
ucaucguccuuuuauccug

SEQ ID NO: 980746 - RNA, 19 nt, Artificial Sequence
  Description of Artificial Sequence: Synthetic oligonucleotide
gacgaaggugaacauagac

SEQ ID NO: 980747 - RNA, 19 nt, Artificial Sequence
  Description of Artificial Sequence: Synthetic oligonucleotide
uaggcauuguucucuagca

SEQ ID NO: 980748 - RNA, 19 nt, Artificial Sequence
  Description of Artificial Sequence: Synthetic oligonucleotide
gugaaucucauucucuaug

SEQ ID NO: 980749 - RNA, 19 nt, Artificial Sequence
  Description of Artificial Sequence: Synthetic oligonucleotide
cagagacagaugacgaugg

SEQ ID NO: 980750 - RNA, 19 nt, Artificial Sequence
  Description of Artificial Sequence: Synthetic oligonucleotide
caugcuguagacugugagc

SEQ ID NO: 980751 - RNA, 19 nt, Artificial Sequence
  Description of Artificial Sequence: Synthetic oligonucleotide
aauggugguucucccgaag

SEQ ID NO: 980752 - RNA, 19 nt, Artificial Sequence
  Description of Artificial Sequence: Synthetic oligonucleotide
aucuuagaggugugucucc

SEQ ID NO: 980753 - RNA, 19 nt, Artificial Sequence
  Description of Artificial Sequence: Synthetic oligonucleotide
gugaagacgcacaucaucc

SEQ ID NO: 980754 - RNA, 19 nt, Artificial Sequence
  Description of Artificial Sequence: Synthetic oligonucleotide
cagauuuggggacagcggc

SEQ ID NO: 980755 - RNA, 19 nt, Artificial Sequence
  Description of Artificial Sequence: Synthetic oligonucleotide
ucacguugcgucuuucugc

SEQ ID NO: 980756 - RNA, 19 nt, Artificial Sequence
  Description of Artificial Sequence: Synthetic oligonucleotide
uucacguugcgucuuucug

SEQ ID NO: 980757 - RNA, 19 nt, Artificial Sequence
  Description of Artificial Sequence: Synthetic oligonucleotide
agagaggacgcucacgaca

SEQ ID NO: 980758 - RNA, 19 nt, Artificial Sequence
  Description of Artificial Sequence: Synthetic oligonucleotide
agauuauucccugauuuca

SEQ ID NO: 980759 - RNA, 19 nt, Artificial Sequence
  Description of Artificial Sequence: Synthetic oligonucleotide
accagaacgacgaagguga

SEQ ID NO: 980760 - RNA, 19 nt, Artificial Sequence
  Description of Artificial Sequence: Synthetic oligonucleotide
auaaauuauuagcguuuug

SEQ ID NO: 980761 - RNA, 19 nt, Artificial Sequence
  Description of Artificial Sequence: Synthetic oligonucleotide
uuguccggcaggaacacac

SEQ ID NO: 980762 - RNA, 19 nt, Artificial Sequence
  Description of Artificial Sequence: Synthetic oligonucleotide
ucuuagaggugugucuccg

SEQ ID NO: 980763 - RNA, 19 nt, Artificial Sequence
  Description of Artificial Sequence: Synthetic oligonucleotide
guuaccgauaaaugcugag

SEQ ID NO: 980764 - RNA, 19 nt, Artificial Sequence
  Description of Artificial Sequence: Synthetic oligonucleotide
guacaggaaagcaaaggag

SEQ ID NO: 980765 - RNA, 19 nt, Artificial Sequence
  Description of Artificial Sequence: Synthetic oligonucleotide
cacguugcgucuuucugcg

SEQ ID NO: 980766 - RNA, 19 nt, Artificial Sequence
  Description of Artificial Sequence: Synthetic oligonucleotide
guauuugaaguguccgaag

SEQ ID NO: 980767 - RNA, 19 nt, Artificial Sequence
  Description of Artificial Sequence: Synthetic oligonucleotide
accugagcgauguauuuug

SEQ ID NO: 980768 - RNA, 19 nt, Artificial Sequence
  Description of Artificial Sequence: Synthetic oligonucleotide
auacuguaggucaugacca

SEQ ID NO: 980769 - RNA, 19 nt, Artificial Sequence
  Description of Artificial Sequence: Synthetic oligonucleotide
cucuaugaggcuguccucg

SEQ ID NO: 980770 - RNA, 19 nt, Artificial Sequence
  Description of Artificial Sequence: Synthetic oligonucleotide
aggaaggggcuuuaguucu

SEQ ID NO: 980771 - RNA, 19 nt, Artificial Sequence
  Description of Artificial Sequence: Synthetic oligonucleotide
acaugaguaggccugggau

SEQ ID NO: 980772 - RNA, 19 nt, Artificial Sequence
  Description of Artificial Sequence: Synthetic oligonucleotide
gaagagaguccgcuugacc

SEQ ID NO: 980773 - RNA, 19 nt, Artificial Sequence
  Description of Artificial Sequence: Synthetic oligonucleotide
gaggaaggggcuuuaguuc

SEQ ID NO: 980774 - RNA, 19 nt, Artificial Sequence
  Description of Artificial Sequence: Synthetic oligonucleotide
augccuacagagaggacgc

SEQ ID NO: 980775 - RNA, 19 nt, Artificial Sequence
  Description of Artificial Sequence: Synthetic oligonucleotide
auugaugaagagaguccgc

SEQ ID NO: 980776 - RNA, 19 nt, Artificial Sequence
  Description of Artificial Sequence: Synthetic oligonucleotide
gagcuaggaaucccgcgcg

SEQ ID NO: 980777 - RNA, 19 nt, Artificial Sequence
  Description of Artificial Sequence: Synthetic oligonucleotide
ucuugggaggaggaugacg

SEQ ID NO: 980778 - RNA, 19 nt, Artificial Sequence
  Description of Artificial Sequence: Synthetic oligonucleotide
agagccgagaaacucugca

SEQ ID NO: 980779 - RNA, 19 nt, Artificial Sequence
  Description of Artificial Sequence: Synthetic oligonucleotide
cuuuuauccugaagauggc

SEQ ID NO: 980780 - RNA, 19 nt, Artificial Sequence
  Description of Artificial Sequence: Synthetic oligonucleotide
cacgacaaccagcagcccg

SEQ ID NO: 980781 - RNA, 19 nt, Artificial Sequence
  Description of Artificial Sequence: Synthetic oligonucleotide
aagacgcacaucauccaag

SEQ ID NO: 980782 - RNA, 19 nt, Artificial Sequence
  Description of Artificial Sequence: Synthetic oligonucleotide
guaguagagauuguaccug

SEQ ID NO: 980783 - RNA, 19 nt, Artificial Sequence
  Description of Artificial Sequence: Synthetic oligonucleotide
uggcagagacagaugacga

SEQ ID NO: 980784 - RNA, 19 nt, Artificial Sequence
  Description of Artificial Sequence: Synthetic oligonucleotide
agagaguccgcuugaccag

SEQ ID NO: 980785 - RNA, 19 nt, Artificial Sequence
  Description of Artificial Sequence: Synthetic oligonucleotide
ucgaagaaggcagaauagu

SEQ ID NO: 980786 - RNA, 19 nt, Artificial Sequence
  Description of Artificial Sequence: Synthetic oligonucleotide
agcguguccagugugcuuc

SEQ ID NO: 980787 - RNA, 19 nt, Artificial Sequence
  Description of Artificial Sequence: Synthetic oligonucleotide
uccuuuuauccugaagaug

SEQ ID NO: 980788 - RNA, 19 nt, Artificial Sequence
  Description of Artificial Sequence: Synthetic oligonucleotide
aaucccgcgcgcaugguag

SEQ ID NO: 980789 - RNA, 19 nt, Artificial Sequence
  Description of Artificial Sequence: Synthetic oligonucleotide
gaaguguccgaagcagacg

SEQ ID NO: 980790 - RNA, 19 nt, Artificial Sequence
  Description of Artificial Sequence: Synthetic oligonucleotide
augauggggcaggugauac

SEQ ID NO: 980791 - RNA, 19 nt, Artificial Sequence
  Description of Artificial Sequence: Synthetic oligonucleotide
agaggugugucuccgcaug

SEQ ID NO: 980792 - RNA, 19 nt, Artificial Sequence
  Description of Artificial Sequence: Synthetic oligonucleotide
cacucaaaccgaauagcug

SEQ ID NO: 980793 - RNA, 19 nt, Artificial Sequence
  Description of Artificial Sequence: Synthetic oligonucleotide
uaggcugcgccaaacugga

SEQ ID NO: 980794 - RNA, 19 nt, Artificial Sequence
  Description of Artificial Sequence: Synthetic oligonucleotide
cacacucaaaccgaauagc

SEQ ID NO: 980795 - RNA, 19 nt, Artificial Sequence
  Description of Artificial Sequence: Synthetic oligonucleotide
auaaaugcugaggcaauga

SEQ ID NO: 980796 - RNA, 19 nt, Artificial Sequence
  Description of Artificial Sequence: Synthetic oligonucleotide
agguauuugaaguguccga

SEQ ID NO: 980797 - RNA, 19 nt, Artificial Sequence
  Description of Artificial Sequence: Synthetic oligonucleotide
uccagugugcuucgaagaa

SEQ ID NO: 980798 - RNA, 19 nt, Artificial Sequence
  Description of Artificial Sequence: Synthetic oligonucleotide
aggaaucccgcgcgcaugg

SEQ ID NO: 980799 - RNA, 19 nt, Artificial Sequence
  Description of Artificial Sequence: Synthetic oligonucleotide
ugaagacgcacaucaucca

SEQ ID NO: 980800 - RNA, 19 nt, Artificial Sequence
  Description of Artificial Sequence: Synthetic oligonucleotide
auccccagguuuaaauacc

SEQ ID NO: 980801 - RNA, 19 nt, Artificial Sequence
  Description of Artificial Sequence: Synthetic oligonucleotide
uacaugaguaggccuggga

SEQ ID NO: 980802 - RNA, 19 nt, Artificial Sequence
  Description of Artificial Sequence: Synthetic oligonucleotide
acauagacgugggagcuag

SEQ ID NO: 980803 - RNA, 19 nt, Artificial Sequence
  Description of Artificial Sequence: Synthetic oligonucleotide
uucacgaagaaagcgccgu

SEQ ID NO: 980804 - RNA, 19 nt, Artificial Sequence
  Description of Artificial Sequence: Synthetic oligonucleotide
agcggugacauccccaggu

SEQ ID NO: 980805 - RNA, 19 nt, Artificial Sequence
  Description of Artificial Sequence: Synthetic oligonucleotide
augguagagaagaagagua

SEQ ID NO: 980806 - RNA, 19 nt, Artificial Sequence
  Description of Artificial Sequence: Synthetic oligonucleotide
uacuucuggagcucacggc

SEQ ID NO: 980807 - RNA, 19 nt, Artificial Sequence
  Description of Artificial Sequence: Synthetic oligonucleotide
ucguccuuuuauccugaag

SEQ ID NO: 980808 - RNA, 19 nt, Artificial Sequence
  Description of Artificial Sequence: Synthetic oligonucleotide
gacgcacaucauccaagcg

SEQ ID NO: 980809 - RNA, 19 nt, Artificial Sequence
  Description of Artificial Sequence: Synthetic oligonucleotide
ugcgccaaacuggaacucg

SEQ ID NO: 980810 - RNA, 19 nt, Artificial Sequence
  Description of Artificial Sequence: Synthetic oligonucleotide
gaccagaacgacgaaggug

SEQ ID NO: 980811 - RNA, 19 nt, Artificial Sequence
  Description of Artificial Sequence: Synthetic oligonucleotide
agguaggcguaguagagau

SEQ ID NO: 980812 - RNA, 19 nt, Artificial Sequence
  Description of Artificial Sequence: Synthetic oligonucleotide
acgaagaaagcgccguugu

SEQ ID NO: 980813 - RNA, 19 nt, Artificial Sequence
  Description of Artificial Sequence: Synthetic oligonucleotide
accgauaaaugcugaggca

SEQ ID NO: 980814 - RNA, 19 nt, Artificial Sequence
  Description of Artificial Sequence: Synthetic oligonucleotide
ucuaugaggcuguccucgc

SEQ ID NO: 980815 - RNA, 19 nt, Artificial Sequence
  Description of Artificial Sequence: Synthetic oligonucleotide
uacagagaggacgcucacg

SEQ ID NO: 980816 - RNA, 19 nt, Artificial Sequence
  Description of Artificial Sequence: Synthetic oligonucleotide
uagcgcaucuuagaggugu

SEQ ID NO: 980817 - RNA, 19 nt, Artificial Sequence
  Description of Artificial Sequence: Synthetic oligonucleotide
gguggugaggcugaucugg

SEQ ID NO: 980818 - RNA, 19 nt, Artificial Sequence
  Description of Artificial Sequence: Synthetic oligonucleotide
caucccagagggcugcagg

SEQ ID NO: 980819 - RNA, 19 nt, Artificial Sequence
  Description of Artificial Sequence: Synthetic oligonucleotide
gaaagcgccguuguccggc

SEQ ID NO: 980820 - RNA, 19 nt, Artificial Sequence
  Description of Artificial Sequence: Synthetic oligonucleotide
agcuaggaaucccgcgcgc

SEQ ID NO: 980821 - RNA, 19 nt, Artificial Sequence
  Description of Artificial Sequence: Synthetic oligonucleotide
ggagcuaggaaucccgcgc

SEQ ID NO: 980822 - RNA, 19 nt, Artificial Sequence
  Description of Artificial Sequence: Synthetic oligonucleotide
cacgaugccuacagagagg

SEQ ID NO: 980823 - RNA, 19 nt, Artificial Sequence
  Description of Artificial Sequence: Synthetic oligonucleotide
uguccgaagcagacguggc

SEQ ID NO: 980824 - RNA, 19 nt, Artificial Sequence
  Description of Artificial Sequence: Synthetic oligonucleotide
guguccgaagcagacgugg

SEQ ID NO: 980825 - RNA, 19 nt, Artificial Sequence
  Description of Artificial Sequence: Synthetic oligonucleotide
agguccauggcguuaccga

SEQ ID NO: 980826 - RNA, 19 nt, Artificial Sequence
  Description of Artificial Sequence: Synthetic oligonucleotide
ggggcuuuaguucuaauaa

SEQ ID NO: 980827 - RNA, 19 nt, Artificial Sequence
  Description of Artificial Sequence: Synthetic oligonucleotide
uggugguucucccgaagcu

SEQ ID NO: 980828 - RNA, 19 nt, Artificial Sequence
  Description of Artificial Sequence: Synthetic oligonucleotide
augaagagaguccgcuuga

SEQ ID NO: 980829 - RNA, 19 nt, Artificial Sequence
  Description of Artificial Sequence: Synthetic oligonucleotide
acacucaaaccgaauagcu

SEQ ID NO: 980830 - RNA, 19 nt, Artificial Sequence
  Description of Artificial Sequence: Synthetic oligonucleotide
gaugccgcuucacguugcg

SEQ ID NO: 980831 - RNA, 19 nt, Artificial Sequence
  Description of Artificial Sequence: Synthetic oligonucleotide
guccccgucacccucugag

SEQ ID NO: 980832 - RNA, 19 nt, Artificial Sequence
  Description of Artificial Sequence: Synthetic oligonucleotide
uccaagcguaggcugcgcc

SEQ ID NO: 980833 - RNA, 19 nt, Artificial Sequence
  Description of Artificial Sequence: Synthetic oligonucleotide
gaucucaucguccuuuuau

SEQ ID NO: 980834 - RNA, 19 nt, Artificial Sequence
  Description of Artificial Sequence: Synthetic oligonucleotide
gaagacgcacaucauccaa

SEQ ID NO: 980835 - RNA, 19 nt, Artificial Sequence
  Description of Artificial Sequence: Synthetic oligonucleotide
uggagauuccauugaugaa

SEQ ID NO: 980836 - RNA, 19 nt, Artificial Sequence
  Description of Artificial Sequence: Synthetic oligonucleotide
gaggacgcucacgacaacc

SEQ ID NO: 980837 - RNA, 19 nt, Artificial Sequence
  Description of Artificial Sequence: Synthetic oligonucleotide
cacuacuggguggugaggc

SEQ ID NO: 980838 - RNA, 19 nt, Artificial Sequence
  Description of Artificial Sequence: Synthetic oligonucleotide
guacaugagcccgaagggc

SEQ ID NO: 980839 - RNA, 19 nt, Artificial Sequence
  Description of Artificial Sequence: Synthetic oligonucleotide
cuuagaggugugucuccgc

SEQ ID NO: 980840 - RNA, 19 nt, Artificial Sequence
  Description of Artificial Sequence: Synthetic oligonucleotide
gaacacacacucaaaccga

SEQ ID NO: 980841 - RNA, 19 nt, Artificial Sequence
  Description of Artificial Sequence: Synthetic oligonucleotide
acgaugccuacagagagga

SEQ ID NO: 980842 - RNA, 19 nt, Artificial Sequence
  Description of Artificial Sequence: Synthetic oligonucleotide
ugcuuacucuucccaggcc

SEQ ID NO: 980843 - RNA, 19 nt, Artificial Sequence
  Description of Artificial Sequence: Synthetic oligonucleotide
guaggucaugaccaccgug

SEQ ID NO: 980844 - RNA, 19 nt, Artificial Sequence
  Description of Artificial Sequence: Synthetic oligonucleotide
aggggcuuuaguucuaaua

SEQ ID NO: 980845 - RNA, 19 nt, Artificial Sequence
  Description of Artificial Sequence: Synthetic oligonucleotide
uagugcaccgcgucgccgc

SEQ ID NO: 980846 - RNA, 19 nt, Artificial Sequence
  Description of Artificial Sequence: Synthetic oligonucleotide
ugaccagaacgacgaaggu

SEQ ID NO: 980847 - RNA, 19 nt, Artificial Sequence
  Description of Artificial Sequence: Synthetic oligonucleotide
ugggagcuaggaaucccgc

SEQ ID NO: 980848 - RNA, 19 nt, Artificial Sequence
  Description of Artificial Sequence: Synthetic oligonucleotide
gucuuucugcggcggagcg

SEQ ID NO: 980849 - RNA, 19 nt, Artificial Sequence
  Description of Artificial Sequence: Synthetic oligonucleotide
gacgcucacgacaaccagc

SEQ ID NO: 980850 - RNA, 19 nt, Artificial Sequence
  Description of Artificial Sequence: Synthetic oligonucleotide
uguaggucaugaccaccgu

SEQ ID NO: 980851 - RNA, 19 nt, Artificial Sequence
  Description of Artificial Sequence: Synthetic oligonucleotide
auagacgugggagcuagga

SEQ ID NO: 980852 - RNA, 19 nt, Artificial Sequence
  Description of Artificial Sequence: Synthetic oligonucleotide
ugcuguagacugugagcag

SEQ ID NO: 980853 - RNA, 19 nt, Artificial Sequence
  Description of Artificial Sequence: Synthetic oligonucleotide
gauuauucccugauuucaa

SEQ ID NO: 980854 - RNA, 19 nt, Artificial Sequence
  Description of Artificial Sequence: Synthetic oligonucleotide
ggacagguagugcaccgcg

SEQ ID NO: 980855 - RNA, 19 nt, Artificial Sequence
  Description of Artificial Sequence: Synthetic oligonucleotide
auggcguuaccgauaaaug

SEQ ID NO: 980856 - RNA, 19 nt, Artificial Sequence
  Description of Artificial Sequence: Synthetic oligonucleotide
agaggagauuauucccuga

SEQ ID NO: 980857 - RNA, 19 nt, Artificial Sequence
  Description of Artificial Sequence: Synthetic oligonucleotide
caaaccgaauagcugccuc

SEQ ID NO: 980858 - RNA, 19 nt, Artificial Sequence
  Description of Artificial Sequence: Synthetic oligonucleotide
agccgagaaacucugcaua

SEQ ID NO: 980859 - RNA, 19 nt, Artificial Sequence
  Description of Artificial Sequence: Synthetic oligonucleotide
gugggagcuaggaaucccg

SEQ ID NO: 980860 - RNA, 19 nt, Artificial Sequence
  Description of Artificial Sequence: Synthetic oligonucleotide
cagguagugcaccgcgucg

SEQ ID NO: 980861 - RNA, 19 nt, Artificial Sequence
  Description of Artificial Sequence: Synthetic oligonucleotide
uggccacacuacugggugg

SEQ ID NO: 980862 - RNA, 19 nt, Artificial Sequence
  Description of Artificial Sequence: Synthetic oligonucleotide
acagaugacgauggugaug

SEQ ID NO: 980863 - RNA, 19 nt, Artificial Sequence
  Description of Artificial Sequence: Synthetic oligonucleotide
uccccuuacuggugaaucu

SEQ ID NO: 980864 - RNA, 19 nt, Artificial Sequence
  Description of Artificial Sequence: Synthetic oligonucleotide
gaaggugaacauagacgug

SEQ ID NO: 980865 - RNA, 19 nt, Artificial Sequence
  Description of Artificial Sequence: Synthetic oligonucleotide
guucacgaagaaagcgccg

SEQ ID NO: 980866 - RNA, 19 nt, Artificial Sequence
  Description of Artificial Sequence: Synthetic oligonucleotide
cucguaggccugaugccgc

SEQ ID NO: 980867 - RNA, 19 nt, Artificial Sequence
  Description of Artificial Sequence: Synthetic oligonucleotide
gccagaggagauuauuccc

SEQ ID NO: 980868 - RNA, 19 nt, Artificial Sequence
  Description of Artificial Sequence: Synthetic oligonucleotide
gaggugugucuccgcaugc

SEQ ID NO: 980869 - RNA, 19 nt, Artificial Sequence
  Description of Artificial Sequence: Synthetic oligonucleotide
acggcaucugucucugugu

SEQ ID NO: 980870 - RNA, 19 nt, Artificial Sequence
  Description of Artificial Sequence: Synthetic oligonucleotide
aacgacgaaggugaacaua

SEQ ID NO: 980871 - RNA, 19 nt, Artificial Sequence
  Description of Artificial Sequence: Synthetic oligonucleotide
ggcaauggugguucucccg

SEQ ID NO: 980872 - RNA, 19 nt, Artificial Sequence
  Description of Artificial Sequence: Synthetic oligonucleotide
uguucucuagcaggucccc

SEQ ID NO: 980873 - RNA, 19 nt, Artificial Sequence
  Description of Artificial Sequence: Synthetic oligonucleotide
agaaagcgccguuguccgg

SEQ ID NO: 980874 - RNA, 19 nt, Artificial Sequence
  Description of Artificial Sequence: Synthetic oligonucleotide
ccucgcaugacugaaaauc

SEQ ID NO: 980875 - RNA, 19 nt, Artificial Sequence
  Description of Artificial Sequence: Synthetic oligonucleotide
aggugaacauagacguggg

SEQ ID NO: 980876 - RNA, 19 nt, Artificial Sequence
  Description of Artificial Sequence: Synthetic oligonucleotide
agcccgaugaugugccucu

SEQ ID NO: 980877 - RNA, 19 nt, Artificial Sequence
  Description of Artificial Sequence: Synthetic oligonucleotide
ucuguguccgugaggccau

SEQ ID NO: 980878 - RNA, 19 nt, Artificial Sequence
  Description of Artificial Sequence: Synthetic oligonucleotide
caccuuggcucucauuaac

SEQ ID NO: 980879 - RNA, 19 nt, Artificial Sequence
  Description of Artificial Sequence: Synthetic oligonucleotide
acuacuggguggugaggcu

SEQ ID NO: 980880 - RNA, 19 nt, Artificial Sequence
  Description of Artificial Sequence: Synthetic oligonucleotide
aggagauuauucccugauu

SEQ ID NO: 980881 - RNA, 19 nt, Artificial Sequence
  Description of Artificial Sequence: Synthetic oligonucleotide
ucaaaccgaauagcugccu

SEQ ID NO: 980882 - RNA, 19 nt, Artificial Sequence
  Description of Artificial Sequence: Synthetic oligonucleotide
ugaagagaguccgcuugac

SEQ ID NO: 980883 - RNA, 19 nt, Artificial Sequence
  Description of Artificial Sequence: Synthetic oligonucleotide
acgugggagcuaggaaucc

SEQ ID NO: 980884 - RNA, 19 nt, Artificial Sequence
  Description of Artificial Sequence: Synthetic oligonucleotide
ggagauuauucccugauuu

SEQ ID NO: 980885 - RNA, 19 nt, Artificial Sequence
  Description of Artificial Sequence: Synthetic oligonucleotide
ggcaggaacacacacucaa

SEQ ID NO: 980886 - RNA, 19 nt, Artificial Sequence
  Description of Artificial Sequence: Synthetic oligonucleotide
gacgugggagcuaggaauc

SEQ ID NO: 980887 - RNA, 19 nt, Artificial Sequence
  Description of Artificial Sequence: Synthetic oligonucleotide
aaagcgccguuguccggca

SEQ ID NO: 980888 - RNA, 19 nt, Artificial Sequence
  Description of Artificial Sequence: Synthetic oligonucleotide
cauccaagcguaggcugcg

SEQ ID NO: 980889 - RNA, 19 nt, Artificial Sequence
  Description of Artificial Sequence: Synthetic oligonucleotide
gagaggacgcucacgacaa

SEQ ID NO: 980890 - RNA, 19 nt, Artificial Sequence
  Description of Artificial Sequence: Synthetic oligonucleotide
gguauuugaaguguccgaa

SEQ ID NO: 980891 - RNA, 19 nt, Artificial Sequence
  Description of Artificial Sequence: Synthetic oligonucleotide
agagccggaucauguacau

SEQ ID NO: 980892 - RNA, 19 nt, Artificial Sequence
  Description of Artificial Sequence: Synthetic oligonucleotide
uccgcaugcuguagacugu

SEQ ID NO: 980893 - RNA, 19 nt, Artificial Sequence
  Description of Artificial Sequence: Synthetic oligonucleotide
gggagcuaggaaucccgcg

SEQ ID NO: 980894 - RNA, 19 nt, Artificial Sequence
  Description of Artificial Sequence: Synthetic oligonucleotide
gcagauuuggggacagcgg

SEQ ID NO: 980895 - RNA, 19 nt, Artificial Sequence
  Description of Artificial Sequence: Synthetic oligonucleotide
uguccucgcaugacugaaa

SEQ ID NO: 980896 - RNA, 19 nt, Artificial Sequence
  Description of Artificial Sequence: Synthetic oligonucleotide
gaacauagacgugggagcu

SEQ ID NO: 980897 - RNA, 19 nt, Artificial Sequence
  Description of Artificial Sequence: Synthetic oligonucleotide
agcguaggcugcgccaaac

SEQ ID NO: 980898 - RNA, 19 nt, Artificial Sequence
  Description of Artificial Sequence: Synthetic oligonucleotide
ccgaauagcugccucggcc

SEQ ID NO: 980899 - RNA, 19 nt, Artificial Sequence
  Description of Artificial Sequence: Synthetic oligonucleotide
gaggagauuauucccugau

SEQ ID NO: 980900 - RNA, 19 nt, Artificial Sequence
  Description of Artificial Sequence: Synthetic oligonucleotide
cucgcaugacugaaaaucu

SEQ ID NO: 980901 - RNA, 19 nt, Artificial Sequence
  Description of Artificial Sequence: Synthetic oligonucleotide
uaggaaucccgcgcgcaug

SEQ ID NO: 980902 - RNA, 19 nt, Artificial Sequence
  Description of Artificial Sequence: Synthetic oligonucleotide
uggugaugaccagaacgac

SEQ ID NO: 980903 - RNA, 19 nt, Artificial Sequence
  Description of Artificial Sequence: Synthetic oligonucleotide
agaggacgcucacgacaac

SEQ ID NO: 980904 - RNA, 19 nt, Artificial Sequence
  Description of Artificial Sequence: Synthetic oligonucleotide
ucuuucugcggcggagcgc

SEQ ID NO: 980905 - RNA, 19 nt, Artificial Sequence
  Description of Artificial Sequence: Synthetic oligonucleotide
guccuguucuccccagagc

SEQ ID NO: 980906 - RNA, 19 nt, Artificial Sequence
  Description of Artificial Sequence: Synthetic oligonucleotide
uaggcguaguagagauugu

SEQ ID NO: 980907 - RNA, 19 nt, Artificial Sequence
  Description of Artificial Sequence: Synthetic oligonucleotide
aggcuguccucgcaugacu

SEQ ID NO: 980908 - RNA, 19 nt, Artificial Sequence
  Description of Artificial Sequence: Synthetic oligonucleotide
cagguccauggcguuaccg

SEQ ID NO: 980909 - RNA, 19 nt, Artificial Sequence
  Description of Artificial Sequence: Synthetic oligonucleotide
cuacagagaggacgcucac

SEQ ID NO: 980910 - RNA, 19 nt, Artificial Sequence
  Description of Artificial Sequence: Synthetic oligonucleotide
cauagacgugggagcuagg

SEQ ID NO: 980911 - RNA, 19 nt, Artificial Sequence
  Description of Artificial Sequence: Synthetic oligonucleotide
gcaauggugguucucccga

SEQ ID NO: 980912 - RNA, 19 nt, Artificial Sequence
  Description of Artificial Sequence: Synthetic oligonucleotide
acgacaaccagcagcccga

SEQ ID NO: 980913 - RNA, 19 nt, Artificial Sequence
  Description of Artificial Sequence: Synthetic oligonucleotide
ugcgucuuucugcggcgga

SEQ ID NO: 980914 - RNA, 19 nt, Artificial Sequence
  Description of Artificial Sequence: Synthetic oligonucleotide
ugcggccaccaccugguuc

SEQ ID NO: 980915 - RNA, 19 nt, Artificial Sequence
  Description of Artificial Sequence: Synthetic oligonucleotide
aaggggcuuuaguucuaau

SEQ ID NO: 980916 - RNA, 19 nt, Artificial Sequence
  Description of Artificial Sequence: Synthetic oligonucleotide
caugguagagaagaagagu

SEQ ID NO: 980917 - RNA, 19 nt, Artificial Sequence
  Description of Artificial Sequence: Synthetic oligonucleotide
cuccccuuacuggugaauc

SEQ ID NO: 980918 - RNA, 19 nt, Artificial Sequence
  Description of Artificial Sequence: Synthetic oligonucleotide
ggccugaugccgcuucacg

SEQ ID NO: 980919 - RNA, 19 nt, Artificial Sequence
  Description of Artificial Sequence: Synthetic oligonucleotide
ggcguaguagagauuguac

SEQ ID NO: 980920 - RNA, 19 nt, Artificial Sequence
  Description of Artificial Sequence: Synthetic oligonucleotide
augggugcggccaccaccu

SEQ ID NO: 980921 - RNA, 19 nt, Artificial Sequence
  Description of Artificial Sequence: Synthetic oligonucleotide
cauggcguuaccgauaaau

SEQ ID NO: 980922 - RNA, 19 nt, Artificial Sequence
  Description of Artificial Sequence: Synthetic oligonucleotide
acacuacuggguggugagg

SEQ ID NO: 980923 - RNA, 19 nt, Artificial Sequence
  Description of Artificial Sequence: Synthetic oligonucleotide
auccaagcguaggcugcgc

SEQ ID NO: 980924 - RNA, 19 nt, Artificial Sequence
  Description of Artificial Sequence: Synthetic oligonucleotide
agagcguguccagugugcu

SEQ ID NO: 980925 - RNA, 19 nt, Artificial Sequence
  Description of Artificial Sequence: Synthetic oligonucleotide
gagcggugacauccccagg

SEQ ID NO: 980926 - RNA, 19 nt, Artificial Sequence
  Description of Artificial Sequence: Synthetic oligonucleotide
aggacgcucacgacaacca

SEQ ID NO: 980927 - RNA, 19 nt, Artificial Sequence
  Description of Artificial Sequence: Synthetic oligonucleotide
ggugguucucccgaagcug

SEQ ID NO: 980928 - RNA, 19 nt, Artificial Sequence
  Description of Artificial Sequence: Synthetic oligonucleotide
gcagagccggaucauguac

SEQ ID NO: 980929 - RNA, 19 nt, Artificial Sequence
  Description of Artificial Sequence: Synthetic oligonucleotide
gagcucacggcaucugucu

SEQ ID NO: 980930 - RNA, 19 nt, Artificial Sequence
  Description of Artificial Sequence: Synthetic oligonucleotide
cucacggcaucugucucug

SEQ ID NO: 980931 - RNA, 19 nt, Artificial Sequence
  Description of Artificial Sequence: Synthetic oligonucleotide
cgaaggugaacauagacgu

SEQ ID NO: 980932 - RNA, 19 nt, Artificial Sequence
  Description of Artificial Sequence: Synthetic oligonucleotide
acagaagccguugucccuu

SEQ ID NO: 980933 - RNA, 19 nt, Artificial Sequence
  Description of Artificial Sequence: Synthetic oligonucleotide
cagagccgagaaacucugc

SEQ ID NO: 980934 - RNA, 19 nt, Artificial Sequence
  Description of Artificial Sequence: Synthetic oligonucleotide
gcagguaggcguaguagag

SEQ ID NO: 980935 - RNA, 19 nt, Artificial Sequence
  Description of Artificial Sequence: Synthetic oligonucleotide
agguacccaccuuggcucu

SEQ ID NO: 980936 - RNA, 19 nt, Artificial Sequence
  Description of Artificial Sequence: Synthetic oligonucleotide
cgcaugguagagaagaaga

SEQ ID NO: 980937 - RNA, 19 nt, Artificial Sequence
  Description of Artificial Sequence: Synthetic oligonucleotide
gacguggcagagacagaug

SEQ ID NO: 980938 - RNA, 19 nt, Artificial Sequence
  Description of Artificial Sequence: Synthetic oligonucleotide
cagagaggacgcucacgac

SEQ ID NO: 980939 - RNA, 19 nt, Artificial Sequence
  Description of Artificial Sequence: Synthetic oligonucleotide
ccuacagagaggacgcuca

SEQ ID NO: 980940 - RNA, 19 nt, Artificial Sequence
  Description of Artificial Sequence: Synthetic oligonucleotide
gcaggugauacuguagguc

SEQ ID NO: 980941 - RNA, 19 nt, Artificial Sequence
  Description of Artificial Sequence: Synthetic oligonucleotide
ggacgcucacgacaaccag

SEQ ID NO: 980942 - RNA, 19 nt, Artificial Sequence
  Description of Artificial Sequence: Synthetic oligonucleotide
cagaacgacgaaggugaac

SEQ ID NO: 980943 - RNA, 19 nt, Artificial Sequence
  Description of Artificial Sequence: Synthetic oligonucleotide
acguugcgucuuucugcgg

SEQ ID NO: 980944 - RNA, 19 nt, Artificial Sequence
  Description of Artificial Sequence: Synthetic oligonucleotide
uccccgucacccucugagu

SEQ ID NO: 980945 - RNA, 19 nt, Artificial Sequence
  Description of Artificial Sequence: Synthetic oligonucleotide
caucguccuuuuauccuga

SEQ ID NO: 980946 - RNA, 19 nt, Artificial Sequence
  Description of Artificial Sequence: Synthetic oligonucleotide
agcauguacaugagcccga

SEQ ID NO: 980947 - RNA, 19 nt, Artificial Sequence
  Description of Artificial Sequence: Synthetic oligonucleotide
ggcguuaccgauaaaugcu

SEQ ID NO: 980948 - RNA, 19 nt, Artificial Sequence
  Description of Artificial Sequence: Synthetic oligonucleotide
accccucuuugccccgggg

SEQ ID NO: 980949 - RNA, 19 nt, Artificial Sequence
  Description of Artificial Sequence: Synthetic oligonucleotide
gagagcggugacaucccca

SEQ ID NO: 980950 - RNA, 19 nt, Artificial Sequence
  Description of Artificial Sequence: Synthetic oligonucleotide
aggggagagcggugacauc

SEQ ID NO: 980951 - RNA, 19 nt, Artificial Sequence
  Description of Artificial Sequence: Synthetic oligonucleotide
aagcgccguuguccggcag

SEQ ID NO: 980952 - RNA, 19 nt, Artificial Sequence
  Description of Artificial Sequence: Synthetic oligonucleotide
cguugcgucuuucugcggc

SEQ ID NO: 980953 - RNA, 19 nt, Artificial Sequence
  Description of Artificial Sequence: Synthetic oligonucleotide
ucguaggccugaugccgcu

SEQ ID NO: 980954 - RNA, 19 nt, Artificial Sequence
  Description of Artificial Sequence: Synthetic oligonucleotide
ggcucgucuccugagcucc

SEQ ID NO: 980955 - RNA, 19 nt, Artificial Sequence
  Description of Artificial Sequence: Synthetic oligonucleotide
gcguuaccgauaaaugcug

SEQ ID NO: 980956 - RNA, 19 nt, Artificial Sequence
  Description of Artificial Sequence: Synthetic oligonucleotide
gaaucccgcgcgcauggua

SEQ ID NO: 980957 - RNA, 19 nt, Artificial Sequence
  Description of Artificial Sequence: Synthetic oligonucleotide
gaugugccucuggaaggac

SEQ ID NO: 980958 - RNA, 19 nt, Artificial Sequence
  Description of Artificial Sequence: Synthetic oligonucleotide
gaugauggggcaggugaua

SEQ ID NO: 980959 - RNA, 19 nt, Artificial Sequence
  Description of Artificial Sequence: Synthetic oligonucleotide
aggcguaguagagauugua

SEQ ID NO: 980960 - RNA, 19 nt, Artificial Sequence
  Description of Artificial Sequence: Synthetic oligonucleotide
gggugcggccaccaccugg

SEQ ID NO: 980961 - RNA, 19 nt, Artificial Sequence
  Description of Artificial Sequence: Synthetic oligonucleotide
guaggccugggauggcgca

SEQ ID NO: 980962 - RNA, 19 nt, Artificial Sequence
  Description of Artificial Sequence: Synthetic oligonucleotide
ggaacucguaggccugaug

SEQ ID NO: 980963 - RNA, 19 nt, Artificial Sequence
  Description of Artificial Sequence: Synthetic oligonucleotide
ucccgaagcuguaggcauu

SEQ ID NO: 980964 - RNA, 19 nt, Artificial Sequence
  Description of Artificial Sequence: Synthetic oligonucleotide
ccugagcgauguauuuugc

SEQ ID NO: 980965 - RNA, 19 nt, Artificial Sequence
  Description of Artificial Sequence: Synthetic oligonucleotide
ggaaagcaaaggaggugug

SEQ ID NO: 980966 - RNA, 19 nt, Artificial Sequence
  Description of Artificial Sequence: Synthetic oligonucleotide
agcaccugagcgauguauu

SEQ ID NO: 980967 - RNA, 19 nt, Artificial Sequence
  Description of Artificial Sequence: Synthetic oligonucleotide
gagccgagaaacucugcau

SEQ ID NO: 980968 - RNA, 19 nt, Artificial Sequence
  Description of Artificial Sequence: Synthetic oligonucleotide
gugccuugugguccuguuc

SEQ ID NO: 980969 - RNA, 19 nt, Artificial Sequence
  Description of Artificial Sequence: Synthetic oligonucleotide
gcgcgcaugguagagaaga

SEQ ID NO: 980970 - RNA, 19 nt, Artificial Sequence
  Description of Artificial Sequence: Synthetic oligonucleotide
aggugugucuccgcaugcu

SEQ ID NO: 980971 - RNA, 19 nt, Artificial Sequence
  Description of Artificial Sequence: Synthetic oligonucleotide
ccccugagaaguugacagg

SEQ ID NO: 980972 - RNA, 19 nt, Artificial Sequence
  Description of Artificial Sequence: Synthetic oligonucleotide
uuugccccggggccugcuc

SEQ ID NO: 980973 - RNA, 19 nt, Artificial Sequence
  Description of Artificial Sequence: Synthetic oligonucleotide
gacagaugacgauggugau

SEQ ID NO: 980974 - RNA, 19 nt, Artificial Sequence
  Description of Artificial Sequence: Synthetic oligonucleotide
ucccaccacaccccucuuu

SEQ ID NO: 980975 - RNA, 19 nt, Artificial Sequence
  Description of Artificial Sequence: Synthetic oligonucleotide
gcagagccgagaaacucug

SEQ ID NO: 980976 - RNA, 19 nt, Artificial Sequence
  Description of Artificial Sequence: Synthetic oligonucleotide
cagguuuaaauaccuuaau

SEQ ID NO: 980977 - RNA, 19 nt, Artificial Sequence
  Description of Artificial Sequence: Synthetic oligonucleotide
ucacgacaaccagcagccc

SEQ ID NO: 980978 - RNA, 19 nt, Artificial Sequence
  Description of Artificial Sequence: Synthetic oligonucleotide
ccgauaaaugcugaggcaa

SEQ ID NO: 980979 - RNA, 19 nt, Artificial Sequence
  Description of Artificial Sequence: Synthetic oligonucleotide
aguguccgaagcagacgug

SEQ ID NO: 980980 - RNA, 19 nt, Artificial Sequence
  Description of Artificial Sequence: Synthetic oligonucleotide
ccuagaggcccagauucag

SEQ ID NO: 980981 - RNA, 19 nt, Artificial Sequence
  Description of Artificial Sequence: Synthetic oligonucleotide
ccguccgcuacuucuggag

SEQ ID NO: 980982 - RNA, 19 nt, Artificial Sequence
  Description of Artificial Sequence: Synthetic oligonucleotide
guccgcuacuucuggagcu

SEQ ID NO: 980983 - RNA, 19 nt, Artificial Sequence
  Description of Artificial Sequence: Synthetic oligonucleotide
gaguccgcuugaccagguc

SEQ ID NO: 980984 - RNA, 19 nt, Artificial Sequence
  Description of Artificial Sequence: Synthetic oligonucleotide
cuucacguugcgucuuucu

SEQ ID NO: 980985 - RNA, 19 nt, Artificial Sequence
  Description of Artificial Sequence: Synthetic oligonucleotide
cuuacuggugaaucucauu

SEQ ID NO: 980986 - RNA, 19 nt, Artificial Sequence
  Description of Artificial Sequence: Synthetic oligonucleotide
aggcagaauaguagacgau

SEQ ID NO: 980987 - RNA, 19 nt, Artificial Sequence
  Description of Artificial Sequence: Synthetic oligonucleotide
guccccugagaaguugaca

SEQ ID NO: 980988 - RNA, 19 nt, Artificial Sequence
  Description of Artificial Sequence: Synthetic oligonucleotide
gcugcgccaaacuggaacu

SEQ ID NO: 980989 - RNA, 19 nt, Artificial Sequence
  Description of Artificial Sequence: Synthetic oligonucleotide
ggccguccgcuacuucugg

SEQ ID NO: 980990 - RNA, 19 nt, Artificial Sequence
  Description of Artificial Sequence: Synthetic oligonucleotide
caccgcgucgccgccacac

SEQ ID NO: 980991 - RNA, 19 nt, Artificial Sequence
  Description of Artificial Sequence: Synthetic oligonucleotide
gccgccacacuugucccgg

SEQ ID NO: 980992 - RNA, 19 nt, Artificial Sequence
  Description of Artificial Sequence: Synthetic oligonucleotide
caagcguaggcugcgccaa

SEQ ID NO: 980993 - RNA, 19 nt, Artificial Sequence
  Description of Artificial Sequence: Synthetic oligonucleotide
aucccgcgcgcaugguaga

SEQ ID NO: 980994 - RNA, 19 nt, Artificial Sequence
  Description of Artificial Sequence: Synthetic oligonucleotide
cagcccgaugaugugccuc

SEQ ID NO: 980995 - RNA, 19 nt, Artificial Sequence
  Description of Artificial Sequence: Synthetic oligonucleotide
caucgggcggcaucagcaa

SEQ ID NO: 980996 - RNA, 19 nt, Artificial Sequence
  Description of Artificial Sequence: Synthetic oligonucleotide
ugccuacagagaggacgcu

SEQ ID NO: 980997 - RNA, 19 nt, Artificial Sequence
  Description of Artificial Sequence: Synthetic oligonucleotide
ggcccagauucagggacag

SEQ ID NO: 980998 - RNA, 19 nt, Artificial Sequence
  Description of Artificial Sequence: Synthetic oligonucleotide
cugcgccaaacuggaacuc

SEQ ID NO: 980999 - RNA, 19 nt, Artificial Sequence
  Description of Artificial Sequence: Synthetic oligonucleotide
ugggugcggccaccaccug

SEQ ID NO: 981000 - RNA, 19 nt, Artificial Sequence
  Description of Artificial Sequence: Synthetic oligonucleotide
agaguccgcuugaccaggu

SEQ ID NO: 981001 - RNA, 19 nt, Artificial Sequence
  Description of Artificial Sequence: Synthetic oligonucleotide
guacccaccuuggcucuca

SEQ ID NO: 981002 - RNA, 19 nt, Artificial Sequence
  Description of Artificial Sequence: Synthetic oligonucleotide
ccgaguggaucuucuuguc

SEQ ID NO: 981003 - RNA, 19 nt, Artificial Sequence
  Description of Artificial Sequence: Synthetic oligonucleotide
gggagagcggugacauccc

SEQ ID NO: 981004 - RNA, 19 nt, Artificial Sequence
  Description of Artificial Sequence: Synthetic oligonucleotide
gcuaggaaucccgcgcgca

SEQ ID NO: 981005 - RNA, 19 nt, Artificial Sequence
  Description of Artificial Sequence: Synthetic oligonucleotide
cgcacaucauccaagcgua

SEQ ID NO: 981006 - RNA, 19 nt, Artificial Sequence
  Description of Artificial Sequence: Synthetic oligonucleotide
cuaggaaucccgcgcgcau

SEQ ID NO: 981007 - RNA, 19 nt, Artificial Sequence
  Description of Artificial Sequence: Synthetic oligonucleotide
gccuacagagaggacgcuc

SEQ ID NO: 981008 - RNA, 19 nt, Artificial Sequence
  Description of Artificial Sequence: Synthetic oligonucleotide
ccccgucacccucugaguc

SEQ ID NO: 981009 - RNA, 19 nt, Artificial Sequence
  Description of Artificial Sequence: Synthetic oligonucleotide
cuucuggagcucacggcau

SEQ ID NO: 981010 - RNA, 19 nt, Artificial Sequence
  Description of Artificial Sequence: Synthetic oligonucleotide
gccgagaaacucugcauau

SEQ ID NO: 981011 - RNA, 19 nt, Artificial Sequence
  Description of Artificial Sequence: Synthetic oligonucleotide
ccccuuacuggugaaucuc

SEQ ID NO: 981012 - RNA, 19 nt, Artificial Sequence
  Description of Artificial Sequence: Synthetic oligonucleotide
guccauggcguuaccgaua

SEQ ID NO: 981013 - RNA, 19 nt, Artificial Sequence
  Description of Artificial Sequence: Synthetic oligonucleotide
guuguccggcaggaacaca

SEQ ID NO: 981014 - RNA, 19 nt, Artificial Sequence
  Description of Artificial Sequence: Synthetic oligonucleotide
gcacaucauccaagcguag

SEQ ID NO: 981015 - RNA, 19 nt, Artificial Sequence
  Description of Artificial Sequence: Synthetic oligonucleotide
ggcagagacagaugacgau

SEQ ID NO: 981016 - RNA, 19 nt, Artificial Sequence
  Description of Artificial Sequence: Synthetic oligonucleotide
cccgaagcuguaggcauug

SEQ ID NO: 981017 - RNA, 19 nt, Artificial Sequence
  Description of Artificial Sequence: Synthetic oligonucleotide
cccgaguggaucuucuugu

SEQ ID NO: 981018 - RNA, 19 nt, Artificial Sequence
  Description of Artificial Sequence: Synthetic oligonucleotide
gguccccugagaaguugac

SEQ ID NO: 981019 - RNA, 19 nt, Artificial Sequence
  Description of Artificial Sequence: Synthetic oligonucleotide
gcucacggcaucugucucu

SEQ ID NO: 981020 - RNA, 19 nt, Artificial Sequence
  Description of Artificial Sequence: Synthetic oligonucleotide
cgugggagcuaggaauccc

SEQ ID NO: 981021 - RNA, 19 nt, Artificial Sequence
  Description of Artificial Sequence: Synthetic oligonucleotide
ggggcucgucuccugagcu

SEQ ID NO: 981022 - RNA, 19 nt, Artificial Sequence
  Description of Artificial Sequence: Synthetic oligonucleotide
gggcucgucuccugagcuc

SEQ ID NO: 981023 - RNA, 19 nt, Artificial Sequence
  Description of Artificial Sequence: Synthetic oligonucleotide
ccgcaugcuguagacugug

SEQ ID NO: 981024 - RNA, 19 nt, Artificial Sequence
  Description of Artificial Sequence: Synthetic oligonucleotide
gggccguccgcuacuucug

SEQ ID NO: 981025 - RNA, 19 nt, Artificial Sequence
  Description of Artificial Sequence: Synthetic oligonucleotide
ggaucucaucguccuuuua

SEQ ID NO: 981026 - RNA, 19 nt, Artificial Sequence
  Description of Artificial Sequence: Synthetic oligonucleotide
gcggcaucagcaacuccuc

SEQ ID NO: 981027 - RNA, 19 nt, Artificial Sequence
  Description of Artificial Sequence: Synthetic oligonucleotide
cagcaccugagcgauguau

SEQ ID NO: 981028 - RNA, 19 nt, Artificial Sequence
  Description of Artificial Sequence: Synthetic oligonucleotide
gccgcuucacguugcgucu

SEQ ID NO: 981029 - RNA, 19 nt, Artificial Sequence
  Description of Artificial Sequence: Synthetic oligonucleotide
ggugcggccaccaccuggu

SEQ ID NO: 981030 - RNA, 19 nt, Artificial Sequence
  Description of Artificial Sequence: Synthetic oligonucleotide
cacuugucccggaucucau

SEQ ID NO: 981031 - RNA, 19 nt, Artificial Sequence
  Description of Artificial Sequence: Synthetic oligonucleotide
caaccagcagcccgaugau

SEQ ID NO: 981032 - RNA, 19 nt, Artificial Sequence
  Description of Artificial Sequence: Synthetic oligonucleotide
gagcguguccagugugcuu

SEQ ID NO: 981033 - RNA, 19 nt, Artificial Sequence
  Description of Artificial Sequence: Synthetic oligonucleotide
ccacacuacugggugguga

SEQ ID NO: 981034 - RNA, 19 nt, Artificial Sequence
  Description of Artificial Sequence: Synthetic oligonucleotide
gccucggccaggaauuucu

SEQ ID NO: 981035 - RNA, 19 nt, Artificial Sequence
  Description of Artificial Sequence: Synthetic oligonucleotide
cugcggcggagcgcgccag

SEQ ID NO: 981036 - RNA, 19 nt, Artificial Sequence
  Description of Artificial Sequence: Synthetic oligonucleotide
cggggcuguccucacugag

SEQ ID NO: 981037 - RNA, 19 nt, Artificial Sequence
  Description of Artificial Sequence: Synthetic oligonucleotide
cgcgucgccgccacacuug

SEQ ID NO: 981038 - RNA, 19 nt, Artificial Sequence
  Description of Artificial Sequence: Synthetic oligonucleotide
gccguccgcuacuucugga

SEQ ID NO: 981039 - RNA, 19 nt, Artificial Sequence
  Description of Artificial Sequence: Synthetic oligonucleotide
caccugagcgauguauuuu

SEQ ID NO: 981040 - RNA, 19 nt, Artificial Sequence
  Description of Artificial Sequence: Synthetic oligonucleotide
ggccacacuacuggguggu

SEQ ID NO: 981041 - RNA, 19 nt, Artificial Sequence
  Description of Artificial Sequence: Synthetic oligonucleotide
ccgcgcgcaugguagagaa

SEQ ID NO: 981042 - RNA, 19 nt, Artificial Sequence
  Description of Artificial Sequence: Synthetic oligonucleotide
cguuguccggcaggaacac

SEQ ID NO: 981043 - RNA, 19 nt, Artificial Sequence
  Description of Artificial Sequence: Synthetic oligonucleotide
gcguaggcugcgccaaacu

SEQ ID NO: 981044 - RNA, 19 nt, Artificial Sequence
  Description of Artificial Sequence: Synthetic oligonucleotide
gguacccaccuuggcucuc

SEQ ID NO: 981045 - RNA, 19 nt, Artificial Sequence
  Description of Artificial Sequence: Synthetic oligonucleotide
ggacucccaccacaccccu

SEQ ID NO: 981046 - RNA, 19 nt, Artificial Sequence
  Description of Artificial Sequence: Synthetic oligonucleotide
ccggaucauguacaugagu

SEQ ID NO: 981047 - RNA, 19 nt, Artificial Sequence
  Description of Artificial Sequence: Synthetic oligonucleotide
gcucgucuccugagcuccc

SEQ ID NO: 981048 - RNA, 19 nt, Artificial Sequence
  Description of Artificial Sequence: Synthetic oligonucleotide
ccaugucccuagaggccca

SEQ ID NO: 981049 - RNA, 19 nt, Artificial Sequence
  Description of Artificial Sequence: Synthetic oligonucleotide
cgaugccuacagagaggac

SEQ ID NO: 981050 - RNA, 19 nt, Artificial Sequence
  Description of Artificial Sequence: Synthetic oligonucleotide
ccagaacgacgaaggugaa

SEQ ID NO: 981051 - RNA, 19 nt, Artificial Sequence
  Description of Artificial Sequence: Synthetic oligonucleotide
gcgccaaacuggaacucgu

SEQ ID NO: 981052 - RNA, 19 nt, Artificial Sequence
  Description of Artificial Sequence: Synthetic oligonucleotide
cgcgcgcaugguagagaag

SEQ ID NO: 981053 - RNA, 19 nt, Artificial Sequence
  Description of Artificial Sequence: Synthetic oligonucleotide
gcccgaugaugugccucug

SEQ ID NO: 981054 - RNA, 19 nt, Artificial Sequence
  Description of Artificial Sequence: Synthetic oligonucleotide
cgcucacgacaaccagcag

SEQ ID NO: 981055 - RNA, 19 nt, Artificial Sequence
  Description of Artificial Sequence: Synthetic oligonucleotide
ggagcgcgccaggcagagc

SEQ ID NO: 981056 - RNA, 19 nt, Artificial Sequence
  Description of Artificial Sequence: Synthetic oligonucleotide
aggcugcgccaaacuggaa

SEQ ID NO: 981057 - RNA, 19 nt, Artificial Sequence
  Description of Artificial Sequence: Synthetic oligonucleotide
cggagcgcgccaggcagag

SEQ ID NO: 981058 - RNA, 19 nt, Artificial Sequence
  Description of Artificial Sequence: Synthetic oligonucleotide
ccgcuacuucuggagcuca

SEQ ID NO: 981059 - RNA, 19 nt, Artificial Sequence
  Description of Artificial Sequence: Synthetic oligonucleotide
ccgcuugaccaggucaucu

SEQ ID NO: 981060 - RNA, 19 nt, Artificial Sequence
  Description of Artificial Sequence: Synthetic oligonucleotide
gcgcaucuuagaggugugu

SEQ ID NO: 981061 - RNA, 19 nt, Artificial Sequence
  Description of Artificial Sequence: Synthetic oligonucleotide
gcggagcgcgccaggcaga

SEQ ID NO: 981062 - RNA, 19 nt, Artificial Sequence
  Description of Artificial Sequence: Synthetic oligonucleotide
ccguccccgucacccucug

SEQ ID NO: 981063 - RNA, 19 nt, Artificial Sequence
  Description of Artificial Sequence: Synthetic oligonucleotide
ccgucacccucugaguccu

SEQ ID NO: 981064 - RNA, 19 nt, Artificial Sequence
  Description of Artificial Sequence: Synthetic oligonucleotide
ggaaucccgcgcgcauggu

SEQ ID NO: 981065 - RNA, 19 nt, Artificial Sequence
  Description of Artificial Sequence: Synthetic oligonucleotide
ccccagguuuaaauaccuu

SEQ ID NO: 981066 - RNA, 19 nt, Artificial Sequence
  Description of Artificial Sequence: Synthetic oligonucleotide
cucccaccacaccccucuu

SEQ ID NO: 981067 - RNA, 19 nt, Artificial Sequence
  Description of Artificial Sequence: Synthetic oligonucleotide
ccauggcguuaccgauaaa

SEQ ID NO: 981068 - RNA, 19 nt, Artificial Sequence
  Description of Artificial Sequence: Synthetic oligonucleotide
gcaccgcgucgccgccaca

SEQ ID NO: 981069 - RNA, 19 nt, Artificial Sequence
  Description of Artificial Sequence: Synthetic oligonucleotide
cgcuucacguugcgucuuu

SEQ ID NO: 981070 - RNA, 19 nt, Artificial Sequence
  Description of Artificial Sequence: Synthetic oligonucleotide
ccgcuucacguugcgucuu

SEQ ID NO: 981071 - RNA, 19 nt, Artificial Sequence
  Description of Artificial Sequence: Synthetic oligonucleotide
cguaggccugaugccgcuu

SEQ ID NO: 981072 - RNA, 19 nt, Artificial Sequence
  Description of Artificial Sequence: Synthetic oligonucleotide
gacaauauuauccacgggc

SEQ ID NO: 981073 - RNA, 19 nt, Artificial Sequence
  Description of Artificial Sequence: Synthetic oligonucleotide
aacguugagacguguaugc

SEQ ID NO: 981074 - RNA, 19 nt, Artificial Sequence
  Description of Artificial Sequence: Synthetic oligonucleotide
acguaaagaaucucgagac

SEQ ID NO: 981075 - RNA, 19 nt, Artificial Sequence
  Description of Artificial Sequence: Synthetic oligonucleotide
cauagugaaacucaauggg

SEQ ID NO: 981076 - RNA, 19 nt, Artificial Sequence
  Description of Artificial Sequence: Synthetic oligonucleotide
ugcuuagugagcaacaggc

SEQ ID NO: 981077 - RNA, 19 nt, Artificial Sequence
  Description of Artificial Sequence: Synthetic oligonucleotide
aauucaucauuuacaauac

SEQ ID NO: 981078 - RNA, 19 nt, Artificial Sequence
  Description of Artificial Sequence: Synthetic oligonucleotide
aguucacagccuuuaaugc

SEQ ID NO: 981079 - RNA, 19 nt, Artificial Sequence
  Description of Artificial Sequence: Synthetic oligonucleotide
ucauaaacgcuacuucugg

SEQ ID NO: 981080 - RNA, 19 nt, Artificial Sequence
  Description of Artificial Sequence: Synthetic oligonucleotide
ugcuuuaacagccggaacc

SEQ ID NO: 981081 - RNA, 19 nt, Artificial Sequence
  Description of Artificial Sequence: Synthetic oligonucleotide
aguaaagggaaucaggggu

SEQ ID NO: 981082 - RNA, 19 nt, Artificial Sequence
  Description of Artificial Sequence: Synthetic oligonucleotide
acguguaugcuuuaacagc

SEQ ID NO: 981083 - RNA, 19 nt, Artificial Sequence
  Description of Artificial Sequence: Synthetic oligonucleotide
uuuagggucuuuagguucg

SEQ ID NO: 981084 - RNA, 19 nt, Artificial Sequence
  Description of Artificial Sequence: Synthetic oligonucleotide
uuucugucaagccacagcu

SEQ ID NO: 981085 - RNA, 19 nt, Artificial Sequence
  Description of Artificial Sequence: Synthetic oligonucleotide
agauuuagggucuuuaggu

SEQ ID NO: 981086 - RNA, 19 nt, Artificial Sequence
  Description of Artificial Sequence: Synthetic oligonucleotide
auaucguuugcucaugauc

SEQ ID NO: 981087 - RNA, 19 nt, Artificial Sequence
  Description of Artificial Sequence: Synthetic oligonucleotide
ucaauucguuuccagagag

SEQ ID NO: 981088 - RNA, 19 nt, Artificial Sequence
  Description of Artificial Sequence: Synthetic oligonucleotide
gagauuuagggucuuuagg

SEQ ID NO: 981089 - RNA, 19 nt, Artificial Sequence
  Description of Artificial Sequence: Synthetic oligonucleotide
ugaguuuuggguaacucgu

SEQ ID NO: 981090 - RNA, 19 nt, Artificial Sequence
  Description of Artificial Sequence: Synthetic oligonucleotide
ucgugaaucuuauaguuca

SEQ ID NO: 981091 - RNA, 19 nt, Artificial Sequence
  Description of Artificial Sequence: Synthetic oligonucleotide
aaacgcuacuucuggaauc

SEQ ID NO: 981092 - RNA, 19 nt, Artificial Sequence
  Description of Artificial Sequence: Synthetic oligonucleotide
aaugugcuuguuugggcac

SEQ ID NO: 981093 - RNA, 19 nt, Artificial Sequence
  Description of Artificial Sequence: Synthetic oligonucleotide
aaucucgagacuucccauc

SEQ ID NO: 981094 - RNA, 19 nt, Artificial Sequence
  Description of Artificial Sequence: Synthetic oligonucleotide
aaaucguucucgaacggcg

SEQ ID NO: 981095 - RNA, 19 nt, Artificial Sequence
  Description of Artificial Sequence: Synthetic oligonucleotide
uuggguaacucguugagga

SEQ ID NO: 981096 - RNA, 19 nt, Artificial Sequence
  Description of Artificial Sequence: Synthetic oligonucleotide
uucauaaacgcuacuucug

SEQ ID NO: 981097 - RNA, 19 nt, Artificial Sequence
  Description of Artificial Sequence: Synthetic oligonucleotide
uuauccacgggcuauuuac

SEQ ID NO: 981098 - RNA, 19 nt, Artificial Sequence
  Description of Artificial Sequence: Synthetic oligonucleotide
uugaauagucuguuguugc

SEQ ID NO: 981099 - RNA, 19 nt, Artificial Sequence
  Description of Artificial Sequence: Synthetic oligonucleotide
guaacaacuugggaaaucg

SEQ ID NO: 981100 - RNA, 19 nt, Artificial Sequence
  Description of Artificial Sequence: Synthetic oligonucleotide
agggguuaaguacacagag

SEQ ID NO: 981101 - RNA, 19 nt, Artificial Sequence
  Description of Artificial Sequence: Synthetic oligonucleotide
ugaucauuucauaaacgcu

SEQ ID NO: 981102 - RNA, 19 nt, Artificial Sequence
  Description of Artificial Sequence: Synthetic oligonucleotide
ugggaaaucguucucgaac

SEQ ID NO: 981103 - RNA, 19 nt, Artificial Sequence
  Description of Artificial Sequence: Synthetic oligonucleotide
ucuuuagguucucuguucc

SEQ ID NO: 981104 - RNA, 19 nt, Artificial Sequence
  Description of Artificial Sequence: Synthetic oligonucleotide
uuuuggguaacucguugag

SEQ ID NO: 981105 - RNA, 19 nt, Artificial Sequence
  Description of Artificial Sequence: Synthetic oligonucleotide
ugaacgcacguaaagaauc

SEQ ID NO: 981106 - RNA, 19 nt, Artificial Sequence
  Description of Artificial Sequence: Synthetic oligonucleotide
acaaacguucucgugaacg

SEQ ID NO: 981107 - RNA, 19 nt, Artificial Sequence
  Description of Artificial Sequence: Synthetic oligonucleotide
uuuaaugcagaagcuguag

SEQ ID NO: 981108 - RNA, 19 nt, Artificial Sequence
  Description of Artificial Sequence: Synthetic oligonucleotide
aucucgagacuucccaucc

SEQ ID NO: 981109 - RNA, 19 nt, Artificial Sequence
  Description of Artificial Sequence: Synthetic oligonucleotide
acggcgcugauauaggugg

SEQ ID NO: 981110 - RNA, 19 nt, Artificial Sequence
  Description of Artificial Sequence: Synthetic oligonucleotide
augaugauagauauccuuc

SEQ ID NO: 981111 - RNA, 19 nt, Artificial Sequence
  Description of Artificial Sequence: Synthetic oligonucleotide
ggaaggaaugcuuagugag

SEQ ID NO: 981112 - RNA, 19 nt, Artificial Sequence
  Description of Artificial Sequence: Synthetic oligonucleotide
ucuaccacaaaggaauuga

SEQ ID NO: 981113 - RNA, 19 nt, Artificial Sequence
  Description of Artificial Sequence: Synthetic oligonucleotide
agagauuuagggucuuuag

SEQ ID NO: 981114 - RNA, 19 nt, Artificial Sequence
  Description of Artificial Sequence: Synthetic oligonucleotide
auagugaaacucaaugggg

SEQ ID NO: 981115 - RNA, 19 nt, Artificial Sequence
  Description of Artificial Sequence: Synthetic oligonucleotide
aauauuauccacgggcuau

SEQ ID NO: 981116 - RNA, 19 nt, Artificial Sequence
  Description of Artificial Sequence: Synthetic oligonucleotide
auauagguggacuggucuc

SEQ ID NO: 981117 - RNA, 19 nt, Artificial Sequence
  Description of Artificial Sequence: Synthetic oligonucleotide
uugagaugagugaaggccu

SEQ ID NO: 981118 - RNA, 19 nt, Artificial Sequence
  Description of Artificial Sequence: Synthetic oligonucleotide
uuaacagccggaaccgcag

SEQ ID NO: 981119 - RNA, 19 nt, Artificial Sequence
  Description of Artificial Sequence: Synthetic oligonucleotide
aaugcuuagugagcaacag

SEQ ID NO: 981120 - RNA, 19 nt, Artificial Sequence
  Description of Artificial Sequence: Synthetic oligonucleotide
uccagaagucuucuguaag

SEQ ID NO: 981121 - RNA, 19 nt, Artificial Sequence
  Description of Artificial Sequence: Synthetic oligonucleotide
ugcauaguacugcugcaag

SEQ ID NO: 981122 - RNA, 19 nt, Artificial Sequence
  Description of Artificial Sequence: Synthetic oligonucleotide
ucucgaacggcgcugauau

SEQ ID NO: 981123 - RNA, 19 nt, Artificial Sequence
  Description of Artificial Sequence: Synthetic oligonucleotide
auggaaggaaugcuuagug

SEQ ID NO: 981124 - RNA, 19 nt, Artificial Sequence
  Description of Artificial Sequence: Synthetic oligonucleotide
gaccaaacucuuuagguuc

SEQ ID NO: 981125 - RNA, 19 nt, Artificial Sequence
  Description of Artificial Sequence: Synthetic oligonucleotide
augauagauauccuucugu

SEQ ID NO: 981126 - RNA, 19 nt, Artificial Sequence
  Description of Artificial Sequence: Synthetic oligonucleotide
aauagcucaggaauauucu

SEQ ID NO: 981127 - RNA, 19 nt, Artificial Sequence
  Description of Artificial Sequence: Synthetic oligonucleotide
ucgaacggcgcugauauag

SEQ ID NO: 981128 - RNA, 19 nt, Artificial Sequence
  Description of Artificial Sequence: Synthetic oligonucleotide
acaacuugggaaaucguuc

SEQ ID NO: 981129 - RNA, 19 nt, Artificial Sequence
  Description of Artificial Sequence: Synthetic oligonucleotide
uucaauucguuuccagaga

SEQ ID NO: 981130 - RNA, 19 nt, Artificial Sequence
  Description of Artificial Sequence: Synthetic oligonucleotide
uuagguucggcgcuuucug

SEQ ID NO: 981131 - RNA, 19 nt, Artificial Sequence
  Description of Artificial Sequence: Synthetic oligonucleotide
agaaucucgagacuuccca

SEQ ID NO: 981132 - RNA, 19 nt, Artificial Sequence
  Description of Artificial Sequence: Synthetic oligonucleotide
agcaccuaaguccuucggg

SEQ ID NO: 981133 - RNA, 19 nt, Artificial Sequence
  Description of Artificial Sequence: Synthetic oligonucleotide
auucagcuaaguugcuucg

SEQ ID NO: 981134 - RNA, 19 nt, Artificial Sequence
  Description of Artificial Sequence: Synthetic oligonucleotide
uauagguggacuggucucg

SEQ ID NO: 981135 - RNA, 19 nt, Artificial Sequence
  Description of Artificial Sequence: Synthetic oligonucleotide
ucuaauucccgcucagacu

SEQ ID NO: 981136 - RNA, 19 nt, Artificial Sequence
  Description of Artificial Sequence: Synthetic oligonucleotide
gggaaaucguucucgaacg

SEQ ID NO: 981137 - RNA, 19 nt, Artificial Sequence
  Description of Artificial Sequence: Synthetic oligonucleotide
cagggugguagcauggugg

SEQ ID NO: 981138 - RNA, 19 nt, Artificial Sequence
  Description of Artificial Sequence: Synthetic oligonucleotide
ucuguaagucuuccagaag

SEQ ID NO: 981139 - RNA, 19 nt, Artificial Sequence
  Description of Artificial Sequence: Synthetic oligonucleotide
ugagugaaggccugagcag

SEQ ID NO: 981140 - RNA, 19 nt, Artificial Sequence
  Description of Artificial Sequence: Synthetic oligonucleotide
aagaaucucgagacuuccc

SEQ ID NO: 981141 - RNA, 19 nt, Artificial Sequence
  Description of Artificial Sequence: Synthetic oligonucleotide
augucuaccacaaaggaau

SEQ ID NO: 981142 - RNA, 19 nt, Artificial Sequence
  Description of Artificial Sequence: Synthetic oligonucleotide
guuuucucgaucgugaauc

SEQ ID NO: 981143 - RNA, 19 nt, Artificial Sequence
  Description of Artificial Sequence: Synthetic oligonucleotide
aucauuucauaaacgcuac

SEQ ID NO: 981144 - RNA, 19 nt, Artificial Sequence
  Description of Artificial Sequence: Synthetic oligonucleotide
uaaagaaucucgagacuuc

SEQ ID NO: 981145 - RNA, 19 nt, Artificial Sequence
  Description of Artificial Sequence: Synthetic oligonucleotide
uccgguuaagaacagcauc

SEQ ID NO: 981146 - RNA, 19 nt, Artificial Sequence
  Description of Artificial Sequence: Synthetic oligonucleotide
caaacguucucgugaacgc

SEQ ID NO: 981147 - RNA, 19 nt, Artificial Sequence
  Description of Artificial Sequence: Synthetic oligonucleotide
caaaggaauugauaucaug

SEQ ID NO: 981148 - RNA, 19 nt, Artificial Sequence
  Description of Artificial Sequence: Synthetic oligonucleotide
aaucguucucgaacggcgc

SEQ ID NO: 981149 - RNA, 19 nt, Artificial Sequence
  Description of Artificial Sequence: Synthetic oligonucleotide
cauagcccugaauugcugg

SEQ ID NO: 981150 - RNA, 19 nt, Artificial Sequence
  Description of Artificial Sequence: Synthetic oligonucleotide
aauugauaucauguugagu

SEQ ID NO: 981151 - RNA, 19 nt, Artificial Sequence
  Description of Artificial Sequence: Synthetic oligonucleotide
acuugggaaaucguucucg

SEQ ID NO: 981152 - RNA, 19 nt, Artificial Sequence
  Description of Artificial Sequence: Synthetic oligonucleotide
uuccgcacaaauaauucau

SEQ ID NO: 981153 - RNA, 19 nt, Artificial Sequence
  Description of Artificial Sequence: Synthetic oligonucleotide
aacaaacguucucgugaac

SEQ ID NO: 981154 - RNA, 19 nt, Artificial Sequence
  Description of Artificial Sequence: Synthetic oligonucleotide
cuucggguaguuuaguguc

SEQ ID NO: 981155 - RNA, 19 nt, Artificial Sequence
  Description of Artificial Sequence: Synthetic oligonucleotide
ugaauagucuguuguugcu

SEQ ID NO: 981156 - RNA, 19 nt, Artificial Sequence
  Description of Artificial Sequence: Synthetic oligonucleotide
auuccgcacaaauaauuca

SEQ ID NO: 981157 - RNA, 19 nt, Artificial Sequence
  Description of Artificial Sequence: Synthetic oligonucleotide
cuugaauagucuguuguug

SEQ ID NO: 981158 - RNA, 19 nt, Artificial Sequence
  Description of Artificial Sequence: Synthetic oligonucleotide
cauuccgcacaaauaauuc

SEQ ID NO: 981159 - RNA, 19 nt, Artificial Sequence
  Description of Artificial Sequence: Synthetic oligonucleotide
uucucgugaacgcacguaa

SEQ ID NO: 981160 - RNA, 19 nt, Artificial Sequence
  Description of Artificial Sequence: Synthetic oligonucleotide
agcaaugugcuuguuuggg

SEQ ID NO: 981161 - RNA, 19 nt, Artificial Sequence
  Description of Artificial Sequence: Synthetic oligonucleotide
augcuuagugagcaacagg

SEQ ID NO: 981162 - RNA, 19 nt, Artificial Sequence
  Description of Artificial Sequence: Synthetic oligonucleotide
cuugcaacauuuccuguug

SEQ ID NO: 981163 - RNA, 19 nt, Artificial Sequence
  Description of Artificial Sequence: Synthetic oligonucleotide
gaaucagggguuaaguaca

SEQ ID NO: 981164 - RNA, 19 nt, Artificial Sequence
  Description of Artificial Sequence: Synthetic oligonucleotide
agccagacaauauuaucca

SEQ ID NO: 981165 - RNA, 19 nt, Artificial Sequence
  Description of Artificial Sequence: Synthetic oligonucleotide
uacauagcccugaauugcu

SEQ ID NO: 981166 - RNA, 19 nt, Artificial Sequence
  Description of Artificial Sequence: Synthetic oligonucleotide
aacucguugaggaaggcaa

SEQ ID NO: 981167 - RNA, 19 nt, Artificial Sequence
  Description of Artificial Sequence: Synthetic oligonucleotide
ucauaucguuugcucauga

SEQ ID NO: 981168 - RNA, 19 nt, Artificial Sequence
  Description of Artificial Sequence: Synthetic oligonucleotide
gaaggaaugcuuagugagc

SEQ ID NO: 981169 - RNA, 19 nt, Artificial Sequence
  Description of Artificial Sequence: Synthetic oligonucleotide
aacgcuacuucuggaaucu

SEQ ID NO: 981170 - RNA, 19 nt, Artificial Sequence
  Description of Artificial Sequence: Synthetic oligonucleotide
agacaauauuauccacggg

SEQ ID NO: 981171 - RNA, 19 nt, Artificial Sequence
  Description of Artificial Sequence: Synthetic oligonucleotide
uagcaaugugcuuguuugg

SEQ ID NO: 981172 - RNA, 19 nt, Artificial Sequence
  Description of Artificial Sequence: Synthetic oligonucleotide
accuaaguccuucggguag

SEQ ID NO: 981173 - RNA, 19 nt, Artificial Sequence
  Description of Artificial Sequence: Synthetic oligonucleotide
uugucuaauucccgcucag

SEQ ID NO: 981174 - RNA, 19 nt, Artificial Sequence
  Description of Artificial Sequence: Synthetic oligonucleotide
gauaucauguugaguuuug

SEQ ID NO: 981175 - RNA, 19 nt, Artificial Sequence
  Description of Artificial Sequence: Synthetic oligonucleotide
cuuuagcccuuuuaucuug

SEQ ID NO: 981176 - RNA, 19 nt, Artificial Sequence
  Description of Artificial Sequence: Synthetic oligonucleotide
cacguaaagaaucucgaga

SEQ ID NO: 981177 - RNA, 19 nt, Artificial Sequence
  Description of Artificial Sequence: Synthetic oligonucleotide
aaucagggguuaaguacac

SEQ ID NO: 981178 - RNA, 19 nt, Artificial Sequence
  Description of Artificial Sequence: Synthetic oligonucleotide
aacaacuugggaaaucguu

SEQ ID NO: 981179 - RNA, 19 nt, Artificial Sequence
  Description of Artificial Sequence: Synthetic oligonucleotide
uucccuugcagggugguag

SEQ ID NO: 981180 - RNA, 19 nt, Artificial Sequence
  Description of Artificial Sequence: Synthetic oligonucleotide
aguuuagugucagcucuac

SEQ ID NO: 981181 - RNA, 19 nt, Artificial Sequence
  Description of Artificial Sequence: Synthetic oligonucleotide
acaacguugagacguguau

SEQ ID NO: 981182 - RNA, 19 nt, Artificial Sequence
  Description of Artificial Sequence: Synthetic oligonucleotide
ugaugaugauagauauccu

SEQ ID NO: 981183 - RNA, 19 nt, Artificial Sequence
  Description of Artificial Sequence: Synthetic oligonucleotide
cucgugaacgcacguaaag

SEQ ID NO: 981184 - RNA, 19 nt, Artificial Sequence
  Description of Artificial Sequence: Synthetic oligonucleotide
aagggaaucagggguuaag

SEQ ID NO: 981185 - RNA, 19 nt, Artificial Sequence
  Description of Artificial Sequence: Synthetic oligonucleotide
uugcagggugguagcaugg

SEQ ID NO: 981186 - RNA, 19 nt, Artificial Sequence
  Description of Artificial Sequence: Synthetic oligonucleotide
agcccuuuuaucuugucua

SEQ ID NO: 981187 - RNA, 19 nt, Artificial Sequence
  Description of Artificial Sequence: Synthetic oligonucleotide
uuuagcccuuuuaucuugu

SEQ ID NO: 981188 - RNA, 19 nt, Artificial Sequence
  Description of Artificial Sequence: Synthetic oligonucleotide
aucgugaaucuuauaguuc

SEQ ID NO: 981189 - RNA, 19 nt, Artificial Sequence
  Description of Artificial Sequence: Synthetic oligonucleotide
aacgcacguaaagaaucuc

SEQ ID NO: 981190 - RNA, 19 nt, Artificial Sequence
  Description of Artificial Sequence: Synthetic oligonucleotide
aguuaucacacaugggguu

SEQ ID NO: 981191 - RNA, 19 nt, Artificial Sequence
  Description of Artificial Sequence: Synthetic oligonucleotide
caggaccaaacucuuuagg

SEQ ID NO: 981192 - RNA, 19 nt, Artificial Sequence
  Description of Artificial Sequence: Synthetic oligonucleotide
cauggcgaaggcucuuugg

SEQ ID NO: 981193 - RNA, 19 nt, Artificial Sequence
  Description of Artificial Sequence: Synthetic oligonucleotide
caacuuuagcccuuuuauc

SEQ ID NO: 981194 - RNA, 19 nt, Artificial Sequence
  Description of Artificial Sequence: Synthetic oligonucleotide
agcaacaaacguucucgug

SEQ ID NO: 981195 - RNA, 19 nt, Artificial Sequence
  Description of Artificial Sequence: Synthetic oligonucleotide
gcaacaaacguucucguga

SEQ ID NO: 981196 - RNA, 19 nt, Artificial Sequence
  Description of Artificial Sequence: Synthetic oligonucleotide
acgggcuauuuacaagggg

SEQ ID NO: 981197 - RNA, 19 nt, Artificial Sequence
  Description of Artificial Sequence: Synthetic oligonucleotide
agguucaugccagacuggg

SEQ ID NO: 981198 - RNA, 19 nt, Artificial Sequence
  Description of Artificial Sequence: Synthetic oligonucleotide
uuuagguucggcgcuuucu

SEQ ID NO: 981199 - RNA, 19 nt, Artificial Sequence
  Description of Artificial Sequence: Synthetic oligonucleotide
agcaacaggcgccaucaug

SEQ ID NO: 981200 - RNA, 19 nt, Artificial Sequence
  Description of Artificial Sequence: Synthetic oligonucleotide
acgcacguaaagaaucucg

SEQ ID NO: 981201 - RNA, 19 nt, Artificial Sequence
  Description of Artificial Sequence: Synthetic oligonucleotide
agggugggaucuuuaagcu

SEQ ID NO: 981202 - RNA, 19 nt, Artificial Sequence
  Description of Artificial Sequence: Synthetic oligonucleotide
uaacaacuugggaaaucgu

SEQ ID NO: 981203 - RNA, 19 nt, Artificial Sequence
  Description of Artificial Sequence: Synthetic oligonucleotide
caugggguuucugucaagc

SEQ ID NO: 981204 - RNA, 19 nt, Artificial Sequence
  Description of Artificial Sequence: Synthetic oligonucleotide
guuuuggguaacucguuga

SEQ ID NO: 981205 - RNA, 19 nt, Artificial Sequence
  Description of Artificial Sequence: Synthetic oligonucleotide
ucgugaacgcacguaaaga

SEQ ID NO: 981206 - RNA, 19 nt, Artificial Sequence
  Description of Artificial Sequence: Synthetic oligonucleotide
acacaugggguuucuguca

SEQ ID NO: 981207 - RNA, 19 nt, Artificial Sequence
  Description of Artificial Sequence: Synthetic oligonucleotide
gaucgugaaucuuauaguu

SEQ ID NO: 981208 - RNA, 19 nt, Artificial Sequence
  Description of Artificial Sequence: Synthetic oligonucleotide
gguagagaaugcuugcaac

SEQ ID NO: 981209 - RNA, 19 nt, Artificial Sequence
  Description of Artificial Sequence: Synthetic oligonucleotide
uccuucggguaguuuagug

SEQ ID NO: 981210 - RNA, 19 nt, Artificial Sequence
  Description of Artificial Sequence: Synthetic oligonucleotide
gagacguguaugcuuuaac

SEQ ID NO: 981211 - RNA, 19 nt, Artificial Sequence
  Description of Artificial Sequence: Synthetic oligonucleotide
guucaugccagacugggua

SEQ ID NO: 981212 - RNA, 19 nt, Artificial Sequence
  Description of Artificial Sequence: Synthetic oligonucleotide
caaugugcuuguuugggca

SEQ ID NO: 981213 - RNA, 19 nt, Artificial Sequence
  Description of Artificial Sequence: Synthetic oligonucleotide
aaacguucucgugaacgca

SEQ ID NO: 981214 - RNA, 19 nt, Artificial Sequence
  Description of Artificial Sequence: Synthetic oligonucleotide
ccacgggcuauuuacaagg

SEQ ID NO: 981215 - RNA, 19 nt, Artificial Sequence
  Description of Artificial Sequence: Synthetic oligonucleotide
uccgcacaaauaauucauc

SEQ ID NO: 981216 - RNA, 19 nt, Artificial Sequence
  Description of Artificial Sequence: Synthetic oligonucleotide
gugaaacucaaugggguug

SEQ ID NO: 981217 - RNA, 19 nt, Artificial Sequence
  Description of Artificial Sequence: Synthetic oligonucleotide
aucguuugcucaugaucag

SEQ ID NO: 981218 - RNA, 19 nt, Artificial Sequence
  Description of Artificial Sequence: Synthetic oligonucleotide
uuagguucucuguuccaaa

SEQ ID NO: 981219 - RNA, 19 nt, Artificial Sequence
  Description of Artificial Sequence: Synthetic oligonucleotide
ugggcacuuaugucuacca

SEQ ID NO: 981220 - RNA, 19 nt, Artificial Sequence
  Description of Artificial Sequence: Synthetic oligonucleotide
uucggguaguuuaguguca

SEQ ID NO: 981221 - RNA, 19 nt, Artificial Sequence
  Description of Artificial Sequence: Synthetic oligonucleotide
ugauaucauguugaguuuu

SEQ ID NO: 981222 - RNA, 19 nt, Artificial Sequence
  Description of Artificial Sequence: Synthetic oligonucleotide
gguaacucguugaggaagg

SEQ ID NO: 981223 - RNA, 19 nt, Artificial Sequence
  Description of Artificial Sequence: Synthetic oligonucleotide
gggucuuuagguucggcgc

SEQ ID NO: 981224 - RNA, 19 nt, Artificial Sequence
  Description of Artificial Sequence: Synthetic oligonucleotide
gcugauauagguggacugg

SEQ ID NO: 981225 - RNA, 19 nt, Artificial Sequence
  Description of Artificial Sequence: Synthetic oligonucleotide
accacgaggcucaaucuuc

SEQ ID NO: 981226 - RNA, 19 nt, Artificial Sequence
  Description of Artificial Sequence: Synthetic oligonucleotide
gagcaccuaaguccuucgg

SEQ ID NO: 981227 - RNA, 19 nt, Artificial Sequence
  Description of Artificial Sequence: Synthetic oligonucleotide
ucggguaguuuagugucag

SEQ ID NO: 981228 - RNA, 19 nt, Artificial Sequence
  Description of Artificial Sequence: Synthetic oligonucleotide
cagcuaaguugcuucgggc

SEQ ID NO: 981229 - RNA, 19 nt, Artificial Sequence
  Description of Artificial Sequence: Synthetic oligonucleotide
aacggcgcugauauaggug

SEQ ID NO: 981230 - RNA, 19 nt, Artificial Sequence
  Description of Artificial Sequence: Synthetic oligonucleotide
aucaauguucugggccacc

SEQ ID NO: 981231 - RNA, 19 nt, Artificial Sequence
  Description of Artificial Sequence: Synthetic oligonucleotide
cacgggcuauuuacaaggg

SEQ ID NO: 981232 - RNA, 19 nt, Artificial Sequence
  Description of Artificial Sequence: Synthetic oligonucleotide
gcuaaguugcuucgggcag

SEQ ID NO: 981233 - RNA, 19 nt, Artificial Sequence
  Description of Artificial Sequence: Synthetic oligonucleotide
auccaggcguaacaacuug

SEQ ID NO: 981234 - RNA, 19 nt, Artificial Sequence
  Description of Artificial Sequence: Synthetic oligonucleotide
ggaaaucguucucgaacgg

SEQ ID NO: 981235 - RNA, 19 nt, Artificial Sequence
  Description of Artificial Sequence: Synthetic oligonucleotide
aauucccgcucagacuuca

SEQ ID NO: 981236 - RNA, 19 nt, Artificial Sequence
  Description of Artificial Sequence: Synthetic oligonucleotide
guacugcugcaagaaaugc

SEQ ID NO: 981237 - RNA, 19 nt, Artificial Sequence
  Description of Artificial Sequence: Synthetic oligonucleotide
acaauacauagcccugaau

SEQ ID NO: 981238 - RNA, 19 nt, Artificial Sequence
  Description of Artificial Sequence: Synthetic oligonucleotide
cuaauucccgcucagacuu

SEQ ID NO: 981239 - RNA, 19 nt, Artificial Sequence
  Description of Artificial Sequence: Synthetic oligonucleotide
agaaugcuugcaacauuuc

SEQ ID NO: 981240 - RNA, 19 nt, Artificial Sequence
  Description of Artificial Sequence: Synthetic oligonucleotide
agagaaugcuugcaacauu

SEQ ID NO: 981241 - RNA, 19 nt, Artificial Sequence
  Description of Artificial Sequence: Synthetic oligonucleotide
uggguagagaaugcuugca

SEQ ID NO: 981242 - RNA, 19 nt, Artificial Sequence
  Description of Artificial Sequence: Synthetic oligonucleotide
cuugggaaaucguucucga

SEQ ID NO: 981243 - RNA, 19 nt, Artificial Sequence
  Description of Artificial Sequence: Synthetic oligonucleotide
caacguugagacguguaug

SEQ ID NO: 981244 - RNA, 19 nt, Artificial Sequence
  Description of Artificial Sequence: Synthetic oligonucleotide
uaguuuagugucagcucua

SEQ ID NO: 981245 - RNA, 19 nt, Artificial Sequence
  Description of Artificial Sequence: Synthetic oligonucleotide
uugcauaguacugcugcaa

SEQ ID NO: 981246 - RNA, 19 nt, Artificial Sequence
  Description of Artificial Sequence: Synthetic oligonucleotide
gacccugacggucuccuga

SEQ ID NO: 981247 - RNA, 19 nt, Artificial Sequence
  Description of Artificial Sequence: Synthetic oligonucleotide
ggcccguguguuuucauag

SEQ ID NO: 981248 - RNA, 19 nt, Artificial Sequence
  Description of Artificial Sequence: Synthetic oligonucleotide
ugucuaauucccgcucaga

SEQ ID NO: 981249 - RNA, 19 nt, Artificial Sequence
  Description of Artificial Sequence: Synthetic oligonucleotide
ucccgcucagacuucaauu

SEQ ID NO: 981250 - RNA, 19 nt, Artificial Sequence
  Description of Artificial Sequence: Synthetic oligonucleotide
aucguucucgaacggcgcu

SEQ ID NO: 981251 - RNA, 19 nt, Artificial Sequence
  Description of Artificial Sequence: Synthetic oligonucleotide
ggcguaacaacuugggaaa

SEQ ID NO: 981252 - RNA, 19 nt, Artificial Sequence
  Description of Artificial Sequence: Synthetic oligonucleotide
gugaaucuuauaguucaca

SEQ ID NO: 981253 - RNA, 19 nt, Artificial Sequence
  Description of Artificial Sequence: Synthetic oligonucleotide
uugggaaaucguucucgaa

SEQ ID NO: 981254 - RNA, 19 nt, Artificial Sequence
  Description of Artificial Sequence: Synthetic oligonucleotide
gauuuagggucuuuagguu

SEQ ID NO: 981255 - RNA, 19 nt, Artificial Sequence
  Description of Artificial Sequence: Synthetic oligonucleotide
acucguugaggaaggcaac

SEQ ID NO: 981256 - RNA, 19 nt, Artificial Sequence
  Description of Artificial Sequence: Synthetic oligonucleotide
ggguaacucguugaggaag

SEQ ID NO: 981257 - RNA, 19 nt, Artificial Sequence
  Description of Artificial Sequence: Synthetic oligonucleotide
augcucaggagccacgcuu

SEQ ID NO: 981258 - RNA, 19 nt, Artificial Sequence
  Description of Artificial Sequence: Synthetic oligonucleotide
gcuucuccgguuaagaaca

SEQ ID NO: 981259 - RNA, 19 nt, Artificial Sequence
  Description of Artificial Sequence: Synthetic oligonucleotide
uguugaguuuuggguaacu

SEQ ID NO: 981260 - RNA, 19 nt, Artificial Sequence
  Description of Artificial Sequence: Synthetic oligonucleotide
guaguggcaucuuccacaa

SEQ ID NO: 981261 - RNA, 19 nt, Artificial Sequence
  Description of Artificial Sequence: Synthetic oligonucleotide
ggcccuugaggucaagugc

SEQ ID NO: 981262 - RNA, 19 nt, Artificial Sequence
  Description of Artificial Sequence: Synthetic oligonucleotide
acccugacggucuccugag

SEQ ID NO: 981263 - RNA, 19 nt, Artificial Sequence
  Description of Artificial Sequence: Synthetic oligonucleotide
auaucacucuuuaucuuaa

SEQ ID NO: 981264 - RNA, 19 nt, Artificial Sequence
  Description of Artificial Sequence: Synthetic oligonucleotide
aacaggcgccaucauggua

SEQ ID NO: 981265 - RNA, 19 nt, Artificial Sequence
  Description of Artificial Sequence: Synthetic oligonucleotide
cuuuaaugcagaagcugua

SEQ ID NO: 981266 - RNA, 19 nt, Artificial Sequence
  Description of Artificial Sequence: Synthetic oligonucleotide
uuagggucuuuagguucgg

SEQ ID NO: 981267 - RNA, 19 nt, Artificial Sequence
  Description of Artificial Sequence: Synthetic oligonucleotide
agauauccuucuguuuucu

SEQ ID NO: 981268 - RNA, 19 nt, Artificial Sequence
  Description of Artificial Sequence: Synthetic oligonucleotide
caacaaacguucucgugaa

SEQ ID NO: 981269 - RNA, 19 nt, Artificial Sequence
  Description of Artificial Sequence: Synthetic oligonucleotide
ugucuaccacaaaggaauu

SEQ ID NO: 981270 - RNA, 19 nt, Artificial Sequence
  Description of Artificial Sequence: Synthetic oligonucleotide
gcaaugugcuuguuugggc

SEQ ID NO: 981271 - RNA, 19 nt, Artificial Sequence
  Description of Artificial Sequence: Synthetic oligonucleotide
uuaucacacaugggguuuc

SEQ ID NO: 981272 - RNA, 19 nt, Artificial Sequence
  Description of Artificial Sequence: Synthetic oligonucleotide
cuggacauaucauccagcu

SEQ ID NO: 981273 - RNA, 19 nt, Artificial Sequence
  Description of Artificial Sequence: Synthetic oligonucleotide
uggguaacucguugaggaa

SEQ ID NO: 981274 - RNA, 19 nt, Artificial Sequence
  Description of Artificial Sequence: Synthetic oligonucleotide
ggcaacaacguugagacgu

SEQ ID NO: 981275 - RNA, 19 nt, Artificial Sequence
  Description of Artificial Sequence: Synthetic oligonucleotide
uggacauaucauccagcuu

SEQ ID NO: 981276 - RNA, 19 nt, Artificial Sequence
  Description of Artificial Sequence: Synthetic oligonucleotide
gagaaugcuugcaacauuu

SEQ ID NO: 981277 - RNA, 19 nt, Artificial Sequence
  Description of Artificial Sequence: Synthetic oligonucleotide
cuguaguggcaucuuccac

SEQ ID NO: 981278 - RNA, 19 nt, Artificial Sequence
  Description of Artificial Sequence: Synthetic oligonucleotide
guugaaggggacacugcac

SEQ ID NO: 981279 - RNA, 19 nt, Artificial Sequence
  Description of Artificial Sequence: Synthetic oligonucleotide
ccgguuaagaacagcauca

SEQ ID NO: 981280 - RNA, 19 nt, Artificial Sequence
  Description of Artificial Sequence: Synthetic oligonucleotide
uaaagggaaucagggguua

SEQ ID NO: 981281 - RNA, 19 nt, Artificial Sequence
  Description of Artificial Sequence: Synthetic oligonucleotide
uagugagcaacaggcgcca

SEQ ID NO: 981282 - RNA, 19 nt, Artificial Sequence
  Description of Artificial Sequence: Synthetic oligonucleotide
aggcaacaacguugagacg

SEQ ID NO: 981283 - RNA, 19 nt, Artificial Sequence
  Description of Artificial Sequence: Synthetic oligonucleotide
agcggaggcccuugagguc

SEQ ID NO: 981284 - RNA, 19 nt, Artificial Sequence
  Description of Artificial Sequence: Synthetic oligonucleotide
gucuaccacaaaggaauug

SEQ ID NO: 981285 - RNA, 19 nt, Artificial Sequence
  Description of Artificial Sequence: Synthetic oligonucleotide
ucccuugcagggugguagc

SEQ ID NO: 981286 - RNA, 19 nt, Artificial Sequence
  Description of Artificial Sequence: Synthetic oligonucleotide
guugcuucgggcagaguuc

SEQ ID NO: 981287 - RNA, 19 nt, Artificial Sequence
  Description of Artificial Sequence: Synthetic oligonucleotide
uagguucggcgcuuucugu

SEQ ID NO: 981288 - RNA, 19 nt, Artificial Sequence
  Description of Artificial Sequence: Synthetic oligonucleotide
gcuuagugagcaacaggcg

SEQ ID NO: 981289 - RNA, 19 nt, Artificial Sequence
  Description of Artificial Sequence: Synthetic oligonucleotide
uucuccgguuaagaacagc

SEQ ID NO: 981290 - RNA, 19 nt, Artificial Sequence
  Description of Artificial Sequence: Synthetic oligonucleotide
ucugagcggaggcccuuga

SEQ ID NO: 981291 - RNA, 19 nt, Artificial Sequence
  Description of Artificial Sequence: Synthetic oligonucleotide
caacuugggaaaucguucu

SEQ ID NO: 981292 - RNA, 19 nt, Artificial Sequence
  Description of Artificial Sequence: Synthetic oligonucleotide
uuagcccuuuuaucuuguc

SEQ ID NO: 981293 - RNA, 19 nt, Artificial Sequence
  Description of Artificial Sequence: Synthetic oligonucleotide
aaagggaaucagggguuaa

SEQ ID NO: 981294 - RNA, 19 nt, Artificial Sequence
  Description of Artificial Sequence: Synthetic oligonucleotide
gagcggaggcccuugaggu

SEQ ID NO: 981295 - RNA, 19 nt, Artificial Sequence
  Description of Artificial Sequence: Synthetic oligonucleotide
cagggguuaaguacacaga

SEQ ID NO: 981296 - RNA, 19 nt, Artificial Sequence
  Description of Artificial Sequence: Synthetic oligonucleotide
cagcaucaauguucugggc

SEQ ID NO: 981297 - RNA, 19 nt, Artificial Sequence
  Description of Artificial Sequence: Synthetic oligonucleotide
cugacggucuccugaguca

SEQ ID NO: 981298 - RNA, 19 nt, Artificial Sequence
  Description of Artificial Sequence: Synthetic oligonucleotide
ucguucucgaacggcgcug

SEQ ID NO: 981299 - RNA, 19 nt, Artificial Sequence
  Description of Artificial Sequence: Synthetic oligonucleotide
guacacugcgggguggagc

SEQ ID NO: 981300 - RNA, 19 nt, Artificial Sequence
  Description of Artificial Sequence: Synthetic oligonucleotide
agacaauagcucaggaaua

SEQ ID NO: 981301 - RNA, 19 nt, Artificial Sequence
  Description of Artificial Sequence: Synthetic oligonucleotide
cuucuccgguuaagaacag

SEQ ID NO: 981302 - RNA, 19 nt, Artificial Sequence
  Description of Artificial Sequence: Synthetic oligonucleotide
aguuacaggcuggccucgg

SEQ ID NO: 981303 - RNA, 19 nt, Artificial Sequence
  Description of Artificial Sequence: Synthetic oligonucleotide
uucggcgcuuucuguacaa

SEQ ID NO: 981304 - RNA, 19 nt, Artificial Sequence
  Description of Artificial Sequence: Synthetic oligonucleotide
caauucguuuccagagaga

SEQ ID NO: 981305 - RNA, 19 nt, Artificial Sequence
  Description of Artificial Sequence: Synthetic oligonucleotide
uagcccugaauugcuggca

SEQ ID NO: 981306 - RNA, 19 nt, Artificial Sequence
  Description of Artificial Sequence: Synthetic oligonucleotide
ugagcagaucugguauagu

SEQ ID NO: 981307 - RNA, 19 nt, Artificial Sequence
  Description of Artificial Sequence: Synthetic oligonucleotide
acguucucgugaacgcacg

SEQ ID NO: 981308 - RNA, 19 nt, Artificial Sequence
  Description of Artificial Sequence: Synthetic oligonucleotide
gaaucaugcucaggagcca

SEQ ID NO: 981309 - RNA, 19 nt, Artificial Sequence
  Description of Artificial Sequence: Synthetic oligonucleotide
uguacacugcgggguggag

SEQ ID NO: 981310 - RNA, 19 nt, Artificial Sequence
  Description of Artificial Sequence: Synthetic oligonucleotide
agccuuuaaugcagaagcu

SEQ ID NO: 981311 - RNA, 19 nt, Artificial Sequence
  Description of Artificial Sequence: Synthetic oligonucleotide
guuccaaaauagcuucccu

SEQ ID NO: 981312 - RNA, 19 nt, Artificial Sequence
  Description of Artificial Sequence: Synthetic oligonucleotide
auauuauccacgggcuauu

SEQ ID NO: 981313 - RNA, 19 nt, Artificial Sequence
  Description of Artificial Sequence: Synthetic oligonucleotide
aacugggcccguguguuuu

SEQ ID NO: 981314 - RNA, 19 nt, Artificial Sequence
  Description of Artificial Sequence: Synthetic oligonucleotide
aggaaugcuuagugagcaa

SEQ ID NO: 981315 - RNA, 19 nt, Artificial Sequence
  Description of Artificial Sequence: Synthetic oligonucleotide
caaugggguugaaggggac

SEQ ID NO: 981316 - RNA, 19 nt, Artificial Sequence
  Description of Artificial Sequence: Synthetic oligonucleotide
gaaucucgagacuucccau

SEQ ID NO: 981317 - RNA, 19 nt, Artificial Sequence
  Description of Artificial Sequence: Synthetic oligonucleotide
gagucauaaauugcauagu

SEQ ID NO: 981318 - RNA, 19 nt, Artificial Sequence
  Description of Artificial Sequence: Synthetic oligonucleotide
gggguuaaguacacagagc

SEQ ID NO: 981319 - RNA, 19 nt, Artificial Sequence
  Description of Artificial Sequence: Synthetic oligonucleotide
gguuaaguacacagagcac

SEQ ID NO: 981320 - RNA, 19 nt, Artificial Sequence
  Description of Artificial Sequence: Synthetic oligonucleotide
ugacggucuccugagucau

SEQ ID NO: 981321 - RNA, 19 nt, Artificial Sequence
  Description of Artificial Sequence: Synthetic oligonucleotide
gaugacagccagacaauau

SEQ ID NO: 981322 - RNA, 19 nt, Artificial Sequence
  Description of Artificial Sequence: Synthetic oligonucleotide
ccucagucacaguuacagg

SEQ ID NO: 981323 - RNA, 19 nt, Artificial Sequence
  Description of Artificial Sequence: Synthetic oligonucleotide
gaacgcacguaaagaaucu

SEQ ID NO: 981324 - RNA, 19 nt, Artificial Sequence
  Description of Artificial Sequence: Synthetic oligonucleotide
uucucgaacggcgcugaua

SEQ ID NO: 981325 - RNA, 19 nt, Artificial Sequence
  Description of Artificial Sequence: Synthetic oligonucleotide
gguucggcgcuuucuguac

SEQ ID NO: 981326 - RNA, 19 nt, Artificial Sequence
  Description of Artificial Sequence: Synthetic oligonucleotide
acggucuccugagucauaa

SEQ ID NO: 981327 - RNA, 19 nt, Artificial Sequence
  Description of Artificial Sequence: Synthetic oligonucleotide
acauagcccugaauugcug

SEQ ID NO: 981328 - RNA, 19 nt, Artificial Sequence
  Description of Artificial Sequence: Synthetic oligonucleotide
guugagacguguaugcuuu

SEQ ID NO: 981329 - RNA, 19 nt, Artificial Sequence
  Description of Artificial Sequence: Synthetic oligonucleotide
ugggagccaucauaucguu

SEQ ID NO: 981330 - RNA, 19 nt, Artificial Sequence
  Description of Artificial Sequence: Synthetic oligonucleotide
agccggaaccgcagggugg

SEQ ID NO: 981331 - RNA, 19 nt, Artificial Sequence
  Description of Artificial Sequence: Synthetic oligonucleotide
cugagcggaggcccuugag

SEQ ID NO: 981332 - RNA, 19 nt, Artificial Sequence
  Description of Artificial Sequence: Synthetic oligonucleotide
ugcagggugguagcauggu

SEQ ID NO: 981333 - RNA, 19 nt, Artificial Sequence
  Description of Artificial Sequence: Synthetic oligonucleotide
ccgcucagacuucaauucg

SEQ ID NO: 981334 - RNA, 19 nt, Artificial Sequence
  Description of Artificial Sequence: Synthetic oligonucleotide
gccagacaauauuauccac

SEQ ID NO: 981335 - RNA, 19 nt, Artificial Sequence
  Description of Artificial Sequence: Synthetic oligonucleotide
caucaauguucugggccac

SEQ ID NO: 981336 - RNA, 19 nt, Artificial Sequence
  Description of Artificial Sequence: Synthetic oligonucleotide
gaacggcgcugauauaggu

SEQ ID NO: 981337 - RNA, 19 nt, Artificial Sequence
  Description of Artificial Sequence: Synthetic oligonucleotide
acaauagcucaggaauauu

SEQ ID NO: 981338 - RNA, 19 nt, Artificial Sequence
  Description of Artificial Sequence: Synthetic oligonucleotide
cuaaguugcuucgggcaga

SEQ ID NO: 981339 - RNA, 19 nt, Artificial Sequence
  Description of Artificial Sequence: Synthetic oligonucleotide
acguugagacguguaugcu

SEQ ID NO: 981340 - RNA, 19 nt, Artificial Sequence
  Description of Artificial Sequence: Synthetic oligonucleotide
aaucugggucugagcggag

SEQ ID NO: 981341 - RNA, 19 nt, Artificial Sequence
  Description of Artificial Sequence: Synthetic oligonucleotide
gcacuuaugucuaccacaa

SEQ ID NO: 981342 - RNA, 19 nt, Artificial Sequence
  Description of Artificial Sequence: Synthetic oligonucleotide
cccguguguuuucauagug

SEQ ID NO: 981343 - RNA, 19 nt, Artificial Sequence
  Description of Artificial Sequence: Synthetic oligonucleotide
ccacgaggcucaaucuucc

SEQ ID NO: 981344 - RNA, 19 nt, Artificial Sequence
  Description of Artificial Sequence: Synthetic oligonucleotide
cauagcaaugugcuuguuu

SEQ ID NO: 981345 - RNA, 19 nt, Artificial Sequence
  Description of Artificial Sequence: Synthetic oligonucleotide
agcccucccuccucaguca

SEQ ID NO: 981346 - RNA, 19 nt, Artificial Sequence
  Description of Artificial Sequence: Synthetic oligonucleotide
ccugacggucuccugaguc

SEQ ID NO: 981347 - RNA, 19 nt, Artificial Sequence
  Description of Artificial Sequence: Synthetic oligonucleotide
uugagacguguaugcuuua

SEQ ID NO: 981348 - RNA, 19 nt, Artificial Sequence
  Description of Artificial Sequence: Synthetic oligonucleotide
ggcgccaucaugguaggca

SEQ ID NO: 981349 - RNA, 19 nt, Artificial Sequence
  Description of Artificial Sequence: Synthetic oligonucleotide
ucauggccauccaggcgua

SEQ ID NO: 981350 - RNA, 19 nt, Artificial Sequence
  Description of Artificial Sequence: Synthetic oligonucleotide
ggucaagugcuuguuggga

SEQ ID NO: 981351 - RNA, 19 nt, Artificial Sequence
  Description of Artificial Sequence: Synthetic oligonucleotide
gggcacuuaugucuaccac

SEQ ID NO: 981352 - RNA, 19 nt, Artificial Sequence
  Description of Artificial Sequence: Synthetic oligonucleotide
ggagagcgugggcacuggg

SEQ ID NO: 981353 - RNA, 19 nt, Artificial Sequence
  Description of Artificial Sequence: Synthetic oligonucleotide
ugcuucgggcagaguucug

SEQ ID NO: 981354 - RNA, 19 nt, Artificial Sequence
  Description of Artificial Sequence: Synthetic oligonucleotide
guaaagggaaucagggguu

SEQ ID NO: 981355 - RNA, 19 nt, Artificial Sequence
  Description of Artificial Sequence: Synthetic oligonucleotide
agugaaggccugagcagau

SEQ ID NO: 981356 - RNA, 19 nt, Artificial Sequence
  Description of Artificial Sequence: Synthetic oligonucleotide
aucagggguuaaguacaca

SEQ ID NO: 981357 - RNA, 19 nt, Artificial Sequence
  Description of Artificial Sequence: Synthetic oligonucleotide
guggacuggucucggaagu

SEQ ID NO: 981358 - RNA, 19 nt, Artificial Sequence
  Description of Artificial Sequence: Synthetic oligonucleotide
gcaccuaaguccuucgggu

SEQ ID NO: 981359 - RNA, 19 nt, Artificial Sequence
  Description of Artificial Sequence: Synthetic oligonucleotide
ggaccaaacucuuuagguu

SEQ ID NO: 981360 - RNA, 19 nt, Artificial Sequence
  Description of Artificial Sequence: Synthetic oligonucleotide
gcagggugguagcauggug

SEQ ID NO: 981361 - RNA, 19 nt, Artificial Sequence
  Description of Artificial Sequence: Synthetic oligonucleotide
caggaacagcaacaaacgu

SEQ ID NO: 981362 - RNA, 19 nt, Artificial Sequence
  Description of Artificial Sequence: Synthetic oligonucleotide
cgcugauauagguggacug

SEQ ID NO: 981363 - RNA, 19 nt, Artificial Sequence
  Description of Artificial Sequence: Synthetic oligonucleotide
ucgggcgggacaggagaug

SEQ ID NO: 981364 - RNA, 19 nt, Artificial Sequence
  Description of Artificial Sequence: Synthetic oligonucleotide
cugauauagguggacuggu

SEQ ID NO: 981365 - RNA, 19 nt, Artificial Sequence
  Description of Artificial Sequence: Synthetic oligonucleotide
cgaacggcgcugauauagg

SEQ ID NO: 981366 - RNA, 19 nt, Artificial Sequence
  Description of Artificial Sequence: Synthetic oligonucleotide
cguguguuuucauagugaa

SEQ ID NO: 981367 - RNA, 19 nt, Artificial Sequence
  Description of Artificial Sequence: Synthetic oligonucleotide
gcaacaacguugagacgug

SEQ ID NO: 981368 - RNA, 19 nt, Artificial Sequence
  Description of Artificial Sequence: Synthetic oligonucleotide
cgugaacgcacguaaagaa

SEQ ID NO: 981369 - RNA, 19 nt, Artificial Sequence
  Description of Artificial Sequence: Synthetic oligonucleotide
caccuaaguccuucgggua

SEQ ID NO: 981370 - RNA, 19 nt, Artificial Sequence
  Description of Artificial Sequence: Synthetic oligonucleotide
cauaucguuugcucaugau

SEQ ID NO: 981371 - RNA, 19 nt, Artificial Sequence
  Description of Artificial Sequence: Synthetic oligonucleotide
uggacuggucucggaaguu

SEQ ID NO: 981372 - RNA, 19 nt, Artificial Sequence
  Description of Artificial Sequence: Synthetic oligonucleotide
acgcuacuucuggaaucuc

SEQ ID NO: 981373 - RNA, 19 nt, Artificial Sequence
  Description of Artificial Sequence: Synthetic oligonucleotide
gugaacgcacguaaagaau

SEQ ID NO: 981374 - RNA, 19 nt, Artificial Sequence
  Description of Artificial Sequence: Synthetic oligonucleotide
ccguguguuuucauaguga

SEQ ID NO: 981375 - RNA, 19 nt, Artificial Sequence
  Description of Artificial Sequence: Synthetic oligonucleotide
guucucgugaacgcacgua

SEQ ID NO: 981376 - RNA, 19 nt, Artificial Sequence
  Description of Artificial Sequence: Synthetic oligonucleotide
gcuggcauuccgcacaaau

SEQ ID NO: 981377 - RNA, 19 nt, Artificial Sequence
  Description of Artificial Sequence: Synthetic oligonucleotide
agccacgcuuugucauacu

SEQ ID NO: 981378 - RNA, 19 nt, Artificial Sequence
  Description of Artificial Sequence: Synthetic oligonucleotide
gcauggcgaaggcucuuug

SEQ ID NO: 981379 - RNA, 19 nt, Artificial Sequence
  Description of Artificial Sequence: Synthetic oligonucleotide
ggcgggacaggagauggca

SEQ ID NO: 981380 - RNA, 19 nt, Artificial Sequence
  Description of Artificial Sequence: Synthetic oligonucleotide
cacgaggcucaaucuucca

SEQ ID NO: 981381 - RNA, 19 nt, Artificial Sequence
  Description of Artificial Sequence: Synthetic oligonucleotide
cgcacguaaagaaucucga

SEQ ID NO: 981382 - RNA, 19 nt, Artificial Sequence
  Description of Artificial Sequence: Synthetic oligonucleotide
acauaucauccagcuugaa

SEQ ID NO: 981383 - RNA, 19 nt, Artificial Sequence
  Description of Artificial Sequence: Synthetic oligonucleotide
ggcgcugauauagguggac

SEQ ID NO: 981384 - RNA, 19 nt, Artificial Sequence
  Description of Artificial Sequence: Synthetic oligonucleotide
aaguugcuucgggcagagu

SEQ ID NO: 981385 - RNA, 19 nt, Artificial Sequence
  Description of Artificial Sequence: Synthetic oligonucleotide
ccuugaggucaagugcuug

SEQ ID NO: 981386 - RNA, 19 nt, Artificial Sequence
  Description of Artificial Sequence: Synthetic oligonucleotide
ugggcccguguguuuucau

SEQ ID NO: 981387 - RNA, 19 nt, Artificial Sequence
  Description of Artificial Sequence: Synthetic oligonucleotide
ccuucggguaguuuagugu

SEQ ID NO: 981388 - RNA, 19 nt, Artificial Sequence
  Description of Artificial Sequence: Synthetic oligonucleotide
gcggaggcccuugagguca

SEQ ID NO: 981389 - RNA, 19 nt, Artificial Sequence
  Description of Artificial Sequence: Synthetic oligonucleotide
cguaacaacuugggaaauc

SEQ ID NO: 981390 - RNA, 19 nt, Artificial Sequence
  Description of Artificial Sequence: Synthetic oligonucleotide
gaguuuuggguaacucguu

SEQ ID NO: 981391 - RNA, 19 nt, Artificial Sequence
  Description of Artificial Sequence: Synthetic oligonucleotide
cacuuaugucuaccacaaa

SEQ ID NO: 981392 - RNA, 19 nt, Artificial Sequence
  Description of Artificial Sequence: Synthetic oligonucleotide
gcauuccgcacaaauaauu

SEQ ID NO: 981393 - RNA, 19 nt, Artificial Sequence
  Description of Artificial Sequence: Synthetic oligonucleotide
gcccuugaggucaagugcu

SEQ ID NO: 981394 - RNA, 19 nt, Artificial Sequence
  Description of Artificial Sequence: Synthetic oligonucleotide
cgggcgggacaggagaugg

SEQ ID NO: 981395 - RNA, 19 nt, Artificial Sequence
  Description of Artificial Sequence: Synthetic oligonucleotide
cgaucgugaaucuuauagu

SEQ ID NO: 981396 - RNA, 19 nt, Artificial Sequence
  Description of Artificial Sequence: Synthetic oligonucleotide
caacaggcgccaucauggu

SEQ ID NO: 981397 - RNA, 19 nt, Artificial Sequence
  Description of Artificial Sequence: Synthetic oligonucleotide
acacugcgggguggagcag

SEQ ID NO: 981398 - RNA, 19 nt, Artificial Sequence
  Description of Artificial Sequence: Synthetic oligonucleotide
ccugagucauaaauugcau

SEQ ID NO: 981399 - RNA, 19 nt, Artificial Sequence
  Description of Artificial Sequence: Synthetic oligonucleotide
ggacuggucucggaaguua

SEQ ID NO: 981400 - RNA, 19 nt, Artificial Sequence
  Description of Artificial Sequence: Synthetic oligonucleotide
aaccgcagggugggaucuu

SEQ ID NO: 981401 - RNA, 19 nt, Artificial Sequence
  Description of Artificial Sequence: Synthetic oligonucleotide
caugcucaggagccacgcu

SEQ ID NO: 981402 - RNA, 19 nt, Artificial Sequence
  Description of Artificial Sequence: Synthetic oligonucleotide
cggguaguuuagugucagc

SEQ ID NO: 981403 - RNA, 19 nt, Artificial Sequence
  Description of Artificial Sequence: Synthetic oligonucleotide
cugggcccguguguuuuca

SEQ ID NO: 981404 - RNA, 19 nt, Artificial Sequence
  Description of Artificial Sequence: Synthetic oligonucleotide
caacaacguugagacgugu

SEQ ID NO: 981405 - RNA, 19 nt, Artificial Sequence
  Description of Artificial Sequence: Synthetic oligonucleotide
ggcauuccgcacaaauaau

SEQ ID NO: 981406 - RNA, 19 nt, Artificial Sequence
  Description of Artificial Sequence: Synthetic oligonucleotide
gcgccaucaugguaggcau

SEQ ID NO: 981407 - RNA, 19 nt, Artificial Sequence
  Description of Artificial Sequence: Synthetic oligonucleotide
gggugggaucuuuaagcuu

SEQ ID NO: 981408 - RNA, 19 nt, Artificial Sequence
  Description of Artificial Sequence: Synthetic oligonucleotide
gacggucuccugagucaua

SEQ ID NO: 981409 - RNA, 19 nt, Artificial Sequence
  Description of Artificial Sequence: Synthetic oligonucleotide
cucgggcgggacaggagau

SEQ ID NO: 981410 - RNA, 19 nt, Artificial Sequence
  Description of Artificial Sequence: Synthetic oligonucleotide
cucgaacggcgcugauaua

SEQ ID NO: 981411 - RNA, 19 nt, Artificial Sequence
  Description of Artificial Sequence: Synthetic oligonucleotide
gcgcugauauagguggacu

SEQ ID NO: 981412 - RNA, 19 nt, Artificial Sequence
  Description of Artificial Sequence: Synthetic oligonucleotide
cuucccuugcaggguggua

SEQ ID NO: 981413 - RNA, 19 nt, Artificial Sequence
  Description of Artificial Sequence: Synthetic oligonucleotide
guccuucggguaguuuagu

SEQ ID NO: 981414 - RNA, 19 nt, Artificial Sequence
  Description of Artificial Sequence: Synthetic oligonucleotide
gcccguguguuuucauagu

SEQ ID NO: 981415 - RNA, 19 nt, Artificial Sequence
  Description of Artificial Sequence: Synthetic oligonucleotide
gccucgggcgggacaggag

SEQ ID NO: 981416 - RNA, 19 nt, Artificial Sequence
  Description of Artificial Sequence: Synthetic oligonucleotide
cgcucagacuucaauucgu

SEQ ID NO: 981417 - RNA, 19 nt, Artificial Sequence
  Description of Artificial Sequence: Synthetic oligonucleotide
ccacgcuuugucauacuuu

SEQ ID NO: 981418 - RNA, 19 nt, Artificial Sequence
  Description of Artificial Sequence: Synthetic oligonucleotide
cauggccauccaggcguaa

SEQ ID NO: 981419 - RNA, 19 nt, Artificial Sequence
  Description of Artificial Sequence: Synthetic oligonucleotide
ccuaaguccuucggguagu

SEQ ID NO: 981420 - RNA, 19 nt, Artificial Sequence
  Description of Artificial Sequence: Synthetic oligonucleotide
gcguaacaacuugggaaau

SEQ ID NO: 981421 - RNA, 19 nt, Artificial Sequence
  Description of Artificial Sequence: Synthetic oligonucleotide
gcuucccuugcaggguggu

SEQ ID NO: 981422 - RNA, 19 nt, Artificial Sequence
  Description of Artificial Sequence: Synthetic oligonucleotide
ggcauggcgaaggcucuuu

SEQ ID NO: 981423 - RNA, 19 nt, Artificial Sequence
  Description of Artificial Sequence: Synthetic oligonucleotide
cccuuuuaucuugucuaau

SEQ ID NO: 981424 - RNA, 19 nt, Artificial Sequence
  Description of Artificial Sequence: Synthetic oligonucleotide
gggagccaucauaucguuu

SEQ ID NO: 981425 - RNA, 19 nt, Artificial Sequence
  Description of Artificial Sequence: Synthetic oligonucleotide
cguucucgugaacgcacgu

SEQ ID NO: 981426 - RNA, 19 nt, Artificial Sequence
  Description of Artificial Sequence: Synthetic oligonucleotide
cggcgcugauauaggugga

SEQ ID NO: 981427 - RNA, 19 nt, Artificial Sequence
  Description of Artificial Sequence: Synthetic oligonucleotide
ccgcagggugggaucuuua

SEQ ID NO: 981428 - RNA, 19 nt, Artificial Sequence
  Description of Artificial Sequence: Synthetic oligonucleotide
cccugacggucuccugagu

SEQ ID NO: 981429 - RNA, 19 nt, Artificial Sequence
  Description of Artificial Sequence: Synthetic oligonucleotide
aauuagacauaucaauucc

SEQ ID NO: 981430 - RNA, 19 nt, Artificial Sequence
  Description of Artificial Sequence: Synthetic oligonucleotide
aaucuuucuaaaucucugc

SEQ ID NO: 981431 - RNA, 19 nt, Artificial Sequence
  Description of Artificial Sequence: Synthetic oligonucleotide
gaauaaacggaagugaggg

SEQ ID NO: 981432 - RNA, 19 nt, Artificial Sequence
  Description of Artificial Sequence: Synthetic oligonucleotide
aaauauuacaauuuccuuu

SEQ ID NO: 981433 - RNA, 19 nt, Artificial Sequence
  Description of Artificial Sequence: Synthetic oligonucleotide
uuccuaauuagacauauca

SEQ ID NO: 981434 - RNA, 19 nt, Artificial Sequence
  Description of Artificial Sequence: Synthetic oligonucleotide
aaggauuggguccagauga

SEQ ID NO: 981435 - RNA, 19 nt, Artificial Sequence
  Description of Artificial Sequence: Synthetic oligonucleotide
cuuuugaccauugagaccc

SEQ ID NO: 981436 - RNA, 19 nt, Artificial Sequence
  Description of Artificial Sequence: Synthetic oligonucleotide
uauauaggaauccauucgu

SEQ ID NO: 981437 - RNA, 19 nt, Artificial Sequence
  Description of Artificial Sequence: Synthetic oligonucleotide
agagguugagaacaggaac

SEQ ID NO: 981438 - RNA, 19 nt, Artificial Sequence
  Description of Artificial Sequence: Synthetic oligonucleotide
uuuauauaggaauccauuc

SEQ ID NO: 981439 - RNA, 19 nt, Artificial Sequence
  Description of Artificial Sequence: Synthetic oligonucleotide
aggguaagugaauaaacgg

SEQ ID NO: 981440 - RNA, 19 nt, Artificial Sequence
  Description of Artificial Sequence: Synthetic oligonucleotide
auuacaauuuccuuuugcu

SEQ ID NO: 981441 - RNA, 19 nt, Artificial Sequence
  Description of Artificial Sequence: Synthetic oligonucleotide
aauccgccguuucugacgc

SEQ ID NO: 981442 - RNA, 19 nt, Artificial Sequence
  Description of Artificial Sequence: Synthetic oligonucleotide
uaauuagacauaucaauuc

SEQ ID NO: 981443 - RNA, 19 nt, Artificial Sequence
  Description of Artificial Sequence: Synthetic oligonucleotide
uauuacaauuuccuuuugc

SEQ ID NO: 981444 - RNA, 19 nt, Artificial Sequence
  Description of Artificial Sequence: Synthetic oligonucleotide
aaauccgccguuucugacg

SEQ ID NO: 981445 - RNA, 19 nt, Artificial Sequence
  Description of Artificial Sequence: Synthetic oligonucleotide
guuucugacgcacagcuag

SEQ ID NO: 981446 - RNA, 19 nt, Artificial Sequence
  Description of Artificial Sequence: Synthetic oligonucleotide
ucaaagauuucugacagcu

SEQ ID NO: 981447 - RNA, 19 nt, Artificial Sequence
  Description of Artificial Sequence: Synthetic oligonucleotide
aaucaagacagucuggguu

SEQ ID NO: 981448 - RNA, 19 nt, Artificial Sequence
  Description of Artificial Sequence: Synthetic oligonucleotide
ugaguaugggguaucagga

SEQ ID NO: 981449 - RNA, 19 nt, Artificial Sequence
  Description of Artificial Sequence: Synthetic oligonucleotide
uuuaagugaaucugguacu

SEQ ID NO: 981450 - RNA, 19 nt, Artificial Sequence
  Description of Artificial Sequence: Synthetic oligonucleotide
uggcuccuaaucaagacag

SEQ ID NO: 981451 - RNA, 19 nt, Artificial Sequence
  Description of Artificial Sequence: Synthetic oligonucleotide
cuaaucaagacagucuggg

SEQ ID NO: 981452 - RNA, 19 nt, Artificial Sequence
  Description of Artificial Sequence: Synthetic oligonucleotide
acacccuuccacuggaugc

SEQ ID NO: 981453 - RNA, 19 nt, Artificial Sequence
  Description of Artificial Sequence: Synthetic oligonucleotide
gugaguaugggguaucagg

SEQ ID NO: 981454 - RNA, 19 nt, Artificial Sequence
  Description of Artificial Sequence: Synthetic oligonucleotide
uggacgagagguuucuugg

SEQ ID NO: 981455 - RNA, 19 nt, Artificial Sequence
  Description of Artificial Sequence: Synthetic oligonucleotide
aguaugggguaucaggaag

SEQ ID NO: 981456 - RNA, 19 nt, Artificial Sequence
  Description of Artificial Sequence: Synthetic oligonucleotide
aauccauucguuaauguaa

SEQ ID NO: 981457 - RNA, 19 nt, Artificial Sequence
  Description of Artificial Sequence: Synthetic oligonucleotide
ugcagaagcgacacgaacu

SEQ ID NO: 981458 - RNA, 19 nt, Artificial Sequence
  Description of Artificial Sequence: Synthetic oligonucleotide
ugaguaagccaagaguuag

SEQ ID NO: 981459 - RNA, 19 nt, Artificial Sequence
  Description of Artificial Sequence: Synthetic oligonucleotide
cugcaaauggcucuaaaug

SEQ ID NO: 981460 - RNA, 19 nt, Artificial Sequence
  Description of Artificial Sequence: Synthetic oligonucleotide
ugcaagacaggguagcaug

SEQ ID NO: 981461 - RNA, 19 nt, Artificial Sequence
  Description of Artificial Sequence: Synthetic oligonucleotide
guuaauguaaaucuuucua

SEQ ID NO: 981462 - RNA, 19 nt, Artificial Sequence
  Description of Artificial Sequence: Synthetic oligonucleotide
ugcucuuuaagugaaucug

SEQ ID NO: 981463 - RNA, 19 nt, Artificial Sequence
  Description of Artificial Sequence: Synthetic oligonucleotide
ucuuuauauaggaauccau

SEQ ID NO: 981464 - RNA, 19 nt, Artificial Sequence
  Description of Artificial Sequence: Synthetic oligonucleotide
aauggcucuaaaugagggu

SEQ ID NO: 981465 - RNA, 19 nt, Artificial Sequence
  Description of Artificial Sequence: Synthetic oligonucleotide
uucguuaauguaaaucuuu

SEQ ID NO: 981466 - RNA, 19 nt, Artificial Sequence
  Description of Artificial Sequence: Synthetic oligonucleotide
uucacuagcagcaccucga

SEQ ID NO: 981467 - RNA, 19 nt, Artificial Sequence
  Description of Artificial Sequence: Synthetic oligonucleotide
cuaaaugaggguaagugaa

SEQ ID NO: 981468 - RNA, 19 nt, Artificial Sequence
  Description of Artificial Sequence: Synthetic oligonucleotide
gaguuaggggcucucaagc

SEQ ID NO: 981469 - RNA, 19 nt, Artificial Sequence
  Description of Artificial Sequence: Synthetic oligonucleotide
ugagauaaggcaggcuugg

SEQ ID NO: 981470 - RNA, 19 nt, Artificial Sequence
  Description of Artificial Sequence: Synthetic oligonucleotide
agggcuaagcucucgcccc

SEQ ID NO: 981471 - RNA, 19 nt, Artificial Sequence
  Description of Artificial Sequence: Synthetic oligonucleotide
gacgagagguuucuugggg

SEQ ID NO: 981472 - RNA, 19 nt, Artificial Sequence
  Description of Artificial Sequence: Synthetic oligonucleotide
cuugggguugagauaaggc

SEQ ID NO: 981473 - RNA, 19 nt, Artificial Sequence
  Description of Artificial Sequence: Synthetic oligonucleotide
auaaacggaagugagggga

SEQ ID NO: 981474 - RNA, 19 nt, Artificial Sequence
  Description of Artificial Sequence: Synthetic oligonucleotide
gauguaaucguggucuccc

SEQ ID NO: 981475 - RNA, 19 nt, Artificial Sequence
  Description of Artificial Sequence: Synthetic oligonucleotide
ucguuaauguaaaucuuuc

SEQ ID NO: 981476 - RNA, 19 nt, Artificial Sequence
  Description of Artificial Sequence: Synthetic oligonucleotide
gaucagaccaauaccuucc

SEQ ID NO: 981477 - RNA, 19 nt, Artificial Sequence
  Description of Artificial Sequence: Synthetic oligonucleotide
auaggaauccauucguuaa

SEQ ID NO: 981478 - RNA, 19 nt, Artificial Sequence
  Description of Artificial Sequence: Synthetic oligonucleotide
cauucguuaauguaaaucu

SEQ ID NO: 981479 - RNA, 19 nt, Artificial Sequence
  Description of Artificial Sequence: Synthetic oligonucleotide
agaagcgacacgaacuugg

SEQ ID NO: 981480 - RNA, 19 nt, Artificial Sequence
  Description of Artificial Sequence: Synthetic oligonucleotide
uauaggaauccauucguua

SEQ ID NO: 981481 - RNA, 19 nt, Artificial Sequence
  Description of Artificial Sequence: Synthetic oligonucleotide
ucuuuugaccauugagacc

SEQ ID NO: 981482 - RNA, 19 nt, Artificial Sequence
  Description of Artificial Sequence: Synthetic oligonucleotide
guaaucguggucucccggg

SEQ ID NO: 981483 - RNA, 19 nt, Artificial Sequence
  Description of Artificial Sequence: Synthetic oligonucleotide
cuugucggcaaucucccgg

SEQ ID NO: 981484 - RNA, 19 nt, Artificial Sequence
  Description of Artificial Sequence: Synthetic oligonucleotide
acaucaauucuuccagcag

SEQ ID NO: 981485 - RNA, 19 nt, Artificial Sequence
  Description of Artificial Sequence: Synthetic oligonucleotide
cagaagacugcagaggccg

SEQ ID NO: 981486 - RNA, 19 nt, Artificial Sequence
  Description of Artificial Sequence: Synthetic oligonucleotide
gaaggauuggguccagaug

SEQ ID NO: 981487 - RNA, 19 nt, Artificial Sequence
  Description of Artificial Sequence: Synthetic oligonucleotide
agaguuaggggcucucaag

SEQ ID NO: 981488 - RNA, 19 nt, Artificial Sequence
  Description of Artificial Sequence: Synthetic oligonucleotide
uuuauucacuuggaggcug

SEQ ID NO: 981489 - RNA, 19 nt, Artificial Sequence
  Description of Artificial Sequence: Synthetic oligonucleotide
uaaucguggucucccgggg

SEQ ID NO: 981490 - RNA, 19 nt, Artificial Sequence
  Description of Artificial Sequence: Synthetic oligonucleotide
cuuaggcaugucuuuauuc

SEQ ID NO: 981491 - RNA, 19 nt, Artificial Sequence
  Description of Artificial Sequence: Synthetic oligonucleotide
gaggggagugaguaugggg

SEQ ID NO: 981492 - RNA, 19 nt, Artificial Sequence
  Description of Artificial Sequence: Synthetic oligonucleotide
ugaugucguaaauccgccg

SEQ ID NO: 981493 - RNA, 19 nt, Artificial Sequence
  Description of Artificial Sequence: Synthetic oligonucleotide
ucuccggcaaagcaccugc

SEQ ID NO: 981494 - RNA, 19 nt, Artificial Sequence
  Description of Artificial Sequence: Synthetic oligonucleotide
gagguagaaggauuggguc

SEQ ID NO: 981495 - RNA, 19 nt, Artificial Sequence
  Description of Artificial Sequence: Synthetic oligonucleotide
uguagcgagggcuaagcuc

SEQ ID NO: 981496 - RNA, 19 nt, Artificial Sequence
  Description of Artificial Sequence: Synthetic oligonucleotide
uugucggcaaucucccggg

SEQ ID NO: 981497 - RNA, 19 nt, Artificial Sequence
  Description of Artificial Sequence: Synthetic oligonucleotide
uuuucucgugccugcuugg

SEQ ID NO: 981498 - RNA, 19 nt, Artificial Sequence
  Description of Artificial Sequence: Synthetic oligonucleotide
acagcuagagugucggcug

SEQ ID NO: 981499 - RNA, 19 nt, Artificial Sequence
  Description of Artificial Sequence: Synthetic oligonucleotide
uauguagcgagggcuaagc

SEQ ID NO: 981500 - RNA, 19 nt, Artificial Sequence
  Description of Artificial Sequence: Synthetic oligonucleotide
aggcuguacaaauauuaca

SEQ ID NO: 981501 - RNA, 19 nt, Artificial Sequence
  Description of Artificial Sequence: Synthetic oligonucleotide
guaagugaauaaacggaag

SEQ ID NO: 981502 - RNA, 19 nt, Artificial Sequence
  Description of Artificial Sequence: Synthetic oligonucleotide
gcuagcacaguacaagugc

SEQ ID NO: 981503 - RNA, 19 nt, Artificial Sequence
  Description of Artificial Sequence: Synthetic oligonucleotide
acaguacaagugccagugc

SEQ ID NO: 981504 - RNA, 19 nt, Artificial Sequence
  Description of Artificial Sequence: Synthetic oligonucleotide
ucuugggguugagauaagg

SEQ ID NO: 981505 - RNA, 19 nt, Artificial Sequence
  Description of Artificial Sequence: Synthetic oligonucleotide
gaauccauucguuaaugua

SEQ ID NO: 981506 - RNA, 19 nt, Artificial Sequence
  Description of Artificial Sequence: Synthetic oligonucleotide
auggacgagagguuucuug

SEQ ID NO: 981507 - RNA, 19 nt, Artificial Sequence
  Description of Artificial Sequence: Synthetic oligonucleotide
gagggcuaagcucucgccc

SEQ ID NO: 981508 - RNA, 19 nt, Artificial Sequence
  Description of Artificial Sequence: Synthetic oligonucleotide
cucugugacauuccggaug

SEQ ID NO: 981509 - RNA, 19 nt, Artificial Sequence
  Description of Artificial Sequence: Synthetic oligonucleotide
gguauugcaacccggcccc

SEQ ID NO: 981510 - RNA, 19 nt, Artificial Sequence
  Description of Artificial Sequence: Synthetic oligonucleotide
auuagacauaucaauuccu

SEQ ID NO: 981511 - RNA, 19 nt, Artificial Sequence
  Description of Artificial Sequence: Synthetic oligonucleotide
cuugggcagagguggaggg

SEQ ID NO: 981512 - RNA, 19 nt, Artificial Sequence
  Description of Artificial Sequence: Synthetic oligonucleotide
agaagucccaggcuuuucu

SEQ ID NO: 981513 - RNA, 19 nt, Artificial Sequence
  Description of Artificial Sequence: Synthetic oligonucleotide
uuucgccuuaggcaugucu

SEQ ID NO: 981514 - RNA, 19 nt, Artificial Sequence
  Description of Artificial Sequence: Synthetic oligonucleotide
guuaggggcucucaagcug

SEQ ID NO: 981515 - RNA, 19 nt, Artificial Sequence
  Description of Artificial Sequence: Synthetic oligonucleotide
uccagaacaccuguggggu

SEQ ID NO: 981516 - RNA, 19 nt, Artificial Sequence
  Description of Artificial Sequence: Synthetic oligonucleotide
ucucguguggggucaaaga

SEQ ID NO: 981517 - RNA, 19 nt, Artificial Sequence
  Description of Artificial Sequence: Synthetic oligonucleotide
uaaucaagacagucugggu

SEQ ID NO: 981518 - RNA, 19 nt, Artificial Sequence
  Description of Artificial Sequence: Synthetic oligonucleotide
ucguaaauccgccguuucu

SEQ ID NO: 981519 - RNA, 19 nt, Artificial Sequence
  Description of Artificial Sequence: Synthetic oligonucleotide
uaggaauccauucguuaau

SEQ ID NO: 981520 - RNA, 19 nt, Artificial Sequence
  Description of Artificial Sequence: Synthetic oligonucleotide
uucgccuuaggcaugucuu

SEQ ID NO: 981521 - RNA, 19 nt, Artificial Sequence
  Description of Artificial Sequence: Synthetic oligonucleotide
guaucuccggcaaagcacc

SEQ ID NO: 981522 - RNA, 19 nt, Artificial Sequence
  Description of Artificial Sequence: Synthetic oligonucleotide
uagagugucggcugccagc

SEQ ID NO: 981523 - RNA, 19 nt, Artificial Sequence
  Description of Artificial Sequence: Synthetic oligonucleotide
uaagcucucgccccuguuc

SEQ ID NO: 981524 - RNA, 19 nt, Artificial Sequence
  Description of Artificial Sequence: Synthetic oligonucleotide
agcuugucggcaaucuccc

SEQ ID NO: 981525 - RNA, 19 nt, Artificial Sequence
  Description of Artificial Sequence: Synthetic oligonucleotide
gaccaauaccuuccaacac

SEQ ID NO: 981526 - RNA, 19 nt, Artificial Sequence
  Description of Artificial Sequence: Synthetic oligonucleotide
gaguaagccaagaguuagg

SEQ ID NO: 981527 - RNA, 19 nt, Artificial Sequence
  Description of Artificial Sequence: Synthetic oligonucleotide
auauuacaauuuccuuuug

SEQ ID NO: 981528 - RNA, 19 nt, Artificial Sequence
  Description of Artificial Sequence: Synthetic oligonucleotide
ucggcaaucucccggguau

SEQ ID NO: 981529 - RNA, 19 nt, Artificial Sequence
  Description of Artificial Sequence: Synthetic oligonucleotide
ugaggucaagcacaccguc

SEQ ID NO: 981530 - RNA, 19 nt, Artificial Sequence
  Description of Artificial Sequence: Synthetic oligonucleotide
auguaaucguggucucccg

SEQ ID NO: 981531 - RNA, 19 nt, Artificial Sequence
  Description of Artificial Sequence: Synthetic oligonucleotide
aguuaggggcucucaagcu

SEQ ID NO: 981532 - RNA, 19 nt, Artificial Sequence
  Description of Artificial Sequence: Synthetic oligonucleotide
aagcgacacgaacuuggug

SEQ ID NO: 981533 - RNA, 19 nt, Artificial Sequence
  Description of Artificial Sequence: Synthetic oligonucleotide
cugccuugagcucaaucag

SEQ ID NO: 981534 - RNA, 19 nt, Artificial Sequence
  Description of Artificial Sequence: Synthetic oligonucleotide
agcacaguacaagugccag

SEQ ID NO: 981535 - RNA, 19 nt, Artificial Sequence
  Description of Artificial Sequence: Synthetic oligonucleotide
cacccagauuccuaauuag

SEQ ID NO: 981536 - RNA, 19 nt, Artificial Sequence
  Description of Artificial Sequence: Synthetic oligonucleotide
gaugucguaaauccgccgu

SEQ ID NO: 981537 - RNA, 19 nt, Artificial Sequence
  Description of Artificial Sequence: Synthetic oligonucleotide
uagcacaguacaagugcca

SEQ ID NO: 981538 - RNA, 19 nt, Artificial Sequence
  Description of Artificial Sequence: Synthetic oligonucleotide
uucucgugccugcuuggag

SEQ ID NO: 981539 - RNA, 19 nt, Artificial Sequence
  Description of Artificial Sequence: Synthetic oligonucleotide
gacugcauggacgagaggu

SEQ ID NO: 981540 - RNA, 19 nt, Artificial Sequence
  Description of Artificial Sequence: Synthetic oligonucleotide
aagcagcuguucuggacgu

SEQ ID NO: 981541 - RNA, 19 nt, Artificial Sequence
  Description of Artificial Sequence: Synthetic oligonucleotide
aacggaagugaggggagug

SEQ ID NO: 981542 - RNA, 19 nt, Artificial Sequence
  Description of Artificial Sequence: Synthetic oligonucleotide
aagcaggguaucuccggca

SEQ ID NO: 981543 - RNA, 19 nt, Artificial Sequence
  Description of Artificial Sequence: Synthetic oligonucleotide
ugagucacauaggccaagc

SEQ ID NO: 981544 - RNA, 19 nt, Artificial Sequence
  Description of Artificial Sequence: Synthetic oligonucleotide
uuucugacgcacagcuaga

SEQ ID NO: 981545 - RNA, 19 nt, Artificial Sequence
  Description of Artificial Sequence: Synthetic oligonucleotide
aggggagugaguauggggu

SEQ ID NO: 981546 - RNA, 19 nt, Artificial Sequence
  Description of Artificial Sequence: Synthetic oligonucleotide
aacuccaugccuccuuguu

SEQ ID NO: 981547 - RNA, 19 nt, Artificial Sequence
  Description of Artificial Sequence: Synthetic oligonucleotide
ugccuugaugggcucgaag

SEQ ID NO: 981548 - RNA, 19 nt, Artificial Sequence
  Description of Artificial Sequence: Synthetic oligonucleotide
ucccggguauugcaacccg

SEQ ID NO: 981549 - RNA, 19 nt, Artificial Sequence
  Description of Artificial Sequence: Synthetic oligonucleotide
uaaauccgccguuucugac

SEQ ID NO: 981550 - RNA, 19 nt, Artificial Sequence
  Description of Artificial Sequence: Synthetic oligonucleotide
uuaagugaaucugguacuu

SEQ ID NO: 981551 - RNA, 19 nt, Artificial Sequence
  Description of Artificial Sequence: Synthetic oligonucleotide
acgagagguuucuuggggu

SEQ ID NO: 981552 - RNA, 19 nt, Artificial Sequence
  Description of Artificial Sequence: Synthetic oligonucleotide
aggaaguugggccacucuu

SEQ ID NO: 981553 - RNA, 19 nt, Artificial Sequence
  Description of Artificial Sequence: Synthetic oligonucleotide
ggguauugcaacccggccc

SEQ ID NO: 981554 - RNA, 19 nt, Artificial Sequence
  Description of Artificial Sequence: Synthetic oligonucleotide
aagccaagaguuaggggcu

SEQ ID NO: 981555 - RNA, 19 nt, Artificial Sequence
  Description of Artificial Sequence: Synthetic oligonucleotide
cagagcucaugcacucucg

SEQ ID NO: 981556 - RNA, 19 nt, Artificial Sequence
  Description of Artificial Sequence: Synthetic oligonucleotide
gaugcucugcugcacccac

SEQ ID NO: 981557 - RNA, 19 nt, Artificial Sequence
  Description of Artificial Sequence: Synthetic oligonucleotide
augaggguaagugaauaaa

SEQ ID NO: 981558 - RNA, 19 nt, Artificial Sequence
  Description of Artificial Sequence: Synthetic oligonucleotide
uggcucuaaaugaggguaa

SEQ ID NO: 981559 - RNA, 19 nt, Artificial Sequence
  Description of Artificial Sequence: Synthetic oligonucleotide
guaaauccgccguuucuga

SEQ ID NO: 981560 - RNA, 19 nt, Artificial Sequence
  Description of Artificial Sequence: Synthetic oligonucleotide
guguccagugcugucaggc

SEQ ID NO: 981561 - RNA, 19 nt, Artificial Sequence
  Description of Artificial Sequence: Synthetic oligonucleotide
gauuccuaauuagacauau

SEQ ID NO: 981562 - RNA, 19 nt, Artificial Sequence
  Description of Artificial Sequence: Synthetic oligonucleotide
ucguguggggucaaagauu

SEQ ID NO: 981563 - RNA, 19 nt, Artificial Sequence
  Description of Artificial Sequence: Synthetic oligonucleotide
gguaagugaauaaacggaa

SEQ ID NO: 981564 - RNA, 19 nt, Artificial Sequence
  Description of Artificial Sequence: Synthetic oligonucleotide
caguacaagugccagugca

SEQ ID NO: 981565 - RNA, 19 nt, Artificial Sequence
  Description of Artificial Sequence: Synthetic oligonucleotide
ucgaucagaccaauaccuu

SEQ ID NO: 981566 - RNA, 19 nt, Artificial Sequence
  Description of Artificial Sequence: Synthetic oligonucleotide
acauaucaauuccuucuua

SEQ ID NO: 981567 - RNA, 19 nt, Artificial Sequence
  Description of Artificial Sequence: Synthetic oligonucleotide
cucucguccagguuguaga

SEQ ID NO: 981568 - RNA, 19 nt, Artificial Sequence
  Description of Artificial Sequence: Synthetic oligonucleotide
agagcucaugcacucucgu

SEQ ID NO: 981569 - RNA, 19 nt, Artificial Sequence
  Description of Artificial Sequence: Synthetic oligonucleotide
ugcauggacgagagguuuc

SEQ ID NO: 981570 - RNA, 19 nt, Artificial Sequence
  Description of Artificial Sequence: Synthetic oligonucleotide
aucagaccaauaccuucca

SEQ ID NO: 981571 - RNA, 19 nt, Artificial Sequence
  Description of Artificial Sequence: Synthetic oligonucleotide
aggguaucuccggcaaagc

SEQ ID NO: 981572 - RNA, 19 nt, Artificial Sequence
  Description of Artificial Sequence: Synthetic oligonucleotide
caagcugcgggugggagug

SEQ ID NO: 981573 - RNA, 19 nt, Artificial Sequence
  Description of Artificial Sequence: Synthetic oligonucleotide
ucuaggcuggugcccgaug

SEQ ID NO: 981574 - RNA, 19 nt, Artificial Sequence
  Description of Artificial Sequence: Synthetic oligonucleotide
ucagaccaauaccuuccaa

SEQ ID NO: 981575 - RNA, 19 nt, Artificial Sequence
  Description of Artificial Sequence: Synthetic oligonucleotide
ccuaaucaagacagucugg

SEQ ID NO: 981576 - RNA, 19 nt, Artificial Sequence
  Description of Artificial Sequence: Synthetic oligonucleotide
ucgaaggagguagaaggau

SEQ ID NO: 981577 - RNA, 19 nt, Artificial Sequence
  Description of Artificial Sequence: Synthetic oligonucleotide
agugaguaugggguaucag

SEQ ID NO: 981578 - RNA, 19 nt, Artificial Sequence
  Description of Artificial Sequence: Synthetic oligonucleotide
agagugucggcugccagcu

SEQ ID NO: 981579 - RNA, 19 nt, Artificial Sequence
  Description of Artificial Sequence: Synthetic oligonucleotide
cuccccuuagccaggccag

SEQ ID NO: 981580 - RNA, 19 nt, Artificial Sequence
  Description of Artificial Sequence: Synthetic oligonucleotide
cucaugcucuuuaagugaa

SEQ ID NO: 981581 - RNA, 19 nt, Artificial Sequence
  Description of Artificial Sequence: Synthetic oligonucleotide
guagcgagggcuaagcucu

SEQ ID NO: 981582 - RNA, 19 nt, Artificial Sequence
  Description of Artificial Sequence: Synthetic oligonucleotide
aagugaggggagugaguau

SEQ ID NO: 981583 - RNA, 19 nt, Artificial Sequence
  Description of Artificial Sequence: Synthetic oligonucleotide
cuagagugucggcugccag

SEQ ID NO: 981584 - RNA, 19 nt, Artificial Sequence
  Description of Artificial Sequence: Synthetic oligonucleotide
ccaggcucuauguagcgag

SEQ ID NO: 981585 - RNA, 19 nt, Artificial Sequence
  Description of Artificial Sequence: Synthetic oligonucleotide
ucccuguggucagagguug

SEQ ID NO: 981586 - RNA, 19 nt, Artificial Sequence
  Description of Artificial Sequence: Synthetic oligonucleotide
ugcacucucgugugggguc

SEQ ID NO: 981587 - RNA, 19 nt, Artificial Sequence
  Description of Artificial Sequence: Synthetic oligonucleotide
gaguaugggguaucaggaa

SEQ ID NO: 981588 - RNA, 19 nt, Artificial Sequence
  Description of Artificial Sequence: Synthetic oligonucleotide
gacguccucugugacauuc

SEQ ID NO: 981589 - RNA, 19 nt, Artificial Sequence
  Description of Artificial Sequence: Synthetic oligonucleotide
ggacgagagguuucuuggg

SEQ ID NO: 981590 - RNA, 19 nt, Artificial Sequence
  Description of Artificial Sequence: Synthetic oligonucleotide
agcuagagugucggcugcc

SEQ ID NO: 981591 - RNA, 19 nt, Artificial Sequence
  Description of Artificial Sequence: Synthetic oligonucleotide
aaacggaagugaggggagu

SEQ ID NO: 981592 - RNA, 19 nt, Artificial Sequence
  Description of Artificial Sequence: Synthetic oligonucleotide
cucgauggggccacucaug

SEQ ID NO: 981593 - RNA, 19 nt, Artificial Sequence
  Description of Artificial Sequence: Synthetic oligonucleotide
aacugcugcugcugcugcu

SEQ ID NO: 981594 - RNA, 19 nt, Artificial Sequence
  Description of Artificial Sequence: Synthetic oligonucleotide
caggcucuauguagcgagg

SEQ ID NO: 981595 - RNA, 19 nt, Artificial Sequence
  Description of Artificial Sequence: Synthetic oligonucleotide
gacauuccggaugcucugc

SEQ ID NO: 981596 - RNA, 19 nt, Artificial Sequence
  Description of Artificial Sequence: Synthetic oligonucleotide
ucacuagcagcaccucgau

SEQ ID NO: 981597 - RNA, 19 nt, Artificial Sequence
  Description of Artificial Sequence: Synthetic oligonucleotide
cucgaaggagguagaagga

SEQ ID NO: 981598 - RNA, 19 nt, Artificial Sequence
  Description of Artificial Sequence: Synthetic oligonucleotide
cucgugccugcuuggagug

SEQ ID NO: 981599 - RNA, 19 nt, Artificial Sequence
  Description of Artificial Sequence: Synthetic oligonucleotide
ccuaauuagacauaucaau

SEQ ID NO: 981600 - RNA, 19 nt, Artificial Sequence
  Description of Artificial Sequence: Synthetic oligonucleotide
ugcaacccggccccacacc

SEQ ID NO: 981601 - RNA, 19 nt, Artificial Sequence
  Description of Artificial Sequence: Synthetic oligonucleotide
agcaggguaucuccggcaa

SEQ ID NO: 981602 - RNA, 19 nt, Artificial Sequence
  Description of Artificial Sequence: Synthetic oligonucleotide
uuucucgaucagaccaaua

SEQ ID NO: 981603 - RNA, 19 nt, Artificial Sequence
  Description of Artificial Sequence: Synthetic oligonucleotide
gaggccgaguguccagugc

SEQ ID NO: 981604 - RNA, 19 nt, Artificial Sequence
  Description of Artificial Sequence: Synthetic oligonucleotide
caaucucccggguauugca

SEQ ID NO: 981605 - RNA, 19 nt, Artificial Sequence
  Description of Artificial Sequence: Synthetic oligonucleotide
gagucacauaggccaagca

SEQ ID NO: 981606 - RNA, 19 nt, Artificial Sequence
  Description of Artificial Sequence: Synthetic oligonucleotide
ccauucguuaauguaaauc

SEQ ID NO: 981607 - RNA, 19 nt, Artificial Sequence
  Description of Artificial Sequence: Synthetic oligonucleotide
aagauuucugacagcucuu

SEQ ID NO: 981608 - RNA, 19 nt, Artificial Sequence
  Description of Artificial Sequence: Synthetic oligonucleotide
aguacaagugccagugcaa

SEQ ID NO: 981609 - RNA, 19 nt, Artificial Sequence
  Description of Artificial Sequence: Synthetic oligonucleotide
uaguuagcuggggacugca

SEQ ID NO: 981610 - RNA, 19 nt, Artificial Sequence
  Description of Artificial Sequence: Synthetic oligonucleotide
uucuugggguugagauaag

SEQ ID NO: 981611 - RNA, 19 nt, Artificial Sequence
  Description of Artificial Sequence: Synthetic oligonucleotide
ucaugcucuuuaagugaau

SEQ ID NO: 981612 - RNA, 19 nt, Artificial Sequence
  Description of Artificial Sequence: Synthetic oligonucleotide
gggguaguuagcuggggac

SEQ ID NO: 981613 - RNA, 19 nt, Artificial Sequence
  Description of Artificial Sequence: Synthetic oligonucleotide
gguggagaaagucgaagaa

SEQ ID NO: 981614 - RNA, 19 nt, Artificial Sequence
  Description of Artificial Sequence: Synthetic oligonucleotide
uggaggcuguacaaauauu

SEQ ID NO: 981615 - RNA, 19 nt, Artificial Sequence
  Description of Artificial Sequence: Synthetic oligonucleotide
uccauucguuaauguaaau

SEQ ID NO: 981616 - RNA, 19 nt, Artificial Sequence
  Description of Artificial Sequence: Synthetic oligonucleotide
acccagauuccuaauuaga

SEQ ID NO: 981617 - RNA, 19 nt, Artificial Sequence
  Description of Artificial Sequence: Synthetic oligonucleotide
cauuccggaugcucugcug

SEQ ID NO: 981618 - RNA, 19 nt, Artificial Sequence
  Description of Artificial Sequence: Synthetic oligonucleotide
auccauucguuaauguaaa

SEQ ID NO: 981619 - RNA, 19 nt, Artificial Sequence
  Description of Artificial Sequence: Synthetic oligonucleotide
ggguggagaaagucgaaga

SEQ ID NO: 981620 - RNA, 19 nt, Artificial Sequence
  Description of Artificial Sequence: Synthetic oligonucleotide
ccuaguuggcuccuaauca

SEQ ID NO: 981621 - RNA, 19 nt, Artificial Sequence
  Description of Artificial Sequence: Synthetic oligonucleotide
cuauguagcgagggcuaag

SEQ ID NO: 981622 - RNA, 19 nt, Artificial Sequence
  Description of Artificial Sequence: Synthetic oligonucleotide
ggacaugucccugugguca

SEQ ID NO: 981623 - RNA, 19 nt, Artificial Sequence
  Description of Artificial Sequence: Synthetic oligonucleotide
aggcuggugcccgaugggg

SEQ ID NO: 981624 - RNA, 19 nt, Artificial Sequence
  Description of Artificial Sequence: Synthetic oligonucleotide
cacucacugcaaucucagc

SEQ ID NO: 981625 - RNA, 19 nt, Artificial Sequence
  Description of Artificial Sequence: Synthetic oligonucleotide
gucguaaauccgccguuuc

SEQ ID NO: 981626 - RNA, 19 nt, Artificial Sequence
  Description of Artificial Sequence: Synthetic oligonucleotide
auaggccaagcagcuguuc

SEQ ID NO: 981627 - RNA, 19 nt, Artificial Sequence
  Description of Artificial Sequence: Synthetic oligonucleotide
auauaggaauccauucguu

SEQ ID NO: 981628 - RNA, 19 nt, Artificial Sequence
  Description of Artificial Sequence: Synthetic oligonucleotide
cucucaagcugcggguggg

SEQ ID NO: 981629 - RNA, 19 nt, Artificial Sequence
  Description of Artificial Sequence: Synthetic oligonucleotide
ggaggcuguacaaauauua

SEQ ID NO: 981630 - RNA, 19 nt, Artificial Sequence
  Description of Artificial Sequence: Synthetic oligonucleotide
uccgccguuucugacgcac

SEQ ID NO: 981631 - RNA, 19 nt, Artificial Sequence
  Description of Artificial Sequence: Synthetic oligonucleotide
acugcugcugcugcugcug

SEQ ID NO: 981632 - RNA, 19 nt, Artificial Sequence
  Description of Artificial Sequence: Synthetic oligonucleotide
aaucucccggguauugcaa

SEQ ID NO: 981633 - RNA, 19 nt, Artificial Sequence
  Description of Artificial Sequence: Synthetic oligonucleotide
uaugggguaucaggaaguu

SEQ ID NO: 981634 - RNA, 19 nt, Artificial Sequence
  Description of Artificial Sequence: Synthetic oligonucleotide
ugucguaaauccgccguuu

SEQ ID NO: 981635 - RNA, 19 nt, Artificial Sequence
  Description of Artificial Sequence: Synthetic oligonucleotide
uaucuccggcaaagcaccu

SEQ ID NO: 981636 - RNA, 19 nt, Artificial Sequence
  Description of Artificial Sequence: Synthetic oligonucleotide
gguaguuagcuggggacug

SEQ ID NO: 981637 - RNA, 19 nt, Artificial Sequence
  Description of Artificial Sequence: Synthetic oligonucleotide
agaggccgaguguccagug

SEQ ID NO: 981638 - RNA, 19 nt, Artificial Sequence
  Description of Artificial Sequence: Synthetic oligonucleotide
caugucccuguggucagag

SEQ ID NO: 981639 - RNA, 19 nt, Artificial Sequence
  Description of Artificial Sequence: Synthetic oligonucleotide
cugaguaagccaagaguua

SEQ ID NO: 981640 - RNA, 19 nt, Artificial Sequence
  Description of Artificial Sequence: Synthetic oligonucleotide
augucguaaauccgccguu

SEQ ID NO: 981641 - RNA, 19 nt, Artificial Sequence
  Description of Artificial Sequence: Synthetic oligonucleotide
cagcuagagugucggcugc

SEQ ID NO: 981642 - RNA, 19 nt, Artificial Sequence
  Description of Artificial Sequence: Synthetic oligonucleotide
guaguuagcuggggacugc

SEQ ID NO: 981643 - RNA, 19 nt, Artificial Sequence
  Description of Artificial Sequence: Synthetic oligonucleotide
acugagcaucuggggaagg

SEQ ID NO: 981644 - RNA, 19 nt, Artificial Sequence
  Description of Artificial Sequence: Synthetic oligonucleotide
gcuccuaaucaagacaguc

SEQ ID NO: 981645 - RNA, 19 nt, Artificial Sequence
  Description of Artificial Sequence: Synthetic oligonucleotide
ucgccuuaggcaugucuuu

SEQ ID NO: 981646 - RNA, 19 nt, Artificial Sequence
  Description of Artificial Sequence: Synthetic oligonucleotide
uauugcaacccggccccac

SEQ ID NO: 981647 - RNA, 19 nt, Artificial Sequence
  Description of Artificial Sequence: Synthetic oligonucleotide
gcaacccggccccacaccc

SEQ ID NO: 981648 - RNA, 19 nt, Artificial Sequence
  Description of Artificial Sequence: Synthetic oligonucleotide
cugagacuucagugcugcc

SEQ ID NO: 981649 - RNA, 19 nt, Artificial Sequence
  Description of Artificial Sequence: Synthetic oligonucleotide
cauugagacccucugggau

SEQ ID NO: 981650 - RNA, 19 nt, Artificial Sequence
  Description of Artificial Sequence: Synthetic oligonucleotide
cacuagcagcaccucgaug

SEQ ID NO: 981651 - RNA, 19 nt, Artificial Sequence
  Description of Artificial Sequence: Synthetic oligonucleotide
acggaagugaggggaguga

SEQ ID NO: 981652 - RNA, 19 nt, Artificial Sequence
  Description of Artificial Sequence: Synthetic oligonucleotide
cuuccacuggaugcuguuc

SEQ ID NO: 981653 - RNA, 19 nt, Artificial Sequence
  Description of Artificial Sequence: Synthetic oligonucleotide
cccuaguuggcuccuaauc

SEQ ID NO: 981654 - RNA, 19 nt, Artificial Sequence
  Description of Artificial Sequence: Synthetic oligonucleotide
ggcucuaaaugaggguaag

SEQ ID NO: 981655 - RNA, 19 nt, Artificial Sequence
  Description of Artificial Sequence: Synthetic oligonucleotide
gucugccuugaugggcucg

SEQ ID NO: 981656 - RNA, 19 nt, Artificial Sequence
  Description of Artificial Sequence: Synthetic oligonucleotide
ccggguauugcaacccggc

SEQ ID NO: 981657 - RNA, 19 nt, Artificial Sequence
  Description of Artificial Sequence: Synthetic oligonucleotide
guaugggguaucaggaagu

SEQ ID NO: 981658 - RNA, 19 nt, Artificial Sequence
  Description of Artificial Sequence: Synthetic oligonucleotide
cugcugcugcugcugcugc

SEQ ID NO: 981659 - RNA, 19 nt, Artificial Sequence
  Description of Artificial Sequence: Synthetic oligonucleotide
cuguucugcuagcacagua

SEQ ID NO: 981660 - RNA, 19 nt, Artificial Sequence
  Description of Artificial Sequence: Synthetic oligonucleotide
cgaucagaccaauaccuuc

SEQ ID NO: 981661 - RNA, 19 nt, Artificial Sequence
  Description of Artificial Sequence: Synthetic oligonucleotide
cguaaauccgccguuucug

SEQ ID NO: 981662 - RNA, 19 nt, Artificial Sequence
  Description of Artificial Sequence: Synthetic oligonucleotide
caucgcgcccgcccgcccg

SEQ ID NO: 981663 - RNA, 19 nt, Artificial Sequence
  Description of Artificial Sequence: Synthetic oligonucleotide
aucuccggcaaagcaccug

SEQ ID NO: 981664 - RNA, 19 nt, Artificial Sequence
  Description of Artificial Sequence: Synthetic oligonucleotide
cucguguggggucaaagau

SEQ ID NO: 981665 - RNA, 19 nt, Artificial Sequence
  Description of Artificial Sequence: Synthetic oligonucleotide
aagagaucacagacaccuu

SEQ ID NO: 981666 - RNA, 19 nt, Artificial Sequence
  Description of Artificial Sequence: Synthetic oligonucleotide
ggucagagguugagaacag

SEQ ID NO: 981667 - RNA, 19 nt, Artificial Sequence
  Description of Artificial Sequence: Synthetic oligonucleotide
ccagugcaagacaggguag

SEQ ID NO: 981668 - RNA, 19 nt, Artificial Sequence
  Description of Artificial Sequence: Synthetic oligonucleotide
agauuccuaauuagacaua

SEQ ID NO: 981669 - RNA, 19 nt, Artificial Sequence
  Description of Artificial Sequence: Synthetic oligonucleotide
cagaagcgacacgaacuug

SEQ ID NO: 981670 - RNA, 19 nt, Artificial Sequence
  Description of Artificial Sequence: Synthetic oligonucleotide
acgcacagcuagagugucg

SEQ ID NO: 981671 - RNA, 19 nt, Artificial Sequence
  Description of Artificial Sequence: Synthetic oligonucleotide
ugcugcugcugcugcugcu

SEQ ID NO: 981672 - RNA, 19 nt, Artificial Sequence
  Description of Artificial Sequence: Synthetic oligonucleotide
gcagggguaguuagcuggg

SEQ ID NO: 981673 - RNA, 19 nt, Artificial Sequence
  Description of Artificial Sequence: Synthetic oligonucleotide
ggguaucaggaaguugggc

SEQ ID NO: 981674 - RNA, 19 nt, Artificial Sequence
  Description of Artificial Sequence: Synthetic oligonucleotide
uauucacuuggaggcugua

SEQ ID NO: 981675 - RNA, 19 nt, Artificial Sequence
  Description of Artificial Sequence: Synthetic oligonucleotide
gcuugucggcaaucucccg

SEQ ID NO: 981676 - RNA, 19 nt, Artificial Sequence
  Description of Artificial Sequence: Synthetic oligonucleotide
cugcugcugcugcugcuac

SEQ ID NO: 981677 - RNA, 19 nt, Artificial Sequence
  Description of Artificial Sequence: Synthetic oligonucleotide
caggaacaucaaagagauc

SEQ ID NO: 981678 - RNA, 19 nt, Artificial Sequence
  Description of Artificial Sequence: Synthetic oligonucleotide
caggguagcauggccagaa

SEQ ID NO: 981679 - RNA, 19 nt, Artificial Sequence
  Description of Artificial Sequence: Synthetic oligonucleotide
cgcacagcuagagugucgg

SEQ ID NO: 981680 - RNA, 19 nt, Artificial Sequence
  Description of Artificial Sequence: Synthetic oligonucleotide
gaagcgacacgaacuuggu

SEQ ID NO: 981681 - RNA, 19 nt, Artificial Sequence
  Description of Artificial Sequence: Synthetic oligonucleotide
cuucagggaccagcccacc

SEQ ID NO: 981682 - RNA, 19 nt, Artificial Sequence
  Description of Artificial Sequence: Synthetic oligonucleotide
cccggguauugcaacccgg

SEQ ID NO: 981683 - RNA, 19 nt, Artificial Sequence
  Description of Artificial Sequence: Synthetic oligonucleotide
gcgagggcuaagcucucgc

SEQ ID NO: 981684 - RNA, 19 nt, Artificial Sequence
  Description of Artificial Sequence: Synthetic oligonucleotide
aagcugcgggugggagugg

SEQ ID NO: 981685 - RNA, 19 nt, Artificial Sequence
  Description of Artificial Sequence: Synthetic oligonucleotide
ggggucugccuugaugggc

SEQ ID NO: 981686 - RNA, 19 nt, Artificial Sequence
  Description of Artificial Sequence: Synthetic oligonucleotide
ggauuggguccagaugaac

SEQ ID NO: 981687 - RNA, 19 nt, Artificial Sequence
  Description of Artificial Sequence: Synthetic oligonucleotide
uggggacugcauggacgag

SEQ ID NO: 981688 - RNA, 19 nt, Artificial Sequence
  Description of Artificial Sequence: Synthetic oligonucleotide
ugagacccucugggauggg

SEQ ID NO: 981689 - RNA, 19 nt, Artificial Sequence
  Description of Artificial Sequence: Synthetic oligonucleotide
ucgccccuguucugcuagc

SEQ ID NO: 981690 - RNA, 19 nt, Artificial Sequence
  Description of Artificial Sequence: Synthetic oligonucleotide
gguugagaacaggaacauc

SEQ ID NO: 981691 - RNA, 19 nt, Artificial Sequence
  Description of Artificial Sequence: Synthetic oligonucleotide
ucgugccugcuuggagugc

SEQ ID NO: 981692 - RNA, 19 nt, Artificial Sequence
  Description of Artificial Sequence: Synthetic oligonucleotide
ggagcagggguaguuagcu

SEQ ID NO: 981693 - RNA, 19 nt, Artificial Sequence
  Description of Artificial Sequence: Synthetic oligonucleotide
uagcgagggcuaagcucuc

SEQ ID NO: 981694 - RNA, 19 nt, Artificial Sequence
  Description of Artificial Sequence: Synthetic oligonucleotide
ccaauaccuuccaacacgu

SEQ ID NO: 981695 - RNA, 19 nt, Artificial Sequence
  Description of Artificial Sequence: Synthetic oligonucleotide
ggcucucaagcugcgggug

SEQ ID NO: 981696 - RNA, 19 nt, Artificial Sequence
  Description of Artificial Sequence: Synthetic oligonucleotide
gaacaccuguggggucugc

SEQ ID NO: 981697 - RNA, 19 nt, Artificial Sequence
  Description of Artificial Sequence: Synthetic oligonucleotide
ggacugcauggacgagagg

SEQ ID NO: 981698 - RNA, 19 nt, Artificial Sequence
  Description of Artificial Sequence: Synthetic oligonucleotide
gcugcugcugcugcugcug

SEQ ID NO: 981699 - RNA, 19 nt, Artificial Sequence
  Description of Artificial Sequence: Synthetic oligonucleotide
gggcccugauggcaagcag

SEQ ID NO: 981700 - RNA, 19 nt, Artificial Sequence
  Description of Artificial Sequence: Synthetic oligonucleotide
ggagugaguaugggguauc

SEQ ID NO: 981701 - RNA, 19 nt, Artificial Sequence
  Description of Artificial Sequence: Synthetic oligonucleotide
cagaacaccuguggggucu

SEQ ID NO: 981702 - RNA, 19 nt, Artificial Sequence
  Description of Artificial Sequence: Synthetic oligonucleotide
gcagaagcgacacgaacuu

SEQ ID NO: 981703 - RNA, 19 nt, Artificial Sequence
  Description of Artificial Sequence: Synthetic oligonucleotide
ucucgccccuguucugcua

SEQ ID NO: 981704 - RNA, 19 nt, Artificial Sequence
  Description of Artificial Sequence: Synthetic oligonucleotide
cgagggcuaagcucucgcc

SEQ ID NO: 981705 - RNA, 19 nt, Artificial Sequence
  Description of Artificial Sequence: Synthetic oligonucleotide
ccggcaaagcaccugcaga

SEQ ID NO: 981706 - RNA, 19 nt, Artificial Sequence
  Description of Artificial Sequence: Synthetic oligonucleotide
ccuccccuuagccaggcca

SEQ ID NO: 981707 - RNA, 19 nt, Artificial Sequence
  Description of Artificial Sequence: Synthetic oligonucleotide
guggacucuggagcagauc

SEQ ID NO: 981708 - RNA, 19 nt, Artificial Sequence
  Description of Artificial Sequence: Synthetic oligonucleotide
ccacccagauuccuaauua

SEQ ID NO: 981709 - RNA, 19 nt, Artificial Sequence
  Description of Artificial Sequence: Synthetic oligonucleotide
cggguauugcaacccggcc

SEQ ID NO: 981710 - RNA, 19 nt, Artificial Sequence
  Description of Artificial Sequence: Synthetic oligonucleotide
cguuaauguaaaucuuucu

SEQ ID NO: 981711 - RNA, 19 nt, Artificial Sequence
  Description of Artificial Sequence: Synthetic oligonucleotide
gaugggcucgaaggaggua

SEQ ID NO: 981712 - RNA, 19 nt, Artificial Sequence
  Description of Artificial Sequence: Synthetic oligonucleotide
uuuucgccuuaggcauguc

SEQ ID NO: 981713 - RNA, 19 nt, Artificial Sequence
  Description of Artificial Sequence: Synthetic oligonucleotide
gcacagcuagagugucggc

SEQ ID NO: 981714 - RNA, 19 nt, Artificial Sequence
  Description of Artificial Sequence: Synthetic oligonucleotide
cggaagugaggggagugag

SEQ ID NO: 981715 - RNA, 19 nt, Artificial Sequence
  Description of Artificial Sequence: Synthetic oligonucleotide
cgugccugcuuggagugcc

SEQ ID NO: 981716 - RNA, 19 nt, Artificial Sequence
  Description of Artificial Sequence: Synthetic oligonucleotide
gcuagagugucggcugcca

SEQ ID NO: 981717 - RNA, 19 nt, Artificial Sequence
  Description of Artificial Sequence: Synthetic oligonucleotide
ccagaacaccugugggguc

SEQ ID NO: 981718 - RNA, 19 nt, Artificial Sequence
  Description of Artificial Sequence: Synthetic oligonucleotide
ggguaguuagcuggggacu

SEQ ID NO: 981719 - RNA, 19 nt, Artificial Sequence
  Description of Artificial Sequence: Synthetic oligonucleotide
gcuguucuggacguccucu

SEQ ID NO: 981720 - RNA, 19 nt, Artificial Sequence
  Description of Artificial Sequence: Synthetic oligonucleotide
gugcaagacaggguagcau

SEQ ID NO: 981721 - RNA, 19 nt, Artificial Sequence
  Description of Artificial Sequence: Synthetic oligonucleotide
uggugcccgauggggcccu

SEQ ID NO: 981722 - RNA, 19 nt, Artificial Sequence
  Description of Artificial Sequence: Synthetic oligonucleotide
cgccguuucugacgcacag

SEQ ID NO: 981723 - RNA, 19 nt, Artificial Sequence
  Description of Artificial Sequence: Synthetic oligonucleotide
cacccuuccacuggaugcu

SEQ ID NO: 981724 - RNA, 19 nt, Artificial Sequence
  Description of Artificial Sequence: Synthetic oligonucleotide
gguugagauaaggcaggcu

SEQ ID NO: 981725 - RNA, 19 nt, Artificial Sequence
  Description of Artificial Sequence: Synthetic oligonucleotide
ccgaguguccagugcuguc

SEQ ID NO: 981726 - RNA, 19 nt, Artificial Sequence
  Description of Artificial Sequence: Synthetic oligonucleotide
cauaggccaagcagcuguu

SEQ ID NO: 981727 - RNA, 19 nt, Artificial Sequence
  Description of Artificial Sequence: Synthetic oligonucleotide
ccaagaguuaggggcucuc

SEQ ID NO: 981728 - RNA, 19 nt, Artificial Sequence
  Description of Artificial Sequence: Synthetic oligonucleotide
auccgccguuucugacgca

SEQ ID NO: 981729 - RNA, 19 nt, Artificial Sequence
  Description of Artificial Sequence: Synthetic oligonucleotide
cagcaccucgauggggcca

SEQ ID NO: 981730 - RNA, 19 nt, Artificial Sequence
  Description of Artificial Sequence: Synthetic oligonucleotide
cugcauggacgagagguuu

SEQ ID NO: 981731 - RNA, 19 nt, Artificial Sequence
  Description of Artificial Sequence: Synthetic oligonucleotide
ggggcccugauggcaagca

SEQ ID NO: 981732 - RNA, 19 nt, Artificial Sequence
  Description of Artificial Sequence: Synthetic oligonucleotide
ggucugccuugaugggcuc

SEQ ID NO: 981733 - RNA, 19 nt, Artificial Sequence
  Description of Artificial Sequence: Synthetic oligonucleotide
gcauggacgagagguuucu

SEQ ID NO: 981734 - RNA, 19 nt, Artificial Sequence
  Description of Artificial Sequence: Synthetic oligonucleotide
cgaguguccagugcuguca

SEQ ID NO: 981735 - RNA, 19 nt, Artificial Sequence
  Description of Artificial Sequence: Synthetic oligonucleotide
gcacucucgugugggguca

SEQ ID NO: 981736 - RNA, 19 nt, Artificial Sequence
  Description of Artificial Sequence: Synthetic oligonucleotide
acucucguguggggucaaa

SEQ ID NO: 981737 - RNA, 19 nt, Artificial Sequence
  Description of Artificial Sequence: Synthetic oligonucleotide
agucccuaguuggcuccua

SEQ ID NO: 981738 - RNA, 19 nt, Artificial Sequence
  Description of Artificial Sequence: Synthetic oligonucleotide
cuaagcucucgccccuguu

SEQ ID NO: 981739 - RNA, 19 nt, Artificial Sequence
  Description of Artificial Sequence: Synthetic oligonucleotide
gcugcugcugcugcugcua

SEQ ID NO: 981740 - RNA, 19 nt, Artificial Sequence
  Description of Artificial Sequence: Synthetic oligonucleotide
gcuaagcucucgccccugu

SEQ ID NO: 981741 - RNA, 19 nt, Artificial Sequence
  Description of Artificial Sequence: Synthetic oligonucleotide
gggagugaguaugggguau

SEQ ID NO: 981742 - RNA, 19 nt, Artificial Sequence
  Description of Artificial Sequence: Synthetic oligonucleotide
caucuggggaaggcugagu

SEQ ID NO: 981743 - RNA, 19 nt, Artificial Sequence
  Description of Artificial Sequence: Synthetic oligonucleotide
caacccggccccacacccu

SEQ ID NO: 981744 - RNA, 19 nt, Artificial Sequence
  Description of Artificial Sequence: Synthetic oligonucleotide
ccgccuccccuuagccagg

SEQ ID NO: 981745 - RNA, 19 nt, Artificial Sequence
  Description of Artificial Sequence: Synthetic oligonucleotide
ggcuccuaaucaagacagu

SEQ ID NO: 981746 - RNA, 19 nt, Artificial Sequence
  Description of Artificial Sequence: Synthetic oligonucleotide
ccgcccgccuccccuuagc

SEQ ID NO: 981747 - RNA, 19 nt, Artificial Sequence
  Description of Artificial Sequence: Synthetic oligonucleotide
gccgaguguccagugcugu

SEQ ID NO: 981748 - RNA, 19 nt, Artificial Sequence
  Description of Artificial Sequence: Synthetic oligonucleotide
ggucaagcacaccguccuu

SEQ ID NO: 981749 - RNA, 19 nt, Artificial Sequence
  Description of Artificial Sequence: Synthetic oligonucleotide
gugcccgauggggcccuga

SEQ ID NO: 981750 - RNA, 19 nt, Artificial Sequence
  Description of Artificial Sequence: Synthetic oligonucleotide
ccgccguuucugacgcaca

SEQ ID NO: 981751 - RNA, 19 nt, Artificial Sequence
  Description of Artificial Sequence: Synthetic oligonucleotide
cauggacgagagguuucuu

SEQ ID NO: 981752 - RNA, 19 nt, Artificial Sequence
  Description of Artificial Sequence: Synthetic oligonucleotide
cacucucguguggggucaa

SEQ ID NO: 981753 - RNA, 19 nt, Artificial Sequence
  Description of Artificial Sequence: Synthetic oligonucleotide
cagucccuaguuggcuccu

SEQ ID NO: 981754 - RNA, 19 nt, Artificial Sequence
  Description of Artificial Sequence: Synthetic oligonucleotide
cccgcccgccuccccuuag

SEQ ID NO: 981755 - RNA, 19 nt, Artificial Sequence
  Description of Artificial Sequence: Synthetic oligonucleotide
cgccuuaggcaugucuuua

SEQ ID NO: 981756 - RNA, 19 nt, Artificial Sequence
  Description of Artificial Sequence: Synthetic oligonucleotide
cacucucguccagguugua

SEQ ID NO: 981757 - RNA, 19 nt, Artificial Sequence
  Description of Artificial Sequence: Synthetic oligonucleotide
gcccacccagauuccuaau

SEQ ID NO: 981758 - RNA, 19 nt, Artificial Sequence
  Description of Artificial Sequence: Synthetic oligonucleotide
ccggccccacacccuucca

SEQ ID NO: 981759 - RNA, 19 nt, Artificial Sequence
  Description of Artificial Sequence: Synthetic oligonucleotide
ggacguccucugugacauu

SEQ ID NO: 981760 - RNA, 19 nt, Artificial Sequence
  Description of Artificial Sequence: Synthetic oligonucleotide
aauacugugauauucaugc

SEQ ID NO: 981761 - RNA, 19 nt, Artificial Sequence
  Description of Artificial Sequence: Synthetic oligonucleotide
acucaaauaaaauagaggc

SEQ ID NO: 981762 - RNA, 19 nt, Artificial Sequence
  Description of Artificial Sequence: Synthetic oligonucleotide
aauaaaauagcuuuaucuc

SEQ ID NO: 981763 - RNA, 19 nt, Artificial Sequence
  Description of Artificial Sequence: Synthetic oligonucleotide
ucuacuauuauucacaaca

SEQ ID NO: 981764 - RNA, 19 nt, Artificial Sequence
  Description of Artificial Sequence: Synthetic oligonucleotide
aaaacuauuauccugggca

SEQ ID NO: 981765 - RNA, 19 nt, Artificial Sequence
  Description of Artificial Sequence: Synthetic oligonucleotide
aaaacuccaauauugggac

SEQ ID NO: 981766 - RNA, 19 nt, Artificial Sequence
  Description of Artificial Sequence: Synthetic oligonucleotide
uuuaaugaagccauguuag

SEQ ID NO: 981767 - RNA, 19 nt, Artificial Sequence
  Description of Artificial Sequence: Synthetic oligonucleotide
aguauuaacaguuuagcuc

SEQ ID NO: 981768 - RNA, 19 nt, Artificial Sequence
  Description of Artificial Sequence: Synthetic oligonucleotide
aacaguuuagcucaugauc

SEQ ID NO: 981769 - RNA, 19 nt, Artificial Sequence
  Description of Artificial Sequence: Synthetic oligonucleotide
ucauaaacgagaaugaaaa

SEQ ID NO: 981770 - RNA, 19 nt, Artificial Sequence
  Description of Artificial Sequence: Synthetic oligonucleotide
ugaaaauuauaucauuccc

SEQ ID NO: 981771 - RNA, 19 nt, Artificial Sequence
  Description of Artificial Sequence: Synthetic oligonucleotide
aaacuugccaacuuuaagu

SEQ ID NO: 981772 - RNA, 19 nt, Artificial Sequence
  Description of Artificial Sequence: Synthetic oligonucleotide
aaagacugcugccauuucc

SEQ ID NO: 981773 - RNA, 19 nt, Artificial Sequence
  Description of Artificial Sequence: Synthetic oligonucleotide
aaucaaucccaauaaaugu

SEQ ID NO: 981774 - RNA, 19 nt, Artificial Sequence
  Description of Artificial Sequence: Synthetic oligonucleotide
aauggagaaauucuaucag

SEQ ID NO: 981775 - RNA, 19 nt, Artificial Sequence
  Description of Artificial Sequence: Synthetic oligonucleotide
aauucuaucagcacaugac

SEQ ID NO: 981776 - RNA, 19 nt, Artificial Sequence
  Description of Artificial Sequence: Synthetic oligonucleotide
aauagaggcaucucuacug

SEQ ID NO: 981777 - RNA, 19 nt, Artificial Sequence
  Description of Artificial Sequence: Synthetic oligonucleotide
uauacacacauacuagagg

SEQ ID NO: 981778 - RNA, 19 nt, Artificial Sequence
  Description of Artificial Sequence: Synthetic oligonucleotide
agagcuuuuauuuguacgg

SEQ ID NO: 981779 - RNA, 19 nt, Artificial Sequence
  Description of Artificial Sequence: Synthetic oligonucleotide
uuuguaauucccaaaacuc

SEQ ID NO: 981780 - RNA, 19 nt, Artificial Sequence
  Description of Artificial Sequence: Synthetic oligonucleotide
auggguucuaaacuuaggc

SEQ ID NO: 981781 - RNA, 19 nt, Artificial Sequence
  Description of Artificial Sequence: Synthetic oligonucleotide
ugugaauuuguuacagugg

SEQ ID NO: 981782 - RNA, 19 nt, Artificial Sequence
  Description of Artificial Sequence: Synthetic oligonucleotide
auaaaagaauuacacaucu

SEQ ID NO: 981783 - RNA, 19 nt, Artificial Sequence
  Description of Artificial Sequence: Synthetic oligonucleotide
ugacugaugacuaaacuug

SEQ ID NO: 981784 - RNA, 19 nt, Artificial Sequence
  Description of Artificial Sequence: Synthetic oligonucleotide
uauucuacaguauaaagua

SEQ ID NO: 981785 - RNA, 19 nt, Artificial Sequence
  Description of Artificial Sequence: Synthetic oligonucleotide
aacuugccaacuuuaaguc

SEQ ID NO: 981786 - RNA, 19 nt, Artificial Sequence
  Description of Artificial Sequence: Synthetic oligonucleotide
uauagguaaagucagucac

SEQ ID NO: 981787 - RNA, 19 nt, Artificial Sequence
  Description of Artificial Sequence: Synthetic oligonucleotide
aaaucacuuacaaagacug

SEQ ID NO: 981788 - RNA, 19 nt, Artificial Sequence
  Description of Artificial Sequence: Synthetic oligonucleotide
uauaccugugaccaguggg

SEQ ID NO: 981789 - RNA, 19 nt, Artificial Sequence
  Description of Artificial Sequence: Synthetic oligonucleotide
uuuacuauauggaaauacu

SEQ ID NO: 981790 - RNA, 19 nt, Artificial Sequence
  Description of Artificial Sequence: Synthetic oligonucleotide
ugaaucaagguuuaacuca

SEQ ID NO: 981791 - RNA, 19 nt, Artificial Sequence
  Description of Artificial Sequence: Synthetic oligonucleotide
aacucaaauaaaauagagg

SEQ ID NO: 981792 - RNA, 19 nt, Artificial Sequence
  Description of Artificial Sequence: Synthetic oligonucleotide
gauggaaugcccuguaagg

SEQ ID NO: 981793 - RNA, 19 nt, Artificial Sequence
  Description of Artificial Sequence: Synthetic oligonucleotide
aggaaguagagccauuccc

SEQ ID NO: 981794 - RNA, 19 nt, Artificial Sequence
  Description of Artificial Sequence: Synthetic oligonucleotide
acuauauggaaauacugug

SEQ ID NO: 981795 - RNA, 19 nt, Artificial Sequence
  Description of Artificial Sequence: Synthetic oligonucleotide
ucugagguaacuuggaaga

SEQ ID NO: 981796 - RNA, 19 nt, Artificial Sequence
  Description of Artificial Sequence: Synthetic oligonucleotide
auaaaauagaggcaucucu

SEQ ID NO: 981797 - RNA, 19 nt, Artificial Sequence
  Description of Artificial Sequence: Synthetic oligonucleotide
uacuggaucacucugcggc

SEQ ID NO: 981798 - RNA, 19 nt, Artificial Sequence
  Description of Artificial Sequence: Synthetic oligonucleotide
aagguuuaacucauaaacg

SEQ ID NO: 981799 - RNA, 19 nt, Artificial Sequence
  Description of Artificial Sequence: Synthetic oligonucleotide
uguaauucccaaaacucca

SEQ ID NO: 981800 - RNA, 19 nt, Artificial Sequence
  Description of Artificial Sequence: Synthetic oligonucleotide
aaacuauuauccugggcag

SEQ ID NO: 981801 - RNA, 19 nt, Artificial Sequence
  Description of Artificial Sequence: Synthetic oligonucleotide
guauuaacaguuuagcuca

SEQ ID NO: 981802 - RNA, 19 nt, Artificial Sequence
  Description of Artificial Sequence: Synthetic oligonucleotide
auacuuaaacguuuaauga

SEQ ID NO: 981803 - RNA, 19 nt, Artificial Sequence
  Description of Artificial Sequence: Synthetic oligonucleotide
gaaucaaucccaauaaaug

SEQ ID NO: 981804 - RNA, 19 nt, Artificial Sequence
  Description of Artificial Sequence: Synthetic oligonucleotide
auacacacauacuagaggu

SEQ ID NO: 981805 - RNA, 19 nt, Artificial Sequence
  Description of Artificial Sequence: Synthetic oligonucleotide
aauaaaauagaggcaucuc

SEQ ID NO: 981806 - RNA, 19 nt, Artificial Sequence
  Description of Artificial Sequence: Synthetic oligonucleotide
uuacaguggaaauaggaca

SEQ ID NO: 981807 - RNA, 19 nt, Artificial Sequence
  Description of Artificial Sequence: Synthetic oligonucleotide
aguauaaaguaaguccugc

SEQ ID NO: 981808 - RNA, 19 nt, Artificial Sequence
  Description of Artificial Sequence: Synthetic oligonucleotide
acuauuauucacaacaucu

SEQ ID NO: 981809 - RNA, 19 nt, Artificial Sequence
  Description of Artificial Sequence: Synthetic oligonucleotide
augaaucaagguuuaacuc

SEQ ID NO: 981810 - RNA, 19 nt, Artificial Sequence
  Description of Artificial Sequence: Synthetic oligonucleotide
ucuugucugaaucaauccc

SEQ ID NO: 981811 - RNA, 19 nt, Artificial Sequence
  Description of Artificial Sequence: Synthetic oligonucleotide
aaaucaaguugucaucaug

SEQ ID NO: 981812 - RNA, 19 nt, Artificial Sequence
  Description of Artificial Sequence: Synthetic oligonucleotide
aaauucuaucagcacauga

SEQ ID NO: 981813 - RNA, 19 nt, Artificial Sequence
  Description of Artificial Sequence: Synthetic oligonucleotide
ugaaucaaucccaauaaau

SEQ ID NO: 981814 - RNA, 19 nt, Artificial Sequence
  Description of Artificial Sequence: Synthetic oligonucleotide
gaaaaucacuuacaaagac

SEQ ID NO: 981815 - RNA, 19 nt, Artificial Sequence
  Description of Artificial Sequence: Synthetic oligonucleotide
uuuaacucauaaacgagaa

SEQ ID NO: 981816 - RNA, 19 nt, Artificial Sequence
  Description of Artificial Sequence: Synthetic oligonucleotide
aacaauaugaaaauucuuu

SEQ ID NO: 981817 - RNA, 19 nt, Artificial Sequence
  Description of Artificial Sequence: Synthetic oligonucleotide
augugaauuuguuacagug

SEQ ID NO: 981818 - RNA, 19 nt, Artificial Sequence
  Description of Artificial Sequence: Synthetic oligonucleotide
agauauauagguaaaguca

SEQ ID NO: 981819 - RNA, 19 nt, Artificial Sequence
  Description of Artificial Sequence: Synthetic oligonucleotide
uggagaaauucuaucagca

SEQ ID NO: 981820 - RNA, 19 nt, Artificial Sequence
  Description of Artificial Sequence: Synthetic oligonucleotide
uucccaguaccaaauaugc

SEQ ID NO: 981821 - RNA, 19 nt, Artificial Sequence
  Description of Artificial Sequence: Synthetic oligonucleotide
ugauauucaugcauaaauc

SEQ ID NO: 981822 - RNA, 19 nt, Artificial Sequence
  Description of Artificial Sequence: Synthetic oligonucleotide
agguuuaacucauaaacga

SEQ ID NO: 981823 - RNA, 19 nt, Artificial Sequence
  Description of Artificial Sequence: Synthetic oligonucleotide
uauaaaguaaguccugcau

SEQ ID NO: 981824 - RNA, 19 nt, Artificial Sequence
  Description of Artificial Sequence: Synthetic oligonucleotide
uuaaacguuuaaugaagcc

SEQ ID NO: 981825 - RNA, 19 nt, Artificial Sequence
  Description of Artificial Sequence: Synthetic oligonucleotide
uucaagucaaugaacugca

SEQ ID NO: 981826 - RNA, 19 nt, Artificial Sequence
  Description of Artificial Sequence: Synthetic oligonucleotide
acauacuagagguucauca

SEQ ID NO: 981827 - RNA, 19 nt, Artificial Sequence
  Description of Artificial Sequence: Synthetic oligonucleotide
uaaagucagucacaaaacu

SEQ ID NO: 981828 - RNA, 19 nt, Artificial Sequence
  Description of Artificial Sequence: Synthetic oligonucleotide
auugucaugaaaauuauau

SEQ ID NO: 981829 - RNA, 19 nt, Artificial Sequence
  Description of Artificial Sequence: Synthetic oligonucleotide
gagaaauucuaucagcaca

SEQ ID NO: 981830 - RNA, 19 nt, Artificial Sequence
  Description of Artificial Sequence: Synthetic oligonucleotide
aagucaguauucuacagua

SEQ ID NO: 981831 - RNA, 19 nt, Artificial Sequence
  Description of Artificial Sequence: Synthetic oligonucleotide
caacuuuaagucuaaguug

SEQ ID NO: 981832 - RNA, 19 nt, Artificial Sequence
  Description of Artificial Sequence: Synthetic oligonucleotide
uacuuaaacguuuaaugaa

SEQ ID NO: 981833 - RNA, 19 nt, Artificial Sequence
  Description of Artificial Sequence: Synthetic oligonucleotide
ugaucaauuccuguuauac

SEQ ID NO: 981834 - RNA, 19 nt, Artificial Sequence
  Description of Artificial Sequence: Synthetic oligonucleotide
acugguaugacugaugacu

SEQ ID NO: 981835 - RNA, 19 nt, Artificial Sequence
  Description of Artificial Sequence: Synthetic oligonucleotide
aagucagucacaaaacuca

SEQ ID NO: 981836 - RNA, 19 nt, Artificial Sequence
  Description of Artificial Sequence: Synthetic oligonucleotide
aauuuguuacaguggaaau

SEQ ID NO: 981837 - RNA, 19 nt, Artificial Sequence
  Description of Artificial Sequence: Synthetic oligonucleotide
aaauagaggcaucucuacu

SEQ ID NO: 981838 - RNA, 19 nt, Artificial Sequence
  Description of Artificial Sequence: Synthetic oligonucleotide
auguuaacacuggaaaccc

SEQ ID NO: 981839 - RNA, 19 nt, Artificial Sequence
  Description of Artificial Sequence: Synthetic oligonucleotide
cuauuauucacaacaucug

SEQ ID NO: 981840 - RNA, 19 nt, Artificial Sequence
  Description of Artificial Sequence: Synthetic oligonucleotide
uacuagagguucaucaaug

SEQ ID NO: 981841 - RNA, 19 nt, Artificial Sequence
  Description of Artificial Sequence: Synthetic oligonucleotide
guuauuuuacuauauggaa

SEQ ID NO: 981842 - RNA, 19 nt, Artificial Sequence
  Description of Artificial Sequence: Synthetic oligonucleotide
cauccuccuacgaacaucg

SEQ ID NO: 981843 - RNA, 19 nt, Artificial Sequence
  Description of Artificial Sequence: Synthetic oligonucleotide
aauaucagugugucagcug

SEQ ID NO: 981844 - RNA, 19 nt, Artificial Sequence
  Description of Artificial Sequence: Synthetic oligonucleotide
gacauucaguacuugauca

SEQ ID NO: 981845 - RNA, 19 nt, Artificial Sequence
  Description of Artificial Sequence: Synthetic oligonucleotide
uuagcucaugaucauaaaa

SEQ ID NO: 981846 - RNA, 19 nt, Artificial Sequence
  Description of Artificial Sequence: Synthetic oligonucleotide
ugugagaaggacauucagu

SEQ ID NO: 981847 - RNA, 19 nt, Artificial Sequence
  Description of Artificial Sequence: Synthetic oligonucleotide
auagucaccugcaggaugc

SEQ ID NO: 981848 - RNA, 19 nt, Artificial Sequence
  Description of Artificial Sequence: Synthetic oligonucleotide
uccaauauugggacuggag

SEQ ID NO: 981849 - RNA, 19 nt, Artificial Sequence
  Description of Artificial Sequence: Synthetic oligonucleotide
accccaggaagauauauag

SEQ ID NO: 981850 - RNA, 19 nt, Artificial Sequence
  Description of Artificial Sequence: Synthetic oligonucleotide
uuauuuguacggaacaguu

SEQ ID NO: 981851 - RNA, 19 nt, Artificial Sequence
  Description of Artificial Sequence: Synthetic oligonucleotide
gaucaauuccuguuauacc

SEQ ID NO: 981852 - RNA, 19 nt, Artificial Sequence
  Description of Artificial Sequence: Synthetic oligonucleotide
acuuaaacguuuaaugaag

SEQ ID NO: 981853 - RNA, 19 nt, Artificial Sequence
  Description of Artificial Sequence: Synthetic oligonucleotide
ucccaauaaauguuaacac

SEQ ID NO: 981854 - RNA, 19 nt, Artificial Sequence
  Description of Artificial Sequence: Synthetic oligonucleotide
uauauagguaaagucaguc

SEQ ID NO: 981855 - RNA, 19 nt, Artificial Sequence
  Description of Artificial Sequence: Synthetic oligonucleotide
uauacacauggguaaauaa

SEQ ID NO: 981856 - RNA, 19 nt, Artificial Sequence
  Description of Artificial Sequence: Synthetic oligonucleotide
aaauaucgaucccaggcau

SEQ ID NO: 981857 - RNA, 19 nt, Artificial Sequence
  Description of Artificial Sequence: Synthetic oligonucleotide
aacuccaauauugggacug

SEQ ID NO: 981858 - RNA, 19 nt, Artificial Sequence
  Description of Artificial Sequence: Synthetic oligonucleotide
auauagguaaagucaguca

SEQ ID NO: 981859 - RNA, 19 nt, Artificial Sequence
  Description of Artificial Sequence: Synthetic oligonucleotide
ucaauggagaaauucuauc

SEQ ID NO: 981860 - RNA, 19 nt, Artificial Sequence
  Description of Artificial Sequence: Synthetic oligonucleotide
uuaucucuacuauuauuca

SEQ ID NO: 981861 - RNA, 19 nt, Artificial Sequence
  Description of Artificial Sequence: Synthetic oligonucleotide
gaugacuaaacuugccaac

SEQ ID NO: 981862 - RNA, 19 nt, Artificial Sequence
  Description of Artificial Sequence: Synthetic oligonucleotide
ccaauaaauguuaacacug

SEQ ID NO: 981863 - RNA, 19 nt, Artificial Sequence
  Description of Artificial Sequence: Synthetic oligonucleotide
agcauaaaugucccaauga

SEQ ID NO: 981864 - RNA, 19 nt, Artificial Sequence
  Description of Artificial Sequence: Synthetic oligonucleotide
uccagcaacaacuggguac

SEQ ID NO: 981865 - RNA, 19 nt, Artificial Sequence
  Description of Artificial Sequence: Synthetic oligonucleotide
auagcuuuaucucuacuau

SEQ ID NO: 981866 - RNA, 19 nt, Artificial Sequence
  Description of Artificial Sequence: Synthetic oligonucleotide
aaaacuccauaaaagaauu

SEQ ID NO: 981867 - RNA, 19 nt, Artificial Sequence
  Description of Artificial Sequence: Synthetic oligonucleotide
gaaguagagccauucccag

SEQ ID NO: 981868 - RNA, 19 nt, Artificial Sequence
  Description of Artificial Sequence: Synthetic oligonucleotide
ugaugacuaaacuugccaa

SEQ ID NO: 981869 - RNA, 19 nt, Artificial Sequence
  Description of Artificial Sequence: Synthetic oligonucleotide
acacacauacuagagguuc

SEQ ID NO: 981870 - RNA, 19 nt, Artificial Sequence
  Description of Artificial Sequence: Synthetic oligonucleotide
ucaaucccaauaaauguua

SEQ ID NO: 981871 - RNA, 19 nt, Artificial Sequence
  Description of Artificial Sequence: Synthetic oligonucleotide
acaguuuagcucaugauca

SEQ ID NO: 981872 - RNA, 19 nt, Artificial Sequence
  Description of Artificial Sequence: Synthetic oligonucleotide
cucaguaugcaaaauaaaa

SEQ ID NO: 981873 - RNA, 19 nt, Artificial Sequence
  Description of Artificial Sequence: Synthetic oligonucleotide
aagcccaaagaauauggaa

SEQ ID NO: 981874 - RNA, 19 nt, Artificial Sequence
  Description of Artificial Sequence: Synthetic oligonucleotide
aaacgagaaugaaaaucac

SEQ ID NO: 981875 - RNA, 19 nt, Artificial Sequence
  Description of Artificial Sequence: Synthetic oligonucleotide
aaggacuuguuccuuugcu

SEQ ID NO: 981876 - RNA, 19 nt, Artificial Sequence
  Description of Artificial Sequence: Synthetic oligonucleotide
ucccaaugaaucaagguuu

SEQ ID NO: 981877 - RNA, 19 nt, Artificial Sequence
  Description of Artificial Sequence: Synthetic oligonucleotide
gugaauuuguuacagugga

SEQ ID NO: 981878 - RNA, 19 nt, Artificial Sequence
  Description of Artificial Sequence: Synthetic oligonucleotide
ccaaauaucgaucccaggc

SEQ ID NO: 981879 - RNA, 19 nt, Artificial Sequence
  Description of Artificial Sequence: Synthetic oligonucleotide
uuauccugggcagaaaugu

SEQ ID NO: 981880 - RNA, 19 nt, Artificial Sequence
  Description of Artificial Sequence: Synthetic oligonucleotide
uacugugauauucaugcau

SEQ ID NO: 981881 - RNA, 19 nt, Artificial Sequence
  Description of Artificial Sequence: Synthetic oligonucleotide
uggguaugcacaguuggcg

SEQ ID NO: 981882 - RNA, 19 nt, Artificial Sequence
  Description of Artificial Sequence: Synthetic oligonucleotide
aacaucgcaguugugagaa

SEQ ID NO: 981883 - RNA, 19 nt, Artificial Sequence
  Description of Artificial Sequence: Synthetic oligonucleotide
uggguucuaaacuuaggcu

SEQ ID NO: 981884 - RNA, 19 nt, Artificial Sequence
  Description of Artificial Sequence: Synthetic oligonucleotide
caauggagaaauucuauca

SEQ ID NO: 981885 - RNA, 19 nt, Artificial Sequence
  Description of Artificial Sequence: Synthetic oligonucleotide
uugucaugaaaauuauauc

SEQ ID NO: 981886 - RNA, 19 nt, Artificial Sequence
  Description of Artificial Sequence: Synthetic oligonucleotide
aagucuaaguugccaauau

SEQ ID NO: 981887 - RNA, 19 nt, Artificial Sequence
  Description of Artificial Sequence: Synthetic oligonucleotide
uuuucuagccagauggguu

SEQ ID NO: 981888 - RNA, 19 nt, Artificial Sequence
  Description of Artificial Sequence: Synthetic oligonucleotide
uucaguacuugaucaauuc

SEQ ID NO: 981889 - RNA, 19 nt, Artificial Sequence
  Description of Artificial Sequence: Synthetic oligonucleotide
gagggaugcaaacagggca

SEQ ID NO: 981890 - RNA, 19 nt, Artificial Sequence
  Description of Artificial Sequence: Synthetic oligonucleotide
uuauaccugugaccagugg

SEQ ID NO: 981891 - RNA, 19 nt, Artificial Sequence
  Description of Artificial Sequence: Synthetic oligonucleotide
uuaaugaagccauguuaga

SEQ ID NO: 981892 - RNA, 19 nt, Artificial Sequence
  Description of Artificial Sequence: Synthetic oligonucleotide
agucuaaguugccaauauc

SEQ ID NO: 981893 - RNA, 19 nt, Artificial Sequence
  Description of Artificial Sequence: Synthetic oligonucleotide
ugugaucauuccaaagagu

SEQ ID NO: 981894 - RNA, 19 nt, Artificial Sequence
  Description of Artificial Sequence: Synthetic oligonucleotide
cuugcucucaggugaaggc

SEQ ID NO: 981895 - RNA, 19 nt, Artificial Sequence
  Description of Artificial Sequence: Synthetic oligonucleotide
uguuauaccugugaccagu

SEQ ID NO: 981896 - RNA, 19 nt, Artificial Sequence
  Description of Artificial Sequence: Synthetic oligonucleotide
uccuguuauaccugugacc

SEQ ID NO: 981897 - RNA, 19 nt, Artificial Sequence
  Description of Artificial Sequence: Synthetic oligonucleotide
cacacauccuccuacgaac

SEQ ID NO: 981898 - RNA, 19 nt, Artificial Sequence
  Description of Artificial Sequence: Synthetic oligonucleotide
uuucuagccagauggguuc

SEQ ID NO: 981899 - RNA, 19 nt, Artificial Sequence
  Description of Artificial Sequence: Synthetic oligonucleotide
auuccuguuauaccuguga

SEQ ID NO: 981900 - RNA, 19 nt, Artificial Sequence
  Description of Artificial Sequence: Synthetic oligonucleotide
aacgagaaugaaaaucacu

SEQ ID NO: 981901 - RNA, 19 nt, Artificial Sequence
  Description of Artificial Sequence: Synthetic oligonucleotide
aaugucccaaugaaucaag

SEQ ID NO: 981902 - RNA, 19 nt, Artificial Sequence
  Description of Artificial Sequence: Synthetic oligonucleotide
cuaaacuuaggcuucaccu

SEQ ID NO: 981903 - RNA, 19 nt, Artificial Sequence
  Description of Artificial Sequence: Synthetic oligonucleotide
aucaagguuuaacucauaa

SEQ ID NO: 981904 - RNA, 19 nt, Artificial Sequence
  Description of Artificial Sequence: Synthetic oligonucleotide
uuauaucauucccucccug

SEQ ID NO: 981905 - RNA, 19 nt, Artificial Sequence
  Description of Artificial Sequence: Synthetic oligonucleotide
ugagaacuagagauggaau

SEQ ID NO: 981906 - RNA, 19 nt, Artificial Sequence
  Description of Artificial Sequence: Synthetic oligonucleotide
aauauugggacuggaggaa

SEQ ID NO: 981907 - RNA, 19 nt, Artificial Sequence
  Description of Artificial Sequence: Synthetic oligonucleotide
uuugcucacgccuuucuuc

SEQ ID NO: 981908 - RNA, 19 nt, Artificial Sequence
  Description of Artificial Sequence: Synthetic oligonucleotide
aguagagccauucccagua

SEQ ID NO: 981909 - RNA, 19 nt, Artificial Sequence
  Description of Artificial Sequence: Synthetic oligonucleotide
caauauugggacuggagga

SEQ ID NO: 981910 - RNA, 19 nt, Artificial Sequence
  Description of Artificial Sequence: Synthetic oligonucleotide
auuauaucauucccucccu

SEQ ID NO: 981911 - RNA, 19 nt, Artificial Sequence
  Description of Artificial Sequence: Synthetic oligonucleotide
acaugaaugaaaguauuaa

SEQ ID NO: 981912 - RNA, 19 nt, Artificial Sequence
  Description of Artificial Sequence: Synthetic oligonucleotide
guuuaacucauaaacgaga

SEQ ID NO: 981913 - RNA, 19 nt, Artificial Sequence
  Description of Artificial Sequence: Synthetic oligonucleotide
ugcauaaaucaaguuguca

SEQ ID NO: 981914 - RNA, 19 nt, Artificial Sequence
  Description of Artificial Sequence: Synthetic oligonucleotide
aaauaggacaccaguggga

SEQ ID NO: 981915 - RNA, 19 nt, Artificial Sequence
  Description of Artificial Sequence: Synthetic oligonucleotide
uccuccuacgaacaucgca

SEQ ID NO: 981916 - RNA, 19 nt, Artificial Sequence
  Description of Artificial Sequence: Synthetic oligonucleotide
gaacuagagauggaaugcc

SEQ ID NO: 981917 - RNA, 19 nt, Artificial Sequence
  Description of Artificial Sequence: Synthetic oligonucleotide
auaucgaucccaggcauag

SEQ ID NO: 981918 - RNA, 19 nt, Artificial Sequence
  Description of Artificial Sequence: Synthetic oligonucleotide
aggcauagucaccugcagg

SEQ ID NO: 981919 - RNA, 19 nt, Artificial Sequence
  Description of Artificial Sequence: Synthetic oligonucleotide
aaguugccaauaucagugu

SEQ ID NO: 981920 - RNA, 19 nt, Artificial Sequence
  Description of Artificial Sequence: Synthetic oligonucleotide
auagaggcaucucuacugu

SEQ ID NO: 981921 - RNA, 19 nt, Artificial Sequence
  Description of Artificial Sequence: Synthetic oligonucleotide
gauggguucuaaacuuagg

SEQ ID NO: 981922 - RNA, 19 nt, Artificial Sequence
  Description of Artificial Sequence: Synthetic oligonucleotide
aacaacuggguaccucacu

SEQ ID NO: 981923 - RNA, 19 nt, Artificial Sequence
  Description of Artificial Sequence: Synthetic oligonucleotide
uaaggacuuguuccuuugc

SEQ ID NO: 981924 - RNA, 19 nt, Artificial Sequence
  Description of Artificial Sequence: Synthetic oligonucleotide
caucgcaguugugagaagg

SEQ ID NO: 981925 - RNA, 19 nt, Artificial Sequence
  Description of Artificial Sequence: Synthetic oligonucleotide
aacaaaaccccaggaagau

SEQ ID NO: 981926 - RNA, 19 nt, Artificial Sequence
  Description of Artificial Sequence: Synthetic oligonucleotide
ucaagucaaugaacugcag

SEQ ID NO: 981927 - RNA, 19 nt, Artificial Sequence
  Description of Artificial Sequence: Synthetic oligonucleotide
auaggacaccagugggacc

SEQ ID NO: 981928 - RNA, 19 nt, Artificial Sequence
  Description of Artificial Sequence: Synthetic oligonucleotide
gagguaacuuggaagaaca

SEQ ID NO: 981929 - RNA, 19 nt, Artificial Sequence
  Description of Artificial Sequence: Synthetic oligonucleotide
auaucauucccucccugga

SEQ ID NO: 981930 - RNA, 19 nt, Artificial Sequence
  Description of Artificial Sequence: Synthetic oligonucleotide
acauggguaaauaaaguau

SEQ ID NO: 981931 - RNA, 19 nt, Artificial Sequence
  Description of Artificial Sequence: Synthetic oligonucleotide
cuacaguauaaaguaaguc

SEQ ID NO: 981932 - RNA, 19 nt, Artificial Sequence
  Description of Artificial Sequence: Synthetic oligonucleotide
caaauaucgaucccaggca

SEQ ID NO: 981933 - RNA, 19 nt, Artificial Sequence
  Description of Artificial Sequence: Synthetic oligonucleotide
ugaauuuguuacaguggaa

SEQ ID NO: 981934 - RNA, 19 nt, Artificial Sequence
  Description of Artificial Sequence: Synthetic oligonucleotide
aauaaaguauacacacaua

SEQ ID NO: 981935 - RNA, 19 nt, Artificial Sequence
  Description of Artificial Sequence: Synthetic oligonucleotide
auacuagagguucaucaau

SEQ ID NO: 981936 - RNA, 19 nt, Artificial Sequence
  Description of Artificial Sequence: Synthetic oligonucleotide
uauuuguacggaacaguuu

SEQ ID NO: 981937 - RNA, 19 nt, Artificial Sequence
  Description of Artificial Sequence: Synthetic oligonucleotide
cauggguaaauaaaguaua

SEQ ID NO: 981938 - RNA, 19 nt, Artificial Sequence
  Description of Artificial Sequence: Synthetic oligonucleotide
aaguagagccauucccagu

SEQ ID NO: 981939 - RNA, 19 nt, Artificial Sequence
  Description of Artificial Sequence: Synthetic oligonucleotide
acgaacaucgcaguuguga

SEQ ID NO: 981940 - RNA, 19 nt, Artificial Sequence
  Description of Artificial Sequence: Synthetic oligonucleotide
caugaucauaaaauauaca

SEQ ID NO: 981941 - RNA, 19 nt, Artificial Sequence
  Description of Artificial Sequence: Synthetic oligonucleotide
gacacaaaugcuugcucuc

SEQ ID NO: 981942 - RNA, 19 nt, Artificial Sequence
  Description of Artificial Sequence: Synthetic oligonucleotide
uucaacuggacaguacuuc

SEQ ID NO: 981943 - RNA, 19 nt, Artificial Sequence
  Description of Artificial Sequence: Synthetic oligonucleotide
augacuaaacuugccaacu

SEQ ID NO: 981944 - RNA, 19 nt, Artificial Sequence
  Description of Artificial Sequence: Synthetic oligonucleotide
caguauaaaguaaguccug

SEQ ID NO: 981945 - RNA, 19 nt, Artificial Sequence
  Description of Artificial Sequence: Synthetic oligonucleotide
uguuaacacuggaaacccu

SEQ ID NO: 981946 - RNA, 19 nt, Artificial Sequence
  Description of Artificial Sequence: Synthetic oligonucleotide
cccuguaaggacuuguucc

SEQ ID NO: 981947 - RNA, 19 nt, Artificial Sequence
  Description of Artificial Sequence: Synthetic oligonucleotide
cugaugacuaaacuugcca

SEQ ID NO: 981948 - RNA, 19 nt, Artificial Sequence
  Description of Artificial Sequence: Synthetic oligonucleotide
ccaagcacaaacagguucc

SEQ ID NO: 981949 - RNA, 19 nt, Artificial Sequence
  Description of Artificial Sequence: Synthetic oligonucleotide
ucccuggaaaacuauuauc

SEQ ID NO: 981950 - RNA, 19 nt, Artificial Sequence
  Description of Artificial Sequence: Synthetic oligonucleotide
ugagcauaaaugucccaau

SEQ ID NO: 981951 - RNA, 19 nt, Artificial Sequence
  Description of Artificial Sequence: Synthetic oligonucleotide
gacugaugacuaaacuugc

SEQ ID NO: 981952 - RNA, 19 nt, Artificial Sequence
  Description of Artificial Sequence: Synthetic oligonucleotide
ucccaguaccaaauaugcc

SEQ ID NO: 981953 - RNA, 19 nt, Artificial Sequence
  Description of Artificial Sequence: Synthetic oligonucleotide
uauugggacuggaggaagu

SEQ ID NO: 981954 - RNA, 19 nt, Artificial Sequence
  Description of Artificial Sequence: Synthetic oligonucleotide
guuaacacuggaaacccuc

SEQ ID NO: 981955 - RNA, 19 nt, Artificial Sequence
  Description of Artificial Sequence: Synthetic oligonucleotide
uaucauucccucccuggaa

SEQ ID NO: 981956 - RNA, 19 nt, Artificial Sequence
  Description of Artificial Sequence: Synthetic oligonucleotide
cauagucaccugcaggaug

SEQ ID NO: 981957 - RNA, 19 nt, Artificial Sequence
  Description of Artificial Sequence: Synthetic oligonucleotide
cuucacucuagcucgccug

SEQ ID NO: 981958 - RNA, 19 nt, Artificial Sequence
  Description of Artificial Sequence: Synthetic oligonucleotide
cuuguuccuuugcucacgc

SEQ ID NO: 981959 - RNA, 19 nt, Artificial Sequence
  Description of Artificial Sequence: Synthetic oligonucleotide
uaaaucaaguugucaucau

SEQ ID NO: 981960 - RNA, 19 nt, Artificial Sequence
  Description of Artificial Sequence: Synthetic oligonucleotide
ucgaucccaggcauaguca

SEQ ID NO: 981961 - RNA, 19 nt, Artificial Sequence
  Description of Artificial Sequence: Synthetic oligonucleotide
uguacggaacaguuuuaaa

SEQ ID NO: 981962 - RNA, 19 nt, Artificial Sequence
  Description of Artificial Sequence: Synthetic oligonucleotide
uuuagcucaugaucauaaa

SEQ ID NO: 981963 - RNA, 19 nt, Artificial Sequence
  Description of Artificial Sequence: Synthetic oligonucleotide
ggaaaacuauuauccuggg

SEQ ID NO: 981964 - RNA, 19 nt, Artificial Sequence
  Description of Artificial Sequence: Synthetic oligonucleotide
auuuguuacaguggaaaua

SEQ ID NO: 981965 - RNA, 19 nt, Artificial Sequence
  Description of Artificial Sequence: Synthetic oligonucleotide
auacacauggguaaauaaa

SEQ ID NO: 981966 - RNA, 19 nt, Artificial Sequence
  Description of Artificial Sequence: Synthetic oligonucleotide
cuccaagccaugccaagcc

SEQ ID NO: 981967 - RNA, 19 nt, Artificial Sequence
  Description of Artificial Sequence: Synthetic oligonucleotide
ugugauauucaugcauaaa

SEQ ID NO: 981968 - RNA, 19 nt, Artificial Sequence
  Description of Artificial Sequence: Synthetic oligonucleotide
cuggguaccucacuccaag

SEQ ID NO: 981969 - RNA, 19 nt, Artificial Sequence
  Description of Artificial Sequence: Synthetic oligonucleotide
agcccaaagaauauggaaa

SEQ ID NO: 981970 - RNA, 19 nt, Artificial Sequence
  Description of Artificial Sequence: Synthetic oligonucleotide
aaaccccaggaagauauau

SEQ ID NO: 981971 - RNA, 19 nt, Artificial Sequence
  Description of Artificial Sequence: Synthetic oligonucleotide
uccgggguaccugggaugg

SEQ ID NO: 981972 - RNA, 19 nt, Artificial Sequence
  Description of Artificial Sequence: Synthetic oligonucleotide
cacauggguaaauaaagua

SEQ ID NO: 981973 - RNA, 19 nt, Artificial Sequence
  Description of Artificial Sequence: Synthetic oligonucleotide
acugugagaacuagagaug

SEQ ID NO: 981974 - RNA, 19 nt, Artificial Sequence
  Description of Artificial Sequence: Synthetic oligonucleotide
agcuuuaucucuacuauua

SEQ ID NO: 981975 - RNA, 19 nt, Artificial Sequence
  Description of Artificial Sequence: Synthetic oligonucleotide
gaggcaucucuacugucac

SEQ ID NO: 981976 - RNA, 19 nt, Artificial Sequence
  Description of Artificial Sequence: Synthetic oligonucleotide
aacuauuauccugggcaga

SEQ ID NO: 981977 - RNA, 19 nt, Artificial Sequence
  Description of Artificial Sequence: Synthetic oligonucleotide
uaagucuaaguugccaaua

SEQ ID NO: 981978 - RNA, 19 nt, Artificial Sequence
  Description of Artificial Sequence: Synthetic oligonucleotide
cauacuagagguucaucaa

SEQ ID NO: 981979 - RNA, 19 nt, Artificial Sequence
  Description of Artificial Sequence: Synthetic oligonucleotide
gguaccagcagccaaauau

SEQ ID NO: 981980 - RNA, 19 nt, Artificial Sequence
  Description of Artificial Sequence: Synthetic oligonucleotide
ugacuaaacuugccaacuu

SEQ ID NO: 981981 - RNA, 19 nt, Artificial Sequence
  Description of Artificial Sequence: Synthetic oligonucleotide
ucgccugguaaaaucacuu

SEQ ID NO: 981982 - RNA, 19 nt, Artificial Sequence
  Description of Artificial Sequence: Synthetic oligonucleotide
auauugggacuggaggaag

SEQ ID NO: 981983 - RNA, 19 nt, Artificial Sequence
  Description of Artificial Sequence: Synthetic oligonucleotide
auggaaugcccuguaagga

SEQ ID NO: 981984 - RNA, 19 nt, Artificial Sequence
  Description of Artificial Sequence: Synthetic oligonucleotide
ugcaaacagggcacugaac

SEQ ID NO: 981985 - RNA, 19 nt, Artificial Sequence
  Description of Artificial Sequence: Synthetic oligonucleotide
uggaucacucugcggcugc

SEQ ID NO: 981986 - RNA, 19 nt, Artificial Sequence
  Description of Artificial Sequence: Synthetic oligonucleotide
cuagagguucaucaaugga

SEQ ID NO: 981987 - RNA, 19 nt, Artificial Sequence
  Description of Artificial Sequence: Synthetic oligonucleotide
acugugauauucaugcaua

SEQ ID NO: 981988 - RNA, 19 nt, Artificial Sequence
  Description of Artificial Sequence: Synthetic oligonucleotide
gcauaaaugucccaaugaa

SEQ ID NO: 981989 - RNA, 19 nt, Artificial Sequence
  Description of Artificial Sequence: Synthetic oligonucleotide
cugccaaccuuuguaauuc

SEQ ID NO: 981990 - RNA, 19 nt, Artificial Sequence
  Description of Artificial Sequence: Synthetic oligonucleotide
auauggaaauacugugaua

SEQ ID NO: 981991 - RNA, 19 nt, Artificial Sequence
  Description of Artificial Sequence: Synthetic oligonucleotide
ggacuuguuccuuugcuca

SEQ ID NO: 981992 - RNA, 19 nt, Artificial Sequence
  Description of Artificial Sequence: Synthetic oligonucleotide
agaggcaucucuacuguca

SEQ ID NO: 981993 - RNA, 19 nt, Artificial Sequence
  Description of Artificial Sequence: Synthetic oligonucleotide
auacugugauauucaugca

SEQ ID NO: 981994 - RNA, 19 nt, Artificial Sequence
  Description of Artificial Sequence: Synthetic oligonucleotide
guuccgggaagaauucaag

SEQ ID NO: 981995 - RNA, 19 nt, Artificial Sequence
  Description of Artificial Sequence: Synthetic oligonucleotide
acucauaaacgagaaugaa

SEQ ID NO: 981996 - RNA, 19 nt, Artificial Sequence
  Description of Artificial Sequence: Synthetic oligonucleotide
guaugcacaguuggcgucc

SEQ ID NO: 981997 - RNA, 19 nt, Artificial Sequence
  Description of Artificial Sequence: Synthetic oligonucleotide
uauuaacaguuuagcucau

SEQ ID NO: 981998 - RNA, 19 nt, Artificial Sequence
  Description of Artificial Sequence: Synthetic oligonucleotide
cccaaauacccucaguaug

SEQ ID NO: 981999 - RNA, 19 nt, Artificial Sequence
  Description of Artificial Sequence: Synthetic oligonucleotide
agugggcauacuuggguau

SEQ ID NO: 982000 - RNA, 19 nt, Artificial Sequence
  Description of Artificial Sequence: Synthetic oligonucleotide
uugaucaauuccuguuaua

SEQ ID NO: 982001 - RNA, 19 nt, Artificial Sequence
  Description of Artificial Sequence: Synthetic oligonucleotide
acuccaauauugggacugg

SEQ ID NO: 982002 - RNA, 19 nt, Artificial Sequence
  Description of Artificial Sequence: Synthetic oligonucleotide
ccuguuauaccugugacca

SEQ ID NO: 982003 - RNA, 19 nt, Artificial Sequence
  Description of Artificial Sequence: Synthetic oligonucleotide
caaucaugcccaagcccag

SEQ ID NO: 982004 - RNA, 19 nt, Artificial Sequence
  Description of Artificial Sequence: Synthetic oligonucleotide
gcacaugacauugucauga

SEQ ID NO: 982005 - RNA, 19 nt, Artificial Sequence
  Description of Artificial Sequence: Synthetic oligonucleotide
acucuagcucgccugguaa

SEQ ID NO: 982006 - RNA, 19 nt, Artificial Sequence
  Description of Artificial Sequence: Synthetic oligonucleotide
cacucugcggcugccaacc

SEQ ID NO: 982007 - RNA, 19 nt, Artificial Sequence
  Description of Artificial Sequence: Synthetic oligonucleotide
ggguaccucacuccaagcc

SEQ ID NO: 982008 - RNA, 19 nt, Artificial Sequence
  Description of Artificial Sequence: Synthetic oligonucleotide
ugccaaccuuuguaauucc

SEQ ID NO: 982009 - RNA, 19 nt, Artificial Sequence
  Description of Artificial Sequence: Synthetic oligonucleotide
ucucuacugucacccagua

SEQ ID NO: 982010 - RNA, 19 nt, Artificial Sequence
  Description of Artificial Sequence: Synthetic oligonucleotide
guuggcguccagcaacaac

SEQ ID NO: 982011 - RNA, 19 nt, Artificial Sequence
  Description of Artificial Sequence: Synthetic oligonucleotide
gguaccucacuccaagcca

SEQ ID NO: 982012 - RNA, 19 nt, Artificial Sequence
  Description of Artificial Sequence: Synthetic oligonucleotide
ggaaguagagccauuccca

SEQ ID NO: 982013 - RNA, 19 nt, Artificial Sequence
  Description of Artificial Sequence: Synthetic oligonucleotide
caagcacaaacagguuccg

SEQ ID NO: 982014 - RNA, 19 nt, Artificial Sequence
  Description of Artificial Sequence: Synthetic oligonucleotide
ucuagcucgccugguaaaa

SEQ ID NO: 982015 - RNA, 19 nt, Artificial Sequence
  Description of Artificial Sequence: Synthetic oligonucleotide
ugguaugacugaugacuaa

SEQ ID NO: 982016 - RNA, 19 nt, Artificial Sequence
  Description of Artificial Sequence: Synthetic oligonucleotide
uggguaccucacuccaagc

SEQ ID NO: 982017 - RNA, 19 nt, Artificial Sequence
  Description of Artificial Sequence: Synthetic oligonucleotide
cauuaccuucaacuggaca

SEQ ID NO: 982018 - RNA, 19 nt, Artificial Sequence
  Description of Artificial Sequence: Synthetic oligonucleotide
acaugacauugucaugaaa

SEQ ID NO: 982019 - RNA, 19 nt, Artificial Sequence
  Description of Artificial Sequence: Synthetic oligonucleotide
gaaucaagguuuaacucau

SEQ ID NO: 982020 - RNA, 19 nt, Artificial Sequence
  Description of Artificial Sequence: Synthetic oligonucleotide
aauaucgaucccaggcaua

SEQ ID NO: 982021 - RNA, 19 nt, Artificial Sequence
  Description of Artificial Sequence: Synthetic oligonucleotide
cuguuauaccugugaccag

SEQ ID NO: 982022 - RNA, 19 nt, Artificial Sequence
  Description of Artificial Sequence: Synthetic oligonucleotide
caugaaagucaguauucua

SEQ ID NO: 982023 - RNA, 19 nt, Artificial Sequence
  Description of Artificial Sequence: Synthetic oligonucleotide
ugcgccauacuggaucacu

SEQ ID NO: 982024 - RNA, 19 nt, Artificial Sequence
  Description of Artificial Sequence: Synthetic oligonucleotide
agguucaucaauggagaaa

SEQ ID NO: 982025 - RNA, 19 nt, Artificial Sequence
  Description of Artificial Sequence: Synthetic oligonucleotide
cacacauacuagagguuca

SEQ ID NO: 982026 - RNA, 19 nt, Artificial Sequence
  Description of Artificial Sequence: Synthetic oligonucleotide
caacaacuggguaccucac

SEQ ID NO: 982027 - RNA, 19 nt, Artificial Sequence
  Description of Artificial Sequence: Synthetic oligonucleotide
gcacugguaugacugauga

SEQ ID NO: 982028 - RNA, 19 nt, Artificial Sequence
  Description of Artificial Sequence: Synthetic oligonucleotide
uccuacgaacaucgcaguu

SEQ ID NO: 982029 - RNA, 19 nt, Artificial Sequence
  Description of Artificial Sequence: Synthetic oligonucleotide
ccagcaacaacuggguacc

SEQ ID NO: 982030 - RNA, 19 nt, Artificial Sequence
  Description of Artificial Sequence: Synthetic oligonucleotide
gacuaaacuugccaacuuu

SEQ ID NO: 982031 - RNA, 19 nt, Artificial Sequence
  Description of Artificial Sequence: Synthetic oligonucleotide
ucgcaguugugagaaggac

SEQ ID NO: 982032 - RNA, 19 nt, Artificial Sequence
  Description of Artificial Sequence: Synthetic oligonucleotide
auucaguacuugaucaauu

SEQ ID NO: 982033 - RNA, 19 nt, Artificial Sequence
  Description of Artificial Sequence: Synthetic oligonucleotide
cugguaugacugaugacua

SEQ ID NO: 982034 - RNA, 19 nt, Artificial Sequence
  Description of Artificial Sequence: Synthetic oligonucleotide
cugaaucaaucccaauaaa

SEQ ID NO: 982035 - RNA, 19 nt, Artificial Sequence
  Description of Artificial Sequence: Synthetic oligonucleotide
cacccaguaugcagugggc

SEQ ID NO: 982036 - RNA, 19 nt, Artificial Sequence
  Description of Artificial Sequence: Synthetic oligonucleotide
caaucccaauaaauguuaa

SEQ ID NO: 982037 - RNA, 19 nt, Artificial Sequence
  Description of Artificial Sequence: Synthetic oligonucleotide
aucagugugucagcuggga

SEQ ID NO: 982038 - RNA, 19 nt, Artificial Sequence
  Description of Artificial Sequence: Synthetic oligonucleotide
aucacucugcggcugccaa

SEQ ID NO: 982039 - RNA, 19 nt, Artificial Sequence
  Description of Artificial Sequence: Synthetic oligonucleotide
agcucgccugguaaaauca

SEQ ID NO: 982040 - RNA, 19 nt, Artificial Sequence
  Description of Artificial Sequence: Synthetic oligonucleotide
uacuucacucuagcucgcc

SEQ ID NO: 982041 - RNA, 19 nt, Artificial Sequence
  Description of Artificial Sequence: Synthetic oligonucleotide
ccuacgaacaucgcaguug

SEQ ID NO: 982042 - RNA, 19 nt, Artificial Sequence
  Description of Artificial Sequence: Synthetic oligonucleotide
aaccccaggaagauauaua

SEQ ID NO: 982043 - RNA, 19 nt, Artificial Sequence
  Description of Artificial Sequence: Synthetic oligonucleotide
cuacgaacaucgcaguugu

SEQ ID NO: 982044 - RNA, 19 nt, Artificial Sequence
  Description of Artificial Sequence: Synthetic oligonucleotide
cacugguaugacugaugac

SEQ ID NO: 982045 - RNA, 19 nt, Artificial Sequence
  Description of Artificial Sequence: Synthetic oligonucleotide
uacgaacaucgcaguugug

SEQ ID NO: 982046 - RNA, 19 nt, Artificial Sequence
  Description of Artificial Sequence: Synthetic oligonucleotide
ugccaacuuuaagucuaag

SEQ ID NO: 982047 - RNA, 19 nt, Artificial Sequence
  Description of Artificial Sequence: Synthetic oligonucleotide
ccagcaugagugcugcgcc

SEQ ID NO: 982048 - RNA, 19 nt, Artificial Sequence
  Description of Artificial Sequence: Synthetic oligonucleotide
acccaguaugcagugggca

SEQ ID NO: 982049 - RNA, 19 nt, Artificial Sequence
  Description of Artificial Sequence: Synthetic oligonucleotide
guagagccauucccaguac

SEQ ID NO: 982050 - RNA, 19 nt, Artificial Sequence
  Description of Artificial Sequence: Synthetic oligonucleotide
aucgcaguugugagaagga

SEQ ID NO: 982051 - RNA, 19 nt, Artificial Sequence
  Description of Artificial Sequence: Synthetic oligonucleotide
agucagucacaaaacucaa

SEQ ID NO: 982052 - RNA, 19 nt, Artificial Sequence
  Description of Artificial Sequence: Synthetic oligonucleotide
uucuagccagauggguucu

SEQ ID NO: 982053 - RNA, 19 nt, Artificial Sequence
  Description of Artificial Sequence: Synthetic oligonucleotide
agcugggacaugaaugaaa

SEQ ID NO: 982054 - RNA, 19 nt, Artificial Sequence
  Description of Artificial Sequence: Synthetic oligonucleotide
caguaccaaauaugccauc

SEQ ID NO: 982055 - RNA, 19 nt, Artificial Sequence
  Description of Artificial Sequence: Synthetic oligonucleotide
ucacgccuuucuuccauuu

SEQ ID NO: 982056 - RNA, 19 nt, Artificial Sequence
  Description of Artificial Sequence: Synthetic oligonucleotide
cauucccucccuggaaaac

SEQ ID NO: 982057 - RNA, 19 nt, Artificial Sequence
  Description of Artificial Sequence: Synthetic oligonucleotide
cagggcacugaacuugcca

SEQ ID NO: 982058 - RNA, 19 nt, Artificial Sequence
  Description of Artificial Sequence: Synthetic oligonucleotide
cccucaguaugcaaaauaa

SEQ ID NO: 982059 - RNA, 19 nt, Artificial Sequence
  Description of Artificial Sequence: Synthetic oligonucleotide
guucacugugagaacuaga

SEQ ID NO: 982060 - RNA, 19 nt, Artificial Sequence
  Description of Artificial Sequence: Synthetic oligonucleotide
uaugcacaguuggcgucca

SEQ ID NO: 982061 - RNA, 19 nt, Artificial Sequence
  Description of Artificial Sequence: Synthetic oligonucleotide
ggagggaugcaaacagggc

SEQ ID NO: 982062 - RNA, 19 nt, Artificial Sequence
  Description of Artificial Sequence: Synthetic oligonucleotide
auugggacuggaggaagua

SEQ ID NO: 982063 - RNA, 19 nt, Artificial Sequence
  Description of Artificial Sequence: Synthetic oligonucleotide
cacaaacagguuccgggaa

SEQ ID NO: 982064 - RNA, 19 nt, Artificial Sequence
  Description of Artificial Sequence: Synthetic oligonucleotide
agucaguauucuacaguau

SEQ ID NO: 982065 - RNA, 19 nt, Artificial Sequence
  Description of Artificial Sequence: Synthetic oligonucleotide
cacguguucugcuuucugu

SEQ ID NO: 982066 - RNA, 19 nt, Artificial Sequence
  Description of Artificial Sequence: Synthetic oligonucleotide
accugugaccaguggguuu

SEQ ID NO: 982067 - RNA, 19 nt, Artificial Sequence
  Description of Artificial Sequence: Synthetic oligonucleotide
cuuuucuagccagaugggu

SEQ ID NO: 982068 - RNA, 19 nt, Artificial Sequence
  Description of Artificial Sequence: Synthetic oligonucleotide
cacaugacauugucaugaa

SEQ ID NO: 982069 - RNA, 19 nt, Artificial Sequence
  Description of Artificial Sequence: Synthetic oligonucleotide
gaacaagcccaaagaauau

SEQ ID NO: 982070 - RNA, 19 nt, Artificial Sequence
  Description of Artificial Sequence: Synthetic oligonucleotide
auacuuggguaugcacagu

SEQ ID NO: 982071 - RNA, 19 nt, Artificial Sequence
  Description of Artificial Sequence: Synthetic oligonucleotide
gcacugaacuugccaauca

SEQ ID NO: 982072 - RNA, 19 nt, Artificial Sequence
  Description of Artificial Sequence: Synthetic oligonucleotide
guaccugggaugguguugu

SEQ ID NO: 982073 - RNA, 19 nt, Artificial Sequence
  Description of Artificial Sequence: Synthetic oligonucleotide
cucuagcucgccugguaaa

SEQ ID NO: 982074 - RNA, 19 nt, Artificial Sequence
  Description of Artificial Sequence: Synthetic oligonucleotide
ccucacuccaagccaugcc

SEQ ID NO: 982075 - RNA, 19 nt, Artificial Sequence
  Description of Artificial Sequence: Synthetic oligonucleotide
caacuggacaguacuuccu

SEQ ID NO: 982076 - RNA, 19 nt, Artificial Sequence
  Description of Artificial Sequence: Synthetic oligonucleotide
gcugcgccauacuggauca

SEQ ID NO: 982077 - RNA, 19 nt, Artificial Sequence
  Description of Artificial Sequence: Synthetic oligonucleotide
gccaaccuuuguaauuccc

SEQ ID NO: 982078 - RNA, 19 nt, Artificial Sequence
  Description of Artificial Sequence: Synthetic oligonucleotide
ggcacugaacuugccaauc

SEQ ID NO: 982079 - RNA, 19 nt, Artificial Sequence
  Description of Artificial Sequence: Synthetic oligonucleotide
agguaacuuggaagaacaa

SEQ ID NO: 982080 - RNA, 19 nt, Artificial Sequence
  Description of Artificial Sequence: Synthetic oligonucleotide
gggacaugaaugaaaguau

SEQ ID NO: 982081 - RNA, 19 nt, Artificial Sequence
  Description of Artificial Sequence: Synthetic oligonucleotide
cucgccugguaaaaucacu

SEQ ID NO: 982082 - RNA, 19 nt, Artificial Sequence
  Description of Artificial Sequence: Synthetic oligonucleotide
ggaugcaaacagggcacug

SEQ ID NO: 982083 - RNA, 19 nt, Artificial Sequence
  Description of Artificial Sequence: Synthetic oligonucleotide
ccaugccaagccugguacc

SEQ ID NO: 982084 - RNA, 19 nt, Artificial Sequence
  Description of Artificial Sequence: Synthetic oligonucleotide
gguuccgggaagaauucaa

SEQ ID NO: 982085 - RNA, 19 nt, Artificial Sequence
  Description of Artificial Sequence: Synthetic oligonucleotide
gcccuguaaggacuuguuc

SEQ ID NO: 982086 - RNA, 19 nt, Artificial Sequence
  Description of Artificial Sequence: Synthetic oligonucleotide
guuuugucugagguaacuu

SEQ ID NO: 982087 - RNA, 19 nt, Artificial Sequence
  Description of Artificial Sequence: Synthetic oligonucleotide
ggguaugcacaguuggcgu

SEQ ID NO: 982088 - RNA, 19 nt, Artificial Sequence
  Description of Artificial Sequence: Synthetic oligonucleotide
cagcaugagugcugcgcca

SEQ ID NO: 982089 - RNA, 19 nt, Artificial Sequence
  Description of Artificial Sequence: Synthetic oligonucleotide
cugagguaacuuggaagaa

SEQ ID NO: 982090 - RNA, 19 nt, Artificial Sequence
  Description of Artificial Sequence: Synthetic oligonucleotide
ucuagccagauggguucua

SEQ ID NO: 982091 - RNA, 19 nt, Artificial Sequence
  Description of Artificial Sequence: Synthetic oligonucleotide
cacaguuggcguccagcaa

SEQ ID NO: 982092 - RNA, 19 nt, Artificial Sequence
  Description of Artificial Sequence: Synthetic oligonucleotide
gcggcugccaaccuuugua

SEQ ID NO: 982093 - RNA, 19 nt, Artificial Sequence
  Description of Artificial Sequence: Synthetic oligonucleotide
acuggguaccucacuccaa

SEQ ID NO: 982094 - RNA, 19 nt, Artificial Sequence
  Description of Artificial Sequence: Synthetic oligonucleotide
cuccaauauugggacugga

SEQ ID NO: 982095 - RNA, 19 nt, Artificial Sequence
  Description of Artificial Sequence: Synthetic oligonucleotide
gcuuuaucucuacuauuau

SEQ ID NO: 982096 - RNA, 19 nt, Artificial Sequence
  Description of Artificial Sequence: Synthetic oligonucleotide
aguaugcagugggcauacu

SEQ ID NO: 982097 - RNA, 19 nt, Artificial Sequence
  Description of Artificial Sequence: Synthetic oligonucleotide
ccucccuggaaaacuauua

SEQ ID NO: 982098 - RNA, 19 nt, Artificial Sequence
  Description of Artificial Sequence: Synthetic oligonucleotide
guaccucacuccaagccau

SEQ ID NO: 982099 - RNA, 19 nt, Artificial Sequence
  Description of Artificial Sequence: Synthetic oligonucleotide
gggacccacaauacuucac

SEQ ID NO: 982100 - RNA, 19 nt, Artificial Sequence
  Description of Artificial Sequence: Synthetic oligonucleotide
cacucuagcucgccuggua

SEQ ID NO: 982101 - RNA, 19 nt, Artificial Sequence
  Description of Artificial Sequence: Synthetic oligonucleotide
cuccuacgaacaucgcagu

SEQ ID NO: 982102 - RNA, 19 nt, Artificial Sequence
  Description of Artificial Sequence: Synthetic oligonucleotide
cccaaugaaucaagguuua

SEQ ID NO: 982103 - RNA, 19 nt, Artificial Sequence
  Description of Artificial Sequence: Synthetic oligonucleotide
ggacaugaaugaaaguauu

SEQ ID NO: 982104 - RNA, 19 nt, Artificial Sequence
  Description of Artificial Sequence: Synthetic oligonucleotide
ccaguaccaaauaugccau

SEQ ID NO: 982105 - RNA, 19 nt, Artificial Sequence
  Description of Artificial Sequence: Synthetic oligonucleotide
ccacacauccuccuacgaa

SEQ ID NO: 982106 - RNA, 19 nt, Artificial Sequence
  Description of Artificial Sequence: Synthetic oligonucleotide
gcucgccugguaaaaucac

SEQ ID NO: 982107 - RNA, 19 nt, Artificial Sequence
  Description of Artificial Sequence: Synthetic oligonucleotide
ggguuuugucugagguaac

SEQ ID NO: 982108 - RNA, 19 nt, Artificial Sequence
  Description of Artificial Sequence: Synthetic oligonucleotide
gggcauacuuggguaugca

SEQ ID NO: 982109 - RNA, 19 nt, Artificial Sequence
  Description of Artificial Sequence: Synthetic oligonucleotide
cugcgccauacuggaucac

SEQ ID NO: 982110 - RNA, 19 nt, Artificial Sequence
  Description of Artificial Sequence: Synthetic oligonucleotide
gugucagcugggacaugaa

SEQ ID NO: 982111 - RNA, 19 nt, Artificial Sequence
  Description of Artificial Sequence: Synthetic oligonucleotide
cucuacugucacccaguau

SEQ ID NO: 982112 - RNA, 19 nt, Artificial Sequence
  Description of Artificial Sequence: Synthetic oligonucleotide
cagcugggacaugaaugaa

SEQ ID NO: 982113 - RNA, 19 nt, Artificial Sequence
  Description of Artificial Sequence: Synthetic oligonucleotide
ccaguaugcagugggcaua

SEQ ID NO: 982114 - RNA, 19 nt, Artificial Sequence
  Description of Artificial Sequence: Synthetic oligonucleotide
cucacgccuuucuuccauu

SEQ ID NO: 982115 - RNA, 19 nt, Artificial Sequence
  Description of Artificial Sequence: Synthetic oligonucleotide
cuguaaggacuuguuccuu

SEQ ID NO: 982116 - RNA, 19 nt, Artificial Sequence
  Description of Artificial Sequence: Synthetic oligonucleotide
gggaugcaaacagggcacu

SEQ ID NO: 982117 - RNA, 19 nt, Artificial Sequence
  Description of Artificial Sequence: Synthetic oligonucleotide
cggcugccaaccuuuguaa

SEQ ID NO: 982118 - RNA, 19 nt, Artificial Sequence
  Description of Artificial Sequence: Synthetic oligonucleotide
gcauagucaccugcaggau

SEQ ID NO: 982119 - RNA, 19 nt, Artificial Sequence
  Description of Artificial Sequence: Synthetic oligonucleotide
cccaaagaauauggaaaau

SEQ ID NO: 982120 - RNA, 19 nt, Artificial Sequence
  Description of Artificial Sequence: Synthetic oligonucleotide
cagcaacaacuggguaccu

SEQ ID NO: 982121 - RNA, 19 nt, Artificial Sequence
  Description of Artificial Sequence: Synthetic oligonucleotide
ccuccgggguaccugggau

SEQ ID NO: 982122 - RNA, 19 nt, Artificial Sequence
  Description of Artificial Sequence: Synthetic oligonucleotide
ccgggguaccugggauggu

SEQ ID NO: 982123 - RNA, 19 nt, Artificial Sequence
  Description of Artificial Sequence: Synthetic oligonucleotide
aaacccauagcauagacuc

SEQ ID NO: 982124 - RNA, 19 nt, Artificial Sequence
  Description of Artificial Sequence: Synthetic oligonucleotide
aauuucuguguauucaugc

SEQ ID NO: 982125 - RNA, 19 nt, Artificial Sequence
  Description of Artificial Sequence: Synthetic oligonucleotide
aauugaugacgacagacac

SEQ ID NO: 982126 - RNA, 19 nt, Artificial Sequence
  Description of Artificial Sequence: Synthetic oligonucleotide
uguucaaucacuuuuccug

SEQ ID NO: 982127 - RNA, 19 nt, Artificial Sequence
  Description of Artificial Sequence: Synthetic oligonucleotide
auuucugucaaguccaaac

SEQ ID NO: 982128 - RNA, 19 nt, Artificial Sequence
  Description of Artificial Sequence: Synthetic oligonucleotide
uauuaucuagacuagguga

SEQ ID NO: 982129 - RNA, 19 nt, Artificial Sequence
  Description of Artificial Sequence: Synthetic oligonucleotide
aaucgugggacauauuauc

SEQ ID NO: 982130 - RNA, 19 nt, Artificial Sequence
  Description of Artificial Sequence: Synthetic oligonucleotide
uuugucauaaggaaucgug

SEQ ID NO: 982131 - RNA, 19 nt, Artificial Sequence
  Description of Artificial Sequence: Synthetic oligonucleotide
auuaacacugguuuuaaca

SEQ ID NO: 982132 - RNA, 19 nt, Artificial Sequence
  Description of Artificial Sequence: Synthetic oligonucleotide
aaaagguaaauuucugugu

SEQ ID NO: 982133 - RNA, 19 nt, Artificial Sequence
  Description of Artificial Sequence: Synthetic oligonucleotide
cuagacuaggugaugaugg

SEQ ID NO: 982134 - RNA, 19 nt, Artificial Sequence
  Description of Artificial Sequence: Synthetic oligonucleotide
uuguauuuuggauggacgg

SEQ ID NO: 982135 - RNA, 19 nt, Artificial Sequence
  Description of Artificial Sequence: Synthetic oligonucleotide
uuaagaugcaaguugcuca

SEQ ID NO: 982136 - RNA, 19 nt, Artificial Sequence
  Description of Artificial Sequence: Synthetic oligonucleotide
ugaguaaagacugagcagc

SEQ ID NO: 982137 - RNA, 19 nt, Artificial Sequence
  Description of Artificial Sequence: Synthetic oligonucleotide
aaguuugucauaaggaauc

SEQ ID NO: 982138 - RNA, 19 nt, Artificial Sequence
  Description of Artificial Sequence: Synthetic oligonucleotide
agauugggcaauuaaguuc

SEQ ID NO: 982139 - RNA, 19 nt, Artificial Sequence
  Description of Artificial Sequence: Synthetic oligonucleotide
acaagauugcuucugauga

SEQ ID NO: 982140 - RNA, 19 nt, Artificial Sequence
  Description of Artificial Sequence: Synthetic oligonucleotide
ugcucaacgacucagccgc

SEQ ID NO: 982141 - RNA, 19 nt, Artificial Sequence
  Description of Artificial Sequence: Synthetic oligonucleotide
uugucauaaggaaucgugg

SEQ ID NO: 982142 - RNA, 19 nt, Artificial Sequence
  Description of Artificial Sequence: Synthetic oligonucleotide
ugucauaaggaaucguggg

SEQ ID NO: 982143 - RNA, 19 nt, Artificial Sequence
  Description of Artificial Sequence: Synthetic oligonucleotide
aagcucauagguuggagag

SEQ ID NO: 982144 - RNA, 19 nt, Artificial Sequence
  Description of Artificial Sequence: Synthetic oligonucleotide
ucugcauuaacacugguuu

SEQ ID NO: 982145 - RNA, 19 nt, Artificial Sequence
  Description of Artificial Sequence: Synthetic oligonucleotide
augauggagaaauacuagg

SEQ ID NO: 982146 - RNA, 19 nt, Artificial Sequence
  Description of Artificial Sequence: Synthetic oligonucleotide
guaauucugaaugagguag

SEQ ID NO: 982147 - RNA, 19 nt, Artificial Sequence
  Description of Artificial Sequence: Synthetic oligonucleotide
ugagauugggcaauuaagu

SEQ ID NO: 982148 - RNA, 19 nt, Artificial Sequence
  Description of Artificial Sequence: Synthetic oligonucleotide
uuauccacaagauugcuuc

SEQ ID NO: 982149 - RNA, 19 nt, Artificial Sequence
  Description of Artificial Sequence: Synthetic oligonucleotide
aagacggaacuucuaaaag

SEQ ID NO: 982150 - RNA, 19 nt, Artificial Sequence
  Description of Artificial Sequence: Synthetic oligonucleotide
agacggaacuucuaaaagg

SEQ ID NO: 982151 - RNA, 19 nt, Artificial Sequence
  Description of Artificial Sequence: Synthetic oligonucleotide
guuaaacaaauuuucuacc

SEQ ID NO: 982152 - RNA, 19 nt, Artificial Sequence
  Description of Artificial Sequence: Synthetic oligonucleotide
uuguguuaaacaaauuuuc

SEQ ID NO: 982153 - RNA, 19 nt, Artificial Sequence
  Description of Artificial Sequence: Synthetic oligonucleotide
aacagcuaaaguuugucau

SEQ ID NO: 982154 - RNA, 19 nt, Artificial Sequence
  Description of Artificial Sequence: Synthetic oligonucleotide
aaugcauucucuuguauuu

SEQ ID NO: 982155 - RNA, 19 nt, Artificial Sequence
  Description of Artificial Sequence: Synthetic oligonucleotide
aguuguguuaaacaaauuu

SEQ ID NO: 982156 - RNA, 19 nt, Artificial Sequence
  Description of Artificial Sequence: Synthetic oligonucleotide
uuaacacugguuuuaacaa

SEQ ID NO: 982157 - RNA, 19 nt, Artificial Sequence
  Description of Artificial Sequence: Synthetic oligonucleotide
guugaguaaagacugagca

SEQ ID NO: 982158 - RNA, 19 nt, Artificial Sequence
  Description of Artificial Sequence: Synthetic oligonucleotide
aaagacggaacuucuaaaa

SEQ ID NO: 982159 - RNA, 19 nt, Artificial Sequence
  Description of Artificial Sequence: Synthetic oligonucleotide
cuuguauuuuggauggacg

SEQ ID NO: 982160 - RNA, 19 nt, Artificial Sequence
  Description of Artificial Sequence: Synthetic oligonucleotide
uucaguucaggguaaaacu

SEQ ID NO: 982161 - RNA, 19 nt, Artificial Sequence
  Description of Artificial Sequence: Synthetic oligonucleotide
auauuaucuagacuaggug

SEQ ID NO: 982162 - RNA, 19 nt, Artificial Sequence
  Description of Artificial Sequence: Synthetic oligonucleotide
uccuuaagaugcaaguugc

SEQ ID NO: 982163 - RNA, 19 nt, Artificial Sequence
  Description of Artificial Sequence: Synthetic oligonucleotide
agagaggggaguuuggguc

SEQ ID NO: 982164 - RNA, 19 nt, Artificial Sequence
  Description of Artificial Sequence: Synthetic oligonucleotide
gguguuauccacaagauug

SEQ ID NO: 982165 - RNA, 19 nt, Artificial Sequence
  Description of Artificial Sequence: Synthetic oligonucleotide
cauagcauagacucccugg

SEQ ID NO: 982166 - RNA, 19 nt, Artificial Sequence
  Description of Artificial Sequence: Synthetic oligonucleotide
ugaugauggagaaauacua

SEQ ID NO: 982167 - RNA, 19 nt, Artificial Sequence
  Description of Artificial Sequence: Synthetic oligonucleotide
aaacuugcccaucuguuca

SEQ ID NO: 982168 - RNA, 19 nt, Artificial Sequence
  Description of Artificial Sequence: Synthetic oligonucleotide
ugguuuuaacaacagcacc

SEQ ID NO: 982169 - RNA, 19 nt, Artificial Sequence
  Description of Artificial Sequence: Synthetic oligonucleotide
gaguuuguugaguaaagac

SEQ ID NO: 982170 - RNA, 19 nt, Artificial Sequence
  Description of Artificial Sequence: Synthetic oligonucleotide
aaaguuguguuaaacaaau

SEQ ID NO: 982171 - RNA, 19 nt, Artificial Sequence
  Description of Artificial Sequence: Synthetic oligonucleotide
agaugcaaguugcucaacg

SEQ ID NO: 982172 - RNA, 19 nt, Artificial Sequence
  Description of Artificial Sequence: Synthetic oligonucleotide
uugaguaaagacugagcag

SEQ ID NO: 982173 - RNA, 19 nt, Artificial Sequence
  Description of Artificial Sequence: Synthetic oligonucleotide
auaagcuagcuucaguuca

SEQ ID NO: 982174 - RNA, 19 nt, Artificial Sequence
  Description of Artificial Sequence: Synthetic oligonucleotide
aaggcaaugcauucucuug

SEQ ID NO: 982175 - RNA, 19 nt, Artificial Sequence
  Description of Artificial Sequence: Synthetic oligonucleotide
uuuaccaguaccagacuga

SEQ ID NO: 982176 - RNA, 19 nt, Artificial Sequence
  Description of Artificial Sequence: Synthetic oligonucleotide
uguugaguaaagacugagc

SEQ ID NO: 982177 - RNA, 19 nt, Artificial Sequence
  Description of Artificial Sequence: Synthetic oligonucleotide
gaauccguggccauggucc

SEQ ID NO: 982178 - RNA, 19 nt, Artificial Sequence
  Description of Artificial Sequence: Synthetic oligonucleotide
uuugcacaaauuucuguca

SEQ ID NO: 982179 - RNA, 19 nt, Artificial Sequence
  Description of Artificial Sequence: Synthetic oligonucleotide
gaugauggagaaauacuag

SEQ ID NO: 982180 - RNA, 19 nt, Artificial Sequence
  Description of Artificial Sequence: Synthetic oligonucleotide
cugagauugggcaauuaag

SEQ ID NO: 982181 - RNA, 19 nt, Artificial Sequence
  Description of Artificial Sequence: Synthetic oligonucleotide
aauccguggccaugguccc

SEQ ID NO: 982182 - RNA, 19 nt, Artificial Sequence
  Description of Artificial Sequence: Synthetic oligonucleotide
caaauuucugucaagucca

SEQ ID NO: 982183 - RNA, 19 nt, Artificial Sequence
  Description of Artificial Sequence: Synthetic oligonucleotide
ggacauauuaucuagacua

SEQ ID NO: 982184 - RNA, 19 nt, Artificial Sequence
  Description of Artificial Sequence: Synthetic oligonucleotide
ugggcaauuaaguucugug

SEQ ID NO: 982185 - RNA, 19 nt, Artificial Sequence
  Description of Artificial Sequence: Synthetic oligonucleotide
aaaagacggaacuucuaaa

SEQ ID NO: 982186 - RNA, 19 nt, Artificial Sequence
  Description of Artificial Sequence: Synthetic oligonucleotide
ugcaaguugcucaacgacu

SEQ ID NO: 982187 - RNA, 19 nt, Artificial Sequence
  Description of Artificial Sequence: Synthetic oligonucleotide
auugcuucugaugaguuug

SEQ ID NO: 982188 - RNA, 19 nt, Artificial Sequence
  Description of Artificial Sequence: Synthetic oligonucleotide
aagacugagcagcucuguc

SEQ ID NO: 982189 - RNA, 19 nt, Artificial Sequence
  Description of Artificial Sequence: Synthetic oligonucleotide
ccaaacguaauucugaaug

SEQ ID NO: 982190 - RNA, 19 nt, Artificial Sequence
  Description of Artificial Sequence: Synthetic oligonucleotide
ucauuugcacaaauuucug

SEQ ID NO: 982191 - RNA, 19 nt, Artificial Sequence
  Description of Artificial Sequence: Synthetic oligonucleotide
aguuuguugaguaaagacu

SEQ ID NO: 982192 - RNA, 19 nt, Artificial Sequence
  Description of Artificial Sequence: Synthetic oligonucleotide
ucuguucaaucacuuuucc

SEQ ID NO: 982193 - RNA, 19 nt, Artificial Sequence
  Description of Artificial Sequence: Synthetic oligonucleotide
aacacugguuuuaacaaca

SEQ ID NO: 982194 - RNA, 19 nt, Artificial Sequence
  Description of Artificial Sequence: Synthetic oligonucleotide
acccauagcauagacuccc

SEQ ID NO: 982195 - RNA, 19 nt, Artificial Sequence
  Description of Artificial Sequence: Synthetic oligonucleotide
uaggugaugauggagaaau

SEQ ID NO: 982196 - RNA, 19 nt, Artificial Sequence
  Description of Artificial Sequence: Synthetic oligonucleotide
guugaaacccauagcauag

SEQ ID NO: 982197 - RNA, 19 nt, Artificial Sequence
  Description of Artificial Sequence: Synthetic oligonucleotide
ucauaaggaaucgugggac

SEQ ID NO: 982198 - RNA, 19 nt, Artificial Sequence
  Description of Artificial Sequence: Synthetic oligonucleotide
uucugucaaguccaaacgu

SEQ ID NO: 982199 - RNA, 19 nt, Artificial Sequence
  Description of Artificial Sequence: Synthetic oligonucleotide
aaaguuugucauaaggaau

SEQ ID NO: 982200 - RNA, 19 nt, Artificial Sequence
  Description of Artificial Sequence: Synthetic oligonucleotide
uaagcuagcuucaguucag

SEQ ID NO: 982201 - RNA, 19 nt, Artificial Sequence
  Description of Artificial Sequence: Synthetic oligonucleotide
caugccuaaucuuccaaag

SEQ ID NO: 982202 - RNA, 19 nt, Artificial Sequence
  Description of Artificial Sequence: Synthetic oligonucleotide
aguucaggguaaaacuugc

SEQ ID NO: 982203 - RNA, 19 nt, Artificial Sequence
  Description of Artificial Sequence: Synthetic oligonucleotide
uaaaacuugcccaucuguu

SEQ ID NO: 982204 - RNA, 19 nt, Artificial Sequence
  Description of Artificial Sequence: Synthetic oligonucleotide
ugccuaaucuuccaaaguu

SEQ ID NO: 982205 - RNA, 19 nt, Artificial Sequence
  Description of Artificial Sequence: Synthetic oligonucleotide
acuggggauagcuguuugc

SEQ ID NO: 982206 - RNA, 19 nt, Artificial Sequence
  Description of Artificial Sequence: Synthetic oligonucleotide
aaaggcaaugcauucucuu

SEQ ID NO: 982207 - RNA, 19 nt, Artificial Sequence
  Description of Artificial Sequence: Synthetic oligonucleotide
ugggacauauuaucuagac

SEQ ID NO: 982208 - RNA, 19 nt, Artificial Sequence
  Description of Artificial Sequence: Synthetic oligonucleotide
ugaaacccauagcauagac

SEQ ID NO: 982209 - RNA, 19 nt, Artificial Sequence
  Description of Artificial Sequence: Synthetic oligonucleotide
uugaugacgacagacacuu

SEQ ID NO: 982210 - RNA, 19 nt, Artificial Sequence
  Description of Artificial Sequence: Synthetic oligonucleotide
acauauuaucuagacuagg

SEQ ID NO: 982211 - RNA, 19 nt, Artificial Sequence
  Description of Artificial Sequence: Synthetic oligonucleotide
ucuuccaaaguuguguuaa

SEQ ID NO: 982212 - RNA, 19 nt, Artificial Sequence
  Description of Artificial Sequence: Synthetic oligonucleotide
uugcucaacgacucagccg

SEQ ID NO: 982213 - RNA, 19 nt, Artificial Sequence
  Description of Artificial Sequence: Synthetic oligonucleotide
uuuguugaguaaagacuga

SEQ ID NO: 982214 - RNA, 19 nt, Artificial Sequence
  Description of Artificial Sequence: Synthetic oligonucleotide
gacauauuaucuagacuag

SEQ ID NO: 982215 - RNA, 19 nt, Artificial Sequence
  Description of Artificial Sequence: Synthetic oligonucleotide
ucaguucaggguaaaacuu

SEQ ID NO: 982216 - RNA, 19 nt, Artificial Sequence
  Description of Artificial Sequence: Synthetic oligonucleotide
uuguugaguaaagacugag

SEQ ID NO: 982217 - RNA, 19 nt, Artificial Sequence
  Description of Artificial Sequence: Synthetic oligonucleotide
ucugucaaguccaaacgua

SEQ ID NO: 982218 - RNA, 19 nt, Artificial Sequence
  Description of Artificial Sequence: Synthetic oligonucleotide
cacaagauugcuucugaug

SEQ ID NO: 982219 - RNA, 19 nt, Artificial Sequence
  Description of Artificial Sequence: Synthetic oligonucleotide
uuggauggacgguugaaac

SEQ ID NO: 982220 - RNA, 19 nt, Artificial Sequence
  Description of Artificial Sequence: Synthetic oligonucleotide
uaucuagacuaggugauga

SEQ ID NO: 982221 - RNA, 19 nt, Artificial Sequence
  Description of Artificial Sequence: Synthetic oligonucleotide
uccuccuuaagaugcaagu

SEQ ID NO: 982222 - RNA, 19 nt, Artificial Sequence
  Description of Artificial Sequence: Synthetic oligonucleotide
ucuagacuaggugaugaug

SEQ ID NO: 982223 - RNA, 19 nt, Artificial Sequence
  Description of Artificial Sequence: Synthetic oligonucleotide
aagauugcuucugaugagu

SEQ ID NO: 982224 - RNA, 19 nt, Artificial Sequence
  Description of Artificial Sequence: Synthetic oligonucleotide
guaaauuucuguguauuca

SEQ ID NO: 982225 - RNA, 19 nt, Artificial Sequence
  Description of Artificial Sequence: Synthetic oligonucleotide
uggauggacgguugaaacc

SEQ ID NO: 982226 - RNA, 19 nt, Artificial Sequence
  Description of Artificial Sequence: Synthetic oligonucleotide
caagcaucaaaggcaaugc

SEQ ID NO: 982227 - RNA, 19 nt, Artificial Sequence
  Description of Artificial Sequence: Synthetic oligonucleotide
aagguaaauuucuguguau

SEQ ID NO: 982228 - RNA, 19 nt, Artificial Sequence
  Description of Artificial Sequence: Synthetic oligonucleotide
gcaauuaaguucugugggg

SEQ ID NO: 982229 - RNA, 19 nt, Artificial Sequence
  Description of Artificial Sequence: Synthetic oligonucleotide
gggcaauuaaguucugugg

SEQ ID NO: 982230 - RNA, 19 nt, Artificial Sequence
  Description of Artificial Sequence: Synthetic oligonucleotide
ugcacaaauuucugucaag

SEQ ID NO: 982231 - RNA, 19 nt, Artificial Sequence
  Description of Artificial Sequence: Synthetic oligonucleotide
aguuugucauaaggaaucg

SEQ ID NO: 982232 - RNA, 19 nt, Artificial Sequence
  Description of Artificial Sequence: Synthetic oligonucleotide
uaacacugguuuuaacaac

SEQ ID NO: 982233 - RNA, 19 nt, Artificial Sequence
  Description of Artificial Sequence: Synthetic oligonucleotide
guaggucucauugucuggg

SEQ ID NO: 982234 - RNA, 19 nt, Artificial Sequence
  Description of Artificial Sequence: Synthetic oligonucleotide
uccacaagauugcuucuga

SEQ ID NO: 982235 - RNA, 19 nt, Artificial Sequence
  Description of Artificial Sequence: Synthetic oligonucleotide
uucuguguauucaugccua

SEQ ID NO: 982236 - RNA, 19 nt, Artificial Sequence
  Description of Artificial Sequence: Synthetic oligonucleotide
uuaccaguaccagacugag

SEQ ID NO: 982237 - RNA, 19 nt, Artificial Sequence
  Description of Artificial Sequence: Synthetic oligonucleotide
uugguugguguuauccaca

SEQ ID NO: 982238 - RNA, 19 nt, Artificial Sequence
  Description of Artificial Sequence: Synthetic oligonucleotide
agguaggucucauugucug

SEQ ID NO: 982239 - RNA, 19 nt, Artificial Sequence
  Description of Artificial Sequence: Synthetic oligonucleotide
uggcaucugguuuugauuu

SEQ ID NO: 982240 - RNA, 19 nt, Artificial Sequence
  Description of Artificial Sequence: Synthetic oligonucleotide
caugaauccguggccaugg

SEQ ID NO: 982241 - RNA, 19 nt, Artificial Sequence
  Description of Artificial Sequence: Synthetic oligonucleotide
gaugcaaguugcucaacga

SEQ ID NO: 982242 - RNA, 19 nt, Artificial Sequence
  Description of Artificial Sequence: Synthetic oligonucleotide
guauucaugccuaaucuuc

SEQ ID NO: 982243 - RNA, 19 nt, Artificial Sequence
  Description of Artificial Sequence: Synthetic oligonucleotide
uguauuuuggauggacggu

SEQ ID NO: 982244 - RNA, 19 nt, Artificial Sequence
  Description of Artificial Sequence: Synthetic oligonucleotide
uugcacaaauuucugucaa

SEQ ID NO: 982245 - RNA, 19 nt, Artificial Sequence
  Description of Artificial Sequence: Synthetic oligonucleotide
uguauucaugccuaaucuu

SEQ ID NO: 982246 - RNA, 19 nt, Artificial Sequence
  Description of Artificial Sequence: Synthetic oligonucleotide
acugagauugggcaauuaa

SEQ ID NO: 982247 - RNA, 19 nt, Artificial Sequence
  Description of Artificial Sequence: Synthetic oligonucleotide
cuuaagaugcaaguugcuc

SEQ ID NO: 982248 - RNA, 19 nt, Artificial Sequence
  Description of Artificial Sequence: Synthetic oligonucleotide
aacccauagcauagacucc

SEQ ID NO: 982249 - RNA, 19 nt, Artificial Sequence
  Description of Artificial Sequence: Synthetic oligonucleotide
ggggauagcuguuugcagg

SEQ ID NO: 982250 - RNA, 19 nt, Artificial Sequence
  Description of Artificial Sequence: Synthetic oligonucleotide
guugcucaacgacucagcc

SEQ ID NO: 982251 - RNA, 19 nt, Artificial Sequence
  Description of Artificial Sequence: Synthetic oligonucleotide
cauaagcuagcuucaguuc

SEQ ID NO: 982252 - RNA, 19 nt, Artificial Sequence
  Description of Artificial Sequence: Synthetic oligonucleotide
uugguguuauccacaagau

SEQ ID NO: 982253 - RNA, 19 nt, Artificial Sequence
  Description of Artificial Sequence: Synthetic oligonucleotide
agcagcucuguccucuuuc

SEQ ID NO: 982254 - RNA, 19 nt, Artificial Sequence
  Description of Artificial Sequence: Synthetic oligonucleotide
caguucaggguaaaacuug

SEQ ID NO: 982255 - RNA, 19 nt, Artificial Sequence
  Description of Artificial Sequence: Synthetic oligonucleotide
gauugggcaauuaaguucu

SEQ ID NO: 982256 - RNA, 19 nt, Artificial Sequence
  Description of Artificial Sequence: Synthetic oligonucleotide
gacgguugaaacccauagc

SEQ ID NO: 982257 - RNA, 19 nt, Artificial Sequence
  Description of Artificial Sequence: Synthetic oligonucleotide
ugaguuuguugaguaaaga

SEQ ID NO: 982258 - RNA, 19 nt, Artificial Sequence
  Description of Artificial Sequence: Synthetic oligonucleotide
gaugacgacagacacuugu

SEQ ID NO: 982259 - RNA, 19 nt, Artificial Sequence
  Description of Artificial Sequence: Synthetic oligonucleotide
ucguccaccgcuagggccc

SEQ ID NO: 982260 - RNA, 19 nt, Artificial Sequence
  Description of Artificial Sequence: Synthetic oligonucleotide
cacuuguucaacaucaaua

SEQ ID NO: 982261 - RNA, 19 nt, Artificial Sequence
  Description of Artificial Sequence: Synthetic oligonucleotide
aggcaaugcauucucuugu

SEQ ID NO: 982262 - RNA, 19 nt, Artificial Sequence
  Description of Artificial Sequence: Synthetic oligonucleotide
agcuagcuucaguucaggg

SEQ ID NO: 982263 - RNA, 19 nt, Artificial Sequence
  Description of Artificial Sequence: Synthetic oligonucleotide
caucaaaggcaaugcauuc

SEQ ID NO: 982264 - RNA, 19 nt, Artificial Sequence
  Description of Artificial Sequence: Synthetic oligonucleotide
cauauuaucuagacuaggu

SEQ ID NO: 982265 - RNA, 19 nt, Artificial Sequence
  Description of Artificial Sequence: Synthetic oligonucleotide
caagauugcuucugaugag

SEQ ID NO: 982266 - RNA, 19 nt, Artificial Sequence
  Description of Artificial Sequence: Synthetic oligonucleotide
caaacguaauucugaauga

SEQ ID NO: 982267 - RNA, 19 nt, Artificial Sequence
  Description of Artificial Sequence: Synthetic oligonucleotide
aaggaaucgugggacauau

SEQ ID NO: 982268 - RNA, 19 nt, Artificial Sequence
  Description of Artificial Sequence: Synthetic oligonucleotide
aguugcucaacgacucagc

SEQ ID NO: 982269 - RNA, 19 nt, Artificial Sequence
  Description of Artificial Sequence: Synthetic oligonucleotide
ugcauuaacacugguuuua

SEQ ID NO: 982270 - RNA, 19 nt, Artificial Sequence
  Description of Artificial Sequence: Synthetic oligonucleotide
ugacgacagacacuuguuc

SEQ ID NO: 982271 - RNA, 19 nt, Artificial Sequence
  Description of Artificial Sequence: Synthetic oligonucleotide
uucguccaccgcuagggcc

SEQ ID NO: 982272 - RNA, 19 nt, Artificial Sequence
  Description of Artificial Sequence: Synthetic oligonucleotide
guagagaggggaguuuggg

SEQ ID NO: 982273 - RNA, 19 nt, Artificial Sequence
  Description of Artificial Sequence: Synthetic oligonucleotide
ggacgguugaaacccauag

SEQ ID NO: 982274 - RNA, 19 nt, Artificial Sequence
  Description of Artificial Sequence: Synthetic oligonucleotide
uggggauagcuguuugcag

SEQ ID NO: 982275 - RNA, 19 nt, Artificial Sequence
  Description of Artificial Sequence: Synthetic oligonucleotide
ggauggacgguugaaaccc

SEQ ID NO: 982276 - RNA, 19 nt, Artificial Sequence
  Description of Artificial Sequence: Synthetic oligonucleotide
uagacuaggugaugaugga

SEQ ID NO: 982277 - RNA, 19 nt, Artificial Sequence
  Description of Artificial Sequence: Synthetic oligonucleotide
ggugaugauggagaaauac

SEQ ID NO: 982278 - RNA, 19 nt, Artificial Sequence
  Description of Artificial Sequence: Synthetic oligonucleotide
acuaggugaugauggagaa

SEQ ID NO: 982279 - RNA, 19 nt, Artificial Sequence
  Description of Artificial Sequence: Synthetic oligonucleotide
accgcuagggcccaugaau

SEQ ID NO: 982280 - RNA, 19 nt, Artificial Sequence
  Description of Artificial Sequence: Synthetic oligonucleotide
uagagaggggaguuugggu

SEQ ID NO: 982281 - RNA, 19 nt, Artificial Sequence
  Description of Artificial Sequence: Synthetic oligonucleotide
uuugggucccucugcagaa

SEQ ID NO: 982282 - RNA, 19 nt, Artificial Sequence
  Description of Artificial Sequence: Synthetic oligonucleotide
augaguuuguugaguaaag

SEQ ID NO: 982283 - RNA, 19 nt, Artificial Sequence
  Description of Artificial Sequence: Synthetic oligonucleotide
acagcuaaaguuugucaua

SEQ ID NO: 982284 - RNA, 19 nt, Artificial Sequence
  Description of Artificial Sequence: Synthetic oligonucleotide
gacagacacuuguucaaca

SEQ ID NO: 982285 - RNA, 19 nt, Artificial Sequence
  Description of Artificial Sequence: Synthetic oligonucleotide
aagaugcaaguugcucaac

SEQ ID NO: 982286 - RNA, 19 nt, Artificial Sequence
  Description of Artificial Sequence: Synthetic oligonucleotide
aaagacugagcagcucugu

SEQ ID NO: 982287 - RNA, 19 nt, Artificial Sequence
  Description of Artificial Sequence: Synthetic oligonucleotide
augccuaaucuuccaaagu

SEQ ID NO: 982288 - RNA, 19 nt, Artificial Sequence
  Description of Artificial Sequence: Synthetic oligonucleotide
cacugguuuuaacaacagc

SEQ ID NO: 982289 - RNA, 19 nt, Artificial Sequence
  Description of Artificial Sequence: Synthetic oligonucleotide
auuuuggauggacgguuga

SEQ ID NO: 982290 - RNA, 19 nt, Artificial Sequence
  Description of Artificial Sequence: Synthetic oligonucleotide
aagcuagcuucaguucagg

SEQ ID NO: 982291 - RNA, 19 nt, Artificial Sequence
  Description of Artificial Sequence: Synthetic oligonucleotide
ggaaucgugggacauauua

SEQ ID NO: 982292 - RNA, 19 nt, Artificial Sequence
  Description of Artificial Sequence: Synthetic oligonucleotide
guguauucaugccuaaucu

SEQ ID NO: 982293 - RNA, 19 nt, Artificial Sequence
  Description of Artificial Sequence: Synthetic oligonucleotide
cucauugucuggguucccg

SEQ ID NO: 982294 - RNA, 19 nt, Artificial Sequence
  Description of Artificial Sequence: Synthetic oligonucleotide
agacuaggugaugauggag

SEQ ID NO: 982295 - RNA, 19 nt, Artificial Sequence
  Description of Artificial Sequence: Synthetic oligonucleotide
guaaaacuugcccaucugu

SEQ ID NO: 982296 - RNA, 19 nt, Artificial Sequence
  Description of Artificial Sequence: Synthetic oligonucleotide
agcuaaaguuugucauaag

SEQ ID NO: 982297 - RNA, 19 nt, Artificial Sequence
  Description of Artificial Sequence: Synthetic oligonucleotide
acgacagacacuuguucaa

SEQ ID NO: 982298 - RNA, 19 nt, Artificial Sequence
  Description of Artificial Sequence: Synthetic oligonucleotide
ugaauccguggccaugguc

SEQ ID NO: 982299 - RNA, 19 nt, Artificial Sequence
  Description of Artificial Sequence: Synthetic oligonucleotide
agcaucaaaggcaaugcau

SEQ ID NO: 982300 - RNA, 19 nt, Artificial Sequence
  Description of Artificial Sequence: Synthetic oligonucleotide
uauccacaagauugcuucu

SEQ ID NO: 982301 - RNA, 19 nt, Artificial Sequence
  Description of Artificial Sequence: Synthetic oligonucleotide
gacggaacuucuaaaaggu

SEQ ID NO: 982302 - RNA, 19 nt, Artificial Sequence
  Description of Artificial Sequence: Synthetic oligonucleotide
gcucauagguuggagagag

SEQ ID NO: 982303 - RNA, 19 nt, Artificial Sequence
  Description of Artificial Sequence: Synthetic oligonucleotide
caagcucauagguuggaga

SEQ ID NO: 982304 - RNA, 19 nt, Artificial Sequence
  Description of Artificial Sequence: Synthetic oligonucleotide
gcuucugaugaguuuguug

SEQ ID NO: 982305 - RNA, 19 nt, Artificial Sequence
  Description of Artificial Sequence: Synthetic oligonucleotide
aguagagaggggaguuugg

SEQ ID NO: 982306 - RNA, 19 nt, Artificial Sequence
  Description of Artificial Sequence: Synthetic oligonucleotide
gcaagcaucaaaggcaaug

SEQ ID NO: 982307 - RNA, 19 nt, Artificial Sequence
  Description of Artificial Sequence: Synthetic oligonucleotide
gguugaaacccauagcaua

SEQ ID NO: 982308 - RNA, 19 nt, Artificial Sequence
  Description of Artificial Sequence: Synthetic oligonucleotide
uccaaacguaauucugaau

SEQ ID NO: 982309 - RNA, 19 nt, Artificial Sequence
  Description of Artificial Sequence: Synthetic oligonucleotide
uuuuggauggacgguugaa

SEQ ID NO: 982310 - RNA, 19 nt, Artificial Sequence
  Description of Artificial Sequence: Synthetic oligonucleotide
ucgugggacauauuaucua

SEQ ID NO: 982311 - RNA, 19 nt, Artificial Sequence
  Description of Artificial Sequence: Synthetic oligonucleotide
auugaugacgacagacacu

SEQ ID NO: 982312 - RNA, 19 nt, Artificial Sequence
  Description of Artificial Sequence: Synthetic oligonucleotide
guuguguuaaacaaauuuu

SEQ ID NO: 982313 - RNA, 19 nt, Artificial Sequence
  Description of Artificial Sequence: Synthetic oligonucleotide
cauaaggaaucgugggaca

SEQ ID NO: 982314 - RNA, 19 nt, Artificial Sequence
  Description of Artificial Sequence: Synthetic oligonucleotide
gggauagcuguuugcaggc

SEQ ID NO: 982315 - RNA, 19 nt, Artificial Sequence
  Description of Artificial Sequence: Synthetic oligonucleotide
aucgugggacauauuaucu

SEQ ID NO: 982316 - RNA, 19 nt, Artificial Sequence
  Description of Artificial Sequence: Synthetic oligonucleotide
acugaguagagaggggagu

SEQ ID NO: 982317 - RNA, 19 nt, Artificial Sequence
  Description of Artificial Sequence: Synthetic oligonucleotide
uugaaacccauagcauaga

SEQ ID NO: 982318 - RNA, 19 nt, Artificial Sequence
  Description of Artificial Sequence: Synthetic oligonucleotide
ugagcauggccaacacaaa

SEQ ID NO: 982319 - RNA, 19 nt, Artificial Sequence
  Description of Artificial Sequence: Synthetic oligonucleotide
aacuugcccaucuguucaa

SEQ ID NO: 982320 - RNA, 19 nt, Artificial Sequence
  Description of Artificial Sequence: Synthetic oligonucleotide
auaaggaaucgugggacau

SEQ ID NO: 982321 - RNA, 19 nt, Artificial Sequence
  Description of Artificial Sequence: Synthetic oligonucleotide
cugaugaguuuguugagua

SEQ ID NO: 982322 - RNA, 19 nt, Artificial Sequence
  Description of Artificial Sequence: Synthetic oligonucleotide
cugucaaguccaaacguaa

SEQ ID NO: 982323 - RNA, 19 nt, Artificial Sequence
  Description of Artificial Sequence: Synthetic oligonucleotide
gagauugggcaauuaaguu

SEQ ID NO: 982324 - RNA, 19 nt, Artificial Sequence
  Description of Artificial Sequence: Synthetic oligonucleotide
auccacaagauugcuucug

SEQ ID NO: 982325 - RNA, 19 nt, Artificial Sequence
  Description of Artificial Sequence: Synthetic oligonucleotide
aucuagacuaggugaugau

SEQ ID NO: 982326 - RNA, 19 nt, Artificial Sequence
  Description of Artificial Sequence: Synthetic oligonucleotide
aggguaaaacuugcccauc

SEQ ID NO: 982327 - RNA, 19 nt, Artificial Sequence
  Description of Artificial Sequence: Synthetic oligonucleotide
cauugucuggguucccguc

SEQ ID NO: 982328 - RNA, 19 nt, Artificial Sequence
  Description of Artificial Sequence: Synthetic oligonucleotide
cucauagguuggagagagg

SEQ ID NO: 982329 - RNA, 19 nt, Artificial Sequence
  Description of Artificial Sequence: Synthetic oligonucleotide
guccaaacguaauucugaa

SEQ ID NO: 982330 - RNA, 19 nt, Artificial Sequence
  Description of Artificial Sequence: Synthetic oligonucleotide
cgugggacauauuaucuag

SEQ ID NO: 982331 - RNA, 19 nt, Artificial Sequence
  Description of Artificial Sequence: Synthetic oligonucleotide
agguuggagagaggcagag

SEQ ID NO: 982332 - RNA, 19 nt, Artificial Sequence
  Description of Artificial Sequence: Synthetic oligonucleotide
agcuguuugcaggcucuac

SEQ ID NO: 982333 - RNA, 19 nt, Artificial Sequence
  Description of Artificial Sequence: Synthetic oligonucleotide
guucaggguaaaacuugcc

SEQ ID NO: 982334 - RNA, 19 nt, Artificial Sequence
  Description of Artificial Sequence: Synthetic oligonucleotide
uaccaguaccagacugaga

SEQ ID NO: 982335 - RNA, 19 nt, Artificial Sequence
  Description of Artificial Sequence: Synthetic oligonucleotide
gagaaauacuaggccaaaa

SEQ ID NO: 982336 - RNA, 19 nt, Artificial Sequence
  Description of Artificial Sequence: Synthetic oligonucleotide
cuguucguccaccgcuagg

SEQ ID NO: 982337 - RNA, 19 nt, Artificial Sequence
  Description of Artificial Sequence: Synthetic oligonucleotide
cucaacgacucagccgcgg

SEQ ID NO: 982338 - RNA, 19 nt, Artificial Sequence
  Description of Artificial Sequence: Synthetic oligonucleotide
agugccggggcagugcuga

SEQ ID NO: 982339 - RNA, 19 nt, Artificial Sequence
  Description of Artificial Sequence: Synthetic oligonucleotide
uggacgguugaaacccaua

SEQ ID NO: 982340 - RNA, 19 nt, Artificial Sequence
  Description of Artificial Sequence: Synthetic oligonucleotide
uccuguucguccaccgcua

SEQ ID NO: 982341 - RNA, 19 nt, Artificial Sequence
  Description of Artificial Sequence: Synthetic oligonucleotide
uaaggaaucgugggacaua

SEQ ID NO: 982342 - RNA, 19 nt, Artificial Sequence
  Description of Artificial Sequence: Synthetic oligonucleotide
ugaugacgacagacacuug

SEQ ID NO: 982343 - RNA, 19 nt, Artificial Sequence
  Description of Artificial Sequence: Synthetic oligonucleotide
gggaguuugggucccucug

SEQ ID NO: 982344 - RNA, 19 nt, Artificial Sequence
  Description of Artificial Sequence: Synthetic oligonucleotide
cuggggauagcuguuugca

SEQ ID NO: 982345 - RNA, 19 nt, Artificial Sequence
  Description of Artificial Sequence: Synthetic oligonucleotide
cagcuaaaguuugucauaa

SEQ ID NO: 982346 - RNA, 19 nt, Artificial Sequence
  Description of Artificial Sequence: Synthetic oligonucleotide
acgacucagccgcggcuuc

SEQ ID NO: 982347 - RNA, 19 nt, Artificial Sequence
  Description of Artificial Sequence: Synthetic oligonucleotide
gcuagggcccaugaauccg

SEQ ID NO: 982348 - RNA, 19 nt, Artificial Sequence
  Description of Artificial Sequence: Synthetic oligonucleotide
guucguccaccgcuagggc

SEQ ID NO: 982349 - RNA, 19 nt, Artificial Sequence
  Description of Artificial Sequence: Synthetic oligonucleotide
ugaguagagaggggaguuu

SEQ ID NO: 982350 - RNA, 19 nt, Artificial Sequence
  Description of Artificial Sequence: Synthetic oligonucleotide
cacuggggauagcuguuug

SEQ ID NO: 982351 - RNA, 19 nt, Artificial Sequence
  Description of Artificial Sequence: Synthetic oligonucleotide
gaaucgugggacauauuau

SEQ ID NO: 982352 - RNA, 19 nt, Artificial Sequence
  Description of Artificial Sequence: Synthetic oligonucleotide
agcucauagguuggagaga

SEQ ID NO: 982353 - RNA, 19 nt, Artificial Sequence
  Description of Artificial Sequence: Synthetic oligonucleotide
caaugcauucucuuguauu

SEQ ID NO: 982354 - RNA, 19 nt, Artificial Sequence
  Description of Artificial Sequence: Synthetic oligonucleotide
gcauaagcuagcuucaguu

SEQ ID NO: 982355 - RNA, 19 nt, Artificial Sequence
  Description of Artificial Sequence: Synthetic oligonucleotide
caugguccccagugccggg

SEQ ID NO: 982356 - RNA, 19 nt, Artificial Sequence
  Description of Artificial Sequence: Synthetic oligonucleotide
gcaggcucuacuuggcuga

SEQ ID NO: 982357 - RNA, 19 nt, Artificial Sequence
  Description of Artificial Sequence: Synthetic oligonucleotide
agauugcuucugaugaguu

SEQ ID NO: 982358 - RNA, 19 nt, Artificial Sequence
  Description of Artificial Sequence: Synthetic oligonucleotide
gccggggcagugcugacag

SEQ ID NO: 982359 - RNA, 19 nt, Artificial Sequence
  Description of Artificial Sequence: Synthetic oligonucleotide
cuuggcugagcauggccaa

SEQ ID NO: 982360 - RNA, 19 nt, Artificial Sequence
  Description of Artificial Sequence: Synthetic oligonucleotide
cuguucaaucacuuuuccu

SEQ ID NO: 982361 - RNA, 19 nt, Artificial Sequence
  Description of Artificial Sequence: Synthetic oligonucleotide
ucccguccuuguccacagg

SEQ ID NO: 982362 - RNA, 19 nt, Artificial Sequence
  Description of Artificial Sequence: Synthetic oligonucleotide
aggcucuacuuggcugagc

SEQ ID NO: 982363 - RNA, 19 nt, Artificial Sequence
  Description of Artificial Sequence: Synthetic oligonucleotide
agcaagcucauagguugga

SEQ ID NO: 982364 - RNA, 19 nt, Artificial Sequence
  Description of Artificial Sequence: Synthetic oligonucleotide
gugggacauauuaucuaga

SEQ ID NO: 982365 - RNA, 19 nt, Artificial Sequence
  Description of Artificial Sequence: Synthetic oligonucleotide
ggcccaugaauccguggcc

SEQ ID NO: 982366 - RNA, 19 nt, Artificial Sequence
  Description of Artificial Sequence: Synthetic oligonucleotide
gauggacgguugaaaccca

SEQ ID NO: 982367 - RNA, 19 nt, Artificial Sequence
  Description of Artificial Sequence: Synthetic oligonucleotide
augaauccguggccauggu

SEQ ID NO: 982368 - RNA, 19 nt, Artificial Sequence
  Description of Artificial Sequence: Synthetic oligonucleotide
augacgacagacacuuguu

SEQ ID NO: 982369 - RNA, 19 nt, Artificial Sequence
  Description of Artificial Sequence: Synthetic oligonucleotide
gguugguguuauccacaag

SEQ ID NO: 982370 - RNA, 19 nt, Artificial Sequence
  Description of Artificial Sequence: Synthetic oligonucleotide
ucucauugucuggguuccc

SEQ ID NO: 982371 - RNA, 19 nt, Artificial Sequence
  Description of Artificial Sequence: Synthetic oligonucleotide
cuacuuggcugagcauggc

SEQ ID NO: 982372 - RNA, 19 nt, Artificial Sequence
  Description of Artificial Sequence: Synthetic oligonucleotide
ccuaaucuuccaaaguugu

SEQ ID NO: 982373 - RNA, 19 nt, Artificial Sequence
  Description of Artificial Sequence: Synthetic oligonucleotide
caacagcaccauuggcauc

SEQ ID NO: 982374 - RNA, 19 nt, Artificial Sequence
  Description of Artificial Sequence: Synthetic oligonucleotide
auccguggccauggucccc

SEQ ID NO: 982375 - RNA, 19 nt, Artificial Sequence
  Description of Artificial Sequence: Synthetic oligonucleotide
gggacauauuaucuagacu

SEQ ID NO: 982376 - RNA, 19 nt, Artificial Sequence
  Description of Artificial Sequence: Synthetic oligonucleotide
cguccuuguccacaggaag

SEQ ID NO: 982377 - RNA, 19 nt, Artificial Sequence
  Description of Artificial Sequence: Synthetic oligonucleotide
gcacaaauuucugucaagu

SEQ ID NO: 982378 - RNA, 19 nt, Artificial Sequence
  Description of Artificial Sequence: Synthetic oligonucleotide
ggguaaaacuugcccaucu

SEQ ID NO: 982379 - RNA, 19 nt, Artificial Sequence
  Description of Artificial Sequence: Synthetic oligonucleotide
ccaucauuugcacaaauuu

SEQ ID NO: 982380 - RNA, 19 nt, Artificial Sequence
  Description of Artificial Sequence: Synthetic oligonucleotide
aggggaguuugggucccuc

SEQ ID NO: 982381 - RNA, 19 nt, Artificial Sequence
  Description of Artificial Sequence: Synthetic oligonucleotide
uccaccgcuagggcccaug

SEQ ID NO: 982382 - RNA, 19 nt, Artificial Sequence
  Description of Artificial Sequence: Synthetic oligonucleotide
gaugcagguaggucucauu

SEQ ID NO: 982383 - RNA, 19 nt, Artificial Sequence
  Description of Artificial Sequence: Synthetic oligonucleotide
guuauccacaagauugcuu

SEQ ID NO: 982384 - RNA, 19 nt, Artificial Sequence
  Description of Artificial Sequence: Synthetic oligonucleotide
ccgcuagggcccaugaauc

SEQ ID NO: 982385 - RNA, 19 nt, Artificial Sequence
  Description of Artificial Sequence: Synthetic oligonucleotide
ggcaaugcauucucuugua

SEQ ID NO: 982386 - RNA, 19 nt, Artificial Sequence
  Description of Artificial Sequence: Synthetic oligonucleotide
cuagggcccaugaauccgu

SEQ ID NO: 982387 - RNA, 19 nt, Artificial Sequence
  Description of Artificial Sequence: Synthetic oligonucleotide
acggaacuucuaaaaggua

SEQ ID NO: 982388 - RNA, 19 nt, Artificial Sequence
  Description of Artificial Sequence: Synthetic oligonucleotide
ccauagcauagacucccug

SEQ ID NO: 982389 - RNA, 19 nt, Artificial Sequence
  Description of Artificial Sequence: Synthetic oligonucleotide
auugggcaauuaaguucug

SEQ ID NO: 982390 - RNA, 19 nt, Artificial Sequence
  Description of Artificial Sequence: Synthetic oligonucleotide
gcauuaacacugguuuuaa

SEQ ID NO: 982391 - RNA, 19 nt, Artificial Sequence
  Description of Artificial Sequence: Synthetic oligonucleotide
gcaucaaaggcaaugcauu

SEQ ID NO: 982392 - RNA, 19 nt, Artificial Sequence
  Description of Artificial Sequence: Synthetic oligonucleotide
auggacgguugaaacccau

SEQ ID NO: 982393 - RNA, 19 nt, Artificial Sequence
  Description of Artificial Sequence: Synthetic oligonucleotide
cgcuagggcccaugaaucc

SEQ ID NO: 982394 - RNA, 19 nt, Artificial Sequence
  Description of Artificial Sequence: Synthetic oligonucleotide
ggguucccguccuugucca

SEQ ID NO: 982395 - RNA, 19 nt, Artificial Sequence
  Description of Artificial Sequence: Synthetic oligonucleotide
cugcauuaacacugguuuu

SEQ ID NO: 982396 - RNA, 19 nt, Artificial Sequence
  Description of Artificial Sequence: Synthetic oligonucleotide
cguaauucugaaugaggua

SEQ ID NO: 982397 - RNA, 19 nt, Artificial Sequence
  Description of Artificial Sequence: Synthetic oligonucleotide
caggaccuucucuuugccu

SEQ ID NO: 982398 - RNA, 19 nt, Artificial Sequence
  Description of Artificial Sequence: Synthetic oligonucleotide
ccaugaauccguggccaug

SEQ ID NO: 982399 - RNA, 19 nt, Artificial Sequence
  Description of Artificial Sequence: Synthetic oligonucleotide
ccuguuugaagagcaagcu

SEQ ID NO: 982400 - RNA, 19 nt, Artificial Sequence
  Description of Artificial Sequence: Synthetic oligonucleotide
cagugccggggcagugcug

SEQ ID NO: 982401 - RNA, 19 nt, Artificial Sequence
  Description of Artificial Sequence: Synthetic oligonucleotide
gcaaugcauucucuuguau

SEQ ID NO: 982402 - RNA, 19 nt, Artificial Sequence
  Description of Artificial Sequence: Synthetic oligonucleotide
cgacagacacuuguucaac

SEQ ID NO: 982403 - RNA, 19 nt, Artificial Sequence
  Description of Artificial Sequence: Synthetic oligonucleotide
cauuggcaucugguuuuga

SEQ ID NO: 982404 - RNA, 19 nt, Artificial Sequence
  Description of Artificial Sequence: Synthetic oligonucleotide
gcucaacgacucagccgcg

SEQ ID NO: 982405 - RNA, 19 nt, Artificial Sequence
  Description of Artificial Sequence: Synthetic oligonucleotide
ccauuggcaucugguuuug

SEQ ID NO: 982406 - RNA, 19 nt, Artificial Sequence
  Description of Artificial Sequence: Synthetic oligonucleotide
gacucagccgcggcuuccu

SEQ ID NO: 982407 - RNA, 19 nt, Artificial Sequence
  Description of Artificial Sequence: Synthetic oligonucleotide
gguucccguccuuguccac

SEQ ID NO: 982408 - RNA, 19 nt, Artificial Sequence
  Description of Artificial Sequence: Synthetic oligonucleotide
cuguguauucaugccuaau

SEQ ID NO: 982409 - RNA, 19 nt, Artificial Sequence
  Description of Artificial Sequence: Synthetic oligonucleotide
ggcagcuguuuuaccagua

SEQ ID NO: 982410 - RNA, 19 nt, Artificial Sequence
  Description of Artificial Sequence: Synthetic oligonucleotide
caccgcuagggcccaugaa

SEQ ID NO: 982411 - RNA, 19 nt, Artificial Sequence
  Description of Artificial Sequence: Synthetic oligonucleotide
aggaaucgugggacauauu

SEQ ID NO: 982412 - RNA, 19 nt, Artificial Sequence
  Description of Artificial Sequence: Synthetic oligonucleotide
ccguccuuguccacaggaa

SEQ ID NO: 982413 - RNA, 19 nt, Artificial Sequence
  Description of Artificial Sequence: Synthetic oligonucleotide
ggcaucugguuuugauuuu

SEQ ID NO: 982414 - RNA, 19 nt, Artificial Sequence
  Description of Artificial Sequence: Synthetic oligonucleotide
ggauagcuguuugcaggcu

SEQ ID NO: 982415 - RNA, 19 nt, Artificial Sequence
  Description of Artificial Sequence: Synthetic oligonucleotide
ggucccucugcagaacuuu

SEQ ID NO: 982416 - RNA, 19 nt, Artificial Sequence
  Description of Artificial Sequence: Synthetic oligonucleotide
ccacaagauugcuucugau

SEQ ID NO: 982417 - RNA, 19 nt, Artificial Sequence
  Description of Artificial Sequence: Synthetic oligonucleotide
ccaccgcuagggcccauga

SEQ ID NO: 982418 - RNA, 19 nt, Artificial Sequence
  Description of Artificial Sequence: Synthetic oligonucleotide
ggagagaggcagagacacu

SEQ ID NO: 982419 - RNA, 19 nt, Artificial Sequence
  Description of Artificial Sequence: Synthetic oligonucleotide
ccggggcagugcugacagg

SEQ ID NO: 982420 - RNA, 19 nt, Artificial Sequence
  Description of Artificial Sequence: Synthetic oligonucleotide
ccuccuuaagaugcaaguu

SEQ ID NO: 982421 - RNA, 19 nt, Artificial Sequence
  Description of Artificial Sequence: Synthetic oligonucleotide
cgguugaaacccauagcau

SEQ ID NO: 982422 - RNA, 19 nt, Artificial Sequence
  Description of Artificial Sequence: Synthetic oligonucleotide
gcucuacuuggcugagcau

SEQ ID NO: 982423 - RNA, 19 nt, Artificial Sequence
  Description of Artificial Sequence: Synthetic oligonucleotide
cccauagcauagacucccu

SEQ ID NO: 982424 - RNA, 19 nt, Artificial Sequence
  Description of Artificial Sequence: Synthetic oligonucleotide
ccagugccggggcagugcu

SEQ ID NO: 982425 - RNA, 19 nt, Artificial Sequence
  Description of Artificial Sequence: Synthetic oligonucleotide
gccgcggcuuccuguucgu

SEQ ID NO: 982426 - RNA, 19 nt, Artificial Sequence
  Description of Artificial Sequence: Synthetic oligonucleotide
cguccaccgcuagggccca

SEQ ID NO: 982427 - RNA, 19 nt, Artificial Sequence
  Description of Artificial Sequence: Synthetic oligonucleotide
guccaccgcuagggcccau

SEQ ID NO: 982428 - RNA, 19 nt, Artificial Sequence
  Description of Artificial Sequence: Synthetic oligonucleotide
agaacuaaccuuuuguaac

SEQ ID NO: 982429 - RNA, 19 nt, Artificial Sequence
  Description of Artificial Sequence: Synthetic oligonucleotide
aaccuuuuguaacuuaaac

SEQ ID NO: 982430 - RNA, 19 nt, Artificial Sequence
  Description of Artificial Sequence: Synthetic oligonucleotide
aacaauucaagcuucucug

SEQ ID NO: 982431 - RNA, 19 nt, Artificial Sequence
  Description of Artificial Sequence: Synthetic oligonucleotide
uuagauagaaaccucauuu

SEQ ID NO: 982432 - RNA, 19 nt, Artificial Sequence
  Description of Artificial Sequence: Synthetic oligonucleotide
uguuuaaucucaaaguagu

SEQ ID NO: 982433 - RNA, 19 nt, Artificial Sequence
  Description of Artificial Sequence: Synthetic oligonucleotide
uuaaucucaaaguaguaca

SEQ ID NO: 982434 - RNA, 19 nt, Artificial Sequence
  Description of Artificial Sequence: Synthetic oligonucleotide
auuaccgcaauguuuaauc

SEQ ID NO: 982435 - RNA, 19 nt, Artificial Sequence
  Description of Artificial Sequence: Synthetic oligonucleotide
uuuagaacuaaccuuuugu

SEQ ID NO: 982436 - RNA, 19 nt, Artificial Sequence
  Description of Artificial Sequence: Synthetic oligonucleotide
agcgagucgaucucgaugc

SEQ ID NO: 982437 - RNA, 19 nt, Artificial Sequence
  Description of Artificial Sequence: Synthetic oligonucleotide
auuuguaccgcucugccuc

SEQ ID NO: 982438 - RNA, 19 nt, Artificial Sequence
  Description of Artificial Sequence: Synthetic oligonucleotide
uacaaacuaagcuuaacca

SEQ ID NO: 982439 - RNA, 19 nt, Artificial Sequence
  Description of Artificial Sequence: Synthetic oligonucleotide
uuucgagcaaaucuccacg

SEQ ID NO: 982440 - RNA, 19 nt, Artificial Sequence
  Description of Artificial Sequence: Synthetic oligonucleotide
aaagaugccguccucgaug

SEQ ID NO: 982441 - RNA, 19 nt, Artificial Sequence
  Description of Artificial Sequence: Synthetic oligonucleotide
ugugcaaacaucaguuucc

SEQ ID NO: 982442 - RNA, 19 nt, Artificial Sequence
  Description of Artificial Sequence: Synthetic oligonucleotide
ucgaacuugcccaagaggu

SEQ ID NO: 982443 - RNA, 19 nt, Artificial Sequence
  Description of Artificial Sequence: Synthetic oligonucleotide
aucgcgauuagcuucaucu

SEQ ID NO: 982444 - RNA, 19 nt, Artificial Sequence
  Description of Artificial Sequence: Synthetic oligonucleotide
ucgaaggugaccucgaucu

SEQ ID NO: 982445 - RNA, 19 nt, Artificial Sequence
  Description of Artificial Sequence: Synthetic oligonucleotide
uuuaaucucaaaguaguac

SEQ ID NO: 982446 - RNA, 19 nt, Artificial Sequence
  Description of Artificial Sequence: Synthetic oligonucleotide
caccauacggucaaugucg

SEQ ID NO: 982447 - RNA, 19 nt, Artificial Sequence
  Description of Artificial Sequence: Synthetic oligonucleotide
auuucgagcaaaucuccac

SEQ ID NO: 982448 - RNA, 19 nt, Artificial Sequence
  Description of Artificial Sequence: Synthetic oligonucleotide
agucacgucgaguaacagc

SEQ ID NO: 982449 - RNA, 19 nt, Artificial Sequence
  Description of Artificial Sequence: Synthetic oligonucleotide
ucgccaaugaggauagccg

SEQ ID NO: 982450 - RNA, 19 nt, Artificial Sequence
  Description of Artificial Sequence: Synthetic oligonucleotide
ucaaugucguccuugcuca

SEQ ID NO: 982451 - RNA, 19 nt, Artificial Sequence
  Description of Artificial Sequence: Synthetic oligonucleotide
accuuuuguaacuuaaacu

SEQ ID NO: 982452 - RNA, 19 nt, Artificial Sequence
  Description of Artificial Sequence: Synthetic oligonucleotide
aucaguuucccauuucgag

SEQ ID NO: 982453 - RNA, 19 nt, Artificial Sequence
  Description of Artificial Sequence: Synthetic oligonucleotide
cuaaagacuuccaacaaca

SEQ ID NO: 982454 - RNA, 19 nt, Artificial Sequence
  Description of Artificial Sequence: Synthetic oligonucleotide
acguguagaaauccacgcc

SEQ ID NO: 982455 - RNA, 19 nt, Artificial Sequence
  Description of Artificial Sequence: Synthetic oligonucleotide
cauacggucaaugucgucc

SEQ ID NO: 982456 - RNA, 19 nt, Artificial Sequence
  Description of Artificial Sequence: Synthetic oligonucleotide
ugguaaaguuugcugauga

SEQ ID NO: 982457 - RNA, 19 nt, Artificial Sequence
  Description of Artificial Sequence: Synthetic oligonucleotide
aagagguuauuguccuugg

SEQ ID NO: 982458 - RNA, 19 nt, Artificial Sequence
  Description of Artificial Sequence: Synthetic oligonucleotide
guacacuugcaccagcacg

SEQ ID NO: 982459 - RNA, 19 nt, Artificial Sequence
  Description of Artificial Sequence: Synthetic oligonucleotide
ccugucuuuaaaauuaccg

SEQ ID NO: 982460 - RNA, 19 nt, Artificial Sequence
  Description of Artificial Sequence: Synthetic oligonucleotide
gauguuguagguauaggac

SEQ ID NO: 982461 - RNA, 19 nt, Artificial Sequence
  Description of Artificial Sequence: Synthetic oligonucleotide
uuagaacuaaccuuuugua

SEQ ID NO: 982462 - RNA, 19 nt, Artificial Sequence
  Description of Artificial Sequence: Synthetic oligonucleotide
uuauucagcuccuugccgu

SEQ ID NO: 982463 - RNA, 19 nt, Artificial Sequence
  Description of Artificial Sequence: Synthetic oligonucleotide
gauaccaagcgacagugga

SEQ ID NO: 982464 - RNA, 19 nt, Artificial Sequence
  Description of Artificial Sequence: Synthetic oligonucleotide
aaauccacgcccucguaga

SEQ ID NO: 982465 - RNA, 19 nt, Artificial Sequence
  Description of Artificial Sequence: Synthetic oligonucleotide
uagguauaggacucaacug

SEQ ID NO: 982466 - RNA, 19 nt, Artificial Sequence
  Description of Artificial Sequence: Synthetic oligonucleotide
ugguugucugaguagguag

SEQ ID NO: 982467 - RNA, 19 nt, Artificial Sequence
  Description of Artificial Sequence: Synthetic oligonucleotide
gucgaguaacagcagaucc

SEQ ID NO: 982468 - RNA, 19 nt, Artificial Sequence
  Description of Artificial Sequence: Synthetic oligonucleotide
augucguccuugcucaggc

SEQ ID NO: 982469 - RNA, 19 nt, Artificial Sequence
  Description of Artificial Sequence: Synthetic oligonucleotide
auggacacgucgaaggugc

SEQ ID NO: 982470 - RNA, 19 nt, Artificial Sequence
  Description of Artificial Sequence: Synthetic oligonucleotide
uuaguguuaccaagcuucc

SEQ ID NO: 982471 - RNA, 19 nt, Artificial Sequence
  Description of Artificial Sequence: Synthetic oligonucleotide
agcgguuucgauaccaagc

SEQ ID NO: 982472 - RNA, 19 nt, Artificial Sequence
  Description of Artificial Sequence: Synthetic oligonucleotide
caucuuccgauuuguaccg

SEQ ID NO: 982473 - RNA, 19 nt, Artificial Sequence
  Description of Artificial Sequence: Synthetic oligonucleotide
aaacuaaguugcugcaccu

SEQ ID NO: 982474 - RNA, 19 nt, Artificial Sequence
  Description of Artificial Sequence: Synthetic oligonucleotide
aggauagccgccugcacgg

SEQ ID NO: 982475 - RNA, 19 nt, Artificial Sequence
  Description of Artificial Sequence: Synthetic oligonucleotide
guuaccaagcuuccauagg

SEQ ID NO: 982476 - RNA, 19 nt, Artificial Sequence
  Description of Artificial Sequence: Synthetic oligonucleotide
gagucgaucucgaugcugg

SEQ ID NO: 982477 - RNA, 19 nt, Artificial Sequence
  Description of Artificial Sequence: Synthetic oligonucleotide
gacguuaaggaugccauug

SEQ ID NO: 982478 - RNA, 19 nt, Artificial Sequence
  Description of Artificial Sequence: Synthetic oligonucleotide
cuuaguugggcccaauguc

SEQ ID NO: 982479 - RNA, 19 nt, Artificial Sequence
  Description of Artificial Sequence: Synthetic oligonucleotide
ucuuuaaaauuaccgcaau

SEQ ID NO: 982480 - RNA, 19 nt, Artificial Sequence
  Description of Artificial Sequence: Synthetic oligonucleotide
agcuuaguuaguccacuuc

SEQ ID NO: 982481 - RNA, 19 nt, Artificial Sequence
  Description of Artificial Sequence: Synthetic oligonucleotide
ucgaguaacagcagauccu

SEQ ID NO: 982482 - RNA, 19 nt, Artificial Sequence
  Description of Artificial Sequence: Synthetic oligonucleotide
ucgaaagaugccguccucg

SEQ ID NO: 982483 - RNA, 19 nt, Artificial Sequence
  Description of Artificial Sequence: Synthetic oligonucleotide
uccagugcaagcuuaguua

SEQ ID NO: 982484 - RNA, 19 nt, Artificial Sequence
  Description of Artificial Sequence: Synthetic oligonucleotide
ugcucgcuaaucuugcccc

SEQ ID NO: 982485 - RNA, 19 nt, Artificial Sequence
  Description of Artificial Sequence: Synthetic oligonucleotide
uugucgaggaucuuguuuu

SEQ ID NO: 982486 - RNA, 19 nt, Artificial Sequence
  Description of Artificial Sequence: Synthetic oligonucleotide
ucuccacguacaaacuaag

SEQ ID NO: 982487 - RNA, 19 nt, Artificial Sequence
  Description of Artificial Sequence: Synthetic oligonucleotide
uuaguuaguccacuuccuc

SEQ ID NO: 982488 - RNA, 19 nt, Artificial Sequence
  Description of Artificial Sequence: Synthetic oligonucleotide
ucuuacuuggcacgaggac

SEQ ID NO: 982489 - RNA, 19 nt, Artificial Sequence
  Description of Artificial Sequence: Synthetic oligonucleotide
guagguauaggacucaacu

SEQ ID NO: 982490 - RNA, 19 nt, Artificial Sequence
  Description of Artificial Sequence: Synthetic oligonucleotide
uugcgcuugaacuccuccg

SEQ ID NO: 982491 - RNA, 19 nt, Artificial Sequence
  Description of Artificial Sequence: Synthetic oligonucleotide
uugucgccaaugaggauag

SEQ ID NO: 982492 - RNA, 19 nt, Artificial Sequence
  Description of Artificial Sequence: Synthetic oligonucleotide
uuacuuggcacgaggacau

SEQ ID NO: 982493 - RNA, 19 nt, Artificial Sequence
  Description of Artificial Sequence: Synthetic oligonucleotide
ucgauaccaagcgacagug

SEQ ID NO: 982494 - RNA, 19 nt, Artificial Sequence
  Description of Artificial Sequence: Synthetic oligonucleotide
acguuaaggaugccauugg

SEQ ID NO: 982495 - RNA, 19 nt, Artificial Sequence
  Description of Artificial Sequence: Synthetic oligonucleotide
guaugcaccaggcuaaaga

SEQ ID NO: 982496 - RNA, 19 nt, Artificial Sequence
  Description of Artificial Sequence: Synthetic oligonucleotide
ucguagagcgagucgaucu

SEQ ID NO: 982497 - RNA, 19 nt, Artificial Sequence
  Description of Artificial Sequence: Synthetic oligonucleotide
aaucuccacguacaaacua

SEQ ID NO: 982498 - RNA, 19 nt, Artificial Sequence
  Description of Artificial Sequence: Synthetic oligonucleotide
uuucgauaccaagcgacag

SEQ ID NO: 982499 - RNA, 19 nt, Artificial Sequence
  Description of Artificial Sequence: Synthetic oligonucleotide
acgaggacauuucaaagaa

SEQ ID NO: 982500 - RNA, 19 nt, Artificial Sequence
  Description of Artificial Sequence: Synthetic oligonucleotide
uucgauaccaagcgacagu

SEQ ID NO: 982501 - RNA, 19 nt, Artificial Sequence
  Description of Artificial Sequence: Synthetic oligonucleotide
ucucaaaguaguacauaaa

SEQ ID NO: 982502 - RNA, 19 nt, Artificial Sequence
  Description of Artificial Sequence: Synthetic oligonucleotide
uggacguguagaaauccac

SEQ ID NO: 982503 - RNA, 19 nt, Artificial Sequence
  Description of Artificial Sequence: Synthetic oligonucleotide
ucagggugcgcuuggcgcg

SEQ ID NO: 982504 - RNA, 19 nt, Artificial Sequence
  Description of Artificial Sequence: Synthetic oligonucleotide
guuuccgagguuuccgcgg

SEQ ID NO: 982505 - RNA, 19 nt, Artificial Sequence
  Description of Artificial Sequence: Synthetic oligonucleotide
gucacgucgaguaacagca

SEQ ID NO: 982506 - RNA, 19 nt, Artificial Sequence
  Description of Artificial Sequence: Synthetic oligonucleotide
uauaggacucaacugcguu

SEQ ID NO: 982507 - RNA, 19 nt, Artificial Sequence
  Description of Artificial Sequence: Synthetic oligonucleotide
uuaccgcaauguuuaaucu

SEQ ID NO: 982508 - RNA, 19 nt, Artificial Sequence
  Description of Artificial Sequence: Synthetic oligonucleotide
ugcgcuugaacuccuccgc

SEQ ID NO: 982509 - RNA, 19 nt, Artificial Sequence
  Description of Artificial Sequence: Synthetic oligonucleotide
uccuuucauauguaugcac

SEQ ID NO: 982510 - RNA, 19 nt, Artificial Sequence
  Description of Artificial Sequence: Synthetic oligonucleotide
aauccacgcccucguagag

SEQ ID NO: 982511 - RNA, 19 nt, Artificial Sequence
  Description of Artificial Sequence: Synthetic oligonucleotide
acgguugucgaagucuucg

SEQ ID NO: 982512 - RNA, 19 nt, Artificial Sequence
  Description of Artificial Sequence: Synthetic oligonucleotide
uguucguacucaucuuucu

SEQ ID NO: 982513 - RNA, 19 nt, Artificial Sequence
  Description of Artificial Sequence: Synthetic oligonucleotide
uguagguauaggacucaac

SEQ ID NO: 982514 - RNA, 19 nt, Artificial Sequence
  Description of Artificial Sequence: Synthetic oligonucleotide
accucgaaagaugccgucc

SEQ ID NO: 982515 - RNA, 19 nt, Artificial Sequence
  Description of Artificial Sequence: Synthetic oligonucleotide
uaguugggcccaauguccc

SEQ ID NO: 982516 - RNA, 19 nt, Artificial Sequence
  Description of Artificial Sequence: Synthetic oligonucleotide
uucgagcaaaucuccacgu

SEQ ID NO: 982517 - RNA, 19 nt, Artificial Sequence
  Description of Artificial Sequence: Synthetic oligonucleotide
guuuccgcggacuccagug

SEQ ID NO: 982518 - RNA, 19 nt, Artificial Sequence
  Description of Artificial Sequence: Synthetic oligonucleotide
caagagguuauuguccuug

SEQ ID NO: 982519 - RNA, 19 nt, Artificial Sequence
  Description of Artificial Sequence: Synthetic oligonucleotide
ucguacacuugcaccagca

SEQ ID NO: 982520 - RNA, 19 nt, Artificial Sequence
  Description of Artificial Sequence: Synthetic oligonucleotide
uuccauaggacaggugugc

SEQ ID NO: 982521 - RNA, 19 nt, Artificial Sequence
  Description of Artificial Sequence: Synthetic oligonucleotide
gagguuuccgagguuuccg

SEQ ID NO: 982522 - RNA, 19 nt, Artificial Sequence
  Description of Artificial Sequence: Synthetic oligonucleotide
gcgguuucgauaccaagcg

SEQ ID NO: 982523 - RNA, 19 nt, Artificial Sequence
  Description of Artificial Sequence: Synthetic oligonucleotide
gagcgagucgaucucgaug

SEQ ID NO: 982524 - RNA, 19 nt, Artificial Sequence
  Description of Artificial Sequence: Synthetic oligonucleotide
uuccgauuuguaccgcucu

SEQ ID NO: 982525 - RNA, 19 nt, Artificial Sequence
  Description of Artificial Sequence: Synthetic oligonucleotide
agcggugacguuaaggaug

SEQ ID NO: 982526 - RNA, 19 nt, Artificial Sequence
  Description of Artificial Sequence: Synthetic oligonucleotide
accgcaauguuuaaucuca

SEQ ID NO: 982527 - RNA, 19 nt, Artificial Sequence
  Description of Artificial Sequence: Synthetic oligonucleotide
uccgauuuguaccgcucug

SEQ ID NO: 982528 - RNA, 19 nt, Artificial Sequence
  Description of Artificial Sequence: Synthetic oligonucleotide
acuaaguugcugcaccuuu

SEQ ID NO: 982529 - RNA, 19 nt, Artificial Sequence
  Description of Artificial Sequence: Synthetic oligonucleotide
cagccaguugaucaccucc

SEQ ID NO: 982530 - RNA, 19 nt, Artificial Sequence
  Description of Artificial Sequence: Synthetic oligonucleotide
gauagccgccugcacggcg

SEQ ID NO: 982531 - RNA, 19 nt, Artificial Sequence
  Description of Artificial Sequence: Synthetic oligonucleotide
aauuaccgcaauguuuaau

SEQ ID NO: 982532 - RNA, 19 nt, Artificial Sequence
  Description of Artificial Sequence: Synthetic oligonucleotide
ucaaaucagcaaacacuaa

SEQ ID NO: 982533 - RNA, 19 nt, Artificial Sequence
  Description of Artificial Sequence: Synthetic oligonucleotide
aguugaucaccuccugaca

SEQ ID NO: 982534 - RNA, 19 nt, Artificial Sequence
  Description of Artificial Sequence: Synthetic oligonucleotide
cuuacuuggcacgaggaca

SEQ ID NO: 982535 - RNA, 19 nt, Artificial Sequence
  Description of Artificial Sequence: Synthetic oligonucleotide
cuccacguacaaacuaagc

SEQ ID NO: 982536 - RNA, 19 nt, Artificial Sequence
  Description of Artificial Sequence: Synthetic oligonucleotide
accgccuugguaaaguuug

SEQ ID NO: 982537 - RNA, 19 nt, Artificial Sequence
  Description of Artificial Sequence: Synthetic oligonucleotide
uaccgcaauguuuaaucuc

SEQ ID NO: 982538 - RNA, 19 nt, Artificial Sequence
  Description of Artificial Sequence: Synthetic oligonucleotide
accugucuuuaaaauuacc

SEQ ID NO: 982539 - RNA, 19 nt, Artificial Sequence
  Description of Artificial Sequence: Synthetic oligonucleotide
ucaccucgaaagaugccgu

SEQ ID NO: 982540 - RNA, 19 nt, Artificial Sequence
  Description of Artificial Sequence: Synthetic oligonucleotide
uuuccgcggacuccagugc

SEQ ID NO: 982541 - RNA, 19 nt, Artificial Sequence
  Description of Artificial Sequence: Synthetic oligonucleotide
ucuuccgauuuguaccgcu

SEQ ID NO: 982542 - RNA, 19 nt, Artificial Sequence
  Description of Artificial Sequence: Synthetic oligonucleotide
auacggucaaugucguccu

SEQ ID NO: 982543 - RNA, 19 nt, Artificial Sequence
  Description of Artificial Sequence: Synthetic oligonucleotide
gcauuuauguguuuacaga

SEQ ID NO: 982544 - RNA, 19 nt, Artificial Sequence
  Description of Artificial Sequence: Synthetic oligonucleotide
gucgccaaugaggauagcc

SEQ ID NO: 982545 - RNA, 19 nt, Artificial Sequence
  Description of Artificial Sequence: Synthetic oligonucleotide
caccauacgguugucgaag

SEQ ID NO: 982546 - RNA, 19 nt, Artificial Sequence
  Description of Artificial Sequence: Synthetic oligonucleotide
gcuaaagacuuccaacaac

SEQ ID NO: 982547 - RNA, 19 nt, Artificial Sequence
  Description of Artificial Sequence: Synthetic oligonucleotide
cugcucgcuaaucuugccc

SEQ ID NO: 982548 - RNA, 19 nt, Artificial Sequence
  Description of Artificial Sequence: Synthetic oligonucleotide
uuuguaccgcucugccucc

SEQ ID NO: 982549 - RNA, 19 nt, Artificial Sequence
  Description of Artificial Sequence: Synthetic oligonucleotide
gguuucgauaccaagcgac

SEQ ID NO: 982550 - RNA, 19 nt, Artificial Sequence
  Description of Artificial Sequence: Synthetic oligonucleotide
aucgugguguuccucuuga

SEQ ID NO: 982551 - RNA, 19 nt, Artificial Sequence
  Description of Artificial Sequence: Synthetic oligonucleotide
auaggacucaacugcguuu

SEQ ID NO: 982552 - RNA, 19 nt, Artificial Sequence
  Description of Artificial Sequence: Synthetic oligonucleotide
caagcgacaguggagucac

SEQ ID NO: 982553 - RNA, 19 nt, Artificial Sequence
  Description of Artificial Sequence: Synthetic oligonucleotide
cucaccauacgguugucga

SEQ ID NO: 982554 - RNA, 19 nt, Artificial Sequence
  Description of Artificial Sequence: Synthetic oligonucleotide
cugguuccgguccagccag

SEQ ID NO: 982555 - RNA, 19 nt, Artificial Sequence
  Description of Artificial Sequence: Synthetic oligonucleotide
gucuuuaaaauuaccgcaa

SEQ ID NO: 982556 - RNA, 19 nt, Artificial Sequence
  Description of Artificial Sequence: Synthetic oligonucleotide
ggucccucggaagaggucg

SEQ ID NO: 982557 - RNA, 19 nt, Artificial Sequence
  Description of Artificial Sequence: Synthetic oligonucleotide
ggacguguagaaauccacg

SEQ ID NO: 982558 - RNA, 19 nt, Artificial Sequence
  Description of Artificial Sequence: Synthetic oligonucleotide
aagcgggcgcgggugaugg

SEQ ID NO: 982559 - RNA, 19 nt, Artificial Sequence
  Description of Artificial Sequence: Synthetic oligonucleotide
agcaaaucuccacguacaa

SEQ ID NO: 982560 - RNA, 19 nt, Artificial Sequence
  Description of Artificial Sequence: Synthetic oligonucleotide
ugcacggcggcgccauagg

SEQ ID NO: 982561 - RNA, 19 nt, Artificial Sequence
  Description of Artificial Sequence: Synthetic oligonucleotide
uagagcgagucgaucucga

SEQ ID NO: 982562 - RNA, 19 nt, Artificial Sequence
  Description of Artificial Sequence: Synthetic oligonucleotide
ugcucuugucggcagcggu

SEQ ID NO: 982563 - RNA, 19 nt, Artificial Sequence
  Description of Artificial Sequence: Synthetic oligonucleotide
ucgcuaaucuugccccuca

SEQ ID NO: 982564 - RNA, 19 nt, Artificial Sequence
  Description of Artificial Sequence: Synthetic oligonucleotide
cccauuucgagcaaaucuc

SEQ ID NO: 982565 - RNA, 19 nt, Artificial Sequence
  Description of Artificial Sequence: Synthetic oligonucleotide
gugcaagcuuaguuagucc

SEQ ID NO: 982566 - RNA, 19 nt, Artificial Sequence
  Description of Artificial Sequence: Synthetic oligonucleotide
gcagcggugacguuaagga

SEQ ID NO: 982567 - RNA, 19 nt, Artificial Sequence
  Description of Artificial Sequence: Synthetic oligonucleotide
ugucgaagucuucgccacc

SEQ ID NO: 982568 - RNA, 19 nt, Artificial Sequence
  Description of Artificial Sequence: Synthetic oligonucleotide
agcuuggcaucgcgcagcg

SEQ ID NO: 982569 - RNA, 19 nt, Artificial Sequence
  Description of Artificial Sequence: Synthetic oligonucleotide
acuaaccuuuuguaacuua

SEQ ID NO: 982570 - RNA, 19 nt, Artificial Sequence
  Description of Artificial Sequence: Synthetic oligonucleotide
ucacgucgaguaacagcag

SEQ ID NO: 982571 - RNA, 19 nt, Artificial Sequence
  Description of Artificial Sequence: Synthetic oligonucleotide
ucaccauacgguugucgaa

SEQ ID NO: 982572 - RNA, 19 nt, Artificial Sequence
  Description of Artificial Sequence: Synthetic oligonucleotide
ccauuucgagcaaaucucc

SEQ ID NO: 982573 - RNA, 19 nt, Artificial Sequence
  Description of Artificial Sequence: Synthetic oligonucleotide
cuugucgccaaugaggaua

SEQ ID NO: 982574 - RNA, 19 nt, Artificial Sequence
  Description of Artificial Sequence: Synthetic oligonucleotide
caccaggcuaaagacuucc

SEQ ID NO: 982575 - RNA, 19 nt, Artificial Sequence
  Description of Artificial Sequence: Synthetic oligonucleotide
uuuccaccggcuccagggu

SEQ ID NO: 982576 - RNA, 19 nt, Artificial Sequence
  Description of Artificial Sequence: Synthetic oligonucleotide
cuuccgauuuguaccgcuc

SEQ ID NO: 982577 - RNA, 19 nt, Artificial Sequence
  Description of Artificial Sequence: Synthetic oligonucleotide
cuugucggcagcggugacg

SEQ ID NO: 982578 - RNA, 19 nt, Artificial Sequence
  Description of Artificial Sequence: Synthetic oligonucleotide
uguuugcgcuugaacuccu

SEQ ID NO: 982579 - RNA, 19 nt, Artificial Sequence
  Description of Artificial Sequence: Synthetic oligonucleotide
cacggcggcgccauaggcc

SEQ ID NO: 982580 - RNA, 19 nt, Artificial Sequence
  Description of Artificial Sequence: Synthetic oligonucleotide
uaggacucaacugcguuuu

SEQ ID NO: 982581 - RNA, 19 nt, Artificial Sequence
  Description of Artificial Sequence: Synthetic oligonucleotide
cauuucgagcaaaucucca

SEQ ID NO: 982582 - RNA, 19 nt, Artificial Sequence
  Description of Artificial Sequence: Synthetic oligonucleotide
ucguccuugcucaggcgac

SEQ ID NO: 982583 - RNA, 19 nt, Artificial Sequence
  Description of Artificial Sequence: Synthetic oligonucleotide
uucgccacccaggugugug

SEQ ID NO: 982584 - RNA, 19 nt, Artificial Sequence
  Description of Artificial Sequence: Synthetic oligonucleotide
gccuugguaaaguuugcug

SEQ ID NO: 982585 - RNA, 19 nt, Artificial Sequence
  Description of Artificial Sequence: Synthetic oligonucleotide
ucuucgccacccaggugug

SEQ ID NO: 982586 - RNA, 19 nt, Artificial Sequence
  Description of Artificial Sequence: Synthetic oligonucleotide
ugugugucuccggccgugg

SEQ ID NO: 982587 - RNA, 19 nt, Artificial Sequence
  Description of Artificial Sequence: Synthetic oligonucleotide
auagccgccugcacggcgg

SEQ ID NO: 982588 - RNA, 19 nt, Artificial Sequence
  Description of Artificial Sequence: Synthetic oligonucleotide
gcgauuagcuucaucuucc

SEQ ID NO: 982589 - RNA, 19 nt, Artificial Sequence
  Description of Artificial Sequence: Synthetic oligonucleotide
accauacgguugucgaagu

SEQ ID NO: 982590 - RNA, 19 nt, Artificial Sequence
  Description of Artificial Sequence: Synthetic oligonucleotide
cacgcgaucgcgauuagcu

SEQ ID NO: 982591 - RNA, 19 nt, Artificial Sequence
  Description of Artificial Sequence: Synthetic oligonucleotide
gguugcacacucucucaag

SEQ ID NO: 982592 - RNA, 19 nt, Artificial Sequence
  Description of Artificial Sequence: Synthetic oligonucleotide
guuucgauaccaagcgaca

SEQ ID NO: 982593 - RNA, 19 nt, Artificial Sequence
  Description of Artificial Sequence: Synthetic oligonucleotide
augaggauagccgccugca

SEQ ID NO: 982594 - RNA, 19 nt, Artificial Sequence
  Description of Artificial Sequence: Synthetic oligonucleotide
cagcgguuucgauaccaag

SEQ ID NO: 982595 - RNA, 19 nt, Artificial Sequence
  Description of Artificial Sequence: Synthetic oligonucleotide
gcauuagauagaaaccuca

SEQ ID NO: 982596 - RNA, 19 nt, Artificial Sequence
  Description of Artificial Sequence: Synthetic oligonucleotide
gagguuuccgcggacucca

SEQ ID NO: 982597 - RNA, 19 nt, Artificial Sequence
  Description of Artificial Sequence: Synthetic oligonucleotide
agcgacaguggagucacgu

SEQ ID NO: 982598 - RNA, 19 nt, Artificial Sequence
  Description of Artificial Sequence: Synthetic oligonucleotide
uguaccgcucugccuccug

SEQ ID NO: 982599 - RNA, 19 nt, Artificial Sequence
  Description of Artificial Sequence: Synthetic oligonucleotide
ucggcagcggugacguuaa

SEQ ID NO: 982600 - RNA, 19 nt, Artificial Sequence
  Description of Artificial Sequence: Synthetic oligonucleotide
cuuaguuaguccacuuccu

SEQ ID NO: 982601 - RNA, 19 nt, Artificial Sequence
  Description of Artificial Sequence: Synthetic oligonucleotide
gacaguggagucacgucga

SEQ ID NO: 982602 - RNA, 19 nt, Artificial Sequence
  Description of Artificial Sequence: Synthetic oligonucleotide
ggcacgaggacauuucaaa

SEQ ID NO: 982603 - RNA, 19 nt, Artificial Sequence
  Description of Artificial Sequence: Synthetic oligonucleotide
cucguacacuugcaccagc

SEQ ID NO: 982604 - RNA, 19 nt, Artificial Sequence
  Description of Artificial Sequence: Synthetic oligonucleotide
gcaucgaugucgaagguga

SEQ ID NO: 982605 - RNA, 19 nt, Artificial Sequence
  Description of Artificial Sequence: Synthetic oligonucleotide
augcucaaaucagcaaaca

SEQ ID NO: 982606 - RNA, 19 nt, Artificial Sequence
  Description of Artificial Sequence: Synthetic oligonucleotide
ugccacgcgaucgcgauua

SEQ ID NO: 982607 - RNA, 19 nt, Artificial Sequence
  Description of Artificial Sequence: Synthetic oligonucleotide
aucucgaugcuggccugcg

SEQ ID NO: 982608 - RNA, 19 nt, Artificial Sequence
  Description of Artificial Sequence: Synthetic oligonucleotide
gcacggcgcgcuuaguugg

SEQ ID NO: 982609 - RNA, 19 nt, Artificial Sequence
  Description of Artificial Sequence: Synthetic oligonucleotide
ucuccggccguggacuuca

SEQ ID NO: 982610 - RNA, 19 nt, Artificial Sequence
  Description of Artificial Sequence: Synthetic oligonucleotide
ugacguuaaggaugccauu

SEQ ID NO: 982611 - RNA, 19 nt, Artificial Sequence
  Description of Artificial Sequence: Synthetic oligonucleotide
gucgaucucgaugcuggcc

SEQ ID NO: 982612 - RNA, 19 nt, Artificial Sequence
  Description of Artificial Sequence: Synthetic oligonucleotide
cauuagauagaaaccucau

SEQ ID NO: 982613 - RNA, 19 nt, Artificial Sequence
  Description of Artificial Sequence: Synthetic oligonucleotide
ucgcgauuagcuucaucuu

SEQ ID NO: 982614 - RNA, 19 nt, Artificial Sequence
  Description of Artificial Sequence: Synthetic oligonucleotide
auggacguguagaaaucca

SEQ ID NO: 982615 - RNA, 19 nt, Artificial Sequence
  Description of Artificial Sequence: Synthetic oligonucleotide
cauacgguugucgaagucu

SEQ ID NO: 982616 - RNA, 19 nt, Artificial Sequence
  Description of Artificial Sequence: Synthetic oligonucleotide
uuuuggcugccacgcgauc

SEQ ID NO: 982617 - RNA, 19 nt, Artificial Sequence
  Description of Artificial Sequence: Synthetic oligonucleotide
ggugacguuaaggaugcca

SEQ ID NO: 982618 - RNA, 19 nt, Artificial Sequence
  Description of Artificial Sequence: Synthetic oligonucleotide
gagucacgucgaguaacag

SEQ ID NO: 982619 - RNA, 19 nt, Artificial Sequence
  Description of Artificial Sequence: Synthetic oligonucleotide
ggcagcggugacguuaagg

SEQ ID NO: 982620 - RNA, 19 nt, Artificial Sequence
  Description of Artificial Sequence: Synthetic oligonucleotide
cacgucgaguaacagcaga

SEQ ID NO: 982621 - RNA, 19 nt, Artificial Sequence
  Description of Artificial Sequence: Synthetic oligonucleotide
caggcgacccuugucguug

SEQ ID NO: 982622 - RNA, 19 nt, Artificial Sequence
  Description of Artificial Sequence: Synthetic oligonucleotide
gaccccgccagcgguuucg

SEQ ID NO: 982623 - RNA, 19 nt, Artificial Sequence
  Description of Artificial Sequence: Synthetic oligonucleotide
caucgaugucgaaggugac

SEQ ID NO: 982624 - RNA, 19 nt, Artificial Sequence
  Description of Artificial Sequence: Synthetic oligonucleotide
uccucuugaugagcggggu

SEQ ID NO: 982625 - RNA, 19 nt, Artificial Sequence
  Description of Artificial Sequence: Synthetic oligonucleotide
gccguugaagaaauccugc

SEQ ID NO: 982626 - RNA, 19 nt, Artificial Sequence
  Description of Artificial Sequence: Synthetic oligonucleotide
guuccgguccagccaguug

SEQ ID NO: 982627 - RNA, 19 nt, Artificial Sequence
  Description of Artificial Sequence: Synthetic oligonucleotide
ucuuagggaugcgggugga

SEQ ID NO: 982628 - RNA, 19 nt, Artificial Sequence
  Description of Artificial Sequence: Synthetic oligonucleotide
agccaguugaucaccuccu

SEQ ID NO: 982629 - RNA, 19 nt, Artificial Sequence
  Description of Artificial Sequence: Synthetic oligonucleotide
guguuaccaagcuuccaua

SEQ ID NO: 982630 - RNA, 19 nt, Artificial Sequence
  Description of Artificial Sequence: Synthetic oligonucleotide
aggaccgccuugguaaagu

SEQ ID NO: 982631 - RNA, 19 nt, Artificial Sequence
  Description of Artificial Sequence: Synthetic oligonucleotide
caaugucguccuugcucag

SEQ ID NO: 982632 - RNA, 19 nt, Artificial Sequence
  Description of Artificial Sequence: Synthetic oligonucleotide
cagucaggucgaacuugcc

SEQ ID NO: 982633 - RNA, 19 nt, Artificial Sequence
  Description of Artificial Sequence: Synthetic oligonucleotide
ccaggugugugucuccggc

SEQ ID NO: 982634 - RNA, 19 nt, Artificial Sequence
  Description of Artificial Sequence: Synthetic oligonucleotide
ucucgaugcuggccugcgu

SEQ ID NO: 982635 - RNA, 19 nt, Artificial Sequence
  Description of Artificial Sequence: Synthetic oligonucleotide
cucgaaagaugccguccuc

SEQ ID NO: 982636 - RNA, 19 nt, Artificial Sequence
  Description of Artificial Sequence: Synthetic oligonucleotide
guggcucaccauacgguug

SEQ ID NO: 982637 - RNA, 19 nt, Artificial Sequence
  Description of Artificial Sequence: Synthetic oligonucleotide
auacgguugucgaagucuu

SEQ ID NO: 982638 - RNA, 19 nt, Artificial Sequence
  Description of Artificial Sequence: Synthetic oligonucleotide
aggcgacccuugucguugg

SEQ ID NO: 982639 - RNA, 19 nt, Artificial Sequence
  Description of Artificial Sequence: Synthetic oligonucleotide
ggcuaaagacuuccaacaa

SEQ ID NO: 982640 - RNA, 19 nt, Artificial Sequence
  Description of Artificial Sequence: Synthetic oligonucleotide
agaaauccacgcccucgua

SEQ ID NO: 982641 - RNA, 19 nt, Artificial Sequence
  Description of Artificial Sequence: Synthetic oligonucleotide
agagcgagucgaucucgau

SEQ ID NO: 982642 - RNA, 19 nt, Artificial Sequence
  Description of Artificial Sequence: Synthetic oligonucleotide
cacggcgcgcuuaguuggg

SEQ ID NO: 982643 - RNA, 19 nt, Artificial Sequence
  Description of Artificial Sequence: Synthetic oligonucleotide
agcucuuacuuggcacgag

SEQ ID NO: 982644 - RNA, 19 nt, Artificial Sequence
  Description of Artificial Sequence: Synthetic oligonucleotide
cguuaaggaugccauuggc

SEQ ID NO: 982645 - RNA, 19 nt, Artificial Sequence
  Description of Artificial Sequence: Synthetic oligonucleotide
ggcccguucgcccucguac

SEQ ID NO: 982646 - RNA, 19 nt, Artificial Sequence
  Description of Artificial Sequence: Synthetic oligonucleotide
gcuuaguugggcccaaugu

SEQ ID NO: 982647 - RNA, 19 nt, Artificial Sequence
  Description of Artificial Sequence: Synthetic oligonucleotide
ugcggguggagccgcccac

SEQ ID NO: 982648 - RNA, 19 nt, Artificial Sequence
  Description of Artificial Sequence: Synthetic oligonucleotide
accauacggucaaugucgu

SEQ ID NO: 982649 - RNA, 19 nt, Artificial Sequence
  Description of Artificial Sequence: Synthetic oligonucleotide
gugacguuaaggaugccau

SEQ ID NO: 982650 - RNA, 19 nt, Artificial Sequence
  Description of Artificial Sequence: Synthetic oligonucleotide
cgauuuguaccgcucugcc

SEQ ID NO: 982651 - RNA, 19 nt, Artificial Sequence
  Description of Artificial Sequence: Synthetic oligonucleotide
cuugucgaggaucuuguuu

SEQ ID NO: 982652 - RNA, 19 nt, Artificial Sequence
  Description of Artificial Sequence: Synthetic oligonucleotide
gaugcggguggagccgccc

SEQ ID NO: 982653 - RNA, 19 nt, Artificial Sequence
  Description of Artificial Sequence: Synthetic oligonucleotide
cucguagagcgagucgauc

SEQ ID NO: 982654 - RNA, 19 nt, Artificial Sequence
  Description of Artificial Sequence: Synthetic oligonucleotide
gcucaccauacgguugucg

SEQ ID NO: 982655 - RNA, 19 nt, Artificial Sequence
  Description of Artificial Sequence: Synthetic oligonucleotide
ggcgcgcuuaguugggccc

SEQ ID NO: 982656 - RNA, 19 nt, Artificial Sequence
  Description of Artificial Sequence: Synthetic oligonucleotide
acuugucgccaaugaggau

SEQ ID NO: 982657 - RNA, 19 nt, Artificial Sequence
  Description of Artificial Sequence: Synthetic oligonucleotide
ucaggcgacccuugucguu

SEQ ID NO: 982658 - RNA, 19 nt, Artificial Sequence
  Description of Artificial Sequence: Synthetic oligonucleotide
acggcgcgcuuaguugggc

SEQ ID NO: 982659 - RNA, 19 nt, Artificial Sequence
  Description of Artificial Sequence: Synthetic oligonucleotide
uggggaucgugguguuccu

SEQ ID NO: 982660 - RNA, 19 nt, Artificial Sequence
  Description of Artificial Sequence: Synthetic oligonucleotide
ccaacaacagcucuuacuu

SEQ ID NO: 982661 - RNA, 19 nt, Artificial Sequence
  Description of Artificial Sequence: Synthetic oligonucleotide
uccgguccagccaguugau

SEQ ID NO: 982662 - RNA, 19 nt, Artificial Sequence
  Description of Artificial Sequence: Synthetic oligonucleotide
cgauuagcuucaucuuccg

SEQ ID NO: 982663 - RNA, 19 nt, Artificial Sequence
  Description of Artificial Sequence: Synthetic oligonucleotide
cucuugucggcagcgguga

SEQ ID NO: 982664 - RNA, 19 nt, Artificial Sequence
  Description of Artificial Sequence: Synthetic oligonucleotide
cccucguacacuugcacca

SEQ ID NO: 982665 - RNA, 19 nt, Artificial Sequence
  Description of Artificial Sequence: Synthetic oligonucleotide
ucgccacccaggugugugu

SEQ ID NO: 982666 - RNA, 19 nt, Artificial Sequence
  Description of Artificial Sequence: Synthetic oligonucleotide
cucgcuaaucuugccccuc

SEQ ID NO: 982667 - RNA, 19 nt, Artificial Sequence
  Description of Artificial Sequence: Synthetic oligonucleotide
acgcgaucgcgauuagcuu

SEQ ID NO: 982668 - RNA, 19 nt, Artificial Sequence
  Description of Artificial Sequence: Synthetic oligonucleotide
cugcacggcggcgccauag

SEQ ID NO: 982669 - RNA, 19 nt, Artificial Sequence
  Description of Artificial Sequence: Synthetic oligonucleotide
ccgauuuguaccgcucugc

SEQ ID NO: 982670 - RNA, 19 nt, Artificial Sequence
  Description of Artificial Sequence: Synthetic oligonucleotide
gaggagguuuccgagguuu

SEQ ID NO: 982671 - RNA, 19 nt, Artificial Sequence
  Description of Artificial Sequence: Synthetic oligonucleotide
augcggguggagccgccca

SEQ ID NO: 982672 - RNA, 19 nt, Artificial Sequence
  Description of Artificial Sequence: Synthetic oligonucleotide
ucgugguguuccucuugau

SEQ ID NO: 982673 - RNA, 19 nt, Artificial Sequence
  Description of Artificial Sequence: Synthetic oligonucleotide
gaagcgggcgcgggugaug

SEQ ID NO: 982674 - RNA, 19 nt, Artificial Sequence
  Description of Artificial Sequence: Synthetic oligonucleotide
cgcgauuagcuucaucuuc

SEQ ID NO: 982675 - RNA, 19 nt, Artificial Sequence
  Description of Artificial Sequence: Synthetic oligonucleotide
agcgccuuuuccaccggcu

SEQ ID NO: 982676 - RNA, 19 nt, Artificial Sequence
  Description of Artificial Sequence: Synthetic oligonucleotide
ggacaggugugcaaacauc

SEQ ID NO: 982677 - RNA, 19 nt, Artificial Sequence
  Description of Artificial Sequence: Synthetic oligonucleotide
guggagucacgucgaguaa

SEQ ID NO: 982678 - RNA, 19 nt, Artificial Sequence
  Description of Artificial Sequence: Synthetic oligonucleotide
gucggcagcggugacguua

SEQ ID NO: 982679 - RNA, 19 nt, Artificial Sequence
  Description of Artificial Sequence: Synthetic oligonucleotide
aagcgacaguggagucacg

SEQ ID NO: 982680 - RNA, 19 nt, Artificial Sequence
  Description of Artificial Sequence: Synthetic oligonucleotide
cgcgaucgcgauuagcuuc

SEQ ID NO: 982681 - RNA, 19 nt, Artificial Sequence
  Description of Artificial Sequence: Synthetic oligonucleotide
gcccucguagagcgagucg

SEQ ID NO: 982682 - RNA, 19 nt, Artificial Sequence
  Description of Artificial Sequence: Synthetic oligonucleotide
gggaucgugguguuccucu

SEQ ID NO: 982683 - RNA, 19 nt, Artificial Sequence
  Description of Artificial Sequence: Synthetic oligonucleotide
ccacguacaaacuaagcuu

SEQ ID NO: 982684 - RNA, 19 nt, Artificial Sequence
  Description of Artificial Sequence: Synthetic oligonucleotide
cauggcccguucgcccucg

SEQ ID NO: 982685 - RNA, 19 nt, Artificial Sequence
  Description of Artificial Sequence: Synthetic oligonucleotide
guauaggacucaacugcgu

SEQ ID NO: 982686 - RNA, 19 nt, Artificial Sequence
  Description of Artificial Sequence: Synthetic oligonucleotide
gguaaaguuugcugaugau

SEQ ID NO: 982687 - RNA, 19 nt, Artificial Sequence
  Description of Artificial Sequence: Synthetic oligonucleotide
ggugauggacguguagaaa

SEQ ID NO: 982688 - RNA, 19 nt, Artificial Sequence
  Description of Artificial Sequence: Synthetic oligonucleotide
uacggucaaugucguccuu

SEQ ID NO: 982689 - RNA, 19 nt, Artificial Sequence
  Description of Artificial Sequence: Synthetic oligonucleotide
cgauaccaagcgacagugg

SEQ ID NO: 982690 - RNA, 19 nt, Artificial Sequence
  Description of Artificial Sequence: Synthetic oligonucleotide
ccugcucgcuaaucuugcc

SEQ ID NO: 982691 - RNA, 19 nt, Artificial Sequence
  Description of Artificial Sequence: Synthetic oligonucleotide
gggaggagguuuccgaggu

SEQ ID NO: 982692 - RNA, 19 nt, Artificial Sequence
  Description of Artificial Sequence: Synthetic oligonucleotide
cuccagugcaagcuuaguu

SEQ ID NO: 982693 - RNA, 19 nt, Artificial Sequence
  Description of Artificial Sequence: Synthetic oligonucleotide
ggguugcacacucucucaa

SEQ ID NO: 982694 - RNA, 19 nt, Artificial Sequence
  Description of Artificial Sequence: Synthetic oligonucleotide
gcaaaucuccacguacaaa

SEQ ID NO: 982695 - RNA, 19 nt, Artificial Sequence
  Description of Artificial Sequence: Synthetic oligonucleotide
caggaccgccuugguaaag

SEQ ID NO: 982696 - RNA, 19 nt, Artificial Sequence
  Description of Artificial Sequence: Synthetic oligonucleotide
guuaguccacuuccucgau

SEQ ID NO: 982697 - RNA, 19 nt, Artificial Sequence
  Description of Artificial Sequence: Synthetic oligonucleotide
ccaggcuaaagacuuccaa

SEQ ID NO: 982698 - RNA, 19 nt, Artificial Sequence
  Description of Artificial Sequence: Synthetic oligonucleotide
cauaggccaccgccucguc

SEQ ID NO: 982699 - RNA, 19 nt, Artificial Sequence
  Description of Artificial Sequence: Synthetic oligonucleotide
guuugcgcuugaacuccuc

SEQ ID NO: 982700 - RNA, 19 nt, Artificial Sequence
  Description of Artificial Sequence: Synthetic oligonucleotide
uuguaccgcucugccuccu

SEQ ID NO: 982701 - RNA, 19 nt, Artificial Sequence
  Description of Artificial Sequence: Synthetic oligonucleotide
gcuaaucuugccccucagu

SEQ ID NO: 982702 - RNA, 19 nt, Artificial Sequence
  Description of Artificial Sequence: Synthetic oligonucleotide
cagcucuuacuuggcacga

SEQ ID NO: 982703 - RNA, 19 nt, Artificial Sequence
  Description of Artificial Sequence: Synthetic oligonucleotide
cguagagcgagucgaucuc

SEQ ID NO: 982704 - RNA, 19 nt, Artificial Sequence
  Description of Artificial Sequence: Synthetic oligonucleotide
gcgaucgcgauuagcuuca

SEQ ID NO: 982705 - RNA, 19 nt, Artificial Sequence
  Description of Artificial Sequence: Synthetic oligonucleotide
gugugucuccggccgugga

SEQ ID NO: 982706 - RNA, 19 nt, Artificial Sequence
  Description of Artificial Sequence: Synthetic oligonucleotide
ugucgccaaugaggauagc

SEQ ID NO: 982707 - RNA, 19 nt, Artificial Sequence
  Description of Artificial Sequence: Synthetic oligonucleotide
gcacggcggcgccauaggc

SEQ ID NO: 982708 - RNA, 19 nt, Artificial Sequence
  Description of Artificial Sequence: Synthetic oligonucleotide
accuuuccuuucauaugua

SEQ ID NO: 982709 - RNA, 19 nt, Artificial Sequence
  Description of Artificial Sequence: Synthetic oligonucleotide
ugaccccgccagcgguuuc

SEQ ID NO: 982710 - RNA, 19 nt, Artificial Sequence
  Description of Artificial Sequence: Synthetic oligonucleotide
ccauacgguugucgaaguc

SEQ ID NO: 982711 - RNA, 19 nt, Artificial Sequence
  Description of Artificial Sequence: Synthetic oligonucleotide
ccgccuugguaaaguuugc

SEQ ID NO: 982712 - RNA, 19 nt, Artificial Sequence
  Description of Artificial Sequence: Synthetic oligonucleotide
uggcgcgcucgcaggcggu

SEQ ID NO: 982713 - RNA, 19 nt, Artificial Sequence
  Description of Artificial Sequence: Synthetic oligonucleotide
cgcacggcgcgcuuaguug

SEQ ID NO: 982714 - RNA, 19 nt, Artificial Sequence
  Description of Artificial Sequence: Synthetic oligonucleotide
ccucguacacuugcaccag

SEQ ID NO: 982715 - RNA, 19 nt, Artificial Sequence
  Description of Artificial Sequence: Synthetic oligonucleotide
cccucguagagcgagucga

SEQ ID NO: 982716 - RNA, 19 nt, Artificial Sequence
  Description of Artificial Sequence: Synthetic oligonucleotide
gcgcagccggcgcacggcg

SEQ ID NO: 982717 - RNA, 19 nt, Artificial Sequence
  Description of Artificial Sequence: Synthetic oligonucleotide
gccagcgguuucgauacca

SEQ ID NO: 982718 - RNA, 19 nt, Artificial Sequence
  Description of Artificial Sequence: Synthetic oligonucleotide
ccucuugaugagcgggguc

SEQ ID NO: 982719 - RNA, 19 nt, Artificial Sequence
  Description of Artificial Sequence: Synthetic oligonucleotide
uggcccguucgcccucgua

SEQ ID NO: 982720 - RNA, 19 nt, Artificial Sequence
  Description of Artificial Sequence: Synthetic oligonucleotide
accgccucgucgggguuga

SEQ ID NO: 982721 - RNA, 19 nt, Artificial Sequence
  Description of Artificial Sequence: Synthetic oligonucleotide
cuugcaccagcacgcugcu

SEQ ID NO: 982722 - RNA, 19 nt, Artificial Sequence
  Description of Artificial Sequence: Synthetic oligonucleotide
gcccguucgcccucguaca

SEQ ID NO: 982723 - RNA, 19 nt, Artificial Sequence
  Description of Artificial Sequence: Synthetic oligonucleotide
cgcuuaguugggcccaaug

SEQ ID NO: 982724 - RNA, 19 nt, Artificial Sequence
  Description of Artificial Sequence: Synthetic oligonucleotide
ccaagcgacaguggaguca

SEQ ID NO: 982725 - RNA, 19 nt, Artificial Sequence
  Description of Artificial Sequence: Synthetic oligonucleotide
caccgccucgucgggguug

SEQ ID NO: 982726 - RNA, 19 nt, Artificial Sequence
  Description of Artificial Sequence: Synthetic oligonucleotide
agguuuccgcggacuccag

SEQ ID NO: 982727 - RNA, 19 nt, Artificial Sequence
  Description of Artificial Sequence: Synthetic oligonucleotide
guucgcccucguacacuug

SEQ ID NO: 982728 - RNA, 19 nt, Artificial Sequence
  Description of Artificial Sequence: Synthetic oligonucleotide
augaccccgccagcgguuu

SEQ ID NO: 982729 - RNA, 19 nt, Artificial Sequence
  Description of Artificial Sequence: Synthetic oligonucleotide
gcguggacgagcucagggu

SEQ ID NO: 982730 - RNA, 19 nt, Artificial Sequence
  Description of Artificial Sequence: Synthetic oligonucleotide
cgucgaguaacagcagauc

SEQ ID NO: 982731 - RNA, 19 nt, Artificial Sequence
  Description of Artificial Sequence: Synthetic oligonucleotide
cgagguuuccgcggacucc

SEQ ID NO: 982732 - RNA, 19 nt, Artificial Sequence
  Description of Artificial Sequence: Synthetic oligonucleotide
cagcggugacguuaaggau

SEQ ID NO: 982733 - RNA, 19 nt, Artificial Sequence
  Description of Artificial Sequence: Synthetic oligonucleotide
ccauacggucaaugucguc

SEQ ID NO: 982734 - RNA, 19 nt, Artificial Sequence
  Description of Artificial Sequence: Synthetic oligonucleotide
ggauagccgccugcacggc

SEQ ID NO: 982735 - RNA, 19 nt, Artificial Sequence
  Description of Artificial Sequence: Synthetic oligonucleotide
ggcggcgccauaggccacc

SEQ ID NO: 982736 - RNA, 19 nt, Artificial Sequence
  Description of Artificial Sequence: Synthetic oligonucleotide
ccucgaaagaugccguccu

SEQ ID NO: 982737 - RNA, 19 nt, Artificial Sequence
  Description of Artificial Sequence: Synthetic oligonucleotide
gcggggucaugaccccgcc

SEQ ID NO: 982738 - RNA, 19 nt, Artificial Sequence
  Description of Artificial Sequence: Synthetic oligonucleotide
gcgggcgcgggugauggac

SEQ ID NO: 982739 - RNA, 19 nt, Artificial Sequence
  Description of Artificial Sequence: Synthetic oligonucleotide
cccguucgcccucguacac

SEQ ID NO: 982740 - RNA, 19 nt, Artificial Sequence
  Description of Artificial Sequence: Synthetic oligonucleotide
cgggcgcgggugauggacg

SEQ ID NO: 982741 - RNA, 19 nt, Artificial Sequence
  Description of Artificial Sequence: Synthetic oligonucleotide
ccacgcgaucgcgauuagc

SEQ ID NO: 982742 - RNA, 19 nt, Artificial Sequence
  Description of Artificial Sequence: Synthetic oligonucleotide
agcgggcgcgggugaugga

SEQ ID NO: 982743 - RNA, 19 nt, Artificial Sequence
  Description of Artificial Sequence: Synthetic oligonucleotide
ccagcgguuucgauaccaa

SEQ ID NO: 982744 - RNA, 19 nt, Artificial Sequence
  Description of Artificial Sequence: Synthetic oligonucleotide
gguuuccgcggacuccagu

SEQ ID NO: 982745 - RNA, 19 nt, Artificial Sequence
  Description of Artificial Sequence: Synthetic oligonucleotide
auggcccguucgcccucgu

SEQ ID NO: 982746 - RNA, 19 nt, Artificial Sequence
  Description of Artificial Sequence: Synthetic oligonucleotide
gucuccggccguggacuuc

SEQ ID NO: 982747 - RNA, 19 nt, Artificial Sequence
  Description of Artificial Sequence: Synthetic oligonucleotide
ccgcggacuccagugcaag

SEQ ID NO: 982748 - RNA, 19 nt, Artificial Sequence
  Description of Artificial Sequence: Synthetic oligonucleotide
cggcgcgcuuaguugggcc

SEQ ID NO: 982749 - RNA, 19 nt, Artificial Sequence
  Description of Artificial Sequence: Synthetic oligonucleotide
gccacgcgaucgcgauuag

SEQ ID NO: 982750 - RNA, 19 nt, Artificial Sequence
  Description of Artificial Sequence: Synthetic oligonucleotide
cuccggccguggacuucac

SEQ ID NO: 982751 - RNA, 19 nt, Artificial Sequence
  Description of Artificial Sequence: Synthetic oligonucleotide
gcucgcuaaucuugccccu

SEQ ID NO: 982752 - RNA, 19 nt, Artificial Sequence
  Description of Artificial Sequence: Synthetic oligonucleotide
accccgccagcgguuucga

SEQ ID NO: 982753 - RNA, 19 nt, Artificial Sequence
  Description of Artificial Sequence: Synthetic oligonucleotide
cguccuugcucaggcgacc

SEQ ID NO: 982754 - RNA, 19 nt, Artificial Sequence
  Description of Artificial Sequence: Synthetic oligonucleotide
ccgcaauguuuaaucucaa

SEQ ID NO: 982755 - RNA, 19 nt, Artificial Sequence
  Description of Artificial Sequence: Synthetic oligonucleotide
cgcgcucgcaggcggugcg

SEQ ID NO: 982756 - RNA, 19 nt, Artificial Sequence
  Description of Artificial Sequence: Synthetic oligonucleotide
ggaugcggguggagccgcc

SEQ ID NO: 982757 - RNA, 19 nt, Artificial Sequence
  Description of Artificial Sequence: Synthetic oligonucleotide
cgguuucgauaccaagcga

SEQ ID NO: 982758 - RNA, 19 nt, Artificial Sequence
  Description of Artificial Sequence: Synthetic oligonucleotide
ggcgcgcucgcaggcggug

SEQ ID NO: 982759 - RNA, 19 nt, Artificial Sequence
  Description of Artificial Sequence: Synthetic oligonucleotide
gcgcgcuuaguugggccca

SEQ ID NO: 982760 - RNA, 19 nt, Artificial Sequence
  Description of Artificial Sequence: Synthetic oligonucleotide
ccaggaccgccuugguaaa

SEQ ID NO: 982761 - RNA, 19 nt, Artificial Sequence
  Description of Artificial Sequence: Synthetic oligonucleotide
ggaccgccuugguaaaguu

SEQ ID NO: 982762 - RNA, 19 nt, Artificial Sequence
  Description of Artificial Sequence: Synthetic oligonucleotide
cguggacuucaccucgaaa

SEQ ID NO: 982763 - RNA, 19 nt, Artificial Sequence
  Description of Artificial Sequence: Synthetic oligonucleotide
gcgcgggugauggacgugu

SEQ ID NO: 982764 - RNA, 19 nt, Artificial Sequence
  Description of Artificial Sequence: Synthetic oligonucleotide
ccgucuguuugauguugua

SEQ ID NO: 982765 - RNA, 19 nt, Artificial Sequence
  Description of Artificial Sequence: Synthetic oligonucleotide
gcgcgcucgcaggcggugc

SEQ ID NO: 982766 - RNA, 19 nt, Artificial Sequence
  Description of Artificial Sequence: Synthetic oligonucleotide
gcgcacggcgcgcuuaguu

SEQ ID NO: 982767 - RNA, 19 nt, Artificial Sequence
  Description of Artificial Sequence: Synthetic oligonucleotide
ccucguagagcgagucgau

SEQ ID NO: 982768 - RNA, 19 nt, Artificial Sequence
  Description of Artificial Sequence: Synthetic oligonucleotide
gggcccaaugucccuucuu

SEQ ID NO: 982769 - RNA, 19 nt, Artificial Sequence
  Description of Artificial Sequence: Synthetic oligonucleotide
cuucgccacccaggugugu

SEQ ID NO: 982770 - RNA, 19 nt, Artificial Sequence
  Description of Artificial Sequence: Synthetic oligonucleotide
cguucgcccucguacacuu

SEQ ID NO: 982771 - RNA, 19 nt, Artificial Sequence
  Description of Artificial Sequence: Synthetic oligonucleotide
cgccagcgguuucgauacc

SEQ ID NO: 982772 - RNA, 19 nt, Artificial Sequence
  Description of Artificial Sequence: Synthetic oligonucleotide
cggggucaugaccccgcca

SEQ ID NO: 982773 - RNA, 19 nt, Artificial Sequence
  Description of Artificial Sequence: Synthetic oligonucleotide
cggugcgcagccggcgcac

SEQ ID NO: 982774 - RNA, 19 nt, Artificial Sequence
  Description of Artificial Sequence: Synthetic oligonucleotide
ccguucgcccucguacacu

SEQ ID NO: 982775 - RNA, 19 nt, Artificial Sequence
  Description of Artificial Sequence: Synthetic oligonucleotide
cggcgccauaggccaccgc

SEQ ID NO: 982776 - RNA, 19 nt, Artificial Sequence
  Description of Artificial Sequence: Synthetic oligonucleotide
cggcagcggugacguuaag

SEQ ID NO: 982777 - RNA, 19 nt, Artificial Sequence
  Description of Artificial Sequence: Synthetic oligonucleotide
cgcgggugauggacgugua

SEQ ID NO: 982778 - RNA, 19 nt, Artificial Sequence
  Description of Artificial Sequence: Synthetic oligonucleotide
cgcgcuuaguugggcccaa

SEQ ID NO: 982779 - RNA, 19 nt, Artificial Sequence
  Description of Artificial Sequence: Synthetic oligonucleotide
gcgcuuaguugggcccaau

SEQ ID NO: 982780 - RNA, 19 nt, Artificial Sequence
  Description of Artificial Sequence: Synthetic oligonucleotide
ccugcacggcggcgccaua

SEQ ID NO: 982781 - RNA, 19 nt, Artificial Sequence
  Description of Artificial Sequence: Synthetic oligonucleotide
caccggcuccagggucccu

SEQ ID NO: 982782 - RNA, 19 nt, Artificial Sequence
  Description of Artificial Sequence: Synthetic oligonucleotide
gccggcgcacggcgcgcuu

SEQ ID NO: 982783 - RNA, 19 nt, Artificial Sequence
  Description of Artificial Sequence: Synthetic oligonucleotide
ccaccgccucgucgggguu

SEQ ID NO: 982784 - RNA, 19 nt, Artificial Sequence
  Description of Artificial Sequence: Synthetic oligonucleotide
cgaucgcgauuagcuucau

SEQ ID NO: 982785 - RNA, 19 nt, Artificial Sequence
  Description of Artificial Sequence: Synthetic oligonucleotide
ccgccucgucgggguugau

SEQ ID NO: 982786 - RNA, 19 nt, Artificial Sequence
  Description of Artificial Sequence: Synthetic oligonucleotide
aaauauacuaagugggugc

SEQ ID NO: 982787 - RNA, 19 nt, Artificial Sequence
  Description of Artificial Sequence: Synthetic oligonucleotide
aauaguaauaagugggagc

SEQ ID NO: 982788 - RNA, 19 nt, Artificial Sequence
  Description of Artificial Sequence: Synthetic oligonucleotide
aguaaaaucauugaaugcc

SEQ ID NO: 982789 - RNA, 19 nt, Artificial Sequence
  Description of Artificial Sequence: Synthetic oligonucleotide
ugcaaauauacuaaguggg

SEQ ID NO: 982790 - RNA, 19 nt, Artificial Sequence
  Description of Artificial Sequence: Synthetic oligonucleotide
aaaacuaccaaucagucaa

SEQ ID NO: 982791 - RNA, 19 nt, Artificial Sequence
  Description of Artificial Sequence: Synthetic oligonucleotide
uagauugucacucauacug

SEQ ID NO: 982792 - RNA, 19 nt, Artificial Sequence
  Description of Artificial Sequence: Synthetic oligonucleotide
aaugaaccgaggcagagac

SEQ ID NO: 982793 - RNA, 19 nt, Artificial Sequence
  Description of Artificial Sequence: Synthetic oligonucleotide
ugucuauugcacaauaccg

SEQ ID NO: 982794 - RNA, 19 nt, Artificial Sequence
  Description of Artificial Sequence: Synthetic oligonucleotide
aguuuguuagcccuuaugg

SEQ ID NO: 982795 - RNA, 19 nt, Artificial Sequence
  Description of Artificial Sequence: Synthetic oligonucleotide
ugaguaaaaucauugaaug

SEQ ID NO: 982796 - RNA, 19 nt, Artificial Sequence
  Description of Artificial Sequence: Synthetic oligonucleotide
aaugaugucagccacucca

SEQ ID NO: 982797 - RNA, 19 nt, Artificial Sequence
  Description of Artificial Sequence: Synthetic oligonucleotide
cuagaaggcgcuaacaugg

SEQ ID NO: 982798 - RNA, 19 nt, Artificial Sequence
  Description of Artificial Sequence: Synthetic oligonucleotide
agagggacgaauuaucugg

SEQ ID NO: 982799 - RNA, 19 nt, Artificial Sequence
  Description of Artificial Sequence: Synthetic oligonucleotide
agcuuuaagguccuaaggg

SEQ ID NO: 982800 - RNA, 19 nt, Artificial Sequence
  Description of Artificial Sequence: Synthetic oligonucleotide
acuucauacauucuuagca

SEQ ID NO: 982801 - RNA, 19 nt, Artificial Sequence
  Description of Artificial Sequence: Synthetic oligonucleotide
aauucaguuuguuagcccu

SEQ ID NO: 982802 - RNA, 19 nt, Artificial Sequence
  Description of Artificial Sequence: Synthetic oligonucleotide
auauacacuaaaaucacac

SEQ ID NO: 982803 - RNA, 19 nt, Artificial Sequence
  Description of Artificial Sequence: Synthetic oligonucleotide
cacaauaccguguauauac

SEQ ID NO: 982804 - RNA, 19 nt, Artificial Sequence
  Description of Artificial Sequence: Synthetic oligonucleotide
aaguguguaccagacaagc

SEQ ID NO: 982805 - RNA, 19 nt, Artificial Sequence
  Description of Artificial Sequence: Synthetic oligonucleotide
uguggcuagauguacaugc

SEQ ID NO: 982806 - RNA, 19 nt, Artificial Sequence
  Description of Artificial Sequence: Synthetic oligonucleotide
aagucuuggcucugcaucc

SEQ ID NO: 982807 - RNA, 19 nt, Artificial Sequence
  Description of Artificial Sequence: Synthetic oligonucleotide
auaguccagaguucaaucc

SEQ ID NO: 982808 - RNA, 19 nt, Artificial Sequence
  Description of Artificial Sequence: Synthetic oligonucleotide
uugucacucauacugagug

SEQ ID NO: 982809 - RNA, 19 nt, Artificial Sequence
  Description of Artificial Sequence: Synthetic oligonucleotide
uuaucuuauaaagacauuc

SEQ ID NO: 982810 - RNA, 19 nt, Artificial Sequence
  Description of Artificial Sequence: Synthetic oligonucleotide
cucguaaugugacauaagg

SEQ ID NO: 982811 - RNA, 19 nt, Artificial Sequence
  Description of Artificial Sequence: Synthetic oligonucleotide
gucaacaagagacaggccc

SEQ ID NO: 982812 - RNA, 19 nt, Artificial Sequence
  Description of Artificial Sequence: Synthetic oligonucleotide
aauaagugggagcuguugu

SEQ ID NO: 982813 - RNA, 19 nt, Artificial Sequence
  Description of Artificial Sequence: Synthetic oligonucleotide
acauaaggaccuuaagagg

SEQ ID NO: 982814 - RNA, 19 nt, Artificial Sequence
  Description of Artificial Sequence: Synthetic oligonucleotide
aacuguuugagacuacagu

SEQ ID NO: 982815 - RNA, 19 nt, Artificial Sequence
  Description of Artificial Sequence: Synthetic oligonucleotide
ucugacaagaucagcccgg

SEQ ID NO: 982816 - RNA, 19 nt, Artificial Sequence
  Description of Artificial Sequence: Synthetic oligonucleotide
accggaaauaaauaaauaa

SEQ ID NO: 982817 - RNA, 19 nt, Artificial Sequence
  Description of Artificial Sequence: Synthetic oligonucleotide
augauuggccauguaaucc

SEQ ID NO: 982818 - RNA, 19 nt, Artificial Sequence
  Description of Artificial Sequence: Synthetic oligonucleotide
ugaaaguagggcauccuca

SEQ ID NO: 982819 - RNA, 19 nt, Artificial Sequence
  Description of Artificial Sequence: Synthetic oligonucleotide
ucuggaaugaaccgaggca

SEQ ID NO: 982820 - RNA, 19 nt, Artificial Sequence
  Description of Artificial Sequence: Synthetic oligonucleotide
auaaacgaguucuaauuca

SEQ ID NO: 982821 - RNA, 19 nt, Artificial Sequence
  Description of Artificial Sequence: Synthetic oligonucleotide
uguccggagagucccaugg

SEQ ID NO: 982822 - RNA, 19 nt, Artificial Sequence
  Description of Artificial Sequence: Synthetic oligonucleotide
gaaaguagggcauccucag

SEQ ID NO: 982823 - RNA, 19 nt, Artificial Sequence
  Description of Artificial Sequence: Synthetic oligonucleotide
cauaaggaccuuaagagga

SEQ ID NO: 982824 - RNA, 19 nt, Artificial Sequence
  Description of Artificial Sequence: Synthetic oligonucleotide
uugucaacaccacacaauc

SEQ ID NO: 982825 - RNA, 19 nt, Artificial Sequence
  Description of Artificial Sequence: Synthetic oligonucleotide
ucuguagcgccucaguaug

SEQ ID NO: 982826 - RNA, 19 nt, Artificial Sequence
  Description of Artificial Sequence: Synthetic oligonucleotide
aacgaguucuaauucaguu

SEQ ID NO: 982827 - RNA, 19 nt, Artificial Sequence
  Description of Artificial Sequence: Synthetic oligonucleotide
acuaagugggugcuaacag

SEQ ID NO: 982828 - RNA, 19 nt, Artificial Sequence
  Description of Artificial Sequence: Synthetic oligonucleotide
gacaagaucagcccggcac

SEQ ID NO: 982829 - RNA, 19 nt, Artificial Sequence
  Description of Artificial Sequence: Synthetic oligonucleotide
ugaaccgaggcagagacug

SEQ ID NO: 982830 - RNA, 19 nt, Artificial Sequence
  Description of Artificial Sequence: Synthetic oligonucleotide
ucuagaaggcgcuaacaug

SEQ ID NO: 982831 - RNA, 19 nt, Artificial Sequence
  Description of Artificial Sequence: Synthetic oligonucleotide
gauagcgagaucuccaaca

SEQ ID NO: 982832 - RNA, 19 nt, Artificial Sequence
  Description of Artificial Sequence: Synthetic oligonucleotide
ucguaaugugacauaagga

SEQ ID NO: 982833 - RNA, 19 nt, Artificial Sequence
  Description of Artificial Sequence: Synthetic oligonucleotide
cuuuaagguccuaagggug

SEQ ID NO: 982834 - RNA, 19 nt, Artificial Sequence
  Description of Artificial Sequence: Synthetic oligonucleotide
cuaagugggugcuaacagg

SEQ ID NO: 982835 - RNA, 19 nt, Artificial Sequence
  Description of Artificial Sequence: Synthetic oligonucleotide
ugcccgaaaguuuuguucc

SEQ ID NO: 982836 - RNA, 19 nt, Artificial Sequence
  Description of Artificial Sequence: Synthetic oligonucleotide
gauugucacucauacugag

SEQ ID NO: 982837 - RNA, 19 nt, Artificial Sequence
  Description of Artificial Sequence: Synthetic oligonucleotide
aagagggacgaauuaucug

SEQ ID NO: 982838 - RNA, 19 nt, Artificial Sequence
  Description of Artificial Sequence: Synthetic oligonucleotide
uaguccagaguucaauccc

SEQ ID NO: 982839 - RNA, 19 nt, Artificial Sequence
  Description of Artificial Sequence: Synthetic oligonucleotide
auaagugggagcuguuguc

SEQ ID NO: 982840 - RNA, 19 nt, Artificial Sequence
  Description of Artificial Sequence: Synthetic oligonucleotide
aauauacuaagugggugcu

SEQ ID NO: 982841 - RNA, 19 nt, Artificial Sequence
  Description of Artificial Sequence: Synthetic oligonucleotide
auucugaagggguuccgac

SEQ ID NO: 982842 - RNA, 19 nt, Artificial Sequence
  Description of Artificial Sequence: Synthetic oligonucleotide
ucugaagggguuccgacgu

SEQ ID NO: 982843 - RNA, 19 nt, Artificial Sequence
  Description of Artificial Sequence: Synthetic oligonucleotide
ugauuggccauguaaucca

SEQ ID NO: 982844 - RNA, 19 nt, Artificial Sequence
  Description of Artificial Sequence: Synthetic oligonucleotide
uucugaagggguuccgacg

SEQ ID NO: 982845 - RNA, 19 nt, Artificial Sequence
  Description of Artificial Sequence: Synthetic oligonucleotide
aaggcgcuaacauggcuag

SEQ ID NO: 982846 - RNA, 19 nt, Artificial Sequence
  Description of Artificial Sequence: Synthetic oligonucleotide
cacacaaucaaugauguca

SEQ ID NO: 982847 - RNA, 19 nt, Artificial Sequence
  Description of Artificial Sequence: Synthetic oligonucleotide
acaaaacuaccaaucaguc

SEQ ID NO: 982848 - RNA, 19 nt, Artificial Sequence
  Description of Artificial Sequence: Synthetic oligonucleotide
aauaccguguauauacacu

SEQ ID NO: 982849 - RNA, 19 nt, Artificial Sequence
  Description of Artificial Sequence: Synthetic oligonucleotide
caaaucagcuggcagcucc

SEQ ID NO: 982850 - RNA, 19 nt, Artificial Sequence
  Description of Artificial Sequence: Synthetic oligonucleotide
cuugccuugguuuuaccac

SEQ ID NO: 982851 - RNA, 19 nt, Artificial Sequence
  Description of Artificial Sequence: Synthetic oligonucleotide
ucaagagggacgaauuauc

SEQ ID NO: 982852 - RNA, 19 nt, Artificial Sequence
  Description of Artificial Sequence: Synthetic oligonucleotide
agaucuagaaggcgcuaac

SEQ ID NO: 982853 - RNA, 19 nt, Artificial Sequence
  Description of Artificial Sequence: Synthetic oligonucleotide
caagcuuuaagguccuaag

SEQ ID NO: 982854 - RNA, 19 nt, Artificial Sequence
  Description of Artificial Sequence: Synthetic oligonucleotide
aguaauaagugggagcugu

SEQ ID NO: 982855 - RNA, 19 nt, Artificial Sequence
  Description of Artificial Sequence: Synthetic oligonucleotide
uagaaccucaaaguuaaca

SEQ ID NO: 982856 - RNA, 19 nt, Artificial Sequence
  Description of Artificial Sequence: Synthetic oligonucleotide
uaauucaguuuguuagccc

SEQ ID NO: 982857 - RNA, 19 nt, Artificial Sequence
  Description of Artificial Sequence: Synthetic oligonucleotide
gaggagaaucaggagauag

SEQ ID NO: 982858 - RNA, 19 nt, Artificial Sequence
  Description of Artificial Sequence: Synthetic oligonucleotide
aucuuauaaagacauucau

SEQ ID NO: 982859 - RNA, 19 nt, Artificial Sequence
  Description of Artificial Sequence: Synthetic oligonucleotide
uucgccgggauccagcagc

SEQ ID NO: 982860 - RNA, 19 nt, Artificial Sequence
  Description of Artificial Sequence: Synthetic oligonucleotide
uauugcacaauaccgugua

SEQ ID NO: 982861 - RNA, 19 nt, Artificial Sequence
  Description of Artificial Sequence: Synthetic oligonucleotide
cuaaggguggcagugggcg

SEQ ID NO: 982862 - RNA, 19 nt, Artificial Sequence
  Description of Artificial Sequence: Synthetic oligonucleotide
aggggcaaaguuucaagag

SEQ ID NO: 982863 - RNA, 19 nt, Artificial Sequence
  Description of Artificial Sequence: Synthetic oligonucleotide
uuccaugcccaaaucagcu

SEQ ID NO: 982864 - RNA, 19 nt, Artificial Sequence
  Description of Artificial Sequence: Synthetic oligonucleotide
caaauauacuaagugggug

SEQ ID NO: 982865 - RNA, 19 nt, Artificial Sequence
  Description of Artificial Sequence: Synthetic oligonucleotide
uauacuaagugggugcuaa

SEQ ID NO: 982866 - RNA, 19 nt, Artificial Sequence
  Description of Artificial Sequence: Synthetic oligonucleotide
gaugauuggccauguaauc

SEQ ID NO: 982867 - RNA, 19 nt, Artificial Sequence
  Description of Artificial Sequence: Synthetic oligonucleotide
ugacgguuggggcaaagga

SEQ ID NO: 982868 - RNA, 19 nt, Artificial Sequence
  Description of Artificial Sequence: Synthetic oligonucleotide
ucccucaacuucuguagcg

SEQ ID NO: 982869 - RNA, 19 nt, Artificial Sequence
  Description of Artificial Sequence: Synthetic oligonucleotide
agcgagaucuccaacaucu

SEQ ID NO: 982870 - RNA, 19 nt, Artificial Sequence
  Description of Artificial Sequence: Synthetic oligonucleotide
uggggacaccccaagauga

SEQ ID NO: 982871 - RNA, 19 nt, Artificial Sequence
  Description of Artificial Sequence: Synthetic oligonucleotide
agaaucugucauaucugcc

SEQ ID NO: 982872 - RNA, 19 nt, Artificial Sequence
  Description of Artificial Sequence: Synthetic oligonucleotide
acaacagaucuagaaggcg

SEQ ID NO: 982873 - RNA, 19 nt, Artificial Sequence
  Description of Artificial Sequence: Synthetic oligonucleotide
ucuucgagcgccucggcca

SEQ ID NO: 982874 - RNA, 19 nt, Artificial Sequence
  Description of Artificial Sequence: Synthetic oligonucleotide
gcuagauugucacucauac

SEQ ID NO: 982875 - RNA, 19 nt, Artificial Sequence
  Description of Artificial Sequence: Synthetic oligonucleotide
uguaccuucccggaguaca

SEQ ID NO: 982876 - RNA, 19 nt, Artificial Sequence
  Description of Artificial Sequence: Synthetic oligonucleotide
auaccguguauauacacua

SEQ ID NO: 982877 - RNA, 19 nt, Artificial Sequence
  Description of Artificial Sequence: Synthetic oligonucleotide
gucgcugucacugaccaag

SEQ ID NO: 982878 - RNA, 19 nt, Artificial Sequence
  Description of Artificial Sequence: Synthetic oligonucleotide
ucaacuguuugagacuaca

SEQ ID NO: 982879 - RNA, 19 nt, Artificial Sequence
  Description of Artificial Sequence: Synthetic oligonucleotide
caauaccguguauauacac

SEQ ID NO: 982880 - RNA, 19 nt, Artificial Sequence
  Description of Artificial Sequence: Synthetic oligonucleotide
ucccggaguacacaggaac

SEQ ID NO: 982881 - RNA, 19 nt, Artificial Sequence
  Description of Artificial Sequence: Synthetic oligonucleotide
aguguguaccagacaagcc

SEQ ID NO: 982882 - RNA, 19 nt, Artificial Sequence
  Description of Artificial Sequence: Synthetic oligonucleotide
gguuccgacgucaagacag

SEQ ID NO: 982883 - RNA, 19 nt, Artificial Sequence
  Description of Artificial Sequence: Synthetic oligonucleotide
agauagcgagaucuccaac

SEQ ID NO: 982884 - RNA, 19 nt, Artificial Sequence
  Description of Artificial Sequence: Synthetic oligonucleotide
uccggaccaagguacgagg

SEQ ID NO: 982885 - RNA, 19 nt, Artificial Sequence
  Description of Artificial Sequence: Synthetic oligonucleotide
ugucaacaccacacaauca

SEQ ID NO: 982886 - RNA, 19 nt, Artificial Sequence
  Description of Artificial Sequence: Synthetic oligonucleotide
uauggggcacccacaguag

SEQ ID NO: 982887 - RNA, 19 nt, Artificial Sequence
  Description of Artificial Sequence: Synthetic oligonucleotide
aggcaaucugacaagauca

SEQ ID NO: 982888 - RNA, 19 nt, Artificial Sequence
  Description of Artificial Sequence: Synthetic oligonucleotide
guacaugccaggaagugug

SEQ ID NO: 982889 - RNA, 19 nt, Artificial Sequence
  Description of Artificial Sequence: Synthetic oligonucleotide
ucuuagcaugugcauaguc

SEQ ID NO: 982890 - RNA, 19 nt, Artificial Sequence
  Description of Artificial Sequence: Synthetic oligonucleotide
ggaaguguguaccagacaa

SEQ ID NO: 982891 - RNA, 19 nt, Artificial Sequence
  Description of Artificial Sequence: Synthetic oligonucleotide
caccccaagaugauuggcc

SEQ ID NO: 982892 - RNA, 19 nt, Artificial Sequence
  Description of Artificial Sequence: Synthetic oligonucleotide
gacgaauuaucugggauga

SEQ ID NO: 982893 - RNA, 19 nt, Artificial Sequence
  Description of Artificial Sequence: Synthetic oligonucleotide
gauguccugguccggaaac

SEQ ID NO: 982894 - RNA, 19 nt, Artificial Sequence
  Description of Artificial Sequence: Synthetic oligonucleotide
ugcccaaaucagcuggcag

SEQ ID NO: 982895 - RNA, 19 nt, Artificial Sequence
  Description of Artificial Sequence: Synthetic oligonucleotide
ugugcauaguccagaguuc

SEQ ID NO: 982896 - RNA, 19 nt, Artificial Sequence
  Description of Artificial Sequence: Synthetic oligonucleotide
agggucucggacucugugg

SEQ ID NO: 982897 - RNA, 19 nt, Artificial Sequence
  Description of Artificial Sequence: Synthetic oligonucleotide
gacccgggcucuucgagcg

SEQ ID NO: 982898 - RNA, 19 nt, Artificial Sequence
  Description of Artificial Sequence: Synthetic oligonucleotide
gacgguuggggcaaaggag

SEQ ID NO: 982899 - RNA, 19 nt, Artificial Sequence
  Description of Artificial Sequence: Synthetic oligonucleotide
caaucagucaacuguuuga

SEQ ID NO: 982900 - RNA, 19 nt, Artificial Sequence
  Description of Artificial Sequence: Synthetic oligonucleotide
uaccggaaauaaauaaaua

SEQ ID NO: 982901 - RNA, 19 nt, Artificial Sequence
  Description of Artificial Sequence: Synthetic oligonucleotide
cacaaaacuaccaaucagu

SEQ ID NO: 982902 - RNA, 19 nt, Artificial Sequence
  Description of Artificial Sequence: Synthetic oligonucleotide
uucaagagggacgaauuau

SEQ ID NO: 982903 - RNA, 19 nt, Artificial Sequence
  Description of Artificial Sequence: Synthetic oligonucleotide
caacuguuugagacuacag

SEQ ID NO: 982904 - RNA, 19 nt, Artificial Sequence
  Description of Artificial Sequence: Synthetic oligonucleotide
auacuaagugggugcuaac

SEQ ID NO: 982905 - RNA, 19 nt, Artificial Sequence
  Description of Artificial Sequence: Synthetic oligonucleotide
uguacaugccaggaagugu

SEQ ID NO: 982906 - RNA, 19 nt, Artificial Sequence
  Description of Artificial Sequence: Synthetic oligonucleotide
ggacgaauuaucugggaug

SEQ ID NO: 982907 - RNA, 19 nt, Artificial Sequence
  Description of Artificial Sequence: Synthetic oligonucleotide
ccagagaguaaaagaaucc

SEQ ID NO: 982908 - RNA, 19 nt, Artificial Sequence
  Description of Artificial Sequence: Synthetic oligonucleotide
agaugauuggccauguaau

SEQ ID NO: 982909 - RNA, 19 nt, Artificial Sequence
  Description of Artificial Sequence: Synthetic oligonucleotide
aggcccaaagguccacacc

SEQ ID NO: 982910 - RNA, 19 nt, Artificial Sequence
  Description of Artificial Sequence: Synthetic oligonucleotide
aguaccggaaauaaauaaa

SEQ ID NO: 982911 - RNA, 19 nt, Artificial Sequence
  Description of Artificial Sequence: Synthetic oligonucleotide
gagggacgaauuaucuggg

SEQ ID NO: 982912 - RNA, 19 nt, Artificial Sequence
  Description of Artificial Sequence: Synthetic oligonucleotide
acgaguucuaauucaguuu

SEQ ID NO: 982913 - RNA, 19 nt, Artificial Sequence
  Description of Artificial Sequence: Synthetic oligonucleotide
acagucaacaagagacagg

SEQ ID NO: 982914 - RNA, 19 nt, Artificial Sequence
  Description of Artificial Sequence: Synthetic oligonucleotide
gaaugucuauugcacaaua

SEQ ID NO: 982915 - RNA, 19 nt, Artificial Sequence
  Description of Artificial Sequence: Synthetic oligonucleotide
uggaaugaaccgaggcaga

SEQ ID NO: 982916 - RNA, 19 nt, Artificial Sequence
  Description of Artificial Sequence: Synthetic oligonucleotide
uccucguaaugugacauaa

SEQ ID NO: 982917 - RNA, 19 nt, Artificial Sequence
  Description of Artificial Sequence: Synthetic oligonucleotide
accuucccggaguacacag

SEQ ID NO: 982918 - RNA, 19 nt, Artificial Sequence
  Description of Artificial Sequence: Synthetic oligonucleotide
cuuggaggcgcuuguuuac

SEQ ID NO: 982919 - RNA, 19 nt, Artificial Sequence
  Description of Artificial Sequence: Synthetic oligonucleotide
cacuauggggcacccacag

SEQ ID NO: 982920 - RNA, 19 nt, Artificial Sequence
  Description of Artificial Sequence: Synthetic oligonucleotide
uagaaggcgcuaacauggc

SEQ ID NO: 982921 - RNA, 19 nt, Artificial Sequence
  Description of Artificial Sequence: Synthetic oligonucleotide
accguguauauacacuaaa

SEQ ID NO: 982922 - RNA, 19 nt, Artificial Sequence
  Description of Artificial Sequence: Synthetic oligonucleotide
gcuagauguacaugccagg

SEQ ID NO: 982923 - RNA, 19 nt, Artificial Sequence
  Description of Artificial Sequence: Synthetic oligonucleotide
accaccggcgcuucgccgg

SEQ ID NO: 982924 - RNA, 19 nt, Artificial Sequence
  Description of Artificial Sequence: Synthetic oligonucleotide
cagacaagccacaaaacua

SEQ ID NO: 982925 - RNA, 19 nt, Artificial Sequence
  Description of Artificial Sequence: Synthetic oligonucleotide
auaaggaccuuaagaggag

SEQ ID NO: 982926 - RNA, 19 nt, Artificial Sequence
  Description of Artificial Sequence: Synthetic oligonucleotide
cauacauucuuagcaugug

SEQ ID NO: 982927 - RNA, 19 nt, Artificial Sequence
  Description of Artificial Sequence: Synthetic oligonucleotide
aagggguuccgacgucaag

SEQ ID NO: 982928 - RNA, 19 nt, Artificial Sequence
  Description of Artificial Sequence: Synthetic oligonucleotide
aguuccgucucuccagaga

SEQ ID NO: 982929 - RNA, 19 nt, Artificial Sequence
  Description of Artificial Sequence: Synthetic oligonucleotide
agucggagcuucuggguug

SEQ ID NO: 982930 - RNA, 19 nt, Artificial Sequence
  Description of Artificial Sequence: Synthetic oligonucleotide
agcgccucaguaugcuuuc

SEQ ID NO: 982931 - RNA, 19 nt, Artificial Sequence
  Description of Artificial Sequence: Synthetic oligonucleotide
gacgacuuccaggaccucc

SEQ ID NO: 982932 - RNA, 19 nt, Artificial Sequence
  Description of Artificial Sequence: Synthetic oligonucleotide
uugcacaauaccguguaua

SEQ ID NO: 982933 - RNA, 19 nt, Artificial Sequence
  Description of Artificial Sequence: Synthetic oligonucleotide
agaucuuggaggcgcuugu

SEQ ID NO: 982934 - RNA, 19 nt, Artificial Sequence
  Description of Artificial Sequence: Synthetic oligonucleotide
cuaacauggcuagauuguc

SEQ ID NO: 982935 - RNA, 19 nt, Artificial Sequence
  Description of Artificial Sequence: Synthetic oligonucleotide
agcuuguguccggagaguc

SEQ ID NO: 982936 - RNA, 19 nt, Artificial Sequence
  Description of Artificial Sequence: Synthetic oligonucleotide
gagauagcgagaucuccaa

SEQ ID NO: 982937 - RNA, 19 nt, Artificial Sequence
  Description of Artificial Sequence: Synthetic oligonucleotide
gagucccauggccuccucg

SEQ ID NO: 982938 - RNA, 19 nt, Artificial Sequence
  Description of Artificial Sequence: Synthetic oligonucleotide
uaccguguauauacacuaa

SEQ ID NO: 982939 - RNA, 19 nt, Artificial Sequence
  Description of Artificial Sequence: Synthetic oligonucleotide
ucuaccggguccgcgacga

SEQ ID NO: 982940 - RNA, 19 nt, Artificial Sequence
  Description of Artificial Sequence: Synthetic oligonucleotide
agucaacuguuugagacua

SEQ ID NO: 982941 - RNA, 19 nt, Artificial Sequence
  Description of Artificial Sequence: Synthetic oligonucleotide
agucaacaagagacaggcc

SEQ ID NO: 982942 - RNA, 19 nt, Artificial Sequence
  Description of Artificial Sequence: Synthetic oligonucleotide
cuagauguacaugccagga

SEQ ID NO: 982943 - RNA, 19 nt, Artificial Sequence
  Description of Artificial Sequence: Synthetic oligonucleotide
agggguuccgacgucaaga

SEQ ID NO: 982944 - RNA, 19 nt, Artificial Sequence
  Description of Artificial Sequence: Synthetic oligonucleotide
ugggcgacaguuccgucuc

SEQ ID NO: 982945 - RNA, 19 nt, Artificial Sequence
  Description of Artificial Sequence: Synthetic oligonucleotide
aagaucagcccggcaccgg

SEQ ID NO: 982946 - RNA, 19 nt, Artificial Sequence
  Description of Artificial Sequence: Synthetic oligonucleotide
uucuaccggguccgcgacg

SEQ ID NO: 982947 - RNA, 19 nt, Artificial Sequence
  Description of Artificial Sequence: Synthetic oligonucleotide
uguagcgccucaguaugcu

SEQ ID NO: 982948 - RNA, 19 nt, Artificial Sequence
  Description of Artificial Sequence: Synthetic oligonucleotide
acugcggggcgcgaggacg

SEQ ID NO: 982949 - RNA, 19 nt, Artificial Sequence
  Description of Artificial Sequence: Synthetic oligonucleotide
gcccaaaucagcuggcagc

SEQ ID NO: 982950 - RNA, 19 nt, Artificial Sequence
  Description of Artificial Sequence: Synthetic oligonucleotide
cuucccggaguacacagga

SEQ ID NO: 982951 - RNA, 19 nt, Artificial Sequence
  Description of Artificial Sequence: Synthetic oligonucleotide
aagugggugcuaacaggag

SEQ ID NO: 982952 - RNA, 19 nt, Artificial Sequence
  Description of Artificial Sequence: Synthetic oligonucleotide
ggaccuuaagaggagaauc

SEQ ID NO: 982953 - RNA, 19 nt, Artificial Sequence
  Description of Artificial Sequence: Synthetic oligonucleotide
uagcgccucaguaugcuuu

SEQ ID NO: 982954 - RNA, 19 nt, Artificial Sequence
  Description of Artificial Sequence: Synthetic oligonucleotide
aaggaccuuaagaggagaa

SEQ ID NO: 982955 - RNA, 19 nt, Artificial Sequence
  Description of Artificial Sequence: Synthetic oligonucleotide
cgaauuaucugggaugagg

SEQ ID NO: 982956 - RNA, 19 nt, Artificial Sequence
  Description of Artificial Sequence: Synthetic oligonucleotide
uaguaauaagugggagcug

SEQ ID NO: 982957 - RNA, 19 nt, Artificial Sequence
  Description of Artificial Sequence: Synthetic oligonucleotide
cucgucgcugucacugacc

SEQ ID NO: 982958 - RNA, 19 nt, Artificial Sequence
  Description of Artificial Sequence: Synthetic oligonucleotide
cacucauacugagugaaga

SEQ ID NO: 982959 - RNA, 19 nt, Artificial Sequence
  Description of Artificial Sequence: Synthetic oligonucleotide
agaucagcccggcaccgga

SEQ ID NO: 982960 - RNA, 19 nt, Artificial Sequence
  Description of Artificial Sequence: Synthetic oligonucleotide
cucuucgagcgccucggcc

SEQ ID NO: 982961 - RNA, 19 nt, Artificial Sequence
  Description of Artificial Sequence: Synthetic oligonucleotide
caagaucagcccggcaccg

SEQ ID NO: 982962 - RNA, 19 nt, Artificial Sequence
  Description of Artificial Sequence: Synthetic oligonucleotide
gaaccaccggcgcuucgcc

SEQ ID NO: 982963 - RNA, 19 nt, Artificial Sequence
  Description of Artificial Sequence: Synthetic oligonucleotide
gacaggcaaucugacaaga

SEQ ID NO: 982964 - RNA, 19 nt, Artificial Sequence
  Description of Artificial Sequence: Synthetic oligonucleotide
ugacaagaucagcccggca

SEQ ID NO: 982965 - RNA, 19 nt, Artificial Sequence
  Description of Artificial Sequence: Synthetic oligonucleotide
gcggccggcacuucuaccg

SEQ ID NO: 982966 - RNA, 19 nt, Artificial Sequence
  Description of Artificial Sequence: Synthetic oligonucleotide
gaaugaaccgaggcagaga

SEQ ID NO: 982967 - RNA, 19 nt, Artificial Sequence
  Description of Artificial Sequence: Synthetic oligonucleotide
guaccggaaauaaauaaau

SEQ ID NO: 982968 - RNA, 19 nt, Artificial Sequence
  Description of Artificial Sequence: Synthetic oligonucleotide
gugacgguuggggcaaagg

SEQ ID NO: 982969 - RNA, 19 nt, Artificial Sequence
  Description of Artificial Sequence: Synthetic oligonucleotide
agggacgaauuaucuggga

SEQ ID NO: 982970 - RNA, 19 nt, Artificial Sequence
  Description of Artificial Sequence: Synthetic oligonucleotide
guuccgacgucaagacagg

SEQ ID NO: 982971 - RNA, 19 nt, Artificial Sequence
  Description of Artificial Sequence: Synthetic oligonucleotide
acaauaccguguauauaca

SEQ ID NO: 982972 - RNA, 19 nt, Artificial Sequence
  Description of Artificial Sequence: Synthetic oligonucleotide
cuugucaacaccacacaau

SEQ ID NO: 982973 - RNA, 19 nt, Artificial Sequence
  Description of Artificial Sequence: Synthetic oligonucleotide
cuguagcgccucaguaugc

SEQ ID NO: 982974 - RNA, 19 nt, Artificial Sequence
  Description of Artificial Sequence: Synthetic oligonucleotide
cugacaagaucagcccggc

SEQ ID NO: 982975 - RNA, 19 nt, Artificial Sequence
  Description of Artificial Sequence: Synthetic oligonucleotide
gucuauugcacaauaccgu

SEQ ID NO: 982976 - RNA, 19 nt, Artificial Sequence
  Description of Artificial Sequence: Synthetic oligonucleotide
cucguccgccccuucacug

SEQ ID NO: 982977 - RNA, 19 nt, Artificial Sequence
  Description of Artificial Sequence: Synthetic oligonucleotide
ggugaagggucucggacuc

SEQ ID NO: 982978 - RNA, 19 nt, Artificial Sequence
  Description of Artificial Sequence: Synthetic oligonucleotide
aggcgcuuguuuacuuccc

SEQ ID NO: 982979 - RNA, 19 nt, Artificial Sequence
  Description of Artificial Sequence: Synthetic oligonucleotide
agugggcgacaguuccguc

SEQ ID NO: 982980 - RNA, 19 nt, Artificial Sequence
  Description of Artificial Sequence: Synthetic oligonucleotide
guggccucugaagaacuug

SEQ ID NO: 982981 - RNA, 19 nt, Artificial Sequence
  Description of Artificial Sequence: Synthetic oligonucleotide
ucggacucuguggcaaggc

SEQ ID NO: 982982 - RNA, 19 nt, Artificial Sequence
  Description of Artificial Sequence: Synthetic oligonucleotide
uuggaggcgcuuguuuacu

SEQ ID NO: 982983 - RNA, 19 nt, Artificial Sequence
  Description of Artificial Sequence: Synthetic oligonucleotide
agauguccugguccggaaa

SEQ ID NO: 982984 - RNA, 19 nt, Artificial Sequence
  Description of Artificial Sequence: Synthetic oligonucleotide
ucgccgggauccagcagcc

SEQ ID NO: 982985 - RNA, 19 nt, Artificial Sequence
  Description of Artificial Sequence: Synthetic oligonucleotide
agguacgaggagcucccgu

SEQ ID NO: 982986 - RNA, 19 nt, Artificial Sequence
  Description of Artificial Sequence: Synthetic oligonucleotide
gguccuaaggguggcagug

SEQ ID NO: 982987 - RNA, 19 nt, Artificial Sequence
  Description of Artificial Sequence: Synthetic oligonucleotide
ucgcugucacugaccaagu

SEQ ID NO: 982988 - RNA, 19 nt, Artificial Sequence
  Description of Artificial Sequence: Synthetic oligonucleotide
ugucagccacuccaagcuu

SEQ ID NO: 982989 - RNA, 19 nt, Artificial Sequence
  Description of Artificial Sequence: Synthetic oligonucleotide
ggagauagcgagaucucca

SEQ ID NO: 982990 - RNA, 19 nt, Artificial Sequence
  Description of Artificial Sequence: Synthetic oligonucleotide
cuccggaccaagguacgag

SEQ ID NO: 982991 - RNA, 19 nt, Artificial Sequence
  Description of Artificial Sequence: Synthetic oligonucleotide
agguccuaaggguggcagu

SEQ ID NO: 982992 - RNA, 19 nt, Artificial Sequence
  Description of Artificial Sequence: Synthetic oligonucleotide
cuucuaccggguccgcgac

SEQ ID NO: 982993 - RNA, 19 nt, Artificial Sequence
  Description of Artificial Sequence: Synthetic oligonucleotide
aggaccuuaagaggagaau

SEQ ID NO: 982994 - RNA, 19 nt, Artificial Sequence
  Description of Artificial Sequence: Synthetic oligonucleotide
ucguccgccccuucacugu

SEQ ID NO: 982995 - RNA, 19 nt, Artificial Sequence
  Description of Artificial Sequence: Synthetic oligonucleotide
uuccgacgucaagacaggc

SEQ ID NO: 982996 - RNA, 19 nt, Artificial Sequence
  Description of Artificial Sequence: Synthetic oligonucleotide
gagggugaagggucucgga

SEQ ID NO: 982997 - RNA, 19 nt, Artificial Sequence
  Description of Artificial Sequence: Synthetic oligonucleotide
acgacuuccaggaccuccu

SEQ ID NO: 982998 - RNA, 19 nt, Artificial Sequence
  Description of Artificial Sequence: Synthetic oligonucleotide
ccucaacuucuguagcgcc

SEQ ID NO: 982999 - RNA, 19 nt, Artificial Sequence
  Description of Artificial Sequence: Synthetic oligonucleotide
acgaauuaucugggaugag

SEQ ID NO: 983000 - RNA, 19 nt, Artificial Sequence
  Description of Artificial Sequence: Synthetic oligonucleotide
ggcccaaagguccacaccu

SEQ ID NO: 983001 - RNA, 19 nt, Artificial Sequence
  Description of Artificial Sequence: Synthetic oligonucleotide
cacuucuaccggguccgcg

SEQ ID NO: 983002 - RNA, 19 nt, Artificial Sequence
  Description of Artificial Sequence: Synthetic oligonucleotide
gggguuccgacgucaagac

SEQ ID NO: 983003 - RNA, 19 nt, Artificial Sequence
  Description of Artificial Sequence: Synthetic oligonucleotide
augccacuauggggcaccc

SEQ ID NO: 983004 - RNA, 19 nt, Artificial Sequence
  Description of Artificial Sequence: Synthetic oligonucleotide
aggacgccggccacgggcg

SEQ ID NO: 983005 - RNA, 19 nt, Artificial Sequence
  Description of Artificial Sequence: Synthetic oligonucleotide
guaccagacaagccacaaa

SEQ ID NO: 983006 - RNA, 19 nt, Artificial Sequence
  Description of Artificial Sequence: Synthetic oligonucleotide
ggcucuucgagcgccucgg

SEQ ID NO: 983007 - RNA, 19 nt, Artificial Sequence
  Description of Artificial Sequence: Synthetic oligonucleotide
caguuccgucucuccagag

SEQ ID NO: 983008 - RNA, 19 nt, Artificial Sequence
  Description of Artificial Sequence: Synthetic oligonucleotide
guccggagagucccauggc

SEQ ID NO: 983009 - RNA, 19 nt, Artificial Sequence
  Description of Artificial Sequence: Synthetic oligonucleotide
gguacgaggagcucccgua

SEQ ID NO: 983010 - RNA, 19 nt, Artificial Sequence
  Description of Artificial Sequence: Synthetic oligonucleotide
cugcggggcgcgaggacgc

SEQ ID NO: 983011 - RNA, 19 nt, Artificial Sequence
  Description of Artificial Sequence: Synthetic oligonucleotide
uaccggguccgcgacgacu

SEQ ID NO: 983012 - RNA, 19 nt, Artificial Sequence
  Description of Artificial Sequence: Synthetic oligonucleotide
accgaggcagagacugcgg

SEQ ID NO: 983013 - RNA, 19 nt, Artificial Sequence
  Description of Artificial Sequence: Synthetic oligonucleotide
ugccagaaucugucauauc

SEQ ID NO: 983014 - RNA, 19 nt, Artificial Sequence
  Description of Artificial Sequence: Synthetic oligonucleotide
agcucccguaggccccucg

SEQ ID NO: 983015 - RNA, 19 nt, Artificial Sequence
  Description of Artificial Sequence: Synthetic oligonucleotide
ccucguaaugugacauaag

SEQ ID NO: 983016 - RNA, 19 nt, Artificial Sequence
  Description of Artificial Sequence: Synthetic oligonucleotide
gaccaagguacgaggagcu

SEQ ID NO: 983017 - RNA, 19 nt, Artificial Sequence
  Description of Artificial Sequence: Synthetic oligonucleotide
auauacuaagugggugcua

SEQ ID NO: 983018 - RNA, 19 nt, Artificial Sequence
  Description of Artificial Sequence: Synthetic oligonucleotide
acaggcaaucugacaagau

SEQ ID NO: 983019 - RNA, 19 nt, Artificial Sequence
  Description of Artificial Sequence: Synthetic oligonucleotide
gcaaauauacuaagugggu

SEQ ID NO: 983020 - RNA, 19 nt, Artificial Sequence
  Description of Artificial Sequence: Synthetic oligonucleotide
gugggcgacaguuccgucu

SEQ ID NO: 983021 - RNA, 19 nt, Artificial Sequence
  Description of Artificial Sequence: Synthetic oligonucleotide
ccguguauauacacuaaaa

SEQ ID NO: 983022 - RNA, 19 nt, Artificial Sequence
  Description of Artificial Sequence: Synthetic oligonucleotide
gggcacccacaguagauca

SEQ ID NO: 983023 - RNA, 19 nt, Artificial Sequence
  Description of Artificial Sequence: Synthetic oligonucleotide
cagaucuagaaggcgcuaa

SEQ ID NO: 983024 - RNA, 19 nt, Artificial Sequence
  Description of Artificial Sequence: Synthetic oligonucleotide
ccgaaaguuuuguuccauc

SEQ ID NO: 983025 - RNA, 19 nt, Artificial Sequence
  Description of Artificial Sequence: Synthetic oligonucleotide
cgcgacgacuuccaggacc

SEQ ID NO: 983026 - RNA, 19 nt, Artificial Sequence
  Description of Artificial Sequence: Synthetic oligonucleotide
guguccggagagucccaug

SEQ ID NO: 983027 - RNA, 19 nt, Artificial Sequence
  Description of Artificial Sequence: Synthetic oligonucleotide
aaguuucaagagggacgaa

SEQ ID NO: 983028 - RNA, 19 nt, Artificial Sequence
  Description of Artificial Sequence: Synthetic oligonucleotide
cuucgccgggauccagcag

SEQ ID NO: 983029 - RNA, 19 nt, Artificial Sequence
  Description of Artificial Sequence: Synthetic oligonucleotide
ccgacgucaagacaggcaa

SEQ ID NO: 983030 - RNA, 19 nt, Artificial Sequence
  Description of Artificial Sequence: Synthetic oligonucleotide
uuguaccuucccggaguac

SEQ ID NO: 983031 - RNA, 19 nt, Artificial Sequence
  Description of Artificial Sequence: Synthetic oligonucleotide
gagucggagcuucuggguu

SEQ ID NO: 983032 - RNA, 19 nt, Artificial Sequence
  Description of Artificial Sequence: Synthetic oligonucleotide
ccuucccggaguacacagg

SEQ ID NO: 983033 - RNA, 19 nt, Artificial Sequence
  Description of Artificial Sequence: Synthetic oligonucleotide
guaggccccucguccgccc

SEQ ID NO: 983034 - RNA, 19 nt, Artificial Sequence
  Description of Artificial Sequence: Synthetic oligonucleotide
gggacgaauuaucugggau

SEQ ID NO: 983035 - RNA, 19 nt, Artificial Sequence
  Description of Artificial Sequence: Synthetic oligonucleotide
ggaggacugccagaaucug

SEQ ID NO: 983036 - RNA, 19 nt, Artificial Sequence
  Description of Artificial Sequence: Synthetic oligonucleotide
cugaagggguuccgacguc

SEQ ID NO: 983037 - RNA, 19 nt, Artificial Sequence
  Description of Artificial Sequence: Synthetic oligonucleotide
gccccaaacuucaaugaga

SEQ ID NO: 983038 - RNA, 19 nt, Artificial Sequence
  Description of Artificial Sequence: Synthetic oligonucleotide
gucaacuguuugagacuac

SEQ ID NO: 983039 - RNA, 19 nt, Artificial Sequence
  Description of Artificial Sequence: Synthetic oligonucleotide
cguguauauacacuaaaau

SEQ ID NO: 983040 - RNA, 19 nt, Artificial Sequence
  Description of Artificial Sequence: Synthetic oligonucleotide
gcagugggcgacaguuccg

SEQ ID NO: 983041 - RNA, 19 nt, Artificial Sequence
  Description of Artificial Sequence: Synthetic oligonucleotide
gcgcuuguuuacuucccuc

SEQ ID NO: 983042 - RNA, 19 nt, Artificial Sequence
  Description of Artificial Sequence: Synthetic oligonucleotide
ggcacccacaguagaucag

SEQ ID NO: 983043 - RNA, 19 nt, Artificial Sequence
  Description of Artificial Sequence: Synthetic oligonucleotide
cuccucguaaugugacaua

SEQ ID NO: 983044 - RNA, 19 nt, Artificial Sequence
  Description of Artificial Sequence: Synthetic oligonucleotide
gcuucgccgggauccagca

SEQ ID NO: 983045 - RNA, 19 nt, Artificial Sequence
  Description of Artificial Sequence: Synthetic oligonucleotide
gcgacccgggcucuucgag

SEQ ID NO: 983046 - RNA, 19 nt, Artificial Sequence
  Description of Artificial Sequence: Synthetic oligonucleotide
agcccggcaccggaucuug

SEQ ID NO: 983047 - RNA, 19 nt, Artificial Sequence
  Description of Artificial Sequence: Synthetic oligonucleotide
ggccuccucguaaugugac

SEQ ID NO: 983048 - RNA, 19 nt, Artificial Sequence
  Description of Artificial Sequence: Synthetic oligonucleotide
cacaagcacugugucugga

SEQ ID NO: 983049 - RNA, 19 nt, Artificial Sequence
  Description of Artificial Sequence: Synthetic oligonucleotide
cggaccaagguacgaggag

SEQ ID NO: 983050 - RNA, 19 nt, Artificial Sequence
  Description of Artificial Sequence: Synthetic oligonucleotide
ugccacuauggggcaccca

SEQ ID NO: 983051 - RNA, 19 nt, Artificial Sequence
  Description of Artificial Sequence: Synthetic oligonucleotide
ccccaaacuucaaugagau

SEQ ID NO: 983052 - RNA, 19 nt, Artificial Sequence
  Description of Artificial Sequence: Synthetic oligonucleotide
ggcgcuaacauggcuagau

SEQ ID NO: 983053 - RNA, 19 nt, Artificial Sequence
  Description of Artificial Sequence: Synthetic oligonucleotide
gcccgaaaguuuuguucca

SEQ ID NO: 983054 - RNA, 19 nt, Artificial Sequence
  Description of Artificial Sequence: Synthetic oligonucleotide
ggugacgguuggggcaaag

SEQ ID NO: 983055 - RNA, 19 nt, Artificial Sequence
  Description of Artificial Sequence: Synthetic oligonucleotide
ggcuagauugucacucaua

SEQ ID NO: 983056 - RNA, 19 nt, Artificial Sequence
  Description of Artificial Sequence: Synthetic oligonucleotide
gguccgcgacgacuuccag

SEQ ID NO: 983057 - RNA, 19 nt, Artificial Sequence
  Description of Artificial Sequence: Synthetic oligonucleotide
cuucagccccaaacuucaa

SEQ ID NO: 983058 - RNA, 19 nt, Artificial Sequence
  Description of Artificial Sequence: Synthetic oligonucleotide
guaauaagugggagcuguu

SEQ ID NO: 983059 - RNA, 19 nt, Artificial Sequence
  Description of Artificial Sequence: Synthetic oligonucleotide
ggcggccggcacuucuacc

SEQ ID NO: 983060 - RNA, 19 nt, Artificial Sequence
  Description of Artificial Sequence: Synthetic oligonucleotide
uucgagcgccucggccagc

SEQ ID NO: 983061 - RNA, 19 nt, Artificial Sequence
  Description of Artificial Sequence: Synthetic oligonucleotide
ccggaccaagguacgagga

SEQ ID NO: 983062 - RNA, 19 nt, Artificial Sequence
  Description of Artificial Sequence: Synthetic oligonucleotide
ccacuccaagcuuuaaggu

SEQ ID NO: 983063 - RNA, 19 nt, Artificial Sequence
  Description of Artificial Sequence: Synthetic oligonucleotide
ccggaguacacaggaacca

SEQ ID NO: 983064 - RNA, 19 nt, Artificial Sequence
  Description of Artificial Sequence: Synthetic oligonucleotide
ggcgcuuguuuacuucccu

SEQ ID NO: 983065 - RNA, 19 nt, Artificial Sequence
  Description of Artificial Sequence: Synthetic oligonucleotide
ggcgacaguuccgucucuc

SEQ ID NO: 983066 - RNA, 19 nt, Artificial Sequence
  Description of Artificial Sequence: Synthetic oligonucleotide
cgacccgggcucuucgagc

SEQ ID NO: 983067 - RNA, 19 nt, Artificial Sequence
  Description of Artificial Sequence: Synthetic oligonucleotide
cuaccggguccgcgacgac

SEQ ID NO: 983068 - RNA, 19 nt, Artificial Sequence
  Description of Artificial Sequence: Synthetic oligonucleotide
gcacaauaccguguauaua

SEQ ID NO: 983069 - RNA, 19 nt, Artificial Sequence
  Description of Artificial Sequence: Synthetic oligonucleotide
caguaugcuuucugcuuuu

SEQ ID NO: 983070 - RNA, 19 nt, Artificial Sequence
  Description of Artificial Sequence: Synthetic oligonucleotide
aggcgcuaacauggcuaga

SEQ ID NO: 983071 - RNA, 19 nt, Artificial Sequence
  Description of Artificial Sequence: Synthetic oligonucleotide
cggcgcuucgccgggaucc

SEQ ID NO: 983072 - RNA, 19 nt, Artificial Sequence
  Description of Artificial Sequence: Synthetic oligonucleotide
gcgacgacuuccaggaccu

SEQ ID NO: 983073 - RNA, 19 nt, Artificial Sequence
  Description of Artificial Sequence: Synthetic oligonucleotide
guagcgccucaguaugcuu

SEQ ID NO: 983074 - RNA, 19 nt, Artificial Sequence
  Description of Artificial Sequence: Synthetic oligonucleotide
cagugggcgacaguuccgu

SEQ ID NO: 983075 - RNA, 19 nt, Artificial Sequence
  Description of Artificial Sequence: Synthetic oligonucleotide
cccgggcucuucgagcgcc

SEQ ID NO: 983076 - RNA, 19 nt, Artificial Sequence
  Description of Artificial Sequence: Synthetic oligonucleotide
ggcaccggaucuugagggu

SEQ ID NO: 983077 - RNA, 19 nt, Artificial Sequence
  Description of Artificial Sequence: Synthetic oligonucleotide
ggguccgcgacgacuucca

SEQ ID NO: 983078 - RNA, 19 nt, Artificial Sequence
  Description of Artificial Sequence: Synthetic oligonucleotide
gaucagcccggcaccggau

SEQ ID NO: 983079 - RNA, 19 nt, Artificial Sequence
  Description of Artificial Sequence: Synthetic oligonucleotide
gccgccuccggaccaaggu

SEQ ID NO: 983080 - RNA, 19 nt, Artificial Sequence
  Description of Artificial Sequence: Synthetic oligonucleotide
gcggggcgcgaggacgccg

SEQ ID NO: 983081 - RNA, 19 nt, Artificial Sequence
  Description of Artificial Sequence: Synthetic oligonucleotide
cguaggccccucguccgcc

SEQ ID NO: 983082 - RNA, 19 nt, Artificial Sequence
  Description of Artificial Sequence: Synthetic oligonucleotide
gcucccguaggccccucgu

SEQ ID NO: 983083 - RNA, 19 nt, Artificial Sequence
  Description of Artificial Sequence: Synthetic oligonucleotide
ccugaaaguagggcauccu

SEQ ID NO: 983084 - RNA, 19 nt, Artificial Sequence
  Description of Artificial Sequence: Synthetic oligonucleotide
gcgcuaacauggcuagauu

SEQ ID NO: 983085 - RNA, 19 nt, Artificial Sequence
  Description of Artificial Sequence: Synthetic oligonucleotide
ggcgcuucgccgggaucca

SEQ ID NO: 983086 - RNA, 19 nt, Artificial Sequence
  Description of Artificial Sequence: Synthetic oligonucleotide
ggggcgcgaggacgccggc

SEQ ID NO: 983087 - RNA, 19 nt, Artificial Sequence
  Description of Artificial Sequence: Synthetic oligonucleotide
gcgcuucgccgggauccag

SEQ ID NO: 983088 - RNA, 19 nt, Artificial Sequence
  Description of Artificial Sequence: Synthetic oligonucleotide
ggggacaccccaagaugau

SEQ ID NO: 983089 - RNA, 19 nt, Artificial Sequence
  Description of Artificial Sequence: Synthetic oligonucleotide
ggacgccggccacgggcga

SEQ ID NO: 983090 - RNA, 19 nt, Artificial Sequence
  Description of Artificial Sequence: Synthetic oligonucleotide
ccgccuccggaccaaggua

SEQ ID NO: 983091 - RNA, 19 nt, Artificial Sequence
  Description of Artificial Sequence: Synthetic oligonucleotide
ccccucguccgccccuuca

SEQ ID NO: 983092 - RNA, 19 nt, Artificial Sequence
  Description of Artificial Sequence: Synthetic oligonucleotide
cgaggacgccggccacggg

SEQ ID NO: 983093 - RNA, 19 nt, Artificial Sequence
  Description of Artificial Sequence: Synthetic oligonucleotide
cccgaaaguuuuguuccau

SEQ ID NO: 983094 - RNA, 19 nt, Artificial Sequence
  Description of Artificial Sequence: Synthetic oligonucleotide
acgggcgacccgggcucuu

SEQ ID NO: 983095 - RNA, 19 nt, Artificial Sequence
  Description of Artificial Sequence: Synthetic oligonucleotide
ccucguccgccccuucacu

SEQ ID NO: 983096 - RNA, 19 nt, Artificial Sequence
  Description of Artificial Sequence: Synthetic oligonucleotide
gggcgacaguuccgucucu

SEQ ID NO: 983097 - RNA, 19 nt, Artificial Sequence
  Description of Artificial Sequence: Synthetic oligonucleotide
gcgccucaguaugcuuucu

SEQ ID NO: 983098 - RNA, 19 nt, Artificial Sequence
  Description of Artificial Sequence: Synthetic oligonucleotide
cacgggcgacccgggcucu

SEQ ID NO: 983099 - RNA, 19 nt, Artificial Sequence
  Description of Artificial Sequence: Synthetic oligonucleotide
cagcccggcaccggaucuu

SEQ ID NO: 983100 - RNA, 19 nt, Artificial Sequence
  Description of Artificial Sequence: Synthetic oligonucleotide
cgggcgacccgggcucuuc

SEQ ID NO: 983101 - RNA, 19 nt, Artificial Sequence
  Description of Artificial Sequence: Synthetic oligonucleotide
ccgggcggccggcacuucu

SEQ ID NO: 983102 - RNA, 19 nt, Artificial Sequence
  Description of Artificial Sequence: Synthetic oligonucleotide
cgacgacuuccaggaccuc

SEQ ID NO: 983103 - RNA, 19 nt, Artificial Sequence
  Description of Artificial Sequence: Synthetic oligonucleotide
gcacccggagucggagcuu

SEQ ID NO: 983104 - RNA, 19 nt, Artificial Sequence
  Description of Artificial Sequence: Synthetic oligonucleotide
ccgccccuucacuguuacu

SEQ ID NO: 983105 - RNA, 19 nt, Artificial Sequence
  Description of Artificial Sequence: Synthetic oligonucleotide
gccgggcggccggcacuuc

SEQ ID NO: 983106 - RNA, 19 nt, Artificial Sequence
  Description of Artificial Sequence: Synthetic oligonucleotide
aauaacgugcuuuuaaaag

SEQ ID NO: 983107 - RNA, 19 nt, Artificial Sequence
  Description of Artificial Sequence: Synthetic oligonucleotide
uuaauuaaauuacacgugu

SEQ ID NO: 983108 - RNA, 19 nt, Artificial Sequence
  Description of Artificial Sequence: Synthetic oligonucleotide
uuucuuacuggccagagca

SEQ ID NO: 983109 - RNA, 19 nt, Artificial Sequence
  Description of Artificial Sequence: Synthetic oligonucleotide
aauuacacguguuauaaaa

SEQ ID NO: 983110 - RNA, 19 nt, Artificial Sequence
  Description of Artificial Sequence: Synthetic oligonucleotide
aaaacgguaacgcuggaca

SEQ ID NO: 983111 - RNA, 19 nt, Artificial Sequence
  Description of Artificial Sequence: Synthetic oligonucleotide
uguaccuaaacccaccacc

SEQ ID NO: 983112 - RNA, 19 nt, Artificial Sequence
  Description of Artificial Sequence: Synthetic oligonucleotide
ucucgcgugaccuagaacc

SEQ ID NO: 983113 - RNA, 19 nt, Artificial Sequence
  Description of Artificial Sequence: Synthetic oligonucleotide
uagauuuuaccaugaagcg

SEQ ID NO: 983114 - RNA, 19 nt, Artificial Sequence
  Description of Artificial Sequence: Synthetic oligonucleotide
gagagagagagagagaggg

SEQ ID NO: 983115 - RNA, 19 nt, Artificial Sequence
  Description of Artificial Sequence: Synthetic oligonucleotide
cuuauuuggagacauuuug

SEQ ID NO: 983116 - RNA, 19 nt, Artificial Sequence
  Description of Artificial Sequence: Synthetic oligonucleotide
uuggauuuaacugaagcug

SEQ ID NO: 983117 - RNA, 19 nt, Artificial Sequence
  Description of Artificial Sequence: Synthetic oligonucleotide
uuuuaggacagcugaaggc

SEQ ID NO: 983118 - RNA, 19 nt, Artificial Sequence
  Description of Artificial Sequence: Synthetic oligonucleotide
aagaccuccacugaacagg

SEQ ID NO: 983119 - RNA, 19 nt, Artificial Sequence
  Description of Artificial Sequence: Synthetic oligonucleotide
agugggguuagcaacagcc

SEQ ID NO: 983120 - RNA, 19 nt, Artificial Sequence
  Description of Artificial Sequence: Synthetic oligonucleotide
uuugcucaugcaaagagaa

SEQ ID NO: 983121 - RNA, 19 nt, Artificial Sequence
  Description of Artificial Sequence: Synthetic oligonucleotide
auaacgugcuuuuaaaagu

SEQ ID NO: 983122 - RNA, 19 nt, Artificial Sequence
  Description of Artificial Sequence: Synthetic oligonucleotide
gagagagagagagagagag

SEQ ID NO: 983123 - RNA, 19 nt, Artificial Sequence
  Description of Artificial Sequence: Synthetic oligonucleotide
ucuuagaugaaugggaaac

SEQ ID NO: 983124 - RNA, 19 nt, Artificial Sequence
  Description of Artificial Sequence: Synthetic oligonucleotide
gaucugaaggaugaggagg

SEQ ID NO: 983125 - RNA, 19 nt, Artificial Sequence
  Description of Artificial Sequence: Synthetic oligonucleotide
ugaguagaaugacucuugg

SEQ ID NO: 983126 - RNA, 19 nt, Artificial Sequence
  Description of Artificial Sequence: Synthetic oligonucleotide
aaaaggguacagcagaguu

SEQ ID NO: 983127 - RNA, 19 nt, Artificial Sequence
  Description of Artificial Sequence: Synthetic oligonucleotide
aaauaacgugcuuuuaaaa

SEQ ID NO: 983128 - RNA, 19 nt, Artificial Sequence
  Description of Artificial Sequence: Synthetic oligonucleotide
agaucuguucuucugaaga

SEQ ID NO: 983129 - RNA, 19 nt, Artificial Sequence
  Description of Artificial Sequence: Synthetic oligonucleotide
uuuaggacagcugaaggca

SEQ ID NO: 983130 - RNA, 19 nt, Artificial Sequence
  Description of Artificial Sequence: Synthetic oligonucleotide
uguggaacugaguugcugc

SEQ ID NO: 983131 - RNA, 19 nt, Artificial Sequence
  Description of Artificial Sequence: Synthetic oligonucleotide
uuuacagucgggaccauaa

SEQ ID NO: 983132 - RNA, 19 nt, Artificial Sequence
  Description of Artificial Sequence: Synthetic oligonucleotide
acaauuugcucaugcaaag

SEQ ID NO: 983133 - RNA, 19 nt, Artificial Sequence
  Description of Artificial Sequence: Synthetic oligonucleotide
uuucuuagaugaaugggaa

SEQ ID NO: 983134 - RNA, 19 nt, Artificial Sequence
  Description of Artificial Sequence: Synthetic oligonucleotide
cugaacaggagacaccacg

SEQ ID NO: 983135 - RNA, 19 nt, Artificial Sequence
  Description of Artificial Sequence: Synthetic oligonucleotide
cauauuacagaguugugga

SEQ ID NO: 983136 - RNA, 19 nt, Artificial Sequence
  Description of Artificial Sequence: Synthetic oligonucleotide
gagagggagagagagagag

SEQ ID NO: 983137 - RNA, 19 nt, Artificial Sequence
  Description of Artificial Sequence: Synthetic oligonucleotide
agauuuuaccaugaagcgg

SEQ ID NO: 983138 - RNA, 19 nt, Artificial Sequence
  Description of Artificial Sequence: Synthetic oligonucleotide
ugcaucuuaaucucugugu

SEQ ID NO: 983139 - RNA, 19 nt, Artificial Sequence
  Description of Artificial Sequence: Synthetic oligonucleotide
gagggagagagagagagag

SEQ ID NO: 983140 - RNA, 19 nt, Artificial Sequence
  Description of Artificial Sequence: Synthetic oligonucleotide
acguuuuccagaguuuucc

SEQ ID NO: 983141 - RNA, 19 nt, Artificial Sequence
  Description of Artificial Sequence: Synthetic oligonucleotide
acuucuuacccucaacaug

SEQ ID NO: 983142 - RNA, 19 nt, Artificial Sequence
  Description of Artificial Sequence: Synthetic oligonucleotide
gaugaggugcaucgggacg

SEQ ID NO: 983143 - RNA, 19 nt, Artificial Sequence
  Description of Artificial Sequence: Synthetic oligonucleotide
ucgggaccauaaaauaacg

SEQ ID NO: 983144 - RNA, 19 nt, Artificial Sequence
  Description of Artificial Sequence: Synthetic oligonucleotide
cuuacucuguagaacggcc

SEQ ID NO: 983145 - RNA, 19 nt, Artificial Sequence
  Description of Artificial Sequence: Synthetic oligonucleotide
agucucuugggcucgcccc

SEQ ID NO: 983146 - RNA, 19 nt, Artificial Sequence
  Description of Artificial Sequence: Synthetic oligonucleotide
uuugcuugacagcugagua

SEQ ID NO: 983147 - RNA, 19 nt, Artificial Sequence
  Description of Artificial Sequence: Synthetic oligonucleotide
aaaugugcgaggauaccuc

SEQ ID NO: 983148 - RNA, 19 nt, Artificial Sequence
  Description of Artificial Sequence: Synthetic oligonucleotide
auuaaauuacacguguuau

SEQ ID NO: 983149 - RNA, 19 nt, Artificial Sequence
  Description of Artificial Sequence: Synthetic oligonucleotide
ugaacaggaaaacgguaac

SEQ ID NO: 983150 - RNA, 19 nt, Artificial Sequence
  Description of Artificial Sequence: Synthetic oligonucleotide
ucggaaguguccuucaggu

SEQ ID NO: 983151 - RNA, 19 nt, Artificial Sequence
  Description of Artificial Sequence: Synthetic oligonucleotide
agcgcacuuagcuugagcu

SEQ ID NO: 983152 - RNA, 19 nt, Artificial Sequence
  Description of Artificial Sequence: Synthetic oligonucleotide
auguaugugaacucccugu

SEQ ID NO: 983153 - RNA, 19 nt, Artificial Sequence
  Description of Artificial Sequence: Synthetic oligonucleotide
gaacaggaaaacgguaacg

SEQ ID NO: 983154 - RNA, 19 nt, Artificial Sequence
  Description of Artificial Sequence: Synthetic oligonucleotide
gauuuuaccaugaagcggu

SEQ ID NO: 983155 - RNA, 19 nt, Artificial Sequence
  Description of Artificial Sequence: Synthetic oligonucleotide
uuugccgaguucagcauug

SEQ ID NO: 983156 - RNA, 19 nt, Artificial Sequence
  Description of Artificial Sequence: Synthetic oligonucleotide
aggagagggagagagagag

SEQ ID NO: 983157 - RNA, 19 nt, Artificial Sequence
  Description of Artificial Sequence: Synthetic oligonucleotide
uuaggacagcugaaggcag

SEQ ID NO: 983158 - RNA, 19 nt, Artificial Sequence
  Description of Artificial Sequence: Synthetic oligonucleotide
uucuucgcacggcagauac

SEQ ID NO: 983159 - RNA, 19 nt, Artificial Sequence
  Description of Artificial Sequence: Synthetic oligonucleotide
ugacguaaggggcugcuga

SEQ ID NO: 983160 - RNA, 19 nt, Artificial Sequence
  Description of Artificial Sequence: Synthetic oligonucleotide
cucacgugcagguuucugg

SEQ ID NO: 983161 - RNA, 19 nt, Artificial Sequence
  Description of Artificial Sequence: Synthetic oligonucleotide
agagagagagagggaaucc

SEQ ID NO: 983162 - RNA, 19 nt, Artificial Sequence
  Description of Artificial Sequence: Synthetic oligonucleotide
cuuacccucaacaugagua

SEQ ID NO: 983163 - RNA, 19 nt, Artificial Sequence
  Description of Artificial Sequence: Synthetic oligonucleotide
gcaaggauuaacugcagag

SEQ ID NO: 983164 - RNA, 19 nt, Artificial Sequence
  Description of Artificial Sequence: Synthetic oligonucleotide
cuuaccucaaguccuucag

SEQ ID NO: 983165 - RNA, 19 nt, Artificial Sequence
  Description of Artificial Sequence: Synthetic oligonucleotide
ugcgaggauaccucggaag

SEQ ID NO: 983166 - RNA, 19 nt, Artificial Sequence
  Description of Artificial Sequence: Synthetic oligonucleotide
aggaaaacgguaacgcugg

SEQ ID NO: 983167 - RNA, 19 nt, Artificial Sequence
  Description of Artificial Sequence: Synthetic oligonucleotide
cuucagcgcacuuagcuug

SEQ ID NO: 983168 - RNA, 19 nt, Artificial Sequence
  Description of Artificial Sequence: Synthetic oligonucleotide
cuuuuccuggaccagucag

SEQ ID NO: 983169 - RNA, 19 nt, Artificial Sequence
  Description of Artificial Sequence: Synthetic oligonucleotide
auugucuggugacguaagg

SEQ ID NO: 983170 - RNA, 19 nt, Artificial Sequence
  Description of Artificial Sequence: Synthetic oligonucleotide
uucuuauaggacuggaguu

SEQ ID NO: 983171 - RNA, 19 nt, Artificial Sequence
  Description of Artificial Sequence: Synthetic oligonucleotide
cauuuugccgaguucagca

SEQ ID NO: 983172 - RNA, 19 nt, Artificial Sequence
  Description of Artificial Sequence: Synthetic oligonucleotide
ucuuauaggacuggaguuc

SEQ ID NO: 983173 - RNA, 19 nt, Artificial Sequence
  Description of Artificial Sequence: Synthetic oligonucleotide
uacagucgggaccauaaaa

SEQ ID NO: 983174 - RNA, 19 nt, Artificial Sequence
  Description of Artificial Sequence: Synthetic oligonucleotide
agcaacguuuuccagaguu

SEQ ID NO: 983175 - RNA, 19 nt, Artificial Sequence
  Description of Artificial Sequence: Synthetic oligonucleotide
aaggguacagcagaguuua

SEQ ID NO: 983176 - RNA, 19 nt, Artificial Sequence
  Description of Artificial Sequence: Synthetic oligonucleotide
aaucgcuccgcacuuuuau

SEQ ID NO: 983177 - RNA, 19 nt, Artificial Sequence
  Description of Artificial Sequence: Synthetic oligonucleotide
gaguagaaugacucuuggc

SEQ ID NO: 983178 - RNA, 19 nt, Artificial Sequence
  Description of Artificial Sequence: Synthetic oligonucleotide
gaagaccuccacugaacag

SEQ ID NO: 983179 - RNA, 19 nt, Artificial Sequence
  Description of Artificial Sequence: Synthetic oligonucleotide
gugugaucagcugugaggc

SEQ ID NO: 983180 - RNA, 19 nt, Artificial Sequence
  Description of Artificial Sequence: Synthetic oligonucleotide
ucgugaguuuuccuggcug

SEQ ID NO: 983181 - RNA, 19 nt, Artificial Sequence
  Description of Artificial Sequence: Synthetic oligonucleotide
gguucgugaguuuuccugg

SEQ ID NO: 983182 - RNA, 19 nt, Artificial Sequence
  Description of Artificial Sequence: Synthetic oligonucleotide
aguaagggcaaaugugcga

SEQ ID NO: 983183 - RNA, 19 nt, Artificial Sequence
  Description of Artificial Sequence: Synthetic oligonucleotide
ucuuacucuguagaacggc

SEQ ID NO: 983184 - RNA, 19 nt, Artificial Sequence
  Description of Artificial Sequence: Synthetic oligonucleotide
ugugcgaggauaccucgga

SEQ ID NO: 983185 - RNA, 19 nt, Artificial Sequence
  Description of Artificial Sequence: Synthetic oligonucleotide
cuagaaccacgcuagaaga

SEQ ID NO: 983186 - RNA, 19 nt, Artificial Sequence
  Description of Artificial Sequence: Synthetic oligonucleotide
ugcaaggauuaacugcaga

SEQ ID NO: 983187 - RNA, 19 nt, Artificial Sequence
  Description of Artificial Sequence: Synthetic oligonucleotide
uuugcagaucuguucuucu

SEQ ID NO: 983188 - RNA, 19 nt, Artificial Sequence
  Description of Artificial Sequence: Synthetic oligonucleotide
uuacucuguagaacggccu

SEQ ID NO: 983189 - RNA, 19 nt, Artificial Sequence
  Description of Artificial Sequence: Synthetic oligonucleotide
acaggaaaacgguaacgcu

SEQ ID NO: 983190 - RNA, 19 nt, Artificial Sequence
  Description of Artificial Sequence: Synthetic oligonucleotide
cuucgcacggcagauacag

SEQ ID NO: 983191 - RNA, 19 nt, Artificial Sequence
  Description of Artificial Sequence: Synthetic oligonucleotide
uuacccucaacaugaguaa

SEQ ID NO: 983192 - RNA, 19 nt, Artificial Sequence
  Description of Artificial Sequence: Synthetic oligonucleotide
ugcaucgggacgccaggcg

SEQ ID NO: 983193 - RNA, 19 nt, Artificial Sequence
  Description of Artificial Sequence: Synthetic oligonucleotide
ugagcuuauuuggagacau

SEQ ID NO: 983194 - RNA, 19 nt, Artificial Sequence
  Description of Artificial Sequence: Synthetic oligonucleotide
ucgcuccgcacuuuuauug

SEQ ID NO: 983195 - RNA, 19 nt, Artificial Sequence
  Description of Artificial Sequence: Synthetic oligonucleotide
gggagagagagagagagag

SEQ ID NO: 983196 - RNA, 19 nt, Artificial Sequence
  Description of Artificial Sequence: Synthetic oligonucleotide
gguuucuacaaucgcuccg

SEQ ID NO: 983197 - RNA, 19 nt, Artificial Sequence
  Description of Artificial Sequence: Synthetic oligonucleotide
ggaggcuuaccucaagucc

SEQ ID NO: 983198 - RNA, 19 nt, Artificial Sequence
  Description of Artificial Sequence: Synthetic oligonucleotide
uugaccuuccugcauuguc

SEQ ID NO: 983199 - RNA, 19 nt, Artificial Sequence
  Description of Artificial Sequence: Synthetic oligonucleotide
accacgcuagaagaccucc

SEQ ID NO: 983200 - RNA, 19 nt, Artificial Sequence
  Description of Artificial Sequence: Synthetic oligonucleotide
ugguuucuacaaucgcucc

SEQ ID NO: 983201 - RNA, 19 nt, Artificial Sequence
  Description of Artificial Sequence: Synthetic oligonucleotide
cagaguuuagcuggguggg

SEQ ID NO: 983202 - RNA, 19 nt, Artificial Sequence
  Description of Artificial Sequence: Synthetic oligonucleotide
ucgcacggcagauacagaa

SEQ ID NO: 983203 - RNA, 19 nt, Artificial Sequence
  Description of Artificial Sequence: Synthetic oligonucleotide
ugaagcguggccaccuuuc

SEQ ID NO: 983204 - RNA, 19 nt, Artificial Sequence
  Description of Artificial Sequence: Synthetic oligonucleotide
uaagggcaaaugugcgagg

SEQ ID NO: 983205 - RNA, 19 nt, Artificial Sequence
  Description of Artificial Sequence: Synthetic oligonucleotide
caugcuugcaaggauuaac

SEQ ID NO: 983206 - RNA, 19 nt, Artificial Sequence
  Description of Artificial Sequence: Synthetic oligonucleotide
aagcggucuguucuuuucu

SEQ ID NO: 983207 - RNA, 19 nt, Artificial Sequence
  Description of Artificial Sequence: Synthetic oligonucleotide
auuaacugcagagugugua

SEQ ID NO: 983208 - RNA, 19 nt, Artificial Sequence
  Description of Artificial Sequence: Synthetic oligonucleotide
uuagaugaaugggaaacuu

SEQ ID NO: 983209 - RNA, 19 nt, Artificial Sequence
  Description of Artificial Sequence: Synthetic oligonucleotide
uccgcacuuuuauuguuca

SEQ ID NO: 983210 - RNA, 19 nt, Artificial Sequence
  Description of Artificial Sequence: Synthetic oligonucleotide
ccuagaaccacgcuagaag

SEQ ID NO: 983211 - RNA, 19 nt, Artificial Sequence
  Description of Artificial Sequence: Synthetic oligonucleotide
guaacgcuggacaaugaug

SEQ ID NO: 983212 - RNA, 19 nt, Artificial Sequence
  Description of Artificial Sequence: Synthetic oligonucleotide
aagggcaaaugugcgagga

SEQ ID NO: 983213 - RNA, 19 nt, Artificial Sequence
  Description of Artificial Sequence: Synthetic oligonucleotide
uucuuagaugaaugggaaa

SEQ ID NO: 983214 - RNA, 19 nt, Artificial Sequence
  Description of Artificial Sequence: Synthetic oligonucleotide
agagcuguaccuaaaccca

SEQ ID NO: 983215 - RNA, 19 nt, Artificial Sequence
  Description of Artificial Sequence: Synthetic oligonucleotide
ggauuaacugcagagugug

SEQ ID NO: 983216 - RNA, 19 nt, Artificial Sequence
  Description of Artificial Sequence: Synthetic oligonucleotide
gcugaugaggugcaucggg

SEQ ID NO: 983217 - RNA, 19 nt, Artificial Sequence
  Description of Artificial Sequence: Synthetic oligonucleotide
gagagagagagagagggaa

SEQ ID NO: 983218 - RNA, 19 nt, Artificial Sequence
  Description of Artificial Sequence: Synthetic oligonucleotide
cauugucuggugacguaag

SEQ ID NO: 983219 - RNA, 19 nt, Artificial Sequence
  Description of Artificial Sequence: Synthetic oligonucleotide
cacgcuugacaaaacuuuc

SEQ ID NO: 983220 - RNA, 19 nt, Artificial Sequence
  Description of Artificial Sequence: Synthetic oligonucleotide
gucgggaccauaaaauaac

SEQ ID NO: 983221 - RNA, 19 nt, Artificial Sequence
  Description of Artificial Sequence: Synthetic oligonucleotide
ucuuacccucaacaugagu

SEQ ID NO: 983222 - RNA, 19 nt, Artificial Sequence
  Description of Artificial Sequence: Synthetic oligonucleotide
acgugcagguuucuggaug

SEQ ID NO: 983223 - RNA, 19 nt, Artificial Sequence
  Description of Artificial Sequence: Synthetic oligonucleotide
aguuuagcuggguggguga

SEQ ID NO: 983224 - RNA, 19 nt, Artificial Sequence
  Description of Artificial Sequence: Synthetic oligonucleotide
uccaugcuugcaaggauua

SEQ ID NO: 983225 - RNA, 19 nt, Artificial Sequence
  Description of Artificial Sequence: Synthetic oligonucleotide
cuguagaacggccuugcuc

SEQ ID NO: 983226 - RNA, 19 nt, Artificial Sequence
  Description of Artificial Sequence: Synthetic oligonucleotide
gagagagagagagggaauc

SEQ ID NO: 983227 - RNA, 19 nt, Artificial Sequence
  Description of Artificial Sequence: Synthetic oligonucleotide
gacaccacgcuugacaaaa

SEQ ID NO: 983228 - RNA, 19 nt, Artificial Sequence
  Description of Artificial Sequence: Synthetic oligonucleotide
acgugcuuuuaaaaguguc

SEQ ID NO: 983229 - RNA, 19 nt, Artificial Sequence
  Description of Artificial Sequence: Synthetic oligonucleotide
uuuugccgaguucagcauu

SEQ ID NO: 983230 - RNA, 19 nt, Artificial Sequence
  Description of Artificial Sequence: Synthetic oligonucleotide
gaaaacgguaacgcuggac

SEQ ID NO: 983231 - RNA, 19 nt, Artificial Sequence
  Description of Artificial Sequence: Synthetic oligonucleotide
uuucuacaaucgcuccgca

SEQ ID NO: 983232 - RNA, 19 nt, Artificial Sequence
  Description of Artificial Sequence: Synthetic oligonucleotide
gaguuuagcugggugggug

SEQ ID NO: 983233 - RNA, 19 nt, Artificial Sequence
  Description of Artificial Sequence: Synthetic oligonucleotide
agcugaguagaaugacucu

SEQ ID NO: 983234 - RNA, 19 nt, Artificial Sequence
  Description of Artificial Sequence: Synthetic oligonucleotide
aagguccguuuucccagag

SEQ ID NO: 983235 - RNA, 19 nt, Artificial Sequence
  Description of Artificial Sequence: Synthetic oligonucleotide
agaacggccuugcucuucu

SEQ ID NO: 983236 - RNA, 19 nt, Artificial Sequence
  Description of Artificial Sequence: Synthetic oligonucleotide
acagucgggaccauaaaau

SEQ ID NO: 983237 - RNA, 19 nt, Artificial Sequence
  Description of Artificial Sequence: Synthetic oligonucleotide
uucgugaguuuuccuggcu

SEQ ID NO: 983238 - RNA, 19 nt, Artificial Sequence
  Description of Artificial Sequence: Synthetic oligonucleotide
aaaggguacagcagaguuu

SEQ ID NO: 983239 - RNA, 19 nt, Artificial Sequence
  Description of Artificial Sequence: Synthetic oligonucleotide
aacgugcuuuuaaaagugu

SEQ ID NO: 983240 - RNA, 19 nt, Artificial Sequence
  Description of Artificial Sequence: Synthetic oligonucleotide
uacugugucagugggguua

SEQ ID NO: 983241 - RNA, 19 nt, Artificial Sequence
  Description of Artificial Sequence: Synthetic oligonucleotide
agcccagcaacguuuucca

SEQ ID NO: 983242 - RNA, 19 nt, Artificial Sequence
  Description of Artificial Sequence: Synthetic oligonucleotide
guucgugaguuuuccuggc

SEQ ID NO: 983243 - RNA, 19 nt, Artificial Sequence
  Description of Artificial Sequence: Synthetic oligonucleotide
agaaugacucuuggcaaca

SEQ ID NO: 983244 - RNA, 19 nt, Artificial Sequence
  Description of Artificial Sequence: Synthetic oligonucleotide
gcaucuuaaucucuguguc

SEQ ID NO: 983245 - RNA, 19 nt, Artificial Sequence
  Description of Artificial Sequence: Synthetic oligonucleotide
acgguaacgcuggacaaug

SEQ ID NO: 983246 - RNA, 19 nt, Artificial Sequence
  Description of Artificial Sequence: Synthetic oligonucleotide
ugagcuccgagcucugguc

SEQ ID NO: 983247 - RNA, 19 nt, Artificial Sequence
  Description of Artificial Sequence: Synthetic oligonucleotide
agagagagagagagagagg

SEQ ID NO: 983248 - RNA, 19 nt, Artificial Sequence
  Description of Artificial Sequence: Synthetic oligonucleotide
uuguggaacugaguugcug

SEQ ID NO: 983249 - RNA, 19 nt, Artificial Sequence
  Description of Artificial Sequence: Synthetic oligonucleotide
agcguggccaccuuucuua

SEQ ID NO: 983250 - RNA, 19 nt, Artificial Sequence
  Description of Artificial Sequence: Synthetic oligonucleotide
ggguucgugaguuuuccug

SEQ ID NO: 983251 - RNA, 19 nt, Artificial Sequence
  Description of Artificial Sequence: Synthetic oligonucleotide
cacgcuagaagaccuccac

SEQ ID NO: 983252 - RNA, 19 nt, Artificial Sequence
  Description of Artificial Sequence: Synthetic oligonucleotide
uucagcgcacuuagcuuga

SEQ ID NO: 983253 - RNA, 19 nt, Artificial Sequence
  Description of Artificial Sequence: Synthetic oligonucleotide
auuuugccgaguucagcau

SEQ ID NO: 983254 - RNA, 19 nt, Artificial Sequence
  Description of Artificial Sequence: Synthetic oligonucleotide
uuacagucgggaccauaaa

SEQ ID NO: 983255 - RNA, 19 nt, Artificial Sequence
  Description of Artificial Sequence: Synthetic oligonucleotide
aggcuucugguaauuggac

SEQ ID NO: 983256 - RNA, 19 nt, Artificial Sequence
  Description of Artificial Sequence: Synthetic oligonucleotide
guccccuuacugcagccag

SEQ ID NO: 983257 - RNA, 19 nt, Artificial Sequence
  Description of Artificial Sequence: Synthetic oligonucleotide
gcagcgugcuuguugaggc

SEQ ID NO: 983258 - RNA, 19 nt, Artificial Sequence
  Description of Artificial Sequence: Synthetic oligonucleotide
uugagcuuauuuggagaca

SEQ ID NO: 983259 - RNA, 19 nt, Artificial Sequence
  Description of Artificial Sequence: Synthetic oligonucleotide
ucggguucgugaguuuucc

SEQ ID NO: 983260 - RNA, 19 nt, Artificial Sequence
  Description of Artificial Sequence: Synthetic oligonucleotide
gauaccucggaaguguccu

SEQ ID NO: 983261 - RNA, 19 nt, Artificial Sequence
  Description of Artificial Sequence: Synthetic oligonucleotide
cucuaggguccccuuuucc

SEQ ID NO: 983262 - RNA, 19 nt, Artificial Sequence
  Description of Artificial Sequence: Synthetic oligonucleotide
cuccgcacuuuuauuguuc

SEQ ID NO: 983263 - RNA, 19 nt, Artificial Sequence
  Description of Artificial Sequence: Synthetic oligonucleotide
gccgaguucagcauugaag

SEQ ID NO: 983264 - RNA, 19 nt, Artificial Sequence
  Description of Artificial Sequence: Synthetic oligonucleotide
uuaccaugaagcggucugu

SEQ ID NO: 983265 - RNA, 19 nt, Artificial Sequence
  Description of Artificial Sequence: Synthetic oligonucleotide
agucgggaccauaaaauaa

SEQ ID NO: 983266 - RNA, 19 nt, Artificial Sequence
  Description of Artificial Sequence: Synthetic oligonucleotide
cuugggcucgccccauccg

SEQ ID NO: 983267 - RNA, 19 nt, Artificial Sequence
  Description of Artificial Sequence: Synthetic oligonucleotide
uaccuaaacccaccaccuc

SEQ ID NO: 983268 - RNA, 19 nt, Artificial Sequence
  Description of Artificial Sequence: Synthetic oligonucleotide
uucggguucgugaguuuuc

SEQ ID NO: 983269 - RNA, 19 nt, Artificial Sequence
  Description of Artificial Sequence: Synthetic oligonucleotide
acgcuagaagaccuccacu

SEQ ID NO: 983270 - RNA, 19 nt, Artificial Sequence
  Description of Artificial Sequence: Synthetic oligonucleotide
guaaggggcugcugaugag

SEQ ID NO: 983271 - RNA, 19 nt, Artificial Sequence
  Description of Artificial Sequence: Synthetic oligonucleotide
caggcggaggcuuaccuca

SEQ ID NO: 983272 - RNA, 19 nt, Artificial Sequence
  Description of Artificial Sequence: Synthetic oligonucleotide
aaccacgcuagaagaccuc

SEQ ID NO: 983273 - RNA, 19 nt, Artificial Sequence
  Description of Artificial Sequence: Synthetic oligonucleotide
acucucacgugcagguuuc

SEQ ID NO: 983274 - RNA, 19 nt, Artificial Sequence
  Description of Artificial Sequence: Synthetic oligonucleotide
ucuucgcacggcagauaca

SEQ ID NO: 983275 - RNA, 19 nt, Artificial Sequence
  Description of Artificial Sequence: Synthetic oligonucleotide
gaggcuuaccucaaguccu

SEQ ID NO: 983276 - RNA, 19 nt, Artificial Sequence
  Description of Artificial Sequence: Synthetic oligonucleotide
ucuucucgcgugaccuaga

SEQ ID NO: 983277 - RNA, 19 nt, Artificial Sequence
  Description of Artificial Sequence: Synthetic oligonucleotide
uucucgcgugaccuagaac

SEQ ID NO: 983278 - RNA, 19 nt, Artificial Sequence
  Description of Artificial Sequence: Synthetic oligonucleotide
ugaucagcugugaggcaua

SEQ ID NO: 983279 - RNA, 19 nt, Artificial Sequence
  Description of Artificial Sequence: Synthetic oligonucleotide
uccccuuacugcagccagc

SEQ ID NO: 983280 - RNA, 19 nt, Artificial Sequence
  Description of Artificial Sequence: Synthetic oligonucleotide
cuguaccuaaacccaccac

SEQ ID NO: 983281 - RNA, 19 nt, Artificial Sequence
  Description of Artificial Sequence: Synthetic oligonucleotide
cgacugauuaauuaaauua

SEQ ID NO: 983282 - RNA, 19 nt, Artificial Sequence
  Description of Artificial Sequence: Synthetic oligonucleotide
aggcugccgauguauguga

SEQ ID NO: 983283 - RNA, 19 nt, Artificial Sequence
  Description of Artificial Sequence: Synthetic oligonucleotide
ugcgugcucugcaucuuaa

SEQ ID NO: 983284 - RNA, 19 nt, Artificial Sequence
  Description of Artificial Sequence: Synthetic oligonucleotide
acaaucgcuccgcacuuuu

SEQ ID NO: 983285 - RNA, 19 nt, Artificial Sequence
  Description of Artificial Sequence: Synthetic oligonucleotide
gaggauaccucggaagugu

SEQ ID NO: 983286 - RNA, 19 nt, Artificial Sequence
  Description of Artificial Sequence: Synthetic oligonucleotide
ggugcaucgggacgccagg

SEQ ID NO: 983287 - RNA, 19 nt, Artificial Sequence
  Description of Artificial Sequence: Synthetic oligonucleotide
cagucucuugggcucgccc

SEQ ID NO: 983288 - RNA, 19 nt, Artificial Sequence
  Description of Artificial Sequence: Synthetic oligonucleotide
cagccgacugauuaauuaa

SEQ ID NO: 983289 - RNA, 19 nt, Artificial Sequence
  Description of Artificial Sequence: Synthetic oligonucleotide
ugcauugucuggugacgua

SEQ ID NO: 983290 - RNA, 19 nt, Artificial Sequence
  Description of Artificial Sequence: Synthetic oligonucleotide
cgcuagaagaccuccacug

SEQ ID NO: 983291 - RNA, 19 nt, Artificial Sequence
  Description of Artificial Sequence: Synthetic oligonucleotide
ugcgguccgucuccgggga

SEQ ID NO: 983292 - RNA, 19 nt, Artificial Sequence
  Description of Artificial Sequence: Synthetic oligonucleotide
ugccgaguucagcauugaa

SEQ ID NO: 983293 - RNA, 19 nt, Artificial Sequence
  Description of Artificial Sequence: Synthetic oligonucleotide
ggcaaaugugcgaggauac

SEQ ID NO: 983294 - RNA, 19 nt, Artificial Sequence
  Description of Artificial Sequence: Synthetic oligonucleotide
acucccugucacaguaagg

SEQ ID NO: 983295 - RNA, 19 nt, Artificial Sequence
  Description of Artificial Sequence: Synthetic oligonucleotide
acgcuugacaaaacuuucu

SEQ ID NO: 983296 - RNA, 19 nt, Artificial Sequence
  Description of Artificial Sequence: Synthetic oligonucleotide
aagcguggccaccuuucuu

SEQ ID NO: 983297 - RNA, 19 nt, Artificial Sequence
  Description of Artificial Sequence: Synthetic oligonucleotide
augugcgaggauaccucgg

SEQ ID NO: 983298 - RNA, 19 nt, Artificial Sequence
  Description of Artificial Sequence: Synthetic oligonucleotide
ggguacagcagaguuuagc

SEQ ID NO: 983299 - RNA, 19 nt, Artificial Sequence
  Description of Artificial Sequence: Synthetic oligonucleotide
ugaagcggucuguucuuuu

SEQ ID NO: 983300 - RNA, 19 nt, Artificial Sequence
  Description of Artificial Sequence: Synthetic oligonucleotide
uucgcacggcagauacaga

SEQ ID NO: 983301 - RNA, 19 nt, Artificial Sequence
  Description of Artificial Sequence: Synthetic oligonucleotide
uccgucugaagguccguuu

SEQ ID NO: 983302 - RNA, 19 nt, Artificial Sequence
  Description of Artificial Sequence: Synthetic oligonucleotide
uccugacaaucugggaagu

SEQ ID NO: 983303 - RNA, 19 nt, Artificial Sequence
  Description of Artificial Sequence: Synthetic oligonucleotide
guaccuaaacccaccaccu

SEQ ID NO: 983304 - RNA, 19 nt, Artificial Sequence
  Description of Artificial Sequence: Synthetic oligonucleotide
ggcagcgugcuuguugagg

SEQ ID NO: 983305 - RNA, 19 nt, Artificial Sequence
  Description of Artificial Sequence: Synthetic oligonucleotide
agagagagagagagagaga

SEQ ID NO: 983306 - RNA, 19 nt, Artificial Sequence
  Description of Artificial Sequence: Synthetic oligonucleotide
caaggauuaacugcagagu

SEQ ID NO: 983307 - RNA, 19 nt, Artificial Sequence
  Description of Artificial Sequence: Synthetic oligonucleotide
agagagagagagagaggga

SEQ ID NO: 983308 - RNA, 19 nt, Artificial Sequence
  Description of Artificial Sequence: Synthetic oligonucleotide
ccuuacugcagccagccga

SEQ ID NO: 983309 - RNA, 19 nt, Artificial Sequence
  Description of Artificial Sequence: Synthetic oligonucleotide
aggugcaucgggacgccag

SEQ ID NO: 983310 - RNA, 19 nt, Artificial Sequence
  Description of Artificial Sequence: Synthetic oligonucleotide
accacgcuugacaaaacuu

SEQ ID NO: 983311 - RNA, 19 nt, Artificial Sequence
  Description of Artificial Sequence: Synthetic oligonucleotide
agagagagagagagggaau

SEQ ID NO: 983312 - RNA, 19 nt, Artificial Sequence
  Description of Artificial Sequence: Synthetic oligonucleotide
cagucgggaccauaaaaua

SEQ ID NO: 983313 - RNA, 19 nt, Artificial Sequence
  Description of Artificial Sequence: Synthetic oligonucleotide
uacccucaacaugaguaau

SEQ ID NO: 983314 - RNA, 19 nt, Artificial Sequence
  Description of Artificial Sequence: Synthetic oligonucleotide
cagcgcacuuagcuugagc

SEQ ID NO: 983315 - RNA, 19 nt, Artificial Sequence
  Description of Artificial Sequence: Synthetic oligonucleotide
ugagggucucuaggguccc

SEQ ID NO: 983316 - RNA, 19 nt, Artificial Sequence
  Description of Artificial Sequence: Synthetic oligonucleotide
agcggucuguucuuuucuu

SEQ ID NO: 983317 - RNA, 19 nt, Artificial Sequence
  Description of Artificial Sequence: Synthetic oligonucleotide
agccgacugauuaauuaaa

SEQ ID NO: 983318 - RNA, 19 nt, Artificial Sequence
  Description of Artificial Sequence: Synthetic oligonucleotide
cucgcgugaccuagaacca

SEQ ID NO: 983319 - RNA, 19 nt, Artificial Sequence
  Description of Artificial Sequence: Synthetic oligonucleotide
ccauccgucugaagguccg

SEQ ID NO: 983320 - RNA, 19 nt, Artificial Sequence
  Description of Artificial Sequence: Synthetic oligonucleotide
aucgcuccgcacuuuuauu

SEQ ID NO: 983321 - RNA, 19 nt, Artificial Sequence
  Description of Artificial Sequence: Synthetic oligonucleotide
gaaccacgcuagaagaccu

SEQ ID NO: 983322 - RNA, 19 nt, Artificial Sequence
  Description of Artificial Sequence: Synthetic oligonucleotide
aggugaagcguggccaccu

SEQ ID NO: 983323 - RNA, 19 nt, Artificial Sequence
  Description of Artificial Sequence: Synthetic oligonucleotide
ccucguuuuccugacaauc

SEQ ID NO: 983324 - RNA, 19 nt, Artificial Sequence
  Description of Artificial Sequence: Synthetic oligonucleotide
ccugcauugucuggugacg

SEQ ID NO: 983325 - RNA, 19 nt, Artificial Sequence
  Description of Artificial Sequence: Synthetic oligonucleotide
gcuguaccuaaacccacca

SEQ ID NO: 983326 - RNA, 19 nt, Artificial Sequence
  Description of Artificial Sequence: Synthetic oligonucleotide
gcagccagccgacugauua

SEQ ID NO: 983327 - RNA, 19 nt, Artificial Sequence
  Description of Artificial Sequence: Synthetic oligonucleotide
ugggacaggcugagacggu

SEQ ID NO: 983328 - RNA, 19 nt, Artificial Sequence
  Description of Artificial Sequence: Synthetic oligonucleotide
cagcucaugccuggcacug

SEQ ID NO: 983329 - RNA, 19 nt, Artificial Sequence
  Description of Artificial Sequence: Synthetic oligonucleotide
ucgcgugaccuagaaccac

SEQ ID NO: 983330 - RNA, 19 nt, Artificial Sequence
  Description of Artificial Sequence: Synthetic oligonucleotide
auuuacagucgggaccaua

SEQ ID NO: 983331 - RNA, 19 nt, Artificial Sequence
  Description of Artificial Sequence: Synthetic oligonucleotide
gcuuaccucaaguccuuca

SEQ ID NO: 983332 - RNA, 19 nt, Artificial Sequence
  Description of Artificial Sequence: Synthetic oligonucleotide
ucagcgcacuuagcuugag

SEQ ID NO: 983333 - RNA, 19 nt, Artificial Sequence
  Description of Artificial Sequence: Synthetic oligonucleotide
ugagacggucugugugauc

SEQ ID NO: 983334 - RNA, 19 nt, Artificial Sequence
  Description of Artificial Sequence: Synthetic oligonucleotide
ggauaccucggaagugucc

SEQ ID NO: 983335 - RNA, 19 nt, Artificial Sequence
  Description of Artificial Sequence: Synthetic oligonucleotide
uagaacggccuugcucuuc

SEQ ID NO: 983336 - RNA, 19 nt, Artificial Sequence
  Description of Artificial Sequence: Synthetic oligonucleotide
cacuccgcucucuagauuu

SEQ ID NO: 983337 - RNA, 19 nt, Artificial Sequence
  Description of Artificial Sequence: Synthetic oligonucleotide
gaagcguggccaccuuucu

SEQ ID NO: 983338 - RNA, 19 nt, Artificial Sequence
  Description of Artificial Sequence: Synthetic oligonucleotide
aguccccuuacugcagcca

SEQ ID NO: 983339 - RNA, 19 nt, Artificial Sequence
  Description of Artificial Sequence: Synthetic oligonucleotide
caaugauggaugguuuucu

SEQ ID NO: 983340 - RNA, 19 nt, Artificial Sequence
  Description of Artificial Sequence: Synthetic oligonucleotide
gaaucgccuucugcaccag

SEQ ID NO: 983341 - RNA, 19 nt, Artificial Sequence
  Description of Artificial Sequence: Synthetic oligonucleotide
gaggagagggagagagaga

SEQ ID NO: 983342 - RNA, 19 nt, Artificial Sequence
  Description of Artificial Sequence: Synthetic oligonucleotide
agagggagagagagagaga

SEQ ID NO: 983343 - RNA, 19 nt, Artificial Sequence
  Description of Artificial Sequence: Synthetic oligonucleotide
acccucaacaugaguaauu

SEQ ID NO: 983344 - RNA, 19 nt, Artificial Sequence
  Description of Artificial Sequence: Synthetic oligonucleotide
cgcgugaccuagaaccacg

SEQ ID NO: 983345 - RNA, 19 nt, Artificial Sequence
  Description of Artificial Sequence: Synthetic oligonucleotide
caucgggacgccaggcgga

SEQ ID NO: 983346 - RNA, 19 nt, Artificial Sequence
  Description of Artificial Sequence: Synthetic oligonucleotide
cgcucucuagauuuuacca

SEQ ID NO: 983347 - RNA, 19 nt, Artificial Sequence
  Description of Artificial Sequence: Synthetic oligonucleotide
aucgggacgccaggcggag

SEQ ID NO: 983348 - RNA, 19 nt, Artificial Sequence
  Description of Artificial Sequence: Synthetic oligonucleotide
cuucucgcgugaccuagaa

SEQ ID NO: 983349 - RNA, 19 nt, Artificial Sequence
  Description of Artificial Sequence: Synthetic oligonucleotide
auaccucggaaguguccuu

SEQ ID NO: 983350 - RNA, 19 nt, Artificial Sequence
  Description of Artificial Sequence: Synthetic oligonucleotide
gguaacgcuggacaaugau

SEQ ID NO: 983351 - RNA, 19 nt, Artificial Sequence
  Description of Artificial Sequence: Synthetic oligonucleotide
agccagccgacugauuaau

SEQ ID NO: 983352 - RNA, 19 nt, Artificial Sequence
  Description of Artificial Sequence: Synthetic oligonucleotide
agggagagagagagagaga

SEQ ID NO: 983353 - RNA, 19 nt, Artificial Sequence
  Description of Artificial Sequence: Synthetic oligonucleotide
gcgaggauaccucggaagu

SEQ ID NO: 983354 - RNA, 19 nt, Artificial Sequence
  Description of Artificial Sequence: Synthetic oligonucleotide
agcuccgagcucuggucuu

SEQ ID NO: 983355 - RNA, 19 nt, Artificial Sequence
  Description of Artificial Sequence: Synthetic oligonucleotide
uggagacauuuugccgagu

SEQ ID NO: 983356 - RNA, 19 nt, Artificial Sequence
  Description of Artificial Sequence: Synthetic oligonucleotide
gugcaucgggacgccaggc

SEQ ID NO: 983357 - RNA, 19 nt, Artificial Sequence
  Description of Artificial Sequence: Synthetic oligonucleotide
ggcagauacagaaccgucu

SEQ ID NO: 983358 - RNA, 19 nt, Artificial Sequence
  Description of Artificial Sequence: Synthetic oligonucleotide
ccaugaagcggucuguucu

SEQ ID NO: 983359 - RNA, 19 nt, Artificial Sequence
  Description of Artificial Sequence: Synthetic oligonucleotide
ccccuuacugcagccagcc

SEQ ID NO: 983360 - RNA, 19 nt, Artificial Sequence
  Description of Artificial Sequence: Synthetic oligonucleotide
guuuagcugggugggugaa

SEQ ID NO: 983361 - RNA, 19 nt, Artificial Sequence
  Description of Artificial Sequence: Synthetic oligonucleotide
uuacugcagccagccgacu

SEQ ID NO: 983362 - RNA, 19 nt, Artificial Sequence
  Description of Artificial Sequence: Synthetic oligonucleotide
ccagccgacugauuaauua

SEQ ID NO: 983363 - RNA, 19 nt, Artificial Sequence
  Description of Artificial Sequence: Synthetic oligonucleotide
cguaaggggcugcugauga

SEQ ID NO: 983364 - RNA, 19 nt, Artificial Sequence
  Description of Artificial Sequence: Synthetic oligonucleotide
gugcgaggauaccucggaa

SEQ ID NO: 983365 - RNA, 19 nt, Artificial Sequence
  Description of Artificial Sequence: Synthetic oligonucleotide
cuccacugaacaggagaca

SEQ ID NO: 983366 - RNA, 19 nt, Artificial Sequence
  Description of Artificial Sequence: Synthetic oligonucleotide
augaagcggucuguucuuu

SEQ ID NO: 983367 - RNA, 19 nt, Artificial Sequence
  Description of Artificial Sequence: Synthetic oligonucleotide
ggagagagagagagagaga

SEQ ID NO: 983368 - RNA, 19 nt, Artificial Sequence
  Description of Artificial Sequence: Synthetic oligonucleotide
ccauaaaauaacgugcuuu

SEQ ID NO: 983369 - RNA, 19 nt, Artificial Sequence
  Description of Artificial Sequence: Synthetic oligonucleotide
ggucuugcccaagggcgcc

SEQ ID NO: 983370 - RNA, 19 nt, Artificial Sequence
  Description of Artificial Sequence: Synthetic oligonucleotide
caugaagcggucuguucuu

SEQ ID NO: 983371 - RNA, 19 nt, Artificial Sequence
  Description of Artificial Sequence: Synthetic oligonucleotide
ggcggaggcuuaccucaag

SEQ ID NO: 983372 - RNA, 19 nt, Artificial Sequence
  Description of Artificial Sequence: Synthetic oligonucleotide
ucgccccauccgucugaag

SEQ ID NO: 983373 - RNA, 19 nt, Artificial Sequence
  Description of Artificial Sequence: Synthetic oligonucleotide
auccgucugaagguccguu

SEQ ID NO: 983374 - RNA, 19 nt, Artificial Sequence
  Description of Artificial Sequence: Synthetic oligonucleotide
ggaaaacgguaacgcugga

SEQ ID NO: 983375 - RNA, 19 nt, Artificial Sequence
  Description of Artificial Sequence: Synthetic oligonucleotide
caaucgcuccgcacuuuua

SEQ ID NO: 983376 - RNA, 19 nt, Artificial Sequence
  Description of Artificial Sequence: Synthetic oligonucleotide
cggaggcuuaccucaaguc

SEQ ID NO: 983377 - RNA, 19 nt, Artificial Sequence
  Description of Artificial Sequence: Synthetic oligonucleotide
gguccgucuccggggauug

SEQ ID NO: 983378 - RNA, 19 nt, Artificial Sequence
  Description of Artificial Sequence: Synthetic oligonucleotide
ccaggcggaggcuuaccuc

SEQ ID NO: 983379 - RNA, 19 nt, Artificial Sequence
  Description of Artificial Sequence: Synthetic oligonucleotide
gcccagcaacguuuuccag

SEQ ID NO: 983380 - RNA, 19 nt, Artificial Sequence
  Description of Artificial Sequence: Synthetic oligonucleotide
cgucuccggggauugcugc

SEQ ID NO: 983381 - RNA, 19 nt, Artificial Sequence
  Description of Artificial Sequence: Synthetic oligonucleotide
aggcuuaccucaaguccuu

SEQ ID NO: 983382 - RNA, 19 nt, Artificial Sequence
  Description of Artificial Sequence: Synthetic oligonucleotide
cugcauugucuggugacgu

SEQ ID NO: 983383 - RNA, 19 nt, Artificial Sequence
  Description of Artificial Sequence: Synthetic oligonucleotide
gucuccggggauugcugcu

SEQ ID NO: 983384 - RNA, 19 nt, Artificial Sequence
  Description of Artificial Sequence: Synthetic oligonucleotide
ggcgccugcgugcucugca

SEQ ID NO: 983385 - RNA, 19 nt, Artificial Sequence
  Description of Artificial Sequence: Synthetic oligonucleotide
ccgcacuuuuauuguucac

SEQ ID NO: 983386 - RNA, 19 nt, Artificial Sequence
  Description of Artificial Sequence: Synthetic oligonucleotide
cggcagauacagaaccguc

SEQ ID NO: 983387 - RNA, 19 nt, Artificial Sequence
  Description of Artificial Sequence: Synthetic oligonucleotide
ccggggauugcugcuguug

SEQ ID NO: 983388 - RNA, 19 nt, Artificial Sequence
  Description of Artificial Sequence: Synthetic oligonucleotide
gcuuauuuggagacauuuu

SEQ ID NO: 983389 - RNA, 19 nt, Artificial Sequence
  Description of Artificial Sequence: Synthetic oligonucleotide
ccgacugauuaauuaaauu

SEQ ID NO: 983390 - RNA, 19 nt, Artificial Sequence
  Description of Artificial Sequence: Synthetic oligonucleotide
cugcgugcucugcaucuua

SEQ ID NO: 983391 - RNA, 19 nt, Artificial Sequence
  Description of Artificial Sequence: Synthetic oligonucleotide
ccgucuccggggauugcug

SEQ ID NO: 983392 - RNA, 19 nt, Artificial Sequence
  Description of Artificial Sequence: Synthetic oligonucleotide
gcuugccaaggcuucgggu

SEQ ID NO: 983393 - RNA, 19 nt, Artificial Sequence
  Description of Artificial Sequence: Synthetic oligonucleotide
ggagagggagagagagaga

SEQ ID NO: 983394 - RNA, 19 nt, Artificial Sequence
  Description of Artificial Sequence: Synthetic oligonucleotide
cuggacaaugauggauggu

SEQ ID NO: 983395 - RNA, 19 nt, Artificial Sequence
  Description of Artificial Sequence: Synthetic oligonucleotide
gacgccaggcggaggcuua

SEQ ID NO: 983396 - RNA, 19 nt, Artificial Sequence
  Description of Artificial Sequence: Synthetic oligonucleotide
gugaagcguggccaccuuu

SEQ ID NO: 983397 - RNA, 19 nt, Artificial Sequence
  Description of Artificial Sequence: Synthetic oligonucleotide
ggcucgccccauccgucug

SEQ ID NO: 983398 - RNA, 19 nt, Artificial Sequence
  Description of Artificial Sequence: Synthetic oligonucleotide
cuucggguucgugaguuuu

SEQ ID NO: 983399 - RNA, 19 nt, Artificial Sequence
  Description of Artificial Sequence: Synthetic oligonucleotide
acuccgcucucuagauuuu

SEQ ID NO: 983400 - RNA, 19 nt, Artificial Sequence
  Description of Artificial Sequence: Synthetic oligonucleotide
ccacgcuagaagaccucca

SEQ ID NO: 983401 - RNA, 19 nt, Artificial Sequence
  Description of Artificial Sequence: Synthetic oligonucleotide
ccccacuccgcucucuaga

SEQ ID NO: 983402 - RNA, 19 nt, Artificial Sequence
  Description of Artificial Sequence: Synthetic oligonucleotide
gccgacugauuaauuaaau

SEQ ID NO: 983403 - RNA, 19 nt, Artificial Sequence
  Description of Artificial Sequence: Synthetic oligonucleotide
cuugaccuuccugcauugu

SEQ ID NO: 983404 - RNA, 19 nt, Artificial Sequence
  Description of Artificial Sequence: Synthetic oligonucleotide
gagcuuauuuggagacauu

SEQ ID NO: 983405 - RNA, 19 nt, Artificial Sequence
  Description of Artificial Sequence: Synthetic oligonucleotide
cacgugcagguuucuggau

SEQ ID NO: 983406 - RNA, 19 nt, Artificial Sequence
  Description of Artificial Sequence: Synthetic oligonucleotide
ggcuuaccucaaguccuuc

SEQ ID NO: 983407 - RNA, 19 nt, Artificial Sequence
  Description of Artificial Sequence: Synthetic oligonucleotide
cagcgugcuuguugaggcu

SEQ ID NO: 983408 - RNA, 19 nt, Artificial Sequence
  Description of Artificial Sequence: Synthetic oligonucleotide
gccaggcggaggcuuaccu

SEQ ID NO: 983409 - RNA, 19 nt, Artificial Sequence
  Description of Artificial Sequence: Synthetic oligonucleotide
gcucgccccauccgucuga

SEQ ID NO: 983410 - RNA, 19 nt, Artificial Sequence
  Description of Artificial Sequence: Synthetic oligonucleotide
caagggcgccugcgugcuc

SEQ ID NO: 983411 - RNA, 19 nt, Artificial Sequence
  Description of Artificial Sequence: Synthetic oligonucleotide
gcccaugugagggucucua

SEQ ID NO: 983412 - RNA, 19 nt, Artificial Sequence
  Description of Artificial Sequence: Synthetic oligonucleotide
cugagacggucugugugau

SEQ ID NO: 983413 - RNA, 19 nt, Artificial Sequence
  Description of Artificial Sequence: Synthetic oligonucleotide
gcaacguuuuccagaguuu

SEQ ID NO: 983414 - RNA, 19 nt, Artificial Sequence
  Description of Artificial Sequence: Synthetic oligonucleotide
ccccauccgucugaagguc

SEQ ID NO: 983415 - RNA, 19 nt, Artificial Sequence
  Description of Artificial Sequence: Synthetic oligonucleotide
cucgccccauccgucugaa

SEQ ID NO: 983416 - RNA, 19 nt, Artificial Sequence
  Description of Artificial Sequence: Synthetic oligonucleotide
ggcuucggguucgugaguu

SEQ ID NO: 983417 - RNA, 19 nt, Artificial Sequence
  Description of Artificial Sequence: Synthetic oligonucleotide
cccucaacaugaguaauuu

SEQ ID NO: 983418 - RNA, 19 nt, Artificial Sequence
  Description of Artificial Sequence: Synthetic oligonucleotide
gcgcacuuagcuugagcuu

SEQ ID NO: 983419 - RNA, 19 nt, Artificial Sequence
  Description of Artificial Sequence: Synthetic oligonucleotide
gguuagcaacagccacagu

SEQ ID NO: 983420 - RNA, 19 nt, Artificial Sequence
  Description of Artificial Sequence: Synthetic oligonucleotide
gggcucgccccauccgucu

SEQ ID NO: 983421 - RNA, 19 nt, Artificial Sequence
  Description of Artificial Sequence: Synthetic oligonucleotide
cauccgucugaagguccgu

SEQ ID NO: 983422 - RNA, 19 nt, Artificial Sequence
  Description of Artificial Sequence: Synthetic oligonucleotide
gucuugcccaagggcgccu

SEQ ID NO: 983423 - RNA, 19 nt, Artificial Sequence
  Description of Artificial Sequence: Synthetic oligonucleotide
cagcaacguuuuccagagu

SEQ ID NO: 983424 - RNA, 19 nt, Artificial Sequence
  Description of Artificial Sequence: Synthetic oligonucleotide
ggugaagcguggccaccuu

SEQ ID NO: 983425 - RNA, 19 nt, Artificial Sequence
  Description of Artificial Sequence: Synthetic oligonucleotide
ccaagagcccagcaacguu

SEQ ID NO: 983426 - RNA, 19 nt, Artificial Sequence
  Description of Artificial Sequence: Synthetic oligonucleotide
cgguaacgcuggacaauga

SEQ ID NO: 983427 - RNA, 19 nt, Artificial Sequence
  Description of Artificial Sequence: Synthetic oligonucleotide
cccacuccgcucucuagau

SEQ ID NO: 983428 - RNA, 19 nt, Artificial Sequence
  Description of Artificial Sequence: Synthetic oligonucleotide
cccaagagcccagcaacgu

SEQ ID NO: 983429 - RNA, 19 nt, Artificial Sequence
  Description of Artificial Sequence: Synthetic oligonucleotide
cgcuccgcacuuuuauugu

SEQ ID NO: 983430 - RNA, 19 nt, Artificial Sequence
  Description of Artificial Sequence: Synthetic oligonucleotide
cucucacgugcagguuucu

SEQ ID NO: 983431 - RNA, 19 nt, Artificial Sequence
  Description of Artificial Sequence: Synthetic oligonucleotide
cggggauugcugcuguugu

SEQ ID NO: 983432 - RNA, 19 nt, Artificial Sequence
  Description of Artificial Sequence: Synthetic oligonucleotide
ccguuuucccagagcugua

SEQ ID NO: 983433 - RNA, 19 nt, Artificial Sequence
  Description of Artificial Sequence: Synthetic oligonucleotide
gcuucggguucgugaguuu

SEQ ID NO: 983434 - RNA, 19 nt, Artificial Sequence
  Description of Artificial Sequence: Synthetic oligonucleotide
gcgccugcgugcucugcau

SEQ ID NO: 983435 - RNA, 19 nt, Artificial Sequence
  Description of Artificial Sequence: Synthetic oligonucleotide
cgccaggcggaggcuuacc

SEQ ID NO: 983436 - RNA, 19 nt, Artificial Sequence
  Description of Artificial Sequence: Synthetic oligonucleotide
gccagccgacugauuaauu

SEQ ID NO: 983437 - RNA, 19 nt, Artificial Sequence
  Description of Artificial Sequence: Synthetic oligonucleotide
cggguucgugaguuuuccu

SEQ ID NO: 983438 - RNA, 19 nt, Artificial Sequence
  Description of Artificial Sequence: Synthetic oligonucleotide
cugcggccuugaccuuccu

SEQ ID NO: 983439 - RNA, 19 nt, Artificial Sequence
  Description of Artificial Sequence: Synthetic oligonucleotide
ccacuccgcucucuagauu

SEQ ID NO: 983440 - RNA, 19 nt, Artificial Sequence
  Description of Artificial Sequence: Synthetic oligonucleotide
aaaggaaugguuaugagug

SEQ ID NO: 983441 - RNA, 19 nt, Artificial Sequence
  Description of Artificial Sequence: Synthetic oligonucleotide
uaacgcuuuauauagcugg

SEQ ID NO: 983442 - RNA, 19 nt, Artificial Sequence
  Description of Artificial Sequence: Synthetic oligonucleotide
aaagucauuuggcuggugg

SEQ ID NO: 983443 - RNA, 19 nt, Artificial Sequence
  Description of Artificial Sequence: Synthetic oligonucleotide
aauugcguuuaugacaacc

SEQ ID NO: 983444 - RNA, 19 nt, Artificial Sequence
  Description of Artificial Sequence: Synthetic oligonucleotide
uuugcaaucguuaguaaac

SEQ ID NO: 983445 - RNA, 19 nt, Artificial Sequence
  Description of Artificial Sequence: Synthetic oligonucleotide
aggcaaacgaaucuaaagg

SEQ ID NO: 983446 - RNA, 19 nt, Artificial Sequence
  Description of Artificial Sequence: Synthetic oligonucleotide
aucguuaguaaacugguag

SEQ ID NO: 983447 - RNA, 19 nt, Artificial Sequence
  Description of Artificial Sequence: Synthetic oligonucleotide
accauauacaaaugggugg

SEQ ID NO: 983448 - RNA, 19 nt, Artificial Sequence
  Description of Artificial Sequence: Synthetic oligonucleotide
aaauagcaaaguugcuccc

SEQ ID NO: 983449 - RNA, 19 nt, Artificial Sequence
  Description of Artificial Sequence: Synthetic oligonucleotide
acaaccauaaggcaaacga

SEQ ID NO: 983450 - RNA, 19 nt, Artificial Sequence
  Description of Artificial Sequence: Synthetic oligonucleotide
gaccuaacgcuuuauauag

SEQ ID NO: 983451 - RNA, 19 nt, Artificial Sequence
  Description of Artificial Sequence: Synthetic oligonucleotide
uaacagacggcucuccucg

SEQ ID NO: 983452 - RNA, 19 nt, Artificial Sequence
  Description of Artificial Sequence: Synthetic oligonucleotide
uacuguacauucacuaagg

SEQ ID NO: 983453 - RNA, 19 nt, Artificial Sequence
  Description of Artificial Sequence: Synthetic oligonucleotide
ucugcgaggacgcagaagu

SEQ ID NO: 983454 - RNA, 19 nt, Artificial Sequence
  Description of Artificial Sequence: Synthetic oligonucleotide
ggaaaagucauuuggcugg

SEQ ID NO: 983455 - RNA, 19 nt, Artificial Sequence
  Description of Artificial Sequence: Synthetic oligonucleotide
acagggguugaacugaaac

SEQ ID NO: 983456 - RNA, 19 nt, Artificial Sequence
  Description of Artificial Sequence: Synthetic oligonucleotide
aacgaaucuaaaggaaugg

SEQ ID NO: 983457 - RNA, 19 nt, Artificial Sequence
  Description of Artificial Sequence: Synthetic oligonucleotide
gaccaaauagcaaaguugc

SEQ ID NO: 983458 - RNA, 19 nt, Artificial Sequence
  Description of Artificial Sequence: Synthetic oligonucleotide
auugcgauucuucagguca

SEQ ID NO: 983459 - RNA, 19 nt, Artificial Sequence
  Description of Artificial Sequence: Synthetic oligonucleotide
uauacaaauggguggacac

SEQ ID NO: 983460 - RNA, 19 nt, Artificial Sequence
  Description of Artificial Sequence: Synthetic oligonucleotide
ucuagcgcauaacacgagg

SEQ ID NO: 983461 - RNA, 19 nt, Artificial Sequence
  Description of Artificial Sequence: Synthetic oligonucleotide
acuuacuggaccaaauagc

SEQ ID NO: 983462 - RNA, 19 nt, Artificial Sequence
  Description of Artificial Sequence: Synthetic oligonucleotide
uucgcuauguaugagcucc

SEQ ID NO: 983463 - RNA, 19 nt, Artificial Sequence
  Description of Artificial Sequence: Synthetic oligonucleotide
uguuaagguaaccucuccc

SEQ ID NO: 983464 - RNA, 19 nt, Artificial Sequence
  Description of Artificial Sequence: Synthetic oligonucleotide
ucuaaaggaaugguuauga

SEQ ID NO: 983465 - RNA, 19 nt, Artificial Sequence
  Description of Artificial Sequence: Synthetic oligonucleotide
gucauugcgauucuucagg

SEQ ID NO: 983466 - RNA, 19 nt, Artificial Sequence
  Description of Artificial Sequence: Synthetic oligonucleotide
acuguacauucacuaaggc

SEQ ID NO: 983467 - RNA, 19 nt, Artificial Sequence
  Description of Artificial Sequence: Synthetic oligonucleotide
cuaucgagggcccaagucg

SEQ ID NO: 983468 - RNA, 19 nt, Artificial Sequence
  Description of Artificial Sequence: Synthetic oligonucleotide
guugaggggcucuagaaag

SEQ ID NO: 983469 - RNA, 19 nt, Artificial Sequence
  Description of Artificial Sequence: Synthetic oligonucleotide
acaaaaggaggguggaggg

SEQ ID NO: 983470 - RNA, 19 nt, Artificial Sequence
  Description of Artificial Sequence: Synthetic oligonucleotide
auaugcauugcguccaguc

SEQ ID NO: 983471 - RNA, 19 nt, Artificial Sequence
  Description of Artificial Sequence: Synthetic oligonucleotide
gacgcagaagucuagguac

SEQ ID NO: 983472 - RNA, 19 nt, Artificial Sequence
  Description of Artificial Sequence: Synthetic oligonucleotide
aacucacgccaguagcacc

SEQ ID NO: 983473 - RNA, 19 nt, Artificial Sequence
  Description of Artificial Sequence: Synthetic oligonucleotide
aaaccauauacaaaugggu

SEQ ID NO: 983474 - RNA, 19 nt, Artificial Sequence
  Description of Artificial Sequence: Synthetic oligonucleotide
auaaacaagaaaacugaag

SEQ ID NO: 983475 - RNA, 19 nt, Artificial Sequence
  Description of Artificial Sequence: Synthetic oligonucleotide
ucuagugccuucuuuggug

SEQ ID NO: 983476 - RNA, 19 nt, Artificial Sequence
  Description of Artificial Sequence: Synthetic oligonucleotide
aacacgagggaaaagaaaa

SEQ ID NO: 983477 - RNA, 19 nt, Artificial Sequence
  Description of Artificial Sequence: Synthetic oligonucleotide
aaacgaaucuaaaggaaug

SEQ ID NO: 983478 - RNA, 19 nt, Artificial Sequence
  Description of Artificial Sequence: Synthetic oligonucleotide
uccuacauuuauaucacaa

SEQ ID NO: 983479 - RNA, 19 nt, Artificial Sequence
  Description of Artificial Sequence: Synthetic oligonucleotide
aacgcuuuauauagcuggc

SEQ ID NO: 983480 - RNA, 19 nt, Artificial Sequence
  Description of Artificial Sequence: Synthetic oligonucleotide
ugcuguuaagguaaccucu

SEQ ID NO: 983481 - RNA, 19 nt, Artificial Sequence
  Description of Artificial Sequence: Synthetic oligonucleotide
aagguaaccucucccgcag

SEQ ID NO: 983482 - RNA, 19 nt, Artificial Sequence
  Description of Artificial Sequence: Synthetic oligonucleotide
ugcaaauugcguuuaugac

SEQ ID NO: 983483 - RNA, 19 nt, Artificial Sequence
  Description of Artificial Sequence: Synthetic oligonucleotide
ucgagcgauaugcauugcg

SEQ ID NO: 983484 - RNA, 19 nt, Artificial Sequence
  Description of Artificial Sequence: Synthetic oligonucleotide
cuagaaagauggcauuucc

SEQ ID NO: 983485 - RNA, 19 nt, Artificial Sequence
  Description of Artificial Sequence: Synthetic oligonucleotide
aagcuucuagcgcauaaca

SEQ ID NO: 983486 - RNA, 19 nt, Artificial Sequence
  Description of Artificial Sequence: Synthetic oligonucleotide
gagauagaaaggaaaaguc

SEQ ID NO: 983487 - RNA, 19 nt, Artificial Sequence
  Description of Artificial Sequence: Synthetic oligonucleotide
uaugcauugcguccaguca

SEQ ID NO: 983488 - RNA, 19 nt, Artificial Sequence
  Description of Artificial Sequence: Synthetic oligonucleotide
aggggcucuagaaagaugg

SEQ ID NO: 983489 - RNA, 19 nt, Artificial Sequence
  Description of Artificial Sequence: Synthetic oligonucleotide
gcuucuagcgcauaacacg

SEQ ID NO: 983490 - RNA, 19 nt, Artificial Sequence
  Description of Artificial Sequence: Synthetic oligonucleotide
cuagcgcauaacacgaggg

SEQ ID NO: 983491 - RNA, 19 nt, Artificial Sequence
  Description of Artificial Sequence: Synthetic oligonucleotide
ucacaagguauccacuuac

SEQ ID NO: 983492 - RNA, 19 nt, Artificial Sequence
  Description of Artificial Sequence: Synthetic oligonucleotide
uccaagcagacauaaggca

SEQ ID NO: 983493 - RNA, 19 nt, Artificial Sequence
  Description of Artificial Sequence: Synthetic oligonucleotide
uugcggacgucauugauga

SEQ ID NO: 983494 - RNA, 19 nt, Artificial Sequence
  Description of Artificial Sequence: Synthetic oligonucleotide
guucaagcgcccaucaucg

SEQ ID NO: 983495 - RNA, 19 nt, Artificial Sequence
  Description of Artificial Sequence: Synthetic oligonucleotide
caaauugcguuuaugacaa

SEQ ID NO: 983496 - RNA, 19 nt, Artificial Sequence
  Description of Artificial Sequence: Synthetic oligonucleotide
cacaaaaggaggguggagg

SEQ ID NO: 983497 - RNA, 19 nt, Artificial Sequence
  Description of Artificial Sequence: Synthetic oligonucleotide
acgcugauccccucuacgc

SEQ ID NO: 983498 - RNA, 19 nt, Artificial Sequence
  Description of Artificial Sequence: Synthetic oligonucleotide
uuaugacaaccauaaggca

SEQ ID NO: 983499 - RNA, 19 nt, Artificial Sequence
  Description of Artificial Sequence: Synthetic oligonucleotide
caugccgugaguuccgggg

SEQ ID NO: 983500 - RNA, 19 nt, Artificial Sequence
  Description of Artificial Sequence: Synthetic oligonucleotide
aucaucgccaugcgggucg

SEQ ID NO: 983501 - RNA, 19 nt, Artificial Sequence
  Description of Artificial Sequence: Synthetic oligonucleotide
caaaguugcucccuucugc

SEQ ID NO: 983502 - RNA, 19 nt, Artificial Sequence
  Description of Artificial Sequence: Synthetic oligonucleotide
ucgacggggaucuugguac

SEQ ID NO: 983503 - RNA, 19 nt, Artificial Sequence
  Description of Artificial Sequence: Synthetic oligonucleotide
agauagaaaggaaaaguca

SEQ ID NO: 983504 - RNA, 19 nt, Artificial Sequence
  Description of Artificial Sequence: Synthetic oligonucleotide
cuagguacuguacauucac

SEQ ID NO: 983505 - RNA, 19 nt, Artificial Sequence
  Description of Artificial Sequence: Synthetic oligonucleotide
aagucauuuggcugguggu

SEQ ID NO: 983506 - RNA, 19 nt, Artificial Sequence
  Description of Artificial Sequence: Synthetic oligonucleotide
ucaagcgcccaucaucgcc

SEQ ID NO: 983507 - RNA, 19 nt, Artificial Sequence
  Description of Artificial Sequence: Synthetic oligonucleotide
aagucuagguacuguacau

SEQ ID NO: 983508 - RNA, 19 nt, Artificial Sequence
  Description of Artificial Sequence: Synthetic oligonucleotide
auccccucuacgcuuacgg

SEQ ID NO: 983509 - RNA, 19 nt, Artificial Sequence
  Description of Artificial Sequence: Synthetic oligonucleotide
aaccauaaggcaaacgaau

SEQ ID NO: 983510 - RNA, 19 nt, Artificial Sequence
  Description of Artificial Sequence: Synthetic oligonucleotide
cuggaugucauugcgauuc

SEQ ID NO: 983511 - RNA, 19 nt, Artificial Sequence
  Description of Artificial Sequence: Synthetic oligonucleotide
uaucgagggcccaagucgc

SEQ ID NO: 983512 - RNA, 19 nt, Artificial Sequence
  Description of Artificial Sequence: Synthetic oligonucleotide
cauaacacgagggaaaaga

SEQ ID NO: 983513 - RNA, 19 nt, Artificial Sequence
  Description of Artificial Sequence: Synthetic oligonucleotide
gcaaucguuaguaaacugg

SEQ ID NO: 983514 - RNA, 19 nt, Artificial Sequence
  Description of Artificial Sequence: Synthetic oligonucleotide
ugcgggucgagcgauaugc

SEQ ID NO: 983515 - RNA, 19 nt, Artificial Sequence
  Description of Artificial Sequence: Synthetic oligonucleotide
ugcaaucguuaguaaacug

SEQ ID NO: 983516 - RNA, 19 nt, Artificial Sequence
  Description of Artificial Sequence: Synthetic oligonucleotide
ugucuagccgcuccccagg

SEQ ID NO: 983517 - RNA, 19 nt, Artificial Sequence
  Description of Artificial Sequence: Synthetic oligonucleotide
uuuccagcuaacagacggc

SEQ ID NO: 983518 - RNA, 19 nt, Artificial Sequence
  Description of Artificial Sequence: Synthetic oligonucleotide
caaagaguaggagauucag

SEQ ID NO: 983519 - RNA, 19 nt, Artificial Sequence
  Description of Artificial Sequence: Synthetic oligonucleotide
guuaguaaacugguagcag

SEQ ID NO: 983520 - RNA, 19 nt, Artificial Sequence
  Description of Artificial Sequence: Synthetic oligonucleotide
agagccggcagcucccgcc

SEQ ID NO: 983521 - RNA, 19 nt, Artificial Sequence
  Description of Artificial Sequence: Synthetic oligonucleotide
ccagucauaccaauuaccc

SEQ ID NO: 983522 - RNA, 19 nt, Artificial Sequence
  Description of Artificial Sequence: Synthetic oligonucleotide
aaggaaugguuaugagugu

SEQ ID NO: 983523 - RNA, 19 nt, Artificial Sequence
  Description of Artificial Sequence: Synthetic oligonucleotide
cuugcggacgucauugaug

SEQ ID NO: 983524 - RNA, 19 nt, Artificial Sequence
  Description of Artificial Sequence: Synthetic oligonucleotide
uguaugagcuccgcugccg

SEQ ID NO: 983525 - RNA, 19 nt, Artificial Sequence
  Description of Artificial Sequence: Synthetic oligonucleotide
gcaaauugcguuuaugaca

SEQ ID NO: 983526 - RNA, 19 nt, Artificial Sequence
  Description of Artificial Sequence: Synthetic oligonucleotide
agcagggcaacucacgcca

SEQ ID NO: 983527 - RNA, 19 nt, Artificial Sequence
  Description of Artificial Sequence: Synthetic oligonucleotide
uugcuauagaguucuggac

SEQ ID NO: 983528 - RNA, 19 nt, Artificial Sequence
  Description of Artificial Sequence: Synthetic oligonucleotide
auugucgcuggguuccagg

SEQ ID NO: 983529 - RNA, 19 nt, Artificial Sequence
  Description of Artificial Sequence: Synthetic oligonucleotide
ugguuaugaguguuuccag

SEQ ID NO: 983530 - RNA, 19 nt, Artificial Sequence
  Description of Artificial Sequence: Synthetic oligonucleotide
accauaaggcaaacgaauc

SEQ ID NO: 983531 - RNA, 19 nt, Artificial Sequence
  Description of Artificial Sequence: Synthetic oligonucleotide
gauagaaaggaaaagucau

SEQ ID NO: 983532 - RNA, 19 nt, Artificial Sequence
  Description of Artificial Sequence: Synthetic oligonucleotide
aacagacggcucuccucgc

SEQ ID NO: 983533 - RNA, 19 nt, Artificial Sequence
  Description of Artificial Sequence: Synthetic oligonucleotide
uggugcacuggcucgauga

SEQ ID NO: 983534 - RNA, 19 nt, Artificial Sequence
  Description of Artificial Sequence: Synthetic oligonucleotide
acucacgccaguagcaccc

SEQ ID NO: 983535 - RNA, 19 nt, Artificial Sequence
  Description of Artificial Sequence: Synthetic oligonucleotide
uauagaguucuggacuccc

SEQ ID NO: 983536 - RNA, 19 nt, Artificial Sequence
  Description of Artificial Sequence: Synthetic oligonucleotide
ugcguuuaugacaaccaua

SEQ ID NO: 983537 - RNA, 19 nt, Artificial Sequence
  Description of Artificial Sequence: Synthetic oligonucleotide
caccuucggugcuagaggg

SEQ ID NO: 983538 - RNA, 19 nt, Artificial Sequence
  Description of Artificial Sequence: Synthetic oligonucleotide
uccuagagauguagacagg

SEQ ID NO: 983539 - RNA, 19 nt, Artificial Sequence
  Description of Artificial Sequence: Synthetic oligonucleotide
agcaaaguugcucccuucu

SEQ ID NO: 983540 - RNA, 19 nt, Artificial Sequence
  Description of Artificial Sequence: Synthetic oligonucleotide
aaauugcguuuaugacaac

SEQ ID NO: 983541 - RNA, 19 nt, Artificial Sequence
  Description of Artificial Sequence: Synthetic oligonucleotide
aaaggagccuucaugccgu

SEQ ID NO: 983542 - RNA, 19 nt, Artificial Sequence
  Description of Artificial Sequence: Synthetic oligonucleotide
cuucuagcgcauaacacga

SEQ ID NO: 983543 - RNA, 19 nt, Artificial Sequence
  Description of Artificial Sequence: Synthetic oligonucleotide
ugaccggcaguugugugcg

SEQ ID NO: 983544 - RNA, 19 nt, Artificial Sequence
  Description of Artificial Sequence: Synthetic oligonucleotide
agguacuguacauucacua

SEQ ID NO: 983545 - RNA, 19 nt, Artificial Sequence
  Description of Artificial Sequence: Synthetic oligonucleotide
ugucgcuggguuccaggcg

SEQ ID NO: 983546 - RNA, 19 nt, Artificial Sequence
  Description of Artificial Sequence: Synthetic oligonucleotide
ugagcagcccuuccuuugc

SEQ ID NO: 983547 - RNA, 19 nt, Artificial Sequence
  Description of Artificial Sequence: Synthetic oligonucleotide
cuggagaucacuuccaaua

SEQ ID NO: 983548 - RNA, 19 nt, Artificial Sequence
  Description of Artificial Sequence: Synthetic oligonucleotide
guauccacuuacuggacca

SEQ ID NO: 983549 - RNA, 19 nt, Artificial Sequence
  Description of Artificial Sequence: Synthetic oligonucleotide
ugauguuacucugggaguc

SEQ ID NO: 983550 - RNA, 19 nt, Artificial Sequence
  Description of Artificial Sequence: Synthetic oligonucleotide
agaugagaugugcaucugu

SEQ ID NO: 983551 - RNA, 19 nt, Artificial Sequence
  Description of Artificial Sequence: Synthetic oligonucleotide
auaaggcagaauguucaag

SEQ ID NO: 983552 - RNA, 19 nt, Artificial Sequence
  Description of Artificial Sequence: Synthetic oligonucleotide
ggcaaacgaaucuaaagga

SEQ ID NO: 983553 - RNA, 19 nt, Artificial Sequence
  Description of Artificial Sequence: Synthetic oligonucleotide
ucauugcgauucuucaggu

SEQ ID NO: 983554 - RNA, 19 nt, Artificial Sequence
  Description of Artificial Sequence: Synthetic oligonucleotide
gacaaccauaaggcaaacg

SEQ ID NO: 983555 - RNA, 19 nt, Artificial Sequence
  Description of Artificial Sequence: Synthetic oligonucleotide
cuagccgcuccccaggaag

SEQ ID NO: 983556 - RNA, 19 nt, Artificial Sequence
  Description of Artificial Sequence: Synthetic oligonucleotide
uacgcuuacggcugcccag

SEQ ID NO: 983557 - RNA, 19 nt, Artificial Sequence
  Description of Artificial Sequence: Synthetic oligonucleotide
aacugaaaccauauacaaa

SEQ ID NO: 983558 - RNA, 19 nt, Artificial Sequence
  Description of Artificial Sequence: Synthetic oligonucleotide
cugaccggcaguugugugc

SEQ ID NO: 983559 - RNA, 19 nt, Artificial Sequence
  Description of Artificial Sequence: Synthetic oligonucleotide
uuacuggaccaaauagcaa

SEQ ID NO: 983560 - RNA, 19 nt, Artificial Sequence
  Description of Artificial Sequence: Synthetic oligonucleotide
augcauugcguccagucau

SEQ ID NO: 983561 - RNA, 19 nt, Artificial Sequence
  Description of Artificial Sequence: Synthetic oligonucleotide
guuaugaguguuuccagcu

SEQ ID NO: 983562 - RNA, 19 nt, Artificial Sequence
  Description of Artificial Sequence: Synthetic oligonucleotide
gagguccccaccuucggug

SEQ ID NO: 983563 - RNA, 19 nt, Artificial Sequence
  Description of Artificial Sequence: Synthetic oligonucleotide
gcuuuauauagcuggcuug

SEQ ID NO: 983564 - RNA, 19 nt, Artificial Sequence
  Description of Artificial Sequence: Synthetic oligonucleotide
cuucaugccgugaguuccg

SEQ ID NO: 983565 - RNA, 19 nt, Artificial Sequence
  Description of Artificial Sequence: Synthetic oligonucleotide
ccaagcagacauaaggcag

SEQ ID NO: 983566 - RNA, 19 nt, Artificial Sequence
  Description of Artificial Sequence: Synthetic oligonucleotide
uucuagcgcauaacacgag

SEQ ID NO: 983567 - RNA, 19 nt, Artificial Sequence
  Description of Artificial Sequence: Synthetic oligonucleotide
aaauggguggacaccugug

SEQ ID NO: 983568 - RNA, 19 nt, Artificial Sequence
  Description of Artificial Sequence: Synthetic oligonucleotide
cuaacagacggcucuccuc

SEQ ID NO: 983569 - RNA, 19 nt, Artificial Sequence
  Description of Artificial Sequence: Synthetic oligonucleotide
uugcguuuaugacaaccau

SEQ ID NO: 983570 - RNA, 19 nt, Artificial Sequence
  Description of Artificial Sequence: Synthetic oligonucleotide
cacgccaguagcacccucg

SEQ ID NO: 983571 - RNA, 19 nt, Artificial Sequence
  Description of Artificial Sequence: Synthetic oligonucleotide
gagcgauaugcauugcguc

SEQ ID NO: 983572 - RNA, 19 nt, Artificial Sequence
  Description of Artificial Sequence: Synthetic oligonucleotide
agaagcuucuagcgcauaa

SEQ ID NO: 983573 - RNA, 19 nt, Artificial Sequence
  Description of Artificial Sequence: Synthetic oligonucleotide
aucuaaaggaaugguuaug

SEQ ID NO: 983574 - RNA, 19 nt, Artificial Sequence
  Description of Artificial Sequence: Synthetic oligonucleotide
cuguuaagguaaccucucc

SEQ ID NO: 983575 - RNA, 19 nt, Artificial Sequence
  Description of Artificial Sequence: Synthetic oligonucleotide
agaauguucaagcgcccau

SEQ ID NO: 983576 - RNA, 19 nt, Artificial Sequence
  Description of Artificial Sequence: Synthetic oligonucleotide
ugcccguagggcuaccuca

SEQ ID NO: 983577 - RNA, 19 nt, Artificial Sequence
  Description of Artificial Sequence: Synthetic oligonucleotide
aaccauguuccugauguua

SEQ ID NO: 983578 - RNA, 19 nt, Artificial Sequence
  Description of Artificial Sequence: Synthetic oligonucleotide
aucgccaugcgggucgagc

SEQ ID NO: 983579 - RNA, 19 nt, Artificial Sequence
  Description of Artificial Sequence: Synthetic oligonucleotide
ucgcuauguaugagcuccg

SEQ ID NO: 983580 - RNA, 19 nt, Artificial Sequence
  Description of Artificial Sequence: Synthetic oligonucleotide
gaagcuucuagcgcauaac

SEQ ID NO: 983581 - RNA, 19 nt, Artificial Sequence
  Description of Artificial Sequence: Synthetic oligonucleotide
gcccaggucacgcugaucc

SEQ ID NO: 983582 - RNA, 19 nt, Artificial Sequence
  Description of Artificial Sequence: Synthetic oligonucleotide
augagcuccgcugccgggc

SEQ ID NO: 983583 - RNA, 19 nt, Artificial Sequence
  Description of Artificial Sequence: Synthetic oligonucleotide
uuuauauagcuggcuugcu

SEQ ID NO: 983584 - RNA, 19 nt, Artificial Sequence
  Description of Artificial Sequence: Synthetic oligonucleotide
aguagcacccucgggaacu

SEQ ID NO: 983585 - RNA, 19 nt, Artificial Sequence
  Description of Artificial Sequence: Synthetic oligonucleotide
cacgcugauccccucuacg

SEQ ID NO: 983586 - RNA, 19 nt, Artificial Sequence
  Description of Artificial Sequence: Synthetic oligonucleotide
gucgugucuccucuagugc

SEQ ID NO: 983587 - RNA, 19 nt, Artificial Sequence
  Description of Artificial Sequence: Synthetic oligonucleotide
uaccaugugggguggcccc

SEQ ID NO: 983588 - RNA, 19 nt, Artificial Sequence
  Description of Artificial Sequence: Synthetic oligonucleotide
auagcuggcuugcuauaga

SEQ ID NO: 983589 - RNA, 19 nt, Artificial Sequence
  Description of Artificial Sequence: Synthetic oligonucleotide
acgaaucuaaaggaauggu

SEQ ID NO: 983590 - RNA, 19 nt, Artificial Sequence
  Description of Artificial Sequence: Synthetic oligonucleotide
ggucgagcgauaugcauug

SEQ ID NO: 983591 - RNA, 19 nt, Artificial Sequence
  Description of Artificial Sequence: Synthetic oligonucleotide
uccugugccugccugccac

SEQ ID NO: 983592 - RNA, 19 nt, Artificial Sequence
  Description of Artificial Sequence: Synthetic oligonucleotide
gguauccacuuacuggacc

SEQ ID NO: 983593 - RNA, 19 nt, Artificial Sequence
  Description of Artificial Sequence: Synthetic oligonucleotide
uucgacggggaucuuggua

SEQ ID NO: 983594 - RNA, 19 nt, Artificial Sequence
  Description of Artificial Sequence: Synthetic oligonucleotide
accucugaccggcaguugu

SEQ ID NO: 983595 - RNA, 19 nt, Artificial Sequence
  Description of Artificial Sequence: Synthetic oligonucleotide
auggguggacaccugugca

SEQ ID NO: 983596 - RNA, 19 nt, Artificial Sequence
  Description of Artificial Sequence: Synthetic oligonucleotide
agcuaacagacggcucucc

SEQ ID NO: 983597 - RNA, 19 nt, Artificial Sequence
  Description of Artificial Sequence: Synthetic oligonucleotide
ggcaacucacgccaguagc

SEQ ID NO: 983598 - RNA, 19 nt, Artificial Sequence
  Description of Artificial Sequence: Synthetic oligonucleotide
gaauguucaagcgcccauc

SEQ ID NO: 983599 - RNA, 19 nt, Artificial Sequence
  Description of Artificial Sequence: Synthetic oligonucleotide
cauugcguccagucauacc

SEQ ID NO: 983600 - RNA, 19 nt, Artificial Sequence
  Description of Artificial Sequence: Synthetic oligonucleotide
accuaacgcuuuauauagc

SEQ ID NO: 983601 - RNA, 19 nt, Artificial Sequence
  Description of Artificial Sequence: Synthetic oligonucleotide
caaucguuaguaaacuggu

SEQ ID NO: 983602 - RNA, 19 nt, Artificial Sequence
  Description of Artificial Sequence: Synthetic oligonucleotide
augaguguuuccagcuaac

SEQ ID NO: 983603 - RNA, 19 nt, Artificial Sequence
  Description of Artificial Sequence: Synthetic oligonucleotide
ucuugcggacgucauugau

SEQ ID NO: 983604 - RNA, 19 nt, Artificial Sequence
  Description of Artificial Sequence: Synthetic oligonucleotide
guagggcuaccucauucug

SEQ ID NO: 983605 - RNA, 19 nt, Artificial Sequence
  Description of Artificial Sequence: Synthetic oligonucleotide
agcccuucgcuauguauga

SEQ ID NO: 983606 - RNA, 19 nt, Artificial Sequence
  Description of Artificial Sequence: Synthetic oligonucleotide
caaacgaaucuaaaggaau

SEQ ID NO: 983607 - RNA, 19 nt, Artificial Sequence
  Description of Artificial Sequence: Synthetic oligonucleotide
caaccauaaggcaaacgaa

SEQ ID NO: 983608 - RNA, 19 nt, Artificial Sequence
  Description of Artificial Sequence: Synthetic oligonucleotide
uagcagcauuucacaaaag

SEQ ID NO: 983609 - RNA, 19 nt, Artificial Sequence
  Description of Artificial Sequence: Synthetic oligonucleotide
cauuuccuagagauguaga

SEQ ID NO: 983610 - RNA, 19 nt, Artificial Sequence
  Description of Artificial Sequence: Synthetic oligonucleotide
cugguagcagcauuucaca

SEQ ID NO: 983611 - RNA, 19 nt, Artificial Sequence
  Description of Artificial Sequence: Synthetic oligonucleotide
aggacgcagaagucuaggu

SEQ ID NO: 983612 - RNA, 19 nt, Artificial Sequence
  Description of Artificial Sequence: Synthetic oligonucleotide
ucugaccggcaguugugug

SEQ ID NO: 983613 - RNA, 19 nt, Artificial Sequence
  Description of Artificial Sequence: Synthetic oligonucleotide
gacacagagcccuucgcua

SEQ ID NO: 983614 - RNA, 19 nt, Artificial Sequence
  Description of Artificial Sequence: Synthetic oligonucleotide
accggcaguugugugcgcc

SEQ ID NO: 983615 - RNA, 19 nt, Artificial Sequence
  Description of Artificial Sequence: Synthetic oligonucleotide
ucaugccgugaguuccggg

SEQ ID NO: 983616 - RNA, 19 nt, Artificial Sequence
  Description of Artificial Sequence: Synthetic oligonucleotide
cuauagaguucuggacucc

SEQ ID NO: 983617 - RNA, 19 nt, Artificial Sequence
  Description of Artificial Sequence: Synthetic oligonucleotide
aucacaagguauccacuua

SEQ ID NO: 983618 - RNA, 19 nt, Artificial Sequence
  Description of Artificial Sequence: Synthetic oligonucleotide
cacuuccaauacugcaacc

SEQ ID NO: 983619 - RNA, 19 nt, Artificial Sequence
  Description of Artificial Sequence: Synthetic oligonucleotide
cuagugccuucuuugguga

SEQ ID NO: 983620 - RNA, 19 nt, Artificial Sequence
  Description of Artificial Sequence: Synthetic oligonucleotide
acgccaguagcacccucgg

SEQ ID NO: 983621 - RNA, 19 nt, Artificial Sequence
  Description of Artificial Sequence: Synthetic oligonucleotide
agagcccuucgcuauguau

SEQ ID NO: 983622 - RNA, 19 nt, Artificial Sequence
  Description of Artificial Sequence: Synthetic oligonucleotide
aaaagucauuuggcuggug

SEQ ID NO: 983623 - RNA, 19 nt, Artificial Sequence
  Description of Artificial Sequence: Synthetic oligonucleotide
ucuacgcuuacggcugccc

SEQ ID NO: 983624 - RNA, 19 nt, Artificial Sequence
  Description of Artificial Sequence: Synthetic oligonucleotide
uugcgauucuucaggucau

SEQ ID NO: 983625 - RNA, 19 nt, Artificial Sequence
  Description of Artificial Sequence: Synthetic oligonucleotide
gguacuguacauucacuaa

SEQ ID NO: 983626 - RNA, 19 nt, Artificial Sequence
  Description of Artificial Sequence: Synthetic oligonucleotide
ucccucugccaucugcccu

SEQ ID NO: 983627 - RNA, 19 nt, Artificial Sequence
  Description of Artificial Sequence: Synthetic oligonucleotide
aaucguuaguaaacuggua

SEQ ID NO: 983628 - RNA, 19 nt, Artificial Sequence
  Description of Artificial Sequence: Synthetic oligonucleotide
cauugcgauucuucagguc

SEQ ID NO: 983629 - RNA, 19 nt, Artificial Sequence
  Description of Artificial Sequence: Synthetic oligonucleotide
uccccucuacgcuuacggc

SEQ ID NO: 983630 - RNA, 19 nt, Artificial Sequence
  Description of Artificial Sequence: Synthetic oligonucleotide
gcguuuaugacaaccauaa

SEQ ID NO: 983631 - RNA, 19 nt, Artificial Sequence
  Description of Artificial Sequence: Synthetic oligonucleotide
agcgcauaacacgagggaa

SEQ ID NO: 983632 - RNA, 19 nt, Artificial Sequence
  Description of Artificial Sequence: Synthetic oligonucleotide
uccagcuaacagacggcuc

SEQ ID NO: 983633 - RNA, 19 nt, Artificial Sequence
  Description of Artificial Sequence: Synthetic oligonucleotide
ggaccuaacgcuuuauaua

SEQ ID NO: 983634 - RNA, 19 nt, Artificial Sequence
  Description of Artificial Sequence: Synthetic oligonucleotide
uucaugccgugaguuccgg

SEQ ID NO: 983635 - RNA, 19 nt, Artificial Sequence
  Description of Artificial Sequence: Synthetic oligonucleotide
gguagcagcauuucacaaa

SEQ ID NO: 983636 - RNA, 19 nt, Artificial Sequence
  Description of Artificial Sequence: Synthetic oligonucleotide
ggagucgauggccugcagc

SEQ ID NO: 983637 - RNA, 19 nt, Artificial Sequence
  Description of Artificial Sequence: Synthetic oligonucleotide
cuggcuacucccaccucug

SEQ ID NO: 983638 - RNA, 19 nt, Artificial Sequence
  Description of Artificial Sequence: Synthetic oligonucleotide
cagcagggcaacucacgcc

SEQ ID NO: 983639 - RNA, 19 nt, Artificial Sequence
  Description of Artificial Sequence: Synthetic oligonucleotide
cuaccaugugggguggccc

SEQ ID NO: 983640 - RNA, 19 nt, Artificial Sequence
  Description of Artificial Sequence: Synthetic oligonucleotide
caagcgcccaucaucgcca

SEQ ID NO: 983641 - RNA, 19 nt, Artificial Sequence
  Description of Artificial Sequence: Synthetic oligonucleotide
agguaaccucucccgcagg

SEQ ID NO: 983642 - RNA, 19 nt, Artificial Sequence
  Description of Artificial Sequence: Synthetic oligonucleotide
uucaagcgcccaucaucgc

SEQ ID NO: 983643 - RNA, 19 nt, Artificial Sequence
  Description of Artificial Sequence: Synthetic oligonucleotide
ugugagguugaggggcucu

SEQ ID NO: 983644 - RNA, 19 nt, Artificial Sequence
  Description of Artificial Sequence: Synthetic oligonucleotide
gcggacgucauugaugagc

SEQ ID NO: 983645 - RNA, 19 nt, Artificial Sequence
  Description of Artificial Sequence: Synthetic oligonucleotide
ugugccugccugccacuga

SEQ ID NO: 983646 - RNA, 19 nt, Artificial Sequence
  Description of Artificial Sequence: Synthetic oligonucleotide
uugcguccagucauaccaa

SEQ ID NO: 983647 - RNA, 19 nt, Artificial Sequence
  Description of Artificial Sequence: Synthetic oligonucleotide
agguauccacuuacuggac

SEQ ID NO: 983648 - RNA, 19 nt, Artificial Sequence
  Description of Artificial Sequence: Synthetic oligonucleotide
aggaaugguuaugaguguu

SEQ ID NO: 983649 - RNA, 19 nt, Artificial Sequence
  Description of Artificial Sequence: Synthetic oligonucleotide
cuucgcuauguaugagcuc

SEQ ID NO: 983650 - RNA, 19 nt, Artificial Sequence
  Description of Artificial Sequence: Synthetic oligonucleotide
acggcguucgacggggauc

SEQ ID NO: 983651 - RNA, 19 nt, Artificial Sequence
  Description of Artificial Sequence: Synthetic oligonucleotide
ucacgcugauccccucuac

SEQ ID NO: 983652 - RNA, 19 nt, Artificial Sequence
  Description of Artificial Sequence: Synthetic oligonucleotide
ccuucaugccgugaguucc

SEQ ID NO: 983653 - RNA, 19 nt, Artificial Sequence
  Description of Artificial Sequence: Synthetic oligonucleotide
caacucacgccaguagcac

SEQ ID NO: 983654 - RNA, 19 nt, Artificial Sequence
  Description of Artificial Sequence: Synthetic oligonucleotide
cuggcuggccagccuaccc

SEQ ID NO: 983655 - RNA, 19 nt, Artificial Sequence
  Description of Artificial Sequence: Synthetic oligonucleotide
cccuucgcuauguaugagc

SEQ ID NO: 983656 - RNA, 19 nt, Artificial Sequence
  Description of Artificial Sequence: Synthetic oligonucleotide
ucuggaugucauugcgauu

SEQ ID NO: 983657 - RNA, 19 nt, Artificial Sequence
  Description of Artificial Sequence: Synthetic oligonucleotide
gcacuugauggccaggcca

SEQ ID NO: 983658 - RNA, 19 nt, Artificial Sequence
  Description of Artificial Sequence: Synthetic oligonucleotide
acgcuuuauauagcuggcu

SEQ ID NO: 983659 - RNA, 19 nt, Artificial Sequence
  Description of Artificial Sequence: Synthetic oligonucleotide
ugcgauucuucaggucaug

SEQ ID NO: 983660 - RNA, 19 nt, Artificial Sequence
  Description of Artificial Sequence: Synthetic oligonucleotide
cguucgacggggaucuugg

SEQ ID NO: 983661 - RNA, 19 nt, Artificial Sequence
  Description of Artificial Sequence: Synthetic oligonucleotide
uucggugcuagaggggcuc

SEQ ID NO: 983662 - RNA, 19 nt, Artificial Sequence
  Description of Artificial Sequence: Synthetic oligonucleotide
ccaccuucggugcuagagg

SEQ ID NO: 983663 - RNA, 19 nt, Artificial Sequence
  Description of Artificial Sequence: Synthetic oligonucleotide
aucgagggcccaagucgcc

SEQ ID NO: 983664 - RNA, 19 nt, Artificial Sequence
  Description of Artificial Sequence: Synthetic oligonucleotide
guucaccauagcagagaag

SEQ ID NO: 983665 - RNA, 19 nt, Artificial Sequence
  Description of Artificial Sequence: Synthetic oligonucleotide
gcgauucuucaggucaugg

SEQ ID NO: 983666 - RNA, 19 nt, Artificial Sequence
  Description of Artificial Sequence: Synthetic oligonucleotide
uauccacuuacuggaccaa

SEQ ID NO: 983667 - RNA, 19 nt, Artificial Sequence
  Description of Artificial Sequence: Synthetic oligonucleotide
auguucaagcgcccaucau

SEQ ID NO: 983668 - RNA, 19 nt, Artificial Sequence
  Description of Artificial Sequence: Synthetic oligonucleotide
gccaggguucaccauagca

SEQ ID NO: 983669 - RNA, 19 nt, Artificial Sequence
  Description of Artificial Sequence: Synthetic oligonucleotide
ugacaaccauaaggcaaac

SEQ ID NO: 983670 - RNA, 19 nt, Artificial Sequence
  Description of Artificial Sequence: Synthetic oligonucleotide
ucuagccgcuccccaggaa

SEQ ID NO: 983671 - RNA, 19 nt, Artificial Sequence
  Description of Artificial Sequence: Synthetic oligonucleotide
auguuacucugggagucga

SEQ ID NO: 983672 - RNA, 19 nt, Artificial Sequence
  Description of Artificial Sequence: Synthetic oligonucleotide
uggcuacucccaccucuga

SEQ ID NO: 983673 - RNA, 19 nt, Artificial Sequence
  Description of Artificial Sequence: Synthetic oligonucleotide
gguugaggggcucuagaaa

SEQ ID NO: 983674 - RNA, 19 nt, Artificial Sequence
  Description of Artificial Sequence: Synthetic oligonucleotide
cugauguuacucugggagu

SEQ ID NO: 983675 - RNA, 19 nt, Artificial Sequence
  Description of Artificial Sequence: Synthetic oligonucleotide
guaaacugguagcagcauu

SEQ ID NO: 983676 - RNA, 19 nt, Artificial Sequence
  Description of Artificial Sequence: Synthetic oligonucleotide
uggcuaucgagggcccaag

SEQ ID NO: 983677 - RNA, 19 nt, Artificial Sequence
  Description of Artificial Sequence: Synthetic oligonucleotide
gcucaguccaagcagacau

SEQ ID NO: 983678 - RNA, 19 nt, Artificial Sequence
  Description of Artificial Sequence: Synthetic oligonucleotide
cuucccgggucgugucucc

SEQ ID NO: 983679 - RNA, 19 nt, Artificial Sequence
  Description of Artificial Sequence: Synthetic oligonucleotide
uugggugugcuggcuacuc

SEQ ID NO: 983680 - RNA, 19 nt, Artificial Sequence
  Description of Artificial Sequence: Synthetic oligonucleotide
cacagagcccuucgcuaug

SEQ ID NO: 983681 - RNA, 19 nt, Artificial Sequence
  Description of Artificial Sequence: Synthetic oligonucleotide
gcgcccaucaucgccaugc

SEQ ID NO: 983682 - RNA, 19 nt, Artificial Sequence
  Description of Artificial Sequence: Synthetic oligonucleotide
cuacgcuuacggcugccca

SEQ ID NO: 983683 - RNA, 19 nt, Artificial Sequence
  Description of Artificial Sequence: Synthetic oligonucleotide
gguuuucuugcggacguca

SEQ ID NO: 983684 - RNA, 19 nt, Artificial Sequence
  Description of Artificial Sequence: Synthetic oligonucleotide
accaugugggguggccccg

SEQ ID NO: 983685 - RNA, 19 nt, Artificial Sequence
  Description of Artificial Sequence: Synthetic oligonucleotide
ccuaacgcuuuauauagcu

SEQ ID NO: 983686 - RNA, 19 nt, Artificial Sequence
  Description of Artificial Sequence: Synthetic oligonucleotide
cccucuacgcuuacggcug

SEQ ID NO: 983687 - RNA, 19 nt, Artificial Sequence
  Description of Artificial Sequence: Synthetic oligonucleotide
aggcggcuggcuaucgagg

SEQ ID NO: 983688 - RNA, 19 nt, Artificial Sequence
  Description of Artificial Sequence: Synthetic oligonucleotide
cucgggaacuuugugaggu

SEQ ID NO: 983689 - RNA, 19 nt, Artificial Sequence
  Description of Artificial Sequence: Synthetic oligonucleotide
gcuguuaagguaaccucuc

SEQ ID NO: 983690 - RNA, 19 nt, Artificial Sequence
  Description of Artificial Sequence: Synthetic oligonucleotide
gggcaacucacgccaguag

SEQ ID NO: 983691 - RNA, 19 nt, Artificial Sequence
  Description of Artificial Sequence: Synthetic oligonucleotide
uccaggcggcuggcuaucg

SEQ ID NO: 983692 - RNA, 19 nt, Artificial Sequence
  Description of Artificial Sequence: Synthetic oligonucleotide
ugauccccucuacgcuuac

SEQ ID NO: 983693 - RNA, 19 nt, Artificial Sequence
  Description of Artificial Sequence: Synthetic oligonucleotide
ucccgccagugcccguagg

SEQ ID NO: 983694 - RNA, 19 nt, Artificial Sequence
  Description of Artificial Sequence: Synthetic oligonucleotide
ggcuacucccaccucugac

SEQ ID NO: 983695 - RNA, 19 nt, Artificial Sequence
  Description of Artificial Sequence: Synthetic oligonucleotide
gacggggaucuugguacug

SEQ ID NO: 983696 - RNA, 19 nt, Artificial Sequence
  Description of Artificial Sequence: Synthetic oligonucleotide
cagaauguucaagcgccca

SEQ ID NO: 983697 - RNA, 19 nt, Artificial Sequence
  Description of Artificial Sequence: Synthetic oligonucleotide
gggaccuaacgcuuuauau

SEQ ID NO: 983698 - RNA, 19 nt, Artificial Sequence
  Description of Artificial Sequence: Synthetic oligonucleotide
ggacgcagaagucuaggua

SEQ ID NO: 983699 - RNA, 19 nt, Artificial Sequence
  Description of Artificial Sequence: Synthetic oligonucleotide
ucgcuggguuccaggcggc

SEQ ID NO: 983700 - RNA, 19 nt, Artificial Sequence
  Description of Artificial Sequence: Synthetic oligonucleotide
cuggcucacccgcccaaug

SEQ ID NO: 983701 - RNA, 19 nt, Artificial Sequence
  Description of Artificial Sequence: Synthetic oligonucleotide
cacaagguauccacuuacu

SEQ ID NO: 983702 - RNA, 19 nt, Artificial Sequence
  Description of Artificial Sequence: Synthetic oligonucleotide
acgcagaagucuagguacu

SEQ ID NO: 983703 - RNA, 19 nt, Artificial Sequence
  Description of Artificial Sequence: Synthetic oligonucleotide
ggugcuagaggggcucugc

SEQ ID NO: 983704 - RNA, 19 nt, Artificial Sequence
  Description of Artificial Sequence: Synthetic oligonucleotide
uagugccuucuuuggugau

SEQ ID NO: 983705 - RNA, 19 nt, Artificial Sequence
  Description of Artificial Sequence: Synthetic oligonucleotide
cacccucgggaacuuugug

SEQ ID NO: 983706 - RNA, 19 nt, Artificial Sequence
  Description of Artificial Sequence: Synthetic oligonucleotide
aagcgcccaucaucgccau

SEQ ID NO: 983707 - RNA, 19 nt, Artificial Sequence
  Description of Artificial Sequence: Synthetic oligonucleotide
gaacagggguugaacugaa

SEQ ID NO: 983708 - RNA, 19 nt, Artificial Sequence
  Description of Artificial Sequence: Synthetic oligonucleotide
acauucacuaaggcuccuu

SEQ ID NO: 983709 - RNA, 19 nt, Artificial Sequence
  Description of Artificial Sequence: Synthetic oligonucleotide
gagcagcccuuccuuugca

SEQ ID NO: 983710 - RNA, 19 nt, Artificial Sequence
  Description of Artificial Sequence: Synthetic oligonucleotide
augcgggucgagcgauaug

SEQ ID NO: 983711 - RNA, 19 nt, Artificial Sequence
  Description of Artificial Sequence: Synthetic oligonucleotide
cugcgaggacgcagaaguc

SEQ ID NO: 983712 - RNA, 19 nt, Artificial Sequence
  Description of Artificial Sequence: Synthetic oligonucleotide
aacagggguugaacugaaa

SEQ ID NO: 983713 - RNA, 19 nt, Artificial Sequence
  Description of Artificial Sequence: Synthetic oligonucleotide
gccgcacggcguucgacgg

SEQ ID NO: 983714 - RNA, 19 nt, Artificial Sequence
  Description of Artificial Sequence: Synthetic oligonucleotide
gcgauaugcauugcgucca

SEQ ID NO: 983715 - RNA, 19 nt, Artificial Sequence
  Description of Artificial Sequence: Synthetic oligonucleotide
gcccaucaucgccaugcgg

SEQ ID NO: 983716 - RNA, 19 nt, Artificial Sequence
  Description of Artificial Sequence: Synthetic oligonucleotide
uggcccucuuggcuagcuc

SEQ ID NO: 983717 - RNA, 19 nt, Artificial Sequence
  Description of Artificial Sequence: Synthetic oligonucleotide
augagcuucccgggucgug

SEQ ID NO: 983718 - RNA, 19 nt, Artificial Sequence
  Description of Artificial Sequence: Synthetic oligonucleotide
cucuacgcuuacggcugcc

SEQ ID NO: 983719 - RNA, 19 nt, Artificial Sequence
  Description of Artificial Sequence: Synthetic oligonucleotide
ugguuuucuugcggacguc

SEQ ID NO: 983720 - RNA, 19 nt, Artificial Sequence
  Description of Artificial Sequence: Synthetic oligonucleotide
cucccgcagguuuccugug

SEQ ID NO: 983721 - RNA, 19 nt, Artificial Sequence
  Description of Artificial Sequence: Synthetic oligonucleotide
cguuaguaaacugguagca

SEQ ID NO: 983722 - RNA, 19 nt, Artificial Sequence
  Description of Artificial Sequence: Synthetic oligonucleotide
ccauaaggcaaacgaaucu

SEQ ID NO: 983723 - RNA, 19 nt, Artificial Sequence
  Description of Artificial Sequence: Synthetic oligonucleotide
ccucgggaacuuugugagg

SEQ ID NO: 983724 - RNA, 19 nt, Artificial Sequence
  Description of Artificial Sequence: Synthetic oligonucleotide
ccguagggcuaccucauuc

SEQ ID NO: 983725 - RNA, 19 nt, Artificial Sequence
  Description of Artificial Sequence: Synthetic oligonucleotide
agucgcccacuaccaugug

SEQ ID NO: 983726 - RNA, 19 nt, Artificial Sequence
  Description of Artificial Sequence: Synthetic oligonucleotide
ccaaugccaggguucacca

SEQ ID NO: 983727 - RNA, 19 nt, Artificial Sequence
  Description of Artificial Sequence: Synthetic oligonucleotide
gucuagccgcuccccagga

SEQ ID NO: 983728 - RNA, 19 nt, Artificial Sequence
  Description of Artificial Sequence: Synthetic oligonucleotide
ccuucugcgaggacgcaga

SEQ ID NO: 983729 - RNA, 19 nt, Artificial Sequence
  Description of Artificial Sequence: Synthetic oligonucleotide
ugcuggcuacucccaccuc

SEQ ID NO: 983730 - RNA, 19 nt, Artificial Sequence
  Description of Artificial Sequence: Synthetic oligonucleotide
cccgcagguuuccugugcc

SEQ ID NO: 983731 - RNA, 19 nt, Artificial Sequence
  Description of Artificial Sequence: Synthetic oligonucleotide
gugcccguagggcuaccuc

SEQ ID NO: 983732 - RNA, 19 nt, Artificial Sequence
  Description of Artificial Sequence: Synthetic oligonucleotide
ccuucgcuauguaugagcu

SEQ ID NO: 983733 - RNA, 19 nt, Artificial Sequence
  Description of Artificial Sequence: Synthetic oligonucleotide
gcuauguaugagcuccgcu

SEQ ID NO: 983734 - RNA, 19 nt, Artificial Sequence
  Description of Artificial Sequence: Synthetic oligonucleotide
gguaaccucucccgcaggu

SEQ ID NO: 983735 - RNA, 19 nt, Artificial Sequence
  Description of Artificial Sequence: Synthetic oligonucleotide
ucccgggucgugucuccuc

SEQ ID NO: 983736 - RNA, 19 nt, Artificial Sequence
  Description of Artificial Sequence: Synthetic oligonucleotide
gauaugcauugcguccagu

SEQ ID NO: 983737 - RNA, 19 nt, Artificial Sequence
  Description of Artificial Sequence: Synthetic oligonucleotide
ucaucgccaugcgggucga

SEQ ID NO: 983738 - RNA, 19 nt, Artificial Sequence
  Description of Artificial Sequence: Synthetic oligonucleotide
cugauccccucuacgcuua

SEQ ID NO: 983739 - RNA, 19 nt, Artificial Sequence
  Description of Artificial Sequence: Synthetic oligonucleotide
gggugagccucaugcucgc

SEQ ID NO: 983740 - RNA, 19 nt, Artificial Sequence
  Description of Artificial Sequence: Synthetic oligonucleotide
ccucugaccggcaguugug

SEQ ID NO: 983741 - RNA, 19 nt, Artificial Sequence
  Description of Artificial Sequence: Synthetic oligonucleotide
ucggugcuagaggggcucu

SEQ ID NO: 983742 - RNA, 19 nt, Artificial Sequence
  Description of Artificial Sequence: Synthetic oligonucleotide
cuaccucauucuggugcac

SEQ ID NO: 983743 - RNA, 19 nt, Artificial Sequence
  Description of Artificial Sequence: Synthetic oligonucleotide
gcccagccugucuagccgc

SEQ ID NO: 983744 - RNA, 19 nt, Artificial Sequence
  Description of Artificial Sequence: Synthetic oligonucleotide
agccaaagaguaggagauu

SEQ ID NO: 983745 - RNA, 19 nt, Artificial Sequence
  Description of Artificial Sequence: Synthetic oligonucleotide
agcagacauaaggcagaau

SEQ ID NO: 983746 - RNA, 19 nt, Artificial Sequence
  Description of Artificial Sequence: Synthetic oligonucleotide
gcgcauaacacgagggaaa

SEQ ID NO: 983747 - RNA, 19 nt, Artificial Sequence
  Description of Artificial Sequence: Synthetic oligonucleotide
gucgagcgauaugcauugc

SEQ ID NO: 983748 - RNA, 19 nt, Artificial Sequence
  Description of Artificial Sequence: Synthetic oligonucleotide
gaccggcaguugugugcgc

SEQ ID NO: 983749 - RNA, 19 nt, Artificial Sequence
  Description of Artificial Sequence: Synthetic oligonucleotide
gcuaacagacggcucuccu

SEQ ID NO: 983750 - RNA, 19 nt, Artificial Sequence
  Description of Artificial Sequence: Synthetic oligonucleotide
gauggccaggccaggugcu

SEQ ID NO: 983751 - RNA, 19 nt, Artificial Sequence
  Description of Artificial Sequence: Synthetic oligonucleotide
uucccgggucgugucuccu

SEQ ID NO: 983752 - RNA, 19 nt, Artificial Sequence
  Description of Artificial Sequence: Synthetic oligonucleotide
cagagccggcagcucccgc

SEQ ID NO: 983753 - RNA, 19 nt, Artificial Sequence
  Description of Artificial Sequence: Synthetic oligonucleotide
cacuaccaugugggguggc

SEQ ID NO: 983754 - RNA, 19 nt, Artificial Sequence
  Description of Artificial Sequence: Synthetic oligonucleotide
ccggcaguugugugcgccc

SEQ ID NO: 983755 - RNA, 19 nt, Artificial Sequence
  Description of Artificial Sequence: Synthetic oligonucleotide
agccggcagcucccgccag

SEQ ID NO: 983756 - RNA, 19 nt, Artificial Sequence
  Description of Artificial Sequence: Synthetic oligonucleotide
agcgcccaucaucgccaug

SEQ ID NO: 983757 - RNA, 19 nt, Artificial Sequence
  Description of Artificial Sequence: Synthetic oligonucleotide
cucccgccagugcccguag

SEQ ID NO: 983758 - RNA, 19 nt, Artificial Sequence
  Description of Artificial Sequence: Synthetic oligonucleotide
guuuucuugcggacgucau

SEQ ID NO: 983759 - RNA, 19 nt, Artificial Sequence
  Description of Artificial Sequence: Synthetic oligonucleotide
ggggaccuaacgcuuuaua

SEQ ID NO: 983760 - RNA, 19 nt, Artificial Sequence
  Description of Artificial Sequence: Synthetic oligonucleotide
gcggcuggcuaucgagggc

SEQ ID NO: 983761 - RNA, 19 nt, Artificial Sequence
  Description of Artificial Sequence: Synthetic oligonucleotide
cuggcuaucgagggcccaa

SEQ ID NO: 983762 - RNA, 19 nt, Artificial Sequence
  Description of Artificial Sequence: Synthetic oligonucleotide
cuggaccaaauagcaaagu

SEQ ID NO: 983763 - RNA, 19 nt, Artificial Sequence
  Description of Artificial Sequence: Synthetic oligonucleotide
ccgcccaaugccaggguuc

SEQ ID NO: 983764 - RNA, 19 nt, Artificial Sequence
  Description of Artificial Sequence: Synthetic oligonucleotide
cuucugcgaggacgcagaa

SEQ ID NO: 983765 - RNA, 19 nt, Artificial Sequence
  Description of Artificial Sequence: Synthetic oligonucleotide
gcguucgacggggaucuug

SEQ ID NO: 983766 - RNA, 19 nt, Artificial Sequence
  Description of Artificial Sequence: Synthetic oligonucleotide
cuccucguucuugguuuuc

SEQ ID NO: 983767 - RNA, 19 nt, Artificial Sequence
  Description of Artificial Sequence: Synthetic oligonucleotide
cuccagacuggagaucacu

SEQ ID NO: 983768 - RNA, 19 nt, Artificial Sequence
  Description of Artificial Sequence: Synthetic oligonucleotide
gcuccgcagaagccucuug

SEQ ID NO: 983769 - RNA, 19 nt, Artificial Sequence
  Description of Artificial Sequence: Synthetic oligonucleotide
cggcuggcuaucgagggcc

SEQ ID NO: 983770 - RNA, 19 nt, Artificial Sequence
  Description of Artificial Sequence: Synthetic oligonucleotide
gaugagcuucccgggucgu

SEQ ID NO: 983771 - RNA, 19 nt, Artificial Sequence
  Description of Artificial Sequence: Synthetic oligonucleotide
cgauaugcauugcguccag

SEQ ID NO: 983772 - RNA, 19 nt, Artificial Sequence
  Description of Artificial Sequence: Synthetic oligonucleotide
ccuuugcaaucguuaguaa

SEQ ID NO: 983773 - RNA, 19 nt, Artificial Sequence
  Description of Artificial Sequence: Synthetic oligonucleotide
ccucuacgcuuacggcugc

SEQ ID NO: 983774 - RNA, 19 nt, Artificial Sequence
  Description of Artificial Sequence: Synthetic oligonucleotide
gggagucgauggccugcag

SEQ ID NO: 983775 - RNA, 19 nt, Artificial Sequence
  Description of Artificial Sequence: Synthetic oligonucleotide
ccacuaccauguggggugg

SEQ ID NO: 983776 - RNA, 19 nt, Artificial Sequence
  Description of Artificial Sequence: Synthetic oligonucleotide
ggaaugguuaugaguguuu

SEQ ID NO: 983777 - RNA, 19 nt, Artificial Sequence
  Description of Artificial Sequence: Synthetic oligonucleotide
gcugauccccucuacgcuu

SEQ ID NO: 983778 - RNA, 19 nt, Artificial Sequence
  Description of Artificial Sequence: Synthetic oligonucleotide
cgcacggcguucgacgggg

SEQ ID NO: 983779 - RNA, 19 nt, Artificial Sequence
  Description of Artificial Sequence: Synthetic oligonucleotide
uggcuuggccgaggccaga

SEQ ID NO: 983780 - RNA, 19 nt, Artificial Sequence
  Description of Artificial Sequence: Synthetic oligonucleotide
cgagcgauaugcauugcgu

SEQ ID NO: 983781 - RNA, 19 nt, Artificial Sequence
  Description of Artificial Sequence: Synthetic oligonucleotide
ccccucuacgcuuacggcu

SEQ ID NO: 983782 - RNA, 19 nt, Artificial Sequence
  Description of Artificial Sequence: Synthetic oligonucleotide
guucgacggggaucuuggu

SEQ ID NO: 983783 - RNA, 19 nt, Artificial Sequence
  Description of Artificial Sequence: Synthetic oligonucleotide
cggggaucuugguacugug

SEQ ID NO: 983784 - RNA, 19 nt, Artificial Sequence
  Description of Artificial Sequence: Synthetic oligonucleotide
cucugaccggcaguugugu

SEQ ID NO: 983785 - RNA, 19 nt, Artificial Sequence
  Description of Artificial Sequence: Synthetic oligonucleotide
cgggucgugucuccucuag

SEQ ID NO: 983786 - RNA, 19 nt, Artificial Sequence
  Description of Artificial Sequence: Synthetic oligonucleotide
ggugagccucaugcucgcc

SEQ ID NO: 983787 - RNA, 19 nt, Artificial Sequence
  Description of Artificial Sequence: Synthetic oligonucleotide
gcccuucgcuauguaugag

SEQ ID NO: 983788 - RNA, 19 nt, Artificial Sequence
  Description of Artificial Sequence: Synthetic oligonucleotide
gcucacccgcccaaugcca

SEQ ID NO: 983789 - RNA, 19 nt, Artificial Sequence
  Description of Artificial Sequence: Synthetic oligonucleotide
gggucgagcgauaugcauu

SEQ ID NO: 983790 - RNA, 19 nt, Artificial Sequence
  Description of Artificial Sequence: Synthetic oligonucleotide
cguagggcuaccucauucu

SEQ ID NO: 983791 - RNA, 19 nt, Artificial Sequence
  Description of Artificial Sequence: Synthetic oligonucleotide
caaugccaggguucaccau

SEQ ID NO: 983792 - RNA, 19 nt, Artificial Sequence
  Description of Artificial Sequence: Synthetic oligonucleotide
caugcgggucgagcgauau

SEQ ID NO: 983793 - RNA, 19 nt, Artificial Sequence
  Description of Artificial Sequence: Synthetic oligonucleotide
caucgccaugcgggucgag

SEQ ID NO: 983794 - RNA, 19 nt, Artificial Sequence
  Description of Artificial Sequence: Synthetic oligonucleotide
ccgcacggcguucgacggg

SEQ ID NO: 983795 - RNA, 19 nt, Artificial Sequence
  Description of Artificial Sequence: Synthetic oligonucleotide
ccauguuccugauguuacu

SEQ ID NO: 983796 - RNA, 19 nt, Artificial Sequence
  Description of Artificial Sequence: Synthetic oligonucleotide
ggcuaucgagggcccaagu

SEQ ID NO: 983797 - RNA, 19 nt, Artificial Sequence
  Description of Artificial Sequence: Synthetic oligonucleotide
cgcuuuauauagcuggcuu

SEQ ID NO: 983798 - RNA, 19 nt, Artificial Sequence
  Description of Artificial Sequence: Synthetic oligonucleotide
cagugcccguagggcuacc

SEQ ID NO: 983799 - RNA, 19 nt, Artificial Sequence
  Description of Artificial Sequence: Synthetic oligonucleotide
ccggcagcucccgccagug

SEQ ID NO: 983800 - RNA, 19 nt, Artificial Sequence
  Description of Artificial Sequence: Synthetic oligonucleotide
ggacucccucugccaucug

SEQ ID NO: 983801 - RNA, 19 nt, Artificial Sequence
  Description of Artificial Sequence: Synthetic oligonucleotide
gcgggucgagcgauaugca

SEQ ID NO: 983802 - RNA, 19 nt, Artificial Sequence
  Description of Artificial Sequence: Synthetic oligonucleotide
ccccugcaaggugggaaug

SEQ ID NO: 983803 - RNA, 19 nt, Artificial Sequence
  Description of Artificial Sequence: Synthetic oligonucleotide
cgcuuacggcugcccagcc

SEQ ID NO: 983804 - RNA, 19 nt, Artificial Sequence
  Description of Artificial Sequence: Synthetic oligonucleotide
ccggguggcccaggucacg

SEQ ID NO: 983805 - RNA, 19 nt, Artificial Sequence
  Description of Artificial Sequence: Synthetic oligonucleotide
cacggcguucgacggggau

SEQ ID NO: 983806 - RNA, 19 nt, Artificial Sequence
  Description of Artificial Sequence: Synthetic oligonucleotide
guagcacccucgggaacuu

SEQ ID NO: 983807 - RNA, 19 nt, Artificial Sequence
  Description of Artificial Sequence: Synthetic oligonucleotide
cgagggcccaagucgccca

SEQ ID NO: 983808 - RNA, 19 nt, Artificial Sequence
  Description of Artificial Sequence: Synthetic oligonucleotide
cucacgccaguagcacccu

SEQ ID NO: 983809 - RNA, 19 nt, Artificial Sequence
  Description of Artificial Sequence: Synthetic oligonucleotide
gcacccucgggaacuuugu

SEQ ID NO: 983810 - RNA, 19 nt, Artificial Sequence
  Description of Artificial Sequence: Synthetic oligonucleotide
gcguugggaggggcuggac

SEQ ID NO: 983811 - RNA, 19 nt, Artificial Sequence
  Description of Artificial Sequence: Synthetic oligonucleotide
gcguccagucauaccaauu

SEQ ID NO: 983812 - RNA, 19 nt, Artificial Sequence
  Description of Artificial Sequence: Synthetic oligonucleotide
cccgggucgugucuccucu

SEQ ID NO: 983813 - RNA, 19 nt, Artificial Sequence
  Description of Artificial Sequence: Synthetic oligonucleotide
ccaauacugcaaccauguu

SEQ ID NO: 983814 - RNA, 19 nt, Artificial Sequence
  Description of Artificial Sequence: Synthetic oligonucleotide
ggggccgcacggcguucga

SEQ ID NO: 983815 - RNA, 19 nt, Artificial Sequence
  Description of Artificial Sequence: Synthetic oligonucleotide
gcccguagggcuaccucau

SEQ ID NO: 983816 - RNA, 19 nt, Artificial Sequence
  Description of Artificial Sequence: Synthetic oligonucleotide
cggcguucgacggggaucu

SEQ ID NO: 983817 - RNA, 19 nt, Artificial Sequence
  Description of Artificial Sequence: Synthetic oligonucleotide
cgggucgagcgauaugcau

SEQ ID NO: 983818 - RNA, 19 nt, Artificial Sequence
  Description of Artificial Sequence: Synthetic oligonucleotide
cgacggggaucuugguacu

SEQ ID NO: 983819 - RNA, 19 nt, Artificial Sequence
  Description of Artificial Sequence: Synthetic oligonucleotide
gcacggcguucgacgggga

SEQ ID NO: 983820 - RNA, 19 nt, Artificial Sequence
  Description of Artificial Sequence: Synthetic oligonucleotide
ccgggucgugucuccucua

SEQ ID NO: 983821 - RNA, 19 nt, Artificial Sequence
  Description of Artificial Sequence: Synthetic oligonucleotide
ccccaccuucggugcuaga

SEQ ID NO: 983822 - RNA, 19 nt, Artificial Sequence
  Description of Artificial Sequence: Synthetic oligonucleotide
cccguagggcuaccucauu

SEQ ID NO: 983823 - RNA, 19 nt, Artificial Sequence
  Description of Artificial Sequence: Synthetic oligonucleotide
ggcguucgacggggaucuu

SEQ ID NO: 983824 - RNA, 19 nt, Artificial Sequence
  Description of Artificial Sequence: Synthetic oligonucleotide
aaaguuuuggcccagagac

SEQ ID NO: 983825 - RNA, 19 nt, Artificial Sequence
  Description of Artificial Sequence: Synthetic oligonucleotide
aauagggguaaacagaacc

SEQ ID NO: 983826 - RNA, 19 nt, Artificial Sequence
  Description of Artificial Sequence: Synthetic oligonucleotide
aaauauucuggucagaccg

SEQ ID NO: 983827 - RNA, 19 nt, Artificial Sequence
  Description of Artificial Sequence: Synthetic oligonucleotide
uuucaagucauuuuauuag

SEQ ID NO: 983828 - RNA, 19 nt, Artificial Sequence
  Description of Artificial Sequence: Synthetic oligonucleotide
uauuaguccaaccauauaa

SEQ ID NO: 983829 - RNA, 19 nt, Artificial Sequence
  Description of Artificial Sequence: Synthetic oligonucleotide
aaguuuaggaguuggggac

SEQ ID NO: 983830 - RNA, 19 nt, Artificial Sequence
  Description of Artificial Sequence: Synthetic oligonucleotide
agcacaauaagaaaugugc

SEQ ID NO: 983831 - RNA, 19 nt, Artificial Sequence
  Description of Artificial Sequence: Synthetic oligonucleotide
uguaucuacagucuugacc

SEQ ID NO: 983832 - RNA, 19 nt, Artificial Sequence
  Description of Artificial Sequence: Synthetic oligonucleotide
agaguugaagaacagcuac

SEQ ID NO: 983833 - RNA, 19 nt, Artificial Sequence
  Description of Artificial Sequence: Synthetic oligonucleotide
aguagcaacagguaauagg

SEQ ID NO: 983834 - RNA, 19 nt, Artificial Sequence
  Description of Artificial Sequence: Synthetic oligonucleotide
aaccguguguuucugcucc

SEQ ID NO: 983835 - RNA, 19 nt, Artificial Sequence
  Description of Artificial Sequence: Synthetic oligonucleotide
uaauuacucugcaagagca

SEQ ID NO: 983836 - RNA, 19 nt, Artificial Sequence
  Description of Artificial Sequence: Synthetic oligonucleotide
aucagugggaaccaaacuc

SEQ ID NO: 983837 - RNA, 19 nt, Artificial Sequence
  Description of Artificial Sequence: Synthetic oligonucleotide
guagcaacagguaauaggg

SEQ ID NO: 983838 - RNA, 19 nt, Artificial Sequence
  Description of Artificial Sequence: Synthetic oligonucleotide
aagucauuuuauuagucca

SEQ ID NO: 983839 - RNA, 19 nt, Artificial Sequence
  Description of Artificial Sequence: Synthetic oligonucleotide
ugggcuaaaguuuuggccc

SEQ ID NO: 983840 - RNA, 19 nt, Artificial Sequence
  Description of Artificial Sequence: Synthetic oligonucleotide
uguauucucagcaucuugu

SEQ ID NO: 983841 - RNA, 19 nt, Artificial Sequence
  Description of Artificial Sequence: Synthetic oligonucleotide
agaaccacaacacaauaca

SEQ ID NO: 983842 - RNA, 19 nt, Artificial Sequence
  Description of Artificial Sequence: Synthetic oligonucleotide
uuggggacaaaguaggaag

SEQ ID NO: 983843 - RNA, 19 nt, Artificial Sequence
  Description of Artificial Sequence: Synthetic oligonucleotide
uuuacaaaccaugaagaca

SEQ ID NO: 983844 - RNA, 19 nt, Artificial Sequence
  Description of Artificial Sequence: Synthetic oligonucleotide
ucagugggaaccaaacucc

SEQ ID NO: 983845 - RNA, 19 nt, Artificial Sequence
  Description of Artificial Sequence: Synthetic oligonucleotide
cacguaauuacucugcaag

SEQ ID NO: 983846 - RNA, 19 nt, Artificial Sequence
  Description of Artificial Sequence: Synthetic oligonucleotide
uuggauccuuuuauuaggg

SEQ ID NO: 983847 - RNA, 19 nt, Artificial Sequence
  Description of Artificial Sequence: Synthetic oligonucleotide
guuagcaccccauaggcgc

SEQ ID NO: 983848 - RNA, 19 nt, Artificial Sequence
  Description of Artificial Sequence: Synthetic oligonucleotide
gauguagacagacuggauc

SEQ ID NO: 983849 - RNA, 19 nt, Artificial Sequence
  Description of Artificial Sequence: Synthetic oligonucleotide
aaggaccaaaaggagcucc

SEQ ID NO: 983850 - RNA, 19 nt, Artificial Sequence
  Description of Artificial Sequence: Synthetic oligonucleotide
aagggguuaauaucuccag

SEQ ID NO: 983851 - RNA, 19 nt, Artificial Sequence
  Description of Artificial Sequence: Synthetic oligonucleotide
ucuuguaucuacagucuug

SEQ ID NO: 983852 - RNA, 19 nt, Artificial Sequence
  Description of Artificial Sequence: Synthetic oligonucleotide
cacaauaagaaaugugcac

SEQ ID NO: 983853 - RNA, 19 nt, Artificial Sequence
  Description of Artificial Sequence: Synthetic oligonucleotide
auucaccucacuccgacag

SEQ ID NO: 983854 - RNA, 19 nt, Artificial Sequence
  Description of Artificial Sequence: Synthetic oligonucleotide
cauuuuauuaguccaacca

SEQ ID NO: 983855 - RNA, 19 nt, Artificial Sequence
  Description of Artificial Sequence: Synthetic oligonucleotide
guaauuacucugcaagagc

SEQ ID NO: 983856 - RNA, 19 nt, Artificial Sequence
  Description of Artificial Sequence: Synthetic oligonucleotide
uaaaguuuuggcccagaga

SEQ ID NO: 983857 - RNA, 19 nt, Artificial Sequence
  Description of Artificial Sequence: Synthetic oligonucleotide
ugguuagcaccccauaggc

SEQ ID NO: 983858 - RNA, 19 nt, Artificial Sequence
  Description of Artificial Sequence: Synthetic oligonucleotide
auggggaugaacccucccc

SEQ ID NO: 983859 - RNA, 19 nt, Artificial Sequence
  Description of Artificial Sequence: Synthetic oligonucleotide
ugucauuccaguacacucu

SEQ ID NO: 983860 - RNA, 19 nt, Artificial Sequence
  Description of Artificial Sequence: Synthetic oligonucleotide
aagcaaucgagguucuucu

SEQ ID NO: 983861 - RNA, 19 nt, Artificial Sequence
  Description of Artificial Sequence: Synthetic oligonucleotide
uacacucucggugaaaacc

SEQ ID NO: 983862 - RNA, 19 nt, Artificial Sequence
  Description of Artificial Sequence: Synthetic oligonucleotide
caucauucaccucacuccg

SEQ ID NO: 983863 - RNA, 19 nt, Artificial Sequence
  Description of Artificial Sequence: Synthetic oligonucleotide
cauuccaguacacucucgg

SEQ ID NO: 983864 - RNA, 19 nt, Artificial Sequence
  Description of Artificial Sequence: Synthetic oligonucleotide
gaccaaaaggagcuccugg

SEQ ID NO: 983865 - RNA, 19 nt, Artificial Sequence
  Description of Artificial Sequence: Synthetic oligonucleotide
acaagcaacugccaaguca

SEQ ID NO: 983866 - RNA, 19 nt, Artificial Sequence
  Description of Artificial Sequence: Synthetic oligonucleotide
aauuacucugcaagagcac

SEQ ID NO: 983867 - RNA, 19 nt, Artificial Sequence
  Description of Artificial Sequence: Synthetic oligonucleotide
caaauauucuggucagacc

SEQ ID NO: 983868 - RNA, 19 nt, Artificial Sequence
  Description of Artificial Sequence: Synthetic oligonucleotide
agaccgaccacauauccca

SEQ ID NO: 983869 - RNA, 19 nt, Artificial Sequence
  Description of Artificial Sequence: Synthetic oligonucleotide
cucggauguagacagacug

SEQ ID NO: 983870 - RNA, 19 nt, Artificial Sequence
  Description of Artificial Sequence: Synthetic oligonucleotide
uaucccaaacuuuuggcaa

SEQ ID NO: 983871 - RNA, 19 nt, Artificial Sequence
  Description of Artificial Sequence: Synthetic oligonucleotide
augaacccuccccaggagc

SEQ ID NO: 983872 - RNA, 19 nt, Artificial Sequence
  Description of Artificial Sequence: Synthetic oligonucleotide
guaggaagcagguccaccc

SEQ ID NO: 983873 - RNA, 19 nt, Artificial Sequence
  Description of Artificial Sequence: Synthetic oligonucleotide
ucaaugcacaaguucccag

SEQ ID NO: 983874 - RNA, 19 nt, Artificial Sequence
  Description of Artificial Sequence: Synthetic oligonucleotide
guauuugguggucaucugc

SEQ ID NO: 983875 - RNA, 19 nt, Artificial Sequence
  Description of Artificial Sequence: Synthetic oligonucleotide
aaaguggggcaccaagagu

SEQ ID NO: 983876 - RNA, 19 nt, Artificial Sequence
  Description of Artificial Sequence: Synthetic oligonucleotide
gugguuagcaccccauagg

SEQ ID NO: 983877 - RNA, 19 nt, Artificial Sequence
  Description of Artificial Sequence: Synthetic oligonucleotide
  modified_base (10)..(10): a, c, u, g, unknown or other
cuuugagganccugcugcc

SEQ ID NO: 983878 - RNA, 19 nt, Artificial Sequence
  Description of Artificial Sequence: Synthetic oligonucleotide
aaccaugaagacaacacaa

SEQ ID NO: 983879 - RNA, 19 nt, Artificial Sequence
  Description of Artificial Sequence: Synthetic oligonucleotide
ucggugaaaaccacuucug

SEQ ID NO: 983880 - RNA, 19 nt, Artificial Sequence
  Description of Artificial Sequence: Synthetic oligonucleotide
aacgaggagugagagccac

SEQ ID NO: 983881 - RNA, 19 nt, Artificial Sequence
  Description of Artificial Sequence: Synthetic oligonucleotide
aacauggggaugaacccuc

SEQ ID NO: 983882 - RNA, 19 nt, Artificial Sequence
  Description of Artificial Sequence: Synthetic oligonucleotide
caaucgagguucuucugcc

SEQ ID NO: 983883 - RNA, 19 nt, Artificial Sequence
  Description of Artificial Sequence: Synthetic oligonucleotide
cugucauuccaguacacuc

SEQ ID NO: 983884 - RNA, 19 nt, Artificial Sequence
  Description of Artificial Sequence: Synthetic oligonucleotide
acagguaauagggguaaac

SEQ ID NO: 983885 - RNA, 19 nt, Artificial Sequence
  Description of Artificial Sequence: Synthetic oligonucleotide
aggagugagagccacguaa

SEQ ID NO: 983886 - RNA, 19 nt, Artificial Sequence
  Description of Artificial Sequence: Synthetic oligonucleotide
caagaguugaagaacagcu

SEQ ID NO: 983887 - RNA, 19 nt, Artificial Sequence
  Description of Artificial Sequence: Synthetic oligonucleotide
  modified_base (8)..(8): a, c, u, g, unknown or other
uugagganccugcugccca

SEQ ID NO: 983888 - RNA, 19 nt, Artificial Sequence
  Description of Artificial Sequence: Synthetic oligonucleotide
cuaaaguuuuggcccagag

SEQ ID NO: 983889 - RNA, 19 nt, Artificial Sequence
  Description of Artificial Sequence: Synthetic oligonucleotide
cagggccucacuuggaucc

SEQ ID NO: 983890 - RNA, 19 nt, Artificial Sequence
  Description of Artificial Sequence: Synthetic oligonucleotide
gguauaagggcuucaugcc

SEQ ID NO: 983891 - RNA, 19 nt, Artificial Sequence
  Description of Artificial Sequence: Synthetic oligonucleotide
aaaguagcaacagguaaua

SEQ ID NO: 983892 - RNA, 19 nt, Artificial Sequence
  Description of Artificial Sequence: Synthetic oligonucleotide
gucacugagagaaaagcac

SEQ ID NO: 983893 - RNA, 19 nt, Artificial Sequence
  Description of Artificial Sequence: Synthetic oligonucleotide
uauaagggcuucaugccuu

SEQ ID NO: 983894 - RNA, 19 nt, Artificial Sequence
  Description of Artificial Sequence: Synthetic oligonucleotide
accucacuccgacaggcac

SEQ ID NO: 983895 - RNA, 19 nt, Artificial Sequence
  Description of Artificial Sequence: Synthetic oligonucleotide
uuaauaucuccaguccaga

SEQ ID NO: 983896 - RNA, 19 nt, Artificial Sequence
  Description of Artificial Sequence: Synthetic oligonucleotide
uccugguugggcaaagcgu

SEQ ID NO: 983897 - RNA, 19 nt, Artificial Sequence
  Description of Artificial Sequence: Synthetic oligonucleotide
acguaauuacucugcaaga

SEQ ID NO: 983898 - RNA, 19 nt, Artificial Sequence
  Description of Artificial Sequence: Synthetic oligonucleotide
auauucuggucagaccgac

SEQ ID NO: 983899 - RNA, 19 nt, Artificial Sequence
  Description of Artificial Sequence: Synthetic oligonucleotide
agcaucuuguaucuacagu

SEQ ID NO: 983900 - RNA, 19 nt, Artificial Sequence
  Description of Artificial Sequence: Synthetic oligonucleotide
cauuaacagcugcagccgg

SEQ ID NO: 983901 - RNA, 19 nt, Artificial Sequence
  Description of Artificial Sequence: Synthetic oligonucleotide
uucccauuaacagcugcag

SEQ ID NO: 983902 - RNA, 19 nt, Artificial Sequence
  Description of Artificial Sequence: Synthetic oligonucleotide
guaauagggguaaacagaa

SEQ ID NO: 983903 - RNA, 19 nt, Artificial Sequence
  Description of Artificial Sequence: Synthetic oligonucleotide
cuucaaaggcuguaccaug

SEQ ID NO: 983904 - RNA, 19 nt, Artificial Sequence
  Description of Artificial Sequence: Synthetic oligonucleotide
acuuucccgaggcagagaa

SEQ ID NO: 983905 - RNA, 19 nt, Artificial Sequence
  Description of Artificial Sequence: Synthetic oligonucleotide
agccacguaauuacucugc

SEQ ID NO: 983906 - RNA, 19 nt, Artificial Sequence
  Description of Artificial Sequence: Synthetic oligonucleotide
ucuagucccuuuucucuug

SEQ ID NO: 983907 - RNA, 19 nt, Artificial Sequence
  Description of Artificial Sequence: Synthetic oligonucleotide
acaaaguuuaggaguuggg

SEQ ID NO: 983908 - RNA, 19 nt, Artificial Sequence
  Description of Artificial Sequence: Synthetic oligonucleotide
aagguauuugguggucauc

SEQ ID NO: 983909 - RNA, 19 nt, Artificial Sequence
  Description of Artificial Sequence: Synthetic oligonucleotide
gaguugaagaacagcuacc

SEQ ID NO: 983910 - RNA, 19 nt, Artificial Sequence
  Description of Artificial Sequence: Synthetic oligonucleotide
aaacauggucacugagaga

SEQ ID NO: 983911 - RNA, 19 nt, Artificial Sequence
  Description of Artificial Sequence: Synthetic oligonucleotide
uuacucugcaagagcacaa

SEQ ID NO: 983912 - RNA, 19 nt, Artificial Sequence
  Description of Artificial Sequence: Synthetic oligonucleotide
aggaaccguguguuucugc

SEQ ID NO: 983913 - RNA, 19 nt, Artificial Sequence
  Description of Artificial Sequence: Synthetic oligonucleotide
  modified_base (5)..(5): a, c, u, g, unknown or other
agganccugcugcccaccc

SEQ ID NO: 983914 - RNA, 19 nt, Artificial Sequence
  Description of Artificial Sequence: Synthetic oligonucleotide
cuuguguuaggaggcaggc

SEQ ID NO: 983915 - RNA, 19 nt, Artificial Sequence
  Description of Artificial Sequence: Synthetic oligonucleotide
aaggcuguaccauggcuuu

SEQ ID NO: 983916 - RNA, 19 nt, Artificial Sequence
  Description of Artificial Sequence: Synthetic oligonucleotide
uuauuaguccaaccauaua

SEQ ID NO: 983917 - RNA, 19 nt, Artificial Sequence
  Description of Artificial Sequence: Synthetic oligonucleotide
aaguagcaacagguaauag

SEQ ID NO: 983918 - RNA, 19 nt, Artificial Sequence
  Description of Artificial Sequence: Synthetic oligonucleotide
auagggguaaacagaacca

SEQ ID NO: 983919 - RNA, 19 nt, Artificial Sequence
  Description of Artificial Sequence: Synthetic oligonucleotide
gaugaacccuccccaggag

SEQ ID NO: 983920 - RNA, 19 nt, Artificial Sequence
  Description of Artificial Sequence: Synthetic oligonucleotide
uggagucacccaucguuag

SEQ ID NO: 983921 - RNA, 19 nt, Artificial Sequence
  Description of Artificial Sequence: Synthetic oligonucleotide
cuuuuauuagggaaggaau

SEQ ID NO: 983922 - RNA, 19 nt, Artificial Sequence
  Description of Artificial Sequence: Synthetic oligonucleotide
acuuguguuaggaggcagg

SEQ ID NO: 983923 - RNA, 19 nt, Artificial Sequence
  Description of Artificial Sequence: Synthetic oligonucleotide
gguaauagggguaaacaga

SEQ ID NO: 983924 - RNA, 19 nt, Artificial Sequence
  Description of Artificial Sequence: Synthetic oligonucleotide
ugagagccacguaauuacu

SEQ ID NO: 983925 - RNA, 19 nt, Artificial Sequence
  Description of Artificial Sequence: Synthetic oligonucleotide
gggguuaauaucuccaguc

SEQ ID NO: 983926 - RNA, 19 nt, Artificial Sequence
  Description of Artificial Sequence: Synthetic oligonucleotide
agugggaaccaaacucccc

SEQ ID NO: 983927 - RNA, 19 nt, Artificial Sequence
  Description of Artificial Sequence: Synthetic oligonucleotide
  modified_base (9)..(9): a, c, u, g, unknown or other
uuugagganccugcugccc

SEQ ID NO: 983928 - RNA, 19 nt, Artificial Sequence
  Description of Artificial Sequence: Synthetic oligonucleotide
agacaagcaacugccaagu

SEQ ID NO: 983929 - RNA, 19 nt, Artificial Sequence
  Description of Artificial Sequence: Synthetic oligonucleotide
gacucuaggaauggcuccc

SEQ ID NO: 983930 - RNA, 19 nt, Artificial Sequence
  Description of Artificial Sequence: Synthetic oligonucleotide
ggagcagguggguucaagg

SEQ ID NO: 983931 - RNA, 19 nt, Artificial Sequence
  Description of Artificial Sequence: Synthetic oligonucleotide
auuaguccaaccauauaaa

SEQ ID NO: 983932 - RNA, 19 nt, Artificial Sequence
  Description of Artificial Sequence: Synthetic oligonucleotide
  modified_base (3)..(3): a, c, u, g, unknown or other
ganccugcugcccacccca

SEQ ID NO: 983933 - RNA, 19 nt, Artificial Sequence
  Description of Artificial Sequence: Synthetic oligonucleotide
uagggguaaacagaaccac

SEQ ID NO: 983934 - RNA, 19 nt, Artificial Sequence
  Description of Artificial Sequence: Synthetic oligonucleotide
gguuaauaucuccagucca

SEQ ID NO: 983935 - RNA, 19 nt, Artificial Sequence
  Description of Artificial Sequence: Synthetic oligonucleotide
gucauuuuauuaguccaac

SEQ ID NO: 983936 - RNA, 19 nt, Artificial Sequence
  Description of Artificial Sequence: Synthetic oligonucleotide
cagaccgaccacauauccc

SEQ ID NO: 983937 - RNA, 19 nt, Artificial Sequence
  Description of Artificial Sequence: Synthetic oligonucleotide
acaacacaauacaaaggug

SEQ ID NO: 983938 - RNA, 19 nt, Artificial Sequence
  Description of Artificial Sequence: Synthetic oligonucleotide
cuuguaucuacagucuuga

SEQ ID NO: 983939 - RNA, 19 nt, Artificial Sequence
  Description of Artificial Sequence: Synthetic oligonucleotide
cuguaccauggcuuugagg

SEQ ID NO: 983940 - RNA, 19 nt, Artificial Sequence
  Description of Artificial Sequence: Synthetic oligonucleotide
aaaggaccagugacuuugg

SEQ ID NO: 983941 - RNA, 19 nt, Artificial Sequence
  Description of Artificial Sequence: Synthetic oligonucleotide
aaaagcagugggagcaggu

SEQ ID NO: 983942 - RNA, 19 nt, Artificial Sequence
  Description of Artificial Sequence: Synthetic oligonucleotide
cauccucaccgccagggcc

SEQ ID NO: 983943 - RNA, 19 nt, Artificial Sequence
  Description of Artificial Sequence: Synthetic oligonucleotide
ucgagguucuucugccugc

SEQ ID NO: 983944 - RNA, 19 nt, Artificial Sequence
  Description of Artificial Sequence: Synthetic oligonucleotide
uggauccuuuuauuaggga

SEQ ID NO: 983945 - RNA, 19 nt, Artificial Sequence
  Description of Artificial Sequence: Synthetic oligonucleotide
cucugcaagagcacaauaa

SEQ ID NO: 983946 - RNA, 19 nt, Artificial Sequence
  Description of Artificial Sequence: Synthetic oligonucleotide
gaagggacuuguguuagga

SEQ ID NO: 983947 - RNA, 19 nt, Artificial Sequence
  Description of Artificial Sequence: Synthetic oligonucleotide
ucugaagggaaggaccaaa

SEQ ID NO: 983948 - RNA, 19 nt, Artificial Sequence
  Description of Artificial Sequence: Synthetic oligonucleotide
auuccaguacacucucggu

SEQ ID NO: 983949 - RNA, 19 nt, Artificial Sequence
  Description of Artificial Sequence: Synthetic oligonucleotide
aguacacucucggugaaaa

SEQ ID NO: 983950 - RNA, 19 nt, Artificial Sequence
  Description of Artificial Sequence: Synthetic oligonucleotide
gugugaggaagauguauuc

SEQ ID NO: 983951 - RNA, 19 nt, Artificial Sequence
  Description of Artificial Sequence: Synthetic oligonucleotide
gcaaucgagguucuucugc

SEQ ID NO: 983952 - RNA, 19 nt, Artificial Sequence
  Description of Artificial Sequence: Synthetic oligonucleotide
ccaggagcauuuuacaaac

SEQ ID NO: 983953 - RNA, 19 nt, Artificial Sequence
  Description of Artificial Sequence: Synthetic oligonucleotide
  modified_base (7)..(7): a, c, u, g, unknown or other
ugagganccugcugcccac

SEQ ID NO: 983954 - RNA, 19 nt, Artificial Sequence
  Description of Artificial Sequence: Synthetic oligonucleotide
agggauugggcuuccugca

SEQ ID NO: 983955 - RNA, 19 nt, Artificial Sequence
  Description of Artificial Sequence: Synthetic oligonucleotide
aaacuaggcugguucccau

SEQ ID NO: 983956 - RNA, 19 nt, Artificial Sequence
  Description of Artificial Sequence: Synthetic oligonucleotide
caaugugcaguagcagggg

SEQ ID NO: 983957 - RNA, 19 nt, Artificial Sequence
  Description of Artificial Sequence: Synthetic oligonucleotide
aagaguugaagaacagcua

SEQ ID NO: 983958 - RNA, 19 nt, Artificial Sequence
  Description of Artificial Sequence: Synthetic oligonucleotide
ugagguauaagggcuucau

SEQ ID NO: 983959 - RNA, 19 nt, Artificial Sequence
  Description of Artificial Sequence: Synthetic oligonucleotide
uuagcaccccauaggcgcu

SEQ ID NO: 983960 - RNA, 19 nt, Artificial Sequence
  Description of Artificial Sequence: Synthetic oligonucleotide
aggugggcuaaaguuuugg

SEQ ID NO: 983961 - RNA, 19 nt, Artificial Sequence
  Description of Artificial Sequence: Synthetic oligonucleotide
ucucggugaaaaccacuuc

SEQ ID NO: 983962 - RNA, 19 nt, Artificial Sequence
  Description of Artificial Sequence: Synthetic oligonucleotide
agaaaguggggcaccaaga

SEQ ID NO: 983963 - RNA, 19 nt, Artificial Sequence
  Description of Artificial Sequence: Synthetic oligonucleotide
aacugccaagucaggaaug

SEQ ID NO: 983964 - RNA, 19 nt, Artificial Sequence
  Description of Artificial Sequence: Synthetic oligonucleotide
gaggcuucggugguuagca

SEQ ID NO: 983965 - RNA, 19 nt, Artificial Sequence
  Description of Artificial Sequence: Synthetic oligonucleotide
cagguaauagggguaaaca

SEQ ID NO: 983966 - RNA, 19 nt, Artificial Sequence
  Description of Artificial Sequence: Synthetic oligonucleotide
uggugugaggaagauguau

SEQ ID NO: 983967 - RNA, 19 nt, Artificial Sequence
  Description of Artificial Sequence: Synthetic oligonucleotide
acuaggcugguucccauua

SEQ ID NO: 983968 - RNA, 19 nt, Artificial Sequence
  Description of Artificial Sequence: Synthetic oligonucleotide
aucuuguaucuacagucuu

SEQ ID NO: 983969 - RNA, 19 nt, Artificial Sequence
  Description of Artificial Sequence: Synthetic oligonucleotide
agcaaucgagguucuucug

SEQ ID NO: 983970 - RNA, 19 nt, Artificial Sequence
  Description of Artificial Sequence: Synthetic oligonucleotide
acacucucggugaaaacca

SEQ ID NO: 983971 - RNA, 19 nt, Artificial Sequence
  Description of Artificial Sequence: Synthetic oligonucleotide
aggcgcuuucugucauucc

SEQ ID NO: 983972 - RNA, 19 nt, Artificial Sequence
  Description of Artificial Sequence: Synthetic oligonucleotide
acugagagaaaagcacaga

SEQ ID NO: 983973 - RNA, 19 nt, Artificial Sequence
  Description of Artificial Sequence: Synthetic oligonucleotide
uucggugguuagcacccca

SEQ ID NO: 983974 - RNA, 19 nt, Artificial Sequence
  Description of Artificial Sequence: Synthetic oligonucleotide
aucccaaacuuuuggcaaa

SEQ ID NO: 983975 - RNA, 19 nt, Artificial Sequence
  Description of Artificial Sequence: Synthetic oligonucleotide
agacaacacaaaaguagca

SEQ ID NO: 983976 - RNA, 19 nt, Artificial Sequence
  Description of Artificial Sequence: Synthetic oligonucleotide
ucaugccuuuccaaacuuu

SEQ ID NO: 983977 - RNA, 19 nt, Artificial Sequence
  Description of Artificial Sequence: Synthetic oligonucleotide
aguuuaggaguuggggaca

SEQ ID NO: 983978 - RNA, 19 nt, Artificial Sequence
  Description of Artificial Sequence: Synthetic oligonucleotide
ggugggcuaaaguuuuggc

SEQ ID NO: 983979 - RNA, 19 nt, Artificial Sequence
  Description of Artificial Sequence: Synthetic oligonucleotide
agggaagggacuuguguua

SEQ ID NO: 983980 - RNA, 19 nt, Artificial Sequence
  Description of Artificial Sequence: Synthetic oligonucleotide
uuguaucuacagucuugac

SEQ ID NO: 983981 - RNA, 19 nt, Artificial Sequence
  Description of Artificial Sequence: Synthetic oligonucleotide
aaguuuuggcccagagacu

SEQ ID NO: 983982 - RNA, 19 nt, Artificial Sequence
  Description of Artificial Sequence: Synthetic oligonucleotide
caguccagacuuccagggg

SEQ ID NO: 983983 - RNA, 19 nt, Artificial Sequence
  Description of Artificial Sequence: Synthetic oligonucleotide
gaccagugacuuuggugug

SEQ ID NO: 983984 - RNA, 19 nt, Artificial Sequence
  Description of Artificial Sequence: Synthetic oligonucleotide
uacaaaccaugaagacaac

SEQ ID NO: 983985 - RNA, 19 nt, Artificial Sequence
  Description of Artificial Sequence: Synthetic oligonucleotide
cccucucggauguagacag

SEQ ID NO: 983986 - RNA, 19 nt, Artificial Sequence
  Description of Artificial Sequence: Synthetic oligonucleotide
guauaagggcuucaugccu

SEQ ID NO: 983987 - RNA, 19 nt, Artificial Sequence
  Description of Artificial Sequence: Synthetic oligonucleotide
cucggugaaaaccacuucu

SEQ ID NO: 983988 - RNA, 19 nt, Artificial Sequence
  Description of Artificial Sequence: Synthetic oligonucleotide
aacuaggcugguucccauu

SEQ ID NO: 983989 - RNA, 19 nt, Artificial Sequence
  Description of Artificial Sequence: Synthetic oligonucleotide
agcugagaaaggaccagug

SEQ ID NO: 983990 - RNA, 19 nt, Artificial Sequence
  Description of Artificial Sequence: Synthetic oligonucleotide
accaagaguugaagaacag

SEQ ID NO: 983991 - RNA, 19 nt, Artificial Sequence
  Description of Artificial Sequence: Synthetic oligonucleotide
ugggugagaucagugggaa

SEQ ID NO: 983992 - RNA, 19 nt, Artificial Sequence
  Description of Artificial Sequence: Synthetic oligonucleotide
ggguacaccaggccugggg

SEQ ID NO: 983993 - RNA, 19 nt, Artificial Sequence
  Description of Artificial Sequence: Synthetic oligonucleotide
gaaccguguguuucugcuc

SEQ ID NO: 983994 - RNA, 19 nt, Artificial Sequence
  Description of Artificial Sequence: Synthetic oligonucleotide
uccuuuuauuagggaagga

SEQ ID NO: 983995 - RNA, 19 nt, Artificial Sequence
  Description of Artificial Sequence: Synthetic oligonucleotide
gugacuuuggugugaggaa

SEQ ID NO: 983996 - RNA, 19 nt, Artificial Sequence
  Description of Artificial Sequence: Synthetic oligonucleotide
aggccaccccacuggaguc

SEQ ID NO: 983997 - RNA, 19 nt, Artificial Sequence
  Description of Artificial Sequence: Synthetic oligonucleotide
cagacuuccaggggagccc

SEQ ID NO: 983998 - RNA, 19 nt, Artificial Sequence
  Description of Artificial Sequence: Synthetic oligonucleotide
ccuccagcaagacucuagg

SEQ ID NO: 983999 - RNA, 19 nt, Artificial Sequence
  Description of Artificial Sequence: Synthetic oligonucleotide
caugcccucucggauguag

SEQ ID NO: 984000 - RNA, 19 nt, Artificial Sequence
  Description of Artificial Sequence: Synthetic oligonucleotide
cguaauuacucugcaagag

SEQ ID NO: 984001 - RNA, 19 nt, Artificial Sequence
  Description of Artificial Sequence: Synthetic oligonucleotide
gguuagcaccccauaggcg

SEQ ID NO: 984002 - RNA, 19 nt, Artificial Sequence
  Description of Artificial Sequence: Synthetic oligonucleotide
agggguaaacagaaccaca

SEQ ID NO: 984003 - RNA, 19 nt, Artificial Sequence
  Description of Artificial Sequence: Synthetic oligonucleotide
cuggaaaaccagggucugg

SEQ ID NO: 984004 - RNA, 19 nt, Artificial Sequence
  Description of Artificial Sequence: Synthetic oligonucleotide
gguauuugguggucaucug

SEQ ID NO: 984005 - RNA, 19 nt, Artificial Sequence
  Description of Artificial Sequence: Synthetic oligonucleotide
caucuuguaucuacagucu

SEQ ID NO: 984006 - RNA, 19 nt, Artificial Sequence
  Description of Artificial Sequence: Synthetic oligonucleotide
acucugcaagagcacaaua

SEQ ID NO: 984007 - RNA, 19 nt, Artificial Sequence
  Description of Artificial Sequence: Synthetic oligonucleotide
ggucagaccgaccacauau

SEQ ID NO: 984008 - RNA, 19 nt, Artificial Sequence
  Description of Artificial Sequence: Synthetic oligonucleotide
ccaagaguugaagaacagc

SEQ ID NO: 984009 - RNA, 19 nt, Artificial Sequence
  Description of Artificial Sequence: Synthetic oligonucleotide
ucggugguuagcaccccau

SEQ ID NO: 984010 - RNA, 19 nt, Artificial Sequence
  Description of Artificial Sequence: Synthetic oligonucleotide
ugcacuuccccaggccacc

SEQ ID NO: 984011 - RNA, 19 nt, Artificial Sequence
  Description of Artificial Sequence: Synthetic oligonucleotide
gguugggcaaagcguuggg

SEQ ID NO: 984012 - RNA, 19 nt, Artificial Sequence
  Description of Artificial Sequence: Synthetic oligonucleotide
aggcuucggugguuagcac

SEQ ID NO: 984013 - RNA, 19 nt, Artificial Sequence
  Description of Artificial Sequence: Synthetic oligonucleotide
guuuuggcccagagacugg

SEQ ID NO: 984014 - RNA, 19 nt, Artificial Sequence
  Description of Artificial Sequence: Synthetic oligonucleotide
uguuggcaucuggagugcc

SEQ ID NO: 984015 - RNA, 19 nt, Artificial Sequence
  Description of Artificial Sequence: Synthetic oligonucleotide
cugguugggcaaagcguug

SEQ ID NO: 984016 - RNA, 19 nt, Artificial Sequence
  Description of Artificial Sequence: Synthetic oligonucleotide
gacaagcaacugccaaguc

SEQ ID NO: 984017 - RNA, 19 nt, Artificial Sequence
  Description of Artificial Sequence: Synthetic oligonucleotide
guacacucucggugaaaac

SEQ ID NO: 984018 - RNA, 19 nt, Artificial Sequence
  Description of Artificial Sequence: Synthetic oligonucleotide
cacucucggugaaaaccac

SEQ ID NO: 984019 - RNA, 19 nt, Artificial Sequence
  Description of Artificial Sequence: Synthetic oligonucleotide
ucccaaacuuuuggcaaaa

SEQ ID NO: 984020 - RNA, 19 nt, Artificial Sequence
  Description of Artificial Sequence: Synthetic oligonucleotide
ggaaacuaggcugguuccc

SEQ ID NO: 984021 - RNA, 19 nt, Artificial Sequence
  Description of Artificial Sequence: Synthetic oligonucleotide
cucgaccacugcugcuugg

SEQ ID NO: 984022 - RNA, 19 nt, Artificial Sequence
  Description of Artificial Sequence: Synthetic oligonucleotide
cagcuccccucuaggaggc

SEQ ID NO: 984023 - RNA, 19 nt, Artificial Sequence
  Description of Artificial Sequence: Synthetic oligonucleotide
ggagucacccaucguuagc

SEQ ID NO: 984024 - RNA, 19 nt, Artificial Sequence
  Description of Artificial Sequence: Synthetic oligonucleotide
aacagguaauagggguaaa

SEQ ID NO: 984025 - RNA, 19 nt, Artificial Sequence
  Description of Artificial Sequence: Synthetic oligonucleotide
aaacgaggagugagagcca

SEQ ID NO: 984026 - RNA, 19 nt, Artificial Sequence
  Description of Artificial Sequence: Synthetic oligonucleotide
cucuaggaauggcucccug

SEQ ID NO: 984027 - RNA, 19 nt, Artificial Sequence
  Description of Artificial Sequence: Synthetic oligonucleotide
aacuuucccgaggcagaga

SEQ ID NO: 984028 - RNA, 19 nt, Artificial Sequence
  Description of Artificial Sequence: Synthetic oligonucleotide
ugagaucagugggaaccaa

SEQ ID NO: 984029 - RNA, 19 nt, Artificial Sequence
  Description of Artificial Sequence: Synthetic oligonucleotide
aggaagcagguccacccuu

SEQ ID NO: 984030 - RNA, 19 nt, Artificial Sequence
  Description of Artificial Sequence: Synthetic oligonucleotide
ggggaugaacccuccccag

SEQ ID NO: 984031 - RNA, 19 nt, Artificial Sequence
  Description of Artificial Sequence: Synthetic oligonucleotide
accagugacuuugguguga

SEQ ID NO: 984032 - RNA, 19 nt, Artificial Sequence
  Description of Artificial Sequence: Synthetic oligonucleotide
augagguauaagggcuuca

SEQ ID NO: 984033 - RNA, 19 nt, Artificial Sequence
  Description of Artificial Sequence: Synthetic oligonucleotide
acucucggugaaaaccacu

SEQ ID NO: 984034 - RNA, 19 nt, Artificial Sequence
  Description of Artificial Sequence: Synthetic oligonucleotide
accgaccacauaucccaaa

SEQ ID NO: 984035 - RNA, 19 nt, Artificial Sequence
  Description of Artificial Sequence: Synthetic oligonucleotide
cuguuggcaucuggagugc

SEQ ID NO: 984036 - RNA, 19 nt, Artificial Sequence
  Description of Artificial Sequence: Synthetic oligonucleotide
ggagcccaaacuucaaaua

SEQ ID NO: 984037 - RNA, 19 nt, Artificial Sequence
  Description of Artificial Sequence: Synthetic oligonucleotide
ggauugggcuuccugcauc

SEQ ID NO: 984038 - RNA, 19 nt, Artificial Sequence
  Description of Artificial Sequence: Synthetic oligonucleotide
  modified_base (4)..(4): a, c, u, g, unknown or other
gganccugcugcccacccc

SEQ ID NO: 984039 - RNA, 19 nt, Artificial Sequence
  Description of Artificial Sequence: Synthetic oligonucleotide
gugagaucagugggaacca

SEQ ID NO: 984040 - RNA, 19 nt, Artificial Sequence
  Description of Artificial Sequence: Synthetic oligonucleotide
gcagggauugggcuuccug

SEQ ID NO: 984041 - RNA, 19 nt, Artificial Sequence
  Description of Artificial Sequence: Synthetic oligonucleotide
ggaaccguguguuucugcu

SEQ ID NO: 984042 - RNA, 19 nt, Artificial Sequence
  Description of Artificial Sequence: Synthetic oligonucleotide
ccgaccacauaucccaaac

SEQ ID NO: 984043 - RNA, 19 nt, Artificial Sequence
  Description of Artificial Sequence: Synthetic oligonucleotide
  modified_base (6)..(6): a, c, u, g, unknown or other
gagganccugcugcccacc

SEQ ID NO: 984044 - RNA, 19 nt, Artificial Sequence
  Description of Artificial Sequence: Synthetic oligonucleotide
caggugggcuaaaguuuug

SEQ ID NO: 984045 - RNA, 19 nt, Artificial Sequence
  Description of Artificial Sequence: Synthetic oligonucleotide
guuuaggaguuggggacaa

SEQ ID NO: 984046 - RNA, 19 nt, Artificial Sequence
  Description of Artificial Sequence: Synthetic oligonucleotide
acgaggagugagagccacg

SEQ ID NO: 984047 - RNA, 19 nt, Artificial Sequence
  Description of Artificial Sequence: Synthetic oligonucleotide
cucucggugaaaaccacuu

SEQ ID NO: 984048 - RNA, 19 nt, Artificial Sequence
  Description of Artificial Sequence: Synthetic oligonucleotide
uuuaggaguuggggacaaa

SEQ ID NO: 984049 - RNA, 19 nt, Artificial Sequence
  Description of Artificial Sequence: Synthetic oligonucleotide
gggcuaaaguuuuggccca

SEQ ID NO: 984050 - RNA, 19 nt, Artificial Sequence
  Description of Artificial Sequence: Synthetic oligonucleotide
gccacguaauuacucugca

SEQ ID NO: 984051 - RNA, 19 nt, Artificial Sequence
  Description of Artificial Sequence: Synthetic oligonucleotide
gcuguaccauggcuuugag

SEQ ID NO: 984052 - RNA, 19 nt, Artificial Sequence
  Description of Artificial Sequence: Synthetic oligonucleotide
auaggcgcuuucugucauu

SEQ ID NO: 984053 - RNA, 19 nt, Artificial Sequence
  Description of Artificial Sequence: Synthetic oligonucleotide
cagcuaccacaaugugcag

SEQ ID NO: 984054 - RNA, 19 nt, Artificial Sequence
  Description of Artificial Sequence: Synthetic oligonucleotide
ucgggcccggcaucaucug

SEQ ID NO: 984055 - RNA, 19 nt, Artificial Sequence
  Description of Artificial Sequence: Synthetic oligonucleotide
gcgcuuucugucauuccag

SEQ ID NO: 984056 - RNA, 19 nt, Artificial Sequence
  Description of Artificial Sequence: Synthetic oligonucleotide
ccacaaugugcaguagcag

SEQ ID NO: 984057 - RNA, 19 nt, Artificial Sequence
  Description of Artificial Sequence: Synthetic oligonucleotide
caagguauuugguggucau

SEQ ID NO: 984058 - RNA, 19 nt, Artificial Sequence
  Description of Artificial Sequence: Synthetic oligonucleotide
cuucggugguuagcacccc

SEQ ID NO: 984059 - RNA, 19 nt, Artificial Sequence
  Description of Artificial Sequence: Synthetic oligonucleotide
caggaaccguguguuucug

SEQ ID NO: 984060 - RNA, 19 nt, Artificial Sequence
  Description of Artificial Sequence: Synthetic oligonucleotide
gugggagcagguggguuca

SEQ ID NO: 984061 - RNA, 19 nt, Artificial Sequence
  Description of Artificial Sequence: Synthetic oligonucleotide
cccgccucgaccacugcug

SEQ ID NO: 984062 - RNA, 19 nt, Artificial Sequence
  Description of Artificial Sequence: Synthetic oligonucleotide
ccacauaucccaaacuuuu

SEQ ID NO: 984063 - RNA, 19 nt, Artificial Sequence
  Description of Artificial Sequence: Synthetic oligonucleotide
ucucagcaucuuguaucua

SEQ ID NO: 984064 - RNA, 19 nt, Artificial Sequence
  Description of Artificial Sequence: Synthetic oligonucleotide
cucuagucccuuuucucuu

SEQ ID NO: 984065 - RNA, 19 nt, Artificial Sequence
  Description of Artificial Sequence: Synthetic oligonucleotide
ggugugaggaagauguauu

SEQ ID NO: 984066 - RNA, 19 nt, Artificial Sequence
  Description of Artificial Sequence: Synthetic oligonucleotide
agucccugaccaggucucu

SEQ ID NO: 984067 - RNA, 19 nt, Artificial Sequence
  Description of Artificial Sequence: Synthetic oligonucleotide
aggguacaccaggccuggg

SEQ ID NO: 984068 - RNA, 19 nt, Artificial Sequence
  Description of Artificial Sequence: Synthetic oligonucleotide
ggcccggcaucaucugccc

SEQ ID NO: 984069 - RNA, 19 nt, Artificial Sequence
  Description of Artificial Sequence: Synthetic oligonucleotide
caucguuagcagccaccaa

SEQ ID NO: 984070 - RNA, 19 nt, Artificial Sequence
  Description of Artificial Sequence: Synthetic oligonucleotide
ggacuuguguuaggaggca

SEQ ID NO: 984071 - RNA, 19 nt, Artificial Sequence
  Description of Artificial Sequence: Synthetic oligonucleotide
acauggucacugagagaaa

SEQ ID NO: 984072 - RNA, 19 nt, Artificial Sequence
  Description of Artificial Sequence: Synthetic oligonucleotide
uccuugccaucuggaacuu

SEQ ID NO: 984073 - RNA, 19 nt, Artificial Sequence
  Description of Artificial Sequence: Synthetic oligonucleotide
cauaggcgcuuucugucau

SEQ ID NO: 984074 - RNA, 19 nt, Artificial Sequence
  Description of Artificial Sequence: Synthetic oligonucleotide
  modified_base (2)..(2): a, c, u, g, unknown or other
anccugcugcccaccccaa

SEQ ID NO: 984075 - RNA, 19 nt, Artificial Sequence
  Description of Artificial Sequence: Synthetic oligonucleotide
gcuaaaguuuuggcccaga

SEQ ID NO: 984076 - RNA, 19 nt, Artificial Sequence
  Description of Artificial Sequence: Synthetic oligonucleotide
gaccgaccacauaucccaa

SEQ ID NO: 984077 - RNA, 19 nt, Artificial Sequence
  Description of Artificial Sequence: Synthetic oligonucleotide
gcuccuggggaaaagcagu

SEQ ID NO: 984078 - RNA, 19 nt, Artificial Sequence
  Description of Artificial Sequence: Synthetic oligonucleotide
ccugguugggcaaagcguu

SEQ ID NO: 984079 - RNA, 19 nt, Artificial Sequence
  Description of Artificial Sequence: Synthetic oligonucleotide
ccacguaauuacucugcaa

SEQ ID NO: 984080 - RNA, 19 nt, Artificial Sequence
  Description of Artificial Sequence: Synthetic oligonucleotide
cggauguagacagacugga

SEQ ID NO: 984081 - RNA, 19 nt, Artificial Sequence
  Description of Artificial Sequence: Synthetic oligonucleotide
ggaugggaagccagugaaa

SEQ ID NO: 984082 - RNA, 19 nt, Artificial Sequence
  Description of Artificial Sequence: Synthetic oligonucleotide
cucugaagggaaggaccaa

SEQ ID NO: 984083 - RNA, 19 nt, Artificial Sequence
  Description of Artificial Sequence: Synthetic oligonucleotide
cguuagcagccaccaacug

SEQ ID NO: 984084 - RNA, 19 nt, Artificial Sequence
  Description of Artificial Sequence: Synthetic oligonucleotide
ccucacuuggauccuuuua

SEQ ID NO: 984085 - RNA, 19 nt, Artificial Sequence
  Description of Artificial Sequence: Synthetic oligonucleotide
cacccaucguuagcagcca

SEQ ID NO: 984086 - RNA, 19 nt, Artificial Sequence
  Description of Artificial Sequence: Synthetic oligonucleotide
ccucgaccacugcugcuug

SEQ ID NO: 984087 - RNA, 19 nt, Artificial Sequence
  Description of Artificial Sequence: Synthetic oligonucleotide
ccgccucgaccacugcugc

SEQ ID NO: 984088 - RNA, 19 nt, Artificial Sequence
  Description of Artificial Sequence: Synthetic oligonucleotide
gcccucucggauguagaca

SEQ ID NO: 984089 - RNA, 19 nt, Artificial Sequence
  Description of Artificial Sequence: Synthetic oligonucleotide
uagcaccccauaggcgcuu

SEQ ID NO: 984090 - RNA, 19 nt, Artificial Sequence
  Description of Artificial Sequence: Synthetic oligonucleotide
agcagggauugggcuuccu

SEQ ID NO: 984091 - RNA, 19 nt, Artificial Sequence
  Description of Artificial Sequence: Synthetic oligonucleotide
caguacacucucggugaaa

SEQ ID NO: 984092 - RNA, 19 nt, Artificial Sequence
  Description of Artificial Sequence: Synthetic oligonucleotide
gcugucccaugguggguga

SEQ ID NO: 984093 - RNA, 19 nt, Artificial Sequence
  Description of Artificial Sequence: Synthetic oligonucleotide
agguggguucaagggcuuu

SEQ ID NO: 984094 - RNA, 19 nt, Artificial Sequence
  Description of Artificial Sequence: Synthetic oligonucleotide
cucuaggaggcugucccau

SEQ ID NO: 984095 - RNA, 19 nt, Artificial Sequence
  Description of Artificial Sequence: Synthetic oligonucleotide
cgagguucuucugccugcc

SEQ ID NO: 984096 - RNA, 19 nt, Artificial Sequence
  Description of Artificial Sequence: Synthetic oligonucleotide
ccggcaucaucugcccacc

SEQ ID NO: 984097 - RNA, 19 nt, Artificial Sequence
  Description of Artificial Sequence: Synthetic oligonucleotide
caccccauaggcgcuuucu

SEQ ID NO: 984098 - RNA, 19 nt, Artificial Sequence
  Description of Artificial Sequence: Synthetic oligonucleotide
cugcagaggcuucgguggu

SEQ ID NO: 984099 - RNA, 19 nt, Artificial Sequence
  Description of Artificial Sequence: Synthetic oligonucleotide
ccaggugggcuaaaguuuu

SEQ ID NO: 984100 - RNA, 19 nt, Artificial Sequence
  Description of Artificial Sequence: Synthetic oligonucleotide
cugccaagucaggaaugcu

SEQ ID NO: 984101 - RNA, 19 nt, Artificial Sequence
  Description of Artificial Sequence: Synthetic oligonucleotide
gggauugggcuuccugcau

SEQ ID NO: 984102 - RNA, 19 nt, Artificial Sequence
  Description of Artificial Sequence: Synthetic oligonucleotide
ucacuccgacaggcaccac

SEQ ID NO: 984103 - RNA, 19 nt, Artificial Sequence
  Description of Artificial Sequence: Synthetic oligonucleotide
agcuccccucuaggaggcu

SEQ ID NO: 984104 - RNA, 19 nt, Artificial Sequence
  Description of Artificial Sequence: Synthetic oligonucleotide
ggccaccccacuggaguca

SEQ ID NO: 984105 - RNA, 19 nt, Artificial Sequence
  Description of Artificial Sequence: Synthetic oligonucleotide
gcaccccauaggcgcuuuc

SEQ ID NO: 984106 - RNA, 19 nt, Artificial Sequence
  Description of Artificial Sequence: Synthetic oligonucleotide
cgaccacauaucccaaacu

SEQ ID NO: 984107 - RNA, 19 nt, Artificial Sequence
  Description of Artificial Sequence: Synthetic oligonucleotide
ccgccagggccuggaaaac

SEQ ID NO: 984108 - RNA, 19 nt, Artificial Sequence
  Description of Artificial Sequence: Synthetic oligonucleotide
ggggaaugaagggguuaau

SEQ ID NO: 984109 - RNA, 19 nt, Artificial Sequence
  Description of Artificial Sequence: Synthetic oligonucleotide
cggugguuagcaccccaua

SEQ ID NO: 984110 - RNA, 19 nt, Artificial Sequence
  Description of Artificial Sequence: Synthetic oligonucleotide
  modified_base (16)..(16): a, c, u, g, unknown or other
ccauggcuuugagganccu

SEQ ID NO: 984111 - RNA, 19 nt, Artificial Sequence
  Description of Artificial Sequence: Synthetic oligonucleotide
uguuauuuaauuauuacca

SEQ ID NO: 984112 - RNA, 19 nt, Artificial Sequence
  Description of Artificial Sequence: Synthetic oligonucleotide
aacagcauuagucaugugg

SEQ ID NO: 984113 - RNA, 19 nt, Artificial Sequence
  Description of Artificial Sequence: Synthetic oligonucleotide
aauuauuaccaacucaaag

SEQ ID NO: 984114 - RNA, 19 nt, Artificial Sequence
  Description of Artificial Sequence: Synthetic oligonucleotide
aauacaaucaaugggaccu

SEQ ID NO: 984115 - RNA, 19 nt, Artificial Sequence
  Description of Artificial Sequence: Synthetic oligonucleotide
aauauggugucauacagga

SEQ ID NO: 984116 - RNA, 19 nt, Artificial Sequence
  Description of Artificial Sequence: Synthetic oligonucleotide
uuuacuuugaaauacccgu

SEQ ID NO: 984117 - RNA, 19 nt, Artificial Sequence
  Description of Artificial Sequence: Synthetic oligonucleotide
auuauuaccaacucaaagu

SEQ ID NO: 984118 - RNA, 19 nt, Artificial Sequence
  Description of Artificial Sequence: Synthetic oligonucleotide
gauugaaugaaagaaggcg

SEQ ID NO: 984119 - RNA, 19 nt, Artificial Sequence
  Description of Artificial Sequence: Synthetic oligonucleotide
aauuucauccuaucggauc

SEQ ID NO: 984120 - RNA, 19 nt, Artificial Sequence
  Description of Artificial Sequence: Synthetic oligonucleotide
uucacguacagcaagaacu

SEQ ID NO: 984121 - RNA, 19 nt, Artificial Sequence
  Description of Artificial Sequence: Synthetic oligonucleotide
uuuaauuauuaccaacuca

SEQ ID NO: 984122 - RNA, 19 nt, Artificial Sequence
  Description of Artificial Sequence: Synthetic oligonucleotide
ucaauugaaagccaauaug

SEQ ID NO: 984123 - RNA, 19 nt, Artificial Sequence
  Description of Artificial Sequence: Synthetic oligonucleotide
cauguucuaaaauacuucg

SEQ ID NO: 984124 - RNA, 19 nt, Artificial Sequence
  Description of Artificial Sequence: Synthetic oligonucleotide
aacuuuacuaucucuaccu

SEQ ID NO: 984125 - RNA, 19 nt, Artificial Sequence
  Description of Artificial Sequence: Synthetic oligonucleotide
uguacuacaaggcaaagua

SEQ ID NO: 984126 - RNA, 19 nt, Artificial Sequence
  Description of Artificial Sequence: Synthetic oligonucleotide
aguaaagggcaauacaauc

SEQ ID NO: 984127 - RNA, 19 nt, Artificial Sequence
  Description of Artificial Sequence: Synthetic oligonucleotide
cucggaauugccauuaucg

SEQ ID NO: 984128 - RNA, 19 nt, Artificial Sequence
  Description of Artificial Sequence: Synthetic oligonucleotide
uuuccuaucagaaaggauu

SEQ ID NO: 984129 - RNA, 19 nt, Artificial Sequence
  Description of Artificial Sequence: Synthetic oligonucleotide
ucuucuucuagucuuaacu

SEQ ID NO: 984130 - RNA, 19 nt, Artificial Sequence
  Description of Artificial Sequence: Synthetic oligonucleotide
aacacguuagcuccauccc

SEQ ID NO: 984131 - RNA, 19 nt, Artificial Sequence
  Description of Artificial Sequence: Synthetic oligonucleotide
uggucauuaagucacagcu

SEQ ID NO: 984132 - RNA, 19 nt, Artificial Sequence
  Description of Artificial Sequence: Synthetic oligonucleotide
aauacccguauuuuaaugu

SEQ ID NO: 984133 - RNA, 19 nt, Artificial Sequence
  Description of Artificial Sequence: Synthetic oligonucleotide
cagauugaaugaaagaagg

SEQ ID NO: 984134 - RNA, 19 nt, Artificial Sequence
  Description of Artificial Sequence: Synthetic oligonucleotide
agugaugauacucaguucu

SEQ ID NO: 984135 - RNA, 19 nt, Artificial Sequence
  Description of Artificial Sequence: Synthetic oligonucleotide
auuuaauuauuaccaacuc

SEQ ID NO: 984136 - RNA, 19 nt, Artificial Sequence
  Description of Artificial Sequence: Synthetic oligonucleotide
agcaccuuguacuacaagg

SEQ ID NO: 984137 - RNA, 19 nt, Artificial Sequence
  Description of Artificial Sequence: Synthetic oligonucleotide
ugucauacaggaauuaagu

SEQ ID NO: 984138 - RNA, 19 nt, Artificial Sequence
  Description of Artificial Sequence: Synthetic oligonucleotide
uuauuuacuuugaaauacc

SEQ ID NO: 984139 - RNA, 19 nt, Artificial Sequence
  Description of Artificial Sequence: Synthetic oligonucleotide
uauuuacuuugaaauaccc

SEQ ID NO: 984140 - RNA, 19 nt, Artificial Sequence
  Description of Artificial Sequence: Synthetic oligonucleotide
auugaaugaaagaaggcgg

SEQ ID NO: 984141 - RNA, 19 nt, Artificial Sequence
  Description of Artificial Sequence: Synthetic oligonucleotide
aaaguguacaaacucugga

SEQ ID NO: 984142 - RNA, 19 nt, Artificial Sequence
  Description of Artificial Sequence: Synthetic oligonucleotide
cuugccaaagugaugauac

SEQ ID NO: 984143 - RNA, 19 nt, Artificial Sequence
  Description of Artificial Sequence: Synthetic oligonucleotide
uacauaucaaaguauauuu

SEQ ID NO: 984144 - RNA, 19 nt, Artificial Sequence
  Description of Artificial Sequence: Synthetic oligonucleotide
ucuaacacaggauucacaa

SEQ ID NO: 984145 - RNA, 19 nt, Artificial Sequence
  Description of Artificial Sequence: Synthetic oligonucleotide
uguucuaaaauacuucgau

SEQ ID NO: 984146 - RNA, 19 nt, Artificial Sequence
  Description of Artificial Sequence: Synthetic oligonucleotide
aauacagugugcuugccaa

SEQ ID NO: 984147 - RNA, 19 nt, Artificial Sequence
  Description of Artificial Sequence: Synthetic oligonucleotide
uucagauugaaugaaagaa

SEQ ID NO: 984148 - RNA, 19 nt, Artificial Sequence
  Description of Artificial Sequence: Synthetic oligonucleotide
ugugcggccucacaaaagg

SEQ ID NO: 984149 - RNA, 19 nt, Artificial Sequence
  Description of Artificial Sequence: Synthetic oligonucleotide
uuggaaacagcauuaguca

SEQ ID NO: 984150 - RNA, 19 nt, Artificial Sequence
  Description of Artificial Sequence: Synthetic oligonucleotide
aaauacccguauuuuaaug

SEQ ID NO: 984151 - RNA, 19 nt, Artificial Sequence
  Description of Artificial Sequence: Synthetic oligonucleotide
uuagcuccaucccacaaag

SEQ ID NO: 984152 - RNA, 19 nt, Artificial Sequence
  Description of Artificial Sequence: Synthetic oligonucleotide
caauacaccaacacguuag

SEQ ID NO: 984153 - RNA, 19 nt, Artificial Sequence
  Description of Artificial Sequence: Synthetic oligonucleotide
aauguuugcuaagugaggu

SEQ ID NO: 984154 - RNA, 19 nt, Artificial Sequence
  Description of Artificial Sequence: Synthetic oligonucleotide
ugcacuuugauagucuccg

SEQ ID NO: 984155 - RNA, 19 nt, Artificial Sequence
  Description of Artificial Sequence: Synthetic oligonucleotide
aaugggaccuuuccuauca

SEQ ID NO: 984156 - RNA, 19 nt, Artificial Sequence
  Description of Artificial Sequence: Synthetic oligonucleotide
acacaggauucacaaaccc

SEQ ID NO: 984157 - RNA, 19 nt, Artificial Sequence
  Description of Artificial Sequence: Synthetic oligonucleotide
agaaggcggauguugagac

SEQ ID NO: 984158 - RNA, 19 nt, Artificial Sequence
  Description of Artificial Sequence: Synthetic oligonucleotide
aagagggucacauaauuuu

SEQ ID NO: 984159 - RNA, 19 nt, Artificial Sequence
  Description of Artificial Sequence: Synthetic oligonucleotide
uuugagcguucucucaugg

SEQ ID NO: 984160 - RNA, 19 nt, Artificial Sequence
  Description of Artificial Sequence: Synthetic oligonucleotide
gaaucugacagcucuaaca

SEQ ID NO: 984161 - RNA, 19 nt, Artificial Sequence
  Description of Artificial Sequence: Synthetic oligonucleotide
auccguaucagacugcuug

SEQ ID NO: 984162 - RNA, 19 nt, Artificial Sequence
  Description of Artificial Sequence: Synthetic oligonucleotide
aacgaagucauucucccau

SEQ ID NO: 984163 - RNA, 19 nt, Artificial Sequence
  Description of Artificial Sequence: Synthetic oligonucleotide
aaaauacuucgauccuccg

SEQ ID NO: 984164 - RNA, 19 nt, Artificial Sequence
  Description of Artificial Sequence: Synthetic oligonucleotide
auuucauccuaucggaucu

SEQ ID NO: 984165 - RNA, 19 nt, Artificial Sequence
  Description of Artificial Sequence: Synthetic oligonucleotide
aaugccucucuuguaaguc

SEQ ID NO: 984166 - RNA, 19 nt, Artificial Sequence
  Description of Artificial Sequence: Synthetic oligonucleotide
aagggcaauacaaucaaug

SEQ ID NO: 984167 - RNA, 19 nt, Artificial Sequence
  Description of Artificial Sequence: Synthetic oligonucleotide
uugacuuuaauguuugcua

SEQ ID NO: 984168 - RNA, 19 nt, Artificial Sequence
  Description of Artificial Sequence: Synthetic oligonucleotide
ugcgacuuuauauuucuca

SEQ ID NO: 984169 - RNA, 19 nt, Artificial Sequence
  Description of Artificial Sequence: Synthetic oligonucleotide
guugauccguaucagacug

SEQ ID NO: 984170 - RNA, 19 nt, Artificial Sequence
  Description of Artificial Sequence: Synthetic oligonucleotide
uuuacauaucaaaguauau

SEQ ID NO: 984171 - RNA, 19 nt, Artificial Sequence
  Description of Artificial Sequence: Synthetic oligonucleotide
ucuagucuuaacuucuccu

SEQ ID NO: 984172 - RNA, 19 nt, Artificial Sequence
  Description of Artificial Sequence: Synthetic oligonucleotide
cucaguaagugcccuaugg

SEQ ID NO: 984173 - RNA, 19 nt, Artificial Sequence
  Description of Artificial Sequence: Synthetic oligonucleotide
cuaucggaucuguugaucc

SEQ ID NO: 984174 - RNA, 19 nt, Artificial Sequence
  Description of Artificial Sequence: Synthetic oligonucleotide
aggucgucaauacaccaac

SEQ ID NO: 984175 - RNA, 19 nt, Artificial Sequence
  Description of Artificial Sequence: Synthetic oligonucleotide
uuuauauuguuaaguguua

SEQ ID NO: 984176 - RNA, 19 nt, Artificial Sequence
  Description of Artificial Sequence: Synthetic oligonucleotide
aaagaaggcggauguugag

SEQ ID NO: 984177 - RNA, 19 nt, Artificial Sequence
  Description of Artificial Sequence: Synthetic oligonucleotide
caauauggugucauacagg

SEQ ID NO: 984178 - RNA, 19 nt, Artificial Sequence
  Description of Artificial Sequence: Synthetic oligonucleotide
caacacguuagcuccaucc

SEQ ID NO: 984179 - RNA, 19 nt, Artificial Sequence
  Description of Artificial Sequence: Synthetic oligonucleotide
caaaguguacaaacucugg

SEQ ID NO: 984180 - RNA, 19 nt, Artificial Sequence
  Description of Artificial Sequence: Synthetic oligonucleotide
ugagcguucucucaugggu

SEQ ID NO: 984181 - RNA, 19 nt, Artificial Sequence
  Description of Artificial Sequence: Synthetic oligonucleotide
agcguauaaagcuucuucu

SEQ ID NO: 984182 - RNA, 19 nt, Artificial Sequence
  Description of Artificial Sequence: Synthetic oligonucleotide
ucuacgagauucucaaacu

SEQ ID NO: 984183 - RNA, 19 nt, Artificial Sequence
  Description of Artificial Sequence: Synthetic oligonucleotide
auuaucguccaucucggca

SEQ ID NO: 984184 - RNA, 19 nt, Artificial Sequence
  Description of Artificial Sequence: Synthetic oligonucleotide
auuccagcccauuggaauc

SEQ ID NO: 984185 - RNA, 19 nt, Artificial Sequence
  Description of Artificial Sequence: Synthetic oligonucleotide
uacaccaacacguuagcuc

SEQ ID NO: 984186 - RNA, 19 nt, Artificial Sequence
  Description of Artificial Sequence: Synthetic oligonucleotide
auucagauugaaugaaaga

SEQ ID NO: 984187 - RNA, 19 nt, Artificial Sequence
  Description of Artificial Sequence: Synthetic oligonucleotide
cucuacgagauucucaaac

SEQ ID NO: 984188 - RNA, 19 nt, Artificial Sequence
  Description of Artificial Sequence: Synthetic oligonucleotide
ucccauuccagcccauugg

SEQ ID NO: 984189 - RNA, 19 nt, Artificial Sequence
  Description of Artificial Sequence: Synthetic oligonucleotide
auauuguuaaguguuauuu

SEQ ID NO: 984190 - RNA, 19 nt, Artificial Sequence
  Description of Artificial Sequence: Synthetic oligonucleotide
caaucaaugggaccuuucc

SEQ ID NO: 984191 - RNA, 19 nt, Artificial Sequence
  Description of Artificial Sequence: Synthetic oligonucleotide
ggaauugccauuaucgucc

SEQ ID NO: 984192 - RNA, 19 nt, Artificial Sequence
  Description of Artificial Sequence: Synthetic oligonucleotide
aggauucacaaacccagag

SEQ ID NO: 984193 - RNA, 19 nt, Artificial Sequence
  Description of Artificial Sequence: Synthetic oligonucleotide
auacuguggcgucagauga

SEQ ID NO: 984194 - RNA, 19 nt, Artificial Sequence
  Description of Artificial Sequence: Synthetic oligonucleotide
agacacaggucgucaauac

SEQ ID NO: 984195 - RNA, 19 nt, Artificial Sequence
  Description of Artificial Sequence: Synthetic oligonucleotide
uguaaggcuaacucccucu

SEQ ID NO: 984196 - RNA, 19 nt, Artificial Sequence
  Description of Artificial Sequence: Synthetic oligonucleotide
ucucuuacacagauuuaca

SEQ ID NO: 984197 - RNA, 19 nt, Artificial Sequence
  Description of Artificial Sequence: Synthetic oligonucleotide
uagucuuaacuucuccucu

SEQ ID NO: 984198 - RNA, 19 nt, Artificial Sequence
  Description of Artificial Sequence: Synthetic oligonucleotide
acugcgacuuuauauuucu

SEQ ID NO: 984199 - RNA, 19 nt, Artificial Sequence
  Description of Artificial Sequence: Synthetic oligonucleotide
uccguaucagacugcuugg

SEQ ID NO: 984200 - RNA, 19 nt, Artificial Sequence
  Description of Artificial Sequence: Synthetic oligonucleotide
gaaugaaagaaggcggaug

SEQ ID NO: 984201 - RNA, 19 nt, Artificial Sequence
  Description of Artificial Sequence: Synthetic oligonucleotide
uugaaauacccguauuuua

SEQ ID NO: 984202 - RNA, 19 nt, Artificial Sequence
  Description of Artificial Sequence: Synthetic oligonucleotide
gagucugcuacuucgaaaa

SEQ ID NO: 984203 - RNA, 19 nt, Artificial Sequence
  Description of Artificial Sequence: Synthetic oligonucleotide
agccaauauggugucauac

SEQ ID NO: 984204 - RNA, 19 nt, Artificial Sequence
  Description of Artificial Sequence: Synthetic oligonucleotide
guucuaaaauacuucgauc

SEQ ID NO: 984205 - RNA, 19 nt, Artificial Sequence
  Description of Artificial Sequence: Synthetic oligonucleotide
gggcaauacaaucaauggg

SEQ ID NO: 984206 - RNA, 19 nt, Artificial Sequence
  Description of Artificial Sequence: Synthetic oligonucleotide
uacuuugaaauacccguau

SEQ ID NO: 984207 - RNA, 19 nt, Artificial Sequence
  Description of Artificial Sequence: Synthetic oligonucleotide
uuucacguacagcaagaac

SEQ ID NO: 984208 - RNA, 19 nt, Artificial Sequence
  Description of Artificial Sequence: Synthetic oligonucleotide
ucccacuccaggucuaagg

SEQ ID NO: 984209 - RNA, 19 nt, Artificial Sequence
  Description of Artificial Sequence: Synthetic oligonucleotide
aaacccagaguacucggaa

SEQ ID NO: 984210 - RNA, 19 nt, Artificial Sequence
  Description of Artificial Sequence: Synthetic oligonucleotide
ugcggccucacaaaagggc

SEQ ID NO: 984211 - RNA, 19 nt, Artificial Sequence
  Description of Artificial Sequence: Synthetic oligonucleotide
ucgcaugccgcccagcgcc

SEQ ID NO: 984212 - RNA, 19 nt, Artificial Sequence
  Description of Artificial Sequence: Synthetic oligonucleotide
uguugauccguaucagacu

SEQ ID NO: 984213 - RNA, 19 nt, Artificial Sequence
  Description of Artificial Sequence: Synthetic oligonucleotide
uauauuguuaaguguuauu

SEQ ID NO: 984214 - RNA, 19 nt, Artificial Sequence
  Description of Artificial Sequence: Synthetic oligonucleotide
aaagccaauauggugucau

SEQ ID NO: 984215 - RNA, 19 nt, Artificial Sequence
  Description of Artificial Sequence: Synthetic oligonucleotide
aacucccucugaaucuucc

SEQ ID NO: 984216 - RNA, 19 nt, Artificial Sequence
  Description of Artificial Sequence: Synthetic oligonucleotide
auccuaucggaucuguuga

SEQ ID NO: 984217 - RNA, 19 nt, Artificial Sequence
  Description of Artificial Sequence: Synthetic oligonucleotide
uuacuuugaaauacccgua

SEQ ID NO: 984218 - RNA, 19 nt, Artificial Sequence
  Description of Artificial Sequence: Synthetic oligonucleotide
gucucuuacacagauuuac

SEQ ID NO: 984219 - RNA, 19 nt, Artificial Sequence
  Description of Artificial Sequence: Synthetic oligonucleotide
uguuugcuaagugagguua

SEQ ID NO: 984220 - RNA, 19 nt, Artificial Sequence
  Description of Artificial Sequence: Synthetic oligonucleotide
ucaauacaccaacacguua

SEQ ID NO: 984221 - RNA, 19 nt, Artificial Sequence
  Description of Artificial Sequence: Synthetic oligonucleotide
ucggaauugccauuaucgu

SEQ ID NO: 984222 - RNA, 19 nt, Artificial Sequence
  Description of Artificial Sequence: Synthetic oligonucleotide
acagcauuagucauguggu

SEQ ID NO: 984223 - RNA, 19 nt, Artificial Sequence
  Description of Artificial Sequence: Synthetic oligonucleotide
ggcaauacaaucaauggga

SEQ ID NO: 984224 - RNA, 19 nt, Artificial Sequence
  Description of Artificial Sequence: Synthetic oligonucleotide
uuauauuguuaaguguuau

SEQ ID NO: 984225 - RNA, 19 nt, Artificial Sequence
  Description of Artificial Sequence: Synthetic oligonucleotide
ucucaauugaaagccaaua

SEQ ID NO: 984226 - RNA, 19 nt, Artificial Sequence
  Description of Artificial Sequence: Synthetic oligonucleotide
gucgucaauacaccaacac

SEQ ID NO: 984227 - RNA, 19 nt, Artificial Sequence
  Description of Artificial Sequence: Synthetic oligonucleotide
acucggaauugccauuauc

SEQ ID NO: 984228 - RNA, 19 nt, Artificial Sequence
  Description of Artificial Sequence: Synthetic oligonucleotide
gugucauacaggaauuaag

SEQ ID NO: 984229 - RNA, 19 nt, Artificial Sequence
  Description of Artificial Sequence: Synthetic oligonucleotide
agacagaauacagugugcu

SEQ ID NO: 984230 - RNA, 19 nt, Artificial Sequence
  Description of Artificial Sequence: Synthetic oligonucleotide
ugugcuugccaaagugaug

SEQ ID NO: 984231 - RNA, 19 nt, Artificial Sequence
  Description of Artificial Sequence: Synthetic oligonucleotide
ugaugauacucaguucuca

SEQ ID NO: 984232 - RNA, 19 nt, Artificial Sequence
  Description of Artificial Sequence: Synthetic oligonucleotide
uugagcguucucucauggg

SEQ ID NO: 984233 - RNA, 19 nt, Artificial Sequence
  Description of Artificial Sequence: Synthetic oligonucleotide
cuacgagauucucaaacuc

SEQ ID NO: 984234 - RNA, 19 nt, Artificial Sequence
  Description of Artificial Sequence: Synthetic oligonucleotide
ucggcacuaacgaagucau

SEQ ID NO: 984235 - RNA, 19 nt, Artificial Sequence
  Description of Artificial Sequence: Synthetic oligonucleotide
uucagauaucaagaggguc

SEQ ID NO: 984236 - RNA, 19 nt, Artificial Sequence
  Description of Artificial Sequence: Synthetic oligonucleotide
uacuucgauccuccgccgg

SEQ ID NO: 984237 - RNA, 19 nt, Artificial Sequence
  Description of Artificial Sequence: Synthetic oligonucleotide
uggaaacagcauuagucau

SEQ ID NO: 984238 - RNA, 19 nt, Artificial Sequence
  Description of Artificial Sequence: Synthetic oligonucleotide
ucaaugggaccuuuccuau

SEQ ID NO: 984239 - RNA, 19 nt, Artificial Sequence
  Description of Artificial Sequence: Synthetic oligonucleotide
ccaauauggugucauacag

SEQ ID NO: 984240 - RNA, 19 nt, Artificial Sequence
  Description of Artificial Sequence: Synthetic oligonucleotide
cacaaacccagaguacucg

SEQ ID NO: 984241 - RNA, 19 nt, Artificial Sequence
  Description of Artificial Sequence: Synthetic oligonucleotide
aguuagggugcauuuccca

SEQ ID NO: 984242 - RNA, 19 nt, Artificial Sequence
  Description of Artificial Sequence: Synthetic oligonucleotide
agcguucucucauggguag

SEQ ID NO: 984243 - RNA, 19 nt, Artificial Sequence
  Description of Artificial Sequence: Synthetic oligonucleotide
cacaggucgucaauacacc

SEQ ID NO: 984244 - RNA, 19 nt, Artificial Sequence
  Description of Artificial Sequence: Synthetic oligonucleotide
cagcguauaaagcuucuuc

SEQ ID NO: 984245 - RNA, 19 nt, Artificial Sequence
  Description of Artificial Sequence: Synthetic oligonucleotide
aguuccccaucgcaugccg

SEQ ID NO: 984246 - RNA, 19 nt, Artificial Sequence
  Description of Artificial Sequence: Synthetic oligonucleotide
cacguuagcuccaucccac

SEQ ID NO: 984247 - RNA, 19 nt, Artificial Sequence
  Description of Artificial Sequence: Synthetic oligonucleotide
uuguacuacaaggcaaagu

SEQ ID NO: 984248 - RNA, 19 nt, Artificial Sequence
  Description of Artificial Sequence: Synthetic oligonucleotide
gugcuugccaaagugauga

SEQ ID NO: 984249 - RNA, 19 nt, Artificial Sequence
  Description of Artificial Sequence: Synthetic oligonucleotide
gcaguuagggugcauuucc

SEQ ID NO: 984250 - RNA, 19 nt, Artificial Sequence
  Description of Artificial Sequence: Synthetic oligonucleotide
uacugcgacuuuauauuuc

SEQ ID NO: 984251 - RNA, 19 nt, Artificial Sequence
  Description of Artificial Sequence: Synthetic oligonucleotide
uuacuaucucuaccuggac

SEQ ID NO: 984252 - RNA, 19 nt, Artificial Sequence
  Description of Artificial Sequence: Synthetic oligonucleotide
acaggucgucaauacacca

SEQ ID NO: 984253 - RNA, 19 nt, Artificial Sequence
  Description of Artificial Sequence: Synthetic oligonucleotide
uuugcuaagugagguuaca

SEQ ID NO: 984254 - RNA, 19 nt, Artificial Sequence
  Description of Artificial Sequence: Synthetic oligonucleotide
uuccccaucgcaugccgcc

SEQ ID NO: 984255 - RNA, 19 nt, Artificial Sequence
  Description of Artificial Sequence: Synthetic oligonucleotide
ugauccguaucagacugcu

SEQ ID NO: 984256 - RNA, 19 nt, Artificial Sequence
  Description of Artificial Sequence: Synthetic oligonucleotide
caucgcaugccgcccagcg

SEQ ID NO: 984257 - RNA, 19 nt, Artificial Sequence
  Description of Artificial Sequence: Synthetic oligonucleotide
auacccguauuuuaauguu

SEQ ID NO: 984258 - RNA, 19 nt, Artificial Sequence
  Description of Artificial Sequence: Synthetic oligonucleotide
cuuccuauccacgucuuuc

SEQ ID NO: 984259 - RNA, 19 nt, Artificial Sequence
  Description of Artificial Sequence: Synthetic oligonucleotide
cuauggucaagugcucucc

SEQ ID NO: 984260 - RNA, 19 nt, Artificial Sequence
  Description of Artificial Sequence: Synthetic oligonucleotide
acacguuagcuccauccca

SEQ ID NO: 984261 - RNA, 19 nt, Artificial Sequence
  Description of Artificial Sequence: Synthetic oligonucleotide
gaugagagucugcuacuuc

SEQ ID NO: 984262 - RNA, 19 nt, Artificial Sequence
  Description of Artificial Sequence: Synthetic oligonucleotide
ggcacuaacgaagucauuc

SEQ ID NO: 984263 - RNA, 19 nt, Artificial Sequence
  Description of Artificial Sequence: Synthetic oligonucleotide
auagucuccgcugcuagga

SEQ ID NO: 984264 - RNA, 19 nt, Artificial Sequence
  Description of Artificial Sequence: Synthetic oligonucleotide
uggguagcauccuauucau

SEQ ID NO: 984265 - RNA, 19 nt, Artificial Sequence
  Description of Artificial Sequence: Synthetic oligonucleotide
auaucaaaguauauuuauu

SEQ ID NO: 984266 - RNA, 19 nt, Artificial Sequence
  Description of Artificial Sequence: Synthetic oligonucleotide
uugauccguaucagacugc

SEQ ID NO: 984267 - RNA, 19 nt, Artificial Sequence
  Description of Artificial Sequence: Synthetic oligonucleotide
ucgauccuccgccggcucg

SEQ ID NO: 984268 - RNA, 19 nt, Artificial Sequence
  Description of Artificial Sequence: Synthetic oligonucleotide
agaaaggauuuuauuuacu

SEQ ID NO: 984269 - RNA, 19 nt, Artificial Sequence
  Description of Artificial Sequence: Synthetic oligonucleotide
acaaucaaugggaccuuuc

SEQ ID NO: 984270 - RNA, 19 nt, Artificial Sequence
  Description of Artificial Sequence: Synthetic oligonucleotide
acuuugaaauacccguauu

SEQ ID NO: 984271 - RNA, 19 nt, Artificial Sequence
  Description of Artificial Sequence: Synthetic oligonucleotide
caguuagggugcauuuccc

SEQ ID NO: 984272 - RNA, 19 nt, Artificial Sequence
  Description of Artificial Sequence: Synthetic oligonucleotide
gucaauacuguggcgucag

SEQ ID NO: 984273 - RNA, 19 nt, Artificial Sequence
  Description of Artificial Sequence: Synthetic oligonucleotide
augugcccaaagcauucag

SEQ ID NO: 984274 - RNA, 19 nt, Artificial Sequence
  Description of Artificial Sequence: Synthetic oligonucleotide
gacacaggucgucaauaca

SEQ ID NO: 984275 - RNA, 19 nt, Artificial Sequence
  Description of Artificial Sequence: Synthetic oligonucleotide
uacccguauuuuaauguuu

SEQ ID NO: 984276 - RNA, 19 nt, Artificial Sequence
  Description of Artificial Sequence: Synthetic oligonucleotide
guccaucucggcacuaacg

SEQ ID NO: 984277 - RNA, 19 nt, Artificial Sequence
  Description of Artificial Sequence: Synthetic oligonucleotide
uuuucacguacagcaagaa

SEQ ID NO: 984278 - RNA, 19 nt, Artificial Sequence
  Description of Artificial Sequence: Synthetic oligonucleotide
uugcuaagugagguuacac

SEQ ID NO: 984279 - RNA, 19 nt, Artificial Sequence
  Description of Artificial Sequence: Synthetic oligonucleotide
ucauaaugccucucuugua

SEQ ID NO: 984280 - RNA, 19 nt, Artificial Sequence
  Description of Artificial Sequence: Synthetic oligonucleotide
ugggcagcguauaaagcuu

SEQ ID NO: 984281 - RNA, 19 nt, Artificial Sequence
  Description of Artificial Sequence: Synthetic oligonucleotide
cacuaacgaagucauucuc

SEQ ID NO: 984282 - RNA, 19 nt, Artificial Sequence
  Description of Artificial Sequence: Synthetic oligonucleotide
ggaaacagcauuagucaug

SEQ ID NO: 984283 - RNA, 19 nt, Artificial Sequence
  Description of Artificial Sequence: Synthetic oligonucleotide
ugucaauacuguggcguca

SEQ ID NO: 984284 - RNA, 19 nt, Artificial Sequence
  Description of Artificial Sequence: Synthetic oligonucleotide
gaaauacccguauuuuaau

SEQ ID NO: 984285 - RNA, 19 nt, Artificial Sequence
  Description of Artificial Sequence: Synthetic oligonucleotide
cuuguacuacaaggcaaag

SEQ ID NO: 984286 - RNA, 19 nt, Artificial Sequence
  Description of Artificial Sequence: Synthetic oligonucleotide
gggguugcuacccuucuug

SEQ ID NO: 984287 - RNA, 19 nt, Artificial Sequence
  Description of Artificial Sequence: Synthetic oligonucleotide
ucccugugcggccucacaa

SEQ ID NO: 984288 - RNA, 19 nt, Artificial Sequence
  Description of Artificial Sequence: Synthetic oligonucleotide
cauuaucguccaucucggc

SEQ ID NO: 984289 - RNA, 19 nt, Artificial Sequence
  Description of Artificial Sequence: Synthetic oligonucleotide
auguucuaaaauacuucga

SEQ ID NO: 984290 - RNA, 19 nt, Artificial Sequence
  Description of Artificial Sequence: Synthetic oligonucleotide
agaguacucggaauugcca

SEQ ID NO: 984291 - RNA, 19 nt, Artificial Sequence
  Description of Artificial Sequence: Synthetic oligonucleotide
ggcuaacucccucugaauc

SEQ ID NO: 984292 - RNA, 19 nt, Artificial Sequence
  Description of Artificial Sequence: Synthetic oligonucleotide
cuuugaaauacccguauuu

SEQ ID NO: 984293 - RNA, 19 nt, Artificial Sequence
  Description of Artificial Sequence: Synthetic oligonucleotide
aguacucggaauugccauu

SEQ ID NO: 984294 - RNA, 19 nt, Artificial Sequence
  Description of Artificial Sequence: Synthetic oligonucleotide
cagccgacccgcuucgcgg

SEQ ID NO: 984295 - RNA, 19 nt, Artificial Sequence
  Description of Artificial Sequence: Synthetic oligonucleotide
gaauugccauuaucgucca

SEQ ID NO: 984296 - RNA, 19 nt, Artificial Sequence
  Description of Artificial Sequence: Synthetic oligonucleotide
ucaauacuguggcgucaga

SEQ ID NO: 984297 - RNA, 19 nt, Artificial Sequence
  Description of Artificial Sequence: Synthetic oligonucleotide
uaucguccaucucggcacu

SEQ ID NO: 984298 - RNA, 19 nt, Artificial Sequence
  Description of Artificial Sequence: Synthetic oligonucleotide
ucccacuaguugauuuggu

SEQ ID NO: 984299 - RNA, 19 nt, Artificial Sequence
  Description of Artificial Sequence: Synthetic oligonucleotide
agaccacaugugcccaaag

SEQ ID NO: 984300 - RNA, 19 nt, Artificial Sequence
  Description of Artificial Sequence: Synthetic oligonucleotide
uucauccuaucggaucugu

SEQ ID NO: 984301 - RNA, 19 nt, Artificial Sequence
  Description of Artificial Sequence: Synthetic oligonucleotide
ggaucuguugauccguauc

SEQ ID NO: 984302 - RNA, 19 nt, Artificial Sequence
  Description of Artificial Sequence: Synthetic oligonucleotide
aagccaauauggugucaua

SEQ ID NO: 984303 - RNA, 19 nt, Artificial Sequence
  Description of Artificial Sequence: Synthetic oligonucleotide
uuucauccuaucggaucug

SEQ ID NO: 984304 - RNA, 19 nt, Artificial Sequence
  Description of Artificial Sequence: Synthetic oligonucleotide
cucaauugaaagccaauau

SEQ ID NO: 984305 - RNA, 19 nt, Artificial Sequence
  Description of Artificial Sequence: Synthetic oligonucleotide
gaguacucggaauugccau

SEQ ID NO: 984306 - RNA, 19 nt, Artificial Sequence
  Description of Artificial Sequence: Synthetic oligonucleotide
ugcccuauggcugcuuccu

SEQ ID NO: 984307 - RNA, 19 nt, Artificial Sequence
  Description of Artificial Sequence: Synthetic oligonucleotide
uccucaguaagugcccuau

SEQ ID NO: 984308 - RNA, 19 nt, Artificial Sequence
  Description of Artificial Sequence: Synthetic oligonucleotide
cugugcggccucacaaaag

SEQ ID NO: 984309 - RNA, 19 nt, Artificial Sequence
  Description of Artificial Sequence: Synthetic oligonucleotide
uucguacugcgacuuuaua

SEQ ID NO: 984310 - RNA, 19 nt, Artificial Sequence
  Description of Artificial Sequence: Synthetic oligonucleotide
auacaccaacacguuagcu

SEQ ID NO: 984311 - RNA, 19 nt, Artificial Sequence
  Description of Artificial Sequence: Synthetic oligonucleotide
aaagcaccuuguacuacaa

SEQ ID NO: 984312 - RNA, 19 nt, Artificial Sequence
  Description of Artificial Sequence: Synthetic oligonucleotide
gccaauauggugucauaca

SEQ ID NO: 984313 - RNA, 19 nt, Artificial Sequence
  Description of Artificial Sequence: Synthetic oligonucleotide
ucccacaaagcaccuugua

SEQ ID NO: 984314 - RNA, 19 nt, Artificial Sequence
  Description of Artificial Sequence: Synthetic oligonucleotide
uaucucuaccuggaccuuc

SEQ ID NO: 984315 - RNA, 19 nt, Artificial Sequence
  Description of Artificial Sequence: Synthetic oligonucleotide
cccacaaagcaccuuguac

SEQ ID NO: 984316 - RNA, 19 nt, Artificial Sequence
  Description of Artificial Sequence: Synthetic oligonucleotide
aucuaagaucucaauugaa

SEQ ID NO: 984317 - RNA, 19 nt, Artificial Sequence
  Description of Artificial Sequence: Synthetic oligonucleotide
ucauccuaucggaucuguu

SEQ ID NO: 984318 - RNA, 19 nt, Artificial Sequence
  Description of Artificial Sequence: Synthetic oligonucleotide
uccuaucggaucuguugau

SEQ ID NO: 984319 - RNA, 19 nt, Artificial Sequence
  Description of Artificial Sequence: Synthetic oligonucleotide
gagagucugcuacuucgaa

SEQ ID NO: 984320 - RNA, 19 nt, Artificial Sequence
  Description of Artificial Sequence: Synthetic oligonucleotide
acguacagcaagaacuuua

SEQ ID NO: 984321 - RNA, 19 nt, Artificial Sequence
  Description of Artificial Sequence: Synthetic oligonucleotide
caaacccagaguacucgga

SEQ ID NO: 984322 - RNA, 19 nt, Artificial Sequence
  Description of Artificial Sequence: Synthetic oligonucleotide
gcaauacaaucaaugggac

SEQ ID NO: 984323 - RNA, 19 nt, Artificial Sequence
  Description of Artificial Sequence: Synthetic oligonucleotide
acgagauucucaaacucua

SEQ ID NO: 984324 - RNA, 19 nt, Artificial Sequence
  Description of Artificial Sequence: Synthetic oligonucleotide
gcgacuuuauauuucucaa

SEQ ID NO: 984325 - RNA, 19 nt, Artificial Sequence
  Description of Artificial Sequence: Synthetic oligonucleotide
ucucuacgagauucucaaa

SEQ ID NO: 984326 - RNA, 19 nt, Artificial Sequence
  Description of Artificial Sequence: Synthetic oligonucleotide
cauccuauucauuccuucu

SEQ ID NO: 984327 - RNA, 19 nt, Artificial Sequence
  Description of Artificial Sequence: Synthetic oligonucleotide
auacagugugcuugccaaa

SEQ ID NO: 984328 - RNA, 19 nt, Artificial Sequence
  Description of Artificial Sequence: Synthetic oligonucleotide
aacuucguacugcgacuuu

SEQ ID NO: 984329 - RNA, 19 nt, Artificial Sequence
  Description of Artificial Sequence: Synthetic oligonucleotide
ugccauuaucguccaucuc

SEQ ID NO: 984330 - RNA, 19 nt, Artificial Sequence
  Description of Artificial Sequence: Synthetic oligonucleotide
guacuacaaggcaaaguaa

SEQ ID NO: 984331 - RNA, 19 nt, Artificial Sequence
  Description of Artificial Sequence: Synthetic oligonucleotide
guacuguucagagcaugca

SEQ ID NO: 984332 - RNA, 19 nt, Artificial Sequence
  Description of Artificial Sequence: Synthetic oligonucleotide
acuucguacugcgacuuua

SEQ ID NO: 984333 - RNA, 19 nt, Artificial Sequence
  Description of Artificial Sequence: Synthetic oligonucleotide
uggcgucagaugagagucu

SEQ ID NO: 984334 - RNA, 19 nt, Artificial Sequence
  Description of Artificial Sequence: Synthetic oligonucleotide
uuucgcugccuugcugccc

SEQ ID NO: 984335 - RNA, 19 nt, Artificial Sequence
  Description of Artificial Sequence: Synthetic oligonucleotide
gucuccgcugcuaggauga

SEQ ID NO: 984336 - RNA, 19 nt, Artificial Sequence
  Description of Artificial Sequence: Synthetic oligonucleotide
aucauucccacuaguugau

SEQ ID NO: 984337 - RNA, 19 nt, Artificial Sequence
  Description of Artificial Sequence: Synthetic oligonucleotide
gguugacuuuaauguuugc

SEQ ID NO: 984338 - RNA, 19 nt, Artificial Sequence
  Description of Artificial Sequence: Synthetic oligonucleotide
aggcuaacucccucugaau

SEQ ID NO: 984339 - RNA, 19 nt, Artificial Sequence
  Description of Artificial Sequence: Synthetic oligonucleotide
caggucgucaauacaccaa

SEQ ID NO: 984340 - RNA, 19 nt, Artificial Sequence
  Description of Artificial Sequence: Synthetic oligonucleotide
uacaaucaaugggaccuuu

SEQ ID NO: 984341 - RNA, 19 nt, Artificial Sequence
  Description of Artificial Sequence: Synthetic oligonucleotide
agaugagagucugcuacuu

SEQ ID NO: 984342 - RNA, 19 nt, Artificial Sequence
  Description of Artificial Sequence: Synthetic oligonucleotide
uagucuccgcugcuaggau

SEQ ID NO: 984343 - RNA, 19 nt, Artificial Sequence
  Description of Artificial Sequence: Synthetic oligonucleotide
gcaagggagacagaauaca

SEQ ID NO: 984344 - RNA, 19 nt, Artificial Sequence
  Description of Artificial Sequence: Synthetic oligonucleotide
ggguugcuacccuucuugc

SEQ ID NO: 984345 - RNA, 19 nt, Artificial Sequence
  Description of Artificial Sequence: Synthetic oligonucleotide
ggagucauaaugccucucu

SEQ ID NO: 984346 - RNA, 19 nt, Artificial Sequence
  Description of Artificial Sequence: Synthetic oligonucleotide
gugcggccucacaaaaggg

SEQ ID NO: 984347 - RNA, 19 nt, Artificial Sequence
  Description of Artificial Sequence: Synthetic oligonucleotide
cugcgacuuuauauuucuc

SEQ ID NO: 984348 - RNA, 19 nt, Artificial Sequence
  Description of Artificial Sequence: Synthetic oligonucleotide
cuauccacgucuuucuguu

SEQ ID NO: 984349 - RNA, 19 nt, Artificial Sequence
  Description of Artificial Sequence: Synthetic oligonucleotide
cuuguaaggcuaacucccu

SEQ ID NO: 984350 - RNA, 19 nt, Artificial Sequence
  Description of Artificial Sequence: Synthetic oligonucleotide
uucgauccuccgccggcuc

SEQ ID NO: 984351 - RNA, 19 nt, Artificial Sequence
  Description of Artificial Sequence: Synthetic oligonucleotide
ggugucauacaggaauuaa

SEQ ID NO: 984352 - RNA, 19 nt, Artificial Sequence
  Description of Artificial Sequence: Synthetic oligonucleotide
cggaauugccauuaucguc

SEQ ID NO: 984353 - RNA, 19 nt, Artificial Sequence
  Description of Artificial Sequence: Synthetic oligonucleotide
cuuuccuaucagaaaggau

SEQ ID NO: 984354 - RNA, 19 nt, Artificial Sequence
  Description of Artificial Sequence: Synthetic oligonucleotide
guacucggaauugccauua

SEQ ID NO: 984355 - RNA, 19 nt, Artificial Sequence
  Description of Artificial Sequence: Synthetic oligonucleotide
gcagccgacccgcuucgcg

SEQ ID NO: 984356 - RNA, 19 nt, Artificial Sequence
  Description of Artificial Sequence: Synthetic oligonucleotide
ggucuaaggaggugcuguc

SEQ ID NO: 984357 - RNA, 19 nt, Artificial Sequence
  Description of Artificial Sequence: Synthetic oligonucleotide
uauccacgucuuucuguuu

SEQ ID NO: 984358 - RNA, 19 nt, Artificial Sequence
  Description of Artificial Sequence: Synthetic oligonucleotide
agauaucaagagggucaca

SEQ ID NO: 984359 - RNA, 19 nt, Artificial Sequence
  Description of Artificial Sequence: Synthetic oligonucleotide
cacucucuacgagauucuc

SEQ ID NO: 984360 - RNA, 19 nt, Artificial Sequence
  Description of Artificial Sequence: Synthetic oligonucleotide
ucguccaucucggcacuaa

SEQ ID NO: 984361 - RNA, 19 nt, Artificial Sequence
  Description of Artificial Sequence: Synthetic oligonucleotide
ggcgucagaugagagucug

SEQ ID NO: 984362 - RNA, 19 nt, Artificial Sequence
  Description of Artificial Sequence: Synthetic oligonucleotide
gagcguucucucaugggua

SEQ ID NO: 984363 - RNA, 19 nt, Artificial Sequence
  Description of Artificial Sequence: Synthetic oligonucleotide
ugcuugccaaagugaugau

SEQ ID NO: 984364 - RNA, 19 nt, Artificial Sequence
  Description of Artificial Sequence: Synthetic oligonucleotide
caagagggucacauaauuu

SEQ ID NO: 984365 - RNA, 19 nt, Artificial Sequence
  Description of Artificial Sequence: Synthetic oligonucleotide
cgcugggcagcguauaaag

SEQ ID NO: 984366 - RNA, 19 nt, Artificial Sequence
  Description of Artificial Sequence: Synthetic oligonucleotide
ugcuacccuucuugcugcu

SEQ ID NO: 984367 - RNA, 19 nt, Artificial Sequence
  Description of Artificial Sequence: Synthetic oligonucleotide
guccugcacuuugauaguc

SEQ ID NO: 984368 - RNA, 19 nt, Artificial Sequence
  Description of Artificial Sequence: Synthetic oligonucleotide
ggaugauagcacuguguua

SEQ ID NO: 984369 - RNA, 19 nt, Artificial Sequence
  Description of Artificial Sequence: Synthetic oligonucleotide
gcacuaacgaagucauucu

SEQ ID NO: 984370 - RNA, 19 nt, Artificial Sequence
  Description of Artificial Sequence: Synthetic oligonucleotide
auauggugucauacaggaa

SEQ ID NO: 984371 - RNA, 19 nt, Artificial Sequence
  Description of Artificial Sequence: Synthetic oligonucleotide
cauuaagucacagcugcuu

SEQ ID NO: 984372 - RNA, 19 nt, Artificial Sequence
  Description of Artificial Sequence: Synthetic oligonucleotide
cguaucagacugcuuggug

SEQ ID NO: 984373 - RNA, 19 nt, Artificial Sequence
  Description of Artificial Sequence: Synthetic oligonucleotide
guuccccaucgcaugccgc

SEQ ID NO: 984374 - RNA, 19 nt, Artificial Sequence
  Description of Artificial Sequence: Synthetic oligonucleotide
gcugggcagcguauaaagc

SEQ ID NO: 984375 - RNA, 19 nt, Artificial Sequence
  Description of Artificial Sequence: Synthetic oligonucleotide
uaagugcccuauggcugcu

SEQ ID NO: 984376 - RNA, 19 nt, Artificial Sequence
  Description of Artificial Sequence: Synthetic oligonucleotide
cuucacgcugggcagcgua

SEQ ID NO: 984377 - RNA, 19 nt, Artificial Sequence
  Description of Artificial Sequence: Synthetic oligonucleotide
cuucguacugcgacuuuau

SEQ ID NO: 984378 - RNA, 19 nt, Artificial Sequence
  Description of Artificial Sequence: Synthetic oligonucleotide
agcauccuauucauuccuu

SEQ ID NO: 984379 - RNA, 19 nt, Artificial Sequence
  Description of Artificial Sequence: Synthetic oligonucleotide
caauacuguggcgucagau

SEQ ID NO: 984380 - RNA, 19 nt, Artificial Sequence
  Description of Artificial Sequence: Synthetic oligonucleotide
cuucgcggcggagcagccc

SEQ ID NO: 984381 - RNA, 19 nt, Artificial Sequence
  Description of Artificial Sequence: Synthetic oligonucleotide
ccuaucggaucuguugauc

SEQ ID NO: 984382 - RNA, 19 nt, Artificial Sequence
  Description of Artificial Sequence: Synthetic oligonucleotide
ucacgcugggcagcguaua

SEQ ID NO: 984383 - RNA, 19 nt, Artificial Sequence
  Description of Artificial Sequence: Synthetic oligonucleotide
ccucacaaaagggcucagc

SEQ ID NO: 984384 - RNA, 19 nt, Artificial Sequence
  Description of Artificial Sequence: Synthetic oligonucleotide
cccagaguacucggaauug

SEQ ID NO: 984385 - RNA, 19 nt, Artificial Sequence
  Description of Artificial Sequence: Synthetic oligonucleotide
cggauguugagaccacaug

SEQ ID NO: 984386 - RNA, 19 nt, Artificial Sequence
  Description of Artificial Sequence: Synthetic oligonucleotide
gguugcuacccuucuugcu

SEQ ID NO: 984387 - RNA, 19 nt, Artificial Sequence
  Description of Artificial Sequence: Synthetic oligonucleotide
ggccucacaaaagggcuca

SEQ ID NO: 984388 - RNA, 19 nt, Artificial Sequence
  Description of Artificial Sequence: Synthetic oligonucleotide
ggucgucaauacaccaaca

SEQ ID NO: 984389 - RNA, 19 nt, Artificial Sequence
  Description of Artificial Sequence: Synthetic oligonucleotide
gcguauaaagcuucuucuu

SEQ ID NO: 984390 - RNA, 19 nt, Artificial Sequence
  Description of Artificial Sequence: Synthetic oligonucleotide
acgcugggcagcguauaaa

SEQ ID NO: 984391 - RNA, 19 nt, Artificial Sequence
  Description of Artificial Sequence: Synthetic oligonucleotide
uccagcccauuggaaucau

SEQ ID NO: 984392 - RNA, 19 nt, Artificial Sequence
  Description of Artificial Sequence: Synthetic oligonucleotide
gggcagcguauaaagcuuc

SEQ ID NO: 984393 - RNA, 19 nt, Artificial Sequence
  Description of Artificial Sequence: Synthetic oligonucleotide
cgacuuuauauuucucaaa

SEQ ID NO: 984394 - RNA, 19 nt, Artificial Sequence
  Description of Artificial Sequence: Synthetic oligonucleotide
cuaacucccucugaaucuu

SEQ ID NO: 984395 - RNA, 19 nt, Artificial Sequence
  Description of Artificial Sequence: Synthetic oligonucleotide
gucccugugcggccucaca

SEQ ID NO: 984396 - RNA, 19 nt, Artificial Sequence
  Description of Artificial Sequence: Synthetic oligonucleotide
ccuauccacgucuuucugu

SEQ ID NO: 984397 - RNA, 19 nt, Artificial Sequence
  Description of Artificial Sequence: Synthetic oligonucleotide
aagugcccuauggcugcuu

SEQ ID NO: 984398 - RNA, 19 nt, Artificial Sequence
  Description of Artificial Sequence: Synthetic oligonucleotide
gcuugccaaagugaugaua

SEQ ID NO: 984399 - RNA, 19 nt, Artificial Sequence
  Description of Artificial Sequence: Synthetic oligonucleotide
gcuacccuucuugcugcug

SEQ ID NO: 984400 - RNA, 19 nt, Artificial Sequence
  Description of Artificial Sequence: Synthetic oligonucleotide
ucgcugcagccgacccgcu

SEQ ID NO: 984401 - RNA, 19 nt, Artificial Sequence
  Description of Artificial Sequence: Synthetic oligonucleotide
gcgucagaugagagucugc

SEQ ID NO: 984402 - RNA, 19 nt, Artificial Sequence
  Description of Artificial Sequence: Synthetic oligonucleotide
ccugugcggccucacaaaa

SEQ ID NO: 984403 - RNA, 19 nt, Artificial Sequence
  Description of Artificial Sequence: Synthetic oligonucleotide
ggcggauguugagaccaca

SEQ ID NO: 984404 - RNA, 19 nt, Artificial Sequence
  Description of Artificial Sequence: Synthetic oligonucleotide
ucuccgcugcuaggaugau

SEQ ID NO: 984405 - RNA, 19 nt, Artificial Sequence
  Description of Artificial Sequence: Synthetic oligonucleotide
gccgacccgcuucgcggcg

SEQ ID NO: 984406 - RNA, 19 nt, Artificial Sequence
  Description of Artificial Sequence: Synthetic oligonucleotide
gcggccucacaaaagggcu

SEQ ID NO: 984407 - RNA, 19 nt, Artificial Sequence
  Description of Artificial Sequence: Synthetic oligonucleotide
cguucucucauggguagca

SEQ ID NO: 984408 - RNA, 19 nt, Artificial Sequence
  Description of Artificial Sequence: Synthetic oligonucleotide
gccucacaaaagggcucag

SEQ ID NO: 984409 - RNA, 19 nt, Artificial Sequence
  Description of Artificial Sequence: Synthetic oligonucleotide
cccaucgcaugccgcccag

SEQ ID NO: 984410 - RNA, 19 nt, Artificial Sequence
  Description of Artificial Sequence: Synthetic oligonucleotide
aucguccaucucggcacua

SEQ ID NO: 984411 - RNA, 19 nt, Artificial Sequence
  Description of Artificial Sequence: Synthetic oligonucleotide
ccgcugcuaggaugauagc

SEQ ID NO: 984412 - RNA, 19 nt, Artificial Sequence
  Description of Artificial Sequence: Synthetic oligonucleotide
cccgcuucgcggcggagca

SEQ ID NO: 984413 - RNA, 19 nt, Artificial Sequence
  Description of Artificial Sequence: Synthetic oligonucleotide
gauccguaucagacugcuu

SEQ ID NO: 984414 - RNA, 19 nt, Artificial Sequence
  Description of Artificial Sequence: Synthetic oligonucleotide
ggcagcguauaaagcuucu

SEQ ID NO: 984415 - RNA, 19 nt, Artificial Sequence
  Description of Artificial Sequence: Synthetic oligonucleotide
cgucagaugagagucugcu

SEQ ID NO: 984416 - RNA, 19 nt, Artificial Sequence
  Description of Artificial Sequence: Synthetic oligonucleotide
cccugugcggccucacaaa

SEQ ID NO: 984417 - RNA, 19 nt, Artificial Sequence
  Description of Artificial Sequence: Synthetic oligonucleotide
caucacucucuacgagauu

SEQ ID NO: 984418 - RNA, 19 nt, Artificial Sequence
  Description of Artificial Sequence: Synthetic oligonucleotide
gcggauguugagaccacau

SEQ ID NO: 984419 - RNA, 19 nt, Artificial Sequence
  Description of Artificial Sequence: Synthetic oligonucleotide
cacguacagcaagaacuuu

SEQ ID NO: 984420 - RNA, 19 nt, Artificial Sequence
  Description of Artificial Sequence: Synthetic oligonucleotide
ccaucgcaugccgcccagc

SEQ ID NO: 984421 - RNA, 19 nt, Artificial Sequence
  Description of Artificial Sequence: Synthetic oligonucleotide
ccgacccgcuucgcggcgg

SEQ ID NO: 984422 - RNA, 19 nt, Artificial Sequence
  Description of Artificial Sequence: Synthetic oligonucleotide
caggagcuuucgcugccuu

SEQ ID NO: 984423 - RNA, 19 nt, Artificial Sequence
  Description of Artificial Sequence: Synthetic oligonucleotide
cgagauucucaaacucuau

SEQ ID NO: 984424 - RNA, 19 nt, Artificial Sequence
  Description of Artificial Sequence: Synthetic oligonucleotide
ccccaucgcaugccgccca

SEQ ID NO: 984425 - RNA, 19 nt, Artificial Sequence
  Description of Artificial Sequence: Synthetic oligonucleotide
ccguaucagacugcuuggu

SEQ ID NO: 984426 - RNA, 19 nt, Artificial Sequence
  Description of Artificial Sequence: Synthetic oligonucleotide
cggcucgcugcagccgacc

SEQ ID NO: 984427 - RNA, 19 nt, Artificial Sequence
  Description of Artificial Sequence: Synthetic oligonucleotide
ccgcuucgcggcggagcag

SEQ ID NO: 984428 - RNA, 19 nt, Artificial Sequence
  Description of Artificial Sequence: Synthetic oligonucleotide
cagcacccaucuguacauu

SEQ ID NO: 984429 - RNA, 19 nt, Artificial Sequence
  Description of Artificial Sequence: Synthetic oligonucleotide
cggcacuaacgaagucauu

SEQ ID NO: 984430 - RNA, 19 nt, Artificial Sequence
  Description of Artificial Sequence: Synthetic oligonucleotide
augaauaguacccauacac

SEQ ID NO: 984431 - RNA, 19 nt, Artificial Sequence
  Description of Artificial Sequence: Synthetic oligonucleotide
uucauagccaaucauaggc

SEQ ID NO: 984432 - RNA, 19 nt, Artificial Sequence
  Description of Artificial Sequence: Synthetic oligonucleotide
auaugaauaguacccauac

SEQ ID NO: 984433 - RNA, 19 nt, Artificial Sequence
  Description of Artificial Sequence: Synthetic oligonucleotide
uccgugaagagaaagcugg

SEQ ID NO: 984434 - RNA, 19 nt, Artificial Sequence
  Description of Artificial Sequence: Synthetic oligonucleotide
aguggaguuagucagguag

SEQ ID NO: 984435 - RNA, 19 nt, Artificial Sequence
  Description of Artificial Sequence: Synthetic oligonucleotide
gacuuacugaaucauagcc

SEQ ID NO: 984436 - RNA, 19 nt, Artificial Sequence
  Description of Artificial Sequence: Synthetic oligonucleotide
ugugcaagcacuuaacaga

SEQ ID NO: 984437 - RNA, 19 nt, Artificial Sequence
  Description of Artificial Sequence: Synthetic oligonucleotide
agugcuuuguuuucauagc

SEQ ID NO: 984438 - RNA, 19 nt, Artificial Sequence
  Description of Artificial Sequence: Synthetic oligonucleotide
ugugcguacucauagagcu

SEQ ID NO: 984439 - RNA, 19 nt, Artificial Sequence
  Description of Artificial Sequence: Synthetic oligonucleotide
acuauugguauccagggca

SEQ ID NO: 984440 - RNA, 19 nt, Artificial Sequence
  Description of Artificial Sequence: Synthetic oligonucleotide
aaaguuggugacauccacc

SEQ ID NO: 984441 - RNA, 19 nt, Artificial Sequence
  Description of Artificial Sequence: Synthetic oligonucleotide
uuaaccagacgcauguccc

SEQ ID NO: 984442 - RNA, 19 nt, Artificial Sequence
  Description of Artificial Sequence: Synthetic oligonucleotide
uguagaagaucuccacgcg

SEQ ID NO: 984443 - RNA, 19 nt, Artificial Sequence
  Description of Artificial Sequence: Synthetic oligonucleotide
aguacccauacacuugcgc

SEQ ID NO: 984444 - RNA, 19 nt, Artificial Sequence
  Description of Artificial Sequence: Synthetic oligonucleotide
auaggcucggaguagcugg

SEQ ID NO: 984445 - RNA, 19 nt, Artificial Sequence
  Description of Artificial Sequence: Synthetic oligonucleotide
guuucguuggaacagacca

SEQ ID NO: 984446 - RNA, 19 nt, Artificial Sequence
  Description of Artificial Sequence: Synthetic oligonucleotide
ugaauaguacccauacacu

SEQ ID NO: 984447 - RNA, 19 nt, Artificial Sequence
  Description of Artificial Sequence: Synthetic oligonucleotide
uagaagaucuccacgcggc

SEQ ID NO: 984448 - RNA, 19 nt, Artificial Sequence
  Description of Artificial Sequence: Synthetic oligonucleotide
guuggaacagaccacgccc

SEQ ID NO: 984449 - RNA, 19 nt, Artificial Sequence
  Description of Artificial Sequence: Synthetic oligonucleotide
auagccauaugaauaguac

SEQ ID NO: 984450 - RNA, 19 nt, Artificial Sequence
  Description of Artificial Sequence: Synthetic oligonucleotide
aauaguacccauacacuug

SEQ ID NO: 984451 - RNA, 19 nt, Artificial Sequence
  Description of Artificial Sequence: Synthetic oligonucleotide
ugaaugaacaggucacagc

SEQ ID NO: 984452 - RNA, 19 nt, Artificial Sequence
  Description of Artificial Sequence: Synthetic oligonucleotide
uucguuggaacagaccacg

SEQ ID NO: 984453 - RNA, 19 nt, Artificial Sequence
  Description of Artificial Sequence: Synthetic oligonucleotide
uagccauaugaauaguacc

SEQ ID NO: 984454 - RNA, 19 nt, Artificial Sequence
  Description of Artificial Sequence: Synthetic oligonucleotide
auagucucgaagcugugug

SEQ ID NO: 984455 - RNA, 19 nt, Artificial Sequence
  Description of Artificial Sequence: Synthetic oligonucleotide
uugaggaacggucugucac

SEQ ID NO: 984456 - RNA, 19 nt, Artificial Sequence
  Description of Artificial Sequence: Synthetic oligonucleotide
gaagucucugaccacgggc

SEQ ID NO: 984457 - RNA, 19 nt, Artificial Sequence
  Description of Artificial Sequence: Synthetic oligonucleotide
auuagcuuguccgugaaga

SEQ ID NO: 984458 - RNA, 19 nt, Artificial Sequence
  Description of Artificial Sequence: Synthetic oligonucleotide
gcugcaauagucucgaagc

SEQ ID NO: 984459 - RNA, 19 nt, Artificial Sequence
  Description of Artificial Sequence: Synthetic oligonucleotide
aaauguuccagagguuguc

SEQ ID NO: 984460 - RNA, 19 nt, Artificial Sequence
  Description of Artificial Sequence: Synthetic oligonucleotide
uucuucgggaguaaaagua

SEQ ID NO: 984461 - RNA, 19 nt, Artificial Sequence
  Description of Artificial Sequence: Synthetic oligonucleotide
ucuucgggaguaaaaguac

SEQ ID NO: 984462 - RNA, 19 nt, Artificial Sequence
  Description of Artificial Sequence: Synthetic oligonucleotide
gugaccucgauucuucggg

SEQ ID NO: 984463 - RNA, 19 nt, Artificial Sequence
  Description of Artificial Sequence: Synthetic oligonucleotide
guagaagaucuccacgcgg

SEQ ID NO: 984464 - RNA, 19 nt, Artificial Sequence
  Description of Artificial Sequence: Synthetic oligonucleotide
uaugaauaguacccauaca

SEQ ID NO: 984465 - RNA, 19 nt, Artificial Sequence
  Description of Artificial Sequence: Synthetic oligonucleotide
ggaacuauugguauccagg

SEQ ID NO: 984466 - RNA, 19 nt, Artificial Sequence
  Description of Artificial Sequence: Synthetic oligonucleotide
ucuguacuuggccaguacu

SEQ ID NO: 984467 - RNA, 19 nt, Artificial Sequence
  Description of Artificial Sequence: Synthetic oligonucleotide
ugcaauuggccagcgaggg

SEQ ID NO: 984468 - RNA, 19 nt, Artificial Sequence
  Description of Artificial Sequence: Synthetic oligonucleotide
uuuggaacagugccuggug

SEQ ID NO: 984469 - RNA, 19 nt, Artificial Sequence
  Description of Artificial Sequence: Synthetic oligonucleotide
uuguccgugaagagaaagc

SEQ ID NO: 984470 - RNA, 19 nt, Artificial Sequence
  Description of Artificial Sequence: Synthetic oligonucleotide
aaagccggggcuuguaggu

SEQ ID NO: 984471 - RNA, 19 nt, Artificial Sequence
  Description of Artificial Sequence: Synthetic oligonucleotide
acagaccacgcccgcaucc

SEQ ID NO: 984472 - RNA, 19 nt, Artificial Sequence
  Description of Artificial Sequence: Synthetic oligonucleotide
ugccuggugacccugguac

SEQ ID NO: 984473 - RNA, 19 nt, Artificial Sequence
  Description of Artificial Sequence: Synthetic oligonucleotide
uccauuaaccagacgcaug

SEQ ID NO: 984474 - RNA, 19 nt, Artificial Sequence
  Description of Artificial Sequence: Synthetic oligonucleotide
ugcguacucauagagcucc

SEQ ID NO: 984475 - RNA, 19 nt, Artificial Sequence
  Description of Artificial Sequence: Synthetic oligonucleotide
aaguaccugaggaagucuc

SEQ ID NO: 984476 - RNA, 19 nt, Artificial Sequence
  Description of Artificial Sequence: Synthetic oligonucleotide
ucucaguuucguuggaaca

SEQ ID NO: 984477 - RNA, 19 nt, Artificial Sequence
  Description of Artificial Sequence: Synthetic oligonucleotide
cauccagcaugacaggucc

SEQ ID NO: 984478 - RNA, 19 nt, Artificial Sequence
  Description of Artificial Sequence: Synthetic oligonucleotide
uuagcuuguccgugaagag

SEQ ID NO: 984479 - RNA, 19 nt, Artificial Sequence
  Description of Artificial Sequence: Synthetic oligonucleotide
aaagugggauccucgggga

SEQ ID NO: 984480 - RNA, 19 nt, Artificial Sequence
  Description of Artificial Sequence: Synthetic oligonucleotide
cugggaaaggcacagugug

SEQ ID NO: 984481 - RNA, 19 nt, Artificial Sequence
  Description of Artificial Sequence: Synthetic oligonucleotide
cugaaucauagccauauga

SEQ ID NO: 984482 - RNA, 19 nt, Artificial Sequence
  Description of Artificial Sequence: Synthetic oligonucleotide
acggaagccgcugaaggcc

SEQ ID NO: 984483 - RNA, 19 nt, Artificial Sequence
  Description of Artificial Sequence: Synthetic oligonucleotide
aucauaggcucggaguagc

SEQ ID NO: 984484 - RNA, 19 nt, Artificial Sequence
  Description of Artificial Sequence: Synthetic oligonucleotide
uagguggccgaccaggaga

SEQ ID NO: 984485 - RNA, 19 nt, Artificial Sequence
  Description of Artificial Sequence: Synthetic oligonucleotide
ugguacaaggacagguuga

SEQ ID NO: 984486 - RNA, 19 nt, Artificial Sequence
  Description of Artificial Sequence: Synthetic oligonucleotide
aucuucgguaccuugaguu

SEQ ID NO: 984487 - RNA, 19 nt, Artificial Sequence
  Description of Artificial Sequence: Synthetic oligonucleotide
gaccaucuaguccagguca

SEQ ID NO: 984488 - RNA, 19 nt, Artificial Sequence
  Description of Artificial Sequence: Synthetic oligonucleotide
aaucauaggcucggaguag

SEQ ID NO: 984489 - RNA, 19 nt, Artificial Sequence
  Description of Artificial Sequence: Synthetic oligonucleotide
uucgggaguaaaaguaccu

SEQ ID NO: 984490 - RNA, 19 nt, Artificial Sequence
  Description of Artificial Sequence: Synthetic oligonucleotide
guggugggaacacucagcc

SEQ ID NO: 984491 - RNA, 19 nt, Artificial Sequence
  Description of Artificial Sequence: Synthetic oligonucleotide
acgugggugucugaguucc

SEQ ID NO: 984492 - RNA, 19 nt, Artificial Sequence
  Description of Artificial Sequence: Synthetic oligonucleotide
auucuucgggaguaaaagu

SEQ ID NO: 984493 - RNA, 19 nt, Artificial Sequence
  Description of Artificial Sequence: Synthetic oligonucleotide
uagguguucuccgugaggu

SEQ ID NO: 984494 - RNA, 19 nt, Artificial Sequence
  Description of Artificial Sequence: Synthetic oligonucleotide
uccugcacauuccaccuca

SEQ ID NO: 984495 - RNA, 19 nt, Artificial Sequence
  Description of Artificial Sequence: Synthetic oligonucleotide
uuucguuggaacagaccac

SEQ ID NO: 984496 - RNA, 19 nt, Artificial Sequence
  Description of Artificial Sequence: Synthetic oligonucleotide
aguuucguuggaacagacc

SEQ ID NO: 984497 - RNA, 19 nt, Artificial Sequence
  Description of Artificial Sequence: Synthetic oligonucleotide
acaggagagccauugccug

SEQ ID NO: 984498 - RNA, 19 nt, Artificial Sequence
  Description of Artificial Sequence: Synthetic oligonucleotide
uccuuuggaacagugccug

SEQ ID NO: 984499 - RNA, 19 nt, Artificial Sequence
  Description of Artificial Sequence: Synthetic oligonucleotide
acuuacugaaucauagcca

SEQ ID NO: 984500 - RNA, 19 nt, Artificial Sequence
  Description of Artificial Sequence: Synthetic oligonucleotide
aggaugugcaugcucucag

SEQ ID NO: 984501 - RNA, 19 nt, Artificial Sequence
  Description of Artificial Sequence: Synthetic oligonucleotide
guacccauacacuugcgca

SEQ ID NO: 984502 - RNA, 19 nt, Artificial Sequence
  Description of Artificial Sequence: Synthetic oligonucleotide
guacuuggccaguacuggg

SEQ ID NO: 984503 - RNA, 19 nt, Artificial Sequence
  Description of Artificial Sequence: Synthetic oligonucleotide
cuauugguauccagggcac

SEQ ID NO: 984504 - RNA, 19 nt, Artificial Sequence
  Description of Artificial Sequence: Synthetic oligonucleotide
cucucaguuucguuggaac

SEQ ID NO: 984505 - RNA, 19 nt, Artificial Sequence
  Description of Artificial Sequence: Synthetic oligonucleotide
uugcccugucaccugaaug

SEQ ID NO: 984506 - RNA, 19 nt, Artificial Sequence
  Description of Artificial Sequence: Synthetic oligonucleotide
cugcaauuggccagcgagg

SEQ ID NO: 984507 - RNA, 19 nt, Artificial Sequence
  Description of Artificial Sequence: Synthetic oligonucleotide
uacccauacacuugcgcac

SEQ ID NO: 984508 - RNA, 19 nt, Artificial Sequence
  Description of Artificial Sequence: Synthetic oligonucleotide
agcaaccacaaagaaaaga

SEQ ID NO: 984509 - RNA, 19 nt, Artificial Sequence
  Description of Artificial Sequence: Synthetic oligonucleotide
gaauaguacccauacacuu

SEQ ID NO: 984510 - RNA, 19 nt, Artificial Sequence
  Description of Artificial Sequence: Synthetic oligonucleotide
agcacuuaacagaagacau

SEQ ID NO: 984511 - RNA, 19 nt, Artificial Sequence
  Description of Artificial Sequence: Synthetic oligonucleotide
acgacguuggcaucuaaaa

SEQ ID NO: 984512 - RNA, 19 nt, Artificial Sequence
  Description of Artificial Sequence: Synthetic oligonucleotide
gaacggucugucaccaagg

SEQ ID NO: 984513 - RNA, 19 nt, Artificial Sequence
  Description of Artificial Sequence: Synthetic oligonucleotide
aacagaccacgcccgcauc

SEQ ID NO: 984514 - RNA, 19 nt, Artificial Sequence
  Description of Artificial Sequence: Synthetic oligonucleotide
cuucgguaccuugaguucc

SEQ ID NO: 984515 - RNA, 19 nt, Artificial Sequence
  Description of Artificial Sequence: Synthetic oligonucleotide
gaaucauagccauaugaau

SEQ ID NO: 984516 - RNA, 19 nt, Artificial Sequence
  Description of Artificial Sequence: Synthetic oligonucleotide
aggagauuagcuuguccgu

SEQ ID NO: 984517 - RNA, 19 nt, Artificial Sequence
  Description of Artificial Sequence: Synthetic oligonucleotide
aucauggggaagcggaccu

SEQ ID NO: 984518 - RNA, 19 nt, Artificial Sequence
  Description of Artificial Sequence: Synthetic oligonucleotide
cugugcguacucauagagc

SEQ ID NO: 984519 - RNA, 19 nt, Artificial Sequence
  Description of Artificial Sequence: Synthetic oligonucleotide
gaagcggaccuguuccacc

SEQ ID NO: 984520 - RNA, 19 nt, Artificial Sequence
  Description of Artificial Sequence: Synthetic oligonucleotide
gagauuagcuuguccguga

SEQ ID NO: 984521 - RNA, 19 nt, Artificial Sequence
  Description of Artificial Sequence: Synthetic oligonucleotide
caugaugacgcugcugccc

SEQ ID NO: 984522 - RNA, 19 nt, Artificial Sequence
  Description of Artificial Sequence: Synthetic oligonucleotide
ccgacuuacugaaucauag

SEQ ID NO: 984523 - RNA, 19 nt, Artificial Sequence
  Description of Artificial Sequence: Synthetic oligonucleotide
ucgggaguaaaaguaccug

SEQ ID NO: 984524 - RNA, 19 nt, Artificial Sequence
  Description of Artificial Sequence: Synthetic oligonucleotide
cuuguccgugaagagaaag

SEQ ID NO: 984525 - RNA, 19 nt, Artificial Sequence
  Description of Artificial Sequence: Synthetic oligonucleotide
acccauacacuugcgcacc

SEQ ID NO: 984526 - RNA, 19 nt, Artificial Sequence
  Description of Artificial Sequence: Synthetic oligonucleotide
ugggaggcgccacucuccg

SEQ ID NO: 984527 - RNA, 19 nt, Artificial Sequence
  Description of Artificial Sequence: Synthetic oligonucleotide
uccaggggcguguggaaag

SEQ ID NO: 984528 - RNA, 19 nt, Artificial Sequence
  Description of Artificial Sequence: Synthetic oligonucleotide
gcaagcacuuaacagaaga

SEQ ID NO: 984529 - RNA, 19 nt, Artificial Sequence
  Description of Artificial Sequence: Synthetic oligonucleotide
acugggagcucgucagagg

SEQ ID NO: 984530 - RNA, 19 nt, Artificial Sequence
  Description of Artificial Sequence: Synthetic oligonucleotide
uucgguaccuugaguuccc

SEQ ID NO: 984531 - RNA, 19 nt, Artificial Sequence
  Description of Artificial Sequence: Synthetic oligonucleotide
guaaagccggggcuuguag

SEQ ID NO: 984532 - RNA, 19 nt, Artificial Sequence
  Description of Artificial Sequence: Synthetic oligonucleotide
gcaucuaaaauguuccaga

SEQ ID NO: 984533 - RNA, 19 nt, Artificial Sequence
  Description of Artificial Sequence: Synthetic oligonucleotide
ggaacggucugucaccaag

SEQ ID NO: 984534 - RNA, 19 nt, Artificial Sequence
  Description of Artificial Sequence: Synthetic oligonucleotide
ucuccggagagguccagga

SEQ ID NO: 984535 - RNA, 19 nt, Artificial Sequence
  Description of Artificial Sequence: Synthetic oligonucleotide
acagccggcugcaauaguc

SEQ ID NO: 984536 - RNA, 19 nt, Artificial Sequence
  Description of Artificial Sequence: Synthetic oligonucleotide
cuuacugaaucauagccau

SEQ ID NO: 984537 - RNA, 19 nt, Artificial Sequence
  Description of Artificial Sequence: Synthetic oligonucleotide
uaguacccauacacuugcg

SEQ ID NO: 984538 - RNA, 19 nt, Artificial Sequence
  Description of Artificial Sequence: Synthetic oligonucleotide
guggaaagugggauccucg

SEQ ID NO: 984539 - RNA, 19 nt, Artificial Sequence
  Description of Artificial Sequence: Synthetic oligonucleotide
gagccggcaaaguugguga

SEQ ID NO: 984540 - RNA, 19 nt, Artificial Sequence
  Description of Artificial Sequence: Synthetic oligonucleotide
ggagguguaaagccggggc

SEQ ID NO: 984541 - RNA, 19 nt, Artificial Sequence
  Description of Artificial Sequence: Synthetic oligonucleotide
cacauuccaccucauccag

SEQ ID NO: 984542 - RNA, 19 nt, Artificial Sequence
  Description of Artificial Sequence: Synthetic oligonucleotide
cauacacuugcgcacccug

SEQ ID NO: 984543 - RNA, 19 nt, Artificial Sequence
  Description of Artificial Sequence: Synthetic oligonucleotide
ugagagggaccaucuaguc

SEQ ID NO: 984544 - RNA, 19 nt, Artificial Sequence
  Description of Artificial Sequence: Synthetic oligonucleotide
guggcgaacagccggcugc

SEQ ID NO: 984545 - RNA, 19 nt, Artificial Sequence
  Description of Artificial Sequence: Synthetic oligonucleotide
cugaggcuccauuaaccag

SEQ ID NO: 984546 - RNA, 19 nt, Artificial Sequence
  Description of Artificial Sequence: Synthetic oligonucleotide
ggcugcaauagucucgaag

SEQ ID NO: 984547 - RNA, 19 nt, Artificial Sequence
  Description of Artificial Sequence: Synthetic oligonucleotide
acgcauguccccaucuucg

SEQ ID NO: 984548 - RNA, 19 nt, Artificial Sequence
  Description of Artificial Sequence: Synthetic oligonucleotide
ggaaagugggauccucggg

SEQ ID NO: 984549 - RNA, 19 nt, Artificial Sequence
  Description of Artificial Sequence: Synthetic oligonucleotide
gaccucgauucuucgggag

SEQ ID NO: 984550 - RNA, 19 nt, Artificial Sequence
  Description of Artificial Sequence: Synthetic oligonucleotide
agcaagguggugggaacac

SEQ ID NO: 984551 - RNA, 19 nt, Artificial Sequence
  Description of Artificial Sequence: Synthetic oligonucleotide
cacggaagccgcugaaggc

SEQ ID NO: 984552 - RNA, 19 nt, Artificial Sequence
  Description of Artificial Sequence: Synthetic oligonucleotide
ucggaguagcuggacuugg

SEQ ID NO: 984553 - RNA, 19 nt, Artificial Sequence
  Description of Artificial Sequence: Synthetic oligonucleotide
gggaguaccgacuuacuga

SEQ ID NO: 984554 - RNA, 19 nt, Artificial Sequence
  Description of Artificial Sequence: Synthetic oligonucleotide
auccaccacacugugaccu

SEQ ID NO: 984555 - RNA, 19 nt, Artificial Sequence
  Description of Artificial Sequence: Synthetic oligonucleotide
cauaugaauaguacccaua

SEQ ID NO: 984556 - RNA, 19 nt, Artificial Sequence
  Description of Artificial Sequence: Synthetic oligonucleotide
ggcaucuaaaauguuccag

SEQ ID NO: 984557 - RNA, 19 nt, Artificial Sequence
  Description of Artificial Sequence: Synthetic oligonucleotide
caaucauaggcucggagua

SEQ ID NO: 984558 - RNA, 19 nt, Artificial Sequence
  Description of Artificial Sequence: Synthetic oligonucleotide
uggccgaccaggagauuag

SEQ ID NO: 984559 - RNA, 19 nt, Artificial Sequence
  Description of Artificial Sequence: Synthetic oligonucleotide
cuccgcgcuccacugaucc

SEQ ID NO: 984560 - RNA, 19 nt, Artificial Sequence
  Description of Artificial Sequence: Synthetic oligonucleotide
agagggucagaucccugug

SEQ ID NO: 984561 - RNA, 19 nt, Artificial Sequence
  Description of Artificial Sequence: Synthetic oligonucleotide
ucguuggaacagaccacgc

SEQ ID NO: 984562 - RNA, 19 nt, Artificial Sequence
  Description of Artificial Sequence: Synthetic oligonucleotide
gacgcauguccccaucuuc

SEQ ID NO: 984563 - RNA, 19 nt, Artificial Sequence
  Description of Artificial Sequence: Synthetic oligonucleotide
cauagccauaugaauagua

SEQ ID NO: 984564 - RNA, 19 nt, Artificial Sequence
  Description of Artificial Sequence: Synthetic oligonucleotide
ucugcgugccacagggccu

SEQ ID NO: 984565 - RNA, 19 nt, Artificial Sequence
  Description of Artificial Sequence: Synthetic oligonucleotide
uggaacagaccacgcccgc

SEQ ID NO: 984566 - RNA, 19 nt, Artificial Sequence
  Description of Artificial Sequence: Synthetic oligonucleotide
agcuuguccgugaagagaa

SEQ ID NO: 984567 - RNA, 19 nt, Artificial Sequence
  Description of Artificial Sequence: Synthetic oligonucleotide
gaacagccggcugcaauag

SEQ ID NO: 984568 - RNA, 19 nt, Artificial Sequence
  Description of Artificial Sequence: Synthetic oligonucleotide
guucccggaaccagcaacc

SEQ ID NO: 984569 - RNA, 19 nt, Artificial Sequence
  Description of Artificial Sequence: Synthetic oligonucleotide
gaagaaaucuuggaacuau

SEQ ID NO: 984570 - RNA, 19 nt, Artificial Sequence
  Description of Artificial Sequence: Synthetic oligonucleotide
gaagacauggugaccucga

SEQ ID NO: 984571 - RNA, 19 nt, Artificial Sequence
  Description of Artificial Sequence: Synthetic oligonucleotide
gguugaggagguguaaagc

SEQ ID NO: 984572 - RNA, 19 nt, Artificial Sequence
  Description of Artificial Sequence: Synthetic oligonucleotide
gggcaugcaguccacgucc

SEQ ID NO: 984573 - RNA, 19 nt, Artificial Sequence
  Description of Artificial Sequence: Synthetic oligonucleotide
aacgacguuggcaucuaaa

SEQ ID NO: 984574 - RNA, 19 nt, Artificial Sequence
  Description of Artificial Sequence: Synthetic oligonucleotide
agccggcugcaauagucuc

SEQ ID NO: 984575 - RNA, 19 nt, Artificial Sequence
  Description of Artificial Sequence: Synthetic oligonucleotide
ugaggaagucucugaccac

SEQ ID NO: 984576 - RNA, 19 nt, Artificial Sequence
  Description of Artificial Sequence: Synthetic oligonucleotide
agccggcaaaguuggugac

SEQ ID NO: 984577 - RNA, 19 nt, Artificial Sequence
  Description of Artificial Sequence: Synthetic oligonucleotide
aaccagacgcaugucccca

SEQ ID NO: 984578 - RNA, 19 nt, Artificial Sequence
  Description of Artificial Sequence: Synthetic oligonucleotide
accucgauucuucgggagu

SEQ ID NO: 984579 - RNA, 19 nt, Artificial Sequence
  Description of Artificial Sequence: Synthetic oligonucleotide
uggggaagcggaccuguuc

SEQ ID NO: 984580 - RNA, 19 nt, Artificial Sequence
  Description of Artificial Sequence: Synthetic oligonucleotide
uggaguuagucagguagaa

SEQ ID NO: 984581 - RNA, 19 nt, Artificial Sequence
  Description of Artificial Sequence: Synthetic oligonucleotide
agauuagcuuguccgugaa

SEQ ID NO: 984582 - RNA, 19 nt, Artificial Sequence
  Description of Artificial Sequence: Synthetic oligonucleotide
aaggggcggaugaccacac

SEQ ID NO: 984583 - RNA, 19 nt, Artificial Sequence
  Description of Artificial Sequence: Synthetic oligonucleotide
ccugugcguacucauagag

SEQ ID NO: 984584 - RNA, 19 nt, Artificial Sequence
  Description of Artificial Sequence: Synthetic oligonucleotide
caguuucguuggaacagac

SEQ ID NO: 984585 - RNA, 19 nt, Artificial Sequence
  Description of Artificial Sequence: Synthetic oligonucleotide
cacuugcgcacccugugac

SEQ ID NO: 984586 - RNA, 19 nt, Artificial Sequence
  Description of Artificial Sequence: Synthetic oligonucleotide
gaggagguguaaagccggg

SEQ ID NO: 984587 - RNA, 19 nt, Artificial Sequence
  Description of Artificial Sequence: Synthetic oligonucleotide
ccaguacugggaaaggcac

SEQ ID NO: 984588 - RNA, 19 nt, Artificial Sequence
  Description of Artificial Sequence: Synthetic oligonucleotide
ugggagcucgucagaggug

SEQ ID NO: 984589 - RNA, 19 nt, Artificial Sequence
  Description of Artificial Sequence: Synthetic oligonucleotide
ggaguaccgacuuacugaa

SEQ ID NO: 984590 - RNA, 19 nt, Artificial Sequence
  Description of Artificial Sequence: Synthetic oligonucleotide
cagguugaacugcagcuca

SEQ ID NO: 984591 - RNA, 19 nt, Artificial Sequence
  Description of Artificial Sequence: Synthetic oligonucleotide
guaccugaggaagucucug

SEQ ID NO: 984592 - RNA, 19 nt, Artificial Sequence
  Description of Artificial Sequence: Synthetic oligonucleotide
aguccaacccuggaagcca

SEQ ID NO: 984593 - RNA, 19 nt, Artificial Sequence
  Description of Artificial Sequence: Synthetic oligonucleotide
uaggcucggaguagcugga

SEQ ID NO: 984594 - RNA, 19 nt, Artificial Sequence
  Description of Artificial Sequence: Synthetic oligonucleotide
gaaggggcggaugaccaca

SEQ ID NO: 984595 - RNA, 19 nt, Artificial Sequence
  Description of Artificial Sequence: Synthetic oligonucleotide
caggccucaaccuguguca

SEQ ID NO: 984596 - RNA, 19 nt, Artificial Sequence
  Description of Artificial Sequence: Synthetic oligonucleotide
ggggaguaccgacuuacug

SEQ ID NO: 984597 - RNA, 19 nt, Artificial Sequence
  Description of Artificial Sequence: Synthetic oligonucleotide
ggagauuagcuuguccgug

SEQ ID NO: 984598 - RNA, 19 nt, Artificial Sequence
  Description of Artificial Sequence: Synthetic oligonucleotide
caugggaggcgccacucuc

SEQ ID NO: 984599 - RNA, 19 nt, Artificial Sequence
  Description of Artificial Sequence: Synthetic oligonucleotide
ggaagucucugaccacggg

SEQ ID NO: 984600 - RNA, 19 nt, Artificial Sequence
  Description of Artificial Sequence: Synthetic oligonucleotide
gagccuuagagccggcaaa

SEQ ID NO: 984601 - RNA, 19 nt, Artificial Sequence
  Description of Artificial Sequence: Synthetic oligonucleotide
gagggcuccguuccugcac

SEQ ID NO: 984602 - RNA, 19 nt, Artificial Sequence
  Description of Artificial Sequence: Synthetic oligonucleotide
ucccggaaccagcaaccac

SEQ ID NO: 984603 - RNA, 19 nt, Artificial Sequence
  Description of Artificial Sequence: Synthetic oligonucleotide
gagguguaaagccggggcu

SEQ ID NO: 984604 - RNA, 19 nt, Artificial Sequence
  Description of Artificial Sequence: Synthetic oligonucleotide
ugugaccuugaggaacggu

SEQ ID NO: 984605 - RNA, 19 nt, Artificial Sequence
  Description of Artificial Sequence: Synthetic oligonucleotide
gugucagaggcucaaaguu

SEQ ID NO: 984606 - RNA, 19 nt, Artificial Sequence
  Description of Artificial Sequence: Synthetic oligonucleotide
cauaggcucggaguagcug

SEQ ID NO: 984607 - RNA, 19 nt, Artificial Sequence
  Description of Artificial Sequence: Synthetic oligonucleotide
ccugaggaagucucugacc

SEQ ID NO: 984608 - RNA, 19 nt, Artificial Sequence
  Description of Artificial Sequence: Synthetic oligonucleotide
guccgugaagagaaagcug

SEQ ID NO: 984609 - RNA, 19 nt, Artificial Sequence
  Description of Artificial Sequence: Synthetic oligonucleotide
gaacacucagccaggccuc

SEQ ID NO: 984610 - RNA, 19 nt, Artificial Sequence
  Description of Artificial Sequence: Synthetic oligonucleotide
cucuguacuuggccaguac

SEQ ID NO: 984611 - RNA, 19 nt, Artificial Sequence
  Description of Artificial Sequence: Synthetic oligonucleotide
aaacgacguuggcaucuaa

SEQ ID NO: 984612 - RNA, 19 nt, Artificial Sequence
  Description of Artificial Sequence: Synthetic oligonucleotide
uuccagagguugucacaca

SEQ ID NO: 984613 - RNA, 19 nt, Artificial Sequence
  Description of Artificial Sequence: Synthetic oligonucleotide
ggugucugaguucccacca

SEQ ID NO: 984614 - RNA, 19 nt, Artificial Sequence
  Description of Artificial Sequence: Synthetic oligonucleotide
cagaaguccaacccuggaa

SEQ ID NO: 984615 - RNA, 19 nt, Artificial Sequence
  Description of Artificial Sequence: Synthetic oligonucleotide
acagagucccugguggccu

SEQ ID NO: 984616 - RNA, 19 nt, Artificial Sequence
  Description of Artificial Sequence: Synthetic oligonucleotide
gcugaggcuccauuaacca

SEQ ID NO: 984617 - RNA, 19 nt, Artificial Sequence
  Description of Artificial Sequence: Synthetic oligonucleotide
uccgugagguucaggccuc

SEQ ID NO: 984618 - RNA, 19 nt, Artificial Sequence
  Description of Artificial Sequence: Synthetic oligonucleotide
accacacggaagccgcuga

SEQ ID NO: 984619 - RNA, 19 nt, Artificial Sequence
  Description of Artificial Sequence: Synthetic oligonucleotide
ggcugaggcuccauuaacc

SEQ ID NO: 984620 - RNA, 19 nt, Artificial Sequence
  Description of Artificial Sequence: Synthetic oligonucleotide
gagcucgucagaggugcag

SEQ ID NO: 984621 - RNA, 19 nt, Artificial Sequence
  Description of Artificial Sequence: Synthetic oligonucleotide
ggaguuagucagguagaag

SEQ ID NO: 984622 - RNA, 19 nt, Artificial Sequence
  Description of Artificial Sequence: Synthetic oligonucleotide
caugacaggucccuguccu

SEQ ID NO: 984623 - RNA, 19 nt, Artificial Sequence
  Description of Artificial Sequence: Synthetic oligonucleotide
gaggcuccauuaaccagac

SEQ ID NO: 984624 - RNA, 19 nt, Artificial Sequence
  Description of Artificial Sequence: Synthetic oligonucleotide
cuggacgguggggagguag

SEQ ID NO: 984625 - RNA, 19 nt, Artificial Sequence
  Description of Artificial Sequence: Synthetic oligonucleotide
ggugcagggaaagagggaa

SEQ ID NO: 984626 - RNA, 19 nt, Artificial Sequence
  Description of Artificial Sequence: Synthetic oligonucleotide
cacucucaugaugacgcug

SEQ ID NO: 984627 - RNA, 19 nt, Artificial Sequence
  Description of Artificial Sequence: Synthetic oligonucleotide
ucagaucccugugcccuug

SEQ ID NO: 984628 - RNA, 19 nt, Artificial Sequence
  Description of Artificial Sequence: Synthetic oligonucleotide
cugagagggaccaucuagu

SEQ ID NO: 984629 - RNA, 19 nt, Artificial Sequence
  Description of Artificial Sequence: Synthetic oligonucleotide
guaccuugaguucccggaa

SEQ ID NO: 984630 - RNA, 19 nt, Artificial Sequence
  Description of Artificial Sequence: Synthetic oligonucleotide
gaggaacggucugucacca

SEQ ID NO: 984631 - RNA, 19 nt, Artificial Sequence
  Description of Artificial Sequence: Synthetic oligonucleotide
ucgauucuucgggaguaaa

SEQ ID NO: 984632 - RNA, 19 nt, Artificial Sequence
  Description of Artificial Sequence: Synthetic oligonucleotide
uccacugauccacggccuu

SEQ ID NO: 984633 - RNA, 19 nt, Artificial Sequence
  Description of Artificial Sequence: Synthetic oligonucleotide
caauuggccagcgagggcu

SEQ ID NO: 984634 - RNA, 19 nt, Artificial Sequence
  Description of Artificial Sequence: Synthetic oligonucleotide
uguaaagccggggcuugua

SEQ ID NO: 984635 - RNA, 19 nt, Artificial Sequence
  Description of Artificial Sequence: Synthetic oligonucleotide
gcaaguccagcucacuaga

SEQ ID NO: 984636 - RNA, 19 nt, Artificial Sequence
  Description of Artificial Sequence: Synthetic oligonucleotide
accaggagauuagcuuguc

SEQ ID NO: 984637 - RNA, 19 nt, Artificial Sequence
  Description of Artificial Sequence: Synthetic oligonucleotide
ucgguaccuugaguucccg

SEQ ID NO: 984638 - RNA, 19 nt, Artificial Sequence
  Description of Artificial Sequence: Synthetic oligonucleotide
gugcaugcucucaguuucg

SEQ ID NO: 984639 - RNA, 19 nt, Artificial Sequence
  Description of Artificial Sequence: Synthetic oligonucleotide
cacucuccgcgcuccacug

SEQ ID NO: 984640 - RNA, 19 nt, Artificial Sequence
  Description of Artificial Sequence: Synthetic oligonucleotide
ugcgcacccugugaccuug

SEQ ID NO: 984641 - RNA, 19 nt, Artificial Sequence
  Description of Artificial Sequence: Synthetic oligonucleotide
cucggaguagcuggacuug

SEQ ID NO: 984642 - RNA, 19 nt, Artificial Sequence
  Description of Artificial Sequence: Synthetic oligonucleotide
ugaccacacggaagccgcu

SEQ ID NO: 984643 - RNA, 19 nt, Artificial Sequence
  Description of Artificial Sequence: Synthetic oligonucleotide
ugggcacagagggucagau

SEQ ID NO: 984644 - RNA, 19 nt, Artificial Sequence
  Description of Artificial Sequence: Synthetic oligonucleotide
gugucugaguucccaccac

SEQ ID NO: 984645 - RNA, 19 nt, Artificial Sequence
  Description of Artificial Sequence: Synthetic oligonucleotide
agcccagggagcugcaauu

SEQ ID NO: 984646 - RNA, 19 nt, Artificial Sequence
  Description of Artificial Sequence: Synthetic oligonucleotide
ccaucuucgguaccuugag

SEQ ID NO: 984647 - RNA, 19 nt, Artificial Sequence
  Description of Artificial Sequence: Synthetic oligonucleotide
agugccuggugacccuggu

SEQ ID NO: 984648 - RNA, 19 nt, Artificial Sequence
  Description of Artificial Sequence: Synthetic oligonucleotide
auacacuugcgcacccugu

SEQ ID NO: 984649 - RNA, 19 nt, Artificial Sequence
  Description of Artificial Sequence: Synthetic oligonucleotide
gggcuuguagguguucucc

SEQ ID NO: 984650 - RNA, 19 nt, Artificial Sequence
  Description of Artificial Sequence: Synthetic oligonucleotide
ggagcugcaauuggccagc

SEQ ID NO: 984651 - RNA, 19 nt, Artificial Sequence
  Description of Artificial Sequence: Synthetic oligonucleotide
gaacagaccacgcccgcau

SEQ ID NO: 984652 - RNA, 19 nt, Artificial Sequence
  Description of Artificial Sequence: Synthetic oligonucleotide
uucccggaaccagcaacca

SEQ ID NO: 984653 - RNA, 19 nt, Artificial Sequence
  Description of Artificial Sequence: Synthetic oligonucleotide
ucgaagcuguguggccccg

SEQ ID NO: 984654 - RNA, 19 nt, Artificial Sequence
  Description of Artificial Sequence: Synthetic oligonucleotide
ggccucuguacuuggccag

SEQ ID NO: 984655 - RNA, 19 nt, Artificial Sequence
  Description of Artificial Sequence: Synthetic oligonucleotide
agacgcauguccccaucuu

SEQ ID NO: 984656 - RNA, 19 nt, Artificial Sequence
  Description of Artificial Sequence: Synthetic oligonucleotide
cccggaaccagcaaccaca

SEQ ID NO: 984657 - RNA, 19 nt, Artificial Sequence
  Description of Artificial Sequence: Synthetic oligonucleotide
agguguaaagccggggcuu

SEQ ID NO: 984658 - RNA, 19 nt, Artificial Sequence
  Description of Artificial Sequence: Synthetic oligonucleotide
gagccauugccuggcccag

SEQ ID NO: 984659 - RNA, 19 nt, Artificial Sequence
  Description of Artificial Sequence: Synthetic oligonucleotide
cgacuuacugaaucauagc

SEQ ID NO: 984660 - RNA, 19 nt, Artificial Sequence
  Description of Artificial Sequence: Synthetic oligonucleotide
gcaauagucucgaagcugu

SEQ ID NO: 984661 - RNA, 19 nt, Artificial Sequence
  Description of Artificial Sequence: Synthetic oligonucleotide
cugcacauuccaccucauc

SEQ ID NO: 984662 - RNA, 19 nt, Artificial Sequence
  Description of Artificial Sequence: Synthetic oligonucleotide
gccauaugaauaguaccca

SEQ ID NO: 984663 - RNA, 19 nt, Artificial Sequence
  Description of Artificial Sequence: Synthetic oligonucleotide
aggcuccauuaaccagacg

SEQ ID NO: 984664 - RNA, 19 nt, Artificial Sequence
  Description of Artificial Sequence: Synthetic oligonucleotide
cugggagcucgucagaggu

SEQ ID NO: 984665 - RNA, 19 nt, Artificial Sequence
  Description of Artificial Sequence: Synthetic oligonucleotide
gcuugugcaagcacuuaac

SEQ ID NO: 984666 - RNA, 19 nt, Artificial Sequence
  Description of Artificial Sequence: Synthetic oligonucleotide
gguguaaagccggggcuug

SEQ ID NO: 984667 - RNA, 19 nt, Artificial Sequence
  Description of Artificial Sequence: Synthetic oligonucleotide
cguuggaacagaccacgcc

SEQ ID NO: 984668 - RNA, 19 nt, Artificial Sequence
  Description of Artificial Sequence: Synthetic oligonucleotide
acgcccgcauccuucucgu

SEQ ID NO: 984669 - RNA, 19 nt, Artificial Sequence
  Description of Artificial Sequence: Synthetic oligonucleotide
gcaugacaggucccugucc

SEQ ID NO: 984670 - RNA, 19 nt, Artificial Sequence
  Description of Artificial Sequence: Synthetic oligonucleotide
cccgcauccuucucgugcc

SEQ ID NO: 984671 - RNA, 19 nt, Artificial Sequence
  Description of Artificial Sequence: Synthetic oligonucleotide
agcucacuagacacagcca

SEQ ID NO: 984672 - RNA, 19 nt, Artificial Sequence
  Description of Artificial Sequence: Synthetic oligonucleotide
gcguucucguagcccaggg

SEQ ID NO: 984673 - RNA, 19 nt, Artificial Sequence
  Description of Artificial Sequence: Synthetic oligonucleotide
ccaaucauaggcucggagu

SEQ ID NO: 984674 - RNA, 19 nt, Artificial Sequence
  Description of Artificial Sequence: Synthetic oligonucleotide
uggcgaacagccggcugca

SEQ ID NO: 984675 - RNA, 19 nt, Artificial Sequence
  Description of Artificial Sequence: Synthetic oligonucleotide
agcugcaauuggccagcga

SEQ ID NO: 984676 - RNA, 19 nt, Artificial Sequence
  Description of Artificial Sequence: Synthetic oligonucleotide
ccaggccucaaccuguguc

SEQ ID NO: 984677 - RNA, 19 nt, Artificial Sequence
  Description of Artificial Sequence: Synthetic oligonucleotide
ccauuaaccagacgcaugu

SEQ ID NO: 984678 - RNA, 19 nt, Artificial Sequence
  Description of Artificial Sequence: Synthetic oligonucleotide
uggugacauccaccacacu

SEQ ID NO: 984679 - RNA, 19 nt, Artificial Sequence
  Description of Artificial Sequence: Synthetic oligonucleotide
uccgcgcuccacugaucca

SEQ ID NO: 984680 - RNA, 19 nt, Artificial Sequence
  Description of Artificial Sequence: Synthetic oligonucleotide
gcggaugaccacacggaag

SEQ ID NO: 984681 - RNA, 19 nt, Artificial Sequence
  Description of Artificial Sequence: Synthetic oligonucleotide
ggccaguacugggaaaggc

SEQ ID NO: 984682 - RNA, 19 nt, Artificial Sequence
  Description of Artificial Sequence: Synthetic oligonucleotide
accgacuuacugaaucaua

SEQ ID NO: 984683 - RNA, 19 nt, Artificial Sequence
  Description of Artificial Sequence: Synthetic oligonucleotide
gccggcugcaauagucucg

SEQ ID NO: 984684 - RNA, 19 nt, Artificial Sequence
  Description of Artificial Sequence: Synthetic oligonucleotide
ccuuuggaacagugccugg

SEQ ID NO: 984685 - RNA, 19 nt, Artificial Sequence
  Description of Artificial Sequence: Synthetic oligonucleotide
cuagcuugugcaagcacuu

SEQ ID NO: 984686 - RNA, 19 nt, Artificial Sequence
  Description of Artificial Sequence: Synthetic oligonucleotide
gauccacggccuucagcaa

SEQ ID NO: 984687 - RNA, 19 nt, Artificial Sequence
  Description of Artificial Sequence: Synthetic oligonucleotide
gcaauuggccagcgagggc

SEQ ID NO: 984688 - RNA, 19 nt, Artificial Sequence
  Description of Artificial Sequence: Synthetic oligonucleotide
cugcaauagucucgaagcu

SEQ ID NO: 984689 - RNA, 19 nt, Artificial Sequence
  Description of Artificial Sequence: Synthetic oligonucleotide
gggucagaucccugugccc

SEQ ID NO: 984690 - RNA, 19 nt, Artificial Sequence
  Description of Artificial Sequence: Synthetic oligonucleotide
cugcgugccacagggccug

SEQ ID NO: 984691 - RNA, 19 nt, Artificial Sequence
  Description of Artificial Sequence: Synthetic oligonucleotide
agcgagggcuccguuccug

SEQ ID NO: 984692 - RNA, 19 nt, Artificial Sequence
  Description of Artificial Sequence: Synthetic oligonucleotide
accagacgcauguccccau

SEQ ID NO: 984693 - RNA, 19 nt, Artificial Sequence
  Description of Artificial Sequence: Synthetic oligonucleotide
ucuccgcgcuccacugauc

SEQ ID NO: 984694 - RNA, 19 nt, Artificial Sequence
  Description of Artificial Sequence: Synthetic oligonucleotide
gaugacgcugcugcccucu

SEQ ID NO: 984695 - RNA, 19 nt, Artificial Sequence
  Description of Artificial Sequence: Synthetic oligonucleotide
acgcggcccucacuggcug

SEQ ID NO: 984696 - RNA, 19 nt, Artificial Sequence
  Description of Artificial Sequence: Synthetic oligonucleotide
cagguugaggagguguaaa

SEQ ID NO: 984697 - RNA, 19 nt, Artificial Sequence
  Description of Artificial Sequence: Synthetic oligonucleotide
gcccagcgcaucugggagg

SEQ ID NO: 984698 - RNA, 19 nt, Artificial Sequence
  Description of Artificial Sequence: Synthetic oligonucleotide
gguggcgaacagccggcug

SEQ ID NO: 984699 - RNA, 19 nt, Artificial Sequence
  Description of Artificial Sequence: Synthetic oligonucleotide
cuugcgcacccugugaccu

SEQ ID NO: 984700 - RNA, 19 nt, Artificial Sequence
  Description of Artificial Sequence: Synthetic oligonucleotide
cgggaguaaaaguaccuga

SEQ ID NO: 984701 - RNA, 19 nt, Artificial Sequence
  Description of Artificial Sequence: Synthetic oligonucleotide
gcguguggaaagugggauc

SEQ ID NO: 984702 - RNA, 19 nt, Artificial Sequence
  Description of Artificial Sequence: Synthetic oligonucleotide
cccaucuucgguaccuuga

SEQ ID NO: 984703 - RNA, 19 nt, Artificial Sequence
  Description of Artificial Sequence: Synthetic oligonucleotide
gcucuggacgguggggagg

SEQ ID NO: 984704 - RNA, 19 nt, Artificial Sequence
  Description of Artificial Sequence: Synthetic oligonucleotide
ggcggaugaccacacggaa

SEQ ID NO: 984705 - RNA, 19 nt, Artificial Sequence
  Description of Artificial Sequence: Synthetic oligonucleotide
ggaagcggaccuguuccac

SEQ ID NO: 984706 - RNA, 19 nt, Artificial Sequence
  Description of Artificial Sequence: Synthetic oligonucleotide
cgcauguccccaucuucgg

SEQ ID NO: 984707 - RNA, 19 nt, Artificial Sequence
  Description of Artificial Sequence: Synthetic oligonucleotide
gcaaacgacguuggcaucu

SEQ ID NO: 984708 - RNA, 19 nt, Artificial Sequence
  Description of Artificial Sequence: Synthetic oligonucleotide
gcucgucagaggugcagga

SEQ ID NO: 984709 - RNA, 19 nt, Artificial Sequence
  Description of Artificial Sequence: Synthetic oligonucleotide
cucguagcccagggcccgg

SEQ ID NO: 984710 - RNA, 19 nt, Artificial Sequence
  Description of Artificial Sequence: Synthetic oligonucleotide
agguugaacugcagcucaa

SEQ ID NO: 984711 - RNA, 19 nt, Artificial Sequence
  Description of Artificial Sequence: Synthetic oligonucleotide
gcgagggcuccguuccugc

SEQ ID NO: 984712 - RNA, 19 nt, Artificial Sequence
  Description of Artificial Sequence: Synthetic oligonucleotide
ggcaaacgacguuggcauc

SEQ ID NO: 984713 - RNA, 19 nt, Artificial Sequence
  Description of Artificial Sequence: Synthetic oligonucleotide
gcugggguguugugggguc

SEQ ID NO: 984714 - RNA, 19 nt, Artificial Sequence
  Description of Artificial Sequence: Synthetic oligonucleotide
cccauacacuugcgcaccc

SEQ ID NO: 984715 - RNA, 19 nt, Artificial Sequence
  Description of Artificial Sequence: Synthetic oligonucleotide
cugggccuccgaguuggug

SEQ ID NO: 984716 - RNA, 19 nt, Artificial Sequence
  Description of Artificial Sequence: Synthetic oligonucleotide
ggaacagaccacgcccgca

SEQ ID NO: 984717 - RNA, 19 nt, Artificial Sequence
  Description of Artificial Sequence: Synthetic oligonucleotide
caucuucgguaccuugagu

SEQ ID NO: 984718 - RNA, 19 nt, Artificial Sequence
  Description of Artificial Sequence: Synthetic oligonucleotide
ucgugcccgcagcggcucu

SEQ ID NO: 984719 - RNA, 19 nt, Artificial Sequence
  Description of Artificial Sequence: Synthetic oligonucleotide
ccugaaugaacaggucaca

SEQ ID NO: 984720 - RNA, 19 nt, Artificial Sequence
  Description of Artificial Sequence: Synthetic oligonucleotide
ugcgugccacagggccugg

SEQ ID NO: 984721 - RNA, 19 nt, Artificial Sequence
  Description of Artificial Sequence: Synthetic oligonucleotide
cagacgcauguccccaucu

SEQ ID NO: 984722 - RNA, 19 nt, Artificial Sequence
  Description of Artificial Sequence: Synthetic oligonucleotide
cauggggaagcggaccugu

SEQ ID NO: 984723 - RNA, 19 nt, Artificial Sequence
  Description of Artificial Sequence: Synthetic oligonucleotide
uugcgcacccugugaccuu

SEQ ID NO: 984724 - RNA, 19 nt, Artificial Sequence
  Description of Artificial Sequence: Synthetic oligonucleotide
ccggcaaacgacguuggca

SEQ ID NO: 984725 - RNA, 19 nt, Artificial Sequence
  Description of Artificial Sequence: Synthetic oligonucleotide
ccacgcggcccucacuggc

SEQ ID NO: 984726 - RNA, 19 nt, Artificial Sequence
  Description of Artificial Sequence: Synthetic oligonucleotide
cauccuucucgugcccgca

SEQ ID NO: 984727 - RNA, 19 nt, Artificial Sequence
  Description of Artificial Sequence: Synthetic oligonucleotide
gccauugccuggcccagaa

SEQ ID NO: 984728 - RNA, 19 nt, Artificial Sequence
  Description of Artificial Sequence: Synthetic oligonucleotide
ggcccgaaggcagcucugc

SEQ ID NO: 984729 - RNA, 19 nt, Artificial Sequence
  Description of Artificial Sequence: Synthetic oligonucleotide
ccugguggccugugcguac

SEQ ID NO: 984730 - RNA, 19 nt, Artificial Sequence
  Description of Artificial Sequence: Synthetic oligonucleotide
cucgauucuucgggaguaa

SEQ ID NO: 984731 - RNA, 19 nt, Artificial Sequence
  Description of Artificial Sequence: Synthetic oligonucleotide
cgguaccuugaguucccgg

SEQ ID NO: 984732 - RNA, 19 nt, Artificial Sequence
  Description of Artificial Sequence: Synthetic oligonucleotide
ccauaugaauaguacccau

SEQ ID NO: 984733 - RNA, 19 nt, Artificial Sequence
  Description of Artificial Sequence: Synthetic oligonucleotide
cucgugcccgcagcggcuc

SEQ ID NO: 984734 - RNA, 19 nt, Artificial Sequence
  Description of Artificial Sequence: Synthetic oligonucleotide
agggcccggcaaacgacgu

SEQ ID NO: 984735 - RNA, 19 nt, Artificial Sequence
  Description of Artificial Sequence: Synthetic oligonucleotide
cauggugaccucgauucuu

SEQ ID NO: 984736 - RNA, 19 nt, Artificial Sequence
  Description of Artificial Sequence: Synthetic oligonucleotide
cacugagagggaccaucua

SEQ ID NO: 984737 - RNA, 19 nt, Artificial Sequence
  Description of Artificial Sequence: Synthetic oligonucleotide
caaacgacguuggcaucua

SEQ ID NO: 984738 - RNA, 19 nt, Artificial Sequence
  Description of Artificial Sequence: Synthetic oligonucleotide
cacagagcaucagugcuuu

SEQ ID NO: 984739 - RNA, 19 nt, Artificial Sequence
  Description of Artificial Sequence: Synthetic oligonucleotide
gcaugcaguccacguccac

SEQ ID NO: 984740 - RNA, 19 nt, Artificial Sequence
  Description of Artificial Sequence: Synthetic oligonucleotide
ccccguaggcagaggcuag

SEQ ID NO: 984741 - RNA, 19 nt, Artificial Sequence
  Description of Artificial Sequence: Synthetic oligonucleotide
gcccggcaaacgacguugg

SEQ ID NO: 984742 - RNA, 19 nt, Artificial Sequence
  Description of Artificial Sequence: Synthetic oligonucleotide
gcucggaguagcuggacuu

SEQ ID NO: 984743 - RNA, 19 nt, Artificial Sequence
  Description of Artificial Sequence: Synthetic oligonucleotide
aggggacacgugggugucu

SEQ ID NO: 984744 - RNA, 19 nt, Artificial Sequence
  Description of Artificial Sequence: Synthetic oligonucleotide
agccauugccuggcccaga

SEQ ID NO: 984745 - RNA, 19 nt, Artificial Sequence
  Description of Artificial Sequence: Synthetic oligonucleotide
ggcguguggaaagugggau

SEQ ID NO: 984746 - RNA, 19 nt, Artificial Sequence
  Description of Artificial Sequence: Synthetic oligonucleotide
ggcucggaguagcuggacu

SEQ ID NO: 984747 - RNA, 19 nt, Artificial Sequence
  Description of Artificial Sequence: Synthetic oligonucleotide
cgaacagccggcugcaaua

SEQ ID NO: 984748 - RNA, 19 nt, Artificial Sequence
  Description of Artificial Sequence: Synthetic oligonucleotide
caguggaguuagucaggua

SEQ ID NO: 984749 - RNA, 19 nt, Artificial Sequence
  Description of Artificial Sequence: Synthetic oligonucleotide
ggccgaccaggagauuagc

SEQ ID NO: 984750 - RNA, 19 nt, Artificial Sequence
  Description of Artificial Sequence: Synthetic oligonucleotide
ccauugccuggcccagaag

SEQ ID NO: 984751 - RNA, 19 nt, Artificial Sequence
  Description of Artificial Sequence: Synthetic oligonucleotide
gccauaguuccagcagcuc

SEQ ID NO: 984752 - RNA, 19 nt, Artificial Sequence
  Description of Artificial Sequence: Synthetic oligonucleotide
cccggcaaacgacguuggc

SEQ ID NO: 984753 - RNA, 19 nt, Artificial Sequence
  Description of Artificial Sequence: Synthetic oligonucleotide
ccagacgcauguccccauc

SEQ ID NO: 984754 - RNA, 19 nt, Artificial Sequence
  Description of Artificial Sequence: Synthetic oligonucleotide
ccggcugcaauagucucga

SEQ ID NO: 984755 - RNA, 19 nt, Artificial Sequence
  Description of Artificial Sequence: Synthetic oligonucleotide
ccggagagguccaggaugu

SEQ ID NO: 984756 - RNA, 19 nt, Artificial Sequence
  Description of Artificial Sequence: Synthetic oligonucleotide
cuugcccugucaccugaau

SEQ ID NO: 984757 - RNA, 19 nt, Artificial Sequence
  Description of Artificial Sequence: Synthetic oligonucleotide
gccggcaaaguuggugaca

SEQ ID NO: 984758 - RNA, 19 nt, Artificial Sequence
  Description of Artificial Sequence: Synthetic oligonucleotide
ggcaugcaguccacgucca

SEQ ID NO: 984759 - RNA, 19 nt, Artificial Sequence
  Description of Artificial Sequence: Synthetic oligonucleotide
gcauguccccaucuucggu

SEQ ID NO: 984760 - RNA, 19 nt, Artificial Sequence
  Description of Artificial Sequence: Synthetic oligonucleotide
ggggagguagguggccgac

SEQ ID NO: 984761 - RNA, 19 nt, Artificial Sequence
  Description of Artificial Sequence: Synthetic oligonucleotide
cccguaggcagaggcuagc

SEQ ID NO: 984762 - RNA, 19 nt, Artificial Sequence
  Description of Artificial Sequence: Synthetic oligonucleotide
ccgaccaggagauuagcuu

SEQ ID NO: 984763 - RNA, 19 nt, Artificial Sequence
  Description of Artificial Sequence: Synthetic oligonucleotide
gccuccgaguugguguuca

SEQ ID NO: 984764 - RNA, 19 nt, Artificial Sequence
  Description of Artificial Sequence: Synthetic oligonucleotide
gcggcccucacuggcugag

SEQ ID NO: 984765 - RNA, 19 nt, Artificial Sequence
  Description of Artificial Sequence: Synthetic oligonucleotide
gggaggcgccacucuccgc

SEQ ID NO: 984766 - RNA, 19 nt, Artificial Sequence
  Description of Artificial Sequence: Synthetic oligonucleotide
gcggcucuucagccagccc

SEQ ID NO: 984767 - RNA, 19 nt, Artificial Sequence
  Description of Artificial Sequence: Synthetic oligonucleotide
cacgcggcccucacuggcu

SEQ ID NO: 984768 - RNA, 19 nt, Artificial Sequence
  Description of Artificial Sequence: Synthetic oligonucleotide
guacugggaaaggcacagu

SEQ ID NO: 984769 - RNA, 19 nt, Artificial Sequence
  Description of Artificial Sequence: Synthetic oligonucleotide
cgggcaugcaguccacguc

SEQ ID NO: 984770 - RNA, 19 nt, Artificial Sequence
  Description of Artificial Sequence: Synthetic oligonucleotide
cggcaaacgacguuggcau

SEQ ID NO: 984771 - RNA, 19 nt, Artificial Sequence
  Description of Artificial Sequence: Synthetic oligonucleotide
ccucgauucuucgggagua

SEQ ID NO: 984772 - RNA, 19 nt, Artificial Sequence
  Description of Artificial Sequence: Synthetic oligonucleotide
ggguguuguggggucugga

SEQ ID NO: 984773 - RNA, 19 nt, Artificial Sequence
  Description of Artificial Sequence: Synthetic oligonucleotide
ggucuccggagagguccag

SEQ ID NO: 984774 - RNA, 19 nt, Artificial Sequence
  Description of Artificial Sequence: Synthetic oligonucleotide
ccagaacugggagcucguc

SEQ ID NO: 984775 - RNA, 19 nt, Artificial Sequence
  Description of Artificial Sequence: Synthetic oligonucleotide
guguaaagccggggcuugu

SEQ ID NO: 984776 - RNA, 19 nt, Artificial Sequence
  Description of Artificial Sequence: Synthetic oligonucleotide
gcgaacagccggcugcaau

SEQ ID NO: 984777 - RNA, 19 nt, Artificial Sequence
  Description of Artificial Sequence: Synthetic oligonucleotide
ucuggacgguggggaggua

SEQ ID NO: 984778 - RNA, 19 nt, Artificial Sequence
  Description of Artificial Sequence: Synthetic oligonucleotide
cagaccacgcccgcauccu

SEQ ID NO: 984779 - RNA, 19 nt, Artificial Sequence
  Description of Artificial Sequence: Synthetic oligonucleotide
gaguaccgacuuacugaau

SEQ ID NO: 984780 - RNA, 19 nt, Artificial Sequence
  Description of Artificial Sequence: Synthetic oligonucleotide
gcgcaucugggaggucucc

SEQ ID NO: 984781 - RNA, 19 nt, Artificial Sequence
  Description of Artificial Sequence: Synthetic oligonucleotide
cuccggagagguccaggau

SEQ ID NO: 984782 - RNA, 19 nt, Artificial Sequence
  Description of Artificial Sequence: Synthetic oligonucleotide
ccgcauccuucucgugccc

SEQ ID NO: 984783 - RNA, 19 nt, Artificial Sequence
  Description of Artificial Sequence: Synthetic oligonucleotide
gccgaccaggagauuagcu

SEQ ID NO: 984784 - RNA, 19 nt, Artificial Sequence
  Description of Artificial Sequence: Synthetic oligonucleotide
ccacgggcaugcaguccac

SEQ ID NO: 984785 - RNA, 19 nt, Artificial Sequence
  Description of Artificial Sequence: Synthetic oligonucleotide
cugguggccugugcguacu

SEQ ID NO: 984786 - RNA, 19 nt, Artificial Sequence
  Description of Artificial Sequence: Synthetic oligonucleotide
gcgugccacagggccuggg

SEQ ID NO: 984787 - RNA, 19 nt, Artificial Sequence
  Description of Artificial Sequence: Synthetic oligonucleotide
ccggcaaaguuggugacau

SEQ ID NO: 984788 - RNA, 19 nt, Artificial Sequence
  Description of Artificial Sequence: Synthetic oligonucleotide
cgacguuggcaucuaaaau

SEQ ID NO: 984789 - RNA, 19 nt, Artificial Sequence
  Description of Artificial Sequence: Synthetic oligonucleotide
cucugaccacgggcaugca

SEQ ID NO: 984790 - RNA, 19 nt, Artificial Sequence
  Description of Artificial Sequence: Synthetic oligonucleotide
ccgaguugguguucaggau

SEQ ID NO: 984791 - RNA, 19 nt, Artificial Sequence
  Description of Artificial Sequence: Synthetic oligonucleotide
ccuugcccugucaccugaa

SEQ ID NO: 984792 - RNA, 19 nt, Artificial Sequence
  Description of Artificial Sequence: Synthetic oligonucleotide
cgugagguucaggccucug

SEQ ID NO: 984793 - RNA, 19 nt, Artificial Sequence
  Description of Artificial Sequence: Synthetic oligonucleotide
gccucuguacuuggccagu

SEQ ID NO: 984794 - RNA, 19 nt, Artificial Sequence
  Description of Artificial Sequence: Synthetic oligonucleotide
ccacucucaugaugacgcu

SEQ ID NO: 984795 - RNA, 19 nt, Artificial Sequence
  Description of Artificial Sequence: Synthetic oligonucleotide
ccuggcccgaaggcagcuc

SEQ ID NO: 984796 - RNA, 19 nt, Artificial Sequence
  Description of Artificial Sequence: Synthetic oligonucleotide
cccgaggugcagggaaaga

SEQ ID NO: 984797 - RNA, 19 nt, Artificial Sequence
  Description of Artificial Sequence: Synthetic oligonucleotide
cgagggcuccguuccugca

SEQ ID NO: 984798 - RNA, 19 nt, Artificial Sequence
  Description of Artificial Sequence: Synthetic oligonucleotide
ggccuccgaguugguguuc

SEQ ID NO: 984799 - RNA, 19 nt, Artificial Sequence
  Description of Artificial Sequence: Synthetic oligonucleotide
cagcgagggcuccguuccu

SEQ ID NO: 984800 - RNA, 19 nt, Artificial Sequence
  Description of Artificial Sequence: Synthetic oligonucleotide
ccacgcccgcauccuucuc

SEQ ID NO: 984801 - RNA, 19 nt, Artificial Sequence
  Description of Artificial Sequence: Synthetic oligonucleotide
ggcgaacagccggcugcaa

SEQ ID NO: 984802 - RNA, 19 nt, Artificial Sequence
  Description of Artificial Sequence: Synthetic oligonucleotide
cccugguggccugugcgua

SEQ ID NO: 984803 - RNA, 19 nt, Artificial Sequence
  Description of Artificial Sequence: Synthetic oligonucleotide
ccguaggcagaggcuagcu

SEQ ID NO: 984804 - RNA, 19 nt, Artificial Sequence
  Description of Artificial Sequence: Synthetic oligonucleotide
ccugcacauuccaccucau

SEQ ID NO: 984805 - RNA, 19 nt, Artificial Sequence
  Description of Artificial Sequence: Synthetic oligonucleotide
ggguggcgaacagccggcu

SEQ ID NO: 984806 - RNA, 19 nt, Artificial Sequence
  Description of Artificial Sequence: Synthetic oligonucleotide
cguaggcagaggcuagcuu

SEQ ID NO: 984807 - RNA, 19 nt, Artificial Sequence
  Description of Artificial Sequence: Synthetic oligonucleotide
gggcccggcaaacgacguu

SEQ ID NO: 984808 - RNA, 19 nt, Artificial Sequence
  Description of Artificial Sequence: Synthetic oligonucleotide
cguuggcaucuaaaauguu

SEQ ID NO: 984809 - RNA, 19 nt, Artificial Sequence
  Description of Artificial Sequence: Synthetic oligonucleotide
gcgcacccugugaccuuga

SEQ ID NO: 984810 - RNA, 19 nt, Artificial Sequence
  Description of Artificial Sequence: Synthetic oligonucleotide
ggcuccguuccugcacauu

SEQ ID NO: 984811 - RNA, 19 nt, Artificial Sequence
  Description of Artificial Sequence: Synthetic oligonucleotide
ggccagcgagggcuccguu

SEQ ID NO: 984812 - RNA, 19 nt, Artificial Sequence
  Description of Artificial Sequence: Synthetic oligonucleotide
gguggccgaccaggagauu

SEQ ID NO: 984813 - RNA, 19 nt, Artificial Sequence
  Description of Artificial Sequence: Synthetic oligonucleotide
cggcugcaauagucucgaa

SEQ ID NO: 984814 - RNA, 19 nt, Artificial Sequence
  Description of Artificial Sequence: Synthetic oligonucleotide
ccgugagguucaggccucu

SEQ ID NO: 984815 - RNA, 19 nt, Artificial Sequence
  Description of Artificial Sequence: Synthetic oligonucleotide
uucaauuaaggcaacaaug

SEQ ID NO: 984816 - RNA, 19 nt, Artificial Sequence
  Description of Artificial Sequence: Synthetic oligonucleotide
gacggcaugacgcugaagg

SEQ ID NO: 984817 - RNA, 19 nt, Artificial Sequence
  Description of Artificial Sequence: Synthetic oligonucleotide
ugguguaccgacaaugugg

SEQ ID NO: 984818 - RNA, 19 nt, Artificial Sequence
  Description of Artificial Sequence: Synthetic oligonucleotide
cauagcaucuuaaaggccc

SEQ ID NO: 984819 - RNA, 19 nt, Artificial Sequence
  Description of Artificial Sequence: Synthetic oligonucleotide
aaugcggugcuuuagauuu

SEQ ID NO: 984820 - RNA, 19 nt, Artificial Sequence
  Description of Artificial Sequence: Synthetic oligonucleotide
ugaauggauugucacaaag

SEQ ID NO: 984821 - RNA, 19 nt, Artificial Sequence
  Description of Artificial Sequence: Synthetic oligonucleotide
ucccugcuaacucugaugg

SEQ ID NO: 984822 - RNA, 19 nt, Artificial Sequence
  Description of Artificial Sequence: Synthetic oligonucleotide
gugucugagaccuugggcg

SEQ ID NO: 984823 - RNA, 19 nt, Artificial Sequence
  Description of Artificial Sequence: Synthetic oligonucleotide
uaagguuccaccacggugu

SEQ ID NO: 984824 - RNA, 19 nt, Artificial Sequence
  Description of Artificial Sequence: Synthetic oligonucleotide
aaacuugguaccgaucugg

SEQ ID NO: 984825 - RNA, 19 nt, Artificial Sequence
  Description of Artificial Sequence: Synthetic oligonucleotide
aaaggcccagaccucacac

SEQ ID NO: 984826 - RNA, 19 nt, Artificial Sequence
  Description of Artificial Sequence: Synthetic oligonucleotide
uguccgaagaugaaguugu

SEQ ID NO: 984827 - RNA, 19 nt, Artificial Sequence
  Description of Artificial Sequence: Synthetic oligonucleotide
ugcuuuagauuuuaucacc

SEQ ID NO: 984828 - RNA, 19 nt, Artificial Sequence
  Description of Artificial Sequence: Synthetic oligonucleotide
aggacuguuccagauaacc

SEQ ID NO: 984829 - RNA, 19 nt, Artificial Sequence
  Description of Artificial Sequence: Synthetic oligonucleotide
uugcgaaucacauccagca

SEQ ID NO: 984830 - RNA, 19 nt, Artificial Sequence
  Description of Artificial Sequence: Synthetic oligonucleotide
cuugguaccgaucugguuc

SEQ ID NO: 984831 - RNA, 19 nt, Artificial Sequence
  Description of Artificial Sequence: Synthetic oligonucleotide
uuaugaauggauugucaca

SEQ ID NO: 984832 - RNA, 19 nt, Artificial Sequence
  Description of Artificial Sequence: Synthetic oligonucleotide
auauuguauauucaauuaa

SEQ ID NO: 984833 - RNA, 19 nt, Artificial Sequence
  Description of Artificial Sequence: Synthetic oligonucleotide
ucagcguugagcuggccgg

SEQ ID NO: 984834 - RNA, 19 nt, Artificial Sequence
  Description of Artificial Sequence: Synthetic oligonucleotide
gagaagaugacucauugua

SEQ ID NO: 984835 - RNA, 19 nt, Artificial Sequence
  Description of Artificial Sequence: Synthetic oligonucleotide
cuguaugaaaucacccugg

SEQ ID NO: 984836 - RNA, 19 nt, Artificial Sequence
  Description of Artificial Sequence: Synthetic oligonucleotide
uguauuugguugagagggg

SEQ ID NO: 984837 - RNA, 19 nt, Artificial Sequence
  Description of Artificial Sequence: Synthetic oligonucleotide
uaaggcaacaaugcggugc

SEQ ID NO: 984838 - RNA, 19 nt, Artificial Sequence
  Description of Artificial Sequence: Synthetic oligonucleotide
uguaguagacgcugauccg

SEQ ID NO: 984839 - RNA, 19 nt, Artificial Sequence
  Description of Artificial Sequence: Synthetic oligonucleotide
aaucacccuggucugguag

SEQ ID NO: 984840 - RNA, 19 nt, Artificial Sequence
  Description of Artificial Sequence: Synthetic oligonucleotide
ucugguaggacuguuccag

SEQ ID NO: 984841 - RNA, 19 nt, Artificial Sequence
  Description of Artificial Sequence: Synthetic oligonucleotide
uuccauauuguauauucaa

SEQ ID NO: 984842 - RNA, 19 nt, Artificial Sequence
  Description of Artificial Sequence: Synthetic oligonucleotide
acuuuaacguuguugggga

SEQ ID NO: 984843 - RNA, 19 nt, Artificial Sequence
  Description of Artificial Sequence: Synthetic oligonucleotide
aaaacuugguaccgaucug

SEQ ID NO: 984844 - RNA, 19 nt, Artificial Sequence
  Description of Artificial Sequence: Synthetic oligonucleotide
uucagguuuagcauuuuau

SEQ ID NO: 984845 - RNA, 19 nt, Artificial Sequence
  Description of Artificial Sequence: Synthetic oligonucleotide
ugacucauuguaguagacg

SEQ ID NO: 984846 - RNA, 19 nt, Artificial Sequence
  Description of Artificial Sequence: Synthetic oligonucleotide
uugggcgacggcaugacgc

SEQ ID NO: 984847 - RNA, 19 nt, Artificial Sequence
  Description of Artificial Sequence: Synthetic oligonucleotide
uuguaagguuccaccacgg

SEQ ID NO: 984848 - RNA, 19 nt, Artificial Sequence
  Description of Artificial Sequence: Synthetic oligonucleotide
auuaaggcaacaaugcggu

SEQ ID NO: 984849 - RNA, 19 nt, Artificial Sequence
  Description of Artificial Sequence: Synthetic oligonucleotide
acacacggccacuuuaacg

SEQ ID NO: 984850 - RNA, 19 nt, Artificial Sequence
  Description of Artificial Sequence: Synthetic oligonucleotide
uauucaauuaaggcaacaa

SEQ ID NO: 984851 - RNA, 19 nt, Artificial Sequence
  Description of Artificial Sequence: Synthetic oligonucleotide
cacuuuaacguuguugggg

SEQ ID NO: 984852 - RNA, 19 nt, Artificial Sequence
  Description of Artificial Sequence: Synthetic oligonucleotide
gauaaccuggggaacagug

SEQ ID NO: 984853 - RNA, 19 nt, Artificial Sequence
  Description of Artificial Sequence: Synthetic oligonucleotide
uccauauuguauauucaau

SEQ ID NO: 984854 - RNA, 19 nt, Artificial Sequence
  Description of Artificial Sequence: Synthetic oligonucleotide
aaguugucaggccggaaga

SEQ ID NO: 984855 - RNA, 19 nt, Artificial Sequence
  Description of Artificial Sequence: Synthetic oligonucleotide
aaagacgguggcaacgguc

SEQ ID NO: 984856 - RNA, 19 nt, Artificial Sequence
  Description of Artificial Sequence: Synthetic oligonucleotide
ucacaaaguuccauauugu

SEQ ID NO: 984857 - RNA, 19 nt, Artificial Sequence
  Description of Artificial Sequence: Synthetic oligonucleotide
ucagguuuagcauuuuauu

SEQ ID NO: 984858 - RNA, 19 nt, Artificial Sequence
  Description of Artificial Sequence: Synthetic oligonucleotide
gaagagcugcccaaaaggc

SEQ ID NO: 984859 - RNA, 19 nt, Artificial Sequence
  Description of Artificial Sequence: Synthetic oligonucleotide
ucuaacuucccugcuaacu

SEQ ID NO: 984860 - RNA, 19 nt, Artificial Sequence
  Description of Artificial Sequence: Synthetic oligonucleotide
cuaggcacauacuucugag

SEQ ID NO: 984861 - RNA, 19 nt, Artificial Sequence
  Description of Artificial Sequence: Synthetic oligonucleotide
cuaacuucccugcuaacuc

SEQ ID NO: 984862 - RNA, 19 nt, Artificial Sequence
  Description of Artificial Sequence: Synthetic oligonucleotide
uguaccgacaauguggcau

SEQ ID NO: 984863 - RNA, 19 nt, Artificial Sequence
  Description of Artificial Sequence: Synthetic oligonucleotide
cauauuguauauucaauua

SEQ ID NO: 984864 - RNA, 19 nt, Artificial Sequence
  Description of Artificial Sequence: Synthetic oligonucleotide
cuugcgaaucacauccagc

SEQ ID NO: 984865 - RNA, 19 nt, Artificial Sequence
  Description of Artificial Sequence: Synthetic oligonucleotide
uugucaggccggaagagcu

SEQ ID NO: 984866 - RNA, 19 nt, Artificial Sequence
  Description of Artificial Sequence: Synthetic oligonucleotide
uauucuaacuucccugcua

SEQ ID NO: 984867 - RNA, 19 nt, Artificial Sequence
  Description of Artificial Sequence: Synthetic oligonucleotide
auugucacaaaguuccaua

SEQ ID NO: 984868 - RNA, 19 nt, Artificial Sequence
  Description of Artificial Sequence: Synthetic oligonucleotide
auucuaacuucccugcuaa

SEQ ID NO: 984869 - RNA, 19 nt, Artificial Sequence
  Description of Artificial Sequence: Synthetic oligonucleotide
cuaaagacgguggcaacgg

SEQ ID NO: 984870 - RNA, 19 nt, Artificial Sequence
  Description of Artificial Sequence: Synthetic oligonucleotide
cuaagagcaggugugcacc

SEQ ID NO: 984871 - RNA, 19 nt, Artificial Sequence
  Description of Artificial Sequence: Synthetic oligonucleotide
augaaaucacccuggucug

SEQ ID NO: 984872 - RNA, 19 nt, Artificial Sequence
  Description of Artificial Sequence: Synthetic oligonucleotide
agaagaugacucauuguag

SEQ ID NO: 984873 - RNA, 19 nt, Artificial Sequence
  Description of Artificial Sequence: Synthetic oligonucleotide
uugcggcgaaacauggccg

SEQ ID NO: 984874 - RNA, 19 nt, Artificial Sequence
  Description of Artificial Sequence: Synthetic oligonucleotide
ugagaagaugacucauugu

SEQ ID NO: 984875 - RNA, 19 nt, Artificial Sequence
  Description of Artificial Sequence: Synthetic oligonucleotide
uugguaccgaucugguucc

SEQ ID NO: 984876 - RNA, 19 nt, Artificial Sequence
  Description of Artificial Sequence: Synthetic oligonucleotide
uuauucuaacuucccugcu

SEQ ID NO: 984877 - RNA, 19 nt, Artificial Sequence
  Description of Artificial Sequence: Synthetic oligonucleotide
ugcaccauagcaucuuaaa

SEQ ID NO: 984878 - RNA, 19 nt, Artificial Sequence
  Description of Artificial Sequence: Synthetic oligonucleotide
guaggacuguuccagauaa

SEQ ID NO: 984879 - RNA, 19 nt, Artificial Sequence
  Description of Artificial Sequence: Synthetic oligonucleotide
caugaugcgguccggguac

SEQ ID NO: 984880 - RNA, 19 nt, Artificial Sequence
  Description of Artificial Sequence: Synthetic oligonucleotide
acuccuugcgaaucacauc

SEQ ID NO: 984881 - RNA, 19 nt, Artificial Sequence
  Description of Artificial Sequence: Synthetic oligonucleotide
guaguagacgcugauccgc

SEQ ID NO: 984882 - RNA, 19 nt, Artificial Sequence
  Description of Artificial Sequence: Synthetic oligonucleotide
uguucacacuccuugcgaa

SEQ ID NO: 984883 - RNA, 19 nt, Artificial Sequence
  Description of Artificial Sequence: Synthetic oligonucleotide
aucacccuggucugguagg

SEQ ID NO: 984884 - RNA, 19 nt, Artificial Sequence
  Description of Artificial Sequence: Synthetic oligonucleotide
auaaccuggggaacagugg

SEQ ID NO: 984885 - RNA, 19 nt, Artificial Sequence
  Description of Artificial Sequence: Synthetic oligonucleotide
ugaaaucacccuggucugg

SEQ ID NO: 984886 - RNA, 19 nt, Artificial Sequence
  Description of Artificial Sequence: Synthetic oligonucleotide
ggcacuuaacggaaggugg

SEQ ID NO: 984887 - RNA, 19 nt, Artificial Sequence
  Description of Artificial Sequence: Synthetic oligonucleotide
augaaacacaaaucuuuau

SEQ ID NO: 984888 - RNA, 19 nt, Artificial Sequence
  Description of Artificial Sequence: Synthetic oligonucleotide
uguaagguuccaccacggu

SEQ ID NO: 984889 - RNA, 19 nt, Artificial Sequence
  Description of Artificial Sequence: Synthetic oligonucleotide
uggccgggaaaacgcaggg

SEQ ID NO: 984890 - RNA, 19 nt, Artificial Sequence
  Description of Artificial Sequence: Synthetic oligonucleotide
guagacgcugauccgcucc

SEQ ID NO: 984891 - RNA, 19 nt, Artificial Sequence
  Description of Artificial Sequence: Synthetic oligonucleotide
uggcugggcacuuaacgga

SEQ ID NO: 984892 - RNA, 19 nt, Artificial Sequence
  Description of Artificial Sequence: Synthetic oligonucleotide
cuuaacggaagguggucuc

SEQ ID NO: 984893 - RNA, 19 nt, Artificial Sequence
  Description of Artificial Sequence: Synthetic oligonucleotide
cugggcacuuaacggaagg

SEQ ID NO: 984894 - RNA, 19 nt, Artificial Sequence
  Description of Artificial Sequence: Synthetic oligonucleotide
acugaguccaccagcucgg

SEQ ID NO: 984895 - RNA, 19 nt, Artificial Sequence
  Description of Artificial Sequence: Synthetic oligonucleotide
gacauggggccccuaaaga

SEQ ID NO: 984896 - RNA, 19 nt, Artificial Sequence
  Description of Artificial Sequence: Synthetic oligonucleotide
agcugguguaccgacaaug

SEQ ID NO: 984897 - RNA, 19 nt, Artificial Sequence
  Description of Artificial Sequence: Synthetic oligonucleotide
ggucugguaggacuguucc

SEQ ID NO: 984898 - RNA, 19 nt, Artificial Sequence
  Description of Artificial Sequence: Synthetic oligonucleotide
acggaagguggucucuguc

SEQ ID NO: 984899 - RNA, 19 nt, Artificial Sequence
  Description of Artificial Sequence: Synthetic oligonucleotide
cuggccgggaaaacgcagg

SEQ ID NO: 984900 - RNA, 19 nt, Artificial Sequence
  Description of Artificial Sequence: Synthetic oligonucleotide
aacggaagguggucucugu

SEQ ID NO: 984901 - RNA, 19 nt, Artificial Sequence
  Description of Artificial Sequence: Synthetic oligonucleotide
ggaaaacgcagggaugugg

SEQ ID NO: 984902 - RNA, 19 nt, Artificial Sequence
  Description of Artificial Sequence: Synthetic oligonucleotide
guaccgaucugguucccgc

SEQ ID NO: 984903 - RNA, 19 nt, Artificial Sequence
  Description of Artificial Sequence: Synthetic oligonucleotide
augccugauccugugccgc

SEQ ID NO: 984904 - RNA, 19 nt, Artificial Sequence
  Description of Artificial Sequence: Synthetic oligonucleotide
acuuaacggaagguggucu

SEQ ID NO: 984905 - RNA, 19 nt, Artificial Sequence
  Description of Artificial Sequence: Synthetic oligonucleotide
ccuguaugaaaucacccug

SEQ ID NO: 984906 - RNA, 19 nt, Artificial Sequence
  Description of Artificial Sequence: Synthetic oligonucleotide
uuaaggcaacaaugcggug

SEQ ID NO: 984907 - RNA, 19 nt, Artificial Sequence
  Description of Artificial Sequence: Synthetic oligonucleotide
acaaugcggugcuuuagau

SEQ ID NO: 984908 - RNA, 19 nt, Artificial Sequence
  Description of Artificial Sequence: Synthetic oligonucleotide
gagaccuugggcgacggca

SEQ ID NO: 984909 - RNA, 19 nt, Artificial Sequence
  Description of Artificial Sequence: Synthetic oligonucleotide
aguagacgcugauccgcuc

SEQ ID NO: 984910 - RNA, 19 nt, Artificial Sequence
  Description of Artificial Sequence: Synthetic oligonucleotide
ugcggcgaaacauggccga

SEQ ID NO: 984911 - RNA, 19 nt, Artificial Sequence
  Description of Artificial Sequence: Synthetic oligonucleotide
uggcgugggucgcaggcag

SEQ ID NO: 984912 - RNA, 19 nt, Artificial Sequence
  Description of Artificial Sequence: Synthetic oligonucleotide
augacucauuguaguagac

SEQ ID NO: 984913 - RNA, 19 nt, Artificial Sequence
  Description of Artificial Sequence: Synthetic oligonucleotide
gaauggauugucacaaagu

SEQ ID NO: 984914 - RNA, 19 nt, Artificial Sequence
  Description of Artificial Sequence: Synthetic oligonucleotide
uaaagacgguggcaacggu

SEQ ID NO: 984915 - RNA, 19 nt, Artificial Sequence
  Description of Artificial Sequence: Synthetic oligonucleotide
uuaacggaagguggucucu

SEQ ID NO: 984916 - RNA, 19 nt, Artificial Sequence
  Description of Artificial Sequence: Synthetic oligonucleotide
gguguaccgacaauguggc

SEQ ID NO: 984917 - RNA, 19 nt, Artificial Sequence
  Description of Artificial Sequence: Synthetic oligonucleotide
agggauguggugacaccgc

SEQ ID NO: 984918 - RNA, 19 nt, Artificial Sequence
  Description of Artificial Sequence: Synthetic oligonucleotide
uucugagaagaugacucau

SEQ ID NO: 984919 - RNA, 19 nt, Artificial Sequence
  Description of Artificial Sequence: Synthetic oligonucleotide
aacuucccugcuaacucug

SEQ ID NO: 984920 - RNA, 19 nt, Artificial Sequence
  Description of Artificial Sequence: Synthetic oligonucleotide
cugugaguggggcgaagcc

SEQ ID NO: 984921 - RNA, 19 nt, Artificial Sequence
  Description of Artificial Sequence: Synthetic oligonucleotide
auggggccccuaaagacgg

SEQ ID NO: 984922 - RNA, 19 nt, Artificial Sequence
  Description of Artificial Sequence: Synthetic oligonucleotide
gagucgcccacguagccuc

SEQ ID NO: 984923 - RNA, 19 nt, Artificial Sequence
  Description of Artificial Sequence: Synthetic oligonucleotide
ugguaggacuguuccagau

SEQ ID NO: 984924 - RNA, 19 nt, Artificial Sequence
  Description of Artificial Sequence: Synthetic oligonucleotide
aguugucaggccggaagag

SEQ ID NO: 984925 - RNA, 19 nt, Artificial Sequence
  Description of Artificial Sequence: Synthetic oligonucleotide
guugucaggccggaagagc

SEQ ID NO: 984926 - RNA, 19 nt, Artificial Sequence
  Description of Artificial Sequence: Synthetic oligonucleotide
cugguguaccgacaaugug

SEQ ID NO: 984927 - RNA, 19 nt, Artificial Sequence
  Description of Artificial Sequence: Synthetic oligonucleotide
uuccccgucguugaccgug

SEQ ID NO: 984928 - RNA, 19 nt, Artificial Sequence
  Description of Artificial Sequence: Synthetic oligonucleotide
uccagauaaccuggggaac

SEQ ID NO: 984929 - RNA, 19 nt, Artificial Sequence
  Description of Artificial Sequence: Synthetic oligonucleotide
gugguguguauuugguuga

SEQ ID NO: 984930 - RNA, 19 nt, Artificial Sequence
  Description of Artificial Sequence: Synthetic oligonucleotide
gacgguggcaacggucagg

SEQ ID NO: 984931 - RNA, 19 nt, Artificial Sequence
  Description of Artificial Sequence: Synthetic oligonucleotide
uaacggaagguggucucug

SEQ ID NO: 984932 - RNA, 19 nt, Artificial Sequence
  Description of Artificial Sequence: Synthetic oligonucleotide
agcccuaggcacauacuuc

SEQ ID NO: 984933 - RNA, 19 nt, Artificial Sequence
  Description of Artificial Sequence: Synthetic oligonucleotide
ccuaaagacgguggcaacg

SEQ ID NO: 984934 - RNA, 19 nt, Artificial Sequence
  Description of Artificial Sequence: Synthetic oligonucleotide
auguggcauuguaagguuc

SEQ ID NO: 984935 - RNA, 19 nt, Artificial Sequence
  Description of Artificial Sequence: Synthetic oligonucleotide
guggcaacggucagguagc

SEQ ID NO: 984936 - RNA, 19 nt, Artificial Sequence
  Description of Artificial Sequence: Synthetic oligonucleotide
ugguguguauuugguugag

SEQ ID NO: 984937 - RNA, 19 nt, Artificial Sequence
  Description of Artificial Sequence: Synthetic oligonucleotide
cagauaaccuggggaacag

SEQ ID NO: 984938 - RNA, 19 nt, Artificial Sequence
  Description of Artificial Sequence: Synthetic oligonucleotide
gccugugauguguagacca

SEQ ID NO: 984939 - RNA, 19 nt, Artificial Sequence
  Description of Artificial Sequence: Synthetic oligonucleotide
gaaaacgcagggauguggu

SEQ ID NO: 984940 - RNA, 19 nt, Artificial Sequence
  Description of Artificial Sequence: Synthetic oligonucleotide
accagaugguugagguccc

SEQ ID NO: 984941 - RNA, 19 nt, Artificial Sequence
  Description of Artificial Sequence: Synthetic oligonucleotide
uucuaacuucccugcuaac

SEQ ID NO: 984942 - RNA, 19 nt, Artificial Sequence
  Description of Artificial Sequence: Synthetic oligonucleotide
uugaccguggcguccugau

SEQ ID NO: 984943 - RNA, 19 nt, Artificial Sequence
  Description of Artificial Sequence: Synthetic oligonucleotide
ugggcgacggcaugacgcu

SEQ ID NO: 984944 - RNA, 19 nt, Artificial Sequence
  Description of Artificial Sequence: Synthetic oligonucleotide
ugagucgcccacguagccu

SEQ ID NO: 984945 - RNA, 19 nt, Artificial Sequence
  Description of Artificial Sequence: Synthetic oligonucleotide
augaauggauugucacaaa

SEQ ID NO: 984946 - RNA, 19 nt, Artificial Sequence
  Description of Artificial Sequence: Synthetic oligonucleotide
uaggacuguuccagauaac

SEQ ID NO: 984947 - RNA, 19 nt, Artificial Sequence
  Description of Artificial Sequence: Synthetic oligonucleotide
gcagucgcaguguucacac

SEQ ID NO: 984948 - RNA, 19 nt, Artificial Sequence
  Description of Artificial Sequence: Synthetic oligonucleotide
gauccugugccgccgccca

SEQ ID NO: 984949 - RNA, 19 nt, Artificial Sequence
  Description of Artificial Sequence: Synthetic oligonucleotide
ucccaaaacuugguaccga

SEQ ID NO: 984950 - RNA, 19 nt, Artificial Sequence
  Description of Artificial Sequence: Synthetic oligonucleotide
cugagucgcccacguagcc

SEQ ID NO: 984951 - RNA, 19 nt, Artificial Sequence
  Description of Artificial Sequence: Synthetic oligonucleotide
auggacauggggccccuaa

SEQ ID NO: 984952 - RNA, 19 nt, Artificial Sequence
  Description of Artificial Sequence: Synthetic oligonucleotide
ugggcacuuaacggaaggu

SEQ ID NO: 984953 - RNA, 19 nt, Artificial Sequence
  Description of Artificial Sequence: Synthetic oligonucleotide
cuugggcgacggcaugacg

SEQ ID NO: 984954 - RNA, 19 nt, Artificial Sequence
  Description of Artificial Sequence: Synthetic oligonucleotide
guugagaggggccugugau

SEQ ID NO: 984955 - RNA, 19 nt, Artificial Sequence
  Description of Artificial Sequence: Synthetic oligonucleotide
caggcagucgcaguguuca

SEQ ID NO: 984956 - RNA, 19 nt, Artificial Sequence
  Description of Artificial Sequence: Synthetic oligonucleotide
agcgcugagucgcccacgu

SEQ ID NO: 984957 - RNA, 19 nt, Artificial Sequence
  Description of Artificial Sequence: Synthetic oligonucleotide
cagcucggcgcccucagug

SEQ ID NO: 984958 - RNA, 19 nt, Artificial Sequence
  Description of Artificial Sequence: Synthetic oligonucleotide
ugccugauccugugccgcc

SEQ ID NO: 984959 - RNA, 19 nt, Artificial Sequence
  Description of Artificial Sequence: Synthetic oligonucleotide
ugguucccgcacuggcccg

SEQ ID NO: 984960 - RNA, 19 nt, Artificial Sequence
  Description of Artificial Sequence: Synthetic oligonucleotide
gucaggccggaagagcugc

SEQ ID NO: 984961 - RNA, 19 nt, Artificial Sequence
  Description of Artificial Sequence: Synthetic oligonucleotide
gugcccaugccugauccug

SEQ ID NO: 984962 - RNA, 19 nt, Artificial Sequence
  Description of Artificial Sequence: Synthetic oligonucleotide
acuugguaccgaucugguu

SEQ ID NO: 984963 - RNA, 19 nt, Artificial Sequence
  Description of Artificial Sequence: Synthetic oligonucleotide
agacgguggcaacggucag

SEQ ID NO: 984964 - RNA, 19 nt, Artificial Sequence
  Description of Artificial Sequence: Synthetic oligonucleotide
gggcacuuaacggaaggug

SEQ ID NO: 984965 - RNA, 19 nt, Artificial Sequence
  Description of Artificial Sequence: Synthetic oligonucleotide
cacuuaacggaaggugguc

SEQ ID NO: 984966 - RNA, 19 nt, Artificial Sequence
  Description of Artificial Sequence: Synthetic oligonucleotide
gucacacacggccacuuua

SEQ ID NO: 984967 - RNA, 19 nt, Artificial Sequence
  Description of Artificial Sequence: Synthetic oligonucleotide
guagaccagggcaccgugc

SEQ ID NO: 984968 - RNA, 19 nt, Artificial Sequence
  Description of Artificial Sequence: Synthetic oligonucleotide
caccagcgcagcccuaggc

SEQ ID NO: 984969 - RNA, 19 nt, Artificial Sequence
  Description of Artificial Sequence: Synthetic oligonucleotide
cucggcgcccucaguguag

SEQ ID NO: 984970 - RNA, 19 nt, Artificial Sequence
  Description of Artificial Sequence: Synthetic oligonucleotide
uagccuccggccuggucga

SEQ ID NO: 984971 - RNA, 19 nt, Artificial Sequence
  Description of Artificial Sequence: Synthetic oligonucleotide
ugcggugcuuuagauuuua

SEQ ID NO: 984972 - RNA, 19 nt, Artificial Sequence
  Description of Artificial Sequence: Synthetic oligonucleotide
gcgaaucacauccagcacu

SEQ ID NO: 984973 - RNA, 19 nt, Artificial Sequence
  Description of Artificial Sequence: Synthetic oligonucleotide
ucguugaccguggcguccu

SEQ ID NO: 984974 - RNA, 19 nt, Artificial Sequence
  Description of Artificial Sequence: Synthetic oligonucleotide
agauaaccuggggaacagu

SEQ ID NO: 984975 - RNA, 19 nt, Artificial Sequence
  Description of Artificial Sequence: Synthetic oligonucleotide
gaccuugggcgacggcaug

SEQ ID NO: 984976 - RNA, 19 nt, Artificial Sequence
  Description of Artificial Sequence: Synthetic oligonucleotide
cgcugagucgcccacguag

SEQ ID NO: 984977 - RNA, 19 nt, Artificial Sequence
  Description of Artificial Sequence: Synthetic oligonucleotide
gucguugaccguggcgucc

SEQ ID NO: 984978 - RNA, 19 nt, Artificial Sequence
  Description of Artificial Sequence: Synthetic oligonucleotide
gguaccgaucugguucccg

SEQ ID NO: 984979 - RNA, 19 nt, Artificial Sequence
  Description of Artificial Sequence: Synthetic oligonucleotide
ccaaaacuugguaccgauc

SEQ ID NO: 984980 - RNA, 19 nt, Artificial Sequence
  Description of Artificial Sequence: Synthetic oligonucleotide
cauccagcacugaguccac

SEQ ID NO: 984981 - RNA, 19 nt, Artificial Sequence
  Description of Artificial Sequence: Synthetic oligonucleotide
ugggucgcaggcagccauc

SEQ ID NO: 984982 - RNA, 19 nt, Artificial Sequence
  Description of Artificial Sequence: Synthetic oligonucleotide
ggaacagugguguguauuu

SEQ ID NO: 984983 - RNA, 19 nt, Artificial Sequence
  Description of Artificial Sequence: Synthetic oligonucleotide
cagggcuaagagcaggugu

SEQ ID NO: 984984 - RNA, 19 nt, Artificial Sequence
  Description of Artificial Sequence: Synthetic oligonucleotide
accucacacuguccauagu

SEQ ID NO: 984985 - RNA, 19 nt, Artificial Sequence
  Description of Artificial Sequence: Synthetic oligonucleotide
uggggcgaagccgggcaug

SEQ ID NO: 984986 - RNA, 19 nt, Artificial Sequence
  Description of Artificial Sequence: Synthetic oligonucleotide
accgacaauguggcauugu

SEQ ID NO: 984987 - RNA, 19 nt, Artificial Sequence
  Description of Artificial Sequence: Synthetic oligonucleotide
ccgugcucacaccaucagg

SEQ ID NO: 984988 - RNA, 19 nt, Artificial Sequence
  Description of Artificial Sequence: Synthetic oligonucleotide
cugccccgggcugugagug

SEQ ID NO: 984989 - RNA, 19 nt, Artificial Sequence
  Description of Artificial Sequence: Synthetic oligonucleotide
acacggccacuuuaacguu

SEQ ID NO: 984990 - RNA, 19 nt, Artificial Sequence
  Description of Artificial Sequence: Synthetic oligonucleotide
ccuccggccuggucgaugc

SEQ ID NO: 984991 - RNA, 19 nt, Artificial Sequence
  Description of Artificial Sequence: Synthetic oligonucleotide
agaccuugggcgacggcau

SEQ ID NO: 984992 - RNA, 19 nt, Artificial Sequence
  Description of Artificial Sequence: Synthetic oligonucleotide
agucgcccacguagccucc

SEQ ID NO: 984993 - RNA, 19 nt, Artificial Sequence
  Description of Artificial Sequence: Synthetic oligonucleotide
cagugcuauugccaaugaa

SEQ ID NO: 984994 - RNA, 19 nt, Artificial Sequence
  Description of Artificial Sequence: Synthetic oligonucleotide
guaccgacaauguggcauu

SEQ ID NO: 984995 - RNA, 19 nt, Artificial Sequence
  Description of Artificial Sequence: Synthetic oligonucleotide
ccuauucauugaucucuuc

SEQ ID NO: 984996 - RNA, 19 nt, Artificial Sequence
  Description of Artificial Sequence: Synthetic oligonucleotide
gcccuaggcacauacuucu

SEQ ID NO: 984997 - RNA, 19 nt, Artificial Sequence
  Description of Artificial Sequence: Synthetic oligonucleotide
ggcgcgucugcgcucgggc

SEQ ID NO: 984998 - RNA, 19 nt, Artificial Sequence
  Description of Artificial Sequence: Synthetic oligonucleotide
acuucccugcuaacucuga

SEQ ID NO: 984999 - RNA, 19 nt, Artificial Sequence
  Description of Artificial Sequence: Synthetic oligonucleotide
gcaacaaugcggugcuuua

SEQ ID NO: 985000 - RNA, 19 nt, Artificial Sequence
  Description of Artificial Sequence: Synthetic oligonucleotide
ggcaugacgcugaaggugu

SEQ ID NO: 985001 - RNA, 19 nt, Artificial Sequence
  Description of Artificial Sequence: Synthetic oligonucleotide
ucggcgcccucaguguagu

SEQ ID NO: 985002 - RNA, 19 nt, Artificial Sequence
  Description of Artificial Sequence: Synthetic oligonucleotide
gcgaagccgggcaugaaga

SEQ ID NO: 985003 - RNA, 19 nt, Artificial Sequence
  Description of Artificial Sequence: Synthetic oligonucleotide
gccgggaaaacgcagggau

SEQ ID NO: 985004 - RNA, 19 nt, Artificial Sequence
  Description of Artificial Sequence: Synthetic oligonucleotide
caaugcggugcuuuagauu

SEQ ID NO: 985005 - RNA, 19 nt, Artificial Sequence
  Description of Artificial Sequence: Synthetic oligonucleotide
cguacguggguguggucag

SEQ ID NO: 985006 - RNA, 19 nt, Artificial Sequence
  Description of Artificial Sequence: Synthetic oligonucleotide
gucgcccacguagccuccg

SEQ ID NO: 985007 - RNA, 19 nt, Artificial Sequence
  Description of Artificial Sequence: Synthetic oligonucleotide
ggacuguuccagauaaccu

SEQ ID NO: 985008 - RNA, 19 nt, Artificial Sequence
  Description of Artificial Sequence: Synthetic oligonucleotide
cagcccuaggcacauacuu

SEQ ID NO: 985009 - RNA, 19 nt, Artificial Sequence
  Description of Artificial Sequence: Synthetic oligonucleotide
guguaccgacaauguggca

SEQ ID NO: 985010 - RNA, 19 nt, Artificial Sequence
  Description of Artificial Sequence: Synthetic oligonucleotide
gggaaaacgcagggaugug

SEQ ID NO: 985011 - RNA, 19 nt, Artificial Sequence
  Description of Artificial Sequence: Synthetic oligonucleotide
gcgcgucugcgcucgggcg

SEQ ID NO: 985012 - RNA, 19 nt, Artificial Sequence
  Description of Artificial Sequence: Synthetic oligonucleotide
guuguucccggcgcccguc

SEQ ID NO: 985013 - RNA, 19 nt, Artificial Sequence
  Description of Artificial Sequence: Synthetic oligonucleotide
agguagcggccguggcgug

SEQ ID NO: 985014 - RNA, 19 nt, Artificial Sequence
  Description of Artificial Sequence: Synthetic oligonucleotide
gugcaccauagcaucuuaa

SEQ ID NO: 985015 - RNA, 19 nt, Artificial Sequence
  Description of Artificial Sequence: Synthetic oligonucleotide
cuuuaacguuguuggggau

SEQ ID NO: 985016 - RNA, 19 nt, Artificial Sequence
  Description of Artificial Sequence: Synthetic oligonucleotide
agcgcagcccuaggcacau

SEQ ID NO: 985017 - RNA, 19 nt, Artificial Sequence
  Description of Artificial Sequence: Synthetic oligonucleotide
gggcaccgugcucacacca

SEQ ID NO: 985018 - RNA, 19 nt, Artificial Sequence
  Description of Artificial Sequence: Synthetic oligonucleotide
cagcgcagcccuaggcaca

SEQ ID NO: 985019 - RNA, 19 nt, Artificial Sequence
  Description of Artificial Sequence: Synthetic oligonucleotide
ugaugcgguccggguacuc

SEQ ID NO: 985020 - RNA, 19 nt, Artificial Sequence
  Description of Artificial Sequence: Synthetic oligonucleotide
uucccggcgcccgucuguc

SEQ ID NO: 985021 - RNA, 19 nt, Artificial Sequence
  Description of Artificial Sequence: Synthetic oligonucleotide
agcguugagcuggccggga

SEQ ID NO: 985022 - RNA, 19 nt, Artificial Sequence
  Description of Artificial Sequence: Synthetic oligonucleotide
cccugcuaacucugauggc

SEQ ID NO: 985023 - RNA, 19 nt, Artificial Sequence
  Description of Artificial Sequence: Synthetic oligonucleotide
cccggcgcccgucuguccg

SEQ ID NO: 985024 - RNA, 19 nt, Artificial Sequence
  Description of Artificial Sequence: Synthetic oligonucleotide
ccugauccugugccgccgc

SEQ ID NO: 985025 - RNA, 19 nt, Artificial Sequence
  Description of Artificial Sequence: Synthetic oligonucleotide
ggggccccuaaagacggug

SEQ ID NO: 985026 - RNA, 19 nt, Artificial Sequence
  Description of Artificial Sequence: Synthetic oligonucleotide
guccccguacgugggugug

SEQ ID NO: 985027 - RNA, 19 nt, Artificial Sequence
  Description of Artificial Sequence: Synthetic oligonucleotide
guccgaagaugaaguuguc

SEQ ID NO: 985028 - RNA, 19 nt, Artificial Sequence
  Description of Artificial Sequence: Synthetic oligonucleotide
ccguacgugggugugguca

SEQ ID NO: 985029 - RNA, 19 nt, Artificial Sequence
  Description of Artificial Sequence: Synthetic oligonucleotide
gcaggcgugggaagggcac

SEQ ID NO: 985030 - RNA, 19 nt, Artificial Sequence
  Description of Artificial Sequence: Synthetic oligonucleotide
cggugucugagaccuuggg

SEQ ID NO: 985031 - RNA, 19 nt, Artificial Sequence
  Description of Artificial Sequence: Synthetic oligonucleotide
cugcugacugccccgggcu

SEQ ID NO: 985032 - RNA, 19 nt, Artificial Sequence
  Description of Artificial Sequence: Synthetic oligonucleotide
cacccuggucugguaggac

SEQ ID NO: 985033 - RNA, 19 nt, Artificial Sequence
  Description of Artificial Sequence: Synthetic oligonucleotide
gcgugggucgcaggcagcc

SEQ ID NO: 985034 - RNA, 19 nt, Artificial Sequence
  Description of Artificial Sequence: Synthetic oligonucleotide
cccuaggcacauacuucug

SEQ ID NO: 985035 - RNA, 19 nt, Artificial Sequence
  Description of Artificial Sequence: Synthetic oligonucleotide
ccgacaauguggcauugua

SEQ ID NO: 985036 - RNA, 19 nt, Artificial Sequence
  Description of Artificial Sequence: Synthetic oligonucleotide
gcgcccgucuguccgaaga

SEQ ID NO: 985037 - RNA, 19 nt, Artificial Sequence
  Description of Artificial Sequence: Synthetic oligonucleotide
uucccgcacuggcccgccu

SEQ ID NO: 985038 - RNA, 19 nt, Artificial Sequence
  Description of Artificial Sequence: Synthetic oligonucleotide
ucccggcgcccgucugucc

SEQ ID NO: 985039 - RNA, 19 nt, Artificial Sequence
  Description of Artificial Sequence: Synthetic oligonucleotide
ccgggcugugaguggggcg

SEQ ID NO: 985040 - RNA, 19 nt, Artificial Sequence
  Description of Artificial Sequence: Synthetic oligonucleotide
cggcaugacgcugaaggug

SEQ ID NO: 985041 - RNA, 19 nt, Artificial Sequence
  Description of Artificial Sequence: Synthetic oligonucleotide
ggcgacggcaugacgcuga

SEQ ID NO: 985042 - RNA, 19 nt, Artificial Sequence
  Description of Artificial Sequence: Synthetic oligonucleotide
gccccgggcugugaguggg

SEQ ID NO: 985043 - RNA, 19 nt, Artificial Sequence
  Description of Artificial Sequence: Synthetic oligonucleotide
guggcgugggucgcaggca

SEQ ID NO: 985044 - RNA, 19 nt, Artificial Sequence
  Description of Artificial Sequence: Synthetic oligonucleotide
gcacuuaacggaagguggu

SEQ ID NO: 985045 - RNA, 19 nt, Artificial Sequence
  Description of Artificial Sequence: Synthetic oligonucleotide
ccggggugggaugucacac

SEQ ID NO: 985046 - RNA, 19 nt, Artificial Sequence
  Description of Artificial Sequence: Synthetic oligonucleotide
ccacguagccuccggccug

SEQ ID NO: 985047 - RNA, 19 nt, Artificial Sequence
  Description of Artificial Sequence: Synthetic oligonucleotide
ccgccgcccaacgaguggg

SEQ ID NO: 985048 - RNA, 19 nt, Artificial Sequence
  Description of Artificial Sequence: Synthetic oligonucleotide
ggcugggcacuuaacggaa

SEQ ID NO: 985049 - RNA, 19 nt, Artificial Sequence
  Description of Artificial Sequence: Synthetic oligonucleotide
guguagaccagggcaccgu

SEQ ID NO: 985050 - RNA, 19 nt, Artificial Sequence
  Description of Artificial Sequence: Synthetic oligonucleotide
cuccggccuggucgaugcc

SEQ ID NO: 985051 - RNA, 19 nt, Artificial Sequence
  Description of Artificial Sequence: Synthetic oligonucleotide
cucacaccaucagggcuaa

SEQ ID NO: 985052 - RNA, 19 nt, Artificial Sequence
  Description of Artificial Sequence: Synthetic oligonucleotide
ugacugccccgggcuguga

SEQ ID NO: 985053 - RNA, 19 nt, Artificial Sequence
  Description of Artificial Sequence: Synthetic oligonucleotide
ggcaacaaugcggugcuuu

SEQ ID NO: 985054 - RNA, 19 nt, Artificial Sequence
  Description of Artificial Sequence: Synthetic oligonucleotide
gagguccccguacgugggu

SEQ ID NO: 985055 - RNA, 19 nt, Artificial Sequence
  Description of Artificial Sequence: Synthetic oligonucleotide
gcgggcgcgucugcgcucg

SEQ ID NO: 985056 - RNA, 19 nt, Artificial Sequence
  Description of Artificial Sequence: Synthetic oligonucleotide
gaggggccugugaugugua

SEQ ID NO: 985057 - RNA, 19 nt, Artificial Sequence
  Description of Artificial Sequence: Synthetic oligonucleotide
gcggcgaaacauggccgag

SEQ ID NO: 985058 - RNA, 19 nt, Artificial Sequence
  Description of Artificial Sequence: Synthetic oligonucleotide
ccaccagcgcagcccuagg

SEQ ID NO: 985059 - RNA, 19 nt, Artificial Sequence
  Description of Artificial Sequence: Synthetic oligonucleotide
cgcccaacgagugggugag

SEQ ID NO: 985060 - RNA, 19 nt, Artificial Sequence
  Description of Artificial Sequence: Synthetic oligonucleotide
ggugugcaccauagcaucu

SEQ ID NO: 985061 - RNA, 19 nt, Artificial Sequence
  Description of Artificial Sequence: Synthetic oligonucleotide
cccaaaacuugguaccgau

SEQ ID NO: 985062 - RNA, 19 nt, Artificial Sequence
  Description of Artificial Sequence: Synthetic oligonucleotide
ccagaugguugaggucccc

SEQ ID NO: 985063 - RNA, 19 nt, Artificial Sequence
  Description of Artificial Sequence: Synthetic oligonucleotide
ccuugggcgacggcaugac

SEQ ID NO: 985064 - RNA, 19 nt, Artificial Sequence
  Description of Artificial Sequence: Synthetic oligonucleotide
ccgcccaacgaguggguga

SEQ ID NO: 985065 - RNA, 19 nt, Artificial Sequence
  Description of Artificial Sequence: Synthetic oligonucleotide
cugugccgccgcccaacga

SEQ ID NO: 985066 - RNA, 19 nt, Artificial Sequence
  Description of Artificial Sequence: Synthetic oligonucleotide
augcggugcuuuagauuuu

SEQ ID NO: 985067 - RNA, 19 nt, Artificial Sequence
  Description of Artificial Sequence: Synthetic oligonucleotide
ccggugaaccagugcagaa

SEQ ID NO: 985068 - RNA, 19 nt, Artificial Sequence
  Description of Artificial Sequence: Synthetic oligonucleotide
cccgccuggaugugcacaa

SEQ ID NO: 985069 - RNA, 19 nt, Artificial Sequence
  Description of Artificial Sequence: Synthetic oligonucleotide
ggccgggaaaacgcaggga

SEQ ID NO: 985070 - RNA, 19 nt, Artificial Sequence
  Description of Artificial Sequence: Synthetic oligonucleotide
gccgcccaacgagugggug

SEQ ID NO: 985071 - RNA, 19 nt, Artificial Sequence
  Description of Artificial Sequence: Synthetic oligonucleotide
gcguugagcuggccgggaa

SEQ ID NO: 985072 - RNA, 19 nt, Artificial Sequence
  Description of Artificial Sequence: Synthetic oligonucleotide
gggcgcgucugcgcucggg

SEQ ID NO: 985073 - RNA, 19 nt, Artificial Sequence
  Description of Artificial Sequence: Synthetic oligonucleotide
ggugcccaugccugauccu

SEQ ID NO: 985074 - RNA, 19 nt, Artificial Sequence
  Description of Artificial Sequence: Synthetic oligonucleotide
ggcgugggucgcaggcagc

SEQ ID NO: 985075 - RNA, 19 nt, Artificial Sequence
  Description of Artificial Sequence: Synthetic oligonucleotide
gggcgacggcaugacgcug

SEQ ID NO: 985076 - RNA, 19 nt, Artificial Sequence
  Description of Artificial Sequence: Synthetic oligonucleotide
gugccgccgcccaacgagu

SEQ ID NO: 985077 - RNA, 19 nt, Artificial Sequence
  Description of Artificial Sequence: Synthetic oligonucleotide
gcgacggcaugacgcugaa

SEQ ID NO: 985078 - RNA, 19 nt, Artificial Sequence
  Description of Artificial Sequence: Synthetic oligonucleotide
ggcaccgugcucacaccau

SEQ ID NO: 985079 - RNA, 19 nt, Artificial Sequence
  Description of Artificial Sequence: Synthetic oligonucleotide
cccguacgugggugugguc

SEQ ID NO: 985080 - RNA, 19 nt, Artificial Sequence
  Description of Artificial Sequence: Synthetic oligonucleotide
cuuccccgucguugaccgu

SEQ ID NO: 985081 - RNA, 19 nt, Artificial Sequence
  Description of Artificial Sequence: Synthetic oligonucleotide
ccggccuggucgaugccgu

SEQ ID NO: 985082 - RNA, 19 nt, Artificial Sequence
  Description of Artificial Sequence: Synthetic oligonucleotide
agccuccggccuggucgau

SEQ ID NO: 985083 - RNA, 19 nt, Artificial Sequence
  Description of Artificial Sequence: Synthetic oligonucleotide
gcgucugcgcucgggcgcu

SEQ ID NO: 985084 - RNA, 19 nt, Artificial Sequence
  Description of Artificial Sequence: Synthetic oligonucleotide
gcgcugagucgcccacgua

SEQ ID NO: 985085 - RNA, 19 nt, Artificial Sequence
  Description of Artificial Sequence: Synthetic oligonucleotide
gcggugcuuuagauuuuau

SEQ ID NO: 985086 - RNA, 19 nt, Artificial Sequence
  Description of Artificial Sequence: Synthetic oligonucleotide
ccccguacguggguguggu

SEQ ID NO: 985087 - RNA, 19 nt, Artificial Sequence
  Description of Artificial Sequence: Synthetic oligonucleotide
cgcaguguucacacuccuu

SEQ ID NO: 985088 - RNA, 19 nt, Artificial Sequence
  Description of Artificial Sequence: Synthetic oligonucleotide
cggcgcccucaguguagug

SEQ ID NO: 985089 - RNA, 19 nt, Artificial Sequence
  Description of Artificial Sequence: Synthetic oligonucleotide
cgugggucgcaggcagcca

SEQ ID NO: 985090 - RNA, 19 nt, Artificial Sequence
  Description of Artificial Sequence: Synthetic oligonucleotide
gcaugacgcugaagguguu

SEQ ID NO: 985091 - RNA, 19 nt, Artificial Sequence
  Description of Artificial Sequence: Synthetic oligonucleotide
cgcccgucuguccgaagau

SEQ ID NO: 985092 - RNA, 19 nt, Artificial Sequence
  Description of Artificial Sequence: Synthetic oligonucleotide
cgggcgcgucugcgcucgg

SEQ ID NO: 985093 - RNA, 19 nt, Artificial Sequence
  Description of Artificial Sequence: Synthetic oligonucleotide
cgguggcaacggucaggua

SEQ ID NO: 985094 - RNA, 19 nt, Artificial Sequence
  Description of Artificial Sequence: Synthetic oligonucleotide
cgccgcccaacgagugggu

SEQ ID NO: 985095 - RNA, 19 nt, Artificial Sequence
  Description of Artificial Sequence: Synthetic oligonucleotide
gcgcagcccuaggcacaua

SEQ ID NO: 985096 - RNA, 19 nt, Artificial Sequence
  Description of Artificial Sequence: Synthetic oligonucleotide
aauucuaucaaucuggaag

SEQ ID NO: 985097 - RNA, 19 nt, Artificial Sequence
  Description of Artificial Sequence: Synthetic oligonucleotide
uugaauuucaaaauuaggg

SEQ ID NO: 985098 - RNA, 19 nt, Artificial Sequence
  Description of Artificial Sequence: Synthetic oligonucleotide
aaaugauuuaauuggcucc

SEQ ID NO: 985099 - RNA, 19 nt, Artificial Sequence
  Description of Artificial Sequence: Synthetic oligonucleotide
aacuauaugguuucuaugg

SEQ ID NO: 985100 - RNA, 19 nt, Artificial Sequence
  Description of Artificial Sequence: Synthetic oligonucleotide
ucuuaaguaaguaacaugc

SEQ ID NO: 985101 - RNA, 19 nt, Artificial Sequence
  Description of Artificial Sequence: Synthetic oligonucleotide
auauuagauguccagaagc

SEQ ID NO: 985102 - RNA, 19 nt, Artificial Sequence
  Description of Artificial Sequence: Synthetic oligonucleotide
aagacgaacagucuuauca

SEQ ID NO: 985103 - RNA, 19 nt, Artificial Sequence
  Description of Artificial Sequence: Synthetic oligonucleotide
ugaauuucaaaauuagggc

SEQ ID NO: 985104 - RNA, 19 nt, Artificial Sequence
  Description of Artificial Sequence: Synthetic oligonucleotide
uguuguuucuggaaaaccg

SEQ ID NO: 985105 - RNA, 19 nt, Artificial Sequence
  Description of Artificial Sequence: Synthetic oligonucleotide
aaaagcaauaguccgcccg

SEQ ID NO: 985106 - RNA, 19 nt, Artificial Sequence
  Description of Artificial Sequence: Synthetic oligonucleotide
uaaacagcuaccagaaacg

SEQ ID NO: 985107 - RNA, 19 nt, Artificial Sequence
  Description of Artificial Sequence: Synthetic oligonucleotide
aaacguaagugugaaaugg

SEQ ID NO: 985108 - RNA, 19 nt, Artificial Sequence
  Description of Artificial Sequence: Synthetic oligonucleotide
cuguguaugaugaagaaac

SEQ ID NO: 985109 - RNA, 19 nt, Artificial Sequence
  Description of Artificial Sequence: Synthetic oligonucleotide
aauauuagauguccagaag

SEQ ID NO: 985110 - RNA, 19 nt, Artificial Sequence
  Description of Artificial Sequence: Synthetic oligonucleotide
aaaauuagggcauguucag

SEQ ID NO: 985111 - RNA, 19 nt, Artificial Sequence
  Description of Artificial Sequence: Synthetic oligonucleotide
aauuagggcauguucagcu

SEQ ID NO: 985112 - RNA, 19 nt, Artificial Sequence
  Description of Artificial Sequence: Synthetic oligonucleotide
uguagcaugaucccaaaga

SEQ ID NO: 985113 - RNA, 19 nt, Artificial Sequence
  Description of Artificial Sequence: Synthetic oligonucleotide
cuaugaaaagcaauagucc

SEQ ID NO: 985114 - RNA, 19 nt, Artificial Sequence
  Description of Artificial Sequence: Synthetic oligonucleotide
uuuaauuggcuccagacuu

SEQ ID NO: 985115 - RNA, 19 nt, Artificial Sequence
  Description of Artificial Sequence: Synthetic oligonucleotide
aaugggaccaaagugaccu

SEQ ID NO: 985116 - RNA, 19 nt, Artificial Sequence
  Description of Artificial Sequence: Synthetic oligonucleotide
cauaacauaaacagcuacc

SEQ ID NO: 985117 - RNA, 19 nt, Artificial Sequence
  Description of Artificial Sequence: Synthetic oligonucleotide
acuauaugguuucuauggc

SEQ ID NO: 985118 - RNA, 19 nt, Artificial Sequence
  Description of Artificial Sequence: Synthetic oligonucleotide
uccuguaucucccugucgg

SEQ ID NO: 985119 - RNA, 19 nt, Artificial Sequence
  Description of Artificial Sequence: Synthetic oligonucleotide
cuaucaaucuggaaggaag

SEQ ID NO: 985120 - RNA, 19 nt, Artificial Sequence
  Description of Artificial Sequence: Synthetic oligonucleotide
uauuagauguccagaagca

SEQ ID NO: 985121 - RNA, 19 nt, Artificial Sequence
  Description of Artificial Sequence: Synthetic oligonucleotide
aaucucacacagugaaugg

SEQ ID NO: 985122 - RNA, 19 nt, Artificial Sequence
  Description of Artificial Sequence: Synthetic oligonucleotide
uguaugaugaagaaacuuu

SEQ ID NO: 985123 - RNA, 19 nt, Artificial Sequence
  Description of Artificial Sequence: Synthetic oligonucleotide
uuagaggcauuuuauuuag

SEQ ID NO: 985124 - RNA, 19 nt, Artificial Sequence
  Description of Artificial Sequence: Synthetic oligonucleotide
ugcuuaugagccaagguca

SEQ ID NO: 985125 - RNA, 19 nt, Artificial Sequence
  Description of Artificial Sequence: Synthetic oligonucleotide
aaacuauaugguuucuaug

SEQ ID NO: 985126 - RNA, 19 nt, Artificial Sequence
  Description of Artificial Sequence: Synthetic oligonucleotide
agagaguaacucugaaggc

SEQ ID NO: 985127 - RNA, 19 nt, Artificial Sequence
  Description of Artificial Sequence: Synthetic oligonucleotide
aagugugaccacuaaucuc

SEQ ID NO: 985128 - RNA, 19 nt, Artificial Sequence
  Description of Artificial Sequence: Synthetic oligonucleotide
gagaguaacucugaaggcg

SEQ ID NO: 985129 - RNA, 19 nt, Artificial Sequence
  Description of Artificial Sequence: Synthetic oligonucleotide
uuagauguccagaagcagu

SEQ ID NO: 985130 - RNA, 19 nt, Artificial Sequence
  Description of Artificial Sequence: Synthetic oligonucleotide
ugaagaaacuuucugggua

SEQ ID NO: 985131 - RNA, 19 nt, Artificial Sequence
  Description of Artificial Sequence: Synthetic oligonucleotide
uucuuaaguaaguaacaug

SEQ ID NO: 985132 - RNA, 19 nt, Artificial Sequence
  Description of Artificial Sequence: Synthetic oligonucleotide
uaaacuauaugguuucuau

SEQ ID NO: 985133 - RNA, 19 nt, Artificial Sequence
  Description of Artificial Sequence: Synthetic oligonucleotide
aaugauuuaauuggcucca

SEQ ID NO: 985134 - RNA, 19 nt, Artificial Sequence
  Description of Artificial Sequence: Synthetic oligonucleotide
aaauuagggcauguucagc

SEQ ID NO: 985135 - RNA, 19 nt, Artificial Sequence
  Description of Artificial Sequence: Synthetic oligonucleotide
uguuuauccucacuacacc

SEQ ID NO: 985136 - RNA, 19 nt, Artificial Sequence
  Description of Artificial Sequence: Synthetic oligonucleotide
aucagaauuucccaaagaa

SEQ ID NO: 985137 - RNA, 19 nt, Artificial Sequence
  Description of Artificial Sequence: Synthetic oligonucleotide
caaaauuagggcauguuca

SEQ ID NO: 985138 - RNA, 19 nt, Artificial Sequence
  Description of Artificial Sequence: Synthetic oligonucleotide
ugaaagagaucaaaccagu

SEQ ID NO: 985139 - RNA, 19 nt, Artificial Sequence
  Description of Artificial Sequence: Synthetic oligonucleotide
uuuccuaccacaguuugcc

SEQ ID NO: 985140 - RNA, 19 nt, Artificial Sequence
  Description of Artificial Sequence: Synthetic oligonucleotide
ugacaaugugcuuaugagc

SEQ ID NO: 985141 - RNA, 19 nt, Artificial Sequence
  Description of Artificial Sequence: Synthetic oligonucleotide
auuuaauuggcuccagacu

SEQ ID NO: 985142 - RNA, 19 nt, Artificial Sequence
  Description of Artificial Sequence: Synthetic oligonucleotide
uguuuaguccauaaacuau

SEQ ID NO: 985143 - RNA, 19 nt, Artificial Sequence
  Description of Artificial Sequence: Synthetic oligonucleotide
agaaacguaagugugaaau

SEQ ID NO: 985144 - RNA, 19 nt, Artificial Sequence
  Description of Artificial Sequence: Synthetic oligonucleotide
uacguuggcauguucacug

SEQ ID NO: 985145 - RNA, 19 nt, Artificial Sequence
  Description of Artificial Sequence: Synthetic oligonucleotide
aaaucugcggcugcugugg

SEQ ID NO: 985146 - RNA, 19 nt, Artificial Sequence
  Description of Artificial Sequence: Synthetic oligonucleotide
aaagcaauaguccgcccgu

SEQ ID NO: 985147 - RNA, 19 nt, Artificial Sequence
  Description of Artificial Sequence: Synthetic oligonucleotide
agggauauacuccaugcug

SEQ ID NO: 985148 - RNA, 19 nt, Artificial Sequence
  Description of Artificial Sequence: Synthetic oligonucleotide
uuuguaggacucuaauucu

SEQ ID NO: 985149 - RNA, 19 nt, Artificial Sequence
  Description of Artificial Sequence: Synthetic oligonucleotide
gaagcacgcauuuccaaag

SEQ ID NO: 985150 - RNA, 19 nt, Artificial Sequence
  Description of Artificial Sequence: Synthetic oligonucleotide
gaagaaacuuucuggguac

SEQ ID NO: 985151 - RNA, 19 nt, Artificial Sequence
  Description of Artificial Sequence: Synthetic oligonucleotide
agaagcaauucuaucaauc

SEQ ID NO: 985152 - RNA, 19 nt, Artificial Sequence
  Description of Artificial Sequence: Synthetic oligonucleotide
ugaugcucaggcuuuaacu

SEQ ID NO: 985153 - RNA, 19 nt, Artificial Sequence
  Description of Artificial Sequence: Synthetic oligonucleotide
uuaugagccaaggucauca

SEQ ID NO: 985154 - RNA, 19 nt, Artificial Sequence
  Description of Artificial Sequence: Synthetic oligonucleotide
cuuacugcacuaugaaaag

SEQ ID NO: 985155 - RNA, 19 nt, Artificial Sequence
  Description of Artificial Sequence: Synthetic oligonucleotide
gaaacguaagugugaaaug

SEQ ID NO: 985156 - RNA, 19 nt, Artificial Sequence
  Description of Artificial Sequence: Synthetic oligonucleotide
ucuauggcaaacaucugau

SEQ ID NO: 985157 - RNA, 19 nt, Artificial Sequence
  Description of Artificial Sequence: Synthetic oligonucleotide
uuguacguuggcauguuca

SEQ ID NO: 985158 - RNA, 19 nt, Artificial Sequence
  Description of Artificial Sequence: Synthetic oligonucleotide
accugcaacaagaaauucc

SEQ ID NO: 985159 - RNA, 19 nt, Artificial Sequence
  Description of Artificial Sequence: Synthetic oligonucleotide
aggaaagagaagcaauucu

SEQ ID NO: 985160 - RNA, 19 nt, Artificial Sequence
  Description of Artificial Sequence: Synthetic oligonucleotide
augaaagagaucaaaccag

SEQ ID NO: 985161 - RNA, 19 nt, Artificial Sequence
  Description of Artificial Sequence: Synthetic oligonucleotide
aacguaagugugaaauggg

SEQ ID NO: 985162 - RNA, 19 nt, Artificial Sequence
  Description of Artificial Sequence: Synthetic oligonucleotide
cagaaaguagccguaaggc

SEQ ID NO: 985163 - RNA, 19 nt, Artificial Sequence
  Description of Artificial Sequence: Synthetic oligonucleotide
aagucauauaugcgcagca

SEQ ID NO: 985164 - RNA, 19 nt, Artificial Sequence
  Description of Artificial Sequence: Synthetic oligonucleotide
ugagccaaggucaucaauu

SEQ ID NO: 985165 - RNA, 19 nt, Artificial Sequence
  Description of Artificial Sequence: Synthetic oligonucleotide
uuguuuaguccauaaacua

SEQ ID NO: 985166 - RNA, 19 nt, Artificial Sequence
  Description of Artificial Sequence: Synthetic oligonucleotide
auauacuccaugcugcuaa

SEQ ID NO: 985167 - RNA, 19 nt, Artificial Sequence
  Description of Artificial Sequence: Synthetic oligonucleotide
aaagacgaacagucuuauc

SEQ ID NO: 985168 - RNA, 19 nt, Artificial Sequence
  Description of Artificial Sequence: Synthetic oligonucleotide
augggaauuguacguuggc

SEQ ID NO: 985169 - RNA, 19 nt, Artificial Sequence
  Description of Artificial Sequence: Synthetic oligonucleotide
accgaguaguuguucgugc

SEQ ID NO: 985170 - RNA, 19 nt, Artificial Sequence
  Description of Artificial Sequence: Synthetic oligonucleotide
auaaucauacuuauagagu

SEQ ID NO: 985171 - RNA, 19 nt, Artificial Sequence
  Description of Artificial Sequence: Synthetic oligonucleotide
uaucagaauuucccaaaga

SEQ ID NO: 985172 - RNA, 19 nt, Artificial Sequence
  Description of Artificial Sequence: Synthetic oligonucleotide
ucaacguugcaccccaaac

SEQ ID NO: 985173 - RNA, 19 nt, Artificial Sequence
  Description of Artificial Sequence: Synthetic oligonucleotide
cacuaaucuccuuagguuc

SEQ ID NO: 985174 - RNA, 19 nt, Artificial Sequence
  Description of Artificial Sequence: Synthetic oligonucleotide
aauaguccgcccguaagug

SEQ ID NO: 985175 - RNA, 19 nt, Artificial Sequence
  Description of Artificial Sequence: Synthetic oligonucleotide
uccaguuuuaauacucaaa

SEQ ID NO: 985176 - RNA, 19 nt, Artificial Sequence
  Description of Artificial Sequence: Synthetic oligonucleotide
acuguuauaaucauacuua

SEQ ID NO: 985177 - RNA, 19 nt, Artificial Sequence
  Description of Artificial Sequence: Synthetic oligonucleotide
ccuuauucaacguugcacc

SEQ ID NO: 985178 - RNA, 19 nt, Artificial Sequence
  Description of Artificial Sequence: Synthetic oligonucleotide
guacuuccaguuuuaauac

SEQ ID NO: 985179 - RNA, 19 nt, Artificial Sequence
  Description of Artificial Sequence: Synthetic oligonucleotide
aaggcgcuuguuuagucca

SEQ ID NO: 985180 - RNA, 19 nt, Artificial Sequence
  Description of Artificial Sequence: Synthetic oligonucleotide
ugugcuuaugagccaaggu

SEQ ID NO: 985181 - RNA, 19 nt, Artificial Sequence
  Description of Artificial Sequence: Synthetic oligonucleotide
aaauccaccacgggccgcg

SEQ ID NO: 985182 - RNA, 19 nt, Artificial Sequence
  Description of Artificial Sequence: Synthetic oligonucleotide
uagauguccagaagcaguc

SEQ ID NO: 985183 - RNA, 19 nt, Artificial Sequence
  Description of Artificial Sequence: Synthetic oligonucleotide
ucauuagcaaagcccuccc

SEQ ID NO: 985184 - RNA, 19 nt, Artificial Sequence
  Description of Artificial Sequence: Synthetic oligonucleotide
gugcuuaugagccaagguc

SEQ ID NO: 985185 - RNA, 19 nt, Artificial Sequence
  Description of Artificial Sequence: Synthetic oligonucleotide
uguaggacucuaauucuuc

SEQ ID NO: 985186 - RNA, 19 nt, Artificial Sequence
  Description of Artificial Sequence: Synthetic oligonucleotide
ugaccacuaaucuccuuag

SEQ ID NO: 985187 - RNA, 19 nt, Artificial Sequence
  Description of Artificial Sequence: Synthetic oligonucleotide
ucuucagaaccacuggcau

SEQ ID NO: 985188 - RNA, 19 nt, Artificial Sequence
  Description of Artificial Sequence: Synthetic oligonucleotide
aauuucaaguuuauacaau

SEQ ID NO: 985189 - RNA, 19 nt, Artificial Sequence
  Description of Artificial Sequence: Synthetic oligonucleotide
uaguccgcccguaagugag

SEQ ID NO: 985190 - RNA, 19 nt, Artificial Sequence
  Description of Artificial Sequence: Synthetic oligonucleotide
gaagcaauucuaucaaucu

SEQ ID NO: 985191 - RNA, 19 nt, Artificial Sequence
  Description of Artificial Sequence: Synthetic oligonucleotide
acagcuaccagaaacguaa

SEQ ID NO: 985192 - RNA, 19 nt, Artificial Sequence
  Description of Artificial Sequence: Synthetic oligonucleotide
auuagggcauguucagcuc

SEQ ID NO: 985193 - RNA, 19 nt, Artificial Sequence
  Description of Artificial Sequence: Synthetic oligonucleotide
cauccuuauucaacguugc

SEQ ID NO: 985194 - RNA, 19 nt, Artificial Sequence
  Description of Artificial Sequence: Synthetic oligonucleotide
gaugccggaagugugacca

SEQ ID NO: 985195 - RNA, 19 nt, Artificial Sequence
  Description of Artificial Sequence: Synthetic oligonucleotide
uuaagggaaaagucagaaa

SEQ ID NO: 985196 - RNA, 19 nt, Artificial Sequence
  Description of Artificial Sequence: Synthetic oligonucleotide
aaaccgaguaguuguucgu

SEQ ID NO: 985197 - RNA, 19 nt, Artificial Sequence
  Description of Artificial Sequence: Synthetic oligonucleotide
gcaagcgcugaucagaaag

SEQ ID NO: 985198 - RNA, 19 nt, Artificial Sequence
  Description of Artificial Sequence: Synthetic oligonucleotide
uuuggccgugaaaucugcg

SEQ ID NO: 985199 - RNA, 19 nt, Artificial Sequence
  Description of Artificial Sequence: Synthetic oligonucleotide
aacaucugaugcucaggcu

SEQ ID NO: 985200 - RNA, 19 nt, Artificial Sequence
  Description of Artificial Sequence: Synthetic oligonucleotide
uuauucaacguugcacccc

SEQ ID NO: 985201 - RNA, 19 nt, Artificial Sequence
  Description of Artificial Sequence: Synthetic oligonucleotide
cuuguuuaguccauaaacu

SEQ ID NO: 985202 - RNA, 19 nt, Artificial Sequence
  Description of Artificial Sequence: Synthetic oligonucleotide
ccgguuaacagguaguugc

SEQ ID NO: 985203 - RNA, 19 nt, Artificial Sequence
  Description of Artificial Sequence: Synthetic oligonucleotide
uuaacagguaguugcuauc

SEQ ID NO: 985204 - RNA, 19 nt, Artificial Sequence
  Description of Artificial Sequence: Synthetic oligonucleotide
auauaugcgcagcaguuua

SEQ ID NO: 985205 - RNA, 19 nt, Artificial Sequence
  Description of Artificial Sequence: Synthetic oligonucleotide
uagccguaaggcgugaugc

SEQ ID NO: 985206 - RNA, 19 nt, Artificial Sequence
  Description of Artificial Sequence: Synthetic oligonucleotide
guaugaugaagaaacuuuc

SEQ ID NO: 985207 - RNA, 19 nt, Artificial Sequence
  Description of Artificial Sequence: Synthetic oligonucleotide
aaaguagccguaaggcgug

SEQ ID NO: 985208 - RNA, 19 nt, Artificial Sequence
  Description of Artificial Sequence: Synthetic oligonucleotide
aaaaccgaucuuuggcuuu

SEQ ID NO: 985209 - RNA, 19 nt, Artificial Sequence
  Description of Artificial Sequence: Synthetic oligonucleotide
uuguagcaugaucccaaag

SEQ ID NO: 985210 - RNA, 19 nt, Artificial Sequence
  Description of Artificial Sequence: Synthetic oligonucleotide
aaacagcuaccagaaacgu

SEQ ID NO: 985211 - RNA, 19 nt, Artificial Sequence
  Description of Artificial Sequence: Synthetic oligonucleotide
gaugcggaauugaugguug

SEQ ID NO: 985212 - RNA, 19 nt, Artificial Sequence
  Description of Artificial Sequence: Synthetic oligonucleotide
gacucuaauucuucuccac

SEQ ID NO: 985213 - RNA, 19 nt, Artificial Sequence
  Description of Artificial Sequence: Synthetic oligonucleotide
cuucugucauuguagcaug

SEQ ID NO: 985214 - RNA, 19 nt, Artificial Sequence
  Description of Artificial Sequence: Synthetic oligonucleotide
aucucacacagugaauggg

SEQ ID NO: 985215 - RNA, 19 nt, Artificial Sequence
  Description of Artificial Sequence: Synthetic oligonucleotide
gaaaucugcggcugcugug

SEQ ID NO: 985216 - RNA, 19 nt, Artificial Sequence
  Description of Artificial Sequence: Synthetic oligonucleotide
gagcucaccaucaggacug

SEQ ID NO: 985217 - RNA, 19 nt, Artificial Sequence
  Description of Artificial Sequence: Synthetic oligonucleotide
aagugaccuuuguaggacu

SEQ ID NO: 985218 - RNA, 19 nt, Artificial Sequence
  Description of Artificial Sequence: Synthetic oligonucleotide
agccguaaggcgugaugcc

SEQ ID NO: 985219 - RNA, 19 nt, Artificial Sequence
  Description of Artificial Sequence: Synthetic oligonucleotide
augcggaauugaugguugc

SEQ ID NO: 985220 - RNA, 19 nt, Artificial Sequence
  Description of Artificial Sequence: Synthetic oligonucleotide
auuguacguuggcauguuc

SEQ ID NO: 985221 - RNA, 19 nt, Artificial Sequence
  Description of Artificial Sequence: Synthetic oligonucleotide
uuaucauguauuuccucuu

SEQ ID NO: 985222 - RNA, 19 nt, Artificial Sequence
  Description of Artificial Sequence: Synthetic oligonucleotide
gcuaccagaaacguaagug

SEQ ID NO: 985223 - RNA, 19 nt, Artificial Sequence
  Description of Artificial Sequence: Synthetic oligonucleotide
agacuuacugcacuaugaa

SEQ ID NO: 985224 - RNA, 19 nt, Artificial Sequence
  Description of Artificial Sequence: Synthetic oligonucleotide
gaaaguagccguaaggcgu

SEQ ID NO: 985225 - RNA, 19 nt, Artificial Sequence
  Description of Artificial Sequence: Synthetic oligonucleotide
ugaucagaaaguagccgua

SEQ ID NO: 985226 - RNA, 19 nt, Artificial Sequence
  Description of Artificial Sequence: Synthetic oligonucleotide
ugggaauuguacguuggca

SEQ ID NO: 985227 - RNA, 19 nt, Artificial Sequence
  Description of Artificial Sequence: Synthetic oligonucleotide
uucucccucagggauauac

SEQ ID NO: 985228 - RNA, 19 nt, Artificial Sequence
  Description of Artificial Sequence: Synthetic oligonucleotide
uaagugugaaaugggaauu

SEQ ID NO: 985229 - RNA, 19 nt, Artificial Sequence
  Description of Artificial Sequence: Synthetic oligonucleotide
gaccacuaaucuccuuagg

SEQ ID NO: 985230 - RNA, 19 nt, Artificial Sequence
  Description of Artificial Sequence: Synthetic oligonucleotide
ucauuguagcaugauccca

SEQ ID NO: 985231 - RNA, 19 nt, Artificial Sequence
  Description of Artificial Sequence: Synthetic oligonucleotide
agucauauaugcgcagcag

SEQ ID NO: 985232 - RNA, 19 nt, Artificial Sequence
  Description of Artificial Sequence: Synthetic oligonucleotide
aaccgaguaguuguucgug

SEQ ID NO: 985233 - RNA, 19 nt, Artificial Sequence
  Description of Artificial Sequence: Synthetic oligonucleotide
caaucuggaaggaaguaaa

SEQ ID NO: 985234 - RNA, 19 nt, Artificial Sequence
  Description of Artificial Sequence: Synthetic oligonucleotide
gagcauagguuugccaucc

SEQ ID NO: 985235 - RNA, 19 nt, Artificial Sequence
  Description of Artificial Sequence: Synthetic oligonucleotide
uguucagcucagauccugu

SEQ ID NO: 985236 - RNA, 19 nt, Artificial Sequence
  Description of Artificial Sequence: Synthetic oligonucleotide
aaaccgaucuuuggcuuug

SEQ ID NO: 985237 - RNA, 19 nt, Artificial Sequence
  Description of Artificial Sequence: Synthetic oligonucleotide
ucccugucggagcauaggu

SEQ ID NO: 985238 - RNA, 19 nt, Artificial Sequence
  Description of Artificial Sequence: Synthetic oligonucleotide
uuccaguuuuaauacucaa

SEQ ID NO: 985239 - RNA, 19 nt, Artificial Sequence
  Description of Artificial Sequence: Synthetic oligonucleotide
cacgcauuuccaaaggcca

SEQ ID NO: 985240 - RNA, 19 nt, Artificial Sequence
  Description of Artificial Sequence: Synthetic oligonucleotide
uuguaggacucuaauucuu

SEQ ID NO: 985241 - RNA, 19 nt, Artificial Sequence
  Description of Artificial Sequence: Synthetic oligonucleotide
ucuaucaaucuggaaggaa

SEQ ID NO: 985242 - RNA, 19 nt, Artificial Sequence
  Description of Artificial Sequence: Synthetic oligonucleotide
cauuagcaaagcccucccg

SEQ ID NO: 985243 - RNA, 19 nt, Artificial Sequence
  Description of Artificial Sequence: Synthetic oligonucleotide
ggaauuguacguuggcaug

SEQ ID NO: 985244 - RNA, 19 nt, Artificial Sequence
  Description of Artificial Sequence: Synthetic oligonucleotide
cagacuuacugcacuauga

SEQ ID NO: 985245 - RNA, 19 nt, Artificial Sequence
  Description of Artificial Sequence: Synthetic oligonucleotide
agucuugacaaugugcuua

SEQ ID NO: 985246 - RNA, 19 nt, Artificial Sequence
  Description of Artificial Sequence: Synthetic oligonucleotide
gucaguguacaaugaaaga

SEQ ID NO: 985247 - RNA, 19 nt, Artificial Sequence
  Description of Artificial Sequence: Synthetic oligonucleotide
guaagugugaaaugggaau

SEQ ID NO: 985248 - RNA, 19 nt, Artificial Sequence
  Description of Artificial Sequence: Synthetic oligonucleotide
gacgaacagucuuaucauc

SEQ ID NO: 985249 - RNA, 19 nt, Artificial Sequence
  Description of Artificial Sequence: Synthetic oligonucleotide
acgaacagucuuaucauca

SEQ ID NO: 985250 - RNA, 19 nt, Artificial Sequence
  Description of Artificial Sequence: Synthetic oligonucleotide
ugaaucucacacagugaau

SEQ ID NO: 985251 - RNA, 19 nt, Artificial Sequence
  Description of Artificial Sequence: Synthetic oligonucleotide
auaugcgcagcaguuuauc

SEQ ID NO: 985252 - RNA, 19 nt, Artificial Sequence
  Description of Artificial Sequence: Synthetic oligonucleotide
uaggacucuaauucuucuc

SEQ ID NO: 985253 - RNA, 19 nt, Artificial Sequence
  Description of Artificial Sequence: Synthetic oligonucleotide
auacucaaauguaucagaa

SEQ ID NO: 985254 - RNA, 19 nt, Artificial Sequence
  Description of Artificial Sequence: Synthetic oligonucleotide
cauuguagcaugaucccaa

SEQ ID NO: 985255 - RNA, 19 nt, Artificial Sequence
  Description of Artificial Sequence: Synthetic oligonucleotide
aguguacaaugaaagagau

SEQ ID NO: 985256 - RNA, 19 nt, Artificial Sequence
  Description of Artificial Sequence: Synthetic oligonucleotide
aucauacuuauagaguuua

SEQ ID NO: 985257 - RNA, 19 nt, Artificial Sequence
  Description of Artificial Sequence: Synthetic oligonucleotide
aaucauacuuauagaguuu

SEQ ID NO: 985258 - RNA, 19 nt, Artificial Sequence
  Description of Artificial Sequence: Synthetic oligonucleotide
uuugccacauggagagagu

SEQ ID NO: 985259 - RNA, 19 nt, Artificial Sequence
  Description of Artificial Sequence: Synthetic oligonucleotide
uucugucauuguagcauga

SEQ ID NO: 985260 - RNA, 19 nt, Artificial Sequence
  Description of Artificial Sequence: Synthetic oligonucleotide
uauaugcgcagcaguuuau

SEQ ID NO: 985261 - RNA, 19 nt, Artificial Sequence
  Description of Artificial Sequence: Synthetic oligonucleotide
guaacucugaaggcgcuug

SEQ ID NO: 985262 - RNA, 19 nt, Artificial Sequence
  Description of Artificial Sequence: Synthetic oligonucleotide
gacuuacugcacuaugaaa

SEQ ID NO: 985263 - RNA, 19 nt, Artificial Sequence
  Description of Artificial Sequence: Synthetic oligonucleotide
cacucauuagcaaagcccu

SEQ ID NO: 985264 - RNA, 19 nt, Artificial Sequence
  Description of Artificial Sequence: Synthetic oligonucleotide
cagcucagauccuguaacc

SEQ ID NO: 985265 - RNA, 19 nt, Artificial Sequence
  Description of Artificial Sequence: Synthetic oligonucleotide
caacguugcaccccaaaca

SEQ ID NO: 985266 - RNA, 19 nt, Artificial Sequence
  Description of Artificial Sequence: Synthetic oligonucleotide
acuaaucuccuuagguucu

SEQ ID NO: 985267 - RNA, 19 nt, Artificial Sequence
  Description of Artificial Sequence: Synthetic oligonucleotide
cauggaaucugaauucucu

SEQ ID NO: 985268 - RNA, 19 nt, Artificial Sequence
  Description of Artificial Sequence: Synthetic oligonucleotide
cuaccagaaacguaagugu

SEQ ID NO: 985269 - RNA, 19 nt, Artificial Sequence
  Description of Artificial Sequence: Synthetic oligonucleotide
caauccagucuccuguauc

SEQ ID NO: 985270 - RNA, 19 nt, Artificial Sequence
  Description of Artificial Sequence: Synthetic oligonucleotide
cugaucagaaaguagccgu

SEQ ID NO: 985271 - RNA, 19 nt, Artificial Sequence
  Description of Artificial Sequence: Synthetic oligonucleotide
gugaccacuaaucuccuua

SEQ ID NO: 985272 - RNA, 19 nt, Artificial Sequence
  Description of Artificial Sequence: Synthetic oligonucleotide
auaaacuauaugguuucua

SEQ ID NO: 985273 - RNA, 19 nt, Artificial Sequence
  Description of Artificial Sequence: Synthetic oligonucleotide
agugaccuuuguaggacuc

SEQ ID NO: 985274 - RNA, 19 nt, Artificial Sequence
  Description of Artificial Sequence: Synthetic oligonucleotide
aaccgaucuuuggcuuugc

SEQ ID NO: 985275 - RNA, 19 nt, Artificial Sequence
  Description of Artificial Sequence: Synthetic oligonucleotide
aaucuggaaggaaguaaau

SEQ ID NO: 985276 - RNA, 19 nt, Artificial Sequence
  Description of Artificial Sequence: Synthetic oligonucleotide
ugaaggcgcuuguuuaguc

SEQ ID NO: 985277 - RNA, 19 nt, Artificial Sequence
  Description of Artificial Sequence: Synthetic oligonucleotide
guuaacagguaguugcuau

SEQ ID NO: 985278 - RNA, 19 nt, Artificial Sequence
  Description of Artificial Sequence: Synthetic oligonucleotide
uucuaucaaucuggaagga

SEQ ID NO: 985279 - RNA, 19 nt, Artificial Sequence
  Description of Artificial Sequence: Synthetic oligonucleotide
agcuaccagaaacguaagu

SEQ ID NO: 985280 - RNA, 19 nt, Artificial Sequence
  Description of Artificial Sequence: Synthetic oligonucleotide
uaacucugaaggcgcuugu

SEQ ID NO: 985281 - RNA, 19 nt, Artificial Sequence
  Description of Artificial Sequence: Synthetic oligonucleotide
caguuugccacaaucucaa

SEQ ID NO: 985282 - RNA, 19 nt, Artificial Sequence
  Description of Artificial Sequence: Synthetic oligonucleotide
aguuguucgugcacuggag

SEQ ID NO: 985283 - RNA, 19 nt, Artificial Sequence
  Description of Artificial Sequence: Synthetic oligonucleotide
auaguccgcccguaaguga

SEQ ID NO: 985284 - RNA, 19 nt, Artificial Sequence
  Description of Artificial Sequence: Synthetic oligonucleotide
cugaugcucaggcuuuaac

SEQ ID NO: 985285 - RNA, 19 nt, Artificial Sequence
  Description of Artificial Sequence: Synthetic oligonucleotide
gcauccuuauucaacguug

SEQ ID NO: 985286 - RNA, 19 nt, Artificial Sequence
  Description of Artificial Sequence: Synthetic oligonucleotide
acguaagugugaaauggga

SEQ ID NO: 985287 - RNA, 19 nt, Artificial Sequence
  Description of Artificial Sequence: Synthetic oligonucleotide
gcaauaguccgcccguaag

SEQ ID NO: 985288 - RNA, 19 nt, Artificial Sequence
  Description of Artificial Sequence: Synthetic oligonucleotide
gucauauaugcgcagcagu

SEQ ID NO: 985289 - RNA, 19 nt, Artificial Sequence
  Description of Artificial Sequence: Synthetic oligonucleotide
gcacuaugaaaagcaauag

SEQ ID NO: 985290 - RNA, 19 nt, Artificial Sequence
  Description of Artificial Sequence: Synthetic oligonucleotide
gcgcugaucagaaaguagc

SEQ ID NO: 985291 - RNA, 19 nt, Artificial Sequence
  Description of Artificial Sequence: Synthetic oligonucleotide
ucggagcauagguuugcca

SEQ ID NO: 985292 - RNA, 19 nt, Artificial Sequence
  Description of Artificial Sequence: Synthetic oligonucleotide
agcgcugaucagaaaguag

SEQ ID NO: 985293 - RNA, 19 nt, Artificial Sequence
  Description of Artificial Sequence: Synthetic oligonucleotide
ugcggaauugaugguugca

SEQ ID NO: 985294 - RNA, 19 nt, Artificial Sequence
  Description of Artificial Sequence: Synthetic oligonucleotide
cacuguuauaaucauacuu

SEQ ID NO: 985295 - RNA, 19 nt, Artificial Sequence
  Description of Artificial Sequence: Synthetic oligonucleotide
uaugagccaaggucaucaa

SEQ ID NO: 985296 - RNA, 19 nt, Artificial Sequence
  Description of Artificial Sequence: Synthetic oligonucleotide
auacuccccaauguuuucu

SEQ ID NO: 985297 - RNA, 19 nt, Artificial Sequence
  Description of Artificial Sequence: Synthetic oligonucleotide
ggaaaaccgaucuuuggcu

SEQ ID NO: 985298 - RNA, 19 nt, Artificial Sequence
  Description of Artificial Sequence: Synthetic oligonucleotide
uguucgugcacuggagcaa

SEQ ID NO: 985299 - RNA, 19 nt, Artificial Sequence
  Description of Artificial Sequence: Synthetic oligonucleotide
aauuguacguuggcauguu

SEQ ID NO: 985300 - RNA, 19 nt, Artificial Sequence
  Description of Artificial Sequence: Synthetic oligonucleotide
gaauuguacguuggcaugu

SEQ ID NO: 985301 - RNA, 19 nt, Artificial Sequence
  Description of Artificial Sequence: Synthetic oligonucleotide
gaagcagucaguguacaau

SEQ ID NO: 985302 - RNA, 19 nt, Artificial Sequence
  Description of Artificial Sequence: Synthetic oligonucleotide
ugaugccggaagugugacc

SEQ ID NO: 985303 - RNA, 19 nt, Artificial Sequence
  Description of Artificial Sequence: Synthetic oligonucleotide
accacgggccgcguguggc

SEQ ID NO: 985304 - RNA, 19 nt, Artificial Sequence
  Description of Artificial Sequence: Synthetic oligonucleotide
uugaugccggaagugugac

SEQ ID NO: 985305 - RNA, 19 nt, Artificial Sequence
  Description of Artificial Sequence: Synthetic oligonucleotide
agcaauaguccgcccguaa

SEQ ID NO: 985306 - RNA, 19 nt, Artificial Sequence
  Description of Artificial Sequence: Synthetic oligonucleotide
aggaagcacgcauuuccaa

SEQ ID NO: 985307 - RNA, 19 nt, Artificial Sequence
  Description of Artificial Sequence: Synthetic oligonucleotide
acucauuagcaaagcccuc

SEQ ID NO: 985308 - RNA, 19 nt, Artificial Sequence
  Description of Artificial Sequence: Synthetic oligonucleotide
aacagcuaccagaaacgua

SEQ ID NO: 985309 - RNA, 19 nt, Artificial Sequence
  Description of Artificial Sequence: Synthetic oligonucleotide
cacuaugaaaagcaauagu

SEQ ID NO: 985310 - RNA, 19 nt, Artificial Sequence
  Description of Artificial Sequence: Synthetic oligonucleotide
cugucggagcauagguuug

SEQ ID NO: 985311 - RNA, 19 nt, Artificial Sequence
  Description of Artificial Sequence: Synthetic oligonucleotide
gggcguggcacucauuagc

SEQ ID NO: 985312 - RNA, 19 nt, Artificial Sequence
  Description of Artificial Sequence: Synthetic oligonucleotide
gaaaaccgaucuuuggcuu

SEQ ID NO: 985313 - RNA, 19 nt, Artificial Sequence
  Description of Artificial Sequence: Synthetic oligonucleotide
agggcguggcacucauuag

SEQ ID NO: 985314 - RNA, 19 nt, Artificial Sequence
  Description of Artificial Sequence: Synthetic oligonucleotide
ccgcccguaagugagaacc

SEQ ID NO: 985315 - RNA, 19 nt, Artificial Sequence
  Description of Artificial Sequence: Synthetic oligonucleotide
uugcuacacacugcugugu

SEQ ID NO: 985316 - RNA, 19 nt, Artificial Sequence
  Description of Artificial Sequence: Synthetic oligonucleotide
augccggaagugugaccac

SEQ ID NO: 985317 - RNA, 19 nt, Artificial Sequence
  Description of Artificial Sequence: Synthetic oligonucleotide
ucacuacaccacagagccu

SEQ ID NO: 985318 - RNA, 19 nt, Artificial Sequence
  Description of Artificial Sequence: Synthetic oligonucleotide
cagcuaccagaaacguaag

SEQ ID NO: 985319 - RNA, 19 nt, Artificial Sequence
  Description of Artificial Sequence: Synthetic oligonucleotide
cuaaucuccuuagguucug

SEQ ID NO: 985320 - RNA, 19 nt, Artificial Sequence
  Description of Artificial Sequence: Synthetic oligonucleotide
ugccgcugaaggccaaauc

SEQ ID NO: 985321 - RNA, 19 nt, Artificial Sequence
  Description of Artificial Sequence: Synthetic oligonucleotide
gcacgcauuuccaaaggcc

SEQ ID NO: 985322 - RNA, 19 nt, Artificial Sequence
  Description of Artificial Sequence: Synthetic oligonucleotide
acugcacuaugaaaagcaa

SEQ ID NO: 985323 - RNA, 19 nt, Artificial Sequence
  Description of Artificial Sequence: Synthetic oligonucleotide
agaauacauggaaucugaa

SEQ ID NO: 985324 - RNA, 19 nt, Artificial Sequence
  Description of Artificial Sequence: Synthetic oligonucleotide
gaguaguuguucgugcacu

SEQ ID NO: 985325 - RNA, 19 nt, Artificial Sequence
  Description of Artificial Sequence: Synthetic oligonucleotide
agcagucaguguacaauga

SEQ ID NO: 985326 - RNA, 19 nt, Artificial Sequence
  Description of Artificial Sequence: Synthetic oligonucleotide
acguuggcauguucacuga

SEQ ID NO: 985327 - RNA, 19 nt, Artificial Sequence
  Description of Artificial Sequence: Synthetic oligonucleotide
caauucuaucaaucuggaa

SEQ ID NO: 985328 - RNA, 19 nt, Artificial Sequence
  Description of Artificial Sequence: Synthetic oligonucleotide
gguuuguucaagucauaua

SEQ ID NO: 985329 - RNA, 19 nt, Artificial Sequence
  Description of Artificial Sequence: Synthetic oligonucleotide
gggaauuguacguuggcau

SEQ ID NO: 985330 - RNA, 19 nt, Artificial Sequence
  Description of Artificial Sequence: Synthetic oligonucleotide
caauaguccgcccguaagu

SEQ ID NO: 985331 - RNA, 19 nt, Artificial Sequence
  Description of Artificial Sequence: Synthetic oligonucleotide
ugccggaagugugaccacu

SEQ ID NO: 985332 - RNA, 19 nt, Artificial Sequence
  Description of Artificial Sequence: Synthetic oligonucleotide
gauauacuccaugcugcua

SEQ ID NO: 985333 - RNA, 19 nt, Artificial Sequence
  Description of Artificial Sequence: Synthetic oligonucleotide
cagggcguggcacucauua

SEQ ID NO: 985334 - RNA, 19 nt, Artificial Sequence
  Description of Artificial Sequence: Synthetic oligonucleotide
acguuccaauccagucucc

SEQ ID NO: 985335 - RNA, 19 nt, Artificial Sequence
  Description of Artificial Sequence: Synthetic oligonucleotide
ccagacuuacugcacuaug

SEQ ID NO: 985336 - RNA, 19 nt, Artificial Sequence
  Description of Artificial Sequence: Synthetic oligonucleotide
ccguaagugagaaccagga

SEQ ID NO: 985337 - RNA, 19 nt, Artificial Sequence
  Description of Artificial Sequence: Synthetic oligonucleotide
auacuccaugcugcuaaca

SEQ ID NO: 985338 - RNA, 19 nt, Artificial Sequence
  Description of Artificial Sequence: Synthetic oligonucleotide
aaggcgugaugccgcugaa

SEQ ID NO: 985339 - RNA, 19 nt, Artificial Sequence
  Description of Artificial Sequence: Synthetic oligonucleotide
caagcgcugaucagaaagu

SEQ ID NO: 985340 - RNA, 19 nt, Artificial Sequence
  Description of Artificial Sequence: Synthetic oligonucleotide
cguugcaccccaaacagca

SEQ ID NO: 985341 - RNA, 19 nt, Artificial Sequence
  Description of Artificial Sequence: Synthetic oligonucleotide
agcauagguuugccauccu

SEQ ID NO: 985342 - RNA, 19 nt, Artificial Sequence
  Description of Artificial Sequence: Synthetic oligonucleotide
ugugaccacuaaucuccuu

SEQ ID NO: 985343 - RNA, 19 nt, Artificial Sequence
  Description of Artificial Sequence: Synthetic oligonucleotide
gcaauucuaucaaucugga

SEQ ID NO: 985344 - RNA, 19 nt, Artificial Sequence
  Description of Artificial Sequence: Synthetic oligonucleotide
gaaagagaucaaaccaguu

SEQ ID NO: 985345 - RNA, 19 nt, Artificial Sequence
  Description of Artificial Sequence: Synthetic oligonucleotide
gucggagcauagguuugcc

SEQ ID NO: 985346 - RNA, 19 nt, Artificial Sequence
  Description of Artificial Sequence: Synthetic oligonucleotide
agcaccuuuaugacccaaa

SEQ ID NO: 985347 - RNA, 19 nt, Artificial Sequence
  Description of Artificial Sequence: Synthetic oligonucleotide
cgugcacuggagcaaauuc

SEQ ID NO: 985348 - RNA, 19 nt, Artificial Sequence
  Description of Artificial Sequence: Synthetic oligonucleotide
gguaguugcuauccugugu

SEQ ID NO: 985349 - RNA, 19 nt, Artificial Sequence
  Description of Artificial Sequence: Synthetic oligonucleotide
uucgugcacuggagcaaau

SEQ ID NO: 985350 - RNA, 19 nt, Artificial Sequence
  Description of Artificial Sequence: Synthetic oligonucleotide
aagcaauaguccgcccgua

SEQ ID NO: 985351 - RNA, 19 nt, Artificial Sequence
  Description of Artificial Sequence: Synthetic oligonucleotide
gcaccuuuaugacccaaaa

SEQ ID NO: 985352 - RNA, 19 nt, Artificial Sequence
  Description of Artificial Sequence: Synthetic oligonucleotide
gggaccaaagugaccuuug

SEQ ID NO: 985353 - RNA, 19 nt, Artificial Sequence
  Description of Artificial Sequence: Synthetic oligonucleotide
aaguagccguaaggcguga

SEQ ID NO: 985354 - RNA, 19 nt, Artificial Sequence
  Description of Artificial Sequence: Synthetic oligonucleotide
ucgugcacuggagcaaauu

SEQ ID NO: 985355 - RNA, 19 nt, Artificial Sequence
  Description of Artificial Sequence: Synthetic oligonucleotide
gugagcggcgucugccuca

SEQ ID NO: 985356 - RNA, 19 nt, Artificial Sequence
  Description of Artificial Sequence: Synthetic oligonucleotide
ugcugcuaacagacauguu

SEQ ID NO: 985357 - RNA, 19 nt, Artificial Sequence
  Description of Artificial Sequence: Synthetic oligonucleotide
cacuacaccacagagccuu

SEQ ID NO: 985358 - RNA, 19 nt, Artificial Sequence
  Description of Artificial Sequence: Synthetic oligonucleotide
cguaagugugaaaugggaa

SEQ ID NO: 985359 - RNA, 19 nt, Artificial Sequence
  Description of Artificial Sequence: Synthetic oligonucleotide
cuccacuguuauaaucaua

SEQ ID NO: 985360 - RNA, 19 nt, Artificial Sequence
  Description of Artificial Sequence: Synthetic oligonucleotide
guucgugcacuggagcaaa

SEQ ID NO: 985361 - RNA, 19 nt, Artificial Sequence
  Description of Artificial Sequence: Synthetic oligonucleotide
cuccagacuuacugcacua

SEQ ID NO: 985362 - RNA, 19 nt, Artificial Sequence
  Description of Artificial Sequence: Synthetic oligonucleotide
uccgcccguaagugagaac

SEQ ID NO: 985363 - RNA, 19 nt, Artificial Sequence
  Description of Artificial Sequence: Synthetic oligonucleotide
acgcauuuccaaaggccau

SEQ ID NO: 985364 - RNA, 19 nt, Artificial Sequence
  Description of Artificial Sequence: Synthetic oligonucleotide
cagaaacguaagugugaaa

SEQ ID NO: 985365 - RNA, 19 nt, Artificial Sequence
  Description of Artificial Sequence: Synthetic oligonucleotide
acgggccgcguguggcccg

SEQ ID NO: 985366 - RNA, 19 nt, Artificial Sequence
  Description of Artificial Sequence: Synthetic oligonucleotide
guaaggcgugaugccgcug

SEQ ID NO: 985367 - RNA, 19 nt, Artificial Sequence
  Description of Artificial Sequence: Synthetic oligonucleotide
cccaaacagcaccuuuaug

SEQ ID NO: 985368 - RNA, 19 nt, Artificial Sequence
  Description of Artificial Sequence: Synthetic oligonucleotide
ccagaaacguaagugugaa

SEQ ID NO: 985369 - RNA, 19 nt, Artificial Sequence
  Description of Artificial Sequence: Synthetic oligonucleotide
cauauaugcgcagcaguuu

SEQ ID NO: 985370 - RNA, 19 nt, Artificial Sequence
  Description of Artificial Sequence: Synthetic oligonucleotide
aauccaccacgggccgcgu

SEQ ID NO: 985371 - RNA, 19 nt, Artificial Sequence
  Description of Artificial Sequence: Synthetic oligonucleotide
caccacgggccgcgugugg

SEQ ID NO: 985372 - RNA, 19 nt, Artificial Sequence
  Description of Artificial Sequence: Synthetic oligonucleotide
cgaguaguuguucgugcac

SEQ ID NO: 985373 - RNA, 19 nt, Artificial Sequence
  Description of Artificial Sequence: Synthetic oligonucleotide
aguagccguaaggcgugau

SEQ ID NO: 985374 - RNA, 19 nt, Artificial Sequence
  Description of Artificial Sequence: Synthetic oligonucleotide
ccgaguaguuguucgugca

SEQ ID NO: 985375 - RNA, 19 nt, Artificial Sequence
  Description of Artificial Sequence: Synthetic oligonucleotide
gcggcgucugccucauggc

SEQ ID NO: 985376 - RNA, 19 nt, Artificial Sequence
  Description of Artificial Sequence: Synthetic oligonucleotide
aucucccugucggagcaua

SEQ ID NO: 985377 - RNA, 19 nt, Artificial Sequence
  Description of Artificial Sequence: Synthetic oligonucleotide
gguuaacagguaguugcua

SEQ ID NO: 985378 - RNA, 19 nt, Artificial Sequence
  Description of Artificial Sequence: Synthetic oligonucleotide
cugucacuugcuacacacu

SEQ ID NO: 985379 - RNA, 19 nt, Artificial Sequence
  Description of Artificial Sequence: Synthetic oligonucleotide
ggugagcggcgucugccuc

SEQ ID NO: 985380 - RNA, 19 nt, Artificial Sequence
  Description of Artificial Sequence: Synthetic oligonucleotide
ggcauccuuauucaacguu

SEQ ID NO: 985381 - RNA, 19 nt, Artificial Sequence
  Description of Artificial Sequence: Synthetic oligonucleotide
gcccgagcaggugagcggc

SEQ ID NO: 985382 - RNA, 19 nt, Artificial Sequence
  Description of Artificial Sequence: Synthetic oligonucleotide
gugaccuuuguaggacucu

SEQ ID NO: 985383 - RNA, 19 nt, Artificial Sequence
  Description of Artificial Sequence: Synthetic oligonucleotide
gcgcuuguuuaguccauaa

SEQ ID NO: 985384 - RNA, 19 nt, Artificial Sequence
  Description of Artificial Sequence: Synthetic oligonucleotide
gccgcguguggcccgagca

SEQ ID NO: 985385 - RNA, 19 nt, Artificial Sequence
  Description of Artificial Sequence: Synthetic oligonucleotide
cccgguuaacagguaguug

SEQ ID NO: 985386 - RNA, 19 nt, Artificial Sequence
  Description of Artificial Sequence: Synthetic oligonucleotide
ggguacuuccaguuuuaau

SEQ ID NO: 985387 - RNA, 19 nt, Artificial Sequence
  Description of Artificial Sequence: Synthetic oligonucleotide
uaucucccugucggagcau

SEQ ID NO: 985388 - RNA, 19 nt, Artificial Sequence
  Description of Artificial Sequence: Synthetic oligonucleotide
aguccgcccguaagugaga

SEQ ID NO: 985389 - RNA, 19 nt, Artificial Sequence
  Description of Artificial Sequence: Synthetic oligonucleotide
cugaaggcgcuuguuuagu

SEQ ID NO: 985390 - RNA, 19 nt, Artificial Sequence
  Description of Artificial Sequence: Synthetic oligonucleotide
acuacaccacagagccuuu

SEQ ID NO: 985391 - RNA, 19 nt, Artificial Sequence
  Description of Artificial Sequence: Synthetic oligonucleotide
ccgcguguggcccgagcag

SEQ ID NO: 985392 - RNA, 19 nt, Artificial Sequence
  Description of Artificial Sequence: Synthetic oligonucleotide
gcauagguuugccauccuu

SEQ ID NO: 985393 - RNA, 19 nt, Artificial Sequence
  Description of Artificial Sequence: Synthetic oligonucleotide
auucaacguugcaccccaa

SEQ ID NO: 985394 - RNA, 19 nt, Artificial Sequence
  Description of Artificial Sequence: Synthetic oligonucleotide
guggcccgagcaggugagc

SEQ ID NO: 985395 - RNA, 19 nt, Artificial Sequence
  Description of Artificial Sequence: Synthetic oligonucleotide
gcaugaucccaaagacgaa

SEQ ID NO: 985396 - RNA, 19 nt, Artificial Sequence
  Description of Artificial Sequence: Synthetic oligonucleotide
ccacuguuauaaucauacu

SEQ ID NO: 985397 - RNA, 19 nt, Artificial Sequence
  Description of Artificial Sequence: Synthetic oligonucleotide
ggccgcguguggcccgagc

SEQ ID NO: 985398 - RNA, 19 nt, Artificial Sequence
  Description of Artificial Sequence: Synthetic oligonucleotide
ggcgcuuguuuaguccaua

SEQ ID NO: 985399 - RNA, 19 nt, Artificial Sequence
  Description of Artificial Sequence: Synthetic oligonucleotide
cucccgccugcaccucaca

SEQ ID NO: 985400 - RNA, 19 nt, Artificial Sequence
  Description of Artificial Sequence: Synthetic oligonucleotide
cgguuaacagguaguugcu

SEQ ID NO: 985401 - RNA, 19 nt, Artificial Sequence
  Description of Artificial Sequence: Synthetic oligonucleotide
cgcccguaagugagaacca

SEQ ID NO: 985402 - RNA, 19 nt, Artificial Sequence
  Description of Artificial Sequence: Synthetic oligonucleotide
cuacaccacagagccuuuu

SEQ ID NO: 985403 - RNA, 19 nt, Artificial Sequence
  Description of Artificial Sequence: Synthetic oligonucleotide
ccaccacgggccgcgugug

SEQ ID NO: 985404 - RNA, 19 nt, Artificial Sequence
  Description of Artificial Sequence: Synthetic oligonucleotide
cggaagugugaccacuaau

SEQ ID NO: 985405 - RNA, 19 nt, Artificial Sequence
  Description of Artificial Sequence: Synthetic oligonucleotide
cguaaggcgugaugccgcu

SEQ ID NO: 985406 - RNA, 19 nt, Artificial Sequence
  Description of Artificial Sequence: Synthetic oligonucleotide
ccccgguuaacagguaguu

SEQ ID NO: 985407 - RNA, 19 nt, Artificial Sequence
  Description of Artificial Sequence: Synthetic oligonucleotide
cuucucccucagggauaua

SEQ ID NO: 985408 - RNA, 19 nt, Artificial Sequence
  Description of Artificial Sequence: Synthetic oligonucleotide
ccgagcaggugagcggcgu

SEQ ID NO: 985409 - RNA, 19 nt, Artificial Sequence
  Description of Artificial Sequence: Synthetic oligonucleotide
aauuaaauggugcaaugcc

SEQ ID NO: 985410 - RNA, 19 nt, Artificial Sequence
  Description of Artificial Sequence: Synthetic oligonucleotide
uuuagaagaaaccugcagg

SEQ ID NO: 985411 - RNA, 19 nt, Artificial Sequence
  Description of Artificial Sequence: Synthetic oligonucleotide
aaagauauacucuccugcc

SEQ ID NO: 985412 - RNA, 19 nt, Artificial Sequence
  Description of Artificial Sequence: Synthetic oligonucleotide
uccaaugugauuaacuugg

SEQ ID NO: 985413 - RNA, 19 nt, Artificial Sequence
  Description of Artificial Sequence: Synthetic oligonucleotide
aaacugauugcuuugaugu

SEQ ID NO: 985414 - RNA, 19 nt, Artificial Sequence
  Description of Artificial Sequence: Synthetic oligonucleotide
auaucaauccaucugucgc

SEQ ID NO: 985415 - RNA, 19 nt, Artificial Sequence
  Description of Artificial Sequence: Synthetic oligonucleotide
aaauuaaauggugcaaugc

SEQ ID NO: 985416 - RNA, 19 nt, Artificial Sequence
  Description of Artificial Sequence: Synthetic oligonucleotide
ugucuuuggugauagaugg

SEQ ID NO: 985417 - RNA, 19 nt, Artificial Sequence
  Description of Artificial Sequence: Synthetic oligonucleotide
ugaagaguuuuacaguugg

SEQ ID NO: 985418 - RNA, 19 nt, Artificial Sequence
  Description of Artificial Sequence: Synthetic oligonucleotide
uuuucgcccauccaaaagg

SEQ ID NO: 985419 - RNA, 19 nt, Artificial Sequence
  Description of Artificial Sequence: Synthetic oligonucleotide
uuagcaaggagcauaguug

SEQ ID NO: 985420 - RNA, 19 nt, Artificial Sequence
  Description of Artificial Sequence: Synthetic oligonucleotide
uacuuuagaagaaaccugc

SEQ ID NO: 985421 - RNA, 19 nt, Artificial Sequence
  Description of Artificial Sequence: Synthetic oligonucleotide
uuuagcuucuccgacaagg

SEQ ID NO: 985422 - RNA, 19 nt, Artificial Sequence
  Description of Artificial Sequence: Synthetic oligonucleotide
ucuauuaauuugaaggaac

SEQ ID NO: 985423 - RNA, 19 nt, Artificial Sequence
  Description of Artificial Sequence: Synthetic oligonucleotide
agugagaguauuuccgugc

SEQ ID NO: 985424 - RNA, 19 nt, Artificial Sequence
  Description of Artificial Sequence: Synthetic oligonucleotide
gauagucuuaagcugagug

SEQ ID NO: 985425 - RNA, 19 nt, Artificial Sequence
  Description of Artificial Sequence: Synthetic oligonucleotide
uucuuuaauaaguuguuga

SEQ ID NO: 985426 - RNA, 19 nt, Artificial Sequence
  Description of Artificial Sequence: Synthetic oligonucleotide
aaaauggaugugucugccc

SEQ ID NO: 985427 - RNA, 19 nt, Artificial Sequence
  Description of Artificial Sequence: Synthetic oligonucleotide
aaaacugauugcuuugaug

SEQ ID NO: 985428 - RNA, 19 nt, Artificial Sequence
  Description of Artificial Sequence: Synthetic oligonucleotide
ugugauagucuuaagcuga

SEQ ID NO: 985429 - RNA, 19 nt, Artificial Sequence
  Description of Artificial Sequence: Synthetic oligonucleotide
gauaucaauccaucugucg

SEQ ID NO: 985430 - RNA, 19 nt, Artificial Sequence
  Description of Artificial Sequence: Synthetic oligonucleotide
uuuguaacaggucauacuu

SEQ ID NO: 985431 - RNA, 19 nt, Artificial Sequence
  Description of Artificial Sequence: Synthetic oligonucleotide
uuaaauggugcaaugccug

SEQ ID NO: 985432 - RNA, 19 nt, Artificial Sequence
  Description of Artificial Sequence: Synthetic oligonucleotide
uuagaagaaaccugcagga

SEQ ID NO: 985433 - RNA, 19 nt, Artificial Sequence
  Description of Artificial Sequence: Synthetic oligonucleotide
aauaaguuguugauagcgg

SEQ ID NO: 985434 - RNA, 19 nt, Artificial Sequence
  Description of Artificial Sequence: Synthetic oligonucleotide
ucucuauuaauuugaagga

SEQ ID NO: 985435 - RNA, 19 nt, Artificial Sequence
  Description of Artificial Sequence: Synthetic oligonucleotide
auagaaauuggugucuccc

SEQ ID NO: 985436 - RNA, 19 nt, Artificial Sequence
  Description of Artificial Sequence: Synthetic oligonucleotide
agagaaagcacguuugcag

SEQ ID NO: 985437 - RNA, 19 nt, Artificial Sequence
  Description of Artificial Sequence: Synthetic oligonucleotide
aaccacaagaacuggacca

SEQ ID NO: 985438 - RNA, 19 nt, Artificial Sequence
  Description of Artificial Sequence: Synthetic oligonucleotide
aaguuguugauagcggagc

SEQ ID NO: 985439 - RNA, 19 nt, Artificial Sequence
  Description of Artificial Sequence: Synthetic oligonucleotide
uggauaucaauccaucugu

SEQ ID NO: 985440 - RNA, 19 nt, Artificial Sequence
  Description of Artificial Sequence: Synthetic oligonucleotide
ucccauauuggcuugaacu

SEQ ID NO: 985441 - RNA, 19 nt, Artificial Sequence
  Description of Artificial Sequence: Synthetic oligonucleotide
aacuauagccaugggaaac

SEQ ID NO: 985442 - RNA, 19 nt, Artificial Sequence
  Description of Artificial Sequence: Synthetic oligonucleotide
gagcccacaaaacugauug

SEQ ID NO: 985443 - RNA, 19 nt, Artificial Sequence
  Description of Artificial Sequence: Synthetic oligonucleotide
acguaugaagagcaagugc

SEQ ID NO: 985444 - RNA, 19 nt, Artificial Sequence
  Description of Artificial Sequence: Synthetic oligonucleotide
uuuacaaucuugauggcuu

SEQ ID NO: 985445 - RNA, 19 nt, Artificial Sequence
  Description of Artificial Sequence: Synthetic oligonucleotide
aaauucacagcuucaugcu

SEQ ID NO: 985446 - RNA, 19 nt, Artificial Sequence
  Description of Artificial Sequence: Synthetic oligonucleotide
uuaagcugaguguaaaacu

SEQ ID NO: 985447 - RNA, 19 nt, Artificial Sequence
  Description of Artificial Sequence: Synthetic oligonucleotide
agcauuaguguuucccugc

SEQ ID NO: 985448 - RNA, 19 nt, Artificial Sequence
  Description of Artificial Sequence: Synthetic oligonucleotide
gagaaagcacguuugcagg

SEQ ID NO: 985449 - RNA, 19 nt, Artificial Sequence
  Description of Artificial Sequence: Synthetic oligonucleotide
aaagaugacaagugagggu

SEQ ID NO: 985450 - RNA, 19 nt, Artificial Sequence
  Description of Artificial Sequence: Synthetic oligonucleotide
agaaagcacguuugcaggc

SEQ ID NO: 985451 - RNA, 19 nt, Artificial Sequence
  Description of Artificial Sequence: Synthetic oligonucleotide
uuuagcaaggagcauaguu

SEQ ID NO: 985452 - RNA, 19 nt, Artificial Sequence
  Description of Artificial Sequence: Synthetic oligonucleotide
agaacaugggcaaaggcac

SEQ ID NO: 985453 - RNA, 19 nt, Artificial Sequence
  Description of Artificial Sequence: Synthetic oligonucleotide
gaugugauagucuuaagcu

SEQ ID NO: 985454 - RNA, 19 nt, Artificial Sequence
  Description of Artificial Sequence: Synthetic oligonucleotide
ucuaucagacugcagacuc

SEQ ID NO: 985455 - RNA, 19 nt, Artificial Sequence
  Description of Artificial Sequence: Synthetic oligonucleotide
aauuuagcaaggagcauag

SEQ ID NO: 985456 - RNA, 19 nt, Artificial Sequence
  Description of Artificial Sequence: Synthetic oligonucleotide
uaguaaagauggcaguucc

SEQ ID NO: 985457 - RNA, 19 nt, Artificial Sequence
  Description of Artificial Sequence: Synthetic oligonucleotide
uaaguuguugauagcggag

SEQ ID NO: 985458 - RNA, 19 nt, Artificial Sequence
  Description of Artificial Sequence: Synthetic oligonucleotide
ucugaugguuucauuagga

SEQ ID NO: 985459 - RNA, 19 nt, Artificial Sequence
  Description of Artificial Sequence: Synthetic oligonucleotide
cagacgguaggaauaaagg

SEQ ID NO: 985460 - RNA, 19 nt, Artificial Sequence
  Description of Artificial Sequence: Synthetic oligonucleotide
uguuccuaacgccccaugg

SEQ ID NO: 985461 - RNA, 19 nt, Artificial Sequence
  Description of Artificial Sequence: Synthetic oligonucleotide
cuaucuaucagacugcaga

SEQ ID NO: 985462 - RNA, 19 nt, Artificial Sequence
  Description of Artificial Sequence: Synthetic oligonucleotide
ucuuuaauaaguuguugau

SEQ ID NO: 985463 - RNA, 19 nt, Artificial Sequence
  Description of Artificial Sequence: Synthetic oligonucleotide
gaucagagggccaagauca

SEQ ID NO: 985464 - RNA, 19 nt, Artificial Sequence
  Description of Artificial Sequence: Synthetic oligonucleotide
uaggcaugacuacagcagg

SEQ ID NO: 985465 - RNA, 19 nt, Artificial Sequence
  Description of Artificial Sequence: Synthetic oligonucleotide
uauggguugucauuuacaa

SEQ ID NO: 985466 - RNA, 19 nt, Artificial Sequence
  Description of Artificial Sequence: Synthetic oligonucleotide
cacguguuuacuuuagaag

SEQ ID NO: 985467 - RNA, 19 nt, Artificial Sequence
  Description of Artificial Sequence: Synthetic oligonucleotide
aggaauaaagguccauguc

SEQ ID NO: 985468 - RNA, 19 nt, Artificial Sequence
  Description of Artificial Sequence: Synthetic oligonucleotide
ugauuucauugguagcugg

SEQ ID NO: 985469 - RNA, 19 nt, Artificial Sequence
  Description of Artificial Sequence: Synthetic oligonucleotide
ggaauggggacauugacgc

SEQ ID NO: 985470 - RNA, 19 nt, Artificial Sequence
  Description of Artificial Sequence: Synthetic oligonucleotide
gauauacucuccugccugg

SEQ ID NO: 985471 - RNA, 19 nt, Artificial Sequence
  Description of Artificial Sequence: Synthetic oligonucleotide
aaauuacaccaguuggacu

SEQ ID NO: 985472 - RNA, 19 nt, Artificial Sequence
  Description of Artificial Sequence: Synthetic oligonucleotide
uuugaaggaacugacaguu

SEQ ID NO: 985473 - RNA, 19 nt, Artificial Sequence
  Description of Artificial Sequence: Synthetic oligonucleotide
auaaguuguugauagcgga

SEQ ID NO: 985474 - RNA, 19 nt, Artificial Sequence
  Description of Artificial Sequence: Synthetic oligonucleotide
auuggcuugaacucucuug

SEQ ID NO: 985475 - RNA, 19 nt, Artificial Sequence
  Description of Artificial Sequence: Synthetic oligonucleotide
uucccaucaaugaagaguu

SEQ ID NO: 985476 - RNA, 19 nt, Artificial Sequence
  Description of Artificial Sequence: Synthetic oligonucleotide
ucuccgacaaggauggcug

SEQ ID NO: 985477 - RNA, 19 nt, Artificial Sequence
  Description of Artificial Sequence: Synthetic oligonucleotide
uaauuugaaggaacugaca

SEQ ID NO: 985478 - RNA, 19 nt, Artificial Sequence
  Description of Artificial Sequence: Synthetic oligonucleotide
acugacaguucugagaaag

SEQ ID NO: 985479 - RNA, 19 nt, Artificial Sequence
  Description of Artificial Sequence: Synthetic oligonucleotide
ugcagacccagcauuagug

SEQ ID NO: 985480 - RNA, 19 nt, Artificial Sequence
  Description of Artificial Sequence: Synthetic oligonucleotide
guugaaagagccaugcagc

SEQ ID NO: 985481 - RNA, 19 nt, Artificial Sequence
  Description of Artificial Sequence: Synthetic oligonucleotide
uauuaauuugaaggaacug

SEQ ID NO: 985482 - RNA, 19 nt, Artificial Sequence
  Description of Artificial Sequence: Synthetic oligonucleotide
auagucuuaagcugagugu

SEQ ID NO: 985483 - RNA, 19 nt, Artificial Sequence
  Description of Artificial Sequence: Synthetic oligonucleotide
aagauauacucuccugccu

SEQ ID NO: 985484 - RNA, 19 nt, Artificial Sequence
  Description of Artificial Sequence: Synthetic oligonucleotide
ugcugacggcuuaaaaugg

SEQ ID NO: 985485 - RNA, 19 nt, Artificial Sequence
  Description of Artificial Sequence: Synthetic oligonucleotide
cagguacucucucugaugg

SEQ ID NO: 985486 - RNA, 19 nt, Artificial Sequence
  Description of Artificial Sequence: Synthetic oligonucleotide
uuaauaaguuguugauagc

SEQ ID NO: 985487 - RNA, 19 nt, Artificial Sequence
  Description of Artificial Sequence: Synthetic oligonucleotide
uuuggugauagauggcaug

SEQ ID NO: 985488 - RNA, 19 nt, Artificial Sequence
  Description of Artificial Sequence: Synthetic oligonucleotide
uuucauuaggaaaguauuu

SEQ ID NO: 985489 - RNA, 19 nt, Artificial Sequence
  Description of Artificial Sequence: Synthetic oligonucleotide
aacuuguuccuaacgcccc

SEQ ID NO: 985490 - RNA, 19 nt, Artificial Sequence
  Description of Artificial Sequence: Synthetic oligonucleotide
guggauaucaauccaucug

SEQ ID NO: 985491 - RNA, 19 nt, Artificial Sequence
  Description of Artificial Sequence: Synthetic oligonucleotide
uuccaaugugauuaacuug

SEQ ID NO: 985492 - RNA, 19 nt, Artificial Sequence
  Description of Artificial Sequence: Synthetic oligonucleotide
aagugagaguauuuccgug

SEQ ID NO: 985493 - RNA, 19 nt, Artificial Sequence
  Description of Artificial Sequence: Synthetic oligonucleotide
aaaggaugguagcucccuc

SEQ ID NO: 985494 - RNA, 19 nt, Artificial Sequence
  Description of Artificial Sequence: Synthetic oligonucleotide
uaucuaucagacugcagac

SEQ ID NO: 985495 - RNA, 19 nt, Artificial Sequence
  Description of Artificial Sequence: Synthetic oligonucleotide
cuuaagcugaguguaaaac

SEQ ID NO: 985496 - RNA, 19 nt, Artificial Sequence
  Description of Artificial Sequence: Synthetic oligonucleotide
uuuaguguauuuuccuuau

SEQ ID NO: 985497 - RNA, 19 nt, Artificial Sequence
  Description of Artificial Sequence: Synthetic oligonucleotide
aucaaugaagaguuuuaca

SEQ ID NO: 985498 - RNA, 19 nt, Artificial Sequence
  Description of Artificial Sequence: Synthetic oligonucleotide
gauggcuguugaaagagcc

SEQ ID NO: 985499 - RNA, 19 nt, Artificial Sequence
  Description of Artificial Sequence: Synthetic oligonucleotide
caugacuacagcaggugag

SEQ ID NO: 985500 - RNA, 19 nt, Artificial Sequence
  Description of Artificial Sequence: Synthetic oligonucleotide
uguuugccauagaaauugg

SEQ ID NO: 985501 - RNA, 19 nt, Artificial Sequence
  Description of Artificial Sequence: Synthetic oligonucleotide
ugguccaacaaaguuacca

SEQ ID NO: 985502 - RNA, 19 nt, Artificial Sequence
  Description of Artificial Sequence: Synthetic oligonucleotide
ucggaauacaucuccuuca

SEQ ID NO: 985503 - RNA, 19 nt, Artificial Sequence
  Description of Artificial Sequence: Synthetic oligonucleotide
gugaucgcaaauaaaauuc

SEQ ID NO: 985504 - RNA, 19 nt, Artificial Sequence
  Description of Artificial Sequence: Synthetic oligonucleotide
uagaaauuggugucucccc

SEQ ID NO: 985505 - RNA, 19 nt, Artificial Sequence
  Description of Artificial Sequence: Synthetic oligonucleotide
gaaaccugcaggauccggg

SEQ ID NO: 985506 - RNA, 19 nt, Artificial Sequence
  Description of Artificial Sequence: Synthetic oligonucleotide
ucgcccauccaaaaggaug

SEQ ID NO: 985507 - RNA, 19 nt, Artificial Sequence
  Description of Artificial Sequence: Synthetic oligonucleotide
ucucucuauuaauuugaag

SEQ ID NO: 985508 - RNA, 19 nt, Artificial Sequence
  Description of Artificial Sequence: Synthetic oligonucleotide
uguggauaucaauccaucu

SEQ ID NO: 985509 - RNA, 19 nt, Artificial Sequence
  Description of Artificial Sequence: Synthetic oligonucleotide
aaagcacguuugcaggcag

SEQ ID NO: 985510 - RNA, 19 nt, Artificial Sequence
  Description of Artificial Sequence: Synthetic oligonucleotide
aaauuggugucuccccuga

SEQ ID NO: 985511 - RNA, 19 nt, Artificial Sequence
  Description of Artificial Sequence: Synthetic oligonucleotide
ugaucagagggccaagauc

SEQ ID NO: 985512 - RNA, 19 nt, Artificial Sequence
  Description of Artificial Sequence: Synthetic oligonucleotide
gaacuuguuccuaacgccc

SEQ ID NO: 985513 - RNA, 19 nt, Artificial Sequence
  Description of Artificial Sequence: Synthetic oligonucleotide
aacaggucauacuuggcuu

SEQ ID NO: 985514 - RNA, 19 nt, Artificial Sequence
  Description of Artificial Sequence: Synthetic oligonucleotide
acugagaugugauagucuu

SEQ ID NO: 985515 - RNA, 19 nt, Artificial Sequence
  Description of Artificial Sequence: Synthetic oligonucleotide
uuagcuucuccgacaagga

SEQ ID NO: 985516 - RNA, 19 nt, Artificial Sequence
  Description of Artificial Sequence: Synthetic oligonucleotide
ugauuaacuuggcaauuuc

SEQ ID NO: 985517 - RNA, 19 nt, Artificial Sequence
  Description of Artificial Sequence: Synthetic oligonucleotide
acaguucugagaaagagau

SEQ ID NO: 985518 - RNA, 19 nt, Artificial Sequence
  Description of Artificial Sequence: Synthetic oligonucleotide
agaaauuggugucuccccu

SEQ ID NO: 985519 - RNA, 19 nt, Artificial Sequence
  Description of Artificial Sequence: Synthetic oligonucleotide
ugacggcuuaaaauggaug

SEQ ID NO: 985520 - RNA, 19 nt, Artificial Sequence
  Description of Artificial Sequence: Synthetic oligonucleotide
gucgcuuuuggauucaaca

SEQ ID NO: 985521 - RNA, 19 nt, Artificial Sequence
  Description of Artificial Sequence: Synthetic oligonucleotide
ugcagcguuggccagcagc

SEQ ID NO: 985522 - RNA, 19 nt, Artificial Sequence
  Description of Artificial Sequence: Synthetic oligonucleotide
aaacuauagccaugggaaa

SEQ ID NO: 985523 - RNA, 19 nt, Artificial Sequence
  Description of Artificial Sequence: Synthetic oligonucleotide
aguuuuacaguuggcacug

SEQ ID NO: 985524 - RNA, 19 nt, Artificial Sequence
  Description of Artificial Sequence: Synthetic oligonucleotide
caaggagcauaguugcucc

SEQ ID NO: 985525 - RNA, 19 nt, Artificial Sequence
  Description of Artificial Sequence: Synthetic oligonucleotide
guaggcaugacuacagcag

SEQ ID NO: 985526 - RNA, 19 nt, Artificial Sequence
  Description of Artificial Sequence: Synthetic oligonucleotide
ugucacacuacaggcaugc

SEQ ID NO: 985527 - RNA, 19 nt, Artificial Sequence
  Description of Artificial Sequence: Synthetic oligonucleotide
augugauuaacuuggcaau

SEQ ID NO: 985528 - RNA, 19 nt, Artificial Sequence
  Description of Artificial Sequence: Synthetic oligonucleotide
uugacccucuuucaaagau

SEQ ID NO: 985529 - RNA, 19 nt, Artificial Sequence
  Description of Artificial Sequence: Synthetic oligonucleotide
guugguccaacaaaguuac

SEQ ID NO: 985530 - RNA, 19 nt, Artificial Sequence
  Description of Artificial Sequence: Synthetic oligonucleotide
ccaagugagaguauuuccg

SEQ ID NO: 985531 - RNA, 19 nt, Artificial Sequence
  Description of Artificial Sequence: Synthetic oligonucleotide
aucagcuagagucuucccu

SEQ ID NO: 985532 - RNA, 19 nt, Artificial Sequence
  Description of Artificial Sequence: Synthetic oligonucleotide
gaaauuggugucuccccug

SEQ ID NO: 985533 - RNA, 19 nt, Artificial Sequence
  Description of Artificial Sequence: Synthetic oligonucleotide
gaguauuuccgugcagugg

SEQ ID NO: 985534 - RNA, 19 nt, Artificial Sequence
  Description of Artificial Sequence: Synthetic oligonucleotide
auuuacaaucuugauggcu

SEQ ID NO: 985535 - RNA, 19 nt, Artificial Sequence
  Description of Artificial Sequence: Synthetic oligonucleotide
uccuaacgccccaugguag

SEQ ID NO: 985536 - RNA, 19 nt, Artificial Sequence
  Description of Artificial Sequence: Synthetic oligonucleotide
aaaaggaugguagcucccu

SEQ ID NO: 985537 - RNA, 19 nt, Artificial Sequence
  Description of Artificial Sequence: Synthetic oligonucleotide
aagagauuggcugcaacau

SEQ ID NO: 985538 - RNA, 19 nt, Artificial Sequence
  Description of Artificial Sequence: Synthetic oligonucleotide
ggaaaguauuuccacaaac

SEQ ID NO: 985539 - RNA, 19 nt, Artificial Sequence
  Description of Artificial Sequence: Synthetic oligonucleotide
gaucgagagccggugaagg

SEQ ID NO: 985540 - RNA, 19 nt, Artificial Sequence
  Description of Artificial Sequence: Synthetic oligonucleotide
uuucgcccauccaaaagga

SEQ ID NO: 985541 - RNA, 19 nt, Artificial Sequence
  Description of Artificial Sequence: Synthetic oligonucleotide
guaggaauaaagguccaug

SEQ ID NO: 985542 - RNA, 19 nt, Artificial Sequence
  Description of Artificial Sequence: Synthetic oligonucleotide
agaguauuuccgugcagug

SEQ ID NO: 985543 - RNA, 19 nt, Artificial Sequence
  Description of Artificial Sequence: Synthetic oligonucleotide
auugguagcuggguugugg

SEQ ID NO: 985544 - RNA, 19 nt, Artificial Sequence
  Description of Artificial Sequence: Synthetic oligonucleotide
cauagaaauuggugucucc

SEQ ID NO: 985545 - RNA, 19 nt, Artificial Sequence
  Description of Artificial Sequence: Synthetic oligonucleotide
agcauccucuucuuuccac

SEQ ID NO: 985546 - RNA, 19 nt, Artificial Sequence
  Description of Artificial Sequence: Synthetic oligonucleotide
ucgcuuuuggauucaacaa

SEQ ID NO: 985547 - RNA, 19 nt, Artificial Sequence
  Description of Artificial Sequence: Synthetic oligonucleotide
acugauugcuuugaugucu

SEQ ID NO: 985548 - RNA, 19 nt, Artificial Sequence
  Description of Artificial Sequence: Synthetic oligonucleotide
cuaucagacugcagacucg

SEQ ID NO: 985549 - RNA, 19 nt, Artificial Sequence
  Description of Artificial Sequence: Synthetic oligonucleotide
gacggcuuaaaauggaugu

SEQ ID NO: 985550 - RNA, 19 nt, Artificial Sequence
  Description of Artificial Sequence: Synthetic oligonucleotide
ggucccagcauccugaaac

SEQ ID NO: 985551 - RNA, 19 nt, Artificial Sequence
  Description of Artificial Sequence: Synthetic oligonucleotide
guuggagcccacaaaacug

SEQ ID NO: 985552 - RNA, 19 nt, Artificial Sequence
  Description of Artificial Sequence: Synthetic oligonucleotide
augacuacagcaggugagg

SEQ ID NO: 985553 - RNA, 19 nt, Artificial Sequence
  Description of Artificial Sequence: Synthetic oligonucleotide
agagccaugcagcguuggc

SEQ ID NO: 985554 - RNA, 19 nt, Artificial Sequence
  Description of Artificial Sequence: Synthetic oligonucleotide
ccauccaaaaggaugguag

SEQ ID NO: 985555 - RNA, 19 nt, Artificial Sequence
  Description of Artificial Sequence: Synthetic oligonucleotide
cauuuucauagccuuugac

SEQ ID NO: 985556 - RNA, 19 nt, Artificial Sequence
  Description of Artificial Sequence: Synthetic oligonucleotide
agcccacaaaacugauugc

SEQ ID NO: 985557 - RNA, 19 nt, Artificial Sequence
  Description of Artificial Sequence: Synthetic oligonucleotide
uagucuuaagcugagugua

SEQ ID NO: 985558 - RNA, 19 nt, Artificial Sequence
  Description of Artificial Sequence: Synthetic oligonucleotide
cauauuggcuugaacucuc

SEQ ID NO: 985559 - RNA, 19 nt, Artificial Sequence
  Description of Artificial Sequence: Synthetic oligonucleotide
cacguuugcaggcagcaac

SEQ ID NO: 985560 - RNA, 19 nt, Artificial Sequence
  Description of Artificial Sequence: Synthetic oligonucleotide
aguuguugauagcggagca

SEQ ID NO: 985561 - RNA, 19 nt, Artificial Sequence
  Description of Artificial Sequence: Synthetic oligonucleotide
ugguaguaaagauggcagu

SEQ ID NO: 985562 - RNA, 19 nt, Artificial Sequence
  Description of Artificial Sequence: Synthetic oligonucleotide
gacguaugaagagcaagug

SEQ ID NO: 985563 - RNA, 19 nt, Artificial Sequence
  Description of Artificial Sequence: Synthetic oligonucleotide
ugacauuggagaugauggu

SEQ ID NO: 985564 - RNA, 19 nt, Artificial Sequence
  Description of Artificial Sequence: Synthetic oligonucleotide
ugucauuuacaaucuugau

SEQ ID NO: 985565 - RNA, 19 nt, Artificial Sequence
  Description of Artificial Sequence: Synthetic oligonucleotide
uuggagaugaugguugguc

SEQ ID NO: 985566 - RNA, 19 nt, Artificial Sequence
  Description of Artificial Sequence: Synthetic oligonucleotide
caacaaaguuaccauuuuc

SEQ ID NO: 985567 - RNA, 19 nt, Artificial Sequence
  Description of Artificial Sequence: Synthetic oligonucleotide
gaucgcaaauaaaauucac

SEQ ID NO: 985568 - RNA, 19 nt, Artificial Sequence
  Description of Artificial Sequence: Synthetic oligonucleotide
acuacagcaggugaggaaa

SEQ ID NO: 985569 - RNA, 19 nt, Artificial Sequence
  Description of Artificial Sequence: Synthetic oligonucleotide
ugauuugagcaaagaugac

SEQ ID NO: 985570 - RNA, 19 nt, Artificial Sequence
  Description of Artificial Sequence: Synthetic oligonucleotide
ucgagagccggugaaggag

SEQ ID NO: 985571 - RNA, 19 nt, Artificial Sequence
  Description of Artificial Sequence: Synthetic oligonucleotide
cucggaauacaucuccuuc

SEQ ID NO: 985572 - RNA, 19 nt, Artificial Sequence
  Description of Artificial Sequence: Synthetic oligonucleotide
uccaaaaggaugguagcuc

SEQ ID NO: 985573 - RNA, 19 nt, Artificial Sequence
  Description of Artificial Sequence: Synthetic oligonucleotide
agagcaagugcagacccag

SEQ ID NO: 985574 - RNA, 19 nt, Artificial Sequence
  Description of Artificial Sequence: Synthetic oligonucleotide
uccauauggguugucauuu

SEQ ID NO: 985575 - RNA, 19 nt, Artificial Sequence
  Description of Artificial Sequence: Synthetic oligonucleotide
aagugaggguggccaagag

SEQ ID NO: 985576 - RNA, 19 nt, Artificial Sequence
  Description of Artificial Sequence: Synthetic oligonucleotide
uuguuccacuaucuaucag

SEQ ID NO: 985577 - RNA, 19 nt, Artificial Sequence
  Description of Artificial Sequence: Synthetic oligonucleotide
uugguagcuggguugugga

SEQ ID NO: 985578 - RNA, 19 nt, Artificial Sequence
  Description of Artificial Sequence: Synthetic oligonucleotide
ccgaugauuucauugguag

SEQ ID NO: 985579 - RNA, 19 nt, Artificial Sequence
  Description of Artificial Sequence: Synthetic oligonucleotide
cuauuaauuugaaggaacu

SEQ ID NO: 985580 - RNA, 19 nt, Artificial Sequence
  Description of Artificial Sequence: Synthetic oligonucleotide
gaaggaagaucgagagccg

SEQ ID NO: 985581 - RNA, 19 nt, Artificial Sequence
  Description of Artificial Sequence: Synthetic oligonucleotide
acuauagccaugggaaaca

SEQ ID NO: 985582 - RNA, 19 nt, Artificial Sequence
  Description of Artificial Sequence: Synthetic oligonucleotide
auagcggagcaggaccugc

SEQ ID NO: 985583 - RNA, 19 nt, Artificial Sequence
  Description of Artificial Sequence: Synthetic oligonucleotide
auuucccaucaaugaagag

SEQ ID NO: 985584 - RNA, 19 nt, Artificial Sequence
  Description of Artificial Sequence: Synthetic oligonucleotide
gaguuuuacaguuggcacu

SEQ ID NO: 985585 - RNA, 19 nt, Artificial Sequence
  Description of Artificial Sequence: Synthetic oligonucleotide
aauggaugugucugcccau

SEQ ID NO: 985586 - RNA, 19 nt, Artificial Sequence
  Description of Artificial Sequence: Synthetic oligonucleotide
ccggugaaggagaacaugg

SEQ ID NO: 985587 - RNA, 19 nt, Artificial Sequence
  Description of Artificial Sequence: Synthetic oligonucleotide
agacguaugaagagcaagu

SEQ ID NO: 985588 - RNA, 19 nt, Artificial Sequence
  Description of Artificial Sequence: Synthetic oligonucleotide
ugccacguguuuacuuuag

SEQ ID NO: 985589 - RNA, 19 nt, Artificial Sequence
  Description of Artificial Sequence: Synthetic oligonucleotide
agccaugcagcguuggcca

SEQ ID NO: 985590 - RNA, 19 nt, Artificial Sequence
  Description of Artificial Sequence: Synthetic oligonucleotide
uuacaaucuugauggcuuc

SEQ ID NO: 985591 - RNA, 19 nt, Artificial Sequence
  Description of Artificial Sequence: Synthetic oligonucleotide
ccaaaaggaugguagcucc

SEQ ID NO: 985592 - RNA, 19 nt, Artificial Sequence
  Description of Artificial Sequence: Synthetic oligonucleotide
uacccgaccgaugauuuca

SEQ ID NO: 985593 - RNA, 19 nt, Artificial Sequence
  Description of Artificial Sequence: Synthetic oligonucleotide
ugaugucugggugaucgca

SEQ ID NO: 985594 - RNA, 19 nt, Artificial Sequence
  Description of Artificial Sequence: Synthetic oligonucleotide
uuuuagcuucuccgacaag

SEQ ID NO: 985595 - RNA, 19 nt, Artificial Sequence
  Description of Artificial Sequence: Synthetic oligonucleotide
gaugacaagugaggguggc

SEQ ID NO: 985596 - RNA, 19 nt, Artificial Sequence
  Description of Artificial Sequence: Synthetic oligonucleotide
guagcucccucuuuuguuc

SEQ ID NO: 985597 - RNA, 19 nt, Artificial Sequence
  Description of Artificial Sequence: Synthetic oligonucleotide
gcauccugaaacaauuuag

SEQ ID NO: 985598 - RNA, 19 nt, Artificial Sequence
  Description of Artificial Sequence: Synthetic oligonucleotide
uucuccgacaaggauggcu

SEQ ID NO: 985599 - RNA, 19 nt, Artificial Sequence
  Description of Artificial Sequence: Synthetic oligonucleotide
auaguugcuccagguacuc

SEQ ID NO: 985600 - RNA, 19 nt, Artificial Sequence
  Description of Artificial Sequence: Synthetic oligonucleotide
auggaucugauuugagcaa

SEQ ID NO: 985601 - RNA, 19 nt, Artificial Sequence
  Description of Artificial Sequence: Synthetic oligonucleotide
uuuuggcacgguccaccag

SEQ ID NO: 985602 - RNA, 19 nt, Artificial Sequence
  Description of Artificial Sequence: Synthetic oligonucleotide
ugguuggagcccacaaaac

SEQ ID NO: 985603 - RNA, 19 nt, Artificial Sequence
  Description of Artificial Sequence: Synthetic oligonucleotide
guaguaaagauggcaguuc

SEQ ID NO: 985604 - RNA, 19 nt, Artificial Sequence
  Description of Artificial Sequence: Synthetic oligonucleotide
ggacugagguacccgaccg

SEQ ID NO: 985605 - RNA, 19 nt, Artificial Sequence
  Description of Artificial Sequence: Synthetic oligonucleotide
augauuucauugguagcug

SEQ ID NO: 985606 - RNA, 19 nt, Artificial Sequence
  Description of Artificial Sequence: Synthetic oligonucleotide
cagcauuaguguuucccug

SEQ ID NO: 985607 - RNA, 19 nt, Artificial Sequence
  Description of Artificial Sequence: Synthetic oligonucleotide
aagagccaugcagcguugg

SEQ ID NO: 985608 - RNA, 19 nt, Artificial Sequence
  Description of Artificial Sequence: Synthetic oligonucleotide
ugugauuaacuuggcaauu

SEQ ID NO: 985609 - RNA, 19 nt, Artificial Sequence
  Description of Artificial Sequence: Synthetic oligonucleotide
auauuccauucucauggau

SEQ ID NO: 985610 - RNA, 19 nt, Artificial Sequence
  Description of Artificial Sequence: Synthetic oligonucleotide
gaugccagaugccacgugu

SEQ ID NO: 985611 - RNA, 19 nt, Artificial Sequence
  Description of Artificial Sequence: Synthetic oligonucleotide
ugacccucuuucaaagaua

SEQ ID NO: 985612 - RNA, 19 nt, Artificial Sequence
  Description of Artificial Sequence: Synthetic oligonucleotide
aaggagcauaguugcucca

SEQ ID NO: 985613 - RNA, 19 nt, Artificial Sequence
  Description of Artificial Sequence: Synthetic oligonucleotide
caucuggcaugacuacucc

SEQ ID NO: 985614 - RNA, 19 nt, Artificial Sequence
  Description of Artificial Sequence: Synthetic oligonucleotide
ugguagcucccucuuuugu

SEQ ID NO: 985615 - RNA, 19 nt, Artificial Sequence
  Description of Artificial Sequence: Synthetic oligonucleotide
ugaacucucuugccauuuc

SEQ ID NO: 985616 - RNA, 19 nt, Artificial Sequence
  Description of Artificial Sequence: Synthetic oligonucleotide
gagccaugcagcguuggcc

SEQ ID NO: 985617 - RNA, 19 nt, Artificial Sequence
  Description of Artificial Sequence: Synthetic oligonucleotide
gaauggggacauugacgcc

SEQ ID NO: 985618 - RNA, 19 nt, Artificial Sequence
  Description of Artificial Sequence: Synthetic oligonucleotide
ggagcauaguugcuccagg

SEQ ID NO: 985619 - RNA, 19 nt, Artificial Sequence
  Description of Artificial Sequence: Synthetic oligonucleotide
ggagaacaugggcaaaggc

SEQ ID NO: 985620 - RNA, 19 nt, Artificial Sequence
  Description of Artificial Sequence: Synthetic oligonucleotide
caauuuagcaaggagcaua

SEQ ID NO: 985621 - RNA, 19 nt, Artificial Sequence
  Description of Artificial Sequence: Synthetic oligonucleotide
ugaaagagccaugcagcgu

SEQ ID NO: 985622 - RNA, 19 nt, Artificial Sequence
  Description of Artificial Sequence: Synthetic oligonucleotide
uuguuccuaacgccccaug

SEQ ID NO: 985623 - RNA, 19 nt, Artificial Sequence
  Description of Artificial Sequence: Synthetic oligonucleotide
ugucgcuuuuggauucaac

SEQ ID NO: 985624 - RNA, 19 nt, Artificial Sequence
  Description of Artificial Sequence: Synthetic oligonucleotide
gaagaucgagagccgguga

SEQ ID NO: 985625 - RNA, 19 nt, Artificial Sequence
  Description of Artificial Sequence: Synthetic oligonucleotide
agaugaugguugguccaac

SEQ ID NO: 985626 - RNA, 19 nt, Artificial Sequence
  Description of Artificial Sequence: Synthetic oligonucleotide
gugagaguauuuccgugca

SEQ ID NO: 985627 - RNA, 19 nt, Artificial Sequence
  Description of Artificial Sequence: Synthetic oligonucleotide
ggugauagauggcaugguc

SEQ ID NO: 985628 - RNA, 19 nt, Artificial Sequence
  Description of Artificial Sequence: Synthetic oligonucleotide
aggagcauaguugcuccag

SEQ ID NO: 985629 - RNA, 19 nt, Artificial Sequence
  Description of Artificial Sequence: Synthetic oligonucleotide
uggcuugaacucucuugcc

SEQ ID NO: 985630 - RNA, 19 nt, Artificial Sequence
  Description of Artificial Sequence: Synthetic oligonucleotide
uagcucccucuuuuguucc

SEQ ID NO: 985631 - RNA, 19 nt, Artificial Sequence
  Description of Artificial Sequence: Synthetic oligonucleotide
augacuacuccaugauuuu

SEQ ID NO: 985632 - RNA, 19 nt, Artificial Sequence
  Description of Artificial Sequence: Synthetic oligonucleotide
agagauuggcugcaacaua

SEQ ID NO: 985633 - RNA, 19 nt, Artificial Sequence
  Description of Artificial Sequence: Synthetic oligonucleotide
agcauaguugcuccaggua

SEQ ID NO: 985634 - RNA, 19 nt, Artificial Sequence
  Description of Artificial Sequence: Synthetic oligonucleotide
gaucugauuugagcaaaga

SEQ ID NO: 985635 - RNA, 19 nt, Artificial Sequence
  Description of Artificial Sequence: Synthetic oligonucleotide
guggccaagagugauggga

SEQ ID NO: 985636 - RNA, 19 nt, Artificial Sequence
  Description of Artificial Sequence: Synthetic oligonucleotide
ugucuccccugaaggaaga

SEQ ID NO: 985637 - RNA, 19 nt, Artificial Sequence
  Description of Artificial Sequence: Synthetic oligonucleotide
aacgccccaugguaggcau

SEQ ID NO: 985638 - RNA, 19 nt, Artificial Sequence
  Description of Artificial Sequence: Synthetic oligonucleotide
gagaguauuuccgugcagu

SEQ ID NO: 985639 - RNA, 19 nt, Artificial Sequence
  Description of Artificial Sequence: Synthetic oligonucleotide
aauuggugucuccccugaa

SEQ ID NO: 985640 - RNA, 19 nt, Artificial Sequence
  Description of Artificial Sequence: Synthetic oligonucleotide
gugauagucuuaagcugag

SEQ ID NO: 985641 - RNA, 19 nt, Artificial Sequence
  Description of Artificial Sequence: Synthetic oligonucleotide
cgaccgaugauuucauugg

SEQ ID NO: 985642 - RNA, 19 nt, Artificial Sequence
  Description of Artificial Sequence: Synthetic oligonucleotide
agaugacaagugagggugg

SEQ ID NO: 985643 - RNA, 19 nt, Artificial Sequence
  Description of Artificial Sequence: Synthetic oligonucleotide
gcagacgguaggaauaaag

SEQ ID NO: 985644 - RNA, 19 nt, Artificial Sequence
  Description of Artificial Sequence: Synthetic oligonucleotide
cccauauuggcuugaacuc

SEQ ID NO: 985645 - RNA, 19 nt, Artificial Sequence
  Description of Artificial Sequence: Synthetic oligonucleotide
acuuuagaagaaaccugca

SEQ ID NO: 985646 - RNA, 19 nt, Artificial Sequence
  Description of Artificial Sequence: Synthetic oligonucleotide
caccaagugagaguauuuc

SEQ ID NO: 985647 - RNA, 19 nt, Artificial Sequence
  Description of Artificial Sequence: Synthetic oligonucleotide
ugacuacagcaggugagga

SEQ ID NO: 985648 - RNA, 19 nt, Artificial Sequence
  Description of Artificial Sequence: Synthetic oligonucleotide
uccaccaagugagaguauu

SEQ ID NO: 985649 - RNA, 19 nt, Artificial Sequence
  Description of Artificial Sequence: Synthetic oligonucleotide
cucuauuaauuugaaggaa

SEQ ID NO: 985650 - RNA, 19 nt, Artificial Sequence
  Description of Artificial Sequence: Synthetic oligonucleotide
acggcuuaaaauggaugug

SEQ ID NO: 985651 - RNA, 19 nt, Artificial Sequence
  Description of Artificial Sequence: Synthetic oligonucleotide
ggagggaugucacacuaca

SEQ ID NO: 985652 - RNA, 19 nt, Artificial Sequence
  Description of Artificial Sequence: Synthetic oligonucleotide
gaauaaagguccaugucuu

SEQ ID NO: 985653 - RNA, 19 nt, Artificial Sequence
  Description of Artificial Sequence: Synthetic oligonucleotide
gacuacagcaggugaggaa

SEQ ID NO: 985654 - RNA, 19 nt, Artificial Sequence
  Description of Artificial Sequence: Synthetic oligonucleotide
gaugguagcucccucuuuu

SEQ ID NO: 985655 - RNA, 19 nt, Artificial Sequence
  Description of Artificial Sequence: Synthetic oligonucleotide
caucagcuagagucuuccc

SEQ ID NO: 985656 - RNA, 19 nt, Artificial Sequence
  Description of Artificial Sequence: Synthetic oligonucleotide
gaaagaguagcauccucuu

SEQ ID NO: 985657 - RNA, 19 nt, Artificial Sequence
  Description of Artificial Sequence: Synthetic oligonucleotide
cauauuccauucucaugga

SEQ ID NO: 985658 - RNA, 19 nt, Artificial Sequence
  Description of Artificial Sequence: Synthetic oligonucleotide
accugaaggccucggaaua

SEQ ID NO: 985659 - RNA, 19 nt, Artificial Sequence
  Description of Artificial Sequence: Synthetic oligonucleotide
ggguggccaagagugaugg

SEQ ID NO: 985660 - RNA, 19 nt, Artificial Sequence
  Description of Artificial Sequence: Synthetic oligonucleotide
acuaucuaucagacugcag

SEQ ID NO: 985661 - RNA, 19 nt, Artificial Sequence
  Description of Artificial Sequence: Synthetic oligonucleotide
cuggcaugacuacuccaug

SEQ ID NO: 985662 - RNA, 19 nt, Artificial Sequence
  Description of Artificial Sequence: Synthetic oligonucleotide
ccaaaugcagccccgacca

SEQ ID NO: 985663 - RNA, 19 nt, Artificial Sequence
  Description of Artificial Sequence: Synthetic oligonucleotide
gauccggguccgcacugcc

SEQ ID NO: 985664 - RNA, 19 nt, Artificial Sequence
  Description of Artificial Sequence: Synthetic oligonucleotide
ggccucggaauacaucucc

SEQ ID NO: 985665 - RNA, 19 nt, Artificial Sequence
  Description of Artificial Sequence: Synthetic oligonucleotide
uucgcccauccaaaaggau

SEQ ID NO: 985666 - RNA, 19 nt, Artificial Sequence
  Description of Artificial Sequence: Synthetic oligonucleotide
ggugaucgcaaauaaaauu

SEQ ID NO: 985667 - RNA, 19 nt, Artificial Sequence
  Description of Artificial Sequence: Synthetic oligonucleotide
aggagggaugucacacuac

SEQ ID NO: 985668 - RNA, 19 nt, Artificial Sequence
  Description of Artificial Sequence: Synthetic oligonucleotide
ccuaacgccccaugguagg

SEQ ID NO: 985669 - RNA, 19 nt, Artificial Sequence
  Description of Artificial Sequence: Synthetic oligonucleotide
uauuuccgugcaguggcuc

SEQ ID NO: 985670 - RNA, 19 nt, Artificial Sequence
  Description of Artificial Sequence: Synthetic oligonucleotide
uugguggacugagguaccc

SEQ ID NO: 985671 - RNA, 19 nt, Artificial Sequence
  Description of Artificial Sequence: Synthetic oligonucleotide
agcuagagucuucccuugu

SEQ ID NO: 985672 - RNA, 19 nt, Artificial Sequence
  Description of Artificial Sequence: Synthetic oligonucleotide
ccuuguuccaaugugauua

SEQ ID NO: 985673 - RNA, 19 nt, Artificial Sequence
  Description of Artificial Sequence: Synthetic oligonucleotide
acugagguacccgaccgau

SEQ ID NO: 985674 - RNA, 19 nt, Artificial Sequence
  Description of Artificial Sequence: Synthetic oligonucleotide
ucuccccugaaggaagauc

SEQ ID NO: 985675 - RNA, 19 nt, Artificial Sequence
  Description of Artificial Sequence: Synthetic oligonucleotide
gaugucugggugaucgcaa

SEQ ID NO: 985676 - RNA, 19 nt, Artificial Sequence
  Description of Artificial Sequence: Synthetic oligonucleotide
cagcuagagucuucccuug

SEQ ID NO: 985677 - RNA, 19 nt, Artificial Sequence
  Description of Artificial Sequence: Synthetic oligonucleotide
acaauuuagcaaggagcau

SEQ ID NO: 985678 - RNA, 19 nt, Artificial Sequence
  Description of Artificial Sequence: Synthetic oligonucleotide
cuaacgccccaugguaggc

SEQ ID NO: 985679 - RNA, 19 nt, Artificial Sequence
  Description of Artificial Sequence: Synthetic oligonucleotide
cccugcauugacucgcagg

SEQ ID NO: 985680 - RNA, 19 nt, Artificial Sequence
  Description of Artificial Sequence: Synthetic oligonucleotide
ggaagaucgagagccggug

SEQ ID NO: 985681 - RNA, 19 nt, Artificial Sequence
  Description of Artificial Sequence: Synthetic oligonucleotide
gagcauaguugcuccaggu

SEQ ID NO: 985682 - RNA, 19 nt, Artificial Sequence
  Description of Artificial Sequence: Synthetic oligonucleotide
aggucauacuuggcuugac

SEQ ID NO: 985683 - RNA, 19 nt, Artificial Sequence
  Description of Artificial Sequence: Synthetic oligonucleotide
gguuggagcccacaaaacu

SEQ ID NO: 985684 - RNA, 19 nt, Artificial Sequence
  Description of Artificial Sequence: Synthetic oligonucleotide
cauaguugcuccagguacu

SEQ ID NO: 985685 - RNA, 19 nt, Artificial Sequence
  Description of Artificial Sequence: Synthetic oligonucleotide
augucugggugaucgcaaa

SEQ ID NO: 985686 - RNA, 19 nt, Artificial Sequence
  Description of Artificial Sequence: Synthetic oligonucleotide
uugacgcccaccugcccaa

SEQ ID NO: 985687 - RNA, 19 nt, Artificial Sequence
  Description of Artificial Sequence: Synthetic oligonucleotide
guuccuaacgccccauggu

SEQ ID NO: 985688 - RNA, 19 nt, Artificial Sequence
  Description of Artificial Sequence: Synthetic oligonucleotide
acguuugcaggcagcaaca

SEQ ID NO: 985689 - RNA, 19 nt, Artificial Sequence
  Description of Artificial Sequence: Synthetic oligonucleotide
auuggagaugaugguuggu

SEQ ID NO: 985690 - RNA, 19 nt, Artificial Sequence
  Description of Artificial Sequence: Synthetic oligonucleotide
gacaagugaggguggccaa

SEQ ID NO: 985691 - RNA, 19 nt, Artificial Sequence
  Description of Artificial Sequence: Synthetic oligonucleotide
agcaucagcuagagucuuc

SEQ ID NO: 985692 - RNA, 19 nt, Artificial Sequence
  Description of Artificial Sequence: Synthetic oligonucleotide
cugagguacccgaccgaug

SEQ ID NO: 985693 - RNA, 19 nt, Artificial Sequence
  Description of Artificial Sequence: Synthetic oligonucleotide
gagaugaugguugguccaa

SEQ ID NO: 985694 - RNA, 19 nt, Artificial Sequence
  Description of Artificial Sequence: Synthetic oligonucleotide
cucccauauuggcuugaac

SEQ ID NO: 985695 - RNA, 19 nt, Artificial Sequence
  Description of Artificial Sequence: Synthetic oligonucleotide
cagagaaagcacguuugca

SEQ ID NO: 985696 - RNA, 19 nt, Artificial Sequence
  Description of Artificial Sequence: Synthetic oligonucleotide
ucugucgcuuuuggauuca

SEQ ID NO: 985697 - RNA, 19 nt, Artificial Sequence
  Description of Artificial Sequence: Synthetic oligonucleotide
augugucugcccaugcaga

SEQ ID NO: 985698 - RNA, 19 nt, Artificial Sequence
  Description of Artificial Sequence: Synthetic oligonucleotide
uaacgccccaugguaggca

SEQ ID NO: 985699 - RNA, 19 nt, Artificial Sequence
  Description of Artificial Sequence: Synthetic oligonucleotide
ccaaugugauuaacuuggc

SEQ ID NO: 985700 - RNA, 19 nt, Artificial Sequence
  Description of Artificial Sequence: Synthetic oligonucleotide
ggaucugauuugagcaaag

SEQ ID NO: 985701 - RNA, 19 nt, Artificial Sequence
  Description of Artificial Sequence: Synthetic oligonucleotide
gacucgcucuuuggcuugg

SEQ ID NO: 985702 - RNA, 19 nt, Artificial Sequence
  Description of Artificial Sequence: Synthetic oligonucleotide
guuguggauaucaauccau

SEQ ID NO: 985703 - RNA, 19 nt, Artificial Sequence
  Description of Artificial Sequence: Synthetic oligonucleotide
agguacucucucugauggu

SEQ ID NO: 985704 - RNA, 19 nt, Artificial Sequence
  Description of Artificial Sequence: Synthetic oligonucleotide
ggcaugacuacagcaggug

SEQ ID NO: 985705 - RNA, 19 nt, Artificial Sequence
  Description of Artificial Sequence: Synthetic oligonucleotide
gagucuucccuuguuccaa

SEQ ID NO: 985706 - RNA, 19 nt, Artificial Sequence
  Description of Artificial Sequence: Synthetic oligonucleotide
gucuuaagcugaguguaaa

SEQ ID NO: 985707 - RNA, 19 nt, Artificial Sequence
  Description of Artificial Sequence: Synthetic oligonucleotide
accugcugacggcuuaaaa

SEQ ID NO: 985708 - RNA, 19 nt, Artificial Sequence
  Description of Artificial Sequence: Synthetic oligonucleotide
cacuaucuaucagacugca

SEQ ID NO: 985709 - RNA, 19 nt, Artificial Sequence
  Description of Artificial Sequence: Synthetic oligonucleotide
ggcuuaaaauggauguguc

SEQ ID NO: 985710 - RNA, 19 nt, Artificial Sequence
  Description of Artificial Sequence: Synthetic oligonucleotide
agucuuaagcugaguguaa

SEQ ID NO: 985711 - RNA, 19 nt, Artificial Sequence
  Description of Artificial Sequence: Synthetic oligonucleotide
auauuggcuugaacucucu

SEQ ID NO: 985712 - RNA, 19 nt, Artificial Sequence
  Description of Artificial Sequence: Synthetic oligonucleotide
aggcaugacuacagcaggu

SEQ ID NO: 985713 - RNA, 19 nt, Artificial Sequence
  Description of Artificial Sequence: Synthetic oligonucleotide
gguccccugcauugacucg

SEQ ID NO: 985714 - RNA, 19 nt, Artificial Sequence
  Description of Artificial Sequence: Synthetic oligonucleotide
ccgaccaguugguuuagug

SEQ ID NO: 985715 - RNA, 19 nt, Artificial Sequence
  Description of Artificial Sequence: Synthetic oligonucleotide
agccccgaccaguugguuu

SEQ ID NO: 985716 - RNA, 19 nt, Artificial Sequence
  Description of Artificial Sequence: Synthetic oligonucleotide
cccaugguaggcaugacua

SEQ ID NO: 985717 - RNA, 19 nt, Artificial Sequence
  Description of Artificial Sequence: Synthetic oligonucleotide
aggcagacgguaggaauaa

SEQ ID NO: 985718 - RNA, 19 nt, Artificial Sequence
  Description of Artificial Sequence: Synthetic oligonucleotide
caagugaggguggccaaga

SEQ ID NO: 985719 - RNA, 19 nt, Artificial Sequence
  Description of Artificial Sequence: Synthetic oligonucleotide
accaguugguuuaguguau

SEQ ID NO: 985720 - RNA, 19 nt, Artificial Sequence
  Description of Artificial Sequence: Synthetic oligonucleotide
agcaaggagcauaguugcu

SEQ ID NO: 985721 - RNA, 19 nt, Artificial Sequence
  Description of Artificial Sequence: Synthetic oligonucleotide
cugagaugugauagucuua

SEQ ID NO: 985722 - RNA, 19 nt, Artificial Sequence
  Description of Artificial Sequence: Synthetic oligonucleotide
agguacccgaccgaugauu

SEQ ID NO: 985723 - RNA, 19 nt, Artificial Sequence
  Description of Artificial Sequence: Synthetic oligonucleotide
gucugggugaucgcaaaua

SEQ ID NO: 985724 - RNA, 19 nt, Artificial Sequence
  Description of Artificial Sequence: Synthetic oligonucleotide
ccaugguaggcaugacuac

SEQ ID NO: 985725 - RNA, 19 nt, Artificial Sequence
  Description of Artificial Sequence: Synthetic oligonucleotide
guuugccauagaaauuggu

SEQ ID NO: 985726 - RNA, 19 nt, Artificial Sequence
  Description of Artificial Sequence: Synthetic oligonucleotide
ccacguguuuacuuuagaa

SEQ ID NO: 985727 - RNA, 19 nt, Artificial Sequence
  Description of Artificial Sequence: Synthetic oligonucleotide
aggccucggaauacaucuc

SEQ ID NO: 985728 - RNA, 19 nt, Artificial Sequence
  Description of Artificial Sequence: Synthetic oligonucleotide
guacccgaccgaugauuuc

SEQ ID NO: 985729 - RNA, 19 nt, Artificial Sequence
  Description of Artificial Sequence: Synthetic oligonucleotide
uccgacaaggauggcuguu

SEQ ID NO: 985730 - RNA, 19 nt, Artificial Sequence
  Description of Artificial Sequence: Synthetic oligonucleotide
augucacacuacaggcaug

SEQ ID NO: 985731 - RNA, 19 nt, Artificial Sequence
  Description of Artificial Sequence: Synthetic oligonucleotide
gguaguaaagauggcaguu

SEQ ID NO: 985732 - RNA, 19 nt, Artificial Sequence
  Description of Artificial Sequence: Synthetic oligonucleotide
gguagcuggguuguggaua

SEQ ID NO: 985733 - RNA, 19 nt, Artificial Sequence
  Description of Artificial Sequence: Synthetic oligonucleotide
guccgcacugccgccgccg

SEQ ID NO: 985734 - RNA, 19 nt, Artificial Sequence
  Description of Artificial Sequence: Synthetic oligonucleotide
gugauuaacuuggcaauuu

SEQ ID NO: 985735 - RNA, 19 nt, Artificial Sequence
  Description of Artificial Sequence: Synthetic oligonucleotide
caugcagcguuggccagca

SEQ ID NO: 985736 - RNA, 19 nt, Artificial Sequence
  Description of Artificial Sequence: Synthetic oligonucleotide
ggugaucagagggccaaga

SEQ ID NO: 985737 - RNA, 19 nt, Artificial Sequence
  Description of Artificial Sequence: Synthetic oligonucleotide
cugacggcuuaaaauggau

SEQ ID NO: 985738 - RNA, 19 nt, Artificial Sequence
  Description of Artificial Sequence: Synthetic oligonucleotide
caggcaugcucaaccaccu

SEQ ID NO: 985739 - RNA, 19 nt, Artificial Sequence
  Description of Artificial Sequence: Synthetic oligonucleotide
gcuugaacucucuugccau

SEQ ID NO: 985740 - RNA, 19 nt, Artificial Sequence
  Description of Artificial Sequence: Synthetic oligonucleotide
ccgugcaguggcuccauug

SEQ ID NO: 985741 - RNA, 19 nt, Artificial Sequence
  Description of Artificial Sequence: Synthetic oligonucleotide
gacgcccaccugcccaaca

SEQ ID NO: 985742 - RNA, 19 nt, Artificial Sequence
  Description of Artificial Sequence: Synthetic oligonucleotide
ccucuuucaaagauauacu

SEQ ID NO: 985743 - RNA, 19 nt, Artificial Sequence
  Description of Artificial Sequence: Synthetic oligonucleotide
gagucuugaagaacuuguu

SEQ ID NO: 985744 - RNA, 19 nt, Artificial Sequence
  Description of Artificial Sequence: Synthetic oligonucleotide
gccggugaaggagaacaug

SEQ ID NO: 985745 - RNA, 19 nt, Artificial Sequence
  Description of Artificial Sequence: Synthetic oligonucleotide
gcugacggcuuaaaaugga

SEQ ID NO: 985746 - RNA, 19 nt, Artificial Sequence
  Description of Artificial Sequence: Synthetic oligonucleotide
agauuggcugcaacauauu

SEQ ID NO: 985747 - RNA, 19 nt, Artificial Sequence
  Description of Artificial Sequence: Synthetic oligonucleotide
acacccagaggcagacggu

SEQ ID NO: 985748 - RNA, 19 nt, Artificial Sequence
  Description of Artificial Sequence: Synthetic oligonucleotide
ggaugccagaugccacgug

SEQ ID NO: 985749 - RNA, 19 nt, Artificial Sequence
  Description of Artificial Sequence: Synthetic oligonucleotide
ccgacaaggauggcuguug

SEQ ID NO: 985750 - RNA, 19 nt, Artificial Sequence
  Description of Artificial Sequence: Synthetic oligonucleotide
aucagacugcagacucgcu

SEQ ID NO: 985751 - RNA, 19 nt, Artificial Sequence
  Description of Artificial Sequence: Synthetic oligonucleotide
caguuggacugagucuuga

SEQ ID NO: 985752 - RNA, 19 nt, Artificial Sequence
  Description of Artificial Sequence: Synthetic oligonucleotide
guuuuacaguuggcacuga

SEQ ID NO: 985753 - RNA, 19 nt, Artificial Sequence
  Description of Artificial Sequence: Synthetic oligonucleotide
gccaugggaaacauccaaa

SEQ ID NO: 985754 - RNA, 19 nt, Artificial Sequence
  Description of Artificial Sequence: Synthetic oligonucleotide
gagagccggugaaggagaa

SEQ ID NO: 985755 - RNA, 19 nt, Artificial Sequence
  Description of Artificial Sequence: Synthetic oligonucleotide
ccaguuggacugagucuug

SEQ ID NO: 985756 - RNA, 19 nt, Artificial Sequence
  Description of Artificial Sequence: Synthetic oligonucleotide
gccccgaccaguugguuua

SEQ ID NO: 985757 - RNA, 19 nt, Artificial Sequence
  Description of Artificial Sequence: Synthetic oligonucleotide
agccggugaaggagaacau

SEQ ID NO: 985758 - RNA, 19 nt, Artificial Sequence
  Description of Artificial Sequence: Synthetic oligonucleotide
cuucuccgacaaggauggc

SEQ ID NO: 985759 - RNA, 19 nt, Artificial Sequence
  Description of Artificial Sequence: Synthetic oligonucleotide
ggauccggguccgcacugc

SEQ ID NO: 985760 - RNA, 19 nt, Artificial Sequence
  Description of Artificial Sequence: Synthetic oligonucleotide
guauuuccgugcaguggcu

SEQ ID NO: 985761 - RNA, 19 nt, Artificial Sequence
  Description of Artificial Sequence: Synthetic oligonucleotide
guacucucucugaugguuu

SEQ ID NO: 985762 - RNA, 19 nt, Artificial Sequence
  Description of Artificial Sequence: Synthetic oligonucleotide
augcagcguuggccagcag

SEQ ID NO: 985763 - RNA, 19 nt, Artificial Sequence
  Description of Artificial Sequence: Synthetic oligonucleotide
gggugaucagagggccaag

SEQ ID NO: 985764 - RNA, 19 nt, Artificial Sequence
  Description of Artificial Sequence: Synthetic oligonucleotide
ccauauuggcuugaacucu

SEQ ID NO: 985765 - RNA, 19 nt, Artificial Sequence
  Description of Artificial Sequence: Synthetic oligonucleotide
gcccuguuugccauagaaa

SEQ ID NO: 985766 - RNA, 19 nt, Artificial Sequence
  Description of Artificial Sequence: Synthetic oligonucleotide
acccgaccgaugauuucau

SEQ ID NO: 985767 - RNA, 19 nt, Artificial Sequence
  Description of Artificial Sequence: Synthetic oligonucleotide
ccaugcagagaaagcacgu

SEQ ID NO: 985768 - RNA, 19 nt, Artificial Sequence
  Description of Artificial Sequence: Synthetic oligonucleotide
gagguacccgaccgaugau

SEQ ID NO: 985769 - RNA, 19 nt, Artificial Sequence
  Description of Artificial Sequence: Synthetic oligonucleotide
gaccugcugacggcuuaaa

SEQ ID NO: 985770 - RNA, 19 nt, Artificial Sequence
  Description of Artificial Sequence: Synthetic oligonucleotide
caugcuguccauggaugau

SEQ ID NO: 985771 - RNA, 19 nt, Artificial Sequence
  Description of Artificial Sequence: Synthetic oligonucleotide
ugacgcccaccugcccaac

SEQ ID NO: 985772 - RNA, 19 nt, Artificial Sequence
  Description of Artificial Sequence: Synthetic oligonucleotide
cagcguuggccagcagcuc

SEQ ID NO: 985773 - RNA, 19 nt, Artificial Sequence
  Description of Artificial Sequence: Synthetic oligonucleotide
gguacccgaccgaugauuu

SEQ ID NO: 985774 - RNA, 19 nt, Artificial Sequence
  Description of Artificial Sequence: Synthetic oligonucleotide
cuccgacaaggauggcugu

SEQ ID NO: 985775 - RNA, 19 nt, Artificial Sequence
  Description of Artificial Sequence: Synthetic oligonucleotide
ccaacaaaguuaccauuuu

SEQ ID NO: 985776 - RNA, 19 nt, Artificial Sequence
  Description of Artificial Sequence: Synthetic oligonucleotide
ccauauggguugucauuua

SEQ ID NO: 985777 - RNA, 19 nt, Artificial Sequence
  Description of Artificial Sequence: Synthetic oligonucleotide
acgccccaugguaggcaug

SEQ ID NO: 985778 - RNA, 19 nt, Artificial Sequence
  Description of Artificial Sequence: Synthetic oligonucleotide
gccgccgccgccgccgccg

SEQ ID NO: 985779 - RNA, 19 nt, Artificial Sequence
  Description of Artificial Sequence: Synthetic oligonucleotide
cgacaaggauggcuguuga

SEQ ID NO: 985780 - RNA, 19 nt, Artificial Sequence
  Description of Artificial Sequence: Synthetic oligonucleotide
ggggaucauggcagggaaa

SEQ ID NO: 985781 - RNA, 19 nt, Artificial Sequence
  Description of Artificial Sequence: Synthetic oligonucleotide
gucacacuacaggcaugcu

SEQ ID NO: 985782 - RNA, 19 nt, Artificial Sequence
  Description of Artificial Sequence: Synthetic oligonucleotide
ugccgccgccgccgccgcc

SEQ ID NO: 985783 - RNA, 19 nt, Artificial Sequence
  Description of Artificial Sequence: Synthetic oligonucleotide
cugccgccgccgccgccgc

SEQ ID NO: 985784 - RNA, 19 nt, Artificial Sequence
  Description of Artificial Sequence: Synthetic oligonucleotide
cggcuuaaaauggaugugu

SEQ ID NO: 985785 - RNA, 19 nt, Artificial Sequence
  Description of Artificial Sequence: Synthetic oligonucleotide
gccugcacacacacccaga

SEQ ID NO: 985786 - RNA, 19 nt, Artificial Sequence
  Description of Artificial Sequence: Synthetic oligonucleotide
ggaugguagcucccucuuu

SEQ ID NO: 985787 - RNA, 19 nt, Artificial Sequence
  Description of Artificial Sequence: Synthetic oligonucleotide
gcucccauauuggcuugaa

SEQ ID NO: 985788 - RNA, 19 nt, Artificial Sequence
  Description of Artificial Sequence: Synthetic oligonucleotide
ggcagacgguaggaauaaa

SEQ ID NO: 985789 - RNA, 19 nt, Artificial Sequence
  Description of Artificial Sequence: Synthetic oligonucleotide
gcacguuugcaggcagcaa

SEQ ID NO: 985790 - RNA, 19 nt, Artificial Sequence
  Description of Artificial Sequence: Synthetic oligonucleotide
ccaccaagugagaguauuu

SEQ ID NO: 985791 - RNA, 19 nt, Artificial Sequence
  Description of Artificial Sequence: Synthetic oligonucleotide
ccucggaauacaucuccuu

SEQ ID NO: 985792 - RNA, 19 nt, Artificial Sequence
  Description of Artificial Sequence: Synthetic oligonucleotide
ccccgaccaguugguuuag

SEQ ID NO: 985793 - RNA, 19 nt, Artificial Sequence
  Description of Artificial Sequence: Synthetic oligonucleotide
ccgccgccgccgccgccgc

SEQ ID NO: 985794 - RNA, 19 nt, Artificial Sequence
  Description of Artificial Sequence: Synthetic oligonucleotide
cccgaccgaugauuucauu

SEQ ID NO: 985795 - RNA, 19 nt, Artificial Sequence
  Description of Artificial Sequence: Synthetic oligonucleotide
cagccccgaccaguugguu

SEQ ID NO: 985796 - RNA, 19 nt, Artificial Sequence
  Description of Artificial Sequence: Synthetic oligonucleotide
cccgaccaguugguuuagu

SEQ ID NO: 985797 - RNA, 19 nt, Artificial Sequence
  Description of Artificial Sequence: Synthetic oligonucleotide
cgccgccgccgccgccgcc

SEQ ID NO: 985798 - RNA, 19 nt, Artificial Sequence
  Description of Artificial Sequence: Synthetic oligonucleotide
aagucaaacacacacacac

SEQ ID NO: 985799 - RNA, 19 nt, Artificial Sequence
  Description of Artificial Sequence: Synthetic oligonucleotide
aacacacacacacaaacac

SEQ ID NO: 985800 - RNA, 19 nt, Artificial Sequence
  Description of Artificial Sequence: Synthetic oligonucleotide
uccauuuucgugcacaucc

SEQ ID NO: 985801 - RNA, 19 nt, Artificial Sequence
  Description of Artificial Sequence: Synthetic oligonucleotide
uaaacgucgagguggaagg

SEQ ID NO: 985802 - RNA, 19 nt, Artificial Sequence
  Description of Artificial Sequence: Synthetic oligonucleotide
uaugaauccggucucuucc

SEQ ID NO: 985803 - RNA, 19 nt, Artificial Sequence
  Description of Artificial Sequence: Synthetic oligonucleotide
cauguaaacgucgaggugg

SEQ ID NO: 985804 - RNA, 19 nt, Artificial Sequence
  Description of Artificial Sequence: Synthetic oligonucleotide
aaacgcuccaguuccgugg

SEQ ID NO: 985805 - RNA, 19 nt, Artificial Sequence
  Description of Artificial Sequence: Synthetic oligonucleotide
ugugucugaucccugaccc

SEQ ID NO: 985806 - RNA, 19 nt, Artificial Sequence
  Description of Artificial Sequence: Synthetic oligonucleotide
ugcgguuccuccuuaaagg

SEQ ID NO: 985807 - RNA, 19 nt, Artificial Sequence
  Description of Artificial Sequence: Synthetic oligonucleotide
uauucaauaugaauccggu

SEQ ID NO: 985808 - RNA, 19 nt, Artificial Sequence
  Description of Artificial Sequence: Synthetic oligonucleotide
ugcguaaaagcguugccgg

SEQ ID NO: 985809 - RNA, 19 nt, Artificial Sequence
  Description of Artificial Sequence: Synthetic oligonucleotide
uacuuaaauagauucaaua

SEQ ID NO: 985810 - RNA, 19 nt, Artificial Sequence
  Description of Artificial Sequence: Synthetic oligonucleotide
caaacacacacacacaaac

SEQ ID NO: 985811 - RNA, 19 nt, Artificial Sequence
  Description of Artificial Sequence: Synthetic oligonucleotide
gagucgucgugauagaaag

SEQ ID NO: 985812 - RNA, 19 nt, Artificial Sequence
  Description of Artificial Sequence: Synthetic oligonucleotide
guaugagucgucgugauag

SEQ ID NO: 985813 - RNA, 19 nt, Artificial Sequence
  Description of Artificial Sequence: Synthetic oligonucleotide
aaaauagacucuagacacg

SEQ ID NO: 985814 - RNA, 19 nt, Artificial Sequence
  Description of Artificial Sequence: Synthetic oligonucleotide
auauucaauaugaauccgg

SEQ ID NO: 985815 - RNA, 19 nt, Artificial Sequence
  Description of Artificial Sequence: Synthetic oligonucleotide
uaaaaguacugucccggag

SEQ ID NO: 985816 - RNA, 19 nt, Artificial Sequence
  Description of Artificial Sequence: Synthetic oligonucleotide
ugacccgaaaaguagcugc

SEQ ID NO: 985817 - RNA, 19 nt, Artificial Sequence
  Description of Artificial Sequence: Synthetic oligonucleotide
guagggauccgucagguug

SEQ ID NO: 985818 - RNA, 19 nt, Artificial Sequence
  Description of Artificial Sequence: Synthetic oligonucleotide
uagacucuagacacgaagu

SEQ ID NO: 985819 - RNA, 19 nt, Artificial Sequence
  Description of Artificial Sequence: Synthetic oligonucleotide
uuuucgugcacauccgggc

SEQ ID NO: 985820 - RNA, 19 nt, Artificial Sequence
  Description of Artificial Sequence: Synthetic oligonucleotide
uuucgugcacauccgggcg

SEQ ID NO: 985821 - RNA, 19 nt, Artificial Sequence
  Description of Artificial Sequence: Synthetic oligonucleotide
guuggggacgaucaaacgc

SEQ ID NO: 985822 - RNA, 19 nt, Artificial Sequence
  Description of Artificial Sequence: Synthetic oligonucleotide
caaaauacgcuggaagggg

SEQ ID NO: 985823 - RNA, 19 nt, Artificial Sequence
  Description of Artificial Sequence: Synthetic oligonucleotide
aggcgagcgagccagaguc

SEQ ID NO: 985824 - RNA, 19 nt, Artificial Sequence
  Description of Artificial Sequence: Synthetic oligonucleotide
uuggggacgaucaaacgcu

SEQ ID NO: 985825 - RNA, 19 nt, Artificial Sequence
  Description of Artificial Sequence: Synthetic oligonucleotide
uugauaggggacaccggcg

SEQ ID NO: 985826 - RNA, 19 nt, Artificial Sequence
  Description of Artificial Sequence: Synthetic oligonucleotide
ugaucccugacccgaaaag

SEQ ID NO: 985827 - RNA, 19 nt, Artificial Sequence
  Description of Artificial Sequence: Synthetic oligonucleotide
augaauccggucucuuccc

SEQ ID NO: 985828 - RNA, 19 nt, Artificial Sequence
  Description of Artificial Sequence: Synthetic oligonucleotide
uuucaggaguuuguagucg

SEQ ID NO: 985829 - RNA, 19 nt, Artificial Sequence
  Description of Artificial Sequence: Synthetic oligonucleotide
acgugguucaucuugugca

SEQ ID NO: 985830 - RNA, 19 nt, Artificial Sequence
  Description of Artificial Sequence: Synthetic oligonucleotide
aaaagcguugccgggcuuc

SEQ ID NO: 985831 - RNA, 19 nt, Artificial Sequence
  Description of Artificial Sequence: Synthetic oligonucleotide
ggauccgucagguugagug

SEQ ID NO: 985832 - RNA, 19 nt, Artificial Sequence
  Description of Artificial Sequence: Synthetic oligonucleotide
agguugagugccaaggugg

SEQ ID NO: 985833 - RNA, 19 nt, Artificial Sequence
  Description of Artificial Sequence: Synthetic oligonucleotide
agacucuagacacgaagug

SEQ ID NO: 985834 - RNA, 19 nt, Artificial Sequence
  Description of Artificial Sequence: Synthetic oligonucleotide
guaaacgucgagguggaag

SEQ ID NO: 985835 - RNA, 19 nt, Artificial Sequence
  Description of Artificial Sequence: Synthetic oligonucleotide
aaaaccggcccggccaccc

SEQ ID NO: 985836 - RNA, 19 nt, Artificial Sequence
  Description of Artificial Sequence: Synthetic oligonucleotide
gacucuagacacgaagugc

SEQ ID NO: 985837 - RNA, 19 nt, Artificial Sequence
  Description of Artificial Sequence: Synthetic oligonucleotide
uagucguggagagacaggc

SEQ ID NO: 985838 - RNA, 19 nt, Artificial Sequence
  Description of Artificial Sequence: Synthetic oligonucleotide
aacgucgagguggaaggac

SEQ ID NO: 985839 - RNA, 19 nt, Artificial Sequence
  Description of Artificial Sequence: Synthetic oligonucleotide
ugugcguaaaagcguugcc

SEQ ID NO: 985840 - RNA, 19 nt, Artificial Sequence
  Description of Artificial Sequence: Synthetic oligonucleotide
gucaaacacacacacacaa

SEQ ID NO: 985841 - RNA, 19 nt, Artificial Sequence
  Description of Artificial Sequence: Synthetic oligonucleotide
aaacacacacacacaaaca

SEQ ID NO: 985842 - RNA, 19 nt, Artificial Sequence
  Description of Artificial Sequence: Synthetic oligonucleotide
acgaagugcguguuucuuc

SEQ ID NO: 985843 - RNA, 19 nt, Artificial Sequence
  Description of Artificial Sequence: Synthetic oligonucleotide
agggcuuugacaaagccgu

SEQ ID NO: 985844 - RNA, 19 nt, Artificial Sequence
  Description of Artificial Sequence: Synthetic oligonucleotide
aaagcguugccgggcuucc

SEQ ID NO: 985845 - RNA, 19 nt, Artificial Sequence
  Description of Artificial Sequence: Synthetic oligonucleotide
ucaaacacacacacacaaa

SEQ ID NO: 985846 - RNA, 19 nt, Artificial Sequence
  Description of Artificial Sequence: Synthetic oligonucleotide
acgcgccugugucugaucc

SEQ ID NO: 985847 - RNA, 19 nt, Artificial Sequence
  Description of Artificial Sequence: Synthetic oligonucleotide
ugagucgucgugauagaaa

SEQ ID NO: 985848 - RNA, 19 nt, Artificial Sequence
  Description of Artificial Sequence: Synthetic oligonucleotide
aacuggagaccgccggcgg

SEQ ID NO: 985849 - RNA, 19 nt, Artificial Sequence
  Description of Artificial Sequence: Synthetic oligonucleotide
ucagagacgcgccuguguc

SEQ ID NO: 985850 - RNA, 19 nt, Artificial Sequence
  Description of Artificial Sequence: Synthetic oligonucleotide
auuuucgugcacauccggg

SEQ ID NO: 985851 - RNA, 19 nt, Artificial Sequence
  Description of Artificial Sequence: Synthetic oligonucleotide
gugcguaaaagcguugccg

SEQ ID NO: 985852 - RNA, 19 nt, Artificial Sequence
  Description of Artificial Sequence: Synthetic oligonucleotide
cauuuucgugcacauccgg

SEQ ID NO: 985853 - RNA, 19 nt, Artificial Sequence
  Description of Artificial Sequence: Synthetic oligonucleotide
gguacgagcucccaguccc

SEQ ID NO: 985854 - RNA, 19 nt, Artificial Sequence
  Description of Artificial Sequence: Synthetic oligonucleotide
cuguuggggacgaucaaac

SEQ ID NO: 985855 - RNA, 19 nt, Artificial Sequence
  Description of Artificial Sequence: Synthetic oligonucleotide
guuucaggaguuuguaguc

SEQ ID NO: 985856 - RNA, 19 nt, Artificial Sequence
  Description of Artificial Sequence: Synthetic oligonucleotide
aguacugucccggaggcgu

SEQ ID NO: 985857 - RNA, 19 nt, Artificial Sequence
  Description of Artificial Sequence: Synthetic oligonucleotide
ugcgcggcgcuccagaccu

SEQ ID NO: 985858 - RNA, 19 nt, Artificial Sequence
  Description of Artificial Sequence: Synthetic oligonucleotide
ucuagacacgaagugcgug

SEQ ID NO: 985859 - RNA, 19 nt, Artificial Sequence
  Description of Artificial Sequence: Synthetic oligonucleotide
ugucugaucccugacccga

SEQ ID NO: 985860 - RNA, 19 nt, Artificial Sequence
  Description of Artificial Sequence: Synthetic oligonucleotide
ugucccggcaggcugagua

SEQ ID NO: 985861 - RNA, 19 nt, Artificial Sequence
  Description of Artificial Sequence: Synthetic oligonucleotide
ucccuagugucccggcagg

SEQ ID NO: 985862 - RNA, 19 nt, Artificial Sequence
  Description of Artificial Sequence: Synthetic oligonucleotide
ucccuguuaaauacacaaa

SEQ ID NO: 985863 - RNA, 19 nt, Artificial Sequence
  Description of Artificial Sequence: Synthetic oligonucleotide
uggugcgcccgcuuucucg

SEQ ID NO: 985864 - RNA, 19 nt, Artificial Sequence
  Description of Artificial Sequence: Synthetic oligonucleotide
aggaguuuguagucgugga

SEQ ID NO: 985865 - RNA, 19 nt, Artificial Sequence
  Description of Artificial Sequence: Synthetic oligonucleotide
cacgugguucaucuugugc

SEQ ID NO: 985866 - RNA, 19 nt, Artificial Sequence
  Description of Artificial Sequence: Synthetic oligonucleotide
ucggguacgagcucccagu

SEQ ID NO: 985867 - RNA, 19 nt, Artificial Sequence
  Description of Artificial Sequence: Synthetic oligonucleotide
cugcgguuccuccuuaaag

SEQ ID NO: 985868 - RNA, 19 nt, Artificial Sequence
  Description of Artificial Sequence: Synthetic oligonucleotide
agugugugcgcggcgcucc

SEQ ID NO: 985869 - RNA, 19 nt, Artificial Sequence
  Description of Artificial Sequence: Synthetic oligonucleotide
aaggccggcaguacucgac

SEQ ID NO: 985870 - RNA, 19 nt, Artificial Sequence
  Description of Artificial Sequence: Synthetic oligonucleotide
uucgcuccacuuugaugcg

SEQ ID NO: 985871 - RNA, 19 nt, Artificial Sequence
  Description of Artificial Sequence: Synthetic oligonucleotide
aggcuguuccauuuucgug

SEQ ID NO: 985872 - RNA, 19 nt, Artificial Sequence
  Description of Artificial Sequence: Synthetic oligonucleotide
cuagugucccggcaggcug

SEQ ID NO: 985873 - RNA, 19 nt, Artificial Sequence
  Description of Artificial Sequence: Synthetic oligonucleotide
ugcguaugagucgucguga

SEQ ID NO: 985874 - RNA, 19 nt, Artificial Sequence
  Description of Artificial Sequence: Synthetic oligonucleotide
ucugguacggucugcgguu

SEQ ID NO: 985875 - RNA, 19 nt, Artificial Sequence
  Description of Artificial Sequence: Synthetic oligonucleotide
aauaugaauccggucucuu

SEQ ID NO: 985876 - RNA, 19 nt, Artificial Sequence
  Description of Artificial Sequence: Synthetic oligonucleotide
ggccauguaaacgucgagg

SEQ ID NO: 985877 - RNA, 19 nt, Artificial Sequence
  Description of Artificial Sequence: Synthetic oligonucleotide
cuuaaaggcggaggcgccg

SEQ ID NO: 985878 - RNA, 19 nt, Artificial Sequence
  Description of Artificial Sequence: Synthetic oligonucleotide
ucgucgugauagaaaggcu

SEQ ID NO: 985879 - RNA, 19 nt, Artificial Sequence
  Description of Artificial Sequence: Synthetic oligonucleotide
uaugagucgucgugauaga

SEQ ID NO: 985880 - RNA, 19 nt, Artificial Sequence
  Description of Artificial Sequence: Synthetic oligonucleotide
agugcguguuucuucucca

SEQ ID NO: 985881 - RNA, 19 nt, Artificial Sequence
  Description of Artificial Sequence: Synthetic oligonucleotide
uggccgucggguacgagcu

SEQ ID NO: 985882 - RNA, 19 nt, Artificial Sequence
  Description of Artificial Sequence: Synthetic oligonucleotide
ugcacauccgggcggucug

SEQ ID NO: 985883 - RNA, 19 nt, Artificial Sequence
  Description of Artificial Sequence: Synthetic oligonucleotide
ggguaaaaguacugucccg

SEQ ID NO: 985884 - RNA, 19 nt, Artificial Sequence
  Description of Artificial Sequence: Synthetic oligonucleotide
agggguccgaccguauccc

SEQ ID NO: 985885 - RNA, 19 nt, Artificial Sequence
  Description of Artificial Sequence: Synthetic oligonucleotide
agaccuccgggccggugcc

SEQ ID NO: 985886 - RNA, 19 nt, Artificial Sequence
  Description of Artificial Sequence: Synthetic oligonucleotide
cugugcguaaaagcguugc

SEQ ID NO: 985887 - RNA, 19 nt, Artificial Sequence
  Description of Artificial Sequence: Synthetic oligonucleotide
ggcaguacucgacagcccc

SEQ ID NO: 985888 - RNA, 19 nt, Artificial Sequence
  Description of Artificial Sequence: Synthetic oligonucleotide
cugcaggauccaaaaccgg

SEQ ID NO: 985889 - RNA, 19 nt, Artificial Sequence
  Description of Artificial Sequence: Synthetic oligonucleotide
uuaaaggcggaggcgccgc

SEQ ID NO: 985890 - RNA, 19 nt, Artificial Sequence
  Description of Artificial Sequence: Synthetic oligonucleotide
uagcugaugguggccgucg

SEQ ID NO: 985891 - RNA, 19 nt, Artificial Sequence
  Description of Artificial Sequence: Synthetic oligonucleotide
uaaaggcggaggcgccgcg

SEQ ID NO: 985892 - RNA, 19 nt, Artificial Sequence
  Description of Artificial Sequence: Synthetic oligonucleotide
cugcguaugagucgucgug

SEQ ID NO: 985893 - RNA, 19 nt, Artificial Sequence
  Description of Artificial Sequence: Synthetic oligonucleotide
guggccgucggguacgagc

SEQ ID NO: 985894 - RNA, 19 nt, Artificial Sequence
  Description of Artificial Sequence: Synthetic oligonucleotide
agaaggccggcaguacucg

SEQ ID NO: 985895 - RNA, 19 nt, Artificial Sequence
  Description of Artificial Sequence: Synthetic oligonucleotide
gacccgaaaaguagcugcc

SEQ ID NO: 985896 - RNA, 19 nt, Artificial Sequence
  Description of Artificial Sequence: Synthetic oligonucleotide
agcguugccgggcuuccag

SEQ ID NO: 985897 - RNA, 19 nt, Artificial Sequence
  Description of Artificial Sequence: Synthetic oligonucleotide
aacugcugagguugguaua

SEQ ID NO: 985898 - RNA, 19 nt, Artificial Sequence
  Description of Artificial Sequence: Synthetic oligonucleotide
uggugcgugugggagguag

SEQ ID NO: 985899 - RNA, 19 nt, Artificial Sequence
  Description of Artificial Sequence: Synthetic oligonucleotide
gccgcgauagcguagcccc

SEQ ID NO: 985900 - RNA, 19 nt, Artificial Sequence
  Description of Artificial Sequence: Synthetic oligonucleotide
aaguacugucccggaggcg

SEQ ID NO: 985901 - RNA, 19 nt, Artificial Sequence
  Description of Artificial Sequence: Synthetic oligonucleotide
cuccuuaaaggcggaggcg

SEQ ID NO: 985902 - RNA, 19 nt, Artificial Sequence
  Description of Artificial Sequence: Synthetic oligonucleotide
acacacacacacaaacaca

SEQ ID NO: 985903 - RNA, 19 nt, Artificial Sequence
  Description of Artificial Sequence: Synthetic oligonucleotide
gugggcgucgucgugauca

SEQ ID NO: 985904 - RNA, 19 nt, Artificial Sequence
  Description of Artificial Sequence: Synthetic oligonucleotide
cacgccguugcuguugggg

SEQ ID NO: 985905 - RNA, 19 nt, Artificial Sequence
  Description of Artificial Sequence: Synthetic oligonucleotide
gaggcgagcuucagagacg

SEQ ID NO: 985906 - RNA, 19 nt, Artificial Sequence
  Description of Artificial Sequence: Synthetic oligonucleotide
cagaccucgucucugccuc

SEQ ID NO: 985907 - RNA, 19 nt, Artificial Sequence
  Description of Artificial Sequence: Synthetic oligonucleotide
gaucacgccguugcuguug

SEQ ID NO: 985908 - RNA, 19 nt, Artificial Sequence
  Description of Artificial Sequence: Synthetic oligonucleotide
caaacgcuccaguuccgug

SEQ ID NO: 985909 - RNA, 19 nt, Artificial Sequence
  Description of Artificial Sequence: Synthetic oligonucleotide
cacacacacacaaacacau

SEQ ID NO: 985910 - RNA, 19 nt, Artificial Sequence
  Description of Artificial Sequence: Synthetic oligonucleotide
ucugcgguuccuccuuaaa

SEQ ID NO: 985911 - RNA, 19 nt, Artificial Sequence
  Description of Artificial Sequence: Synthetic oligonucleotide
agagacgcgccugugucug

SEQ ID NO: 985912 - RNA, 19 nt, Artificial Sequence
  Description of Artificial Sequence: Synthetic oligonucleotide
guagucguggagagacagg

SEQ ID NO: 985913 - RNA, 19 nt, Artificial Sequence
  Description of Artificial Sequence: Synthetic oligonucleotide
ucugaucccugacccgaaa

SEQ ID NO: 985914 - RNA, 19 nt, Artificial Sequence
  Description of Artificial Sequence: Synthetic oligonucleotide
ggugcgcccgcuuucucgg

SEQ ID NO: 985915 - RNA, 19 nt, Artificial Sequence
  Description of Artificial Sequence: Synthetic oligonucleotide
ucggcgucgcuuccuucag

SEQ ID NO: 985916 - RNA, 19 nt, Artificial Sequence
  Description of Artificial Sequence: Synthetic oligonucleotide
uaucccgccgcugcguaug

SEQ ID NO: 985917 - RNA, 19 nt, Artificial Sequence
  Description of Artificial Sequence: Synthetic oligonucleotide
acgagcucccagucccgac

SEQ ID NO: 985918 - RNA, 19 nt, Artificial Sequence
  Description of Artificial Sequence: Synthetic oligonucleotide
ccgaaaaguagcugccugc

SEQ ID NO: 985919 - RNA, 19 nt, Artificial Sequence
  Description of Artificial Sequence: Synthetic oligonucleotide
agucaaacacacacacaca

SEQ ID NO: 985920 - RNA, 19 nt, Artificial Sequence
  Description of Artificial Sequence: Synthetic oligonucleotide
acacacacacaaacacauc

SEQ ID NO: 985921 - RNA, 19 nt, Artificial Sequence
  Description of Artificial Sequence: Synthetic oligonucleotide
ccauuuucgugcacauccg

SEQ ID NO: 985922 - RNA, 19 nt, Artificial Sequence
  Description of Artificial Sequence: Synthetic oligonucleotide
gucggguacgagcucccag

SEQ ID NO: 985923 - RNA, 19 nt, Artificial Sequence
  Description of Artificial Sequence: Synthetic oligonucleotide
aaacgucgagguggaagga

SEQ ID NO: 985924 - RNA, 19 nt, Artificial Sequence
  Description of Artificial Sequence: Synthetic oligonucleotide
acgccguugcuguugggga

SEQ ID NO: 985925 - RNA, 19 nt, Artificial Sequence
  Description of Artificial Sequence: Synthetic oligonucleotide
gcgguuccuccuuaaaggc

SEQ ID NO: 985926 - RNA, 19 nt, Artificial Sequence
  Description of Artificial Sequence: Synthetic oligonucleotide
cauccgggcggucuggguc

SEQ ID NO: 985927 - RNA, 19 nt, Artificial Sequence
  Description of Artificial Sequence: Synthetic oligonucleotide
uccgaccguaucccgccgc

SEQ ID NO: 985928 - RNA, 19 nt, Artificial Sequence
  Description of Artificial Sequence: Synthetic oligonucleotide
gauccaaaaccggcccggc

SEQ ID NO: 985929 - RNA, 19 nt, Artificial Sequence
  Description of Artificial Sequence: Synthetic oligonucleotide
ggaggcgugggcgucgucg

SEQ ID NO: 985930 - RNA, 19 nt, Artificial Sequence
  Description of Artificial Sequence: Synthetic oligonucleotide
cgucgugauagaaaggcug

SEQ ID NO: 985931 - RNA, 19 nt, Artificial Sequence
  Description of Artificial Sequence: Synthetic oligonucleotide
gcguaaaagcguugccggg

SEQ ID NO: 985932 - RNA, 19 nt, Artificial Sequence
  Description of Artificial Sequence: Synthetic oligonucleotide
aggcgccgcgacccaagcc

SEQ ID NO: 985933 - RNA, 19 nt, Artificial Sequence
  Description of Artificial Sequence: Synthetic oligonucleotide
uggggacgaucaaacgcuc

SEQ ID NO: 985934 - RNA, 19 nt, Artificial Sequence
  Description of Artificial Sequence: Synthetic oligonucleotide
caguacucgacagccccgc

SEQ ID NO: 985935 - RNA, 19 nt, Artificial Sequence
  Description of Artificial Sequence: Synthetic oligonucleotide
gcgagcuucagagacgcgc

SEQ ID NO: 985936 - RNA, 19 nt, Artificial Sequence
  Description of Artificial Sequence: Synthetic oligonucleotide
guaaaagcguugccgggcu

SEQ ID NO: 985937 - RNA, 19 nt, Artificial Sequence
  Description of Artificial Sequence: Synthetic oligonucleotide
gggacgaucaaacgcucca

SEQ ID NO: 985938 - RNA, 19 nt, Artificial Sequence
  Description of Artificial Sequence: Synthetic oligonucleotide
ggcugcgugccucugguac

SEQ ID NO: 985939 - RNA, 19 nt, Artificial Sequence
  Description of Artificial Sequence: Synthetic oligonucleotide
auccgggcggucugggucu

SEQ ID NO: 985940 - RNA, 19 nt, Artificial Sequence
  Description of Artificial Sequence: Synthetic oligonucleotide
gguccgaccguaucccgcc

SEQ ID NO: 985941 - RNA, 19 nt, Artificial Sequence
  Description of Artificial Sequence: Synthetic oligonucleotide
gcugcgugccucugguacg

SEQ ID NO: 985942 - RNA, 19 nt, Artificial Sequence
  Description of Artificial Sequence: Synthetic oligonucleotide
cuuccagaccucgucucug

SEQ ID NO: 985943 - RNA, 19 nt, Artificial Sequence
  Description of Artificial Sequence: Synthetic oligonucleotide
cgucgcuuccuucaguucc

SEQ ID NO: 985944 - RNA, 19 nt, Artificial Sequence
  Description of Artificial Sequence: Synthetic oligonucleotide
gagggugcggaggcugggg

SEQ ID NO: 985945 - RNA, 19 nt, Artificial Sequence
  Description of Artificial Sequence: Synthetic oligonucleotide
cucggcgucgcuuccuuca

SEQ ID NO: 985946 - RNA, 19 nt, Artificial Sequence
  Description of Artificial Sequence: Synthetic oligonucleotide
cugacccgaaaaguagcug

SEQ ID NO: 985947 - RNA, 19 nt, Artificial Sequence
  Description of Artificial Sequence: Synthetic oligonucleotide
gguggccgcccgcaaaggg

SEQ ID NO: 985948 - RNA, 19 nt, Artificial Sequence
  Description of Artificial Sequence: Synthetic oligonucleotide
ugcgugugggagguagcug

SEQ ID NO: 985949 - RNA, 19 nt, Artificial Sequence
  Description of Artificial Sequence: Synthetic oligonucleotide
gucgcuuccuucaguuccc

SEQ ID NO: 985950 - RNA, 19 nt, Artificial Sequence
  Description of Artificial Sequence: Synthetic oligonucleotide
ugugcgcggcgcuccagac

SEQ ID NO: 985951 - RNA, 19 nt, Artificial Sequence
  Description of Artificial Sequence: Synthetic oligonucleotide
cugggcgcaggcgagcgag

SEQ ID NO: 985952 - RNA, 19 nt, Artificial Sequence
  Description of Artificial Sequence: Synthetic oligonucleotide
cuugagaccccgguaggga

SEQ ID NO: 985953 - RNA, 19 nt, Artificial Sequence
  Description of Artificial Sequence: Synthetic oligonucleotide
aaaggcggaggcgccgcga

SEQ ID NO: 985954 - RNA, 19 nt, Artificial Sequence
  Description of Artificial Sequence: Synthetic oligonucleotide
uccggucgcgcguccucgg

SEQ ID NO: 985955 - RNA, 19 nt, Artificial Sequence
  Description of Artificial Sequence: Synthetic oligonucleotide
acgucgagguggaaggacu

SEQ ID NO: 985956 - RNA, 19 nt, Artificial Sequence
  Description of Artificial Sequence: Synthetic oligonucleotide
gcucccgggcccuugagac

SEQ ID NO: 985957 - RNA, 19 nt, Artificial Sequence
  Description of Artificial Sequence: Synthetic oligonucleotide
ucccucccuagugucccgg

SEQ ID NO: 985958 - RNA, 19 nt, Artificial Sequence
  Description of Artificial Sequence: Synthetic oligonucleotide
augagucgucgugauagaa

SEQ ID NO: 985959 - RNA, 19 nt, Artificial Sequence
  Description of Artificial Sequence: Synthetic oligonucleotide
uaaaagcguugccgggcuu

SEQ ID NO: 985960 - RNA, 19 nt, Artificial Sequence
  Description of Artificial Sequence: Synthetic oligonucleotide
cccugacccgaaaaguagc

SEQ ID NO: 985961 - RNA, 19 nt, Artificial Sequence
  Description of Artificial Sequence: Synthetic oligonucleotide
aguacucgacagccccgca

SEQ ID NO: 985962 - RNA, 19 nt, Artificial Sequence
  Description of Artificial Sequence: Synthetic oligonucleotide
gcgugugggagguagcuga

SEQ ID NO: 985963 - RNA, 19 nt, Artificial Sequence
  Description of Artificial Sequence: Synthetic oligonucleotide
agcugugcguaaaagcguu

SEQ ID NO: 985964 - RNA, 19 nt, Artificial Sequence
  Description of Artificial Sequence: Synthetic oligonucleotide
ccuuaaaggcggaggcgcc

SEQ ID NO: 985965 - RNA, 19 nt, Artificial Sequence
  Description of Artificial Sequence: Synthetic oligonucleotide
ccggcaguacucgacagcc

SEQ ID NO: 985966 - RNA, 19 nt, Artificial Sequence
  Description of Artificial Sequence: Synthetic oligonucleotide
cgaucaaacgcuccaguuc

SEQ ID NO: 985967 - RNA, 19 nt, Artificial Sequence
  Description of Artificial Sequence: Synthetic oligonucleotide
ggacgaucaaacgcuccag

SEQ ID NO: 985968 - RNA, 19 nt, Artificial Sequence
  Description of Artificial Sequence: Synthetic oligonucleotide
gucgugauagaaaggcugu

SEQ ID NO: 985969 - RNA, 19 nt, Artificial Sequence
  Description of Artificial Sequence: Synthetic oligonucleotide
agagggugcggaggcuggg

SEQ ID NO: 985970 - RNA, 19 nt, Artificial Sequence
  Description of Artificial Sequence: Synthetic oligonucleotide
cguaaaagcguugccgggc

SEQ ID NO: 985971 - RNA, 19 nt, Artificial Sequence
  Description of Artificial Sequence: Synthetic oligonucleotide
uguccggucgcgcguccuc

SEQ ID NO: 985972 - RNA, 19 nt, Artificial Sequence
  Description of Artificial Sequence: Synthetic oligonucleotide
uuccggcauuugguggccg

SEQ ID NO: 985973 - RNA, 19 nt, Artificial Sequence
  Description of Artificial Sequence: Synthetic oligonucleotide
caaagccguccgcgaagcc

SEQ ID NO: 985974 - RNA, 19 nt, Artificial Sequence
  Description of Artificial Sequence: Synthetic oligonucleotide
uucucggcgucgcuuccuu

SEQ ID NO: 985975 - RNA, 19 nt, Artificial Sequence
  Description of Artificial Sequence: Synthetic oligonucleotide
ucgcuccacuuugaugcgc

SEQ ID NO: 985976 - RNA, 19 nt, Artificial Sequence
  Description of Artificial Sequence: Synthetic oligonucleotide
guggcgucgcggcugcgug

SEQ ID NO: 985977 - RNA, 19 nt, Artificial Sequence
  Description of Artificial Sequence: Synthetic oligonucleotide
gcuuucucggcgucgcuuc

SEQ ID NO: 985978 - RNA, 19 nt, Artificial Sequence
  Description of Artificial Sequence: Synthetic oligonucleotide
cgagcuucagagacgcgcc

SEQ ID NO: 985979 - RNA, 19 nt, Artificial Sequence
  Description of Artificial Sequence: Synthetic oligonucleotide
guacgagcucccagucccg

SEQ ID NO: 985980 - RNA, 19 nt, Artificial Sequence
  Description of Artificial Sequence: Synthetic oligonucleotide
gagcggcgagcuguccucg

SEQ ID NO: 985981 - RNA, 19 nt, Artificial Sequence
  Description of Artificial Sequence: Synthetic oligonucleotide
gggguguccgugcggggcg

SEQ ID NO: 985982 - RNA, 19 nt, Artificial Sequence
  Description of Artificial Sequence: Synthetic oligonucleotide
acccgaaaaguagcugccu

SEQ ID NO: 985983 - RNA, 19 nt, Artificial Sequence
  Description of Artificial Sequence: Synthetic oligonucleotide
aguuccccgcugccugcag

SEQ ID NO: 985984 - RNA, 19 nt, Artificial Sequence
  Description of Artificial Sequence: Synthetic oligonucleotide
gaggcgccgcgacccaagc

SEQ ID NO: 985985 - RNA, 19 nt, Artificial Sequence
  Description of Artificial Sequence: Synthetic oligonucleotide
acugucccggaggcguggg

SEQ ID NO: 985986 - RNA, 19 nt, Artificial Sequence
  Description of Artificial Sequence: Synthetic oligonucleotide
cucccgggcccuugagacc

SEQ ID NO: 985987 - RNA, 19 nt, Artificial Sequence
  Description of Artificial Sequence: Synthetic oligonucleotide
gccagaguccagugugugc

SEQ ID NO: 985988 - RNA, 19 nt, Artificial Sequence
  Description of Artificial Sequence: Synthetic oligonucleotide
gacccgguguccggucgcg

SEQ ID NO: 985989 - RNA, 19 nt, Artificial Sequence
  Description of Artificial Sequence: Synthetic oligonucleotide
ggguacgagcucccagucc

SEQ ID NO: 985990 - RNA, 19 nt, Artificial Sequence
  Description of Artificial Sequence: Synthetic oligonucleotide
guccgaccguaucccgccg

SEQ ID NO: 985991 - RNA, 19 nt, Artificial Sequence
  Description of Artificial Sequence: Synthetic oligonucleotide
ggccucgcugcugcgagcg

SEQ ID NO: 985992 - RNA, 19 nt, Artificial Sequence
  Description of Artificial Sequence: Synthetic oligonucleotide
cagcuccgccgcgauagcg

SEQ ID NO: 985993 - RNA, 19 nt, Artificial Sequence
  Description of Artificial Sequence: Synthetic oligonucleotide
gaguaccaggcggcggggc

SEQ ID NO: 985994 - RNA, 19 nt, Artificial Sequence
  Description of Artificial Sequence: Synthetic oligonucleotide
ugggcgucgucgugaucac

SEQ ID NO: 985995 - RNA, 19 nt, Artificial Sequence
  Description of Artificial Sequence: Synthetic oligonucleotide
acauccgggcggucugggu

SEQ ID NO: 985996 - RNA, 19 nt, Artificial Sequence
  Description of Artificial Sequence: Synthetic oligonucleotide
cccuguuaaauacacaaau

SEQ ID NO: 985997 - RNA, 19 nt, Artificial Sequence
  Description of Artificial Sequence: Synthetic oligonucleotide
ggcgucacgugguucaucu

SEQ ID NO: 985998 - RNA, 19 nt, Artificial Sequence
  Description of Artificial Sequence: Synthetic oligonucleotide
gcugaguaccaggcggcgg

SEQ ID NO: 985999 - RNA, 19 nt, Artificial Sequence
  Description of Artificial Sequence: Synthetic oligonucleotide
guccggucgcgcguccucg

SEQ ID NO: 986000 - RNA, 19 nt, Artificial Sequence
  Description of Artificial Sequence: Synthetic oligonucleotide
ucgcuuccuucaguucccc

SEQ ID NO: 986001 - RNA, 19 nt, Artificial Sequence
  Description of Artificial Sequence: Synthetic oligonucleotide
agucccgacggcggccccg

SEQ ID NO: 986002 - RNA, 19 nt, Artificial Sequence
  Description of Artificial Sequence: Synthetic oligonucleotide
uggcgucgcggcugcgugc

SEQ ID NO: 986003 - RNA, 19 nt, Artificial Sequence
  Description of Artificial Sequence: Synthetic oligonucleotide
cacauccgggcggucuggg

SEQ ID NO: 986004 - RNA, 19 nt, Artificial Sequence
  Description of Artificial Sequence: Synthetic oligonucleotide
uguaaacgucgagguggaa

SEQ ID NO: 986005 - RNA, 19 nt, Artificial Sequence
  Description of Artificial Sequence: Synthetic oligonucleotide
ugggcgcaggcgagcgagc

SEQ ID NO: 986006 - RNA, 19 nt, Artificial Sequence
  Description of Artificial Sequence: Synthetic oligonucleotide
ugugugcgcggcgcuccag

SEQ ID NO: 986007 - RNA, 19 nt, Artificial Sequence
  Description of Artificial Sequence: Synthetic oligonucleotide
gggacccgguguccggucg

SEQ ID NO: 986008 - RNA, 19 nt, Artificial Sequence
  Description of Artificial Sequence: Synthetic oligonucleotide
agcuccgccgcgauagcgu

SEQ ID NO: 986009 - RNA, 19 nt, Artificial Sequence
  Description of Artificial Sequence: Synthetic oligonucleotide
gcccgcaaaggguggugcg

SEQ ID NO: 986010 - RNA, 19 nt, Artificial Sequence
  Description of Artificial Sequence: Synthetic oligonucleotide
ggcgagcuguccucggcug

SEQ ID NO: 986011 - RNA, 19 nt, Artificial Sequence
  Description of Artificial Sequence: Synthetic oligonucleotide
guagcugaugguggccguc

SEQ ID NO: 986012 - RNA, 19 nt, Artificial Sequence
  Description of Artificial Sequence: Synthetic oligonucleotide
gugcgcggcgcuccagacc

SEQ ID NO: 986013 - RNA, 19 nt, Artificial Sequence
  Description of Artificial Sequence: Synthetic oligonucleotide
gucgucgugaucacgccgu

SEQ ID NO: 986014 - RNA, 19 nt, Artificial Sequence
  Description of Artificial Sequence: Synthetic oligonucleotide
ugaucacgccguugcuguu

SEQ ID NO: 986015 - RNA, 19 nt, Artificial Sequence
  Description of Artificial Sequence: Synthetic oligonucleotide
gggguccgaccguaucccg

SEQ ID NO: 986016 - RNA, 19 nt, Artificial Sequence
  Description of Artificial Sequence: Synthetic oligonucleotide
ccgcuuucgcuccacuuug

SEQ ID NO: 986017 - RNA, 19 nt, Artificial Sequence
  Description of Artificial Sequence: Synthetic oligonucleotide
cuccgccgcgauagcguag

SEQ ID NO: 986018 - RNA, 19 nt, Artificial Sequence
  Description of Artificial Sequence: Synthetic oligonucleotide
accggcgggguggcgucgc

SEQ ID NO: 986019 - RNA, 19 nt, Artificial Sequence
  Description of Artificial Sequence: Synthetic oligonucleotide
gccggcaguacucgacagc

SEQ ID NO: 986020 - RNA, 19 nt, Artificial Sequence
  Description of Artificial Sequence: Synthetic oligonucleotide
caauaugaauccggucucu

SEQ ID NO: 986021 - RNA, 19 nt, Artificial Sequence
  Description of Artificial Sequence: Synthetic oligonucleotide
gugugcgcggcgcuccaga

SEQ ID NO: 986022 - RNA, 19 nt, Artificial Sequence
  Description of Artificial Sequence: Synthetic oligonucleotide
ucgucgugaucacgccguu

SEQ ID NO: 986023 - RNA, 19 nt, Artificial Sequence
  Description of Artificial Sequence: Synthetic oligonucleotide
agggauccgucagguugag

SEQ ID NO: 986024 - RNA, 19 nt, Artificial Sequence
  Description of Artificial Sequence: Synthetic oligonucleotide
guacugucccggaggcgug

SEQ ID NO: 986025 - RNA, 19 nt, Artificial Sequence
  Description of Artificial Sequence: Synthetic oligonucleotide
caaaaccggcccggccacc

SEQ ID NO: 986026 - RNA, 19 nt, Artificial Sequence
  Description of Artificial Sequence: Synthetic oligonucleotide
ugcugacgugggucaugac

SEQ ID NO: 986027 - RNA, 19 nt, Artificial Sequence
  Description of Artificial Sequence: Synthetic oligonucleotide
gccgggguguccgugcggg

SEQ ID NO: 986028 - RNA, 19 nt, Artificial Sequence
  Description of Artificial Sequence: Synthetic oligonucleotide
gacgcgccugugucugauc

SEQ ID NO: 986029 - RNA, 19 nt, Artificial Sequence
  Description of Artificial Sequence: Synthetic oligonucleotide
ggggacgaucaaacgcucc

SEQ ID NO: 986030 - RNA, 19 nt, Artificial Sequence
  Description of Artificial Sequence: Synthetic oligonucleotide
cccgguguccggucgcgcg

SEQ ID NO: 986031 - RNA, 19 nt, Artificial Sequence
  Description of Artificial Sequence: Synthetic oligonucleotide
gcaaaggguggugcgugug

SEQ ID NO: 986032 - RNA, 19 nt, Artificial Sequence
  Description of Artificial Sequence: Synthetic oligonucleotide
acugggcgcaggcgagcga

SEQ ID NO: 986033 - RNA, 19 nt, Artificial Sequence
  Description of Artificial Sequence: Synthetic oligonucleotide
cucuagacacgaagugcgu

SEQ ID NO: 986034 - RNA, 19 nt, Artificial Sequence
  Description of Artificial Sequence: Synthetic oligonucleotide
cugguacggucugcgguuc

SEQ ID NO: 986035 - RNA, 19 nt, Artificial Sequence
  Description of Artificial Sequence: Synthetic oligonucleotide
gaggcgugggcgucgucgu

SEQ ID NO: 986036 - RNA, 19 nt, Artificial Sequence
  Description of Artificial Sequence: Synthetic oligonucleotide
ggcggaggucccucccuag

SEQ ID NO: 986037 - RNA, 19 nt, Artificial Sequence
  Description of Artificial Sequence: Synthetic oligonucleotide
cugucccggaggcgugggc

SEQ ID NO: 986038 - RNA, 19 nt, Artificial Sequence
  Description of Artificial Sequence: Synthetic oligonucleotide
guacucgacagccccgcau

SEQ ID NO: 986039 - RNA, 19 nt, Artificial Sequence
  Description of Artificial Sequence: Synthetic oligonucleotide
gagugccaagguggguuuc

SEQ ID NO: 986040 - RNA, 19 nt, Artificial Sequence
  Description of Artificial Sequence: Synthetic oligonucleotide
cgucgucgugaucacgccg

SEQ ID NO: 986041 - RNA, 19 nt, Artificial Sequence
  Description of Artificial Sequence: Synthetic oligonucleotide
gccguugcugacguggguc

SEQ ID NO: 986042 - RNA, 19 nt, Artificial Sequence
  Description of Artificial Sequence: Synthetic oligonucleotide
cguccagccuucccggccg

SEQ ID NO: 986043 - RNA, 19 nt, Artificial Sequence
  Description of Artificial Sequence: Synthetic oligonucleotide
gucccgacggcggccccgg

SEQ ID NO: 986044 - RNA, 19 nt, Artificial Sequence
  Description of Artificial Sequence: Synthetic oligonucleotide
ccgcuuccggcauuuggug

SEQ ID NO: 986045 - RNA, 19 nt, Artificial Sequence
  Description of Artificial Sequence: Synthetic oligonucleotide
gcgucgucgugaucacgcc

SEQ ID NO: 986046 - RNA, 19 nt, Artificial Sequence
  Description of Artificial Sequence: Synthetic oligonucleotide
guacggucugcgguuccuc

SEQ ID NO: 986047 - RNA, 19 nt, Artificial Sequence
  Description of Artificial Sequence: Synthetic oligonucleotide
agacgcgccugugucugau

SEQ ID NO: 986048 - RNA, 19 nt, Artificial Sequence
  Description of Artificial Sequence: Synthetic oligonucleotide
aucccgccgcugcguauga

SEQ ID NO: 986049 - RNA, 19 nt, Artificial Sequence
  Description of Artificial Sequence: Synthetic oligonucleotide
gcgagcuguccucggcugc

SEQ ID NO: 986050 - RNA, 19 nt, Artificial Sequence
  Description of Artificial Sequence: Synthetic oligonucleotide
gagacgcgccugugucuga

SEQ ID NO: 986051 - RNA, 19 nt, Artificial Sequence
  Description of Artificial Sequence: Synthetic oligonucleotide
ggguccgaccguaucccgc

SEQ ID NO: 986052 - RNA, 19 nt, Artificial Sequence
  Description of Artificial Sequence: Synthetic oligonucleotide
ugcgagcggcgagcugucc

SEQ ID NO: 986053 - RNA, 19 nt, Artificial Sequence
  Description of Artificial Sequence: Synthetic oligonucleotide
cugcgagcggcgagcuguc

SEQ ID NO: 986054 - RNA, 19 nt, Artificial Sequence
  Description of Artificial Sequence: Synthetic oligonucleotide
ugccagggguccgaccgua

SEQ ID NO: 986055 - RNA, 19 nt, Artificial Sequence
  Description of Artificial Sequence: Synthetic oligonucleotide
ggugcgugugggagguagc

SEQ ID NO: 986056 - RNA, 19 nt, Artificial Sequence
  Description of Artificial Sequence: Synthetic oligonucleotide
ggacccgguguccggucgc

SEQ ID NO: 986057 - RNA, 19 nt, Artificial Sequence
  Description of Artificial Sequence: Synthetic oligonucleotide
gcugugcguaaaagcguug

SEQ ID NO: 986058 - RNA, 19 nt, Artificial Sequence
  Description of Artificial Sequence: Synthetic oligonucleotide
ggcgucgcggcugcgugcc

SEQ ID NO: 986059 - RNA, 19 nt, Artificial Sequence
  Description of Artificial Sequence: Synthetic oligonucleotide
aggcgcucagaaggcgugu

SEQ ID NO: 986060 - RNA, 19 nt, Artificial Sequence
  Description of Artificial Sequence: Synthetic oligonucleotide
gcguccucgggaacuggag

SEQ ID NO: 986061 - RNA, 19 nt, Artificial Sequence
  Description of Artificial Sequence: Synthetic oligonucleotide
cgucgagguggaaggacug

SEQ ID NO: 986062 - RNA, 19 nt, Artificial Sequence
  Description of Artificial Sequence: Synthetic oligonucleotide
cuucccggccggggugucc

SEQ ID NO: 986063 - RNA, 19 nt, Artificial Sequence
  Description of Artificial Sequence: Synthetic oligonucleotide
gcgacccaagcccagcugu

SEQ ID NO: 986064 - RNA, 19 nt, Artificial Sequence
  Description of Artificial Sequence: Synthetic oligonucleotide
ggaggcgccgcgacccaag

SEQ ID NO: 986065 - RNA, 19 nt, Artificial Sequence
  Description of Artificial Sequence: Synthetic oligonucleotide
cgcugcguaugagucgucg

SEQ ID NO: 986066 - RNA, 19 nt, Artificial Sequence
  Description of Artificial Sequence: Synthetic oligonucleotide
cguugccgggcuuccagac

SEQ ID NO: 986067 - RNA, 19 nt, Artificial Sequence
  Description of Artificial Sequence: Synthetic oligonucleotide
gucgcgcguccucgggaac

SEQ ID NO: 986068 - RNA, 19 nt, Artificial Sequence
  Description of Artificial Sequence: Synthetic oligonucleotide
gggaguaacugcugagguu

SEQ ID NO: 986069 - RNA, 19 nt, Artificial Sequence
  Description of Artificial Sequence: Synthetic oligonucleotide
gcacauccgggcggucugg

SEQ ID NO: 986070 - RNA, 19 nt, Artificial Sequence
  Description of Artificial Sequence: Synthetic oligonucleotide
gugcgugugggagguagcu

SEQ ID NO: 986071 - RNA, 19 nt, Artificial Sequence
  Description of Artificial Sequence: Synthetic oligonucleotide
ccucccuguuaaauacaca

SEQ ID NO: 986072 - RNA, 19 nt, Artificial Sequence
  Description of Artificial Sequence: Synthetic oligonucleotide
gguggugcgugugggaggu

SEQ ID NO: 986073 - RNA, 19 nt, Artificial Sequence
  Description of Artificial Sequence: Synthetic oligonucleotide
gguguccggucgcgcgucc

SEQ ID NO: 986074 - RNA, 19 nt, Artificial Sequence
  Description of Artificial Sequence: Synthetic oligonucleotide
ccguugcugacguggguca

SEQ ID NO: 986075 - RNA, 19 nt, Artificial Sequence
  Description of Artificial Sequence: Synthetic oligonucleotide
ccugacccgaaaaguagcu

SEQ ID NO: 986076 - RNA, 19 nt, Artificial Sequence
  Description of Artificial Sequence: Synthetic oligonucleotide
gcugcguaugagucgucgu

SEQ ID NO: 986077 - RNA, 19 nt, Artificial Sequence
  Description of Artificial Sequence: Synthetic oligonucleotide
ccgcaaaggguggugcgug

SEQ ID NO: 986078 - RNA, 19 nt, Artificial Sequence
  Description of Artificial Sequence: Synthetic oligonucleotide
guggccgcccgcaaagggu

SEQ ID NO: 986079 - RNA, 19 nt, Artificial Sequence
  Description of Artificial Sequence: Synthetic oligonucleotide
ggcgucgcuuccuucaguu

SEQ ID NO: 986080 - RNA, 19 nt, Artificial Sequence
  Description of Artificial Sequence: Synthetic oligonucleotide
ugguggccgucggguacga

SEQ ID NO: 986081 - RNA, 19 nt, Artificial Sequence
  Description of Artificial Sequence: Synthetic oligonucleotide
guguccgugcggggcgagc

SEQ ID NO: 986082 - RNA, 19 nt, Artificial Sequence
  Description of Artificial Sequence: Synthetic oligonucleotide
gugugugcgcggcgcucca

SEQ ID NO: 986083 - RNA, 19 nt, Artificial Sequence
  Description of Artificial Sequence: Synthetic oligonucleotide
gucugaucccugacccgaa

SEQ ID NO: 986084 - RNA, 19 nt, Artificial Sequence
  Description of Artificial Sequence: Synthetic oligonucleotide
gaccuccgggccggugccc

SEQ ID NO: 986085 - RNA, 19 nt, Artificial Sequence
  Description of Artificial Sequence: Synthetic oligonucleotide
guggugcgcccgcuuucuc

SEQ ID NO: 986086 - RNA, 19 nt, Artificial Sequence
  Description of Artificial Sequence: Synthetic oligonucleotide
gugcacauccgggcggucu

SEQ ID NO: 986087 - RNA, 19 nt, Artificial Sequence
  Description of Artificial Sequence: Synthetic oligonucleotide
uccgggcggucugggucug

SEQ ID NO: 986088 - RNA, 19 nt, Artificial Sequence
  Description of Artificial Sequence: Synthetic oligonucleotide
gcgucgcuuccuucaguuc

SEQ ID NO: 986089 - RNA, 19 nt, Artificial Sequence
  Description of Artificial Sequence: Synthetic oligonucleotide
ccagucccgacggcggccc

SEQ ID NO: 986090 - RNA, 19 nt, Artificial Sequence
  Description of Artificial Sequence: Synthetic oligonucleotide
ccgucggguacgagcuccc

SEQ ID NO: 986091 - RNA, 19 nt, Artificial Sequence
  Description of Artificial Sequence: Synthetic oligonucleotide
ccccgcauucucagccuug

SEQ ID NO: 986092 - RNA, 19 nt, Artificial Sequence
  Description of Artificial Sequence: Synthetic oligonucleotide
agaccccgguagggauccg

SEQ ID NO: 986093 - RNA, 19 nt, Artificial Sequence
  Description of Artificial Sequence: Synthetic oligonucleotide
cggguggccgcccgcaaag

SEQ ID NO: 986094 - RNA, 19 nt, Artificial Sequence
  Description of Artificial Sequence: Synthetic oligonucleotide
cgugcggggcgagcgaggg

SEQ ID NO: 986095 - RNA, 19 nt, Artificial Sequence
  Description of Artificial Sequence: Synthetic oligonucleotide
gcguugccgggcuuccaga

SEQ ID NO: 986096 - RNA, 19 nt, Artificial Sequence
  Description of Artificial Sequence: Synthetic oligonucleotide
cucgacagccccgcauucu

SEQ ID NO: 986097 - RNA, 19 nt, Artificial Sequence
  Description of Artificial Sequence: Synthetic oligonucleotide
cagucccgacggcggcccc

SEQ ID NO: 986098 - RNA, 19 nt, Artificial Sequence
  Description of Artificial Sequence: Synthetic oligonucleotide
gcccgcuuucucggcgucg

SEQ ID NO: 986099 - RNA, 19 nt, Artificial Sequence
  Description of Artificial Sequence: Synthetic oligonucleotide
ggcgagcuucagagacgcg

SEQ ID NO: 986100 - RNA, 19 nt, Artificial Sequence
  Description of Artificial Sequence: Synthetic oligonucleotide
cccuagugucccggcaggc

SEQ ID NO: 986101 - RNA, 19 nt, Artificial Sequence
  Description of Artificial Sequence: Synthetic oligonucleotide
gaccccgguagggauccgu

SEQ ID NO: 986102 - RNA, 19 nt, Artificial Sequence
  Description of Artificial Sequence: Synthetic oligonucleotide
gccgcugcguaugagucgu

SEQ ID NO: 986103 - RNA, 19 nt, Artificial Sequence
  Description of Artificial Sequence: Synthetic oligonucleotide
gucgcggcugcgugccucu

SEQ ID NO: 986104 - RNA, 19 nt, Artificial Sequence
  Description of Artificial Sequence: Synthetic oligonucleotide
caccggcgggguggcgucg

SEQ ID NO: 986105 - RNA, 19 nt, Artificial Sequence
  Description of Artificial Sequence: Synthetic oligonucleotide
gccucgcugcugcgagcgg

SEQ ID NO: 986106 - RNA, 19 nt, Artificial Sequence
  Description of Artificial Sequence: Synthetic oligonucleotide
cggcaguacucgacagccc

SEQ ID NO: 986107 - RNA, 19 nt, Artificial Sequence
  Description of Artificial Sequence: Synthetic oligonucleotide
cgcgccugugucugauccc

SEQ ID NO: 986108 - RNA, 19 nt, Artificial Sequence
  Description of Artificial Sequence: Synthetic oligonucleotide
gcguaugagucgucgugau

SEQ ID NO: 986109 - RNA, 19 nt, Artificial Sequence
  Description of Artificial Sequence: Synthetic oligonucleotide
ccggucgcgcguccucggg

SEQ ID NO: 986110 - RNA, 19 nt, Artificial Sequence
  Description of Artificial Sequence: Synthetic oligonucleotide
gggcccuugagaccccggu

SEQ ID NO: 986111 - RNA, 19 nt, Artificial Sequence
  Description of Artificial Sequence: Synthetic oligonucleotide
cgugccucugguacggucu

SEQ ID NO: 986112 - RNA, 19 nt, Artificial Sequence
  Description of Artificial Sequence: Synthetic oligonucleotide
gguguccgugcggggcgag

SEQ ID NO: 986113 - RNA, 19 nt, Artificial Sequence
  Description of Artificial Sequence: Synthetic oligonucleotide
ccggcaggcugaguaccag

SEQ ID NO: 986114 - RNA, 19 nt, Artificial Sequence
  Description of Artificial Sequence: Synthetic oligonucleotide
gguacggucugcgguuccu

SEQ ID NO: 986115 - RNA, 19 nt, Artificial Sequence
  Description of Artificial Sequence: Synthetic oligonucleotide
gugcggggcgagcgaggga

SEQ ID NO: 986116 - RNA, 19 nt, Artificial Sequence
  Description of Artificial Sequence: Synthetic oligonucleotide
cggguacgagcucccaguc

SEQ ID NO: 986117 - RNA, 19 nt, Artificial Sequence
  Description of Artificial Sequence: Synthetic oligonucleotide
gcgagcggcgagcuguccu

SEQ ID NO: 986118 - RNA, 19 nt, Artificial Sequence
  Description of Artificial Sequence: Synthetic oligonucleotide
cgggguguccgugcggggc

SEQ ID NO: 986119 - RNA, 19 nt, Artificial Sequence
  Description of Artificial Sequence: Synthetic oligonucleotide
cguggaggcgagcuucaga

SEQ ID NO: 986120 - RNA, 19 nt, Artificial Sequence
  Description of Artificial Sequence: Synthetic oligonucleotide
gguagggauccgucagguu

SEQ ID NO: 986121 - RNA, 19 nt, Artificial Sequence
  Description of Artificial Sequence: Synthetic oligonucleotide
uggcgcccagggacacguu

SEQ ID NO: 986122 - RNA, 19 nt, Artificial Sequence
  Description of Artificial Sequence: Synthetic oligonucleotide
gcgccugugucugaucccu

SEQ ID NO: 986123 - RNA, 19 nt, Artificial Sequence
  Description of Artificial Sequence: Synthetic oligonucleotide
cgccgcgauagcguagccc

SEQ ID NO: 986124 - RNA, 19 nt, Artificial Sequence
  Description of Artificial Sequence: Synthetic oligonucleotide
gcggcugcgugccucuggu

SEQ ID NO: 986125 - RNA, 19 nt, Artificial Sequence
  Description of Artificial Sequence: Synthetic oligonucleotide
ccgggguguccgugcgggg

SEQ ID NO: 986126 - RNA, 19 nt, Artificial Sequence
  Description of Artificial Sequence: Synthetic oligonucleotide
cccggcaggcugaguacca

SEQ ID NO: 986127 - RNA, 19 nt, Artificial Sequence
  Description of Artificial Sequence: Synthetic oligonucleotide
cgcccgcaaaggguggugc

SEQ ID NO: 986128 - RNA, 19 nt, Artificial Sequence
  Description of Artificial Sequence: Synthetic oligonucleotide
gcgcguccucgggaacugg

SEQ ID NO: 986129 - RNA, 19 nt, Artificial Sequence
  Description of Artificial Sequence: Synthetic oligonucleotide
gggcggaggucccucccua

SEQ ID NO: 986130 - RNA, 19 nt, Artificial Sequence
  Description of Artificial Sequence: Synthetic oligonucleotide
gguggccgucggguacgag

SEQ ID NO: 986131 - RNA, 19 nt, Artificial Sequence
  Description of Artificial Sequence: Synthetic oligonucleotide
ccgguuggcagcugugcgu

SEQ ID NO: 986132 - RNA, 19 nt, Artificial Sequence
  Description of Artificial Sequence: Synthetic oligonucleotide
ccucggcugcggcgggacc

SEQ ID NO: 986133 - RNA, 19 nt, Artificial Sequence
  Description of Artificial Sequence: Synthetic oligonucleotide
cgcggcgcuccagaccucc

SEQ ID NO: 986134 - RNA, 19 nt, Artificial Sequence
  Description of Artificial Sequence: Synthetic oligonucleotide
gggcgucacgugguucauc

SEQ ID NO: 986135 - RNA, 19 nt, Artificial Sequence
  Description of Artificial Sequence: Synthetic oligonucleotide
ggccgucggguacgagcuc

SEQ ID NO: 986136 - RNA, 19 nt, Artificial Sequence
  Description of Artificial Sequence: Synthetic oligonucleotide
ggacaccggcgggguggcg

SEQ ID NO: 986137 - RNA, 19 nt, Artificial Sequence
  Description of Artificial Sequence: Synthetic oligonucleotide
ccuagugucccggcaggcu

SEQ ID NO: 986138 - RNA, 19 nt, Artificial Sequence
  Description of Artificial Sequence: Synthetic oligonucleotide
gcggccgguuggcagcugu

SEQ ID NO: 986139 - RNA, 19 nt, Artificial Sequence
  Description of Artificial Sequence: Synthetic oligonucleotide
ggguguccgugcggggcga

SEQ ID NO: 986140 - RNA, 19 nt, Artificial Sequence
  Description of Artificial Sequence: Synthetic oligonucleotide
guguccggucgcgcguccu

SEQ ID NO: 986141 - RNA, 19 nt, Artificial Sequence
  Description of Artificial Sequence: Synthetic oligonucleotide
cggcgggacccgguguccg

SEQ ID NO: 986142 - RNA, 19 nt, Artificial Sequence
  Description of Artificial Sequence: Synthetic oligonucleotide
ccgcccgcaaaggguggug

SEQ ID NO: 986143 - RNA, 19 nt, Artificial Sequence
  Description of Artificial Sequence: Synthetic oligonucleotide
gcggaggcgccgcgaccca

SEQ ID NO: 986144 - RNA, 19 nt, Artificial Sequence
  Description of Artificial Sequence: Synthetic oligonucleotide
cgcgcguccucgggaacug

SEQ ID NO: 986145 - RNA, 19 nt, Artificial Sequence
  Description of Artificial Sequence: Synthetic oligonucleotide
ggcgggcguccagccuucc

SEQ ID NO: 986146 - RNA, 19 nt, Artificial Sequence
  Description of Artificial Sequence: Synthetic oligonucleotide
ccgucagguugagugccaa

SEQ ID NO: 986147 - RNA, 19 nt, Artificial Sequence
  Description of Artificial Sequence: Synthetic oligonucleotide
cgaccguaucccgccgcug

SEQ ID NO: 986148 - RNA, 19 nt, Artificial Sequence
  Description of Artificial Sequence: Synthetic oligonucleotide
ccagugugugcgcggcgcu

SEQ ID NO: 986149 - RNA, 19 nt, Artificial Sequence
  Description of Artificial Sequence: Synthetic oligonucleotide
gggcgggcguccagccuuc

SEQ ID NO: 986150 - RNA, 19 nt, Artificial Sequence
  Description of Artificial Sequence: Synthetic oligonucleotide
ccgaccguaucccgccgcu

SEQ ID NO: 986151 - RNA, 19 nt, Artificial Sequence
  Description of Artificial Sequence: Synthetic oligonucleotide
cccgcaaaggguggugcgu

SEQ ID NO: 986152 - RNA, 19 nt, Artificial Sequence
  Description of Artificial Sequence: Synthetic oligonucleotide
cgucgcggcugcgugccuc

SEQ ID NO: 986153 - RNA, 19 nt, Artificial Sequence
  Description of Artificial Sequence: Synthetic oligonucleotide
ccgcugcguaugagucguc

SEQ ID NO: 986154 - RNA, 19 nt, Artificial Sequence
  Description of Artificial Sequence: Synthetic oligonucleotide
ccggguggccgcccgcaaa

SEQ ID NO: 986155 - RNA, 19 nt, Artificial Sequence
  Description of Artificial Sequence: Synthetic oligonucleotide
cgguagggauccgucaggu

SEQ ID NO: 986156 - RNA, 19 nt, Artificial Sequence
  Description of Artificial Sequence: Synthetic oligonucleotide
cggucgcgcguccucggga

SEQ ID NO: 986157 - RNA, 19 nt, Artificial Sequence
  Description of Artificial Sequence: Synthetic oligonucleotide
gccccgcauucucagccuu

SEQ ID NO: 986158 - RNA, 19 nt, Artificial Sequence
  Description of Artificial Sequence: Synthetic oligonucleotide
cgcaaaggguggugcgugu

SEQ ID NO: 986159 - RNA, 19 nt, Artificial Sequence
  Description of Artificial Sequence: Synthetic oligonucleotide
gggauccgucagguugagu

SEQ ID NO: 986160 - RNA, 19 nt, Artificial Sequence
  Description of Artificial Sequence: Synthetic oligonucleotide
guggugcgugugggaggua

SEQ ID NO: 986161 - RNA, 19 nt, Artificial Sequence
  Description of Artificial Sequence: Synthetic oligonucleotide
cgguguccggucgcgcguc

SEQ ID NO: 986162 - RNA, 19 nt, Artificial Sequence
  Description of Artificial Sequence: Synthetic oligonucleotide
ccgguguccggucgcgcgu

SEQ ID NO: 986163 - RNA, 19 nt, Artificial Sequence
  Description of Artificial Sequence: Synthetic oligonucleotide
gcgucacgugguucaucuu

SEQ ID NO: 986164 - RNA, 19 nt, Artificial Sequence
  Description of Artificial Sequence: Synthetic oligonucleotide
cgcccgcuuucucggcguc

SEQ ID NO: 986165 - RNA, 19 nt, Artificial Sequence
  Description of Artificial Sequence: Synthetic oligonucleotide
ccuucccggccgggguguc

SEQ ID NO: 986166 - RNA, 19 nt, Artificial Sequence
  Description of Artificial Sequence: Synthetic oligonucleotide
gccgcccgcaaaggguggu

SEQ ID NO: 986167 - RNA, 19 nt, Artificial Sequence
  Description of Artificial Sequence: Synthetic oligonucleotide
ggggcgucacgugguucau

SEQ ID NO: 986168 - RNA, 19 nt, Artificial Sequence
  Description of Artificial Sequence: Synthetic oligonucleotide
cgugcacauccgggcgguc

SEQ ID NO: 986169 - RNA, 19 nt, Artificial Sequence
  Description of Artificial Sequence: Synthetic oligonucleotide
cgucggguacgagcuccca

SEQ ID NO: 986170 - RNA, 19 nt, Artificial Sequence
  Description of Artificial Sequence: Synthetic oligonucleotide
cgcgcucccgggcccuuga

SEQ ID NO: 986171 - RNA, 19 nt, Artificial Sequence
  Description of Artificial Sequence: Synthetic oligonucleotide
cgcuuucucggcgucgcuu

SEQ ID NO: 986172 - RNA, 19 nt, Artificial Sequence
  Description of Artificial Sequence: Synthetic oligonucleotide
cggaggcgugggcgucguc

SEQ ID NO: 986173 - RNA, 19 nt, Artificial Sequence
  Description of Artificial Sequence: Synthetic oligonucleotide
cggcgucgcuuccuucagu

SEQ ID NO: 986174 - RNA, 19 nt, Artificial Sequence
  Description of Artificial Sequence: Synthetic oligonucleotide
cggcugcgugccucuggua

SEQ ID NO: 986175 - RNA, 19 nt, Artificial Sequence
  Description of Artificial Sequence: Synthetic oligonucleotide
cgcgcgcucccgggcccuu

SEQ ID NO: 986176 - RNA, 19 nt, Artificial Sequence
  Description of Artificial Sequence: Synthetic oligonucleotide
aacaaagucuguuacauuc

SEQ ID NO: 986177 - RNA, 19 nt, Artificial Sequence
  Description of Artificial Sequence: Synthetic oligonucleotide
guauuuacaagguaagugg

SEQ ID NO: 986178 - RNA, 19 nt, Artificial Sequence
  Description of Artificial Sequence: Synthetic oligonucleotide
auguucuuaauucggaggc

SEQ ID NO: 986179 - RNA, 19 nt, Artificial Sequence
  Description of Artificial Sequence: Synthetic oligonucleotide
acagauagcagguacguuc

SEQ ID NO: 986180 - RNA, 19 nt, Artificial Sequence
  Description of Artificial Sequence: Synthetic oligonucleotide
gauguucuuaauucggagg

SEQ ID NO: 986181 - RNA, 19 nt, Artificial Sequence
  Description of Artificial Sequence: Synthetic oligonucleotide
uuaguguucaugcugcagc

SEQ ID NO: 986182 - RNA, 19 nt, Artificial Sequence
  Description of Artificial Sequence: Synthetic oligonucleotide
ugauauacagagauucacc

SEQ ID NO: 986183 - RNA, 19 nt, Artificial Sequence
  Description of Artificial Sequence: Synthetic oligonucleotide
ucuugauguucuuaauucg

SEQ ID NO: 986184 - RNA, 19 nt, Artificial Sequence
  Description of Artificial Sequence: Synthetic oligonucleotide
auagcagguacguucacac

SEQ ID NO: 986185 - RNA, 19 nt, Artificial Sequence
  Description of Artificial Sequence: Synthetic oligonucleotide
aggacucacacacacacac

SEQ ID NO: 986186 - RNA, 19 nt, Artificial Sequence
  Description of Artificial Sequence: Synthetic oligonucleotide
uccuccaaaaugaacagug

SEQ ID NO: 986187 - RNA, 19 nt, Artificial Sequence
  Description of Artificial Sequence: Synthetic oligonucleotide
gacacgcucgcucauaugg

SEQ ID NO: 986188 - RNA, 19 nt, Artificial Sequence
  Description of Artificial Sequence: Synthetic oligonucleotide
caugacaaucacucgaugg

SEQ ID NO: 986189 - RNA, 19 nt, Artificial Sequence
  Description of Artificial Sequence: Synthetic oligonucleotide
uguucucaggcaaggagcg

SEQ ID NO: 986190 - RNA, 19 nt, Artificial Sequence
  Description of Artificial Sequence: Synthetic oligonucleotide
uccaaaaugaacaguggcu

SEQ ID NO: 986191 - RNA, 19 nt, Artificial Sequence
  Description of Artificial Sequence: Synthetic oligonucleotide
ucuacuauguucucaggca

SEQ ID NO: 986192 - RNA, 19 nt, Artificial Sequence
  Description of Artificial Sequence: Synthetic oligonucleotide
ucaugggacguauauuugg

SEQ ID NO: 986193 - RNA, 19 nt, Artificial Sequence
  Description of Artificial Sequence: Synthetic oligonucleotide
agguaaguggcucaucugg

SEQ ID NO: 986194 - RNA, 19 nt, Artificial Sequence
  Description of Artificial Sequence: Synthetic oligonucleotide
aguugcuuuaucccacugc

SEQ ID NO: 986195 - RNA, 19 nt, Artificial Sequence
  Description of Artificial Sequence: Synthetic oligonucleotide
gaguagaaggcugagaccc

SEQ ID NO: 986196 - RNA, 19 nt, Artificial Sequence
  Description of Artificial Sequence: Synthetic oligonucleotide
agcaaagaaaaccuucgag

SEQ ID NO: 986197 - RNA, 19 nt, Artificial Sequence
  Description of Artificial Sequence: Synthetic oligonucleotide
guuauugugccauugacaa

SEQ ID NO: 986198 - RNA, 19 nt, Artificial Sequence
  Description of Artificial Sequence: Synthetic oligonucleotide
aagaaaaccuucgagagua

SEQ ID NO: 986199 - RNA, 19 nt, Artificial Sequence
  Description of Artificial Sequence: Synthetic oligonucleotide
gguacguucacacagguac

SEQ ID NO: 986200 - RNA, 19 nt, Artificial Sequence
  Description of Artificial Sequence: Synthetic oligonucleotide
agcagguacguucacacag

SEQ ID NO: 986201 - RNA, 19 nt, Artificial Sequence
  Description of Artificial Sequence: Synthetic oligonucleotide
ugcggugauauacagagau

SEQ ID NO: 986202 - RNA, 19 nt, Artificial Sequence
  Description of Artificial Sequence: Synthetic oligonucleotide
agaggaaauuuggaggugc

SEQ ID NO: 986203 - RNA, 19 nt, Artificial Sequence
  Description of Artificial Sequence: Synthetic oligonucleotide
auucaggcugcuuugagga

SEQ ID NO: 986204 - RNA, 19 nt, Artificial Sequence
  Description of Artificial Sequence: Synthetic oligonucleotide
cugaucuugagccaucagc

SEQ ID NO: 986205 - RNA, 19 nt, Artificial Sequence
  Description of Artificial Sequence: Synthetic oligonucleotide
ucaggaguugcuuuauccc

SEQ ID NO: 986206 - RNA, 19 nt, Artificial Sequence
  Description of Artificial Sequence: Synthetic oligonucleotide
guauauuuggagcagagcu

SEQ ID NO: 986207 - RNA, 19 nt, Artificial Sequence
  Description of Artificial Sequence: Synthetic oligonucleotide
uuuggagcagagcucucgg

SEQ ID NO: 986208 - RNA, 19 nt, Artificial Sequence
  Description of Artificial Sequence: Synthetic oligonucleotide
caacccacagaguucaagg

SEQ ID NO: 986209 - RNA, 19 nt, Artificial Sequence
  Description of Artificial Sequence: Synthetic oligonucleotide
ugucaugggacguauauuu

SEQ ID NO: 986210 - RNA, 19 nt, Artificial Sequence
  Description of Artificial Sequence: Synthetic oligonucleotide
cacacacacacacacacgc

SEQ ID NO: 986211 - RNA, 19 nt, Artificial Sequence
  Description of Artificial Sequence: Synthetic oligonucleotide
cucuuaguguucaugcugc

SEQ ID NO: 986212 - RNA, 19 nt, Artificial Sequence
  Description of Artificial Sequence: Synthetic oligonucleotide
agaaguauuuacaagguaa

SEQ ID NO: 986213 - RNA, 19 nt, Artificial Sequence
  Description of Artificial Sequence: Synthetic oligonucleotide
augacaaucacucgauggu

SEQ ID NO: 986214 - RNA, 19 nt, Artificial Sequence
  Description of Artificial Sequence: Synthetic oligonucleotide
uuaauucggaggcuguacu

SEQ ID NO: 986215 - RNA, 19 nt, Artificial Sequence
  Description of Artificial Sequence: Synthetic oligonucleotide
ucucagaagacuccauucu

SEQ ID NO: 986216 - RNA, 19 nt, Artificial Sequence
  Description of Artificial Sequence: Synthetic oligonucleotide
ugggacguauauuuggagc

SEQ ID NO: 986217 - RNA, 19 nt, Artificial Sequence
  Description of Artificial Sequence: Synthetic oligonucleotide
gacucacacacacacacac

SEQ ID NO: 986218 - RNA, 19 nt, Artificial Sequence
  Description of Artificial Sequence: Synthetic oligonucleotide
cucauuccugccuaggccc

SEQ ID NO: 986219 - RNA, 19 nt, Artificial Sequence
  Description of Artificial Sequence: Synthetic oligonucleotide
cucacacacacacacacac

SEQ ID NO: 986220 - RNA, 19 nt, Artificial Sequence
  Description of Artificial Sequence: Synthetic oligonucleotide
auauuugguuucuuaucag

SEQ ID NO: 986221 - RNA, 19 nt, Artificial Sequence
  Description of Artificial Sequence: Synthetic oligonucleotide
aaaaccacuggggaacuug

SEQ ID NO: 986222 - RNA, 19 nt, Artificial Sequence
  Description of Artificial Sequence: Synthetic oligonucleotide
ccuaaggaaaguuaucagg

SEQ ID NO: 986223 - RNA, 19 nt, Artificial Sequence
  Description of Artificial Sequence: Synthetic oligonucleotide
gaagcgaggacagugcuug

SEQ ID NO: 986224 - RNA, 19 nt, Artificial Sequence
  Description of Artificial Sequence: Synthetic oligonucleotide
auucggaggcuguacuggc

SEQ ID NO: 986225 - RNA, 19 nt, Artificial Sequence
  Description of Artificial Sequence: Synthetic oligonucleotide
cauucaggcugcuuugagg

SEQ ID NO: 986226 - RNA, 19 nt, Artificial Sequence
  Description of Artificial Sequence: Synthetic oligonucleotide
aaaccuucgagaguaccug

SEQ ID NO: 986227 - RNA, 19 nt, Artificial Sequence
  Description of Artificial Sequence: Synthetic oligonucleotide
acaccacaggauugaaagc

SEQ ID NO: 986228 - RNA, 19 nt, Artificial Sequence
  Description of Artificial Sequence: Synthetic oligonucleotide
ugucugaggacuucucuca

SEQ ID NO: 986229 - RNA, 19 nt, Artificial Sequence
  Description of Artificial Sequence: Synthetic oligonucleotide
guagcucaaagccauuggc

SEQ ID NO: 986230 - RNA, 19 nt, Artificial Sequence
  Description of Artificial Sequence: Synthetic oligonucleotide
ugguuauugugccauugac

SEQ ID NO: 986231 - RNA, 19 nt, Artificial Sequence
  Description of Artificial Sequence: Synthetic oligonucleotide
ugucuugauguucuuaauu

SEQ ID NO: 986232 - RNA, 19 nt, Artificial Sequence
  Description of Artificial Sequence: Synthetic oligonucleotide
ucacacacacacacacacg

SEQ ID NO: 986233 - RNA, 19 nt, Artificial Sequence
  Description of Artificial Sequence: Synthetic oligonucleotide
aauguguguacaucaccaa

SEQ ID NO: 986234 - RNA, 19 nt, Artificial Sequence
  Description of Artificial Sequence: Synthetic oligonucleotide
auauuuggagcagagcucu

SEQ ID NO: 986235 - RNA, 19 nt, Artificial Sequence
  Description of Artificial Sequence: Synthetic oligonucleotide
aacuuuccggagaagccac

SEQ ID NO: 986236 - RNA, 19 nt, Artificial Sequence
  Description of Artificial Sequence: Synthetic oligonucleotide
ucuuaucagagaaguauuu

SEQ ID NO: 986237 - RNA, 19 nt, Artificial Sequence
  Description of Artificial Sequence: Synthetic oligonucleotide
acacagguaccccaaacca

SEQ ID NO: 986238 - RNA, 19 nt, Artificial Sequence
  Description of Artificial Sequence: Synthetic oligonucleotide
ucggacaucaggccaguug

SEQ ID NO: 986239 - RNA, 19 nt, Artificial Sequence
  Description of Artificial Sequence: Synthetic oligonucleotide
gagagcuguacaauacggg

SEQ ID NO: 986240 - RNA, 19 nt, Artificial Sequence
  Description of Artificial Sequence: Synthetic oligonucleotide
aagguaaguggcucaucug

SEQ ID NO: 986241 - RNA, 19 nt, Artificial Sequence
  Description of Artificial Sequence: Synthetic oligonucleotide
gaaaguuaucaggaccucc

SEQ ID NO: 986242 - RNA, 19 nt, Artificial Sequence
  Description of Artificial Sequence: Synthetic oligonucleotide
ugcacacuccugaaaaccu

SEQ ID NO: 986243 - RNA, 19 nt, Artificial Sequence
  Description of Artificial Sequence: Synthetic oligonucleotide
gaugcagugggguaaccca

SEQ ID NO: 986244 - RNA, 19 nt, Artificial Sequence
  Description of Artificial Sequence: Synthetic oligonucleotide
aggaggcucuacuauguuc

SEQ ID NO: 986245 - RNA, 19 nt, Artificial Sequence
  Description of Artificial Sequence: Synthetic oligonucleotide
ugccuaggcccuaagaaaa

SEQ ID NO: 986246 - RNA, 19 nt, Artificial Sequence
  Description of Artificial Sequence: Synthetic oligonucleotide
aggaaaguuaucaggaccu

SEQ ID NO: 986247 - RNA, 19 nt, Artificial Sequence
  Description of Artificial Sequence: Synthetic oligonucleotide
uggcucuuguagcucaaag

SEQ ID NO: 986248 - RNA, 19 nt, Artificial Sequence
  Description of Artificial Sequence: Synthetic oligonucleotide
guggagauaggauggggcc

SEQ ID NO: 986249 - RNA, 19 nt, Artificial Sequence
  Description of Artificial Sequence: Synthetic oligonucleotide
ugagccacgccgcuguucu

SEQ ID NO: 986250 - RNA, 19 nt, Artificial Sequence
  Description of Artificial Sequence: Synthetic oligonucleotide
uuacaagguaaguggcuca

SEQ ID NO: 986251 - RNA, 19 nt, Artificial Sequence
  Description of Artificial Sequence: Synthetic oligonucleotide
agaguaagcuuaaauaaaa

SEQ ID NO: 986252 - RNA, 19 nt, Artificial Sequence
  Description of Artificial Sequence: Synthetic oligonucleotide
uccugaaaaccuuggcccc

SEQ ID NO: 986253 - RNA, 19 nt, Artificial Sequence
  Description of Artificial Sequence: Synthetic oligonucleotide
ucuccuugaagagucaguc

SEQ ID NO: 986254 - RNA, 19 nt, Artificial Sequence
  Description of Artificial Sequence: Synthetic oligonucleotide
aggaaauuuggaggugccc

SEQ ID NO: 986255 - RNA, 19 nt, Artificial Sequence
  Description of Artificial Sequence: Synthetic oligonucleotide
cuguacaauacggggaugc

SEQ ID NO: 986256 - RNA, 19 nt, Artificial Sequence
  Description of Artificial Sequence: Synthetic oligonucleotide
ugggagagcuguacaauac

SEQ ID NO: 986257 - RNA, 19 nt, Artificial Sequence
  Description of Artificial Sequence: Synthetic oligonucleotide
uucuugacacgcucgcuca

SEQ ID NO: 986258 - RNA, 19 nt, Artificial Sequence
  Description of Artificial Sequence: Synthetic oligonucleotide
gugauauacagagauucac

SEQ ID NO: 986259 - RNA, 19 nt, Artificial Sequence
  Description of Artificial Sequence: Synthetic oligonucleotide
gacaaucacucgaugguug

SEQ ID NO: 986260 - RNA, 19 nt, Artificial Sequence
  Description of Artificial Sequence: Synthetic oligonucleotide
gaaaaccuucgagaguacc

SEQ ID NO: 986261 - RNA, 19 nt, Artificial Sequence
  Description of Artificial Sequence: Synthetic oligonucleotide
acuccauucucucccauau

SEQ ID NO: 986262 - RNA, 19 nt, Artificial Sequence
  Description of Artificial Sequence: Synthetic oligonucleotide
cacacacacacacacgcac

SEQ ID NO: 986263 - RNA, 19 nt, Artificial Sequence
  Description of Artificial Sequence: Synthetic oligonucleotide
uucggaggcuguacuggcg

SEQ ID NO: 986264 - RNA, 19 nt, Artificial Sequence
  Description of Artificial Sequence: Synthetic oligonucleotide
agcuguacaauacggggau

SEQ ID NO: 986265 - RNA, 19 nt, Artificial Sequence
  Description of Artificial Sequence: Synthetic oligonucleotide
guaaguggcucaucugggc

SEQ ID NO: 986266 - RNA, 19 nt, Artificial Sequence
  Description of Artificial Sequence: Synthetic oligonucleotide
auuuggaggugcccugauc

SEQ ID NO: 986267 - RNA, 19 nt, Artificial Sequence
  Description of Artificial Sequence: Synthetic oligonucleotide
uuguagcucaaagccauug

SEQ ID NO: 986268 - RNA, 19 nt, Artificial Sequence
  Description of Artificial Sequence: Synthetic oligonucleotide
cacucgaugguuguucucc

SEQ ID NO: 986269 - RNA, 19 nt, Artificial Sequence
  Description of Artificial Sequence: Synthetic oligonucleotide
uggccuagcugucuugaug

SEQ ID NO: 986270 - RNA, 19 nt, Artificial Sequence
  Description of Artificial Sequence: Synthetic oligonucleotide
cuuaauucggaggcuguac

SEQ ID NO: 986271 - RNA, 19 nt, Artificial Sequence
  Description of Artificial Sequence: Synthetic oligonucleotide
ucaacccacagaguucaag

SEQ ID NO: 986272 - RNA, 19 nt, Artificial Sequence
  Description of Artificial Sequence: Synthetic oligonucleotide
uugguuccuucccacugcc

SEQ ID NO: 986273 - RNA, 19 nt, Artificial Sequence
  Description of Artificial Sequence: Synthetic oligonucleotide
ggaggaacagccuuaguga

SEQ ID NO: 986274 - RNA, 19 nt, Artificial Sequence
  Description of Artificial Sequence: Synthetic oligonucleotide
aaccacagggccagcaaag

SEQ ID NO: 986275 - RNA, 19 nt, Artificial Sequence
  Description of Artificial Sequence: Synthetic oligonucleotide
agcacagauagcagguacg

SEQ ID NO: 986276 - RNA, 19 nt, Artificial Sequence
  Description of Artificial Sequence: Synthetic oligonucleotide
aaauuuggaggugcccuga

SEQ ID NO: 986277 - RNA, 19 nt, Artificial Sequence
  Description of Artificial Sequence: Synthetic oligonucleotide
cuucgagaguaccugaaca

SEQ ID NO: 986278 - RNA, 19 nt, Artificial Sequence
  Description of Artificial Sequence: Synthetic oligonucleotide
aggacagugcuugcucucc

SEQ ID NO: 986279 - RNA, 19 nt, Artificial Sequence
  Description of Artificial Sequence: Synthetic oligonucleotide
cacacacacacacgcacgc

SEQ ID NO: 986280 - RNA, 19 nt, Artificial Sequence
  Description of Artificial Sequence: Synthetic oligonucleotide
aaccuucgagaguaccuga

SEQ ID NO: 986281 - RNA, 19 nt, Artificial Sequence
  Description of Artificial Sequence: Synthetic oligonucleotide
aagcgaggacagugcuugc

SEQ ID NO: 986282 - RNA, 19 nt, Artificial Sequence
  Description of Artificial Sequence: Synthetic oligonucleotide
aggacuucucucagaagac

SEQ ID NO: 986283 - RNA, 19 nt, Artificial Sequence
  Description of Artificial Sequence: Synthetic oligonucleotide
cacggcaaacuccucagug

SEQ ID NO: 986284 - RNA, 19 nt, Artificial Sequence
  Description of Artificial Sequence: Synthetic oligonucleotide
cucagaagacuccauucuc

SEQ ID NO: 986285 - RNA, 19 nt, Artificial Sequence
  Description of Artificial Sequence: Synthetic oligonucleotide
aagaauggaggaacagccu

SEQ ID NO: 986286 - RNA, 19 nt, Artificial Sequence
  Description of Artificial Sequence: Synthetic oligonucleotide
ucauauggcuguccaucac

SEQ ID NO: 986287 - RNA, 19 nt, Artificial Sequence
  Description of Artificial Sequence: Synthetic oligonucleotide
auuggccucauuccugccu

SEQ ID NO: 986288 - RNA, 19 nt, Artificial Sequence
  Description of Artificial Sequence: Synthetic oligonucleotide
cagaguaagcuuaaauaaa

SEQ ID NO: 986289 - RNA, 19 nt, Artificial Sequence
  Description of Artificial Sequence: Synthetic oligonucleotide
agccuuagugagccacgcc

SEQ ID NO: 986290 - RNA, 19 nt, Artificial Sequence
  Description of Artificial Sequence: Synthetic oligonucleotide
ucgcucauauggcugucca

SEQ ID NO: 986291 - RNA, 19 nt, Artificial Sequence
  Description of Artificial Sequence: Synthetic oligonucleotide
acggcaaacuccucaguga

SEQ ID NO: 986292 - RNA, 19 nt, Artificial Sequence
  Description of Artificial Sequence: Synthetic oligonucleotide
agugguuauugugccauug

SEQ ID NO: 986293 - RNA, 19 nt, Artificial Sequence
  Description of Artificial Sequence: Synthetic oligonucleotide
agagcaaagccugccuggg

SEQ ID NO: 986294 - RNA, 19 nt, Artificial Sequence
  Description of Artificial Sequence: Synthetic oligonucleotide
uggagauaggauggggccc

SEQ ID NO: 986295 - RNA, 19 nt, Artificial Sequence
  Description of Artificial Sequence: Synthetic oligonucleotide
cucucggacaucaggccag

SEQ ID NO: 986296 - RNA, 19 nt, Artificial Sequence
  Description of Artificial Sequence: Synthetic oligonucleotide
ucccucagguuucucacuc

SEQ ID NO: 986297 - RNA, 19 nt, Artificial Sequence
  Description of Artificial Sequence: Synthetic oligonucleotide
cuuaguguucaugcugcag

SEQ ID NO: 986298 - RNA, 19 nt, Artificial Sequence
  Description of Artificial Sequence: Synthetic oligonucleotide
ggccucuuaguguucaugc

SEQ ID NO: 986299 - RNA, 19 nt, Artificial Sequence
  Description of Artificial Sequence: Synthetic oligonucleotide
gggacguauauuuggagca

SEQ ID NO: 986300 - RNA, 19 nt, Artificial Sequence
  Description of Artificial Sequence: Synthetic oligonucleotide
uguacaauacggggaugca

SEQ ID NO: 986301 - RNA, 19 nt, Artificial Sequence
  Description of Artificial Sequence: Synthetic oligonucleotide
aucacucgaugguuguucu

SEQ ID NO: 986302 - RNA, 19 nt, Artificial Sequence
  Description of Artificial Sequence: Synthetic oligonucleotide
gagaaguauuuacaaggua

SEQ ID NO: 986303 - RNA, 19 nt, Artificial Sequence
  Description of Artificial Sequence: Synthetic oligonucleotide
ccgaguagaaggcugagac

SEQ ID NO: 986304 - RNA, 19 nt, Artificial Sequence
  Description of Artificial Sequence: Synthetic oligonucleotide
agauagcagguacguucac

SEQ ID NO: 986305 - RNA, 19 nt, Artificial Sequence
  Description of Artificial Sequence: Synthetic oligonucleotide
gaggaaauuuggaggugcc

SEQ ID NO: 986306 - RNA, 19 nt, Artificial Sequence
  Description of Artificial Sequence: Synthetic oligonucleotide
uguucuuaauucggaggcu

SEQ ID NO: 986307 - RNA, 19 nt, Artificial Sequence
  Description of Artificial Sequence: Synthetic oligonucleotide
uugacacgcucgcucauau

SEQ ID NO: 986308 - RNA, 19 nt, Artificial Sequence
  Description of Artificial Sequence: Synthetic oligonucleotide
caccaacaaccacagggcc

SEQ ID NO: 986309 - RNA, 19 nt, Artificial Sequence
  Description of Artificial Sequence: Synthetic oligonucleotide
caugggacguauauuugga

SEQ ID NO: 986310 - RNA, 19 nt, Artificial Sequence
  Description of Artificial Sequence: Synthetic oligonucleotide
gguuucucacucuacccug

SEQ ID NO: 986311 - RNA, 19 nt, Artificial Sequence
  Description of Artificial Sequence: Synthetic oligonucleotide
cuuuccggagaagccacgg

SEQ ID NO: 986312 - RNA, 19 nt, Artificial Sequence
  Description of Artificial Sequence: Synthetic oligonucleotide
aggcccuaagaaaaggcag

SEQ ID NO: 986313 - RNA, 19 nt, Artificial Sequence
  Description of Artificial Sequence: Synthetic oligonucleotide
accugaacaaagucuguua

SEQ ID NO: 986314 - RNA, 19 nt, Artificial Sequence
  Description of Artificial Sequence: Synthetic oligonucleotide
gauagcagguacguucaca

SEQ ID NO: 986315 - RNA, 19 nt, Artificial Sequence
  Description of Artificial Sequence: Synthetic oligonucleotide
acacacacacacacgcacg

SEQ ID NO: 986316 - RNA, 19 nt, Artificial Sequence
  Description of Artificial Sequence: Synthetic oligonucleotide
cagauagcagguacguuca

SEQ ID NO: 986317 - RNA, 19 nt, Artificial Sequence
  Description of Artificial Sequence: Synthetic oligonucleotide
cccuucaaaaccacugggg

SEQ ID NO: 986318 - RNA, 19 nt, Artificial Sequence
  Description of Artificial Sequence: Synthetic oligonucleotide
uccggagaagccacggcaa

SEQ ID NO: 986319 - RNA, 19 nt, Artificial Sequence
  Description of Artificial Sequence: Synthetic oligonucleotide
uuauugugccauugacaaa

SEQ ID NO: 986320 - RNA, 19 nt, Artificial Sequence
  Description of Artificial Sequence: Synthetic oligonucleotide
caauacggggaugcagugg

SEQ ID NO: 986321 - RNA, 19 nt, Artificial Sequence
  Description of Artificial Sequence: Synthetic oligonucleotide
ucgagaguaccugaacaaa

SEQ ID NO: 986322 - RNA, 19 nt, Artificial Sequence
  Description of Artificial Sequence: Synthetic oligonucleotide
caacggcaagccaguaagg

SEQ ID NO: 986323 - RNA, 19 nt, Artificial Sequence
  Description of Artificial Sequence: Synthetic oligonucleotide
gcuccgguugaccagcagg

SEQ ID NO: 986324 - RNA, 19 nt, Artificial Sequence
  Description of Artificial Sequence: Synthetic oligonucleotide
uauggcuguccaucacaug

SEQ ID NO: 986325 - RNA, 19 nt, Artificial Sequence
  Description of Artificial Sequence: Synthetic oligonucleotide
cucauauggcuguccauca

SEQ ID NO: 986326 - RNA, 19 nt, Artificial Sequence
  Description of Artificial Sequence: Synthetic oligonucleotide
gacacaggaggcucuacua

SEQ ID NO: 986327 - RNA, 19 nt, Artificial Sequence
  Description of Artificial Sequence: Synthetic oligonucleotide
ucagugucgaaggggcuga

SEQ ID NO: 986328 - RNA, 19 nt, Artificial Sequence
  Description of Artificial Sequence: Synthetic oligonucleotide
gagcuguacaauacgggga

SEQ ID NO: 986329 - RNA, 19 nt, Artificial Sequence
  Description of Artificial Sequence: Synthetic oligonucleotide
acaggcuuucuccuggcuu

SEQ ID NO: 986330 - RNA, 19 nt, Artificial Sequence
  Description of Artificial Sequence: Synthetic oligonucleotide
cuacuauguucucaggcaa

SEQ ID NO: 986331 - RNA, 19 nt, Artificial Sequence
  Description of Artificial Sequence: Synthetic oligonucleotide
ggcccuaagaaaaggcagg

SEQ ID NO: 986332 - RNA, 19 nt, Artificial Sequence
  Description of Artificial Sequence: Synthetic oligonucleotide
gaagccacggcaaacuccu

SEQ ID NO: 986333 - RNA, 19 nt, Artificial Sequence
  Description of Artificial Sequence: Synthetic oligonucleotide
uuccuagcucugcccuugg

SEQ ID NO: 986334 - RNA, 19 nt, Artificial Sequence
  Description of Artificial Sequence: Synthetic oligonucleotide
cagucaacccacagaguuc

SEQ ID NO: 986335 - RNA, 19 nt, Artificial Sequence
  Description of Artificial Sequence: Synthetic oligonucleotide
caggauugaaagcaauaaa

SEQ ID NO: 986336 - RNA, 19 nt, Artificial Sequence
  Description of Artificial Sequence: Synthetic oligonucleotide
uccugccuaggcccuaaga

SEQ ID NO: 986337 - RNA, 19 nt, Artificial Sequence
  Description of Artificial Sequence: Synthetic oligonucleotide
ugacaaucacucgaugguu

SEQ ID NO: 986338 - RNA, 19 nt, Artificial Sequence
  Description of Artificial Sequence: Synthetic oligonucleotide
ucuuaauucggaggcugua

SEQ ID NO: 986339 - RNA, 19 nt, Artificial Sequence
  Description of Artificial Sequence: Synthetic oligonucleotide
uacucugcacacuccugaa

SEQ ID NO: 986340 - RNA, 19 nt, Artificial Sequence
  Description of Artificial Sequence: Synthetic oligonucleotide
uccgcagcagaggaaauuu

SEQ ID NO: 986341 - RNA, 19 nt, Artificial Sequence
  Description of Artificial Sequence: Synthetic oligonucleotide
gguuucuuaucagagaagu

SEQ ID NO: 986342 - RNA, 19 nt, Artificial Sequence
  Description of Artificial Sequence: Synthetic oligonucleotide
gacguauauuuggagcaga

SEQ ID NO: 986343 - RNA, 19 nt, Artificial Sequence
  Description of Artificial Sequence: Synthetic oligonucleotide
ggagaggaacuuuccggag

SEQ ID NO: 986344 - RNA, 19 nt, Artificial Sequence
  Description of Artificial Sequence: Synthetic oligonucleotide
ggccuaaggaaaguuauca

SEQ ID NO: 986345 - RNA, 19 nt, Artificial Sequence
  Description of Artificial Sequence: Synthetic oligonucleotide
acucgaugguuguucucca

SEQ ID NO: 986346 - RNA, 19 nt, Artificial Sequence
  Description of Artificial Sequence: Synthetic oligonucleotide
ccucuuaguguucaugcug

SEQ ID NO: 986347 - RNA, 19 nt, Artificial Sequence
  Description of Artificial Sequence: Synthetic oligonucleotide
uagcagguacguucacaca

SEQ ID NO: 986348 - RNA, 19 nt, Artificial Sequence
  Description of Artificial Sequence: Synthetic oligonucleotide
guacguucacacagguacc

SEQ ID NO: 986349 - RNA, 19 nt, Artificial Sequence
  Description of Artificial Sequence: Synthetic oligonucleotide
uguucuugacacgcucgcu

SEQ ID NO: 986350 - RNA, 19 nt, Artificial Sequence
  Description of Artificial Sequence: Synthetic oligonucleotide
gagaguaccugaacaaagu

SEQ ID NO: 986351 - RNA, 19 nt, Artificial Sequence
  Description of Artificial Sequence: Synthetic oligonucleotide
augaacaguggcucuugua

SEQ ID NO: 986352 - RNA, 19 nt, Artificial Sequence
  Description of Artificial Sequence: Synthetic oligonucleotide
gucaugggacguauauuug

SEQ ID NO: 986353 - RNA, 19 nt, Artificial Sequence
  Description of Artificial Sequence: Synthetic oligonucleotide
cugguagaccuuguucuug

SEQ ID NO: 986354 - RNA, 19 nt, Artificial Sequence
  Description of Artificial Sequence: Synthetic oligonucleotide
uccgaguagaaggcugaga

SEQ ID NO: 986355 - RNA, 19 nt, Artificial Sequence
  Description of Artificial Sequence: Synthetic oligonucleotide
auauggcuguccaucacau

SEQ ID NO: 986356 - RNA, 19 nt, Artificial Sequence
  Description of Artificial Sequence: Synthetic oligonucleotide
ggucugcggugauauacag

SEQ ID NO: 986357 - RNA, 19 nt, Artificial Sequence
  Description of Artificial Sequence: Synthetic oligonucleotide
gcagaggaaauuuggaggu

SEQ ID NO: 986358 - RNA, 19 nt, Artificial Sequence
  Description of Artificial Sequence: Synthetic oligonucleotide
ggagauaggauggggcccc

SEQ ID NO: 986359 - RNA, 19 nt, Artificial Sequence
  Description of Artificial Sequence: Synthetic oligonucleotide
ugggguaacccagcucccc

SEQ ID NO: 986360 - RNA, 19 nt, Artificial Sequence
  Description of Artificial Sequence: Synthetic oligonucleotide
ugacacgcucgcucauaug

SEQ ID NO: 986361 - RNA, 19 nt, Artificial Sequence
  Description of Artificial Sequence: Synthetic oligonucleotide
caggccggagauguugggg

SEQ ID NO: 986362 - RNA, 19 nt, Artificial Sequence
  Description of Artificial Sequence: Synthetic oligonucleotide
ucuacccugcuugcuugug

SEQ ID NO: 986363 - RNA, 19 nt, Artificial Sequence
  Description of Artificial Sequence: Synthetic oligonucleotide
uugucaugggacguauauu

SEQ ID NO: 986364 - RNA, 19 nt, Artificial Sequence
  Description of Artificial Sequence: Synthetic oligonucleotide
aagagucagucaacccaca

SEQ ID NO: 986365 - RNA, 19 nt, Artificial Sequence
  Description of Artificial Sequence: Synthetic oligonucleotide
cagcaaagaaaaccuucga

SEQ ID NO: 986366 - RNA, 19 nt, Artificial Sequence
  Description of Artificial Sequence: Synthetic oligonucleotide
gcucaucugggccuaagga

SEQ ID NO: 986367 - RNA, 19 nt, Artificial Sequence
  Description of Artificial Sequence: Synthetic oligonucleotide
aaggagcggcuccgguuga

SEQ ID NO: 986368 - RNA, 19 nt, Artificial Sequence
  Description of Artificial Sequence: Synthetic oligonucleotide
gccccgucccuucaaaacc

SEQ ID NO: 986369 - RNA, 19 nt, Artificial Sequence
  Description of Artificial Sequence: Synthetic oligonucleotide
ggacguauauuuggagcag

SEQ ID NO: 986370 - RNA, 19 nt, Artificial Sequence
  Description of Artificial Sequence: Synthetic oligonucleotide
ccccuaacagcucuacagc

SEQ ID NO: 986371 - RNA, 19 nt, Artificial Sequence
  Description of Artificial Sequence: Synthetic oligonucleotide
cacguggccaguugcucuc

SEQ ID NO: 986372 - RNA, 19 nt, Artificial Sequence
  Description of Artificial Sequence: Synthetic oligonucleotide
acuuuccggagaagccacg

SEQ ID NO: 986373 - RNA, 19 nt, Artificial Sequence
  Description of Artificial Sequence: Synthetic oligonucleotide
cucgcucauauggcugucc

SEQ ID NO: 986374 - RNA, 19 nt, Artificial Sequence
  Description of Artificial Sequence: Synthetic oligonucleotide
gcugagagggcuccgagua

SEQ ID NO: 986375 - RNA, 19 nt, Artificial Sequence
  Description of Artificial Sequence: Synthetic oligonucleotide
ccuaggcccuaagaaaagg

SEQ ID NO: 986376 - RNA, 19 nt, Artificial Sequence
  Description of Artificial Sequence: Synthetic oligonucleotide
aggucugcggugauauaca

SEQ ID NO: 986377 - RNA, 19 nt, Artificial Sequence
  Description of Artificial Sequence: Synthetic oligonucleotide
cagccuuagugagccacgc

SEQ ID NO: 986378 - RNA, 19 nt, Artificial Sequence
  Description of Artificial Sequence: Synthetic oligonucleotide
ggccuagcugucuugaugu

SEQ ID NO: 986379 - RNA, 19 nt, Artificial Sequence
  Description of Artificial Sequence: Synthetic oligonucleotide
acucacacacacacacaca

SEQ ID NO: 986380 - RNA, 19 nt, Artificial Sequence
  Description of Artificial Sequence: Synthetic oligonucleotide
uguuggggauucugcucau

SEQ ID NO: 986381 - RNA, 19 nt, Artificial Sequence
  Description of Artificial Sequence: Synthetic oligonucleotide
ugggaugccuccccaccuu

SEQ ID NO: 986382 - RNA, 19 nt, Artificial Sequence
  Description of Artificial Sequence: Synthetic oligonucleotide
gucuccgcagcagaggaaa

SEQ ID NO: 986383 - RNA, 19 nt, Artificial Sequence
  Description of Artificial Sequence: Synthetic oligonucleotide
cagcacaggcuuucuccug

SEQ ID NO: 986384 - RNA, 19 nt, Artificial Sequence
  Description of Artificial Sequence: Synthetic oligonucleotide
ucuccgcagcagaggaaau

SEQ ID NO: 986385 - RNA, 19 nt, Artificial Sequence
  Description of Artificial Sequence: Synthetic oligonucleotide
acacacacacacacacgca

SEQ ID NO: 986386 - RNA, 19 nt, Artificial Sequence
  Description of Artificial Sequence: Synthetic oligonucleotide
acggcguggggaggucucc

SEQ ID NO: 986387 - RNA, 19 nt, Artificial Sequence
  Description of Artificial Sequence: Synthetic oligonucleotide
gaugccuccccaccuugcu

SEQ ID NO: 986388 - RNA, 19 nt, Artificial Sequence
  Description of Artificial Sequence: Synthetic oligonucleotide
cugggccuaaggaaaguua

SEQ ID NO: 986389 - RNA, 19 nt, Artificial Sequence
  Description of Artificial Sequence: Synthetic oligonucleotide
ccugaaaaccuuggccccg

SEQ ID NO: 986390 - RNA, 19 nt, Artificial Sequence
  Description of Artificial Sequence: Synthetic oligonucleotide
uggucaggaguugcuuuau

SEQ ID NO: 986391 - RNA, 19 nt, Artificial Sequence
  Description of Artificial Sequence: Synthetic oligonucleotide
ccuucgagaguaccugaac

SEQ ID NO: 986392 - RNA, 19 nt, Artificial Sequence
  Description of Artificial Sequence: Synthetic oligonucleotide
acacacacacacgcacgca

SEQ ID NO: 986393 - RNA, 19 nt, Artificial Sequence
  Description of Artificial Sequence: Synthetic oligonucleotide
caggacucacacacacaca

SEQ ID NO: 986394 - RNA, 19 nt, Artificial Sequence
  Description of Artificial Sequence: Synthetic oligonucleotide
ccugccuaggcccuaagaa

SEQ ID NO: 986395 - RNA, 19 nt, Artificial Sequence
  Description of Artificial Sequence: Synthetic oligonucleotide
cuccgaguagaaggcugag

SEQ ID NO: 986396 - RNA, 19 nt, Artificial Sequence
  Description of Artificial Sequence: Synthetic oligonucleotide
cagcucauguuccuccaaa

SEQ ID NO: 986397 - RNA, 19 nt, Artificial Sequence
  Description of Artificial Sequence: Synthetic oligonucleotide
ucucggacaucaggccagu

SEQ ID NO: 986398 - RNA, 19 nt, Artificial Sequence
  Description of Artificial Sequence: Synthetic oligonucleotide
aaccuuggccccgucccuu

SEQ ID NO: 986399 - RNA, 19 nt, Artificial Sequence
  Description of Artificial Sequence: Synthetic oligonucleotide
uggccccgucccuucaaaa

SEQ ID NO: 986400 - RNA, 19 nt, Artificial Sequence
  Description of Artificial Sequence: Synthetic oligonucleotide
ggaaaguuaucaggaccuc

SEQ ID NO: 986401 - RNA, 19 nt, Artificial Sequence
  Description of Artificial Sequence: Synthetic oligonucleotide
ggcccaccuugccagacac

SEQ ID NO: 986402 - RNA, 19 nt, Artificial Sequence
  Description of Artificial Sequence: Synthetic oligonucleotide
aagccacggcaaacuccuc

SEQ ID NO: 986403 - RNA, 19 nt, Artificial Sequence
  Description of Artificial Sequence: Synthetic oligonucleotide
ccaugacaaucacucgaug

SEQ ID NO: 986404 - RNA, 19 nt, Artificial Sequence
  Description of Artificial Sequence: Synthetic oligonucleotide
gucugcggugauauacaga

SEQ ID NO: 986405 - RNA, 19 nt, Artificial Sequence
  Description of Artificial Sequence: Synthetic oligonucleotide
gguaccccaaaccacuuuu

SEQ ID NO: 986406 - RNA, 19 nt, Artificial Sequence
  Description of Artificial Sequence: Synthetic oligonucleotide
cggacaucaggccaguuga

SEQ ID NO: 986407 - RNA, 19 nt, Artificial Sequence
  Description of Artificial Sequence: Synthetic oligonucleotide
cacggcguggggaggucuc

SEQ ID NO: 986408 - RNA, 19 nt, Artificial Sequence
  Description of Artificial Sequence: Synthetic oligonucleotide
acgcacgcacacacaccac

SEQ ID NO: 986409 - RNA, 19 nt, Artificial Sequence
  Description of Artificial Sequence: Synthetic oligonucleotide
cacgcucgcucauauggcu

SEQ ID NO: 986410 - RNA, 19 nt, Artificial Sequence
  Description of Artificial Sequence: Synthetic oligonucleotide
gauggggccccuucuccau

SEQ ID NO: 986411 - RNA, 19 nt, Artificial Sequence
  Description of Artificial Sequence: Synthetic oligonucleotide
gcaagccaguaagggaagc

SEQ ID NO: 986412 - RNA, 19 nt, Artificial Sequence
  Description of Artificial Sequence: Synthetic oligonucleotide
ccaccuugccagacacagg

SEQ ID NO: 986413 - RNA, 19 nt, Artificial Sequence
  Description of Artificial Sequence: Synthetic oligonucleotide
auuccugccuaggcccuaa

SEQ ID NO: 986414 - RNA, 19 nt, Artificial Sequence
  Description of Artificial Sequence: Synthetic oligonucleotide
guuggggauucugcucauc

SEQ ID NO: 986415 - RNA, 19 nt, Artificial Sequence
  Description of Artificial Sequence: Synthetic oligonucleotide
cuucuggcaggccggagau

SEQ ID NO: 986416 - RNA, 19 nt, Artificial Sequence
  Description of Artificial Sequence: Synthetic oligonucleotide
caggcaacggcaagccagu

SEQ ID NO: 986417 - RNA, 19 nt, Artificial Sequence
  Description of Artificial Sequence: Synthetic oligonucleotide
caguugcucucggcuuggg

SEQ ID NO: 986418 - RNA, 19 nt, Artificial Sequence
  Description of Artificial Sequence: Synthetic oligonucleotide
gagagggcuccgaguagaa

SEQ ID NO: 986419 - RNA, 19 nt, Artificial Sequence
  Description of Artificial Sequence: Synthetic oligonucleotide
gggcugagcgcggaagggc

SEQ ID NO: 986420 - RNA, 19 nt, Artificial Sequence
  Description of Artificial Sequence: Synthetic oligonucleotide
caugggagagcuguacaau

SEQ ID NO: 986421 - RNA, 19 nt, Artificial Sequence
  Description of Artificial Sequence: Synthetic oligonucleotide
gcuguacaauacggggaug

SEQ ID NO: 986422 - RNA, 19 nt, Artificial Sequence
  Description of Artificial Sequence: Synthetic oligonucleotide
ccgcagcagaggaaauuug

SEQ ID NO: 986423 - RNA, 19 nt, Artificial Sequence
  Description of Artificial Sequence: Synthetic oligonucleotide
acacggcguggggaggucu

SEQ ID NO: 986424 - RNA, 19 nt, Artificial Sequence
  Description of Artificial Sequence: Synthetic oligonucleotide
agguacguucacacaggua

SEQ ID NO: 986425 - RNA, 19 nt, Artificial Sequence
  Description of Artificial Sequence: Synthetic oligonucleotide
gcuccgaguagaaggcuga

SEQ ID NO: 986426 - RNA, 19 nt, Artificial Sequence
  Description of Artificial Sequence: Synthetic oligonucleotide
guaccugaacaaagucugu

SEQ ID NO: 986427 - RNA, 19 nt, Artificial Sequence
  Description of Artificial Sequence: Synthetic oligonucleotide
ggacucacacacacacaca

SEQ ID NO: 986428 - RNA, 19 nt, Artificial Sequence
  Description of Artificial Sequence: Synthetic oligonucleotide
gggccuaaggaaaguuauc

SEQ ID NO: 986429 - RNA, 19 nt, Artificial Sequence
  Description of Artificial Sequence: Synthetic oligonucleotide
ggagcggcuccgguugacc

SEQ ID NO: 986430 - RNA, 19 nt, Artificial Sequence
  Description of Artificial Sequence: Synthetic oligonucleotide
gcacagauagcagguacgu

SEQ ID NO: 986431 - RNA, 19 nt, Artificial Sequence
  Description of Artificial Sequence: Synthetic oligonucleotide
cugggucccugggaccuuc

SEQ ID NO: 986432 - RNA, 19 nt, Artificial Sequence
  Description of Artificial Sequence: Synthetic oligonucleotide
cagugucgaaggggcugag

SEQ ID NO: 986433 - RNA, 19 nt, Artificial Sequence
  Description of Artificial Sequence: Synthetic oligonucleotide
cccuaacagcucuacagcu

SEQ ID NO: 986434 - RNA, 19 nt, Artificial Sequence
  Description of Artificial Sequence: Synthetic oligonucleotide
gcggcuccgguugaccagc

SEQ ID NO: 986435 - RNA, 19 nt, Artificial Sequence
  Description of Artificial Sequence: Synthetic oligonucleotide
gccucuuaguguucaugcu

SEQ ID NO: 986436 - RNA, 19 nt, Artificial Sequence
  Description of Artificial Sequence: Synthetic oligonucleotide
ccccgucccuucaaaacca

SEQ ID NO: 986437 - RNA, 19 nt, Artificial Sequence
  Description of Artificial Sequence: Synthetic oligonucleotide
cuuggccccgucccuucaa

SEQ ID NO: 986438 - RNA, 19 nt, Artificial Sequence
  Description of Artificial Sequence: Synthetic oligonucleotide
ccuagcucugcccuugggu

SEQ ID NO: 986439 - RNA, 19 nt, Artificial Sequence
  Description of Artificial Sequence: Synthetic oligonucleotide
agauaggauggggccccuu

SEQ ID NO: 986440 - RNA, 19 nt, Artificial Sequence
  Description of Artificial Sequence: Synthetic oligonucleotide
cucuacccugcuugcuugu

SEQ ID NO: 986441 - RNA, 19 nt, Artificial Sequence
  Description of Artificial Sequence: Synthetic oligonucleotide
cugaaaaccuuggccccgu

SEQ ID NO: 986442 - RNA, 19 nt, Artificial Sequence
  Description of Artificial Sequence: Synthetic oligonucleotide
ccccacaguggagauagga

SEQ ID NO: 986443 - RNA, 19 nt, Artificial Sequence
  Description of Artificial Sequence: Synthetic oligonucleotide
gcugagcgcggaagggcug

SEQ ID NO: 986444 - RNA, 19 nt, Artificial Sequence
  Description of Artificial Sequence: Synthetic oligonucleotide
gcagugggguaacccagcu

SEQ ID NO: 986445 - RNA, 19 nt, Artificial Sequence
  Description of Artificial Sequence: Synthetic oligonucleotide
gcccuaagaaaaggcaggu

SEQ ID NO: 986446 - RNA, 19 nt, Artificial Sequence
  Description of Artificial Sequence: Synthetic oligonucleotide
gcguggggaggucuccgca

SEQ ID NO: 986447 - RNA, 19 nt, Artificial Sequence
  Description of Artificial Sequence: Synthetic oligonucleotide
gggaugcagugggguaacc

SEQ ID NO: 986448 - RNA, 19 nt, Artificial Sequence
  Description of Artificial Sequence: Synthetic oligonucleotide
gggcagccuugucauggga

SEQ ID NO: 986449 - RNA, 19 nt, Artificial Sequence
  Description of Artificial Sequence: Synthetic oligonucleotide
ccuaacagcucuacagcuu

SEQ ID NO: 986450 - RNA, 19 nt, Artificial Sequence
  Description of Artificial Sequence: Synthetic oligonucleotide
cacaggcuuucuccuggcu

SEQ ID NO: 986451 - RNA, 19 nt, Artificial Sequence
  Description of Artificial Sequence: Synthetic oligonucleotide
acgccgcuguucucuccuu

SEQ ID NO: 986452 - RNA, 19 nt, Artificial Sequence
  Description of Artificial Sequence: Synthetic oligonucleotide
ggacaucaggccaguugaa

SEQ ID NO: 986453 - RNA, 19 nt, Artificial Sequence
  Description of Artificial Sequence: Synthetic oligonucleotide
guggccuagcugucuugau

SEQ ID NO: 986454 - RNA, 19 nt, Artificial Sequence
  Description of Artificial Sequence: Synthetic oligonucleotide
ggcugagcgcggaagggcu

SEQ ID NO: 986455 - RNA, 19 nt, Artificial Sequence
  Description of Artificial Sequence: Synthetic oligonucleotide
cacagauagcagguacguu

SEQ ID NO: 986456 - RNA, 19 nt, Artificial Sequence
  Description of Artificial Sequence: Synthetic oligonucleotide
agcaggccacguggccagu

SEQ ID NO: 986457 - RNA, 19 nt, Artificial Sequence
  Description of Artificial Sequence: Synthetic oligonucleotide
cauuccugccuaggcccua

SEQ ID NO: 986458 - RNA, 19 nt, Artificial Sequence
  Description of Artificial Sequence: Synthetic oligonucleotide
ccacguggccaguugcucu

SEQ ID NO: 986459 - RNA, 19 nt, Artificial Sequence
  Description of Artificial Sequence: Synthetic oligonucleotide
cagugguuauugugccauu

SEQ ID NO: 986460 - RNA, 19 nt, Artificial Sequence
  Description of Artificial Sequence: Synthetic oligonucleotide
cuguacuggcgggccagcu

SEQ ID NO: 986461 - RNA, 19 nt, Artificial Sequence
  Description of Artificial Sequence: Synthetic oligonucleotide
ccggagaagccacggcaaa

SEQ ID NO: 986462 - RNA, 19 nt, Artificial Sequence
  Description of Artificial Sequence: Synthetic oligonucleotide
ggaagcgaggacagugcuu

SEQ ID NO: 986463 - RNA, 19 nt, Artificial Sequence
  Description of Artificial Sequence: Synthetic oligonucleotide
gcucgcucauauggcuguc

SEQ ID NO: 986464 - RNA, 19 nt, Artificial Sequence
  Description of Artificial Sequence: Synthetic oligonucleotide
gcuuccuagcucugcccuu

SEQ ID NO: 986465 - RNA, 19 nt, Artificial Sequence
  Description of Artificial Sequence: Synthetic oligonucleotide
ccgcuguucucuccuugaa

SEQ ID NO: 986466 - RNA, 19 nt, Artificial Sequence
  Description of Artificial Sequence: Synthetic oligonucleotide
cuggggaacuugguuccuu

SEQ ID NO: 986467 - RNA, 19 nt, Artificial Sequence
  Description of Artificial Sequence: Synthetic oligonucleotide
gccccacaguggagauagg

SEQ ID NO: 986468 - RNA, 19 nt, Artificial Sequence
  Description of Artificial Sequence: Synthetic oligonucleotide
gcggugauauacagagauu

SEQ ID NO: 986469 - RNA, 19 nt, Artificial Sequence
  Description of Artificial Sequence: Synthetic oligonucleotide
cggcguggggaggucuccg

SEQ ID NO: 986470 - RNA, 19 nt, Artificial Sequence
  Description of Artificial Sequence: Synthetic oligonucleotide
ccgucccuucaaaaccacu

SEQ ID NO: 986471 - RNA, 19 nt, Artificial Sequence
  Description of Artificial Sequence: Synthetic oligonucleotide
gcccaccuugccagacaca

SEQ ID NO: 986472 - RNA, 19 nt, Artificial Sequence
  Description of Artificial Sequence: Synthetic oligonucleotide
gggcuccgaguagaaggcu

SEQ ID NO: 986473 - RNA, 19 nt, Artificial Sequence
  Description of Artificial Sequence: Synthetic oligonucleotide
gccuagcugucuugauguu

SEQ ID NO: 986474 - RNA, 19 nt, Artificial Sequence
  Description of Artificial Sequence: Synthetic oligonucleotide
ccacggcaaacuccucagu

SEQ ID NO: 986475 - RNA, 19 nt, Artificial Sequence
  Description of Artificial Sequence: Synthetic oligonucleotide
ggggccucuuaguguucau

SEQ ID NO: 986476 - RNA, 19 nt, Artificial Sequence
  Description of Artificial Sequence: Synthetic oligonucleotide
cucucggcuugggcagccu

SEQ ID NO: 986477 - RNA, 19 nt, Artificial Sequence
  Description of Artificial Sequence: Synthetic oligonucleotide
gcaggccacguggccaguu

SEQ ID NO: 986478 - RNA, 19 nt, Artificial Sequence
  Description of Artificial Sequence: Synthetic oligonucleotide
acuaaaucaacaaagauuc

SEQ ID NO: 986479 - RNA, 19 nt, Artificial Sequence
  Description of Artificial Sequence: Synthetic oligonucleotide
gauaaagcuauuuagagga

SEQ ID NO: 986480 - RNA, 19 nt, Artificial Sequence
  Description of Artificial Sequence: Synthetic oligonucleotide
aaauacaucauuuccguga

SEQ ID NO: 986481 - RNA, 19 nt, Artificial Sequence
  Description of Artificial Sequence: Synthetic oligonucleotide
uuauguuacaaauacagaa

SEQ ID NO: 986482 - RNA, 19 nt, Artificial Sequence
  Description of Artificial Sequence: Synthetic oligonucleotide
uuuaaggccagacacacug

SEQ ID NO: 986483 - RNA, 19 nt, Artificial Sequence
  Description of Artificial Sequence: Synthetic oligonucleotide
aauacaucauuuccgugac

SEQ ID NO: 986484 - RNA, 19 nt, Artificial Sequence
  Description of Artificial Sequence: Synthetic oligonucleotide
auaugcaauaggcauauac

SEQ ID NO: 986485 - RNA, 19 nt, Artificial Sequence
  Description of Artificial Sequence: Synthetic oligonucleotide
ugaaaagugaucuucacaa

SEQ ID NO: 986486 - RNA, 19 nt, Artificial Sequence
  Description of Artificial Sequence: Synthetic oligonucleotide
aaggcuacuuaaucuaagc

SEQ ID NO: 986487 - RNA, 19 nt, Artificial Sequence
  Description of Artificial Sequence: Synthetic oligonucleotide
uucucaaagcuuuuggugg

SEQ ID NO: 986488 - RNA, 19 nt, Artificial Sequence
  Description of Artificial Sequence: Synthetic oligonucleotide
gaaaagguaguauuugucc

SEQ ID NO: 986489 - RNA, 19 nt, Artificial Sequence
  Description of Artificial Sequence: Synthetic oligonucleotide
ugauaaagcuauuuagagg

SEQ ID NO: 986490 - RNA, 19 nt, Artificial Sequence
  Description of Artificial Sequence: Synthetic oligonucleotide
uaacuuuccgaucaucugg

SEQ ID NO: 986491 - RNA, 19 nt, Artificial Sequence
  Description of Artificial Sequence: Synthetic oligonucleotide
uauuaaugccccauuauug

SEQ ID NO: 986492 - RNA, 19 nt, Artificial Sequence
  Description of Artificial Sequence: Synthetic oligonucleotide
aacaaaccaauccucggcg

SEQ ID NO: 986493 - RNA, 19 nt, Artificial Sequence
  Description of Artificial Sequence: Synthetic oligonucleotide
ucuaacgugagguaagugc

SEQ ID NO: 986494 - RNA, 19 nt, Artificial Sequence
  Description of Artificial Sequence: Synthetic oligonucleotide
aaacaguaggacaauauuc

SEQ ID NO: 986495 - RNA, 19 nt, Artificial Sequence
  Description of Artificial Sequence: Synthetic oligonucleotide
ucucagaacauucagggac

SEQ ID NO: 986496 - RNA, 19 nt, Artificial Sequence
  Description of Artificial Sequence: Synthetic oligonucleotide
uuuauacagaaggagaaag

SEQ ID NO: 986497 - RNA, 19 nt, Artificial Sequence
  Description of Artificial Sequence: Synthetic oligonucleotide
agaaacacgacaacaaggc

SEQ ID NO: 986498 - RNA, 19 nt, Artificial Sequence
  Description of Artificial Sequence: Synthetic oligonucleotide
agagagaccauucuuuccg

SEQ ID NO: 986499 - RNA, 19 nt, Artificial Sequence
  Description of Artificial Sequence: Synthetic oligonucleotide
uaugcaauaggcauauaca

SEQ ID NO: 986500 - RNA, 19 nt, Artificial Sequence
  Description of Artificial Sequence: Synthetic oligonucleotide
auuuccgugaccuguuucc

SEQ ID NO: 986501 - RNA, 19 nt, Artificial Sequence
  Description of Artificial Sequence: Synthetic oligonucleotide
aguauauuuuaacuuuccg

SEQ ID NO: 986502 - RNA, 19 nt, Artificial Sequence
  Description of Artificial Sequence: Synthetic oligonucleotide
agauaaguauccuugguug

SEQ ID NO: 986503 - RNA, 19 nt, Artificial Sequence
  Description of Artificial Sequence: Synthetic oligonucleotide
uauagaagaacaauauuua

SEQ ID NO: 986504 - RNA, 19 nt, Artificial Sequence
  Description of Artificial Sequence: Synthetic oligonucleotide
aguaggacaauauucucag

SEQ ID NO: 986505 - RNA, 19 nt, Artificial Sequence
  Description of Artificial Sequence: Synthetic oligonucleotide
aacgccgcugaacucagcc

SEQ ID NO: 986506 - RNA, 19 nt, Artificial Sequence
  Description of Artificial Sequence: Synthetic oligonucleotide
uacacagcuaucuuggcag

SEQ ID NO: 986507 - RNA, 19 nt, Artificial Sequence
  Description of Artificial Sequence: Synthetic oligonucleotide
acaacaaggcuacuuaauc

SEQ ID NO: 986508 - RNA, 19 nt, Artificial Sequence
  Description of Artificial Sequence: Synthetic oligonucleotide
aacaccaccagacaggcau

SEQ ID NO: 986509 - RNA, 19 nt, Artificial Sequence
  Description of Artificial Sequence: Synthetic oligonucleotide
uucggguuugaaaagguag

SEQ ID NO: 986510 - RNA, 19 nt, Artificial Sequence
  Description of Artificial Sequence: Synthetic oligonucleotide
aaggauaaagccuguuaag

SEQ ID NO: 986511 - RNA, 19 nt, Artificial Sequence
  Description of Artificial Sequence: Synthetic oligonucleotide
uucaaggguauacauagga

SEQ ID NO: 986512 - RNA, 19 nt, Artificial Sequence
  Description of Artificial Sequence: Synthetic oligonucleotide
aggcauauacaauaggcag

SEQ ID NO: 986513 - RNA, 19 nt, Artificial Sequence
  Description of Artificial Sequence: Synthetic oligonucleotide
uccucgacaacccucaucu

SEQ ID NO: 986514 - RNA, 19 nt, Artificial Sequence
  Description of Artificial Sequence: Synthetic oligonucleotide
aauaggcaggaauauagaa

SEQ ID NO: 986515 - RNA, 19 nt, Artificial Sequence
  Description of Artificial Sequence: Synthetic oligonucleotide
aaaccagaaacacgacaac

SEQ ID NO: 986516 - RNA, 19 nt, Artificial Sequence
  Description of Artificial Sequence: Synthetic oligonucleotide
aggcuacuuaaucuaagcc

SEQ ID NO: 986517 - RNA, 19 nt, Artificial Sequence
  Description of Artificial Sequence: Synthetic oligonucleotide
uuuuauaagcuagaugaug

SEQ ID NO: 986518 - RNA, 19 nt, Artificial Sequence
  Description of Artificial Sequence: Synthetic oligonucleotide
uucagggcggcaaauagcc

SEQ ID NO: 986519 - RNA, 19 nt, Artificial Sequence
  Description of Artificial Sequence: Synthetic oligonucleotide
cuuaaucuaagccacguuc

SEQ ID NO: 986520 - RNA, 19 nt, Artificial Sequence
  Description of Artificial Sequence: Synthetic oligonucleotide
aaaacaguaggacaauauu

SEQ ID NO: 986521 - RNA, 19 nt, Artificial Sequence
  Description of Artificial Sequence: Synthetic oligonucleotide
acccucaucuacuacaggg

SEQ ID NO: 986522 - RNA, 19 nt, Artificial Sequence
  Description of Artificial Sequence: Synthetic oligonucleotide
cagaaacacgacaacaagg

SEQ ID NO: 986523 - RNA, 19 nt, Artificial Sequence
  Description of Artificial Sequence: Synthetic oligonucleotide
uccacauaaccccuucugg

SEQ ID NO: 986524 - RNA, 19 nt, Artificial Sequence
  Description of Artificial Sequence: Synthetic oligonucleotide
acaaauacaucauuuccgu

SEQ ID NO: 986525 - RNA, 19 nt, Artificial Sequence
  Description of Artificial Sequence: Synthetic oligonucleotide
ugcccaguguacaagagcc

SEQ ID NO: 986526 - RNA, 19 nt, Artificial Sequence
  Description of Artificial Sequence: Synthetic oligonucleotide
auuaaugccccauuauuga

SEQ ID NO: 986527 - RNA, 19 nt, Artificial Sequence
  Description of Artificial Sequence: Synthetic oligonucleotide
accuuuugccuccagacuc

SEQ ID NO: 986528 - RNA, 19 nt, Artificial Sequence
  Description of Artificial Sequence: Synthetic oligonucleotide
auucaaguauuaaugcccc

SEQ ID NO: 986529 - RNA, 19 nt, Artificial Sequence
  Description of Artificial Sequence: Synthetic oligonucleotide
auauagaagaacaauauuu

SEQ ID NO: 986530 - RNA, 19 nt, Artificial Sequence
  Description of Artificial Sequence: Synthetic oligonucleotide
ugguuugcaaccccagugg

SEQ ID NO: 986531 - RNA, 19 nt, Artificial Sequence
  Description of Artificial Sequence: Synthetic oligonucleotide
acaauaggcaggaauauag

SEQ ID NO: 986532 - RNA, 19 nt, Artificial Sequence
  Description of Artificial Sequence: Synthetic oligonucleotide
ucaugugauacgcaauccc

SEQ ID NO: 986533 - RNA, 19 nt, Artificial Sequence
  Description of Artificial Sequence: Synthetic oligonucleotide
uugaugugauacuugacac

SEQ ID NO: 986534 - RNA, 19 nt, Artificial Sequence
  Description of Artificial Sequence: Synthetic oligonucleotide
aacuuuccgaucaucuggc

SEQ ID NO: 986535 - RNA, 19 nt, Artificial Sequence
  Description of Artificial Sequence: Synthetic oligonucleotide
aggauaaagccuguuaagg

SEQ ID NO: 986536 - RNA, 19 nt, Artificial Sequence
  Description of Artificial Sequence: Synthetic oligonucleotide
guugaugugauacuugaca

SEQ ID NO: 986537 - RNA, 19 nt, Artificial Sequence
  Description of Artificial Sequence: Synthetic oligonucleotide
ugaaaagguaguauuuguc

SEQ ID NO: 986538 - RNA, 19 nt, Artificial Sequence
  Description of Artificial Sequence: Synthetic oligonucleotide
ugauacuugacaccacucu

SEQ ID NO: 986539 - RNA, 19 nt, Artificial Sequence
  Description of Artificial Sequence: Synthetic oligonucleotide
acaacaaaccaauccucgg

SEQ ID NO: 986540 - RNA, 19 nt, Artificial Sequence
  Description of Artificial Sequence: Synthetic oligonucleotide
ugugauacuugacaccacu

SEQ ID NO: 986541 - RNA, 19 nt, Artificial Sequence
  Description of Artificial Sequence: Synthetic oligonucleotide
uggguuuacaacaaaccaa

SEQ ID NO: 986542 - RNA, 19 nt, Artificial Sequence
  Description of Artificial Sequence: Synthetic oligonucleotide
gacagaguugaugugauac

SEQ ID NO: 986543 - RNA, 19 nt, Artificial Sequence
  Description of Artificial Sequence: Synthetic oligonucleotide
aaagcuauuuagaggagca

SEQ ID NO: 986544 - RNA, 19 nt, Artificial Sequence
  Description of Artificial Sequence: Synthetic oligonucleotide
aaaauuaguuaggaacugu

SEQ ID NO: 986545 - RNA, 19 nt, Artificial Sequence
  Description of Artificial Sequence: Synthetic oligonucleotide
ugagguaagugcaggggag

SEQ ID NO: 986546 - RNA, 19 nt, Artificial Sequence
  Description of Artificial Sequence: Synthetic oligonucleotide
guuaggaacuguuuuauaa

SEQ ID NO: 986547 - RNA, 19 nt, Artificial Sequence
  Description of Artificial Sequence: Synthetic oligonucleotide
auaucuguuuuccacuugu

SEQ ID NO: 986548 - RNA, 19 nt, Artificial Sequence
  Description of Artificial Sequence: Synthetic oligonucleotide
agaaauaucuacaucuggu

SEQ ID NO: 986549 - RNA, 19 nt, Artificial Sequence
  Description of Artificial Sequence: Synthetic oligonucleotide
cuaucuuggcagaacgccg

SEQ ID NO: 986550 - RNA, 19 nt, Artificial Sequence
  Description of Artificial Sequence: Synthetic oligonucleotide
agaaaccagaaacacgaca

SEQ ID NO: 986551 - RNA, 19 nt, Artificial Sequence
  Description of Artificial Sequence: Synthetic oligonucleotide
uuacaacaaaccaauccuc

SEQ ID NO: 986552 - RNA, 19 nt, Artificial Sequence
  Description of Artificial Sequence: Synthetic oligonucleotide
acaacccucaucuacuaca

SEQ ID NO: 986553 - RNA, 19 nt, Artificial Sequence
  Description of Artificial Sequence: Synthetic oligonucleotide
cagaacuuagcacagcuuc

SEQ ID NO: 986554 - RNA, 19 nt, Artificial Sequence
  Description of Artificial Sequence: Synthetic oligonucleotide
uccauaucaagguuaacuu

SEQ ID NO: 986555 - RNA, 19 nt, Artificial Sequence
  Description of Artificial Sequence: Synthetic oligonucleotide
auaucuacaucugguguac

SEQ ID NO: 986556 - RNA, 19 nt, Artificial Sequence
  Description of Artificial Sequence: Synthetic oligonucleotide
uuccacauaaccccuucug

SEQ ID NO: 986557 - RNA, 19 nt, Artificial Sequence
  Description of Artificial Sequence: Synthetic oligonucleotide
acaguaggacaauauucuc

SEQ ID NO: 986558 - RNA, 19 nt, Artificial Sequence
  Description of Artificial Sequence: Synthetic oligonucleotide
ucagagaccgucgacuucc

SEQ ID NO: 986559 - RNA, 19 nt, Artificial Sequence
  Description of Artificial Sequence: Synthetic oligonucleotide
gaugcgaugauacuucuua

SEQ ID NO: 986560 - RNA, 19 nt, Artificial Sequence
  Description of Artificial Sequence: Synthetic oligonucleotide
uaucuuggcagaacgccgc

SEQ ID NO: 986561 - RNA, 19 nt, Artificial Sequence
  Description of Artificial Sequence: Synthetic oligonucleotide
aaaccaauccucggcgugg

SEQ ID NO: 986562 - RNA, 19 nt, Artificial Sequence
  Description of Artificial Sequence: Synthetic oligonucleotide
gaacauucauuucccagac

SEQ ID NO: 986563 - RNA, 19 nt, Artificial Sequence
  Description of Artificial Sequence: Synthetic oligonucleotide
aaguauuaaugccccauua

SEQ ID NO: 986564 - RNA, 19 nt, Artificial Sequence
  Description of Artificial Sequence: Synthetic oligonucleotide
aguauuaaugccccauuau

SEQ ID NO: 986565 - RNA, 19 nt, Artificial Sequence
  Description of Artificial Sequence: Synthetic oligonucleotide
caacaaaccaauccucggc

SEQ ID NO: 986566 - RNA, 19 nt, Artificial Sequence
  Description of Artificial Sequence: Synthetic oligonucleotide
uuauaagcuagaugaugga

SEQ ID NO: 986567 - RNA, 19 nt, Artificial Sequence
  Description of Artificial Sequence: Synthetic oligonucleotide
cagaagugggccaaugccc

SEQ ID NO: 986568 - RNA, 19 nt, Artificial Sequence
  Description of Artificial Sequence: Synthetic oligonucleotide
aacaguacccaaguccuug

SEQ ID NO: 986569 - RNA, 19 nt, Artificial Sequence
  Description of Artificial Sequence: Synthetic oligonucleotide
ucuaguccucuuauguuac

SEQ ID NO: 986570 - RNA, 19 nt, Artificial Sequence
  Description of Artificial Sequence: Synthetic oligonucleotide
cuuuucggguuugaaaagg

SEQ ID NO: 986571 - RNA, 19 nt, Artificial Sequence
  Description of Artificial Sequence: Synthetic oligonucleotide
acacuguaacaaaaguggc

SEQ ID NO: 986572 - RNA, 19 nt, Artificial Sequence
  Description of Artificial Sequence: Synthetic oligonucleotide
ugcaauaggcauauacaau

SEQ ID NO: 986573 - RNA, 19 nt, Artificial Sequence
  Description of Artificial Sequence: Synthetic oligonucleotide
uggucuaacgugagguaag

SEQ ID NO: 986574 - RNA, 19 nt, Artificial Sequence
  Description of Artificial Sequence: Synthetic oligonucleotide
aaacacgacaacaaggcua

SEQ ID NO: 986575 - RNA, 19 nt, Artificial Sequence
  Description of Artificial Sequence: Synthetic oligonucleotide
uucuaguccucuuauguua

SEQ ID NO: 986576 - RNA, 19 nt, Artificial Sequence
  Description of Artificial Sequence: Synthetic oligonucleotide
ucgacaacccucaucuacu

SEQ ID NO: 986577 - RNA, 19 nt, Artificial Sequence
  Description of Artificial Sequence: Synthetic oligonucleotide
ucggguuugaaaagguagu

SEQ ID NO: 986578 - RNA, 19 nt, Artificial Sequence
  Description of Artificial Sequence: Synthetic oligonucleotide
ccaaacaguacccaagucc

SEQ ID NO: 986579 - RNA, 19 nt, Artificial Sequence
  Description of Artificial Sequence: Synthetic oligonucleotide
cuaacgugagguaagugca

SEQ ID NO: 986580 - RNA, 19 nt, Artificial Sequence
  Description of Artificial Sequence: Synthetic oligonucleotide
gaguauauuuuaacuuucc

SEQ ID NO: 986581 - RNA, 19 nt, Artificial Sequence
  Description of Artificial Sequence: Synthetic oligonucleotide
ucugaccucaugugauacg

SEQ ID NO: 986582 - RNA, 19 nt, Artificial Sequence
  Description of Artificial Sequence: Synthetic oligonucleotide
ggauaaagccuguuaaggc

SEQ ID NO: 986583 - RNA, 19 nt, Artificial Sequence
  Description of Artificial Sequence: Synthetic oligonucleotide
aagccacuaaaucaacaaa

SEQ ID NO: 986584 - RNA, 19 nt, Artificial Sequence
  Description of Artificial Sequence: Synthetic oligonucleotide
auaagcuagaugauggaga

SEQ ID NO: 986585 - RNA, 19 nt, Artificial Sequence
  Description of Artificial Sequence: Synthetic oligonucleotide
ggcaaauagccuuuucggg

SEQ ID NO: 986586 - RNA, 19 nt, Artificial Sequence
  Description of Artificial Sequence: Synthetic oligonucleotide
aaauuaguuaggaacuguu

SEQ ID NO: 986587 - RNA, 19 nt, Artificial Sequence
  Description of Artificial Sequence: Synthetic oligonucleotide
gcacaaauacaucauuucc

SEQ ID NO: 986588 - RNA, 19 nt, Artificial Sequence
  Description of Artificial Sequence: Synthetic oligonucleotide
cuguuuuauaagcuagaug

SEQ ID NO: 986589 - RNA, 19 nt, Artificial Sequence
  Description of Artificial Sequence: Synthetic oligonucleotide
uguagguaacccagggcga

SEQ ID NO: 986590 - RNA, 19 nt, Artificial Sequence
  Description of Artificial Sequence: Synthetic oligonucleotide
gacagaagugggccaaugc

SEQ ID NO: 986591 - RNA, 19 nt, Artificial Sequence
  Description of Artificial Sequence: Synthetic oligonucleotide
acagauaaguauccuuggu

SEQ ID NO: 986592 - RNA, 19 nt, Artificial Sequence
  Description of Artificial Sequence: Synthetic oligonucleotide
ccucuuauguuacaaauac

SEQ ID NO: 986593 - RNA, 19 nt, Artificial Sequence
  Description of Artificial Sequence: Synthetic oligonucleotide
agguuaacuuugucagugg

SEQ ID NO: 986594 - RNA, 19 nt, Artificial Sequence
  Description of Artificial Sequence: Synthetic oligonucleotide
uaacgugagguaagugcag

SEQ ID NO: 986595 - RNA, 19 nt, Artificial Sequence
  Description of Artificial Sequence: Synthetic oligonucleotide
ugguuguuggguuuacaac

SEQ ID NO: 986596 - RNA, 19 nt, Artificial Sequence
  Description of Artificial Sequence: Synthetic oligonucleotide
cagcuaucuuggcagaacg

SEQ ID NO: 986597 - RNA, 19 nt, Artificial Sequence
  Description of Artificial Sequence: Synthetic oligonucleotide
cucgacaacccucaucuac

SEQ ID NO: 986598 - RNA, 19 nt, Artificial Sequence
  Description of Artificial Sequence: Synthetic oligonucleotide
ucaaguauuaaugccccau

SEQ ID NO: 986599 - RNA, 19 nt, Artificial Sequence
  Description of Artificial Sequence: Synthetic oligonucleotide
cuacuuaaucuaagccacg

SEQ ID NO: 986600 - RNA, 19 nt, Artificial Sequence
  Description of Artificial Sequence: Synthetic oligonucleotide
caauccucggcguggacag

SEQ ID NO: 986601 - RNA, 19 nt, Artificial Sequence
  Description of Artificial Sequence: Synthetic oligonucleotide
uugugcaguacuuccuggc

SEQ ID NO: 986602 - RNA, 19 nt, Artificial Sequence
  Description of Artificial Sequence: Synthetic oligonucleotide
uggguguggucuaacguga

SEQ ID NO: 986603 - RNA, 19 nt, Artificial Sequence
  Description of Artificial Sequence: Synthetic oligonucleotide
uccucuuauguuacaaaua

SEQ ID NO: 986604 - RNA, 19 nt, Artificial Sequence
  Description of Artificial Sequence: Synthetic oligonucleotide
ugucaccagaacuuagcac

SEQ ID NO: 986605 - RNA, 19 nt, Artificial Sequence
  Description of Artificial Sequence: Synthetic oligonucleotide
ucucaaagcuuuugguggu

SEQ ID NO: 986606 - RNA, 19 nt, Artificial Sequence
  Description of Artificial Sequence: Synthetic oligonucleotide
acguuccaaagacauccac

SEQ ID NO: 986607 - RNA, 19 nt, Artificial Sequence
  Description of Artificial Sequence: Synthetic oligonucleotide
uacuuaaucuaagccacgu

SEQ ID NO: 986608 - RNA, 19 nt, Artificial Sequence
  Description of Artificial Sequence: Synthetic oligonucleotide
aauuaguuaggaacuguuu

SEQ ID NO: 986609 - RNA, 19 nt, Artificial Sequence
  Description of Artificial Sequence: Synthetic oligonucleotide
agcuauuuagaggagcaca

SEQ ID NO: 986610 - RNA, 19 nt, Artificial Sequence
  Description of Artificial Sequence: Synthetic oligonucleotide
cuucagggcggcaaauagc

SEQ ID NO: 986611 - RNA, 19 nt, Artificial Sequence
  Description of Artificial Sequence: Synthetic oligonucleotide
uucucagagaccgucgacu

SEQ ID NO: 986612 - RNA, 19 nt, Artificial Sequence
  Description of Artificial Sequence: Synthetic oligonucleotide
uuaaggccagacacacugc

SEQ ID NO: 986613 - RNA, 19 nt, Artificial Sequence
  Description of Artificial Sequence: Synthetic oligonucleotide
ggcauauacaauaggcagg

SEQ ID NO: 986614 - RNA, 19 nt, Artificial Sequence
  Description of Artificial Sequence: Synthetic oligonucleotide
aacccucaucuacuacagg

SEQ ID NO: 986615 - RNA, 19 nt, Artificial Sequence
  Description of Artificial Sequence: Synthetic oligonucleotide
gacucaucuccuucaaaca

SEQ ID NO: 986616 - RNA, 19 nt, Artificial Sequence
  Description of Artificial Sequence: Synthetic oligonucleotide
uuucuaguccucuuauguu

SEQ ID NO: 986617 - RNA, 19 nt, Artificial Sequence
  Description of Artificial Sequence: Synthetic oligonucleotide
acagcuaucuuggcagaac

SEQ ID NO: 986618 - RNA, 19 nt, Artificial Sequence
  Description of Artificial Sequence: Synthetic oligonucleotide
caacccucaucuacuacag

SEQ ID NO: 986619 - RNA, 19 nt, Artificial Sequence
  Description of Artificial Sequence: Synthetic oligonucleotide
acuccgguugacucucugg

SEQ ID NO: 986620 - RNA, 19 nt, Artificial Sequence
  Description of Artificial Sequence: Synthetic oligonucleotide
aagugggccaaugcccugg

SEQ ID NO: 986621 - RNA, 19 nt, Artificial Sequence
  Description of Artificial Sequence: Synthetic oligonucleotide
cuuuccgaucaucuggcac

SEQ ID NO: 986622 - RNA, 19 nt, Artificial Sequence
  Description of Artificial Sequence: Synthetic oligonucleotide
uccuccucgacaacccuca

SEQ ID NO: 986623 - RNA, 19 nt, Artificial Sequence
  Description of Artificial Sequence: Synthetic oligonucleotide
cugauucugggaagaagac

SEQ ID NO: 986624 - RNA, 19 nt, Artificial Sequence
  Description of Artificial Sequence: Synthetic oligonucleotide
ugcgaugauacuucuuaau

SEQ ID NO: 986625 - RNA, 19 nt, Artificial Sequence
  Description of Artificial Sequence: Synthetic oligonucleotide
guguacaagagcccaggug

SEQ ID NO: 986626 - RNA, 19 nt, Artificial Sequence
  Description of Artificial Sequence: Synthetic oligonucleotide
acgugagguaagugcaggg

SEQ ID NO: 986627 - RNA, 19 nt, Artificial Sequence
  Description of Artificial Sequence: Synthetic oligonucleotide
gcuacuuaaucuaagccac

SEQ ID NO: 986628 - RNA, 19 nt, Artificial Sequence
  Description of Artificial Sequence: Synthetic oligonucleotide
ucggccauuccuuggucag

SEQ ID NO: 986629 - RNA, 19 nt, Artificial Sequence
  Description of Artificial Sequence: Synthetic oligonucleotide
acgacaacaaggcuacuua

SEQ ID NO: 986630 - RNA, 19 nt, Artificial Sequence
  Description of Artificial Sequence: Synthetic oligonucleotide
gaggacuuaagugggugug

SEQ ID NO: 986631 - RNA, 19 nt, Artificial Sequence
  Description of Artificial Sequence: Synthetic oligonucleotide
ucggcguggacagaguuga

SEQ ID NO: 986632 - RNA, 19 nt, Artificial Sequence
  Description of Artificial Sequence: Synthetic oligonucleotide
agcuaucuuggcagaacgc

SEQ ID NO: 986633 - RNA, 19 nt, Artificial Sequence
  Description of Artificial Sequence: Synthetic oligonucleotide
uccggcuccagagaaauau

SEQ ID NO: 986634 - RNA, 19 nt, Artificial Sequence
  Description of Artificial Sequence: Synthetic oligonucleotide
aaagcagauaaaacuccau

SEQ ID NO: 986635 - RNA, 19 nt, Artificial Sequence
  Description of Artificial Sequence: Synthetic oligonucleotide
uucuggcagugccugauuc

SEQ ID NO: 986636 - RNA, 19 nt, Artificial Sequence
  Description of Artificial Sequence: Synthetic oligonucleotide
uuucggguuugaaaaggua

SEQ ID NO: 986637 - RNA, 19 nt, Artificial Sequence
  Description of Artificial Sequence: Synthetic oligonucleotide
uaacccagggcgaguauau

SEQ ID NO: 986638 - RNA, 19 nt, Artificial Sequence
  Description of Artificial Sequence: Synthetic oligonucleotide
acaaaccaauccucggcgu

SEQ ID NO: 986639 - RNA, 19 nt, Artificial Sequence
  Description of Artificial Sequence: Synthetic oligonucleotide
uuguauuuuccagccacaa

SEQ ID NO: 986640 - RNA, 19 nt, Artificial Sequence
  Description of Artificial Sequence: Synthetic oligonucleotide
gugagguaagugcagggga

SEQ ID NO: 986641 - RNA, 19 nt, Artificial Sequence
  Description of Artificial Sequence: Synthetic oligonucleotide
guacacagcuaucuuggca

SEQ ID NO: 986642 - RNA, 19 nt, Artificial Sequence
  Description of Artificial Sequence: Synthetic oligonucleotide
cacauaaccccuucuggca

SEQ ID NO: 986643 - RNA, 19 nt, Artificial Sequence
  Description of Artificial Sequence: Synthetic oligonucleotide
gaccucaugugauacgcaa

SEQ ID NO: 986644 - RNA, 19 nt, Artificial Sequence
  Description of Artificial Sequence: Synthetic oligonucleotide
aggacuuaagugggugugg

SEQ ID NO: 986645 - RNA, 19 nt, Artificial Sequence
  Description of Artificial Sequence: Synthetic oligonucleotide
cucagaacauucagggaca

SEQ ID NO: 986646 - RNA, 19 nt, Artificial Sequence
  Description of Artificial Sequence: Synthetic oligonucleotide
agaguugaugugauacuug

SEQ ID NO: 986647 - RNA, 19 nt, Artificial Sequence
  Description of Artificial Sequence: Synthetic oligonucleotide
acuggaugcgaugauacuu

SEQ ID NO: 986648 - RNA, 19 nt, Artificial Sequence
  Description of Artificial Sequence: Synthetic oligonucleotide
cacaaaguugcccagugua

SEQ ID NO: 986649 - RNA, 19 nt, Artificial Sequence
  Description of Artificial Sequence: Synthetic oligonucleotide
agccuuuucggguuugaaa

SEQ ID NO: 986650 - RNA, 19 nt, Artificial Sequence
  Description of Artificial Sequence: Synthetic oligonucleotide
auaaagcuauuuagaggag

SEQ ID NO: 986651 - RNA, 19 nt, Artificial Sequence
  Description of Artificial Sequence: Synthetic oligonucleotide
aguguacaagagcccaggu

SEQ ID NO: 986652 - RNA, 19 nt, Artificial Sequence
  Description of Artificial Sequence: Synthetic oligonucleotide
gcuaucuuggcagaacgcc

SEQ ID NO: 986653 - RNA, 19 nt, Artificial Sequence
  Description of Artificial Sequence: Synthetic oligonucleotide
aaguauccuugguuggguu

SEQ ID NO: 986654 - RNA, 19 nt, Artificial Sequence
  Description of Artificial Sequence: Synthetic oligonucleotide
auacaauaggcaggaauau

SEQ ID NO: 986655 - RNA, 19 nt, Artificial Sequence
  Description of Artificial Sequence: Synthetic oligonucleotide
caguguacaagagcccagg

SEQ ID NO: 986656 - RNA, 19 nt, Artificial Sequence
  Description of Artificial Sequence: Synthetic oligonucleotide
acaaagauuccaagaacau

SEQ ID NO: 986657 - RNA, 19 nt, Artificial Sequence
  Description of Artificial Sequence: Synthetic oligonucleotide
gugguuguuggguuuacaa

SEQ ID NO: 986658 - RNA, 19 nt, Artificial Sequence
  Description of Artificial Sequence: Synthetic oligonucleotide
ccacauaaccccuucuggc

SEQ ID NO: 986659 - RNA, 19 nt, Artificial Sequence
  Description of Artificial Sequence: Synthetic oligonucleotide
cucuuauguuacaaauaca

SEQ ID NO: 986660 - RNA, 19 nt, Artificial Sequence
  Description of Artificial Sequence: Synthetic oligonucleotide
caaggguauacauaggaau

SEQ ID NO: 986661 - RNA, 19 nt, Artificial Sequence
  Description of Artificial Sequence: Synthetic oligonucleotide
uacaauaggcaggaauaua

SEQ ID NO: 986662 - RNA, 19 nt, Artificial Sequence
  Description of Artificial Sequence: Synthetic oligonucleotide
gccuuuucggguuugaaaa

SEQ ID NO: 986663 - RNA, 19 nt, Artificial Sequence
  Description of Artificial Sequence: Synthetic oligonucleotide
uguggucuaacgugaggua

SEQ ID NO: 986664 - RNA, 19 nt, Artificial Sequence
  Description of Artificial Sequence: Synthetic oligonucleotide
guagguaacccagggcgag

SEQ ID NO: 986665 - RNA, 19 nt, Artificial Sequence
  Description of Artificial Sequence: Synthetic oligonucleotide
ugaccucaugugauacgca

SEQ ID NO: 986666 - RNA, 19 nt, Artificial Sequence
  Description of Artificial Sequence: Synthetic oligonucleotide
gagucauuuuauuugccau

SEQ ID NO: 986667 - RNA, 19 nt, Artificial Sequence
  Description of Artificial Sequence: Synthetic oligonucleotide
acuuaaucuaagccacguu

SEQ ID NO: 986668 - RNA, 19 nt, Artificial Sequence
  Description of Artificial Sequence: Synthetic oligonucleotide
cucuucggccauuccuugg

SEQ ID NO: 986669 - RNA, 19 nt, Artificial Sequence
  Description of Artificial Sequence: Synthetic oligonucleotide
aagguaguauuuguccaua

SEQ ID NO: 986670 - RNA, 19 nt, Artificial Sequence
  Description of Artificial Sequence: Synthetic oligonucleotide
ucuacuacaggggcuucaa

SEQ ID NO: 986671 - RNA, 19 nt, Artificial Sequence
  Description of Artificial Sequence: Synthetic oligonucleotide
agaacuuagcacagcuucu

SEQ ID NO: 986672 - RNA, 19 nt, Artificial Sequence
  Description of Artificial Sequence: Synthetic oligonucleotide
uccacuugugcaguacuuc

SEQ ID NO: 986673 - RNA, 19 nt, Artificial Sequence
  Description of Artificial Sequence: Synthetic oligonucleotide
gacaacccucaucuacuac

SEQ ID NO: 986674 - RNA, 19 nt, Artificial Sequence
  Description of Artificial Sequence: Synthetic oligonucleotide
gguuaggacacuggaugcg

SEQ ID NO: 986675 - RNA, 19 nt, Artificial Sequence
  Description of Artificial Sequence: Synthetic oligonucleotide
gguaguauuuguccauauc

SEQ ID NO: 986676 - RNA, 19 nt, Artificial Sequence
  Description of Artificial Sequence: Synthetic oligonucleotide
acacaugauaaagcuauuu

SEQ ID NO: 986677 - RNA, 19 nt, Artificial Sequence
  Description of Artificial Sequence: Synthetic oligonucleotide
gugaggacuuaagugggug

SEQ ID NO: 986678 - RNA, 19 nt, Artificial Sequence
  Description of Artificial Sequence: Synthetic oligonucleotide
ucacaauauaaagcagaua

SEQ ID NO: 986679 - RNA, 19 nt, Artificial Sequence
  Description of Artificial Sequence: Synthetic oligonucleotide
gcauauacaauaggcagga

SEQ ID NO: 986680 - RNA, 19 nt, Artificial Sequence
  Description of Artificial Sequence: Synthetic oligonucleotide
uacaagagcccaggugagc

SEQ ID NO: 986681 - RNA, 19 nt, Artificial Sequence
  Description of Artificial Sequence: Synthetic oligonucleotide
cuuggcagaacgccgcuga

SEQ ID NO: 986682 - RNA, 19 nt, Artificial Sequence
  Description of Artificial Sequence: Synthetic oligonucleotide
acugcuguagacagccuca

SEQ ID NO: 986683 - RNA, 19 nt, Artificial Sequence
  Description of Artificial Sequence: Synthetic oligonucleotide
gcucacaauauaaagcaga

SEQ ID NO: 986684 - RNA, 19 nt, Artificial Sequence
  Description of Artificial Sequence: Synthetic oligonucleotide
gguguggucuaacgugagg

SEQ ID NO: 986685 - RNA, 19 nt, Artificial Sequence
  Description of Artificial Sequence: Synthetic oligonucleotide
ggagaagccacuaaaucaa

SEQ ID NO: 986686 - RNA, 19 nt, Artificial Sequence
  Description of Artificial Sequence: Synthetic oligonucleotide
cauuuccgugaccuguuuc

SEQ ID NO: 986687 - RNA, 19 nt, Artificial Sequence
  Description of Artificial Sequence: Synthetic oligonucleotide
agguaguauuuguccauau

SEQ ID NO: 986688 - RNA, 19 nt, Artificial Sequence
  Description of Artificial Sequence: Synthetic oligonucleotide
gguuugcaaccccaguggc

SEQ ID NO: 986689 - RNA, 19 nt, Artificial Sequence
  Description of Artificial Sequence: Synthetic oligonucleotide
cucacaauauaaagcagau

SEQ ID NO: 986690 - RNA, 19 nt, Artificial Sequence
  Description of Artificial Sequence: Synthetic oligonucleotide
gacuuaagugggugugguc

SEQ ID NO: 986691 - RNA, 19 nt, Artificial Sequence
  Description of Artificial Sequence: Synthetic oligonucleotide
gagaccauucuuuccggcu

SEQ ID NO: 986692 - RNA, 19 nt, Artificial Sequence
  Description of Artificial Sequence: Synthetic oligonucleotide
augcgaugauacuucuuaa

SEQ ID NO: 986693 - RNA, 19 nt, Artificial Sequence
  Description of Artificial Sequence: Synthetic oligonucleotide
guacaagagcccaggugag

SEQ ID NO: 986694 - RNA, 19 nt, Artificial Sequence
  Description of Artificial Sequence: Synthetic oligonucleotide
gcuuuuggugguuguuggg

SEQ ID NO: 986695 - RNA, 19 nt, Artificial Sequence
  Description of Artificial Sequence: Synthetic oligonucleotide
cucugaccucaugugauac

SEQ ID NO: 986696 - RNA, 19 nt, Artificial Sequence
  Description of Artificial Sequence: Synthetic oligonucleotide
agcuuuaaggccagacaca

SEQ ID NO: 986697 - RNA, 19 nt, Artificial Sequence
  Description of Artificial Sequence: Synthetic oligonucleotide
cucggcguggacagaguug

SEQ ID NO: 986698 - RNA, 19 nt, Artificial Sequence
  Description of Artificial Sequence: Synthetic oligonucleotide
gcaaauagccuuuucgggu

SEQ ID NO: 986699 - RNA, 19 nt, Artificial Sequence
  Description of Artificial Sequence: Synthetic oligonucleotide
auacuucuuaauaucuguu

SEQ ID NO: 986700 - RNA, 19 nt, Artificial Sequence
  Description of Artificial Sequence: Synthetic oligonucleotide
uuccgugaccuguuuccac

SEQ ID NO: 986701 - RNA, 19 nt, Artificial Sequence
  Description of Artificial Sequence: Synthetic oligonucleotide
gagaagccacuaaaucaac

SEQ ID NO: 986702 - RNA, 19 nt, Artificial Sequence
  Description of Artificial Sequence: Synthetic oligonucleotide
guacagagagagaccauuc

SEQ ID NO: 986703 - RNA, 19 nt, Artificial Sequence
  Description of Artificial Sequence: Synthetic oligonucleotide
aaccccaguggcauuucca

SEQ ID NO: 986704 - RNA, 19 nt, Artificial Sequence
  Description of Artificial Sequence: Synthetic oligonucleotide
guccucuuauguuacaaau

SEQ ID NO: 986705 - RNA, 19 nt, Artificial Sequence
  Description of Artificial Sequence: Synthetic oligonucleotide
guugcccaguguacaagag

SEQ ID NO: 986706 - RNA, 19 nt, Artificial Sequence
  Description of Artificial Sequence: Synthetic oligonucleotide
ccucaugugauacgcaauc

SEQ ID NO: 986707 - RNA, 19 nt, Artificial Sequence
  Description of Artificial Sequence: Synthetic oligonucleotide
uuccgaucaucuggcacca

SEQ ID NO: 986708 - RNA, 19 nt, Artificial Sequence
  Description of Artificial Sequence: Synthetic oligonucleotide
agccacguuccaaagacau

SEQ ID NO: 986709 - RNA, 19 nt, Artificial Sequence
  Description of Artificial Sequence: Synthetic oligonucleotide
auccucggcguggacagag

SEQ ID NO: 986710 - RNA, 19 nt, Artificial Sequence
  Description of Artificial Sequence: Synthetic oligonucleotide
augugauacuugacaccac

SEQ ID NO: 986711 - RNA, 19 nt, Artificial Sequence
  Description of Artificial Sequence: Synthetic oligonucleotide
acacagcuaucuuggcaga

SEQ ID NO: 986712 - RNA, 19 nt, Artificial Sequence
  Description of Artificial Sequence: Synthetic oligonucleotide
agugccugauucaaguauu

SEQ ID NO: 986713 - RNA, 19 nt, Artificial Sequence
  Description of Artificial Sequence: Synthetic oligonucleotide
ucagggcggcaaauagccu

SEQ ID NO: 986714 - RNA, 19 nt, Artificial Sequence
  Description of Artificial Sequence: Synthetic oligonucleotide
aaccaauccucggcgugga

SEQ ID NO: 986715 - RNA, 19 nt, Artificial Sequence
  Description of Artificial Sequence: Synthetic oligonucleotide
ccuuuucggguuugaaaag

SEQ ID NO: 986716 - RNA, 19 nt, Artificial Sequence
  Description of Artificial Sequence: Synthetic oligonucleotide
acuuuccgaucaucuggca

SEQ ID NO: 986717 - RNA, 19 nt, Artificial Sequence
  Description of Artificial Sequence: Synthetic oligonucleotide
agggcgaggcugcugcugu

SEQ ID NO: 986718 - RNA, 19 nt, Artificial Sequence
  Description of Artificial Sequence: Synthetic oligonucleotide
cagaacgccgcugaacuca

SEQ ID NO: 986719 - RNA, 19 nt, Artificial Sequence
  Description of Artificial Sequence: Synthetic oligonucleotide
gugauacuugacaccacuc

SEQ ID NO: 986720 - RNA, 19 nt, Artificial Sequence
  Description of Artificial Sequence: Synthetic oligonucleotide
ugccugauucaaguauuaa

SEQ ID NO: 986721 - RNA, 19 nt, Artificial Sequence
  Description of Artificial Sequence: Synthetic oligonucleotide
ucauucccacccuggcccu

SEQ ID NO: 986722 - RNA, 19 nt, Artificial Sequence
  Description of Artificial Sequence: Synthetic oligonucleotide
ucuuggcagaacgccgcug

SEQ ID NO: 986723 - RNA, 19 nt, Artificial Sequence
  Description of Artificial Sequence: Synthetic oligonucleotide
gacuccgguugacucucug

SEQ ID NO: 986724 - RNA, 19 nt, Artificial Sequence
  Description of Artificial Sequence: Synthetic oligonucleotide
ccagagaaauaucuacauc

SEQ ID NO: 986725 - RNA, 19 nt, Artificial Sequence
  Description of Artificial Sequence: Synthetic oligonucleotide
uaacuuugucaguggcaua

SEQ ID NO: 986726 - RNA, 19 nt, Artificial Sequence
  Description of Artificial Sequence: Synthetic oligonucleotide
auaaccccuucuggcagug

SEQ ID NO: 986727 - RNA, 19 nt, Artificial Sequence
  Description of Artificial Sequence: Synthetic oligonucleotide
guuugcaaccccaguggca

SEQ ID NO: 986728 - RNA, 19 nt, Artificial Sequence
  Description of Artificial Sequence: Synthetic oligonucleotide
guguggucuaacgugaggu

SEQ ID NO: 986729 - RNA, 19 nt, Artificial Sequence
  Description of Artificial Sequence: Synthetic oligonucleotide
guggucuaacgugagguaa

SEQ ID NO: 986730 - RNA, 19 nt, Artificial Sequence
  Description of Artificial Sequence: Synthetic oligonucleotide
guaggacaauauucucaga

SEQ ID NO: 986731 - RNA, 19 nt, Artificial Sequence
  Description of Artificial Sequence: Synthetic oligonucleotide
cuuaaguggguguggucua

SEQ ID NO: 986732 - RNA, 19 nt, Artificial Sequence
  Description of Artificial Sequence: Synthetic oligonucleotide
gacacuggaugcgaugaua

SEQ ID NO: 986733 - RNA, 19 nt, Artificial Sequence
  Description of Artificial Sequence: Synthetic oligonucleotide
cagauaaguauccuugguu

SEQ ID NO: 986734 - RNA, 19 nt, Artificial Sequence
  Description of Artificial Sequence: Synthetic oligonucleotide
gacaacaaggcuacuuaau

SEQ ID NO: 986735 - RNA, 19 nt, Artificial Sequence
  Description of Artificial Sequence: Synthetic oligonucleotide
gucuaacgugagguaagug

SEQ ID NO: 986736 - RNA, 19 nt, Artificial Sequence
  Description of Artificial Sequence: Synthetic oligonucleotide
uggcagaacgccgcugaac

SEQ ID NO: 986737 - RNA, 19 nt, Artificial Sequence
  Description of Artificial Sequence: Synthetic oligonucleotide
uuggcagaacgccgcugaa

SEQ ID NO: 986738 - RNA, 19 nt, Artificial Sequence
  Description of Artificial Sequence: Synthetic oligonucleotide
ggcgaguauauuuuaacuu

SEQ ID NO: 986739 - RNA, 19 nt, Artificial Sequence
  Description of Artificial Sequence: Synthetic oligonucleotide
uccccugcccgggacuccg

SEQ ID NO: 986740 - RNA, 19 nt, Artificial Sequence
  Description of Artificial Sequence: Synthetic oligonucleotide
cucagagaccgucgacuuc

SEQ ID NO: 986741 - RNA, 19 nt, Artificial Sequence
  Description of Artificial Sequence: Synthetic oligonucleotide
ugcaaccccaguggcauuu

SEQ ID NO: 986742 - RNA, 19 nt, Artificial Sequence
  Description of Artificial Sequence: Synthetic oligonucleotide
gucgacuucccugcugcug

SEQ ID NO: 986743 - RNA, 19 nt, Artificial Sequence
  Description of Artificial Sequence: Synthetic oligonucleotide
cccauuauugaaaagugau

SEQ ID NO: 986744 - RNA, 19 nt, Artificial Sequence
  Description of Artificial Sequence: Synthetic oligonucleotide
agaacgccgcugaacucag

SEQ ID NO: 986745 - RNA, 19 nt, Artificial Sequence
  Description of Artificial Sequence: Synthetic oligonucleotide
gcgaguauauuuuaacuuu

SEQ ID NO: 986746 - RNA, 19 nt, Artificial Sequence
  Description of Artificial Sequence: Synthetic oligonucleotide
caucauuuccgugaccugu

SEQ ID NO: 986747 - RNA, 19 nt, Artificial Sequence
  Description of Artificial Sequence: Synthetic oligonucleotide
cuccucgacaacccucauc

SEQ ID NO: 986748 - RNA, 19 nt, Artificial Sequence
  Description of Artificial Sequence: Synthetic oligonucleotide
agcacacaugauaaagcua

SEQ ID NO: 986749 - RNA, 19 nt, Artificial Sequence
  Description of Artificial Sequence: Synthetic oligonucleotide
uguccauaucaagguuaac

SEQ ID NO: 986750 - RNA, 19 nt, Artificial Sequence
  Description of Artificial Sequence: Synthetic oligonucleotide
acgccgcugaacucagccu

SEQ ID NO: 986751 - RNA, 19 nt, Artificial Sequence
  Description of Artificial Sequence: Synthetic oligonucleotide
ggagucaacacagagcuuu

SEQ ID NO: 986752 - RNA, 19 nt, Artificial Sequence
  Description of Artificial Sequence: Synthetic oligonucleotide
ccgguugacucucuggcug

SEQ ID NO: 986753 - RNA, 19 nt, Artificial Sequence
  Description of Artificial Sequence: Synthetic oligonucleotide
aaacaguacccaaguccuu

SEQ ID NO: 986754 - RNA, 19 nt, Artificial Sequence
  Description of Artificial Sequence: Synthetic oligonucleotide
guauccuugguuggguucu

SEQ ID NO: 986755 - RNA, 19 nt, Artificial Sequence
  Description of Artificial Sequence: Synthetic oligonucleotide
cuaguccucuuauguuaca

SEQ ID NO: 986756 - RNA, 19 nt, Artificial Sequence
  Description of Artificial Sequence: Synthetic oligonucleotide
cacagaagacacuuguauu

SEQ ID NO: 986757 - RNA, 19 nt, Artificial Sequence
  Description of Artificial Sequence: Synthetic oligonucleotide
ggguuuacaacaaaccaau

SEQ ID NO: 986758 - RNA, 19 nt, Artificial Sequence
  Description of Artificial Sequence: Synthetic oligonucleotide
accuugguuugcaacccca

SEQ ID NO: 986759 - RNA, 19 nt, Artificial Sequence
  Description of Artificial Sequence: Synthetic oligonucleotide
aggcccgugcucugaccuc

SEQ ID NO: 986760 - RNA, 19 nt, Artificial Sequence
  Description of Artificial Sequence: Synthetic oligonucleotide
gggcgaguauauuuuaacu

SEQ ID NO: 986761 - RNA, 19 nt, Artificial Sequence
  Description of Artificial Sequence: Synthetic oligonucleotide
ccgucgacuucccugcugc

SEQ ID NO: 986762 - RNA, 19 nt, Artificial Sequence
  Description of Artificial Sequence: Synthetic oligonucleotide
agagaccgucgacuucccu

SEQ ID NO: 986763 - RNA, 19 nt, Artificial Sequence
  Description of Artificial Sequence: Synthetic oligonucleotide
cagggcgaguauauuuuaa

SEQ ID NO: 986764 - RNA, 19 nt, Artificial Sequence
  Description of Artificial Sequence: Synthetic oligonucleotide
cagggagagagcccacuga

SEQ ID NO: 986765 - RNA, 19 nt, Artificial Sequence
  Description of Artificial Sequence: Synthetic oligonucleotide
cgugagguaagugcagggg

SEQ ID NO: 986766 - RNA, 19 nt, Artificial Sequence
  Description of Artificial Sequence: Synthetic oligonucleotide
guaacccagggcgaguaua

SEQ ID NO: 986767 - RNA, 19 nt, Artificial Sequence
  Description of Artificial Sequence: Synthetic oligonucleotide
ugcccgggacuccgguuga

SEQ ID NO: 986768 - RNA, 19 nt, Artificial Sequence
  Description of Artificial Sequence: Synthetic oligonucleotide
gccugauucaaguauuaau

SEQ ID NO: 986769 - RNA, 19 nt, Artificial Sequence
  Description of Artificial Sequence: Synthetic oligonucleotide
gguuuacaacaaaccaauc

SEQ ID NO: 986770 - RNA, 19 nt, Artificial Sequence
  Description of Artificial Sequence: Synthetic oligonucleotide
guggcaguucuccuuucua

SEQ ID NO: 986771 - RNA, 19 nt, Artificial Sequence
  Description of Artificial Sequence: Synthetic oligonucleotide
accucaugugauacgcaau

SEQ ID NO: 986772 - RNA, 19 nt, Artificial Sequence
  Description of Artificial Sequence: Synthetic oligonucleotide
caaguauuaaugccccauu

SEQ ID NO: 986773 - RNA, 19 nt, Artificial Sequence
  Description of Artificial Sequence: Synthetic oligonucleotide
cuuuccggcuccagagaaa

SEQ ID NO: 986774 - RNA, 19 nt, Artificial Sequence
  Description of Artificial Sequence: Synthetic oligonucleotide
ccccauuauugaaaaguga

SEQ ID NO: 986775 - RNA, 19 nt, Artificial Sequence
  Description of Artificial Sequence: Synthetic oligonucleotide
agguaacccagggcgagua

SEQ ID NO: 986776 - RNA, 19 nt, Artificial Sequence
  Description of Artificial Sequence: Synthetic oligonucleotide
cagugccugauucaaguau

SEQ ID NO: 986777 - RNA, 19 nt, Artificial Sequence
  Description of Artificial Sequence: Synthetic oligonucleotide
ggggcuucaaggguauaca

SEQ ID NO: 986778 - RNA, 19 nt, Artificial Sequence
  Description of Artificial Sequence: Synthetic oligonucleotide
aauccucggcguggacaga

SEQ ID NO: 986779 - RNA, 19 nt, Artificial Sequence
  Description of Artificial Sequence: Synthetic oligonucleotide
aacccagggcgaguauauu

SEQ ID NO: 986780 - RNA, 19 nt, Artificial Sequence
  Description of Artificial Sequence: Synthetic oligonucleotide
cauaaccccuucuggcagu

SEQ ID NO: 986781 - RNA, 19 nt, Artificial Sequence
  Description of Artificial Sequence: Synthetic oligonucleotide
gcauaugcaauaggcauau

SEQ ID NO: 986782 - RNA, 19 nt, Artificial Sequence
  Description of Artificial Sequence: Synthetic oligonucleotide
uccgaucaucuggcaccag

SEQ ID NO: 986783 - RNA, 19 nt, Artificial Sequence
  Description of Artificial Sequence: Synthetic oligonucleotide
cagggcggcaaauagccuu

SEQ ID NO: 986784 - RNA, 19 nt, Artificial Sequence
  Description of Artificial Sequence: Synthetic oligonucleotide
ggcuucaaggguauacaua

SEQ ID NO: 986785 - RNA, 19 nt, Artificial Sequence
  Description of Artificial Sequence: Synthetic oligonucleotide
gacaggcaugagguacaga

SEQ ID NO: 986786 - RNA, 19 nt, Artificial Sequence
  Description of Artificial Sequence: Synthetic oligonucleotide
ugguuggguucugcuuccu

SEQ ID NO: 986787 - RNA, 19 nt, Artificial Sequence
  Description of Artificial Sequence: Synthetic oligonucleotide
agggcggcaaauagccuuu

SEQ ID NO: 986788 - RNA, 19 nt, Artificial Sequence
  Description of Artificial Sequence: Synthetic oligonucleotide
gggagagagcccacugaac

SEQ ID NO: 986789 - RNA, 19 nt, Artificial Sequence
  Description of Artificial Sequence: Synthetic oligonucleotide
cauauacaauaggcaggaa

SEQ ID NO: 986790 - RNA, 19 nt, Artificial Sequence
  Description of Artificial Sequence: Synthetic oligonucleotide
ggguguggucuaacgugag

SEQ ID NO: 986791 - RNA, 19 nt, Artificial Sequence
  Description of Artificial Sequence: Synthetic oligonucleotide
cacuggaugcgaugauacu

SEQ ID NO: 986792 - RNA, 19 nt, Artificial Sequence
  Description of Artificial Sequence: Synthetic oligonucleotide
ccgggacuccgguugacuc

SEQ ID NO: 986793 - RNA, 19 nt, Artificial Sequence
  Description of Artificial Sequence: Synthetic oligonucleotide
cacagcuaucuuggcagaa

SEQ ID NO: 986794 - RNA, 19 nt, Artificial Sequence
  Description of Artificial Sequence: Synthetic oligonucleotide
ggcggcaaauagccuuuuc

SEQ ID NO: 986795 - RNA, 19 nt, Artificial Sequence
  Description of Artificial Sequence: Synthetic oligonucleotide
ggcaugagguacagagaga

SEQ ID NO: 986796 - RNA, 19 nt, Artificial Sequence
  Description of Artificial Sequence: Synthetic oligonucleotide
caggcccgugcucugaccu

SEQ ID NO: 986797 - RNA, 19 nt, Artificial Sequence
  Description of Artificial Sequence: Synthetic oligonucleotide
ccaauccucggcguggaca

SEQ ID NO: 986798 - RNA, 19 nt, Artificial Sequence
  Description of Artificial Sequence: Synthetic oligonucleotide
ggacuuaaguggguguggu

SEQ ID NO: 986799 - RNA, 19 nt, Artificial Sequence
  Description of Artificial Sequence: Synthetic oligonucleotide
cacgacaacaaggcuacuu

SEQ ID NO: 986800 - RNA, 19 nt, Artificial Sequence
  Description of Artificial Sequence: Synthetic oligonucleotide
ccauaucaagguuaacuuu

SEQ ID NO: 986801 - RNA, 19 nt, Artificial Sequence
  Description of Artificial Sequence: Synthetic oligonucleotide
guccugauucugggaagaa

SEQ ID NO: 986802 - RNA, 19 nt, Artificial Sequence
  Description of Artificial Sequence: Synthetic oligonucleotide
ccaaguccuugucaccaga

SEQ ID NO: 986803 - RNA, 19 nt, Artificial Sequence
  Description of Artificial Sequence: Synthetic oligonucleotide
gggcuucaaggguauacau

SEQ ID NO: 986804 - RNA, 19 nt, Artificial Sequence
  Description of Artificial Sequence: Synthetic oligonucleotide
ggucuaacgugagguaagu

SEQ ID NO: 986805 - RNA, 19 nt, Artificial Sequence
  Description of Artificial Sequence: Synthetic oligonucleotide
cacacaugauaaagcuauu

SEQ ID NO: 986806 - RNA, 19 nt, Artificial Sequence
  Description of Artificial Sequence: Synthetic oligonucleotide
cgacaacaaggcuacuuaa

SEQ ID NO: 986807 - RNA, 19 nt, Artificial Sequence
  Description of Artificial Sequence: Synthetic oligonucleotide
acacgacaacaaggcuacu

SEQ ID NO: 986808 - RNA, 19 nt, Artificial Sequence
  Description of Artificial Sequence: Synthetic oligonucleotide
gccacguuccaaagacauc

SEQ ID NO: 986809 - RNA, 19 nt, Artificial Sequence
  Description of Artificial Sequence: Synthetic oligonucleotide
ggugaggacuuaagugggu

SEQ ID NO: 986810 - RNA, 19 nt, Artificial Sequence
  Description of Artificial Sequence: Synthetic oligonucleotide
cgaucaucuggcaccaggu

SEQ ID NO: 986811 - RNA, 19 nt, Artificial Sequence
  Description of Artificial Sequence: Synthetic oligonucleotide
ccagggcgaguauauuuua

SEQ ID NO: 986812 - RNA, 19 nt, Artificial Sequence
  Description of Artificial Sequence: Synthetic oligonucleotide
cauaugcaauaggcauaua

SEQ ID NO: 986813 - RNA, 19 nt, Artificial Sequence
  Description of Artificial Sequence: Synthetic oligonucleotide
cagaaggauaaagccuguu

SEQ ID NO: 986814 - RNA, 19 nt, Artificial Sequence
  Description of Artificial Sequence: Synthetic oligonucleotide
gguaacccagggcgaguau

SEQ ID NO: 986815 - RNA, 19 nt, Artificial Sequence
  Description of Artificial Sequence: Synthetic oligonucleotide
cagagacuucagggcggca

SEQ ID NO: 986816 - RNA, 19 nt, Artificial Sequence
  Description of Artificial Sequence: Synthetic oligonucleotide
gcaaccccaguggcauuuc

SEQ ID NO: 986817 - RNA, 19 nt, Artificial Sequence
  Description of Artificial Sequence: Synthetic oligonucleotide
cccuuccccugcccgggac

SEQ ID NO: 986818 - RNA, 19 nt, Artificial Sequence
  Description of Artificial Sequence: Synthetic oligonucleotide
cggguuugaaaagguagua

SEQ ID NO: 986819 - RNA, 19 nt, Artificial Sequence
  Description of Artificial Sequence: Synthetic oligonucleotide
gggcgaggcugcugcuguc

SEQ ID NO: 986820 - RNA, 19 nt, Artificial Sequence
  Description of Artificial Sequence: Synthetic oligonucleotide
cgacaacccucaucuacua

SEQ ID NO: 986821 - RNA, 19 nt, Artificial Sequence
  Description of Artificial Sequence: Synthetic oligonucleotide
ccucgacaacccucaucua

SEQ ID NO: 986822 - RNA, 19 nt, Artificial Sequence
  Description of Artificial Sequence: Synthetic oligonucleotide
ccgugaccuguuuccacau

SEQ ID NO: 986823 - RNA, 19 nt, Artificial Sequence
  Description of Artificial Sequence: Synthetic oligonucleotide
cgugaccuguuuccacaua

SEQ ID NO: 986824 - RNA, 19 nt, Artificial Sequence
  Description of Artificial Sequence: Synthetic oligonucleotide
ccucggcguggacagaguu

SEQ ID NO: 986825 - RNA, 19 nt, Artificial Sequence
  Description of Artificial Sequence: Synthetic oligonucleotide
gcccgggacuccgguugac

SEQ ID NO: 986826 - RNA, 19 nt, Artificial Sequence
  Description of Artificial Sequence: Synthetic oligonucleotide
cccgggacuccgguugacu

SEQ ID NO: 986827 - RNA, 19 nt, Artificial Sequence
  Description of Artificial Sequence: Synthetic oligonucleotide
cgucgacuucccugcugcu

SEQ ID NO: 986828 - RNA, 19 nt, Artificial Sequence
  Description of Artificial Sequence: Synthetic oligonucleotide
cccugcccgggacuccggu

SEQ ID NO: 986829 - RNA, 19 nt, Artificial Sequence
  Description of Artificial Sequence: Synthetic oligonucleotide
gggcggcaaauagccuuuu

SEQ ID NO: 986830 - RNA, 19 nt, Artificial Sequence
  Description of Artificial Sequence: Synthetic oligonucleotide
gcccgugcucugaccucau

SEQ ID NO: 986831 - RNA, 19 nt, Artificial Sequence
  Description of Artificial Sequence: Synthetic oligonucleotide
cggcguggacagaguugau

SEQ ID NO: 986832 - RNA, 19 nt, Artificial Sequence
  Description of Artificial Sequence: Synthetic oligonucleotide
aaaagcuugaaacauaugg

SEQ ID NO: 986833 - RNA, 19 nt, Artificial Sequence
  Description of Artificial Sequence: Synthetic oligonucleotide
aauaaauugaagcagguag

SEQ ID NO: 986834 - RNA, 19 nt, Artificial Sequence
  Description of Artificial Sequence: Synthetic oligonucleotide
aaugcuauaaaaccuaugg

SEQ ID NO: 986835 - RNA, 19 nt, Artificial Sequence
  Description of Artificial Sequence: Synthetic oligonucleotide
aauguaauaaauugaagca

SEQ ID NO: 986836 - RNA, 19 nt, Artificial Sequence
  Description of Artificial Sequence: Synthetic oligonucleotide
ucuuuuaagucauacacgg

SEQ ID NO: 986837 - RNA, 19 nt, Artificial Sequence
  Description of Artificial Sequence: Synthetic oligonucleotide
auugaaaccacauauaaga

SEQ ID NO: 986838 - RNA, 19 nt, Artificial Sequence
  Description of Artificial Sequence: Synthetic oligonucleotide
caauguaauaaauugaagc

SEQ ID NO: 986839 - RNA, 19 nt, Artificial Sequence
  Description of Artificial Sequence: Synthetic oligonucleotide
aguccuauguuucagagac

SEQ ID NO: 986840 - RNA, 19 nt, Artificial Sequence
  Description of Artificial Sequence: Synthetic oligonucleotide
uaacaaaagaucuagggca

SEQ ID NO: 986841 - RNA, 19 nt, Artificial Sequence
  Description of Artificial Sequence: Synthetic oligonucleotide
uuuguguccaaacaagucc

SEQ ID NO: 986842 - RNA, 19 nt, Artificial Sequence
  Description of Artificial Sequence: Synthetic oligonucleotide
uucaguuuagcacucuggg

SEQ ID NO: 986843 - RNA, 19 nt, Artificial Sequence
  Description of Artificial Sequence: Synthetic oligonucleotide
acuggauuugacuagguag

SEQ ID NO: 986844 - RNA, 19 nt, Artificial Sequence
  Description of Artificial Sequence: Synthetic oligonucleotide
aaaucuugaucacagggcu

SEQ ID NO: 986845 - RNA, 19 nt, Artificial Sequence
  Description of Artificial Sequence: Synthetic oligonucleotide
agugucguaaguuuugcac

SEQ ID NO: 986846 - RNA, 19 nt, Artificial Sequence
  Description of Artificial Sequence: Synthetic oligonucleotide
uuugguaaaacuugaagaa

SEQ ID NO: 986847 - RNA, 19 nt, Artificial Sequence
  Description of Artificial Sequence: Synthetic oligonucleotide
aauagauugacuauuucgu

SEQ ID NO: 986848 - RNA, 19 nt, Artificial Sequence
  Description of Artificial Sequence: Synthetic oligonucleotide
cuugaagaaagaauauucc

SEQ ID NO: 986849 - RNA, 19 nt, Artificial Sequence
  Description of Artificial Sequence: Synthetic oligonucleotide
uugaaaaguucaaauacga

SEQ ID NO: 986850 - RNA, 19 nt, Artificial Sequence
  Description of Artificial Sequence: Synthetic oligonucleotide
aagauagacaacugguuug

SEQ ID NO: 986851 - RNA, 19 nt, Artificial Sequence
  Description of Artificial Sequence: Synthetic oligonucleotide
ucucauugaaaccacauau

SEQ ID NO: 986852 - RNA, 19 nt, Artificial Sequence
  Description of Artificial Sequence: Synthetic oligonucleotide
aguuacuagaaucugccag

SEQ ID NO: 986853 - RNA, 19 nt, Artificial Sequence
  Description of Artificial Sequence: Synthetic oligonucleotide
aggguaauuaucucaaguc

SEQ ID NO: 986854 - RNA, 19 nt, Artificial Sequence
  Description of Artificial Sequence: Synthetic oligonucleotide
gaaagaauauuccugacaa

SEQ ID NO: 986855 - RNA, 19 nt, Artificial Sequence
  Description of Artificial Sequence: Synthetic oligonucleotide
agaaauucgaaagcuaaac

SEQ ID NO: 986856 - RNA, 19 nt, Artificial Sequence
  Description of Artificial Sequence: Synthetic oligonucleotide
gauguucccagucagggag

SEQ ID NO: 986857 - RNA, 19 nt, Artificial Sequence
  Description of Artificial Sequence: Synthetic oligonucleotide
uguggaauggaccccgugg

SEQ ID NO: 986858 - RNA, 19 nt, Artificial Sequence
  Description of Artificial Sequence: Synthetic oligonucleotide
auuucggucacguucaugu

SEQ ID NO: 986859 - RNA, 19 nt, Artificial Sequence
  Description of Artificial Sequence: Synthetic oligonucleotide
aaauugagaaacaccacag

SEQ ID NO: 986860 - RNA, 19 nt, Artificial Sequence
  Description of Artificial Sequence: Synthetic oligonucleotide
guuacuagaaucugccagg

SEQ ID NO: 986861 - RNA, 19 nt, Artificial Sequence
  Description of Artificial Sequence: Synthetic oligonucleotide
uguuauugagguuugguaa

SEQ ID NO: 986862 - RNA, 19 nt, Artificial Sequence
  Description of Artificial Sequence: Synthetic oligonucleotide
guuugguaaaacuugaaga

SEQ ID NO: 986863 - RNA, 19 nt, Artificial Sequence
  Description of Artificial Sequence: Synthetic oligonucleotide
uuaagucauacacgggagg

SEQ ID NO: 986864 - RNA, 19 nt, Artificial Sequence
  Description of Artificial Sequence: Synthetic oligonucleotide
aauucgaaagcuaaacaug

SEQ ID NO: 986865 - RNA, 19 nt, Artificial Sequence
  Description of Artificial Sequence: Synthetic oligonucleotide
aaaagaucuagggcaaggg

SEQ ID NO: 986866 - RNA, 19 nt, Artificial Sequence
  Description of Artificial Sequence: Synthetic oligonucleotide
ucagguaucugugaaaaug

SEQ ID NO: 986867 - RNA, 19 nt, Artificial Sequence
  Description of Artificial Sequence: Synthetic oligonucleotide
guaguuagugcauaaaaca

SEQ ID NO: 986868 - RNA, 19 nt, Artificial Sequence
  Description of Artificial Sequence: Synthetic oligonucleotide
auacacuuguucuugacca

SEQ ID NO: 986869 - RNA, 19 nt, Artificial Sequence
  Description of Artificial Sequence: Synthetic oligonucleotide
ugucguaaguuuugcaccg

SEQ ID NO: 986870 - RNA, 19 nt, Artificial Sequence
  Description of Artificial Sequence: Synthetic oligonucleotide
aaaguucaaauacgaaccu

SEQ ID NO: 986871 - RNA, 19 nt, Artificial Sequence
  Description of Artificial Sequence: Synthetic oligonucleotide
gaucauuucggucacguuc

SEQ ID NO: 986872 - RNA, 19 nt, Artificial Sequence
  Description of Artificial Sequence: Synthetic oligonucleotide
aauauuccugacaaggcug

SEQ ID NO: 986873 - RNA, 19 nt, Artificial Sequence
  Description of Artificial Sequence: Synthetic oligonucleotide
gaccgaaaggaaaagacag

SEQ ID NO: 986874 - RNA, 19 nt, Artificial Sequence
  Description of Artificial Sequence: Synthetic oligonucleotide
auugacuauuucguuauac

SEQ ID NO: 986875 - RNA, 19 nt, Artificial Sequence
  Description of Artificial Sequence: Synthetic oligonucleotide
acuacuaaaggguaauuau

SEQ ID NO: 986876 - RNA, 19 nt, Artificial Sequence
  Description of Artificial Sequence: Synthetic oligonucleotide
ugaacacccagaauauacc

SEQ ID NO: 986877 - RNA, 19 nt, Artificial Sequence
  Description of Artificial Sequence: Synthetic oligonucleotide
auguaauaaauugaagcag

SEQ ID NO: 986878 - RNA, 19 nt, Artificial Sequence
  Description of Artificial Sequence: Synthetic oligonucleotide
guauuuccucaauagauug

SEQ ID NO: 986879 - RNA, 19 nt, Artificial Sequence
  Description of Artificial Sequence: Synthetic oligonucleotide
uuugacuagguaguuagug

SEQ ID NO: 986880 - RNA, 19 nt, Artificial Sequence
  Description of Artificial Sequence: Synthetic oligonucleotide
aacuguuuguguccaaaca

SEQ ID NO: 986881 - RNA, 19 nt, Artificial Sequence
  Description of Artificial Sequence: Synthetic oligonucleotide
aaguaauauugcugcauca

SEQ ID NO: 986882 - RNA, 19 nt, Artificial Sequence
  Description of Artificial Sequence: Synthetic oligonucleotide
ugugauguauacacauuca

SEQ ID NO: 986883 - RNA, 19 nt, Artificial Sequence
  Description of Artificial Sequence: Synthetic oligonucleotide
gaaauucgaaagcuaaaca

SEQ ID NO: 986884 - RNA, 19 nt, Artificial Sequence
  Description of Artificial Sequence: Synthetic oligonucleotide
guaauuaucucaagucagg

SEQ ID NO: 986885 - RNA, 19 nt, Artificial Sequence
  Description of Artificial Sequence: Synthetic oligonucleotide
caaaccccagagaaaaucc

SEQ ID NO: 986886 - RNA, 19 nt, Artificial Sequence
  Description of Artificial Sequence: Synthetic oligonucleotide
uguuuguguccaaacaagu

SEQ ID NO: 986887 - RNA, 19 nt, Artificial Sequence
  Description of Artificial Sequence: Synthetic oligonucleotide
gacaacgcgauugcaaacg

SEQ ID NO: 986888 - RNA, 19 nt, Artificial Sequence
  Description of Artificial Sequence: Synthetic oligonucleotide
guaucauucugucugcaug

SEQ ID NO: 986889 - RNA, 19 nt, Artificial Sequence
  Description of Artificial Sequence: Synthetic oligonucleotide
uaucauucugucugcaugu

SEQ ID NO: 986890 - RNA, 19 nt, Artificial Sequence
  Description of Artificial Sequence: Synthetic oligonucleotide
ugaaaaguucaaauacgaa

SEQ ID NO: 986891 - RNA, 19 nt, Artificial Sequence
  Description of Artificial Sequence: Synthetic oligonucleotide
caaggcgaaauugagaaac

SEQ ID NO: 986892 - RNA, 19 nt, Artificial Sequence
  Description of Artificial Sequence: Synthetic oligonucleotide
uccuauguuucagagacca

SEQ ID NO: 986893 - RNA, 19 nt, Artificial Sequence
  Description of Artificial Sequence: Synthetic oligonucleotide
ugacuauuucguuauacau

SEQ ID NO: 986894 - RNA, 19 nt, Artificial Sequence
  Description of Artificial Sequence: Synthetic oligonucleotide
uuuguucaggccugugagg

SEQ ID NO: 986895 - RNA, 19 nt, Artificial Sequence
  Description of Artificial Sequence: Synthetic oligonucleotide
agaguccuauguuucagag

SEQ ID NO: 986896 - RNA, 19 nt, Artificial Sequence
  Description of Artificial Sequence: Synthetic oligonucleotide
cauaauacacuuguucuug

SEQ ID NO: 986897 - RNA, 19 nt, Artificial Sequence
  Description of Artificial Sequence: Synthetic oligonucleotide
ucgaaagcuaaacauguuu

SEQ ID NO: 986898 - RNA, 19 nt, Artificial Sequence
  Description of Artificial Sequence: Synthetic oligonucleotide
agauagacaacugguuugg

SEQ ID NO: 986899 - RNA, 19 nt, Artificial Sequence
  Description of Artificial Sequence: Synthetic oligonucleotide
aggaccgaaaggaaaagac

SEQ ID NO: 986900 - RNA, 19 nt, Artificial Sequence
  Description of Artificial Sequence: Synthetic oligonucleotide
ugagaaugguucuuccggc

SEQ ID NO: 986901 - RNA, 19 nt, Artificial Sequence
  Description of Artificial Sequence: Synthetic oligonucleotide
uauaaaaccuaugguggug

SEQ ID NO: 986902 - RNA, 19 nt, Artificial Sequence
  Description of Artificial Sequence: Synthetic oligonucleotide
cuguuuguguccaaacaag

SEQ ID NO: 986903 - RNA, 19 nt, Artificial Sequence
  Description of Artificial Sequence: Synthetic oligonucleotide
caaacgugagugcucagcc

SEQ ID NO: 986904 - RNA, 19 nt, Artificial Sequence
  Description of Artificial Sequence: Synthetic oligonucleotide
guuagugcauaaaacauga

SEQ ID NO: 986905 - RNA, 19 nt, Artificial Sequence
  Description of Artificial Sequence: Synthetic oligonucleotide
aacgcgauugcaaacguga

SEQ ID NO: 986906 - RNA, 19 nt, Artificial Sequence
  Description of Artificial Sequence: Synthetic oligonucleotide
agaaugaagcccaggcugc

SEQ ID NO: 986907 - RNA, 19 nt, Artificial Sequence
  Description of Artificial Sequence: Synthetic oligonucleotide
uucaaauacgaaccuuuaa

SEQ ID NO: 986908 - RNA, 19 nt, Artificial Sequence
  Description of Artificial Sequence: Synthetic oligonucleotide
ugccccguacuacuaaagg

SEQ ID NO: 986909 - RNA, 19 nt, Artificial Sequence
  Description of Artificial Sequence: Synthetic oligonucleotide
auacgaaccuuuaaaaugu

SEQ ID NO: 986910 - RNA, 19 nt, Artificial Sequence
  Description of Artificial Sequence: Synthetic oligonucleotide
ucggucacguucauguuug

SEQ ID NO: 986911 - RNA, 19 nt, Artificial Sequence
  Description of Artificial Sequence: Synthetic oligonucleotide
aacgugagugcucagccau

SEQ ID NO: 986912 - RNA, 19 nt, Artificial Sequence
  Description of Artificial Sequence: Synthetic oligonucleotide
uaaauugaagcagguaggu

SEQ ID NO: 986913 - RNA, 19 nt, Artificial Sequence
  Description of Artificial Sequence: Synthetic oligonucleotide
gacauuugugcaaagcuuc

SEQ ID NO: 986914 - RNA, 19 nt, Artificial Sequence
  Description of Artificial Sequence: Synthetic oligonucleotide
uucaggacaacgcgauugc

SEQ ID NO: 986915 - RNA, 19 nt, Artificial Sequence
  Description of Artificial Sequence: Synthetic oligonucleotide
auucgaaagcuaaacaugu

SEQ ID NO: 986916 - RNA, 19 nt, Artificial Sequence
  Description of Artificial Sequence: Synthetic oligonucleotide
ucaauagauugacuauuuc

SEQ ID NO: 986917 - RNA, 19 nt, Artificial Sequence
  Description of Artificial Sequence: Synthetic oligonucleotide
caagcaugucuuuuaaguc

SEQ ID NO: 986918 - RNA, 19 nt, Artificial Sequence
  Description of Artificial Sequence: Synthetic oligonucleotide
guggaauggaccccguggg

SEQ ID NO: 986919 - RNA, 19 nt, Artificial Sequence
  Description of Artificial Sequence: Synthetic oligonucleotide
accacauauaagaaagaag

SEQ ID NO: 986920 - RNA, 19 nt, Artificial Sequence
  Description of Artificial Sequence: Synthetic oligonucleotide
ugccccuagaaccaaagua

SEQ ID NO: 986921 - RNA, 19 nt, Artificial Sequence
  Description of Artificial Sequence: Synthetic oligonucleotide
ucguaaguuuugcaccgag

SEQ ID NO: 986922 - RNA, 19 nt, Artificial Sequence
  Description of Artificial Sequence: Synthetic oligonucleotide
caguaccugaucauuucgg

SEQ ID NO: 986923 - RNA, 19 nt, Artificial Sequence
  Description of Artificial Sequence: Synthetic oligonucleotide
acucuagacucauuuaaau

SEQ ID NO: 986924 - RNA, 19 nt, Artificial Sequence
  Description of Artificial Sequence: Synthetic oligonucleotide
ucggguauccccaguaccu

SEQ ID NO: 986925 - RNA, 19 nt, Artificial Sequence
  Description of Artificial Sequence: Synthetic oligonucleotide
ugaucacagggcucaaggc

SEQ ID NO: 986926 - RNA, 19 nt, Artificial Sequence
  Description of Artificial Sequence: Synthetic oligonucleotide
gaaccugaguuuaugcccc

SEQ ID NO: 986927 - RNA, 19 nt, Artificial Sequence
  Description of Artificial Sequence: Synthetic oligonucleotide
aguaccugaucauuucggu

SEQ ID NO: 986928 - RNA, 19 nt, Artificial Sequence
  Description of Artificial Sequence: Synthetic oligonucleotide
ucauguuugcuucgggguc

SEQ ID NO: 986929 - RNA, 19 nt, Artificial Sequence
  Description of Artificial Sequence: Synthetic oligonucleotide
gugaacacccagaauauac

SEQ ID NO: 986930 - RNA, 19 nt, Artificial Sequence
  Description of Artificial Sequence: Synthetic oligonucleotide
uucucauugaaaccacaua

SEQ ID NO: 986931 - RNA, 19 nt, Artificial Sequence
  Description of Artificial Sequence: Synthetic oligonucleotide
uaugagccaauaucaagua

SEQ ID NO: 986932 - RNA, 19 nt, Artificial Sequence
  Description of Artificial Sequence: Synthetic oligonucleotide
uuuuguuauugagguuugg

SEQ ID NO: 986933 - RNA, 19 nt, Artificial Sequence
  Description of Artificial Sequence: Synthetic oligonucleotide
guaaguuuugcaccgaggu

SEQ ID NO: 986934 - RNA, 19 nt, Artificial Sequence
  Description of Artificial Sequence: Synthetic oligonucleotide
uuugcuucgggguccacau

SEQ ID NO: 986935 - RNA, 19 nt, Artificial Sequence
  Description of Artificial Sequence: Synthetic oligonucleotide
uguuacaaaguuguaucau

SEQ ID NO: 986936 - RNA, 19 nt, Artificial Sequence
  Description of Artificial Sequence: Synthetic oligonucleotide
ccaguuacuagaaucugcc

SEQ ID NO: 986937 - RNA, 19 nt, Artificial Sequence
  Description of Artificial Sequence: Synthetic oligonucleotide
agaacugagcacuuugguu

SEQ ID NO: 986938 - RNA, 19 nt, Artificial Sequence
  Description of Artificial Sequence: Synthetic oligonucleotide
uucgggguccacaugugga

SEQ ID NO: 986939 - RNA, 19 nt, Artificial Sequence
  Description of Artificial Sequence: Synthetic oligonucleotide
guuauugagguuugguaaa

SEQ ID NO: 986940 - RNA, 19 nt, Artificial Sequence
  Description of Artificial Sequence: Synthetic oligonucleotide
aaacgugagugcucagcca

SEQ ID NO: 986941 - RNA, 19 nt, Artificial Sequence
  Description of Artificial Sequence: Synthetic oligonucleotide
caaucuggccccagugucg

SEQ ID NO: 986942 - RNA, 19 nt, Artificial Sequence
  Description of Artificial Sequence: Synthetic oligonucleotide
auagauugacuauuucguu

SEQ ID NO: 986943 - RNA, 19 nt, Artificial Sequence
  Description of Artificial Sequence: Synthetic oligonucleotide
uacuacuaaaggguaauua

SEQ ID NO: 986944 - RNA, 19 nt, Artificial Sequence
  Description of Artificial Sequence: Synthetic oligonucleotide
aguaauauugcugcaucau

SEQ ID NO: 986945 - RNA, 19 nt, Artificial Sequence
  Description of Artificial Sequence: Synthetic oligonucleotide
agacucauuuaaauucuuc

SEQ ID NO: 986946 - RNA, 19 nt, Artificial Sequence
  Description of Artificial Sequence: Synthetic oligonucleotide
uaaaaccuaugguggugcc

SEQ ID NO: 986947 - RNA, 19 nt, Artificial Sequence
  Description of Artificial Sequence: Synthetic oligonucleotide
uauacccguccucugucug

SEQ ID NO: 986948 - RNA, 19 nt, Artificial Sequence
  Description of Artificial Sequence: Synthetic oligonucleotide
aaaccuaugguggugccuu

SEQ ID NO: 986949 - RNA, 19 nt, Artificial Sequence
  Description of Artificial Sequence: Synthetic oligonucleotide
agaaugguucuuccggcca

SEQ ID NO: 986950 - RNA, 19 nt, Artificial Sequence
  Description of Artificial Sequence: Synthetic oligonucleotide
aggcgaaauugagaaacac

SEQ ID NO: 986951 - RNA, 19 nt, Artificial Sequence
  Description of Artificial Sequence: Synthetic oligonucleotide
gcgaaauugagaaacacca

SEQ ID NO: 986952 - RNA, 19 nt, Artificial Sequence
  Description of Artificial Sequence: Synthetic oligonucleotide
aggacaacgcgauugcaaa

SEQ ID NO: 986953 - RNA, 19 nt, Artificial Sequence
  Description of Artificial Sequence: Synthetic oligonucleotide
cguuauacauccuccaggg

SEQ ID NO: 986954 - RNA, 19 nt, Artificial Sequence
  Description of Artificial Sequence: Synthetic oligonucleotide
uacacgggagggcaagucu

SEQ ID NO: 986955 - RNA, 19 nt, Artificial Sequence
  Description of Artificial Sequence: Synthetic oligonucleotide
auaugcuccucacucgggu

SEQ ID NO: 986956 - RNA, 19 nt, Artificial Sequence
  Description of Artificial Sequence: Synthetic oligonucleotide
aguucaaauacgaaccuuu

SEQ ID NO: 986957 - RNA, 19 nt, Artificial Sequence
  Description of Artificial Sequence: Synthetic oligonucleotide
auugcaaacgugagugcuc

SEQ ID NO: 986958 - RNA, 19 nt, Artificial Sequence
  Description of Artificial Sequence: Synthetic oligonucleotide
uguaucauucugucugcau

SEQ ID NO: 986959 - RNA, 19 nt, Artificial Sequence
  Description of Artificial Sequence: Synthetic oligonucleotide
aucauuucggucacguuca

SEQ ID NO: 986960 - RNA, 19 nt, Artificial Sequence
  Description of Artificial Sequence: Synthetic oligonucleotide
auacccguccucugucugg

SEQ ID NO: 986961 - RNA, 19 nt, Artificial Sequence
  Description of Artificial Sequence: Synthetic oligonucleotide
agcaagauguugacgucac

SEQ ID NO: 986962 - RNA, 19 nt, Artificial Sequence
  Description of Artificial Sequence: Synthetic oligonucleotide
uuacuagaaucugccagga

SEQ ID NO: 986963 - RNA, 19 nt, Artificial Sequence
  Description of Artificial Sequence: Synthetic oligonucleotide
aaaaccuaugguggugccu

SEQ ID NO: 986964 - RNA, 19 nt, Artificial Sequence
  Description of Artificial Sequence: Synthetic oligonucleotide
uugcaaacgugagugcuca

SEQ ID NO: 986965 - RNA, 19 nt, Artificial Sequence
  Description of Artificial Sequence: Synthetic oligonucleotide
cauaugcuccucacucggg

SEQ ID NO: 986966 - RNA, 19 nt, Artificial Sequence
  Description of Artificial Sequence: Synthetic oligonucleotide
gauagacaacugguuuggg

SEQ ID NO: 986967 - RNA, 19 nt, Artificial Sequence
  Description of Artificial Sequence: Synthetic oligonucleotide
gcauaaaacaugaaaaugu

SEQ ID NO: 986968 - RNA, 19 nt, Artificial Sequence
  Description of Artificial Sequence: Synthetic oligonucleotide
cucggguauccccaguacc

SEQ ID NO: 986969 - RNA, 19 nt, Artificial Sequence
  Description of Artificial Sequence: Synthetic oligonucleotide
cauguuugcuucggggucc

SEQ ID NO: 986970 - RNA, 19 nt, Artificial Sequence
  Description of Artificial Sequence: Synthetic oligonucleotide
uccucacucggguaucccc

SEQ ID NO: 986971 - RNA, 19 nt, Artificial Sequence
  Description of Artificial Sequence: Synthetic oligonucleotide
guaucugugaaaaugcuau

SEQ ID NO: 986972 - RNA, 19 nt, Artificial Sequence
  Description of Artificial Sequence: Synthetic oligonucleotide
uuuugccccguacuacuaa

SEQ ID NO: 986973 - RNA, 19 nt, Artificial Sequence
  Description of Artificial Sequence: Synthetic oligonucleotide
uugccccguacuacuaaag

SEQ ID NO: 986974 - RNA, 19 nt, Artificial Sequence
  Description of Artificial Sequence: Synthetic oligonucleotide
ugggaccuuugugagaaug

SEQ ID NO: 986975 - RNA, 19 nt, Artificial Sequence
  Description of Artificial Sequence: Synthetic oligonucleotide
ugccuugagaaugacccac

SEQ ID NO: 986976 - RNA, 19 nt, Artificial Sequence
  Description of Artificial Sequence: Synthetic oligonucleotide
ugagggauucggugaacac

SEQ ID NO: 986977 - RNA, 19 nt, Artificial Sequence
  Description of Artificial Sequence: Synthetic oligonucleotide
guuuguguccaaacaaguc

SEQ ID NO: 986978 - RNA, 19 nt, Artificial Sequence
  Description of Artificial Sequence: Synthetic oligonucleotide
gggagggcaagucugguug

SEQ ID NO: 986979 - RNA, 19 nt, Artificial Sequence
  Description of Artificial Sequence: Synthetic oligonucleotide
aaguucaaauacgaaccuu

SEQ ID NO: 986980 - RNA, 19 nt, Artificial Sequence
  Description of Artificial Sequence: Synthetic oligonucleotide
gauucggugaacacccaga

SEQ ID NO: 986981 - RNA, 19 nt, Artificial Sequence
  Description of Artificial Sequence: Synthetic oligonucleotide
gccccguacuacuaaaggg

SEQ ID NO: 986982 - RNA, 19 nt, Artificial Sequence
  Description of Artificial Sequence: Synthetic oligonucleotide
cuucgggguccacaugugg

SEQ ID NO: 986983 - RNA, 19 nt, Artificial Sequence
  Description of Artificial Sequence: Synthetic oligonucleotide
uuugccccguacuacuaaa

SEQ ID NO: 986984 - RNA, 19 nt, Artificial Sequence
  Description of Artificial Sequence: Synthetic oligonucleotide
auaauaacuucuggccacu

SEQ ID NO: 986985 - RNA, 19 nt, Artificial Sequence
  Description of Artificial Sequence: Synthetic oligonucleotide
guaccugaucauuucgguc

SEQ ID NO: 986986 - RNA, 19 nt, Artificial Sequence
  Description of Artificial Sequence: Synthetic oligonucleotide
acaacgcgauugcaaacgu

SEQ ID NO: 986987 - RNA, 19 nt, Artificial Sequence
  Description of Artificial Sequence: Synthetic oligonucleotide
uucgaaagcuaaacauguu

SEQ ID NO: 986988 - RNA, 19 nt, Artificial Sequence
  Description of Artificial Sequence: Synthetic oligonucleotide
aaggcgaaauugagaaaca

SEQ ID NO: 986989 - RNA, 19 nt, Artificial Sequence
  Description of Artificial Sequence: Synthetic oligonucleotide
aaucuggccccagugucgu

SEQ ID NO: 986990 - RNA, 19 nt, Artificial Sequence
  Description of Artificial Sequence: Synthetic oligonucleotide
ggcgaaauugagaaacacc

SEQ ID NO: 986991 - RNA, 19 nt, Artificial Sequence
  Description of Artificial Sequence: Synthetic oligonucleotide
auauacccguccucugucu

SEQ ID NO: 986992 - RNA, 19 nt, Artificial Sequence
  Description of Artificial Sequence: Synthetic oligonucleotide
agauguucccagucaggga

SEQ ID NO: 986993 - RNA, 19 nt, Artificial Sequence
  Description of Artificial Sequence: Synthetic oligonucleotide
uugaaacauaugguguuua

SEQ ID NO: 986994 - RNA, 19 nt, Artificial Sequence
  Description of Artificial Sequence: Synthetic oligonucleotide
ucaaggcgaaauugagaaa

SEQ ID NO: 986995 - RNA, 19 nt, Artificial Sequence
  Description of Artificial Sequence: Synthetic oligonucleotide
aagucugguuguaaugaaa

SEQ ID NO: 986996 - RNA, 19 nt, Artificial Sequence
  Description of Artificial Sequence: Synthetic oligonucleotide
aggcgcuugugguacacca

SEQ ID NO: 986997 - RNA, 19 nt, Artificial Sequence
  Description of Artificial Sequence: Synthetic oligonucleotide
gauugcaaacgugagugcu

SEQ ID NO: 986998 - RNA, 19 nt, Artificial Sequence
  Description of Artificial Sequence: Synthetic oligonucleotide
agaguuugugacccaguua

SEQ ID NO: 986999 - RNA, 19 nt, Artificial Sequence
  Description of Artificial Sequence: Synthetic oligonucleotide
gucagaguuugugacccag

SEQ ID NO: 987000 - RNA, 19 nt, Artificial Sequence
  Description of Artificial Sequence: Synthetic oligonucleotide
agucuagcugaaauaacaa

SEQ ID NO: 987001 - RNA, 19 nt, Artificial Sequence
  Description of Artificial Sequence: Synthetic oligonucleotide
agacauuugugcaaagcuu

SEQ ID NO: 987002 - RNA, 19 nt, Artificial Sequence
  Description of Artificial Sequence: Synthetic oligonucleotide
auacacgggagggcaaguc

SEQ ID NO: 987003 - RNA, 19 nt, Artificial Sequence
  Description of Artificial Sequence: Synthetic oligonucleotide
acguucauguuugcuucgg

SEQ ID NO: 987004 - RNA, 19 nt, Artificial Sequence
  Description of Artificial Sequence: Synthetic oligonucleotide
ugguuuucacaagcaugag

SEQ ID NO: 987005 - RNA, 19 nt, Artificial Sequence
  Description of Artificial Sequence: Synthetic oligonucleotide
caucggccagaaugaagcc

SEQ ID NO: 987006 - RNA, 19 nt, Artificial Sequence
  Description of Artificial Sequence: Synthetic oligonucleotide
cccaguuacuagaaucugc

SEQ ID NO: 987007 - RNA, 19 nt, Artificial Sequence
  Description of Artificial Sequence: Synthetic oligonucleotide
gaaucugccaggaagccau

SEQ ID NO: 987008 - RNA, 19 nt, Artificial Sequence
  Description of Artificial Sequence: Synthetic oligonucleotide
gguaacacuggauuugacu

SEQ ID NO: 987009 - RNA, 19 nt, Artificial Sequence
  Description of Artificial Sequence: Synthetic oligonucleotide
ucuuccggccaugagggau

SEQ ID NO: 987010 - RNA, 19 nt, Artificial Sequence
  Description of Artificial Sequence: Synthetic oligonucleotide
uuaugccccuagaaccaaa

SEQ ID NO: 987011 - RNA, 19 nt, Artificial Sequence
  Description of Artificial Sequence: Synthetic oligonucleotide
guacaagcaugucuuuuaa

SEQ ID NO: 987012 - RNA, 19 nt, Artificial Sequence
  Description of Artificial Sequence: Synthetic oligonucleotide
aaccugaguuuaugccccu

SEQ ID NO: 987013 - RNA, 19 nt, Artificial Sequence
  Description of Artificial Sequence: Synthetic oligonucleotide
ccaguaccugaucauuucg

SEQ ID NO: 987014 - RNA, 19 nt, Artificial Sequence
  Description of Artificial Sequence: Synthetic oligonucleotide
aggucauauuuugccaucu

SEQ ID NO: 987015 - RNA, 19 nt, Artificial Sequence
  Description of Artificial Sequence: Synthetic oligonucleotide
ucgggguccacauguggaa

SEQ ID NO: 987016 - RNA, 19 nt, Artificial Sequence
  Description of Artificial Sequence: Synthetic oligonucleotide
uacgaaccuuuaaaauguu

SEQ ID NO: 987017 - RNA, 19 nt, Artificial Sequence
  Description of Artificial Sequence: Synthetic oligonucleotide
gggaccuuugugagaaugg

SEQ ID NO: 987018 - RNA, 19 nt, Artificial Sequence
  Description of Artificial Sequence: Synthetic oligonucleotide
agcaugucuuuuaagucau

SEQ ID NO: 987019 - RNA, 19 nt, Artificial Sequence
  Description of Artificial Sequence: Synthetic oligonucleotide
aauggaccccgugggccuc

SEQ ID NO: 987020 - RNA, 19 nt, Artificial Sequence
  Description of Artificial Sequence: Synthetic oligonucleotide
ggauucggugaacacccag

SEQ ID NO: 987021 - RNA, 19 nt, Artificial Sequence
  Description of Artificial Sequence: Synthetic oligonucleotide
gacccaguuacuagaaucu

SEQ ID NO: 987022 - RNA, 19 nt, Artificial Sequence
  Description of Artificial Sequence: Synthetic oligonucleotide
ggaauggaccccgugggcc

SEQ ID NO: 987023 - RNA, 19 nt, Artificial Sequence
  Description of Artificial Sequence: Synthetic oligonucleotide
caacgcgauugcaaacgug

SEQ ID NO: 987024 - RNA, 19 nt, Artificial Sequence
  Description of Artificial Sequence: Synthetic oligonucleotide
cacauguggaauggacccc

SEQ ID NO: 987025 - RNA, 19 nt, Artificial Sequence
  Description of Artificial Sequence: Synthetic oligonucleotide
agccaauaucaaguaauau

SEQ ID NO: 987026 - RNA, 19 nt, Artificial Sequence
  Description of Artificial Sequence: Synthetic oligonucleotide
guaauauugcugcaucauu

SEQ ID NO: 987027 - RNA, 19 nt, Artificial Sequence
  Description of Artificial Sequence: Synthetic oligonucleotide
accgaaaggaaaagacaga

SEQ ID NO: 987028 - RNA, 19 nt, Artificial Sequence
  Description of Artificial Sequence: Synthetic oligonucleotide
ggccaugagggauucggug

SEQ ID NO: 987029 - RNA, 19 nt, Artificial Sequence
  Description of Artificial Sequence: Synthetic oligonucleotide
ugucagaguuugugaccca

SEQ ID NO: 987030 - RNA, 19 nt, Artificial Sequence
  Description of Artificial Sequence: Synthetic oligonucleotide
ugcaaacgugagugcucag

SEQ ID NO: 987031 - RNA, 19 nt, Artificial Sequence
  Description of Artificial Sequence: Synthetic oligonucleotide
gcaaucuggccccaguguc

SEQ ID NO: 987032 - RNA, 19 nt, Artificial Sequence
  Description of Artificial Sequence: Synthetic oligonucleotide
gcgcuugugguacaccaag

SEQ ID NO: 987033 - RNA, 19 nt, Artificial Sequence
  Description of Artificial Sequence: Synthetic oligonucleotide
guuugggaccuuugugaga

SEQ ID NO: 987034 - RNA, 19 nt, Artificial Sequence
  Description of Artificial Sequence: Synthetic oligonucleotide
gcagguaaacacaggaaca

SEQ ID NO: 987035 - RNA, 19 nt, Artificial Sequence
  Description of Artificial Sequence: Synthetic oligonucleotide
acccaguuacuagaaucug

SEQ ID NO: 987036 - RNA, 19 nt, Artificial Sequence
  Description of Artificial Sequence: Synthetic oligonucleotide
cguaaguuuugcaccgagg

SEQ ID NO: 987037 - RNA, 19 nt, Artificial Sequence
  Description of Artificial Sequence: Synthetic oligonucleotide
cugaguuuaugccccuaga

SEQ ID NO: 987038 - RNA, 19 nt, Artificial Sequence
  Description of Artificial Sequence: Synthetic oligonucleotide
uggauuugacuagguaguu

SEQ ID NO: 987039 - RNA, 19 nt, Artificial Sequence
  Description of Artificial Sequence: Synthetic oligonucleotide
caguuacuagaaucugcca

SEQ ID NO: 987040 - RNA, 19 nt, Artificial Sequence
  Description of Artificial Sequence: Synthetic oligonucleotide
ggaccgaaaggaaaagaca

SEQ ID NO: 987041 - RNA, 19 nt, Artificial Sequence
  Description of Artificial Sequence: Synthetic oligonucleotide
auguucccagucagggagg

SEQ ID NO: 987042 - RNA, 19 nt, Artificial Sequence
  Description of Artificial Sequence: Synthetic oligonucleotide
auuugacuagguaguuagu

SEQ ID NO: 987043 - RNA, 19 nt, Artificial Sequence
  Description of Artificial Sequence: Synthetic oligonucleotide
ccugaguuuaugccccuag

SEQ ID NO: 987044 - RNA, 19 nt, Artificial Sequence
  Description of Artificial Sequence: Synthetic oligonucleotide
cucuagacucauuuaaauu

SEQ ID NO: 987045 - RNA, 19 nt, Artificial Sequence
  Description of Artificial Sequence: Synthetic oligonucleotide
cuaugguggugccuugaga

SEQ ID NO: 987046 - RNA, 19 nt, Artificial Sequence
  Description of Artificial Sequence: Synthetic oligonucleotide
cgaaauugagaaacaccac

SEQ ID NO: 987047 - RNA, 19 nt, Artificial Sequence
  Description of Artificial Sequence: Synthetic oligonucleotide
guuugcuucgggguccaca

SEQ ID NO: 987048 - RNA, 19 nt, Artificial Sequence
  Description of Artificial Sequence: Synthetic oligonucleotide
gauugacuauuucguuaua

SEQ ID NO: 987049 - RNA, 19 nt, Artificial Sequence
  Description of Artificial Sequence: Synthetic oligonucleotide
ucccgcaggagagugugau

SEQ ID NO: 987050 - RNA, 19 nt, Artificial Sequence
  Description of Artificial Sequence: Synthetic oligonucleotide
cagcaagauguugacguca

SEQ ID NO: 987051 - RNA, 19 nt, Artificial Sequence
  Description of Artificial Sequence: Synthetic oligonucleotide
gacaacugguuugggaccu

SEQ ID NO: 987052 - RNA, 19 nt, Artificial Sequence
  Description of Artificial Sequence: Synthetic oligonucleotide
acgcgauugcaaacgugag

SEQ ID NO: 987053 - RNA, 19 nt, Artificial Sequence
  Description of Artificial Sequence: Synthetic oligonucleotide
uugacgucacuggggucug

SEQ ID NO: 987054 - RNA, 19 nt, Artificial Sequence
  Description of Artificial Sequence: Synthetic oligonucleotide
ggacaacgcgauugcaaac

SEQ ID NO: 987055 - RNA, 19 nt, Artificial Sequence
  Description of Artificial Sequence: Synthetic oligonucleotide
cauuucggucacguucaug

SEQ ID NO: 987056 - RNA, 19 nt, Artificial Sequence
  Description of Artificial Sequence: Synthetic oligonucleotide
gccagucuagcugaaauaa

SEQ ID NO: 987057 - RNA, 19 nt, Artificial Sequence
  Description of Artificial Sequence: Synthetic oligonucleotide
gccccuagaaccaaaguaa

SEQ ID NO: 987058 - RNA, 19 nt, Artificial Sequence
  Description of Artificial Sequence: Synthetic oligonucleotide
guggguacaagcaugucuu

SEQ ID NO: 987059 - RNA, 19 nt, Artificial Sequence
  Description of Artificial Sequence: Synthetic oligonucleotide
ggucauauuuugccaucuc

SEQ ID NO: 987060 - RNA, 19 nt, Artificial Sequence
  Description of Artificial Sequence: Synthetic oligonucleotide
gaaugguucuuccggccau

SEQ ID NO: 987061 - RNA, 19 nt, Artificial Sequence
  Description of Artificial Sequence: Synthetic oligonucleotide
cagugucguaaguuuugca

SEQ ID NO: 987062 - RNA, 19 nt, Artificial Sequence
  Description of Artificial Sequence: Synthetic oligonucleotide
gguaucugugaaaaugcua

SEQ ID NO: 987063 - RNA, 19 nt, Artificial Sequence
  Description of Artificial Sequence: Synthetic oligonucleotide
uggguacaagcaugucuuu

SEQ ID NO: 987064 - RNA, 19 nt, Artificial Sequence
  Description of Artificial Sequence: Synthetic oligonucleotide
guauccccaguaccugauc

SEQ ID NO: 987065 - RNA, 19 nt, Artificial Sequence
  Description of Artificial Sequence: Synthetic oligonucleotide
acgaaccuuuaaaauguua

SEQ ID NO: 987066 - RNA, 19 nt, Artificial Sequence
  Description of Artificial Sequence: Synthetic oligonucleotide
aggcagguaaacacaggaa

SEQ ID NO: 987067 - RNA, 19 nt, Artificial Sequence
  Description of Artificial Sequence: Synthetic oligonucleotide
ccggccaugagggauucgg

SEQ ID NO: 987068 - RNA, 19 nt, Artificial Sequence
  Description of Artificial Sequence: Synthetic oligonucleotide
ccuaugguggugccuugag

SEQ ID NO: 987069 - RNA, 19 nt, Artificial Sequence
  Description of Artificial Sequence: Synthetic oligonucleotide
gcuugaaacauaugguguu

SEQ ID NO: 987070 - RNA, 19 nt, Artificial Sequence
  Description of Artificial Sequence: Synthetic oligonucleotide
caggaccgaaaggaaaaga

SEQ ID NO: 987071 - RNA, 19 nt, Artificial Sequence
  Description of Artificial Sequence: Synthetic oligonucleotide
caugagggauucggugaac

SEQ ID NO: 987072 - RNA, 19 nt, Artificial Sequence
  Description of Artificial Sequence: Synthetic oligonucleotide
ccuauguuucagagaccag

SEQ ID NO: 987073 - RNA, 19 nt, Artificial Sequence
  Description of Artificial Sequence: Synthetic oligonucleotide
uugcaccgagguucccgca

SEQ ID NO: 987074 - RNA, 19 nt, Artificial Sequence
  Description of Artificial Sequence: Synthetic oligonucleotide
guccuauguuucagagacc

SEQ ID NO: 987075 - RNA, 19 nt, Artificial Sequence
  Description of Artificial Sequence: Synthetic oligonucleotide
accgagguucccgcaggag

SEQ ID NO: 987076 - RNA, 19 nt, Artificial Sequence
  Description of Artificial Sequence: Synthetic oligonucleotide
gaggcgcuugugguacacc

SEQ ID NO: 987077 - RNA, 19 nt, Artificial Sequence
  Description of Artificial Sequence: Synthetic oligonucleotide
ccagugucguaaguuuugc

SEQ ID NO: 987078 - RNA, 19 nt, Artificial Sequence
  Description of Artificial Sequence: Synthetic oligonucleotide
auggaccccgugggccucc

SEQ ID NO: 987079 - RNA, 19 nt, Artificial Sequence
  Description of Artificial Sequence: Synthetic oligonucleotide
accuaugguggugccuuga

SEQ ID NO: 987080 - RNA, 19 nt, Artificial Sequence
  Description of Artificial Sequence: Synthetic oligonucleotide
agggcaagucugguuguaa

SEQ ID NO: 987081 - RNA, 19 nt, Artificial Sequence
  Description of Artificial Sequence: Synthetic oligonucleotide
ggaucauaugcuccucacu

SEQ ID NO: 987082 - RNA, 19 nt, Artificial Sequence
  Description of Artificial Sequence: Synthetic oligonucleotide
gacuagguaguuagugcau

SEQ ID NO: 987083 - RNA, 19 nt, Artificial Sequence
  Description of Artificial Sequence: Synthetic oligonucleotide
cacaaagcaguggguacaa

SEQ ID NO: 987084 - RNA, 19 nt, Artificial Sequence
  Description of Artificial Sequence: Synthetic oligonucleotide
cagaguuugugacccaguu

SEQ ID NO: 987085 - RNA, 19 nt, Artificial Sequence
  Description of Artificial Sequence: Synthetic oligonucleotide
cacucggguauccccagua

SEQ ID NO: 987086 - RNA, 19 nt, Artificial Sequence
  Description of Artificial Sequence: Synthetic oligonucleotide
gucguaaguuuugcaccga

SEQ ID NO: 987087 - RNA, 19 nt, Artificial Sequence
  Description of Artificial Sequence: Synthetic oligonucleotide
ggauuugacuagguaguua

SEQ ID NO: 987088 - RNA, 19 nt, Artificial Sequence
  Description of Artificial Sequence: Synthetic oligonucleotide
ccccguacuacuaaagggu

SEQ ID NO: 987089 - RNA, 19 nt, Artificial Sequence
  Description of Artificial Sequence: Synthetic oligonucleotide
cugggguaacacuggauuu

SEQ ID NO: 987090 - RNA, 19 nt, Artificial Sequence
  Description of Artificial Sequence: Synthetic oligonucleotide
guuuugcaccgagguuccc

SEQ ID NO: 987091 - RNA, 19 nt, Artificial Sequence
  Description of Artificial Sequence: Synthetic oligonucleotide
uccggccaugagggauucg

SEQ ID NO: 987092 - RNA, 19 nt, Artificial Sequence
  Description of Artificial Sequence: Synthetic oligonucleotide
cccuagaaccaaaguaaaa

SEQ ID NO: 987093 - RNA, 19 nt, Artificial Sequence
  Description of Artificial Sequence: Synthetic oligonucleotide
uuccggccaugagggauuc

SEQ ID NO: 987094 - RNA, 19 nt, Artificial Sequence
  Description of Artificial Sequence: Synthetic oligonucleotide
gcucagccauuucaguuua

SEQ ID NO: 987095 - RNA, 19 nt, Artificial Sequence
  Description of Artificial Sequence: Synthetic oligonucleotide
acgggagggcaagucuggu

SEQ ID NO: 987096 - RNA, 19 nt, Artificial Sequence
  Description of Artificial Sequence: Synthetic oligonucleotide
cuuugugagaaugguucuu

SEQ ID NO: 987097 - RNA, 19 nt, Artificial Sequence
  Description of Artificial Sequence: Synthetic oligonucleotide
ccccuagaaccaaaguaaa

SEQ ID NO: 987098 - RNA, 19 nt, Artificial Sequence
  Description of Artificial Sequence: Synthetic oligonucleotide
cccguacuacuaaagggua

SEQ ID NO: 987099 - RNA, 19 nt, Artificial Sequence
  Description of Artificial Sequence: Synthetic oligonucleotide
cuuccggccaugagggauu

SEQ ID NO: 987100 - RNA, 19 nt, Artificial Sequence
  Description of Artificial Sequence: Synthetic oligonucleotide
guacuacuaaaggguaauu

SEQ ID NO: 987101 - RNA, 19 nt, Artificial Sequence
  Description of Artificial Sequence: Synthetic oligonucleotide
ccguacuacuaaaggguaa

SEQ ID NO: 987102 - RNA, 19 nt, Artificial Sequence
  Description of Artificial Sequence: Synthetic oligonucleotide
accugaguuuaugccccua

SEQ ID NO: 987103 - RNA, 19 nt, Artificial Sequence
  Description of Artificial Sequence: Synthetic oligonucleotide
ccaaguuggggaucugagu

SEQ ID NO: 987104 - RNA, 19 nt, Artificial Sequence
  Description of Artificial Sequence: Synthetic oligonucleotide
gggcaagucugguuguaau

SEQ ID NO: 987105 - RNA, 19 nt, Artificial Sequence
  Description of Artificial Sequence: Synthetic oligonucleotide
cauguggaauggaccccgu

SEQ ID NO: 987106 - RNA, 19 nt, Artificial Sequence
  Description of Artificial Sequence: Synthetic oligonucleotide
ggagggcaagucugguugu

SEQ ID NO: 987107 - RNA, 19 nt, Artificial Sequence
  Description of Artificial Sequence: Synthetic oligonucleotide
acgugagugcucagccauu

SEQ ID NO: 987108 - RNA, 19 nt, Artificial Sequence
  Description of Artificial Sequence: Synthetic oligonucleotide
cauacacgggagggcaagu

SEQ ID NO: 987109 - RNA, 19 nt, Artificial Sequence
  Description of Artificial Sequence: Synthetic oligonucleotide
ggguacaagcaugucuuuu

SEQ ID NO: 987110 - RNA, 19 nt, Artificial Sequence
  Description of Artificial Sequence: Synthetic oligonucleotide
ggcgcuugugguacaccaa

SEQ ID NO: 987111 - RNA, 19 nt, Artificial Sequence
  Description of Artificial Sequence: Synthetic oligonucleotide
ccugagaaauggagagagu

SEQ ID NO: 987112 - RNA, 19 nt, Artificial Sequence
  Description of Artificial Sequence: Synthetic oligonucleotide
cguacuacuaaaggguaau

SEQ ID NO: 987113 - RNA, 19 nt, Artificial Sequence
  Description of Artificial Sequence: Synthetic oligonucleotide
cggguauccccaguaccug

SEQ ID NO: 987114 - RNA, 19 nt, Artificial Sequence
  Description of Artificial Sequence: Synthetic oligonucleotide
gggauucggugaacaccca

SEQ ID NO: 987115 - RNA, 19 nt, Artificial Sequence
  Description of Artificial Sequence: Synthetic oligonucleotide
cgcgauugcaaacgugagu

SEQ ID NO: 987116 - RNA, 19 nt, Artificial Sequence
  Description of Artificial Sequence: Synthetic oligonucleotide
cgcuugugguacaccaagu

SEQ ID NO: 987117 - RNA, 19 nt, Artificial Sequence
  Description of Artificial Sequence: Synthetic oligonucleotide
ccccagugucguaaguuuu

SEQ ID NO: 987118 - RNA, 19 nt, Artificial Sequence
  Description of Artificial Sequence: Synthetic oligonucleotide
cgugagugcucagccauuu

SEQ ID NO: 987119 - RNA, 19 nt, Artificial Sequence
  Description of Artificial Sequence: Synthetic oligonucleotide
aaugaaaagaaaucuagac

SEQ ID NO: 987120 - RNA, 19 nt, Artificial Sequence
  Description of Artificial Sequence: Synthetic oligonucleotide
ugaaagauaacuuuuauug

SEQ ID NO: 987121 - RNA, 19 nt, Artificial Sequence
  Description of Artificial Sequence: Synthetic oligonucleotide
gauucuuucaaguauaugc

SEQ ID NO: 987122 - RNA, 19 nt, Artificial Sequence
  Description of Artificial Sequence: Synthetic oligonucleotide
uuuucuaauaaucacacug

SEQ ID NO: 987123 - RNA, 19 nt, Artificial Sequence
  Description of Artificial Sequence: Synthetic oligonucleotide
aaugauuacaguaauauug

SEQ ID NO: 987124 - RNA, 19 nt, Artificial Sequence
  Description of Artificial Sequence: Synthetic oligonucleotide
agcagaauggcuuuuaagc

SEQ ID NO: 987125 - RNA, 19 nt, Artificial Sequence
  Description of Artificial Sequence: Synthetic oligonucleotide
aauuauaucaaacacugau

SEQ ID NO: 987126 - RNA, 19 nt, Artificial Sequence
  Description of Artificial Sequence: Synthetic oligonucleotide
uguaauaucuucuuguaag

SEQ ID NO: 987127 - RNA, 19 nt, Artificial Sequence
  Description of Artificial Sequence: Synthetic oligonucleotide
gaaucuaagagccagaaac

SEQ ID NO: 987128 - RNA, 19 nt, Artificial Sequence
  Description of Artificial Sequence: Synthetic oligonucleotide
aaucuuuucuaauaaucac

SEQ ID NO: 987129 - RNA, 19 nt, Artificial Sequence
  Description of Artificial Sequence: Synthetic oligonucleotide
gaaauagccaguaaaauag

SEQ ID NO: 987130 - RNA, 19 nt, Artificial Sequence
  Description of Artificial Sequence: Synthetic oligonucleotide
agauaauuaaacaaugagc

SEQ ID NO: 987131 - RNA, 19 nt, Artificial Sequence
  Description of Artificial Sequence: Synthetic oligonucleotide
cuaauaaucacacugcaag

SEQ ID NO: 987132 - RNA, 19 nt, Artificial Sequence
  Description of Artificial Sequence: Synthetic oligonucleotide
aaaagcaacuuaugcaugg

SEQ ID NO: 987133 - RNA, 19 nt, Artificial Sequence
  Description of Artificial Sequence: Synthetic oligonucleotide
ugcaaaauaaaugaaauac

SEQ ID NO: 987134 - RNA, 19 nt, Artificial Sequence
  Description of Artificial Sequence: Synthetic oligonucleotide
aguuuuaacaaacuaagca

SEQ ID NO: 987135 - RNA, 19 nt, Artificial Sequence
  Description of Artificial Sequence: Synthetic oligonucleotide
uuagguaauuaacaaaccc

SEQ ID NO: 987136 - RNA, 19 nt, Artificial Sequence
  Description of Artificial Sequence: Synthetic oligonucleotide
gaaagauaacuuuuauugg

SEQ ID NO: 987137 - RNA, 19 nt, Artificial Sequence
  Description of Artificial Sequence: Synthetic oligonucleotide
uagauguaaauaaauauaa

SEQ ID NO: 987138 - RNA, 19 nt, Artificial Sequence
  Description of Artificial Sequence: Synthetic oligonucleotide
uuaagcuuaaaccacccug

SEQ ID NO: 987139 - RNA, 19 nt, Artificial Sequence
  Description of Artificial Sequence: Synthetic oligonucleotide
aaacuaaagcauuugacaa

SEQ ID NO: 987140 - RNA, 19 nt, Artificial Sequence
  Description of Artificial Sequence: Synthetic oligonucleotide
aguaagaagaaguaucuug

SEQ ID NO: 987141 - RNA, 19 nt, Artificial Sequence
  Description of Artificial Sequence: Synthetic oligonucleotide
augcguaucuuuuaaauag

SEQ ID NO: 987142 - RNA, 19 nt, Artificial Sequence
  Description of Artificial Sequence: Synthetic oligonucleotide
uggcuuuuaagcuuaaacc

SEQ ID NO: 987143 - RNA, 19 nt, Artificial Sequence
  Description of Artificial Sequence: Synthetic oligonucleotide
aauaggcacauauacaaau

SEQ ID NO: 987144 - RNA, 19 nt, Artificial Sequence
  Description of Artificial Sequence: Synthetic oligonucleotide
caauucuaagaaaagaaug

SEQ ID NO: 987145 - RNA, 19 nt, Artificial Sequence
  Description of Artificial Sequence: Synthetic oligonucleotide
ucuauagcaaagaauauuu

SEQ ID NO: 987146 - RNA, 19 nt, Artificial Sequence
  Description of Artificial Sequence: Synthetic oligonucleotide
aacuaaagcauuugacaag

SEQ ID NO: 987147 - RNA, 19 nt, Artificial Sequence
  Description of Artificial Sequence: Synthetic oligonucleotide
uccaauuauaucaaacacu

SEQ ID NO: 987148 - RNA, 19 nt, Artificial Sequence
  Description of Artificial Sequence: Synthetic oligonucleotide
uuuauuacacuagugguca

SEQ ID NO: 987149 - RNA, 19 nt, Artificial Sequence
  Description of Artificial Sequence: Synthetic oligonucleotide
aaaaugaaugccaugaaaa

SEQ ID NO: 987150 - RNA, 19 nt, Artificial Sequence
  Description of Artificial Sequence: Synthetic oligonucleotide
aacaacguuugguuuacuc

SEQ ID NO: 987151 - RNA, 19 nt, Artificial Sequence
  Description of Artificial Sequence: Synthetic oligonucleotide
ucccuaaauaauaucauac

SEQ ID NO: 987152 - RNA, 19 nt, Artificial Sequence
  Description of Artificial Sequence: Synthetic oligonucleotide
uagguaauuaacaaacccu

SEQ ID NO: 987153 - RNA, 19 nt, Artificial Sequence
  Description of Artificial Sequence: Synthetic oligonucleotide
uaagcuuaaaccacccugc

SEQ ID NO: 987154 - RNA, 19 nt, Artificial Sequence
  Description of Artificial Sequence: Synthetic oligonucleotide
uaauuaacaaacccucuga

SEQ ID NO: 987155 - RNA, 19 nt, Artificial Sequence
  Description of Artificial Sequence: Synthetic oligonucleotide
uuuuauuacacuagugguc

SEQ ID NO: 987156 - RNA, 19 nt, Artificial Sequence
  Description of Artificial Sequence: Synthetic oligonucleotide
uuuagguaauuaacaaacc

SEQ ID NO: 987157 - RNA, 19 nt, Artificial Sequence
  Description of Artificial Sequence: Synthetic oligonucleotide
auugugaagcaccugguag

SEQ ID NO: 987158 - RNA, 19 nt, Artificial Sequence
  Description of Artificial Sequence: Synthetic oligonucleotide
uuugguuuacucauuuucu

SEQ ID NO: 987159 - RNA, 19 nt, Artificial Sequence
  Description of Artificial Sequence: Synthetic oligonucleotide
cuaaaacuaguauugccgc

SEQ ID NO: 987160 - RNA, 19 nt, Artificial Sequence
  Description of Artificial Sequence: Synthetic oligonucleotide
aauguaagcuucucauuug

SEQ ID NO: 987161 - RNA, 19 nt, Artificial Sequence
  Description of Artificial Sequence: Synthetic oligonucleotide
agauuaauaauguaauuuu

SEQ ID NO: 987162 - RNA, 19 nt, Artificial Sequence
  Description of Artificial Sequence: Synthetic oligonucleotide
ugaaaaugccgucauugcc

SEQ ID NO: 987163 - RNA, 19 nt, Artificial Sequence
  Description of Artificial Sequence: Synthetic oligonucleotide
uggaaauaccaaaugaauc

SEQ ID NO: 987164 - RNA, 19 nt, Artificial Sequence
  Description of Artificial Sequence: Synthetic oligonucleotide
ucuuguaagaacugcuaag

SEQ ID NO: 987165 - RNA, 19 nt, Artificial Sequence
  Description of Artificial Sequence: Synthetic oligonucleotide
uuuauggauucuuucaagu

SEQ ID NO: 987166 - RNA, 19 nt, Artificial Sequence
  Description of Artificial Sequence: Synthetic oligonucleotide
uuugcuaaguuuuaacaaa

SEQ ID NO: 987167 - RNA, 19 nt, Artificial Sequence
  Description of Artificial Sequence: Synthetic oligonucleotide
ucuuagauguaaauaaaua

SEQ ID NO: 987168 - RNA, 19 nt, Artificial Sequence
  Description of Artificial Sequence: Synthetic oligonucleotide
uaagcuucucauuugaaaa

SEQ ID NO: 987169 - RNA, 19 nt, Artificial Sequence
  Description of Artificial Sequence: Synthetic oligonucleotide
aauccuuaaauguaagcuu

SEQ ID NO: 987170 - RNA, 19 nt, Artificial Sequence
  Description of Artificial Sequence: Synthetic oligonucleotide
ccaaaugaaucuaagagcc

SEQ ID NO: 987171 - RNA, 19 nt, Artificial Sequence
  Description of Artificial Sequence: Synthetic oligonucleotide
aggccaaauccacagaugg

SEQ ID NO: 987172 - RNA, 19 nt, Artificial Sequence
  Description of Artificial Sequence: Synthetic oligonucleotide
gauaagcagaauccaagcc

SEQ ID NO: 987173 - RNA, 19 nt, Artificial Sequence
  Description of Artificial Sequence: Synthetic oligonucleotide
uaaugcuacuauagggugg

SEQ ID NO: 987174 - RNA, 19 nt, Artificial Sequence
  Description of Artificial Sequence: Synthetic oligonucleotide
uguuuggaaauaccaaaug

SEQ ID NO: 987175 - RNA, 19 nt, Artificial Sequence
  Description of Artificial Sequence: Synthetic oligonucleotide
ucuauaguaagaagaagua

SEQ ID NO: 987176 - RNA, 19 nt, Artificial Sequence
  Description of Artificial Sequence: Synthetic oligonucleotide
agaaacuaaagcauuugac

SEQ ID NO: 987177 - RNA, 19 nt, Artificial Sequence
  Description of Artificial Sequence: Synthetic oligonucleotide
auguuucugacuuuuaggu

SEQ ID NO: 987178 - RNA, 19 nt, Artificial Sequence
  Description of Artificial Sequence: Synthetic oligonucleotide
agcaaagaauauuucaugu

SEQ ID NO: 987179 - RNA, 19 nt, Artificial Sequence
  Description of Artificial Sequence: Synthetic oligonucleotide
aagcuuaaaccacccugcc

SEQ ID NO: 987180 - RNA, 19 nt, Artificial Sequence
  Description of Artificial Sequence: Synthetic oligonucleotide
aagaucuaauguaauaucu

SEQ ID NO: 987181 - RNA, 19 nt, Artificial Sequence
  Description of Artificial Sequence: Synthetic oligonucleotide
ugcaaaugagaauauuuga

SEQ ID NO: 987182 - RNA, 19 nt, Artificial Sequence
  Description of Artificial Sequence: Synthetic oligonucleotide
guaauuaacaaacccucug

SEQ ID NO: 987183 - RNA, 19 nt, Artificial Sequence
  Description of Artificial Sequence: Synthetic oligonucleotide
aauuaacaaacccucugaa

SEQ ID NO: 987184 - RNA, 19 nt, Artificial Sequence
  Description of Artificial Sequence: Synthetic oligonucleotide
aguauugccgcuuagcuuu

SEQ ID NO: 987185 - RNA, 19 nt, Artificial Sequence
  Description of Artificial Sequence: Synthetic oligonucleotide
aauguaauaucuucuugua

SEQ ID NO: 987186 - RNA, 19 nt, Artificial Sequence
  Description of Artificial Sequence: Synthetic oligonucleotide
uaacaaacuaagcauuuaa

SEQ ID NO: 987187 - RNA, 19 nt, Artificial Sequence
  Description of Artificial Sequence: Synthetic oligonucleotide
ugauuaaccaagugugacc

SEQ ID NO: 987188 - RNA, 19 nt, Artificial Sequence
  Description of Artificial Sequence: Synthetic oligonucleotide
ugcguaucuuuuaaauagg

SEQ ID NO: 987189 - RNA, 19 nt, Artificial Sequence
  Description of Artificial Sequence: Synthetic oligonucleotide
ucuagacacaauucuaaga

SEQ ID NO: 987190 - RNA, 19 nt, Artificial Sequence
  Description of Artificial Sequence: Synthetic oligonucleotide
uauaagaucuaauguaaua

SEQ ID NO: 987191 - RNA, 19 nt, Artificial Sequence
  Description of Artificial Sequence: Synthetic oligonucleotide
uuggaaauaccaaaugaau

SEQ ID NO: 987192 - RNA, 19 nt, Artificial Sequence
  Description of Artificial Sequence: Synthetic oligonucleotide
ugaguuagaaguugauggc

SEQ ID NO: 987193 - RNA, 19 nt, Artificial Sequence
  Description of Artificial Sequence: Synthetic oligonucleotide
ugaguaauccuuaaaugua

SEQ ID NO: 987194 - RNA, 19 nt, Artificial Sequence
  Description of Artificial Sequence: Synthetic oligonucleotide
uucuaauaaucacacugca

SEQ ID NO: 987195 - RNA, 19 nt, Artificial Sequence
  Description of Artificial Sequence: Synthetic oligonucleotide
guuguagguacuucaacag

SEQ ID NO: 987196 - RNA, 19 nt, Artificial Sequence
  Description of Artificial Sequence: Synthetic oligonucleotide
ccaauuauaucaaacacug

SEQ ID NO: 987197 - RNA, 19 nt, Artificial Sequence
  Description of Artificial Sequence: Synthetic oligonucleotide
gacaagauuaauaauguaa

SEQ ID NO: 987198 - RNA, 19 nt, Artificial Sequence
  Description of Artificial Sequence: Synthetic oligonucleotide
ugcaugguuauuuacaguu

SEQ ID NO: 987199 - RNA, 19 nt, Artificial Sequence
  Description of Artificial Sequence: Synthetic oligonucleotide
ucaacaguaaugcuacuau

SEQ ID NO: 987200 - RNA, 19 nt, Artificial Sequence
  Description of Artificial Sequence: Synthetic oligonucleotide
cuaguggucaaguuagaag

SEQ ID NO: 987201 - RNA, 19 nt, Artificial Sequence
  Description of Artificial Sequence: Synthetic oligonucleotide
agguuuacagaugacgugg

SEQ ID NO: 987202 - RNA, 19 nt, Artificial Sequence
  Description of Artificial Sequence: Synthetic oligonucleotide
uaagaucuaauguaauauc

SEQ ID NO: 987203 - RNA, 19 nt, Artificial Sequence
  Description of Artificial Sequence: Synthetic oligonucleotide
guaccuuccagcuauggug

SEQ ID NO: 987204 - RNA, 19 nt, Artificial Sequence
  Description of Artificial Sequence: Synthetic oligonucleotide
acuuuuagguaauuaacaa

SEQ ID NO: 987205 - RNA, 19 nt, Artificial Sequence
  Description of Artificial Sequence: Synthetic oligonucleotide
gaagaauaggagcaggcca

SEQ ID NO: 987206 - RNA, 19 nt, Artificial Sequence
  Description of Artificial Sequence: Synthetic oligonucleotide
uuacagaugacguggacau

SEQ ID NO: 987207 - RNA, 19 nt, Artificial Sequence
  Description of Artificial Sequence: Synthetic oligonucleotide
agguaauuaacaaacccuc

SEQ ID NO: 987208 - RNA, 19 nt, Artificial Sequence
  Description of Artificial Sequence: Synthetic oligonucleotide
acuaguauugccgcuuagc

SEQ ID NO: 987209 - RNA, 19 nt, Artificial Sequence
  Description of Artificial Sequence: Synthetic oligonucleotide
aaauagucagaaaaccuga

SEQ ID NO: 987210 - RNA, 19 nt, Artificial Sequence
  Description of Artificial Sequence: Synthetic oligonucleotide
auaagaucuaauguaauau

SEQ ID NO: 987211 - RNA, 19 nt, Artificial Sequence
  Description of Artificial Sequence: Synthetic oligonucleotide
aagccaauacuguccauug

SEQ ID NO: 987212 - RNA, 19 nt, Artificial Sequence
  Description of Artificial Sequence: Synthetic oligonucleotide
cacauugguauaagaaagg

SEQ ID NO: 987213 - RNA, 19 nt, Artificial Sequence
  Description of Artificial Sequence: Synthetic oligonucleotide
guuuggaaauaccaaauga

SEQ ID NO: 987214 - RNA, 19 nt, Artificial Sequence
  Description of Artificial Sequence: Synthetic oligonucleotide
uuuacagaugacguggaca

SEQ ID NO: 987215 - RNA, 19 nt, Artificial Sequence
  Description of Artificial Sequence: Synthetic oligonucleotide
uaggcacauauacaaaugu

SEQ ID NO: 987216 - RNA, 19 nt, Artificial Sequence
  Description of Artificial Sequence: Synthetic oligonucleotide
uucaucguauguaggaaga

SEQ ID NO: 987217 - RNA, 19 nt, Artificial Sequence
  Description of Artificial Sequence: Synthetic oligonucleotide
aguuucccuaaauaauauc

SEQ ID NO: 987218 - RNA, 19 nt, Artificial Sequence
  Description of Artificial Sequence: Synthetic oligonucleotide
ucuaauaaucacacugcaa

SEQ ID NO: 987219 - RNA, 19 nt, Artificial Sequence
  Description of Artificial Sequence: Synthetic oligonucleotide
uaauaaucacacugcaagu

SEQ ID NO: 987220 - RNA, 19 nt, Artificial Sequence
  Description of Artificial Sequence: Synthetic oligonucleotide
cuuccaauuauaucaaaca

SEQ ID NO: 987221 - RNA, 19 nt, Artificial Sequence
  Description of Artificial Sequence: Synthetic oligonucleotide
guauaagaaaggaauguug

SEQ ID NO: 987222 - RNA, 19 nt, Artificial Sequence
  Description of Artificial Sequence: Synthetic oligonucleotide
ucguauguaggaagagagg

SEQ ID NO: 987223 - RNA, 19 nt, Artificial Sequence
  Description of Artificial Sequence: Synthetic oligonucleotide
uuagcaaagcugcagguuu

SEQ ID NO: 987224 - RNA, 19 nt, Artificial Sequence
  Description of Artificial Sequence: Synthetic oligonucleotide
acaacguuugguuuacuca

SEQ ID NO: 987225 - RNA, 19 nt, Artificial Sequence
  Description of Artificial Sequence: Synthetic oligonucleotide
cuagacacaauucuaagaa

SEQ ID NO: 987226 - RNA, 19 nt, Artificial Sequence
  Description of Artificial Sequence: Synthetic oligonucleotide
aguaaugcuacuauagggu

SEQ ID NO: 987227 - RNA, 19 nt, Artificial Sequence
  Description of Artificial Sequence: Synthetic oligonucleotide
auaugcguaucuuuuaaau

SEQ ID NO: 987228 - RNA, 19 nt, Artificial Sequence
  Description of Artificial Sequence: Synthetic oligonucleotide
ucuuucaaguauaugcgua

SEQ ID NO: 987229 - RNA, 19 nt, Artificial Sequence
  Description of Artificial Sequence: Synthetic oligonucleotide
guuucugacuuuuagguaa

SEQ ID NO: 987230 - RNA, 19 nt, Artificial Sequence
  Description of Artificial Sequence: Synthetic oligonucleotide
aaugcuacuauagggugga

SEQ ID NO: 987231 - RNA, 19 nt, Artificial Sequence
  Description of Artificial Sequence: Synthetic oligonucleotide
gagguagcgacacuguaug

SEQ ID NO: 987232 - RNA, 19 nt, Artificial Sequence
  Description of Artificial Sequence: Synthetic oligonucleotide
aagauaacuuuuauuggcu

SEQ ID NO: 987233 - RNA, 19 nt, Artificial Sequence
  Description of Artificial Sequence: Synthetic oligonucleotide
guaaugcuacuauagggug

SEQ ID NO: 987234 - RNA, 19 nt, Artificial Sequence
  Description of Artificial Sequence: Synthetic oligonucleotide
ugaauugucuuagauguaa

SEQ ID NO: 987235 - RNA, 19 nt, Artificial Sequence
  Description of Artificial Sequence: Synthetic oligonucleotide
guuucccuaaauaauauca

SEQ ID NO: 987236 - RNA, 19 nt, Artificial Sequence
  Description of Artificial Sequence: Synthetic oligonucleotide
ugacaaaucuuuucuaaua

SEQ ID NO: 987237 - RNA, 19 nt, Artificial Sequence
  Description of Artificial Sequence: Synthetic oligonucleotide
guugauggcugcucgacag

SEQ ID NO: 987238 - RNA, 19 nt, Artificial Sequence
  Description of Artificial Sequence: Synthetic oligonucleotide
ucuacaucacugaagucau

SEQ ID NO: 987239 - RNA, 19 nt, Artificial Sequence
  Description of Artificial Sequence: Synthetic oligonucleotide
aucguauguaggaagagag

SEQ ID NO: 987240 - RNA, 19 nt, Artificial Sequence
  Description of Artificial Sequence: Synthetic oligonucleotide
auacaaaugugcaaaauaa

SEQ ID NO: 987241 - RNA, 19 nt, Artificial Sequence
  Description of Artificial Sequence: Synthetic oligonucleotide
uaacagaacaggauuuuau

SEQ ID NO: 987242 - RNA, 19 nt, Artificial Sequence
  Description of Artificial Sequence: Synthetic oligonucleotide
auccuuaaauguaagcuuc

SEQ ID NO: 987243 - RNA, 19 nt, Artificial Sequence
  Description of Artificial Sequence: Synthetic oligonucleotide
acuaaagcauuugacaaga

SEQ ID NO: 987244 - RNA, 19 nt, Artificial Sequence
  Description of Artificial Sequence: Synthetic oligonucleotide
aaguugauggcugcucgac

SEQ ID NO: 987245 - RNA, 19 nt, Artificial Sequence
  Description of Artificial Sequence: Synthetic oligonucleotide
aggugaguaauccuuaaau

SEQ ID NO: 987246 - RNA, 19 nt, Artificial Sequence
  Description of Artificial Sequence: Synthetic oligonucleotide
uuucccuaaauaauaucau

SEQ ID NO: 987247 - RNA, 19 nt, Artificial Sequence
  Description of Artificial Sequence: Synthetic oligonucleotide
auaguaagaagaaguaucu

SEQ ID NO: 987248 - RNA, 19 nt, Artificial Sequence
  Description of Artificial Sequence: Synthetic oligonucleotide
aaaccccuaaaacuaguau

SEQ ID NO: 987249 - RNA, 19 nt, Artificial Sequence
  Description of Artificial Sequence: Synthetic oligonucleotide
gcuacuauaggguggaggc

SEQ ID NO: 987250 - RNA, 19 nt, Artificial Sequence
  Description of Artificial Sequence: Synthetic oligonucleotide
aaacccucugaagaauagg

SEQ ID NO: 987251 - RNA, 19 nt, Artificial Sequence
  Description of Artificial Sequence: Synthetic oligonucleotide
auagucagaaaaccugaca

SEQ ID NO: 987252 - RNA, 19 nt, Artificial Sequence
  Description of Artificial Sequence: Synthetic oligonucleotide
ucauuugaaaaccccuaaa

SEQ ID NO: 987253 - RNA, 19 nt, Artificial Sequence
  Description of Artificial Sequence: Synthetic oligonucleotide
uuuacaugcuggaaguguu

SEQ ID NO: 987254 - RNA, 19 nt, Artificial Sequence
  Description of Artificial Sequence: Synthetic oligonucleotide
uacuauaggguggaggcgc

SEQ ID NO: 987255 - RNA, 19 nt, Artificial Sequence
  Description of Artificial Sequence: Synthetic oligonucleotide
uaugcguaucuuuuaaaua

SEQ ID NO: 987256 - RNA, 19 nt, Artificial Sequence
  Description of Artificial Sequence: Synthetic oligonucleotide
cuuagauguaaauaaauau

SEQ ID NO: 987257 - RNA, 19 nt, Artificial Sequence
  Description of Artificial Sequence: Synthetic oligonucleotide
uuuaagcuuaaaccacccu

SEQ ID NO: 987258 - RNA, 19 nt, Artificial Sequence
  Description of Artificial Sequence: Synthetic oligonucleotide
ggugaguaauccuuaaaug

SEQ ID NO: 987259 - RNA, 19 nt, Artificial Sequence
  Description of Artificial Sequence: Synthetic oligonucleotide
caaucucuauaguaagaag

SEQ ID NO: 987260 - RNA, 19 nt, Artificial Sequence
  Description of Artificial Sequence: Synthetic oligonucleotide
guagcgacacuguauggag

SEQ ID NO: 987261 - RNA, 19 nt, Artificial Sequence
  Description of Artificial Sequence: Synthetic oligonucleotide
uugguguacacucuuccuc

SEQ ID NO: 987262 - RNA, 19 nt, Artificial Sequence
  Description of Artificial Sequence: Synthetic oligonucleotide
ugcuaaguuuuaacaaacu

SEQ ID NO: 987263 - RNA, 19 nt, Artificial Sequence
  Description of Artificial Sequence: Synthetic oligonucleotide
cucuauaguaagaagaagu

SEQ ID NO: 987264 - RNA, 19 nt, Artificial Sequence
  Description of Artificial Sequence: Synthetic oligonucleotide
ugcuacuauaggguggagg

SEQ ID NO: 987265 - RNA, 19 nt, Artificial Sequence
  Description of Artificial Sequence: Synthetic oligonucleotide
augauuacaguaauauuga

SEQ ID NO: 987266 - RNA, 19 nt, Artificial Sequence
  Description of Artificial Sequence: Synthetic oligonucleotide
ucucauuugaaaaccccua

SEQ ID NO: 987267 - RNA, 19 nt, Artificial Sequence
  Description of Artificial Sequence: Synthetic oligonucleotide
uaaaacuaguauugccgcu

SEQ ID NO: 987268 - RNA, 19 nt, Artificial Sequence
  Description of Artificial Sequence: Synthetic oligonucleotide
aacuuaugcaugguuauuu

SEQ ID NO: 987269 - RNA, 19 nt, Artificial Sequence
  Description of Artificial Sequence: Synthetic oligonucleotide
uauuacacuaguggucaag

SEQ ID NO: 987270 - RNA, 19 nt, Artificial Sequence
  Description of Artificial Sequence: Synthetic oligonucleotide
aaaacuaguauugccgcuu

SEQ ID NO: 987271 - RNA, 19 nt, Artificial Sequence
  Description of Artificial Sequence: Synthetic oligonucleotide
uaucuauagcaaagaauau

SEQ ID NO: 987272 - RNA, 19 nt, Artificial Sequence
  Description of Artificial Sequence: Synthetic oligonucleotide
acacaauucuaagaaaaga

SEQ ID NO: 987273 - RNA, 19 nt, Artificial Sequence
  Description of Artificial Sequence: Synthetic oligonucleotide
aggauaagcagaauccaag

SEQ ID NO: 987274 - RNA, 19 nt, Artificial Sequence
  Description of Artificial Sequence: Synthetic oligonucleotide
ccuaaauaauaucauacuc

SEQ ID NO: 987275 - RNA, 19 nt, Artificial Sequence
  Description of Artificial Sequence: Synthetic oligonucleotide
caguaauauugaaagauaa

SEQ ID NO: 987276 - RNA, 19 nt, Artificial Sequence
  Description of Artificial Sequence: Synthetic oligonucleotide
auagccaguaaaauaguca

SEQ ID NO: 987277 - RNA, 19 nt, Artificial Sequence
  Description of Artificial Sequence: Synthetic oligonucleotide
uaccuuccagcuauggugu

SEQ ID NO: 987278 - RNA, 19 nt, Artificial Sequence
  Description of Artificial Sequence: Synthetic oligonucleotide
agugugaccggacuuugcu

SEQ ID NO: 987279 - RNA, 19 nt, Artificial Sequence
  Description of Artificial Sequence: Synthetic oligonucleotide
auuuacaugcuggaagugu

SEQ ID NO: 987280 - RNA, 19 nt, Artificial Sequence
  Description of Artificial Sequence: Synthetic oligonucleotide
aaugccgucauugccuacu

SEQ ID NO: 987281 - RNA, 19 nt, Artificial Sequence
  Description of Artificial Sequence: Synthetic oligonucleotide
aaguauaugcguaucuuuu

SEQ ID NO: 987282 - RNA, 19 nt, Artificial Sequence
  Description of Artificial Sequence: Synthetic oligonucleotide
uauaugcguaucuuuuaaa

SEQ ID NO: 987283 - RNA, 19 nt, Artificial Sequence
  Description of Artificial Sequence: Synthetic oligonucleotide
aguucaucugaaaccacuc

SEQ ID NO: 987284 - RNA, 19 nt, Artificial Sequence
  Description of Artificial Sequence: Synthetic oligonucleotide
aagaauaggagcaggccaa

SEQ ID NO: 987285 - RNA, 19 nt, Artificial Sequence
  Description of Artificial Sequence: Synthetic oligonucleotide
aaaaugccgucauugccua

SEQ ID NO: 987286 - RNA, 19 nt, Artificial Sequence
  Description of Artificial Sequence: Synthetic oligonucleotide
uaaauguaagcuucucauu

SEQ ID NO: 987287 - RNA, 19 nt, Artificial Sequence
  Description of Artificial Sequence: Synthetic oligonucleotide
ggauaagcagaauccaagc

SEQ ID NO: 987288 - RNA, 19 nt, Artificial Sequence
  Description of Artificial Sequence: Synthetic oligonucleotide
aagccaauugaaaaugaau

SEQ ID NO: 987289 - RNA, 19 nt, Artificial Sequence
  Description of Artificial Sequence: Synthetic oligonucleotide
aacuaguauugccgcuuag

SEQ ID NO: 987290 - RNA, 19 nt, Artificial Sequence
  Description of Artificial Sequence: Synthetic oligonucleotide
cuggucuacaucacugaag

SEQ ID NO: 987291 - RNA, 19 nt, Artificial Sequence
  Description of Artificial Sequence: Synthetic oligonucleotide
accccuaaaacuaguauug

SEQ ID NO: 987292 - RNA, 19 nt, Artificial Sequence
  Description of Artificial Sequence: Synthetic oligonucleotide
aaccaagugugaccggacu

SEQ ID NO: 987293 - RNA, 19 nt, Artificial Sequence
  Description of Artificial Sequence: Synthetic oligonucleotide
acauugguauaagaaagga

SEQ ID NO: 987294 - RNA, 19 nt, Artificial Sequence
  Description of Artificial Sequence: Synthetic oligonucleotide
agaggccaaauccacagau

SEQ ID NO: 987295 - RNA, 19 nt, Artificial Sequence
  Description of Artificial Sequence: Synthetic oligonucleotide
aaauauccaccaaagccaa

SEQ ID NO: 987296 - RNA, 19 nt, Artificial Sequence
  Description of Artificial Sequence: Synthetic oligonucleotide
guaaaacucacuguaaacu

SEQ ID NO: 987297 - RNA, 19 nt, Artificial Sequence
  Description of Artificial Sequence: Synthetic oligonucleotide
aguaauccuuaaauguaag

SEQ ID NO: 987298 - RNA, 19 nt, Artificial Sequence
  Description of Artificial Sequence: Synthetic oligonucleotide
gaaguguuuaucacucaac

SEQ ID NO: 987299 - RNA, 19 nt, Artificial Sequence
  Description of Artificial Sequence: Synthetic oligonucleotide
auuaaccaagugugaccgg

SEQ ID NO: 987300 - RNA, 19 nt, Artificial Sequence
  Description of Artificial Sequence: Synthetic oligonucleotide
guuggcuugaugcaaucuc

SEQ ID NO: 987301 - RNA, 19 nt, Artificial Sequence
  Description of Artificial Sequence: Synthetic oligonucleotide
ugauuacaguaauauugaa

SEQ ID NO: 987302 - RNA, 19 nt, Artificial Sequence
  Description of Artificial Sequence: Synthetic oligonucleotide
aaggugaguaauccuuaaa

SEQ ID NO: 987303 - RNA, 19 nt, Artificial Sequence
  Description of Artificial Sequence: Synthetic oligonucleotide
caaacccucugaagaauag

SEQ ID NO: 987304 - RNA, 19 nt, Artificial Sequence
  Description of Artificial Sequence: Synthetic oligonucleotide
ugaaucuaagagccagaaa

SEQ ID NO: 987305 - RNA, 19 nt, Artificial Sequence
  Description of Artificial Sequence: Synthetic oligonucleotide
agguacuucaacaguaaug

SEQ ID NO: 987306 - RNA, 19 nt, Artificial Sequence
  Description of Artificial Sequence: Synthetic oligonucleotide
aguauaugcguaucuuuua

SEQ ID NO: 987307 - RNA, 19 nt, Artificial Sequence
  Description of Artificial Sequence: Synthetic oligonucleotide
uguugaguuagaaguugau

SEQ ID NO: 987308 - RNA, 19 nt, Artificial Sequence
  Description of Artificial Sequence: Synthetic oligonucleotide
cugaaaccacucuaucuug

SEQ ID NO: 987309 - RNA, 19 nt, Artificial Sequence
  Description of Artificial Sequence: Synthetic oligonucleotide
uguuucugacuuuuaggua

SEQ ID NO: 987310 - RNA, 19 nt, Artificial Sequence
  Description of Artificial Sequence: Synthetic oligonucleotide
cagcuuuagccuuuucagc

SEQ ID NO: 987311 - RNA, 19 nt, Artificial Sequence
  Description of Artificial Sequence: Synthetic oligonucleotide
cagaugauucugaaugguc

SEQ ID NO: 987312 - RNA, 19 nt, Artificial Sequence
  Description of Artificial Sequence: Synthetic oligonucleotide
gaaaaugccgucauugccu

SEQ ID NO: 987313 - RNA, 19 nt, Artificial Sequence
  Description of Artificial Sequence: Synthetic oligonucleotide
ucaucguauguaggaagag

SEQ ID NO: 987314 - RNA, 19 nt, Artificial Sequence
  Description of Artificial Sequence: Synthetic oligonucleotide
gaagucaucucuuggugua

SEQ ID NO: 987315 - RNA, 19 nt, Artificial Sequence
  Description of Artificial Sequence: Synthetic oligonucleotide
aaaugccgucauugccuac

SEQ ID NO: 987316 - RNA, 19 nt, Artificial Sequence
  Description of Artificial Sequence: Synthetic oligonucleotide
aucuauagcaaagaauauu

SEQ ID NO: 987317 - RNA, 19 nt, Artificial Sequence
  Description of Artificial Sequence: Synthetic oligonucleotide
auaggcacauauacaaaug

SEQ ID NO: 987318 - RNA, 19 nt, Artificial Sequence
  Description of Artificial Sequence: Synthetic oligonucleotide
uugguuuacucauuuucuu

SEQ ID NO: 987319 - RNA, 19 nt, Artificial Sequence
  Description of Artificial Sequence: Synthetic oligonucleotide
ucaaguauaugcguaucuu

SEQ ID NO: 987320 - RNA, 19 nt, Artificial Sequence
  Description of Artificial Sequence: Synthetic oligonucleotide
uuaacaaacuaagcauuua

SEQ ID NO: 987321 - RNA, 19 nt, Artificial Sequence
  Description of Artificial Sequence: Synthetic oligonucleotide
agauaacuuuuauuggcuu

SEQ ID NO: 987322 - RNA, 19 nt, Artificial Sequence
  Description of Artificial Sequence: Synthetic oligonucleotide
agagucgguuuccagggcu

SEQ ID NO: 987323 - RNA, 19 nt, Artificial Sequence
  Description of Artificial Sequence: Synthetic oligonucleotide
ggacauuucacauugguau

SEQ ID NO: 987324 - RNA, 19 nt, Artificial Sequence
  Description of Artificial Sequence: Synthetic oligonucleotide
guauaugcguaucuuuuaa

SEQ ID NO: 987325 - RNA, 19 nt, Artificial Sequence
  Description of Artificial Sequence: Synthetic oligonucleotide
guaagaagaaguaucuugu

SEQ ID NO: 987326 - RNA, 19 nt, Artificial Sequence
  Description of Artificial Sequence: Synthetic oligonucleotide
uaaggugaguaauccuuaa

SEQ ID NO: 987327 - RNA, 19 nt, Artificial Sequence
  Description of Artificial Sequence: Synthetic oligonucleotide
cagguuuacagaugacgug

SEQ ID NO: 987328 - RNA, 19 nt, Artificial Sequence
  Description of Artificial Sequence: Synthetic oligonucleotide
agcaugaaaaugccgucau

SEQ ID NO: 987329 - RNA, 19 nt, Artificial Sequence
  Description of Artificial Sequence: Synthetic oligonucleotide
aaauaggcacauauacaaa

SEQ ID NO: 987330 - RNA, 19 nt, Artificial Sequence
  Description of Artificial Sequence: Synthetic oligonucleotide
ugagcagaauggcuuuuaa

SEQ ID NO: 987331 - RNA, 19 nt, Artificial Sequence
  Description of Artificial Sequence: Synthetic oligonucleotide
ucugacuuuuagguaauua

SEQ ID NO: 987332 - RNA, 19 nt, Artificial Sequence
  Description of Artificial Sequence: Synthetic oligonucleotide
acagaugacguggacauuu

SEQ ID NO: 987333 - RNA, 19 nt, Artificial Sequence
  Description of Artificial Sequence: Synthetic oligonucleotide
cacuguauggagguggcac

SEQ ID NO: 987334 - RNA, 19 nt, Artificial Sequence
  Description of Artificial Sequence: Synthetic oligonucleotide
uggcacgggguaaaacuca

SEQ ID NO: 987335 - RNA, 19 nt, Artificial Sequence
  Description of Artificial Sequence: Synthetic oligonucleotide
uugauggcugcucgacagc

SEQ ID NO: 987336 - RNA, 19 nt, Artificial Sequence
  Description of Artificial Sequence: Synthetic oligonucleotide
aaaaccccuaaaacuagua

SEQ ID NO: 987337 - RNA, 19 nt, Artificial Sequence
  Description of Artificial Sequence: Synthetic oligonucleotide
auuaacagaacaggauuuu

SEQ ID NO: 987338 - RNA, 19 nt, Artificial Sequence
  Description of Artificial Sequence: Synthetic oligonucleotide
uguauggagguggcacggg

SEQ ID NO: 987339 - RNA, 19 nt, Artificial Sequence
  Description of Artificial Sequence: Synthetic oligonucleotide
acucaacucuuccaauuau

SEQ ID NO: 987340 - RNA, 19 nt, Artificial Sequence
  Description of Artificial Sequence: Synthetic oligonucleotide
uaguauugccgcuuagcuu

SEQ ID NO: 987341 - RNA, 19 nt, Artificial Sequence
  Description of Artificial Sequence: Synthetic oligonucleotide
ugccauacuuucagacaug

SEQ ID NO: 987342 - RNA, 19 nt, Artificial Sequence
  Description of Artificial Sequence: Synthetic oligonucleotide
gauggcaccguaccuucca

SEQ ID NO: 987343 - RNA, 19 nt, Artificial Sequence
  Description of Artificial Sequence: Synthetic oligonucleotide
uggucaaguuagaagcauu

SEQ ID NO: 987344 - RNA, 19 nt, Artificial Sequence
  Description of Artificial Sequence: Synthetic oligonucleotide
agguagcgacacuguaugg

SEQ ID NO: 987345 - RNA, 19 nt, Artificial Sequence
  Description of Artificial Sequence: Synthetic oligonucleotide
uacucuaagcuggucuaca

SEQ ID NO: 987346 - RNA, 19 nt, Artificial Sequence
  Description of Artificial Sequence: Synthetic oligonucleotide
acgggguaaaacucacugu

SEQ ID NO: 987347 - RNA, 19 nt, Artificial Sequence
  Description of Artificial Sequence: Synthetic oligonucleotide
cuacuauaggguggaggcg

SEQ ID NO: 987348 - RNA, 19 nt, Artificial Sequence
  Description of Artificial Sequence: Synthetic oligonucleotide
caucugaaaccacucuauc

SEQ ID NO: 987349 - RNA, 19 nt, Artificial Sequence
  Description of Artificial Sequence: Synthetic oligonucleotide
uucagcaucugaaguugua

SEQ ID NO: 987350 - RNA, 19 nt, Artificial Sequence
  Description of Artificial Sequence: Synthetic oligonucleotide
uugaauugucuuagaugua

SEQ ID NO: 987351 - RNA, 19 nt, Artificial Sequence
  Description of Artificial Sequence: Synthetic oligonucleotide
agcaacuuaugcaugguua

SEQ ID NO: 987352 - RNA, 19 nt, Artificial Sequence
  Description of Artificial Sequence: Synthetic oligonucleotide
ccugguagcggccaguccc

SEQ ID NO: 987353 - RNA, 19 nt, Artificial Sequence
  Description of Artificial Sequence: Synthetic oligonucleotide
agaucuaauguaauaucuu

SEQ ID NO: 987354 - RNA, 19 nt, Artificial Sequence
  Description of Artificial Sequence: Synthetic oligonucleotide
acugauuaaccaaguguga

SEQ ID NO: 987355 - RNA, 19 nt, Artificial Sequence
  Description of Artificial Sequence: Synthetic oligonucleotide
ccagcuaugguguugguga

SEQ ID NO: 987356 - RNA, 19 nt, Artificial Sequence
  Description of Artificial Sequence: Synthetic oligonucleotide
uuacaugcuggaaguguuu

SEQ ID NO: 987357 - RNA, 19 nt, Artificial Sequence
  Description of Artificial Sequence: Synthetic oligonucleotide
gcuaaguuuuaacaaacua

SEQ ID NO: 987358 - RNA, 19 nt, Artificial Sequence
  Description of Artificial Sequence: Synthetic oligonucleotide
guuuacagaugacguggac

SEQ ID NO: 987359 - RNA, 19 nt, Artificial Sequence
  Description of Artificial Sequence: Synthetic oligonucleotide
cuaguauugccgcuuagcu

SEQ ID NO: 987360 - RNA, 19 nt, Artificial Sequence
  Description of Artificial Sequence: Synthetic oligonucleotide
cuguauggagguggcacgg

SEQ ID NO: 987361 - RNA, 19 nt, Artificial Sequence
  Description of Artificial Sequence: Synthetic oligonucleotide
augcaugguuauuuacagu

SEQ ID NO: 987362 - RNA, 19 nt, Artificial Sequence
  Description of Artificial Sequence: Synthetic oligonucleotide
ugccgcuuagcuuuucuuu

SEQ ID NO: 987363 - RNA, 19 nt, Artificial Sequence
  Description of Artificial Sequence: Synthetic oligonucleotide
caaaugaaucuaagagcca

SEQ ID NO: 987364 - RNA, 19 nt, Artificial Sequence
  Description of Artificial Sequence: Synthetic oligonucleotide
gcugcagguuuacagauga

SEQ ID NO: 987365 - RNA, 19 nt, Artificial Sequence
  Description of Artificial Sequence: Synthetic oligonucleotide
cucuaagcuggucuacauc

SEQ ID NO: 987366 - RNA, 19 nt, Artificial Sequence
  Description of Artificial Sequence: Synthetic oligonucleotide
guagcggccaguccccagc

SEQ ID NO: 987367 - RNA, 19 nt, Artificial Sequence
  Description of Artificial Sequence: Synthetic oligonucleotide
caauuauaucaaacacuga

SEQ ID NO: 987368 - RNA, 19 nt, Artificial Sequence
  Description of Artificial Sequence: Synthetic oligonucleotide
cucauuugaaaaccccuaa

SEQ ID NO: 987369 - RNA, 19 nt, Artificial Sequence
  Description of Artificial Sequence: Synthetic oligonucleotide
acucuaagcuggucuacau

SEQ ID NO: 987370 - RNA, 19 nt, Artificial Sequence
  Description of Artificial Sequence: Synthetic oligonucleotide
acuaguggucaaguuagaa

SEQ ID NO: 987371 - RNA, 19 nt, Artificial Sequence
  Description of Artificial Sequence: Synthetic oligonucleotide
uuauuacacuaguggucaa

SEQ ID NO: 987372 - RNA, 19 nt, Artificial Sequence
  Description of Artificial Sequence: Synthetic oligonucleotide
agaauaggagcaggccaag

SEQ ID NO: 987373 - RNA, 19 nt, Artificial Sequence
  Description of Artificial Sequence: Synthetic oligonucleotide
gguggaggcgcagagucgg

SEQ ID NO: 987374 - RNA, 19 nt, Artificial Sequence
  Description of Artificial Sequence: Synthetic oligonucleotide
cuaaggugaguaauccuua

SEQ ID NO: 987375 - RNA, 19 nt, Artificial Sequence
  Description of Artificial Sequence: Synthetic oligonucleotide
accacccugccauuucaug

SEQ ID NO: 987376 - RNA, 19 nt, Artificial Sequence
  Description of Artificial Sequence: Synthetic oligonucleotide
augccgucauugccuacuc

SEQ ID NO: 987377 - RNA, 19 nt, Artificial Sequence
  Description of Artificial Sequence: Synthetic oligonucleotide
cacugcaaguuuuaauaaa

SEQ ID NO: 987378 - RNA, 19 nt, Artificial Sequence
  Description of Artificial Sequence: Synthetic oligonucleotide
uggcuugaugcaaucucua

SEQ ID NO: 987379 - RNA, 19 nt, Artificial Sequence
  Description of Artificial Sequence: Synthetic oligonucleotide
cugguagcggccagucccc

SEQ ID NO: 987380 - RNA, 19 nt, Artificial Sequence
  Description of Artificial Sequence: Synthetic oligonucleotide
gugugaccggacuuugcug

SEQ ID NO: 987381 - RNA, 19 nt, Artificial Sequence
  Description of Artificial Sequence: Synthetic oligonucleotide
uuaaaccacccugccauuu

SEQ ID NO: 987382 - RNA, 19 nt, Artificial Sequence
  Description of Artificial Sequence: Synthetic oligonucleotide
agaauccaagccaauugaa

SEQ ID NO: 987383 - RNA, 19 nt, Artificial Sequence
  Description of Artificial Sequence: Synthetic oligonucleotide
agcauuugacaagauuaau

SEQ ID NO: 987384 - RNA, 19 nt, Artificial Sequence
  Description of Artificial Sequence: Synthetic oligonucleotide
accaagugugaccggacuu

SEQ ID NO: 987385 - RNA, 19 nt, Artificial Sequence
  Description of Artificial Sequence: Synthetic oligonucleotide
auggcaccguaccuuccag

SEQ ID NO: 987386 - RNA, 19 nt, Artificial Sequence
  Description of Artificial Sequence: Synthetic oligonucleotide
aaugagcagaauggcuuuu

SEQ ID NO: 987387 - RNA, 19 nt, Artificial Sequence
  Description of Artificial Sequence: Synthetic oligonucleotide
agagguagcgacacuguau

SEQ ID NO: 987388 - RNA, 19 nt, Artificial Sequence
  Description of Artificial Sequence: Synthetic oligonucleotide
cuuccgagcgggcgggugc

SEQ ID NO: 987389 - RNA, 19 nt, Artificial Sequence
  Description of Artificial Sequence: Synthetic oligonucleotide
ucgguuuccagggcuggug

SEQ ID NO: 987390 - RNA, 19 nt, Artificial Sequence
  Description of Artificial Sequence: Synthetic oligonucleotide
uugccuacucuaagcuggu

SEQ ID NO: 987391 - RNA, 19 nt, Artificial Sequence
  Description of Artificial Sequence: Synthetic oligonucleotide
ggggucuggcuuccgagcg

SEQ ID NO: 987392 - RNA, 19 nt, Artificial Sequence
  Description of Artificial Sequence: Synthetic oligonucleotide
ggguaaaacucacuguaaa

SEQ ID NO: 987393 - RNA, 19 nt, Artificial Sequence
  Description of Artificial Sequence: Synthetic oligonucleotide
gccaauacuguccauugaa

SEQ ID NO: 987394 - RNA, 19 nt, Artificial Sequence
  Description of Artificial Sequence: Synthetic oligonucleotide
cacagcgugugcuguugag

SEQ ID NO: 987395 - RNA, 19 nt, Artificial Sequence
  Description of Artificial Sequence: Synthetic oligonucleotide
ugaucagagagaggccaaa

SEQ ID NO: 987396 - RNA, 19 nt, Artificial Sequence
  Description of Artificial Sequence: Synthetic oligonucleotide
acccugccauuucauguug

SEQ ID NO: 987397 - RNA, 19 nt, Artificial Sequence
  Description of Artificial Sequence: Synthetic oligonucleotide
guaggaagagagguagcga

SEQ ID NO: 987398 - RNA, 19 nt, Artificial Sequence
  Description of Artificial Sequence: Synthetic oligonucleotide
gaccggacuuugcugcaac

SEQ ID NO: 987399 - RNA, 19 nt, Artificial Sequence
  Description of Artificial Sequence: Synthetic oligonucleotide
acagcgugugcuguugagu

SEQ ID NO: 987400 - RNA, 19 nt, Artificial Sequence
  Description of Artificial Sequence: Synthetic oligonucleotide
gguggcacgggguaaaacu

SEQ ID NO: 987401 - RNA, 19 nt, Artificial Sequence
  Description of Artificial Sequence: Synthetic oligonucleotide
gguagcgacacuguaugga

SEQ ID NO: 987402 - RNA, 19 nt, Artificial Sequence
  Description of Artificial Sequence: Synthetic oligonucleotide
caagugugaccggacuuug

SEQ ID NO: 987403 - RNA, 19 nt, Artificial Sequence
  Description of Artificial Sequence: Synthetic oligonucleotide
guagguacuucaacaguaa

SEQ ID NO: 987404 - RNA, 19 nt, Artificial Sequence
  Description of Artificial Sequence: Synthetic oligonucleotide
cuacucuaagcuggucuac

SEQ ID NO: 987405 - RNA, 19 nt, Artificial Sequence
  Description of Artificial Sequence: Synthetic oligonucleotide
gagucgguuuccagggcug

SEQ ID NO: 987406 - RNA, 19 nt, Artificial Sequence
  Description of Artificial Sequence: Synthetic oligonucleotide
gaaaaccccuaaaacuagu

SEQ ID NO: 987407 - RNA, 19 nt, Artificial Sequence
  Description of Artificial Sequence: Synthetic oligonucleotide
cugccauacuuucagacau

SEQ ID NO: 987408 - RNA, 19 nt, Artificial Sequence
  Description of Artificial Sequence: Synthetic oligonucleotide
caaguauaugcguaucuuu

SEQ ID NO: 987409 - RNA, 19 nt, Artificial Sequence
  Description of Artificial Sequence: Synthetic oligonucleotide
cuucauugugaagcaccug

SEQ ID NO: 987410 - RNA, 19 nt, Artificial Sequence
  Description of Artificial Sequence: Synthetic oligonucleotide
ccagaaacuaaagcauuug

SEQ ID NO: 987411 - RNA, 19 nt, Artificial Sequence
  Description of Artificial Sequence: Synthetic oligonucleotide
gcugcucgacagcagauga

SEQ ID NO: 987412 - RNA, 19 nt, Artificial Sequence
  Description of Artificial Sequence: Synthetic oligonucleotide
aucacacugcaaguuuuaa

SEQ ID NO: 987413 - RNA, 19 nt, Artificial Sequence
  Description of Artificial Sequence: Synthetic oligonucleotide
guauguaggaagagaggua

SEQ ID NO: 987414 - RNA, 19 nt, Artificial Sequence
  Description of Artificial Sequence: Synthetic oligonucleotide
ugccgucauugccuacucu

SEQ ID NO: 987415 - RNA, 19 nt, Artificial Sequence
  Description of Artificial Sequence: Synthetic oligonucleotide
uugccgcuuagcuuuucuu

SEQ ID NO: 987416 - RNA, 19 nt, Artificial Sequence
  Description of Artificial Sequence: Synthetic oligonucleotide
cucuaucuugaacaaaguu

SEQ ID NO: 987417 - RNA, 19 nt, Artificial Sequence
  Description of Artificial Sequence: Synthetic oligonucleotide
agccaguaaaauagucaga

SEQ ID NO: 987418 - RNA, 19 nt, Artificial Sequence
  Description of Artificial Sequence: Synthetic oligonucleotide
uggcuuccgagcgggcggg

SEQ ID NO: 987419 - RNA, 19 nt, Artificial Sequence
  Description of Artificial Sequence: Synthetic oligonucleotide
cagagucgguuuccagggc

SEQ ID NO: 987420 - RNA, 19 nt, Artificial Sequence
  Description of Artificial Sequence: Synthetic oligonucleotide
ggucuggcuuccgagcggg

SEQ ID NO: 987421 - RNA, 19 nt, Artificial Sequence
  Description of Artificial Sequence: Synthetic oligonucleotide
uagcggccaguccccagcu

SEQ ID NO: 987422 - RNA, 19 nt, Artificial Sequence
  Description of Artificial Sequence: Synthetic oligonucleotide
auccugcccgccucggggu

SEQ ID NO: 987423 - RNA, 19 nt, Artificial Sequence
  Description of Artificial Sequence: Synthetic oligonucleotide
guacuucaacaguaaugcu

SEQ ID NO: 987424 - RNA, 19 nt, Artificial Sequence
  Description of Artificial Sequence: Synthetic oligonucleotide
acuauaggguggaggcgca

SEQ ID NO: 987425 - RNA, 19 nt, Artificial Sequence
  Description of Artificial Sequence: Synthetic oligonucleotide
caguuucccuaaauaauau

SEQ ID NO: 987426 - RNA, 19 nt, Artificial Sequence
  Description of Artificial Sequence: Synthetic oligonucleotide
gguauaagaaaggaauguu

SEQ ID NO: 987427 - RNA, 19 nt, Artificial Sequence
  Description of Artificial Sequence: Synthetic oligonucleotide
cuauaggguggaggcgcag

SEQ ID NO: 987428 - RNA, 19 nt, Artificial Sequence
  Description of Artificial Sequence: Synthetic oligonucleotide
cccuaaauaauaucauacu

SEQ ID NO: 987429 - RNA, 19 nt, Artificial Sequence
  Description of Artificial Sequence: Synthetic oligonucleotide
agcgugugcuguugaguua

SEQ ID NO: 987430 - RNA, 19 nt, Artificial Sequence
  Description of Artificial Sequence: Synthetic oligonucleotide
uuccgagcgggcgggugcc

SEQ ID NO: 987431 - RNA, 19 nt, Artificial Sequence
  Description of Artificial Sequence: Synthetic oligonucleotide
gccgucauugccuacucua

SEQ ID NO: 987432 - RNA, 19 nt, Artificial Sequence
  Description of Artificial Sequence: Synthetic oligonucleotide
ggccaaauccacagauggc

SEQ ID NO: 987433 - RNA, 19 nt, Artificial Sequence
  Description of Artificial Sequence: Synthetic oligonucleotide
gggucuggcuuccgagcgg

SEQ ID NO: 987434 - RNA, 19 nt, Artificial Sequence
  Description of Artificial Sequence: Synthetic oligonucleotide
caccguaccuuccagcuau

SEQ ID NO: 987435 - RNA, 19 nt, Artificial Sequence
  Description of Artificial Sequence: Synthetic oligonucleotide
ccaauacuguccauugaaa

SEQ ID NO: 987436 - RNA, 19 nt, Artificial Sequence
  Description of Artificial Sequence: Synthetic oligonucleotide
gguuuacagaugacgugga

SEQ ID NO: 987437 - RNA, 19 nt, Artificial Sequence
  Description of Artificial Sequence: Synthetic oligonucleotide
gccuacucuaagcuggucu

SEQ ID NO: 987438 - RNA, 19 nt, Artificial Sequence
  Description of Artificial Sequence: Synthetic oligonucleotide
cacuaguggucaaguuaga

SEQ ID NO: 987439 - RNA, 19 nt, Artificial Sequence
  Description of Artificial Sequence: Synthetic oligonucleotide
gaauaggagcaggccaagu

SEQ ID NO: 987440 - RNA, 19 nt, Artificial Sequence
  Description of Artificial Sequence: Synthetic oligonucleotide
gagcgggcgggugcccucg

SEQ ID NO: 987441 - RNA, 19 nt, Artificial Sequence
  Description of Artificial Sequence: Synthetic oligonucleotide
gccgcuuagcuuuucuuua

SEQ ID NO: 987442 - RNA, 19 nt, Artificial Sequence
  Description of Artificial Sequence: Synthetic oligonucleotide
gcuucaucguauguaggaa

SEQ ID NO: 987443 - RNA, 19 nt, Artificial Sequence
  Description of Artificial Sequence: Synthetic oligonucleotide
uggcggcagcuuuagccuu

SEQ ID NO: 987444 - RNA, 19 nt, Artificial Sequence
  Description of Artificial Sequence: Synthetic oligonucleotide
ccuacucuaagcuggucua

SEQ ID NO: 987445 - RNA, 19 nt, Artificial Sequence
  Description of Artificial Sequence: Synthetic oligonucleotide
uauugccgcuuagcuuuuc

SEQ ID NO: 987446 - RNA, 19 nt, Artificial Sequence
  Description of Artificial Sequence: Synthetic oligonucleotide
cuaugguguuggugauaca

SEQ ID NO: 987447 - RNA, 19 nt, Artificial Sequence
  Description of Artificial Sequence: Synthetic oligonucleotide
ucccacagcgugugcuguu

SEQ ID NO: 987448 - RNA, 19 nt, Artificial Sequence
  Description of Artificial Sequence: Synthetic oligonucleotide
cguauguaggaagagaggu

SEQ ID NO: 987449 - RNA, 19 nt, Artificial Sequence
  Description of Artificial Sequence: Synthetic oligonucleotide
ggcugcucgacagcagaug

SEQ ID NO: 987450 - RNA, 19 nt, Artificial Sequence
  Description of Artificial Sequence: Synthetic oligonucleotide
ggcacgggguaaaacucac

SEQ ID NO: 987451 - RNA, 19 nt, Artificial Sequence
  Description of Artificial Sequence: Synthetic oligonucleotide
gggguaaaacucacuguaa

SEQ ID NO: 987452 - RNA, 19 nt, Artificial Sequence
  Description of Artificial Sequence: Synthetic oligonucleotide
cagcgugugcuguugaguu

SEQ ID NO: 987453 - RNA, 19 nt, Artificial Sequence
  Description of Artificial Sequence: Synthetic oligonucleotide
augcuacuauaggguggag

SEQ ID NO: 987454 - RNA, 19 nt, Artificial Sequence
  Description of Artificial Sequence: Synthetic oligonucleotide
uccugcccgccucgggguc

SEQ ID NO: 987455 - RNA, 19 nt, Artificial Sequence
  Description of Artificial Sequence: Synthetic oligonucleotide
cgggguaaaacucacugua

SEQ ID NO: 987456 - RNA, 19 nt, Artificial Sequence
  Description of Artificial Sequence: Synthetic oligonucleotide
ggccaaguacaagaaauau

SEQ ID NO: 987457 - RNA, 19 nt, Artificial Sequence
  Description of Artificial Sequence: Synthetic oligonucleotide
ugccuacucuaagcugguc

SEQ ID NO: 987458 - RNA, 19 nt, Artificial Sequence
  Description of Artificial Sequence: Synthetic oligonucleotide
gcagaugauucugaauggu

SEQ ID NO: 987459 - RNA, 19 nt, Artificial Sequence
  Description of Artificial Sequence: Synthetic oligonucleotide
ggcuugaugcaaucucuau

SEQ ID NO: 987460 - RNA, 19 nt, Artificial Sequence
  Description of Artificial Sequence: Synthetic oligonucleotide
gcgcagagucgguuuccag

SEQ ID NO: 987461 - RNA, 19 nt, Artificial Sequence
  Description of Artificial Sequence: Synthetic oligonucleotide
ccguaccuuccagcuaugg

SEQ ID NO: 987462 - RNA, 19 nt, Artificial Sequence
  Description of Artificial Sequence: Synthetic oligonucleotide
ccacccugccauuucaugu

SEQ ID NO: 987463 - RNA, 19 nt, Artificial Sequence
  Description of Artificial Sequence: Synthetic oligonucleotide
ccgucauugccuacucuaa

SEQ ID NO: 987464 - RNA, 19 nt, Artificial Sequence
  Description of Artificial Sequence: Synthetic oligonucleotide
accguaccuuccagcuaug

SEQ ID NO: 987465 - RNA, 19 nt, Artificial Sequence
  Description of Artificial Sequence: Synthetic oligonucleotide
ggagguggcacgggguaaa

SEQ ID NO: 987466 - RNA, 19 nt, Artificial Sequence
  Description of Artificial Sequence: Synthetic oligonucleotide
cagacauguuucugacuuu

SEQ ID NO: 987467 - RNA, 19 nt, Artificial Sequence
  Description of Artificial Sequence: Synthetic oligonucleotide
caacuuaugcaugguuauu

SEQ ID NO: 987468 - RNA, 19 nt, Artificial Sequence
  Description of Artificial Sequence: Synthetic oligonucleotide
gccagaaacuaaagcauuu

SEQ ID NO: 987469 - RNA, 19 nt, Artificial Sequence
  Description of Artificial Sequence: Synthetic oligonucleotide
gcgacacuguauggaggug

SEQ ID NO: 987470 - RNA, 19 nt, Artificial Sequence
  Description of Artificial Sequence: Synthetic oligonucleotide
gugguccauccugcccgcc

SEQ ID NO: 987471 - RNA, 19 nt, Artificial Sequence
  Description of Artificial Sequence: Synthetic oligonucleotide
gugcccucggcgcuccgcu

SEQ ID NO: 987472 - RNA, 19 nt, Artificial Sequence
  Description of Artificial Sequence: Synthetic oligonucleotide
ccgcuuagcuuuucuuuaa

SEQ ID NO: 987473 - RNA, 19 nt, Artificial Sequence
  Description of Artificial Sequence: Synthetic oligonucleotide
ggugcccucggcgcuccgc

SEQ ID NO: 987474 - RNA, 19 nt, Artificial Sequence
  Description of Artificial Sequence: Synthetic oligonucleotide
cugcucgacagcagaugau

SEQ ID NO: 987475 - RNA, 19 nt, Artificial Sequence
  Description of Artificial Sequence: Synthetic oligonucleotide
gucuggcuuccgagcgggc

SEQ ID NO: 987476 - RNA, 19 nt, Artificial Sequence
  Description of Artificial Sequence: Synthetic oligonucleotide
ggaggcgcagagucgguuu

SEQ ID NO: 987477 - RNA, 19 nt, Artificial Sequence
  Description of Artificial Sequence: Synthetic oligonucleotide
gcuuccgagcgggcgggug

SEQ ID NO: 987478 - RNA, 19 nt, Artificial Sequence
  Description of Artificial Sequence: Synthetic oligonucleotide
cucggccuccccggucgac

SEQ ID NO: 987479 - RNA, 19 nt, Artificial Sequence
  Description of Artificial Sequence: Synthetic oligonucleotide
gcaccguaccuuccagcua

SEQ ID NO: 987480 - RNA, 19 nt, Artificial Sequence
  Description of Artificial Sequence: Synthetic oligonucleotide
cugccauggcggcagcuuu

SEQ ID NO: 987481 - RNA, 19 nt, Artificial Sequence
  Description of Artificial Sequence: Synthetic oligonucleotide
ccacucuaucuugaacaaa

SEQ ID NO: 987482 - RNA, 19 nt, Artificial Sequence
  Description of Artificial Sequence: Synthetic oligonucleotide
ccacagcgugugcuguuga

SEQ ID NO: 987483 - RNA, 19 nt, Artificial Sequence
  Description of Artificial Sequence: Synthetic oligonucleotide
ccaagugugaccggacuuu

SEQ ID NO: 987484 - RNA, 19 nt, Artificial Sequence
  Description of Artificial Sequence: Synthetic oligonucleotide
cggcgcuccgcucccucgg

SEQ ID NO: 987485 - RNA, 19 nt, Artificial Sequence
  Description of Artificial Sequence: Synthetic oligonucleotide
guauugccgcuuagcuuuu

SEQ ID NO: 987486 - RNA, 19 nt, Artificial Sequence
  Description of Artificial Sequence: Synthetic oligonucleotide
gcgggcgggugcccucggc

SEQ ID NO: 987487 - RNA, 19 nt, Artificial Sequence
  Description of Artificial Sequence: Synthetic oligonucleotide
ggcgggugcccucggcgcu

SEQ ID NO: 987488 - RNA, 19 nt, Artificial Sequence
  Description of Artificial Sequence: Synthetic oligonucleotide
guggaggcgcagagucggu

SEQ ID NO: 987489 - RNA, 19 nt, Artificial Sequence
  Description of Artificial Sequence: Synthetic oligonucleotide
gcacgggguaaaacucacu

SEQ ID NO: 987490 - RNA, 19 nt, Artificial Sequence
  Description of Artificial Sequence: Synthetic oligonucleotide
gcccgccucggggucuggc

SEQ ID NO: 987491 - RNA, 19 nt, Artificial Sequence
  Description of Artificial Sequence: Synthetic oligonucleotide
cgagcgggcgggugcccuc

SEQ ID NO: 987492 - RNA, 19 nt, Artificial Sequence
  Description of Artificial Sequence: Synthetic oligonucleotide
ggcggcagcuuuagccuuu

SEQ ID NO: 987493 - RNA, 19 nt, Artificial Sequence
  Description of Artificial Sequence: Synthetic oligonucleotide
gcggcagcuuuagccuuuu

SEQ ID NO: 987494 - RNA, 19 nt, Artificial Sequence
  Description of Artificial Sequence: Synthetic oligonucleotide
ggcuuccgagcgggcgggu

SEQ ID NO: 987495 - RNA, 19 nt, Artificial Sequence
  Description of Artificial Sequence: Synthetic oligonucleotide
ccgagcgggcgggugcccu

SEQ ID NO: 987496 - RNA, 19 nt, Artificial Sequence
  Description of Artificial Sequence: Synthetic oligonucleotide
aauuaaaugaacuuggcac

SEQ ID NO: 987497 - RNA, 19 nt, Artificial Sequence
  Description of Artificial Sequence: Synthetic oligonucleotide
uauaauaugaagaagagcc

SEQ ID NO: 987498 - RNA, 19 nt, Artificial Sequence
  Description of Artificial Sequence: Synthetic oligonucleotide
aagaccaugagucaaagcc

SEQ ID NO: 987499 - RNA, 19 nt, Artificial Sequence
  Description of Artificial Sequence: Synthetic oligonucleotide
aauacaaugcugcaauugc

SEQ ID NO: 987500 - RNA, 19 nt, Artificial Sequence
  Description of Artificial Sequence: Synthetic oligonucleotide
ucuuauaauaugaagaaga

SEQ ID NO: 987501 - RNA, 19 nt, Artificial Sequence
  Description of Artificial Sequence: Synthetic oligonucleotide
aaaucugauacucaucaac

SEQ ID NO: 987502 - RNA, 19 nt, Artificial Sequence
  Description of Artificial Sequence: Synthetic oligonucleotide
gauacuugguaucagauag

SEQ ID NO: 987503 - RNA, 19 nt, Artificial Sequence
  Description of Artificial Sequence: Synthetic oligonucleotide
uguaucaacuguuacauag

SEQ ID NO: 987504 - RNA, 19 nt, Artificial Sequence
  Description of Artificial Sequence: Synthetic oligonucleotide
uuuagaauucccauagcgg

SEQ ID NO: 987505 - RNA, 19 nt, Artificial Sequence
  Description of Artificial Sequence: Synthetic oligonucleotide
ucauuuuagauucaugggc

SEQ ID NO: 987506 - RNA, 19 nt, Artificial Sequence
  Description of Artificial Sequence: Synthetic oligonucleotide
auaguuaugcagaagaggc

SEQ ID NO: 987507 - RNA, 19 nt, Artificial Sequence
  Description of Artificial Sequence: Synthetic oligonucleotide
aauugcaacuugcaggcac

SEQ ID NO: 987508 - RNA, 19 nt, Artificial Sequence
  Description of Artificial Sequence: Synthetic oligonucleotide
ucgaucaucaaucagacau

SEQ ID NO: 987509 - RNA, 19 nt, Artificial Sequence
  Description of Artificial Sequence: Synthetic oligonucleotide
augacuuguaagcagauuc

SEQ ID NO: 987510 - RNA, 19 nt, Artificial Sequence
  Description of Artificial Sequence: Synthetic oligonucleotide
uacauaguuaugcagaaga

SEQ ID NO: 987511 - RNA, 19 nt, Artificial Sequence
  Description of Artificial Sequence: Synthetic oligonucleotide
uggauuauaauacaaugcu

SEQ ID NO: 987512 - RNA, 19 nt, Artificial Sequence
  Description of Artificial Sequence: Synthetic oligonucleotide
uuacaggucugauaaaugg

SEQ ID NO: 987513 - RNA, 19 nt, Artificial Sequence
  Description of Artificial Sequence: Synthetic oligonucleotide
augagucaaagccugauac

SEQ ID NO: 987514 - RNA, 19 nt, Artificial Sequence
  Description of Artificial Sequence: Synthetic oligonucleotide
ucugauacucaucaacagg

SEQ ID NO: 987515 - RNA, 19 nt, Artificial Sequence
  Description of Artificial Sequence: Synthetic oligonucleotide
uguaaaacggucccaauga

SEQ ID NO: 987516 - RNA, 19 nt, Artificial Sequence
  Description of Artificial Sequence: Synthetic oligonucleotide
agaaugaugaccucuaaca

SEQ ID NO: 987517 - RNA, 19 nt, Artificial Sequence
  Description of Artificial Sequence: Synthetic oligonucleotide
aaagccugauaccauacag

SEQ ID NO: 987518 - RNA, 19 nt, Artificial Sequence
  Description of Artificial Sequence: Synthetic oligonucleotide
cuugcaggcacauuguucg

SEQ ID NO: 987519 - RNA, 19 nt, Artificial Sequence
  Description of Artificial Sequence: Synthetic oligonucleotide
aggauuacgauuuugaaua

SEQ ID NO: 987520 - RNA, 19 nt, Artificial Sequence
  Description of Artificial Sequence: Synthetic oligonucleotide
uuagaauucccauagcggu

SEQ ID NO: 987521 - RNA, 19 nt, Artificial Sequence
  Description of Artificial Sequence: Synthetic oligonucleotide
uuguuccauaucaauaagg

SEQ ID NO: 987522 - RNA, 19 nt, Artificial Sequence
  Description of Artificial Sequence: Synthetic oligonucleotide
uucucgaucaucaaucaga

SEQ ID NO: 987523 - RNA, 19 nt, Artificial Sequence
  Description of Artificial Sequence: Synthetic oligonucleotide
aagccgagaacacacaucu

SEQ ID NO: 987524 - RNA, 19 nt, Artificial Sequence
  Description of Artificial Sequence: Synthetic oligonucleotide
gaagcguagauuuucuaag

SEQ ID NO: 987525 - RNA, 19 nt, Artificial Sequence
  Description of Artificial Sequence: Synthetic oligonucleotide
ucucuuauaauaugaagaa

SEQ ID NO: 987526 - RNA, 19 nt, Artificial Sequence
  Description of Artificial Sequence: Synthetic oligonucleotide
uucugaauuacauuuguaa

SEQ ID NO: 987527 - RNA, 19 nt, Artificial Sequence
  Description of Artificial Sequence: Synthetic oligonucleotide
accucuaacaauuuugcug

SEQ ID NO: 987528 - RNA, 19 nt, Artificial Sequence
  Description of Artificial Sequence: Synthetic oligonucleotide
agaauucuaagacaugcug

SEQ ID NO: 987529 - RNA, 19 nt, Artificial Sequence
  Description of Artificial Sequence: Synthetic oligonucleotide
aaugggaguaaccucuucu

SEQ ID NO: 987530 - RNA, 19 nt, Artificial Sequence
  Description of Artificial Sequence: Synthetic oligonucleotide
uagguguggauuauaauac

SEQ ID NO: 987531 - RNA, 19 nt, Artificial Sequence
  Description of Artificial Sequence: Synthetic oligonucleotide
cauuguucgaaguucacug

SEQ ID NO: 987532 - RNA, 19 nt, Artificial Sequence
  Description of Artificial Sequence: Synthetic oligonucleotide
uuaaauguaauugccagau

SEQ ID NO: 987533 - RNA, 19 nt, Artificial Sequence
  Description of Artificial Sequence: Synthetic oligonucleotide
uaaauauuccugcccaucu

SEQ ID NO: 987534 - RNA, 19 nt, Artificial Sequence
  Description of Artificial Sequence: Synthetic oligonucleotide
ugugucaauuguauuuuag

SEQ ID NO: 987535 - RNA, 19 nt, Artificial Sequence
  Description of Artificial Sequence: Synthetic oligonucleotide
ucuuugaucagcgagaguu

SEQ ID NO: 987536 - RNA, 19 nt, Artificial Sequence
  Description of Artificial Sequence: Synthetic oligonucleotide
auaccucaaauacaagggg

SEQ ID NO: 987537 - RNA, 19 nt, Artificial Sequence
  Description of Artificial Sequence: Synthetic oligonucleotide
auaggaguguaucuguauc

SEQ ID NO: 987538 - RNA, 19 nt, Artificial Sequence
  Description of Artificial Sequence: Synthetic oligonucleotide
acagucuacgucauuaagc

SEQ ID NO: 987539 - RNA, 19 nt, Artificial Sequence
  Description of Artificial Sequence: Synthetic oligonucleotide
cagucuacgucauuaagcc

SEQ ID NO: 987540 - RNA, 19 nt, Artificial Sequence
  Description of Artificial Sequence: Synthetic oligonucleotide
uugguaucagauaggagug

SEQ ID NO: 987541 - RNA, 19 nt, Artificial Sequence
  Description of Artificial Sequence: Synthetic oligonucleotide
gauucccucaagcugcugg

SEQ ID NO: 987542 - RNA, 19 nt, Artificial Sequence
  Description of Artificial Sequence: Synthetic oligonucleotide
ucuugauugcugaucaaca

SEQ ID NO: 987543 - RNA, 19 nt, Artificial Sequence
  Description of Artificial Sequence: Synthetic oligonucleotide
ucucuaaauauuccugccc

SEQ ID NO: 987544 - RNA, 19 nt, Artificial Sequence
  Description of Artificial Sequence: Synthetic oligonucleotide
ucugucaugaagccccagg

SEQ ID NO: 987545 - RNA, 19 nt, Artificial Sequence
  Description of Artificial Sequence: Synthetic oligonucleotide
gauaccauacaggauuacg

SEQ ID NO: 987546 - RNA, 19 nt, Artificial Sequence
  Description of Artificial Sequence: Synthetic oligonucleotide
auaaaugcuggcaaaaucu

SEQ ID NO: 987547 - RNA, 19 nt, Artificial Sequence
  Description of Artificial Sequence: Synthetic oligonucleotide
agcgagaguugcuaugucc

SEQ ID NO: 987548 - RNA, 19 nt, Artificial Sequence
  Description of Artificial Sequence: Synthetic oligonucleotide
uguauaucaucucaagaua

SEQ ID NO: 987549 - RNA, 19 nt, Artificial Sequence
  Description of Artificial Sequence: Synthetic oligonucleotide
uguaauugccagaugcugu

SEQ ID NO: 987550 - RNA, 19 nt, Artificial Sequence
  Description of Artificial Sequence: Synthetic oligonucleotide
gguuaaauguaauugccag

SEQ ID NO: 987551 - RNA, 19 nt, Artificial Sequence
  Description of Artificial Sequence: Synthetic oligonucleotide
uucugaucacucuugaacu

SEQ ID NO: 987552 - RNA, 19 nt, Artificial Sequence
  Description of Artificial Sequence: Synthetic oligonucleotide
ucgucagucucucuaaagc

SEQ ID NO: 987553 - RNA, 19 nt, Artificial Sequence
  Description of Artificial Sequence: Synthetic oligonucleotide
cauaguuaugcagaagagg

SEQ ID NO: 987554 - RNA, 19 nt, Artificial Sequence
  Description of Artificial Sequence: Synthetic oligonucleotide
ugauuuaaaaccuguggua

SEQ ID NO: 987555 - RNA, 19 nt, Artificial Sequence
  Description of Artificial Sequence: Synthetic oligonucleotide
auuguucgaaguucacugg

SEQ ID NO: 987556 - RNA, 19 nt, Artificial Sequence
  Description of Artificial Sequence: Synthetic oligonucleotide
cauaugcucuuuucaaucc

SEQ ID NO: 987557 - RNA, 19 nt, Artificial Sequence
  Description of Artificial Sequence: Synthetic oligonucleotide
uggaauacacugaucgaug

SEQ ID NO: 987558 - RNA, 19 nt, Artificial Sequence
  Description of Artificial Sequence: Synthetic oligonucleotide
ugcuguuguaaaacggucc

SEQ ID NO: 987559 - RNA, 19 nt, Artificial Sequence
  Description of Artificial Sequence: Synthetic oligonucleotide
uuuuacaggcauuucucga

SEQ ID NO: 987560 - RNA, 19 nt, Artificial Sequence
  Description of Artificial Sequence: Synthetic oligonucleotide
ugucuguaaaguaaucaaa

SEQ ID NO: 987561 - RNA, 19 nt, Artificial Sequence
  Description of Artificial Sequence: Synthetic oligonucleotide
aauucaucccuggugccgg

SEQ ID NO: 987562 - RNA, 19 nt, Artificial Sequence
  Description of Artificial Sequence: Synthetic oligonucleotide
cuuguaagcagauucccuc

SEQ ID NO: 987563 - RNA, 19 nt, Artificial Sequence
  Description of Artificial Sequence: Synthetic oligonucleotide
ugugguauuuguuccauau

SEQ ID NO: 987564 - RNA, 19 nt, Artificial Sequence
  Description of Artificial Sequence: Synthetic oligonucleotide
uauuaagaaguaggugugg

SEQ ID NO: 987565 - RNA, 19 nt, Artificial Sequence
  Description of Artificial Sequence: Synthetic oligonucleotide
ucucgaucaucaaucagac

SEQ ID NO: 987566 - RNA, 19 nt, Artificial Sequence
  Description of Artificial Sequence: Synthetic oligonucleotide
aacugguucaacauuauua

SEQ ID NO: 987567 - RNA, 19 nt, Artificial Sequence
  Description of Artificial Sequence: Synthetic oligonucleotide
cuugucagcucuaaagcug

SEQ ID NO: 987568 - RNA, 19 nt, Artificial Sequence
  Description of Artificial Sequence: Synthetic oligonucleotide
cauuauuagggaagcguag

SEQ ID NO: 987569 - RNA, 19 nt, Artificial Sequence
  Description of Artificial Sequence: Synthetic oligonucleotide
guggaauagccuucgagag

SEQ ID NO: 987570 - RNA, 19 nt, Artificial Sequence
  Description of Artificial Sequence: Synthetic oligonucleotide
uaaaacggucccaaugacu

SEQ ID NO: 987571 - RNA, 19 nt, Artificial Sequence
  Description of Artificial Sequence: Synthetic oligonucleotide
agcucuugcucucauguag

SEQ ID NO: 987572 - RNA, 19 nt, Artificial Sequence
  Description of Artificial Sequence: Synthetic oligonucleotide
acugaucgaugccacgccc

SEQ ID NO: 987573 - RNA, 19 nt, Artificial Sequence
  Description of Artificial Sequence: Synthetic oligonucleotide
augauuguggaauagccuu

SEQ ID NO: 987574 - RNA, 19 nt, Artificial Sequence
  Description of Artificial Sequence: Synthetic oligonucleotide
ccucuaacaauuuugcugc

SEQ ID NO: 987575 - RNA, 19 nt, Artificial Sequence
  Description of Artificial Sequence: Synthetic oligonucleotide
guagguguggauuauaaua

SEQ ID NO: 987576 - RNA, 19 nt, Artificial Sequence
  Description of Artificial Sequence: Synthetic oligonucleotide
agaggaaauacaugauucu

SEQ ID NO: 987577 - RNA, 19 nt, Artificial Sequence
  Description of Artificial Sequence: Synthetic oligonucleotide
cgaauaauggaauacacug

SEQ ID NO: 987578 - RNA, 19 nt, Artificial Sequence
  Description of Artificial Sequence: Synthetic oligonucleotide
acuguuacauaguuaugca

SEQ ID NO: 987579 - RNA, 19 nt, Artificial Sequence
  Description of Artificial Sequence: Synthetic oligonucleotide
ugagucaaagccugauacc

SEQ ID NO: 987580 - RNA, 19 nt, Artificial Sequence
  Description of Artificial Sequence: Synthetic oligonucleotide
acacugaucgaugccacgc

SEQ ID NO: 987581 - RNA, 19 nt, Artificial Sequence
  Description of Artificial Sequence: Synthetic oligonucleotide
uuuacaggcauuucucgau

SEQ ID NO: 987582 - RNA, 19 nt, Artificial Sequence
  Description of Artificial Sequence: Synthetic oligonucleotide
cuugauugcugaucaacac

SEQ ID NO: 987583 - RNA, 19 nt, Artificial Sequence
  Description of Artificial Sequence: Synthetic oligonucleotide
gagugauguauucuuuagc

SEQ ID NO: 987584 - RNA, 19 nt, Artificial Sequence
  Description of Artificial Sequence: Synthetic oligonucleotide
agccugauaccauacagga

SEQ ID NO: 987585 - RNA, 19 nt, Artificial Sequence
  Description of Artificial Sequence: Synthetic oligonucleotide
gauuguggaauagccuucg

SEQ ID NO: 987586 - RNA, 19 nt, Artificial Sequence
  Description of Artificial Sequence: Synthetic oligonucleotide
uguagccuagcucacugcu

SEQ ID NO: 987587 - RNA, 19 nt, Artificial Sequence
  Description of Artificial Sequence: Synthetic oligonucleotide
gacuaugugccaaagagaa

SEQ ID NO: 987588 - RNA, 19 nt, Artificial Sequence
  Description of Artificial Sequence: Synthetic oligonucleotide
cacgaauaauggaauacac

SEQ ID NO: 987589 - RNA, 19 nt, Artificial Sequence
  Description of Artificial Sequence: Synthetic oligonucleotide
ucauuaagaccaugaguca

SEQ ID NO: 987590 - RNA, 19 nt, Artificial Sequence
  Description of Artificial Sequence: Synthetic oligonucleotide
gaauacacugaucgaugcc

SEQ ID NO: 987591 - RNA, 19 nt, Artificial Sequence
  Description of Artificial Sequence: Synthetic oligonucleotide
guauaucaucucaagauac

SEQ ID NO: 987592 - RNA, 19 nt, Artificial Sequence
  Description of Artificial Sequence: Synthetic oligonucleotide
gaggaaauacaugauucug

SEQ ID NO: 987593 - RNA, 19 nt, Artificial Sequence
  Description of Artificial Sequence: Synthetic oligonucleotide
ucgcagaucauuuucugaa

SEQ ID NO: 987594 - RNA, 19 nt, Artificial Sequence
  Description of Artificial Sequence: Synthetic oligonucleotide
ugcugaaauaccucaaaua

SEQ ID NO: 987595 - RNA, 19 nt, Artificial Sequence
  Description of Artificial Sequence: Synthetic oligonucleotide
gaugccacgcccuuugcac

SEQ ID NO: 987596 - RNA, 19 nt, Artificial Sequence
  Description of Artificial Sequence: Synthetic oligonucleotide
uaaauguaauugccagaug

SEQ ID NO: 987597 - RNA, 19 nt, Artificial Sequence
  Description of Artificial Sequence: Synthetic oligonucleotide
guauuaagaaguaggugug

SEQ ID NO: 987598 - RNA, 19 nt, Artificial Sequence
  Description of Artificial Sequence: Synthetic oligonucleotide
uggaauagccuucgagagc

SEQ ID NO: 987599 - RNA, 19 nt, Artificial Sequence
  Description of Artificial Sequence: Synthetic oligonucleotide
uguggagacacuuguugac

SEQ ID NO: 987600 - RNA, 19 nt, Artificial Sequence
  Description of Artificial Sequence: Synthetic oligonucleotide
uuugaucagcgagaguugc

SEQ ID NO: 987601 - RNA, 19 nt, Artificial Sequence
  Description of Artificial Sequence: Synthetic oligonucleotide
uacgucauuaagccauuga

SEQ ID NO: 987602 - RNA, 19 nt, Artificial Sequence
  Description of Artificial Sequence: Synthetic oligonucleotide
uuguucgaaguucacuggu

SEQ ID NO: 987603 - RNA, 19 nt, Artificial Sequence
  Description of Artificial Sequence: Synthetic oligonucleotide
gagcgcugaauuuguaucc

SEQ ID NO: 987604 - RNA, 19 nt, Artificial Sequence
  Description of Artificial Sequence: Synthetic oligonucleotide
uuauuagggaagcguagau

SEQ ID NO: 987605 - RNA, 19 nt, Artificial Sequence
  Description of Artificial Sequence: Synthetic oligonucleotide
guuaaauguaauugccaga

SEQ ID NO: 987606 - RNA, 19 nt, Artificial Sequence
  Description of Artificial Sequence: Synthetic oligonucleotide
uccacgaauaauggaauac

SEQ ID NO: 987607 - RNA, 19 nt, Artificial Sequence
  Description of Artificial Sequence: Synthetic oligonucleotide
aaacagucuacgucauuaa

SEQ ID NO: 987608 - RNA, 19 nt, Artificial Sequence
  Description of Artificial Sequence: Synthetic oligonucleotide
augaccucuaacaauuuug

SEQ ID NO: 987609 - RNA, 19 nt, Artificial Sequence
  Description of Artificial Sequence: Synthetic oligonucleotide
uguuguaaaacggucccaa

SEQ ID NO: 987610 - RNA, 19 nt, Artificial Sequence
  Description of Artificial Sequence: Synthetic oligonucleotide
gaucuucaaccacacucag

SEQ ID NO: 987611 - RNA, 19 nt, Artificial Sequence
  Description of Artificial Sequence: Synthetic oligonucleotide
guugacaugucagacuaug

SEQ ID NO: 987612 - RNA, 19 nt, Artificial Sequence
  Description of Artificial Sequence: Synthetic oligonucleotide
cucuuauaauaugaagaag

SEQ ID NO: 987613 - RNA, 19 nt, Artificial Sequence
  Description of Artificial Sequence: Synthetic oligonucleotide
auuaagaaguaggugugga

SEQ ID NO: 987614 - RNA, 19 nt, Artificial Sequence
  Description of Artificial Sequence: Synthetic oligonucleotide
uuaagaaguagguguggau

SEQ ID NO: 987615 - RNA, 19 nt, Artificial Sequence
  Description of Artificial Sequence: Synthetic oligonucleotide
aagauacuugguaucagau

SEQ ID NO: 987616 - RNA, 19 nt, Artificial Sequence
  Description of Artificial Sequence: Synthetic oligonucleotide
gaacuuggcacaacuggag

SEQ ID NO: 987617 - RNA, 19 nt, Artificial Sequence
  Description of Artificial Sequence: Synthetic oligonucleotide
ggaaauacaugauucugca

SEQ ID NO: 987618 - RNA, 19 nt, Artificial Sequence
  Description of Artificial Sequence: Synthetic oligonucleotide
aaauauuccugcccaucuu

SEQ ID NO: 987619 - RNA, 19 nt, Artificial Sequence
  Description of Artificial Sequence: Synthetic oligonucleotide
acaugcuguuguaaaacgg

SEQ ID NO: 987620 - RNA, 19 nt, Artificial Sequence
  Description of Artificial Sequence: Synthetic oligonucleotide
uuaaccucccucgucaguc

SEQ ID NO: 987621 - RNA, 19 nt, Artificial Sequence
  Description of Artificial Sequence: Synthetic oligonucleotide
augcagaagaggcaucaug

SEQ ID NO: 987622 - RNA, 19 nt, Artificial Sequence
  Description of Artificial Sequence: Synthetic oligonucleotide
ucaauucaucccuggugcc

SEQ ID NO: 987623 - RNA, 19 nt, Artificial Sequence
  Description of Artificial Sequence: Synthetic oligonucleotide
auaugcucuuuucaaucca

SEQ ID NO: 987624 - RNA, 19 nt, Artificial Sequence
  Description of Artificial Sequence: Synthetic oligonucleotide
ugauuguggaauagccuuc

SEQ ID NO: 987625 - RNA, 19 nt, Artificial Sequence
  Description of Artificial Sequence: Synthetic oligonucleotide
ucaagauacuugguaucag

SEQ ID NO: 987626 - RNA, 19 nt, Artificial Sequence
  Description of Artificial Sequence: Synthetic oligonucleotide
caauuguauuuuagaauuc

SEQ ID NO: 987627 - RNA, 19 nt, Artificial Sequence
  Description of Artificial Sequence: Synthetic oligonucleotide
agucugaauuacuugguua

SEQ ID NO: 987628 - RNA, 19 nt, Artificial Sequence
  Description of Artificial Sequence: Synthetic oligonucleotide
gacuuguaagcagauuccc

SEQ ID NO: 987629 - RNA, 19 nt, Artificial Sequence
  Description of Artificial Sequence: Synthetic oligonucleotide
uuacuugguuaaauguaau

SEQ ID NO: 987630 - RNA, 19 nt, Artificial Sequence
  Description of Artificial Sequence: Synthetic oligonucleotide
cuguauaucaucucaagau

SEQ ID NO: 987631 - RNA, 19 nt, Artificial Sequence
  Description of Artificial Sequence: Synthetic oligonucleotide
auguaauugccagaugcug

SEQ ID NO: 987632 - RNA, 19 nt, Artificial Sequence
  Description of Artificial Sequence: Synthetic oligonucleotide
uguucgaaguucacugguc

SEQ ID NO: 987633 - RNA, 19 nt, Artificial Sequence
  Description of Artificial Sequence: Synthetic oligonucleotide
uccugcaacuccaguaaga

SEQ ID NO: 987634 - RNA, 19 nt, Artificial Sequence
  Description of Artificial Sequence: Synthetic oligonucleotide
ggaauacacugaucgaugc

SEQ ID NO: 987635 - RNA, 19 nt, Artificial Sequence
  Description of Artificial Sequence: Synthetic oligonucleotide
cacucuugaacuucacuuc

SEQ ID NO: 987636 - RNA, 19 nt, Artificial Sequence
  Description of Artificial Sequence: Synthetic oligonucleotide
cauaucaauaagggcacac

SEQ ID NO: 987637 - RNA, 19 nt, Artificial Sequence
  Description of Artificial Sequence: Synthetic oligonucleotide
uaagaccaugagucaaagc

SEQ ID NO: 987638 - RNA, 19 nt, Artificial Sequence
  Description of Artificial Sequence: Synthetic oligonucleotide
gccauugagugauaaaaug

SEQ ID NO: 987639 - RNA, 19 nt, Artificial Sequence
  Description of Artificial Sequence: Synthetic oligonucleotide
auggaauacacugaucgau

SEQ ID NO: 987640 - RNA, 19 nt, Artificial Sequence
  Description of Artificial Sequence: Synthetic oligonucleotide
auaauaugaagaagagccu

SEQ ID NO: 987641 - RNA, 19 nt, Artificial Sequence
  Description of Artificial Sequence: Synthetic oligonucleotide
agguauuaagaaguaggug

SEQ ID NO: 987642 - RNA, 19 nt, Artificial Sequence
  Description of Artificial Sequence: Synthetic oligonucleotide
uucaaucauuuuagauuca

SEQ ID NO: 987643 - RNA, 19 nt, Artificial Sequence
  Description of Artificial Sequence: Synthetic oligonucleotide
gucuuaaccucccucguca

SEQ ID NO: 987644 - RNA, 19 nt, Artificial Sequence
  Description of Artificial Sequence: Synthetic oligonucleotide
guugcuauguccugcaacu

SEQ ID NO: 987645 - RNA, 19 nt, Artificial Sequence
  Description of Artificial Sequence: Synthetic oligonucleotide
cugauuuaaaaccuguggu

SEQ ID NO: 987646 - RNA, 19 nt, Artificial Sequence
  Description of Artificial Sequence: Synthetic oligonucleotide
uuacaggcauuucucgauc

SEQ ID NO: 987647 - RNA, 19 nt, Artificial Sequence
  Description of Artificial Sequence: Synthetic oligonucleotide
auaucaauaagggcacaca

SEQ ID NO: 987648 - RNA, 19 nt, Artificial Sequence
  Description of Artificial Sequence: Synthetic oligonucleotide
gauuuaaaaccugugguau

SEQ ID NO: 987649 - RNA, 19 nt, Artificial Sequence
  Description of Artificial Sequence: Synthetic oligonucleotide
ucuuaaccucccucgucag

SEQ ID NO: 987650 - RNA, 19 nt, Artificial Sequence
  Description of Artificial Sequence: Synthetic oligonucleotide
ucagcgagaguugcuaugu

SEQ ID NO: 987651 - RNA, 19 nt, Artificial Sequence
  Description of Artificial Sequence: Synthetic oligonucleotide
agaagugugucaauuguau

SEQ ID NO: 987652 - RNA, 19 nt, Artificial Sequence
  Description of Artificial Sequence: Synthetic oligonucleotide
augaugaccucuaacaauu

SEQ ID NO: 987653 - RNA, 19 nt, Artificial Sequence
  Description of Artificial Sequence: Synthetic oligonucleotide
aguaaccucuucuacuaua

SEQ ID NO: 987654 - RNA, 19 nt, Artificial Sequence
  Description of Artificial Sequence: Synthetic oligonucleotide
acuugcaggcacauuguuc

SEQ ID NO: 987655 - RNA, 19 nt, Artificial Sequence
  Description of Artificial Sequence: Synthetic oligonucleotide
caagauacuugguaucaga

SEQ ID NO: 987656 - RNA, 19 nt, Artificial Sequence
  Description of Artificial Sequence: Synthetic oligonucleotide
uaagggcacacaagccgag

SEQ ID NO: 987657 - RNA, 19 nt, Artificial Sequence
  Description of Artificial Sequence: Synthetic oligonucleotide
cagcucuaaagcuguuugg

SEQ ID NO: 987658 - RNA, 19 nt, Artificial Sequence
  Description of Artificial Sequence: Synthetic oligonucleotide
guaaaacggucccaaugac

SEQ ID NO: 987659 - RNA, 19 nt, Artificial Sequence
  Description of Artificial Sequence: Synthetic oligonucleotide
caauucaucccuggugccg

SEQ ID NO: 987660 - RNA, 19 nt, Artificial Sequence
  Description of Artificial Sequence: Synthetic oligonucleotide
agcggugacugcuuuguca

SEQ ID NO: 987661 - RNA, 19 nt, Artificial Sequence
  Description of Artificial Sequence: Synthetic oligonucleotide
aggcauaugcucuuuucaa

SEQ ID NO: 987662 - RNA, 19 nt, Artificial Sequence
  Description of Artificial Sequence: Synthetic oligonucleotide
aaguagguguggauuauaa

SEQ ID NO: 987663 - RNA, 19 nt, Artificial Sequence
  Description of Artificial Sequence: Synthetic oligonucleotide
aucagcgagaguugcuaug

SEQ ID NO: 987664 - RNA, 19 nt, Artificial Sequence
  Description of Artificial Sequence: Synthetic oligonucleotide
aaccucccucgucagucuc

SEQ ID NO: 987665 - RNA, 19 nt, Artificial Sequence
  Description of Artificial Sequence: Synthetic oligonucleotide
agguguggauuauaauaca

SEQ ID NO: 987666 - RNA, 19 nt, Artificial Sequence
  Description of Artificial Sequence: Synthetic oligonucleotide
ggaauagccuucgagagca

SEQ ID NO: 987667 - RNA, 19 nt, Artificial Sequence
  Description of Artificial Sequence: Synthetic oligonucleotide
aguagguguggauuauaau

SEQ ID NO: 987668 - RNA, 19 nt, Artificial Sequence
  Description of Artificial Sequence: Synthetic oligonucleotide
aaagcuguuuggagguucu

SEQ ID NO: 987669 - RNA, 19 nt, Artificial Sequence
  Description of Artificial Sequence: Synthetic oligonucleotide
aggcauuucucgaucauca

SEQ ID NO: 987670 - RNA, 19 nt, Artificial Sequence
  Description of Artificial Sequence: Synthetic oligonucleotide
uaacugccacaucugugga

SEQ ID NO: 987671 - RNA, 19 nt, Artificial Sequence
  Description of Artificial Sequence: Synthetic oligonucleotide
cauugagugauaaaaugau

SEQ ID NO: 987672 - RNA, 19 nt, Artificial Sequence
  Description of Artificial Sequence: Synthetic oligonucleotide
acauuauuagggaagcgua

SEQ ID NO: 987673 - RNA, 19 nt, Artificial Sequence
  Description of Artificial Sequence: Synthetic oligonucleotide
uauuagggaagcguagauu

SEQ ID NO: 987674 - RNA, 19 nt, Artificial Sequence
  Description of Artificial Sequence: Synthetic oligonucleotide
aucaaucagacaucuucuu

SEQ ID NO: 987675 - RNA, 19 nt, Artificial Sequence
  Description of Artificial Sequence: Synthetic oligonucleotide
ucuacagcaaugggaguaa

SEQ ID NO: 987676 - RNA, 19 nt, Artificial Sequence
  Description of Artificial Sequence: Synthetic oligonucleotide
aacuugcaggcacauuguu

SEQ ID NO: 987677 - RNA, 19 nt, Artificial Sequence
  Description of Artificial Sequence: Synthetic oligonucleotide
auagcggugacugcuuugu

SEQ ID NO: 987678 - RNA, 19 nt, Artificial Sequence
  Description of Artificial Sequence: Synthetic oligonucleotide
aaugacuuguaagcagauu

SEQ ID NO: 987679 - RNA, 19 nt, Artificial Sequence
  Description of Artificial Sequence: Synthetic oligonucleotide
uggagcgcugaauuuguau

SEQ ID NO: 987680 - RNA, 19 nt, Artificial Sequence
  Description of Artificial Sequence: Synthetic oligonucleotide
gcauaugcucuuuucaauc

SEQ ID NO: 987681 - RNA, 19 nt, Artificial Sequence
  Description of Artificial Sequence: Synthetic oligonucleotide
ugaucagcgagaguugcua

SEQ ID NO: 987682 - RNA, 19 nt, Artificial Sequence
  Description of Artificial Sequence: Synthetic oligonucleotide
ccauugagugauaaaauga

SEQ ID NO: 987683 - RNA, 19 nt, Artificial Sequence
  Description of Artificial Sequence: Synthetic oligonucleotide
caucugaucuuuguagauc

SEQ ID NO: 987684 - RNA, 19 nt, Artificial Sequence
  Description of Artificial Sequence: Synthetic oligonucleotide
cucaagauacuugguauca

SEQ ID NO: 987685 - RNA, 19 nt, Artificial Sequence
  Description of Artificial Sequence: Synthetic oligonucleotide
uaacugguucaacauuauu

SEQ ID NO: 987686 - RNA, 19 nt, Artificial Sequence
  Description of Artificial Sequence: Synthetic oligonucleotide
uggucuuaaccucccucgu

SEQ ID NO: 987687 - RNA, 19 nt, Artificial Sequence
  Description of Artificial Sequence: Synthetic oligonucleotide
ggauuacgauuuugaauag

SEQ ID NO: 987688 - RNA, 19 nt, Artificial Sequence
  Description of Artificial Sequence: Synthetic oligonucleotide
gcucuaaagcuguuuggag

SEQ ID NO: 987689 - RNA, 19 nt, Artificial Sequence
  Description of Artificial Sequence: Synthetic oligonucleotide
ucugaauuacuugguuaaa

SEQ ID NO: 987690 - RNA, 19 nt, Artificial Sequence
  Description of Artificial Sequence: Synthetic oligonucleotide
uccugcaacuguuuucuuu

SEQ ID NO: 987691 - RNA, 19 nt, Artificial Sequence
  Description of Artificial Sequence: Synthetic oligonucleotide
agacuaugugccaaagaga

SEQ ID NO: 987692 - RNA, 19 nt, Artificial Sequence
  Description of Artificial Sequence: Synthetic oligonucleotide
uuccacgaauaauggaaua

SEQ ID NO: 987693 - RNA, 19 nt, Artificial Sequence
  Description of Artificial Sequence: Synthetic oligonucleotide
ggagcgcugaauuuguauc

SEQ ID NO: 987694 - RNA, 19 nt, Artificial Sequence
  Description of Artificial Sequence: Synthetic oligonucleotide
agucuacgucauuaagcca

SEQ ID NO: 987695 - RNA, 19 nt, Artificial Sequence
  Description of Artificial Sequence: Synthetic oligonucleotide
caucucaagauacuuggua

SEQ ID NO: 987696 - RNA, 19 nt, Artificial Sequence
  Description of Artificial Sequence: Synthetic oligonucleotide
gauugcugaucaacacuug

SEQ ID NO: 987697 - RNA, 19 nt, Artificial Sequence
  Description of Artificial Sequence: Synthetic oligonucleotide
ucgaaguucacuggucuua

SEQ ID NO: 987698 - RNA, 19 nt, Artificial Sequence
  Description of Artificial Sequence: Synthetic oligonucleotide
cuggguuaucucuuuguga

SEQ ID NO: 987699 - RNA, 19 nt, Artificial Sequence
  Description of Artificial Sequence: Synthetic oligonucleotide
agccuucgagagcagucuc

SEQ ID NO: 987700 - RNA, 19 nt, Artificial Sequence
  Description of Artificial Sequence: Synthetic oligonucleotide
ucccucgucagucucucua

SEQ ID NO: 987701 - RNA, 19 nt, Artificial Sequence
  Description of Artificial Sequence: Synthetic oligonucleotide
acuuguaagcagauucccu

SEQ ID NO: 987702 - RNA, 19 nt, Artificial Sequence
  Description of Artificial Sequence: Synthetic oligonucleotide
ggccuccaaaauuaaauga

SEQ ID NO: 987703 - RNA, 19 nt, Artificial Sequence
  Description of Artificial Sequence: Synthetic oligonucleotide
cacugaucgaugccacgcc

SEQ ID NO: 987704 - RNA, 19 nt, Artificial Sequence
  Description of Artificial Sequence: Synthetic oligonucleotide
cugaucacucuugaacuuc

SEQ ID NO: 987705 - RNA, 19 nt, Artificial Sequence
  Description of Artificial Sequence: Synthetic oligonucleotide
cacauuguucgaaguucac

SEQ ID NO: 987706 - RNA, 19 nt, Artificial Sequence
  Description of Artificial Sequence: Synthetic oligonucleotide
cucauguagccuagcucac

SEQ ID NO: 987707 - RNA, 19 nt, Artificial Sequence
  Description of Artificial Sequence: Synthetic oligonucleotide
cauuaagaccaugagucaa

SEQ ID NO: 987708 - RNA, 19 nt, Artificial Sequence
  Description of Artificial Sequence: Synthetic oligonucleotide
ucuacgucauuaagccauu

SEQ ID NO: 987709 - RNA, 19 nt, Artificial Sequence
  Description of Artificial Sequence: Synthetic oligonucleotide
auacuguauaucaucucaa

SEQ ID NO: 987710 - RNA, 19 nt, Artificial Sequence
  Description of Artificial Sequence: Synthetic oligonucleotide
cuauauucgcagaucauuu

SEQ ID NO: 987711 - RNA, 19 nt, Artificial Sequence
  Description of Artificial Sequence: Synthetic oligonucleotide
ccaggaaacagucuacguc

SEQ ID NO: 987712 - RNA, 19 nt, Artificial Sequence
  Description of Artificial Sequence: Synthetic oligonucleotide
gcuggguuaucucuuugug

SEQ ID NO: 987713 - RNA, 19 nt, Artificial Sequence
  Description of Artificial Sequence: Synthetic oligonucleotide
uagccuucgagagcagucu

SEQ ID NO: 987714 - RNA, 19 nt, Artificial Sequence
  Description of Artificial Sequence: Synthetic oligonucleotide
acuaugugccaaagagaag

SEQ ID NO: 987715 - RNA, 19 nt, Artificial Sequence
  Description of Artificial Sequence: Synthetic oligonucleotide
gucucucuaaagccgcuuc

SEQ ID NO: 987716 - RNA, 19 nt, Artificial Sequence
  Description of Artificial Sequence: Synthetic oligonucleotide
gcuuccacgaauaauggaa

SEQ ID NO: 987717 - RNA, 19 nt, Artificial Sequence
  Description of Artificial Sequence: Synthetic oligonucleotide
ugaugaccucuaacaauuu

SEQ ID NO: 987718 - RNA, 19 nt, Artificial Sequence
  Description of Artificial Sequence: Synthetic oligonucleotide
auucaucccuggugccggg

SEQ ID NO: 987719 - RNA, 19 nt, Artificial Sequence
  Description of Artificial Sequence: Synthetic oligonucleotide
cuucuacuauauucgcaga

SEQ ID NO: 987720 - RNA, 19 nt, Artificial Sequence
  Description of Artificial Sequence: Synthetic oligonucleotide
auacaugauucugcaacau

SEQ ID NO: 987721 - RNA, 19 nt, Artificial Sequence
  Description of Artificial Sequence: Synthetic oligonucleotide
gucuacgucauuaagccau

SEQ ID NO: 987722 - RNA, 19 nt, Artificial Sequence
  Description of Artificial Sequence: Synthetic oligonucleotide
cgucagucucucuaaagcc

SEQ ID NO: 987723 - RNA, 19 nt, Artificial Sequence
  Description of Artificial Sequence: Synthetic oligonucleotide
ugaucgaugccacgcccuu

SEQ ID NO: 987724 - RNA, 19 nt, Artificial Sequence
  Description of Artificial Sequence: Synthetic oligonucleotide
ugguaucagauaggagugu

SEQ ID NO: 987725 - RNA, 19 nt, Artificial Sequence
  Description of Artificial Sequence: Synthetic oligonucleotide
gguuaucucuuugugaucu

SEQ ID NO: 987726 - RNA, 19 nt, Artificial Sequence
  Description of Artificial Sequence: Synthetic oligonucleotide
ggcacauuguucgaaguuc

SEQ ID NO: 987727 - RNA, 19 nt, Artificial Sequence
  Description of Artificial Sequence: Synthetic oligonucleotide
ugauaccauacaggauuac

SEQ ID NO: 987728 - RNA, 19 nt, Artificial Sequence
  Description of Artificial Sequence: Synthetic oligonucleotide
caauuuugcugcauggcau

SEQ ID NO: 987729 - RNA, 19 nt, Artificial Sequence
  Description of Artificial Sequence: Synthetic oligonucleotide
cuccugcaacuccaguaag

SEQ ID NO: 987730 - RNA, 19 nt, Artificial Sequence
  Description of Artificial Sequence: Synthetic oligonucleotide
gauuacgauuuugaauagu

SEQ ID NO: 987731 - RNA, 19 nt, Artificial Sequence
  Description of Artificial Sequence: Synthetic oligonucleotide
agcgcugaauuuguauccu

SEQ ID NO: 987732 - RNA, 19 nt, Artificial Sequence
  Description of Artificial Sequence: Synthetic oligonucleotide
guaucuguaucaacuguua

SEQ ID NO: 987733 - RNA, 19 nt, Artificial Sequence
  Description of Artificial Sequence: Synthetic oligonucleotide
ucccucaagcugcuggguu

SEQ ID NO: 987734 - RNA, 19 nt, Artificial Sequence
  Description of Artificial Sequence: Synthetic oligonucleotide
ugcaggcacauuguucgaa

SEQ ID NO: 987735 - RNA, 19 nt, Artificial Sequence
  Description of Artificial Sequence: Synthetic oligonucleotide
acuggagcgcugaauuugu

SEQ ID NO: 987736 - RNA, 19 nt, Artificial Sequence
  Description of Artificial Sequence: Synthetic oligonucleotide
agaaguagguguggauuau

SEQ ID NO: 987737 - RNA, 19 nt, Artificial Sequence
  Description of Artificial Sequence: Synthetic oligonucleotide
ggucugauaaauggaguga

SEQ ID NO: 987738 - RNA, 19 nt, Artificial Sequence
  Description of Artificial Sequence: Synthetic oligonucleotide
aucaacuguuacauaguua

SEQ ID NO: 987739 - RNA, 19 nt, Artificial Sequence
  Description of Artificial Sequence: Synthetic oligonucleotide
guggagacacuuguugaca

SEQ ID NO: 987740 - RNA, 19 nt, Artificial Sequence
  Description of Artificial Sequence: Synthetic oligonucleotide
guagccuagcucacugcug

SEQ ID NO: 987741 - RNA, 19 nt, Artificial Sequence
  Description of Artificial Sequence: Synthetic oligonucleotide
aguuugaaauauagcuuua

SEQ ID NO: 987742 - RNA, 19 nt, Artificial Sequence
  Description of Artificial Sequence: Synthetic oligonucleotide
ucgaugccacgcccuuugc

SEQ ID NO: 987743 - RNA, 19 nt, Artificial Sequence
  Description of Artificial Sequence: Synthetic oligonucleotide
gaagugugucaauuguauu

SEQ ID NO: 987744 - RNA, 19 nt, Artificial Sequence
  Description of Artificial Sequence: Synthetic oligonucleotide
ccugauaccauacaggauu

SEQ ID NO: 987745 - RNA, 19 nt, Artificial Sequence
  Description of Artificial Sequence: Synthetic oligonucleotide
cuaagacaugcuguuguaa

SEQ ID NO: 987746 - RNA, 19 nt, Artificial Sequence
  Description of Artificial Sequence: Synthetic oligonucleotide
aucuucaaccacacucaga

SEQ ID NO: 987747 - RNA, 19 nt, Artificial Sequence
  Description of Artificial Sequence: Synthetic oligonucleotide
cuuccacgaauaauggaau

SEQ ID NO: 987748 - RNA, 19 nt, Artificial Sequence
  Description of Artificial Sequence: Synthetic oligonucleotide
agcaagcucuugcucucau

SEQ ID NO: 987749 - RNA, 19 nt, Artificial Sequence
  Description of Artificial Sequence: Synthetic oligonucleotide
gcguagauuuucuaaggua

SEQ ID NO: 987750 - RNA, 19 nt, Artificial Sequence
  Description of Artificial Sequence: Synthetic oligonucleotide
cacuugcagugcaauggca

SEQ ID NO: 987751 - RNA, 19 nt, Artificial Sequence
  Description of Artificial Sequence: Synthetic oligonucleotide
ggucuuaaccucccucguc

SEQ ID NO: 987752 - RNA, 19 nt, Artificial Sequence
  Description of Artificial Sequence: Synthetic oligonucleotide
cacgcccuuugcacuguag

SEQ ID NO: 987753 - RNA, 19 nt, Artificial Sequence
  Description of Artificial Sequence: Synthetic oligonucleotide
gcugcaauugcaacuugca

SEQ ID NO: 987754 - RNA, 19 nt, Artificial Sequence
  Description of Artificial Sequence: Synthetic oligonucleotide
cuacgucauuaagccauug

SEQ ID NO: 987755 - RNA, 19 nt, Artificial Sequence
  Description of Artificial Sequence: Synthetic oligonucleotide
guccugaaaccugauuuaa

SEQ ID NO: 987756 - RNA, 19 nt, Artificial Sequence
  Description of Artificial Sequence: Synthetic oligonucleotide
gaauagccuucgagagcag

SEQ ID NO: 987757 - RNA, 19 nt, Artificial Sequence
  Description of Artificial Sequence: Synthetic oligonucleotide
gugugucaauuguauuuua

SEQ ID NO: 987758 - RNA, 19 nt, Artificial Sequence
  Description of Artificial Sequence: Synthetic oligonucleotide
gaucagcgagaguugcuau

SEQ ID NO: 987759 - RNA, 19 nt, Artificial Sequence
  Description of Artificial Sequence: Synthetic oligonucleotide
gcacauuguucgaaguuca

SEQ ID NO: 987760 - RNA, 19 nt, Artificial Sequence
  Description of Artificial Sequence: Synthetic oligonucleotide
cugaauuuguauccuccau

SEQ ID NO: 987761 - RNA, 19 nt, Artificial Sequence
  Description of Artificial Sequence: Synthetic oligonucleotide
cguagauuuucuaagguau

SEQ ID NO: 987762 - RNA, 19 nt, Artificial Sequence
  Description of Artificial Sequence: Synthetic oligonucleotide
guuguaaaacggucccaau

SEQ ID NO: 987763 - RNA, 19 nt, Artificial Sequence
  Description of Artificial Sequence: Synthetic oligonucleotide
uagcggugacugcuuuguc

SEQ ID NO: 987764 - RNA, 19 nt, Artificial Sequence
  Description of Artificial Sequence: Synthetic oligonucleotide
ccacgaauaauggaauaca

SEQ ID NO: 987765 - RNA, 19 nt, Artificial Sequence
  Description of Artificial Sequence: Synthetic oligonucleotide
cuguuguaaaacgguccca

SEQ ID NO: 987766 - RNA, 19 nt, Artificial Sequence
  Description of Artificial Sequence: Synthetic oligonucleotide
gaguugcuauguccugcaa

SEQ ID NO: 987767 - RNA, 19 nt, Artificial Sequence
  Description of Artificial Sequence: Synthetic oligonucleotide
ggguuaucucuuugugauc

SEQ ID NO: 987768 - RNA, 19 nt, Artificial Sequence
  Description of Artificial Sequence: Synthetic oligonucleotide
cugaucgaugccacgcccu

SEQ ID NO: 987769 - RNA, 19 nt, Artificial Sequence
  Description of Artificial Sequence: Synthetic oligonucleotide
gaguaaccucuucuacuau

SEQ ID NO: 987770 - RNA, 19 nt, Artificial Sequence
  Description of Artificial Sequence: Synthetic oligonucleotide
agccgcuuccacgaauaau

SEQ ID NO: 987771 - RNA, 19 nt, Artificial Sequence
  Description of Artificial Sequence: Synthetic oligonucleotide
cagcgagaguugcuauguc

SEQ ID NO: 987772 - RNA, 19 nt, Artificial Sequence
  Description of Artificial Sequence: Synthetic oligonucleotide
ugcaacuugcaggcacauu

SEQ ID NO: 987773 - RNA, 19 nt, Artificial Sequence
  Description of Artificial Sequence: Synthetic oligonucleotide
ggcacaacuggagcgcuga

SEQ ID NO: 987774 - RNA, 19 nt, Artificial Sequence
  Description of Artificial Sequence: Synthetic oligonucleotide
cuaaagccgcuuccacgaa

SEQ ID NO: 987775 - RNA, 19 nt, Artificial Sequence
  Description of Artificial Sequence: Synthetic oligonucleotide
cuuaaccucccucgucagu

SEQ ID NO: 987776 - RNA, 19 nt, Artificial Sequence
  Description of Artificial Sequence: Synthetic oligonucleotide
agauucccucaagcugcug

SEQ ID NO: 987777 - RNA, 19 nt, Artificial Sequence
  Description of Artificial Sequence: Synthetic oligonucleotide
gcgagaguugcuauguccu

SEQ ID NO: 987778 - RNA, 19 nt, Artificial Sequence
  Description of Artificial Sequence: Synthetic oligonucleotide
gcgcugaauuuguauccuc

SEQ ID NO: 987779 - RNA, 19 nt, Artificial Sequence
  Description of Artificial Sequence: Synthetic oligonucleotide
caauugcaacuugcaggca

SEQ ID NO: 987780 - RNA, 19 nt, Artificial Sequence
  Description of Artificial Sequence: Synthetic oligonucleotide
gcauuacaggucugauaaa

SEQ ID NO: 987781 - RNA, 19 nt, Artificial Sequence
  Description of Artificial Sequence: Synthetic oligonucleotide
cgauuuugaauaguuugaa

SEQ ID NO: 987782 - RNA, 19 nt, Artificial Sequence
  Description of Artificial Sequence: Synthetic oligonucleotide
gccugcauuacaggucuga

SEQ ID NO: 987783 - RNA, 19 nt, Artificial Sequence
  Description of Artificial Sequence: Synthetic oligonucleotide
ggggcaguaacugccacau

SEQ ID NO: 987784 - RNA, 19 nt, Artificial Sequence
  Description of Artificial Sequence: Synthetic oligonucleotide
cuggagcgcugaauuugua

SEQ ID NO: 987785 - RNA, 19 nt, Artificial Sequence
  Description of Artificial Sequence: Synthetic oligonucleotide
gcuauguccugcaacuguu

SEQ ID NO: 987786 - RNA, 19 nt, Artificial Sequence
  Description of Artificial Sequence: Synthetic oligonucleotide
cuggugccgggccuccaaa

SEQ ID NO: 987787 - RNA, 19 nt, Artificial Sequence
  Description of Artificial Sequence: Synthetic oligonucleotide
ccaucugaucuuuguagau

SEQ ID NO: 987788 - RNA, 19 nt, Artificial Sequence
  Description of Artificial Sequence: Synthetic oligonucleotide
cccucaagcugcuggguua

SEQ ID NO: 987789 - RNA, 19 nt, Artificial Sequence
  Description of Artificial Sequence: Synthetic oligonucleotide
gaucgaugccacgcccuuu

SEQ ID NO: 987790 - RNA, 19 nt, Artificial Sequence
  Description of Artificial Sequence: Synthetic oligonucleotide
caucuggcccagucugaau

SEQ ID NO: 987791 - RNA, 19 nt, Artificial Sequence
  Description of Artificial Sequence: Synthetic oligonucleotide
gggcaguaacugccacauc

SEQ ID NO: 987792 - RNA, 19 nt, Artificial Sequence
  Description of Artificial Sequence: Synthetic oligonucleotide
ccauaucaauaagggcaca

SEQ ID NO: 987793 - RNA, 19 nt, Artificial Sequence
  Description of Artificial Sequence: Synthetic oligonucleotide
cgcccuuugcacuguagaa

SEQ ID NO: 987794 - RNA, 19 nt, Artificial Sequence
  Description of Artificial Sequence: Synthetic oligonucleotide
ccucgucagucucucuaaa

SEQ ID NO: 987795 - RNA, 19 nt, Artificial Sequence
  Description of Artificial Sequence: Synthetic oligonucleotide
gccugauaccauacaggau

SEQ ID NO: 987796 - RNA, 19 nt, Artificial Sequence
  Description of Artificial Sequence: Synthetic oligonucleotide
cggugacugcuuugucauc

SEQ ID NO: 987797 - RNA, 19 nt, Artificial Sequence
  Description of Artificial Sequence: Synthetic oligonucleotide
ccuggugccgggccuccaa

SEQ ID NO: 987798 - RNA, 19 nt, Artificial Sequence
  Description of Artificial Sequence: Synthetic oligonucleotide
ccucaagcugcuggguuau

SEQ ID NO: 987799 - RNA, 19 nt, Artificial Sequence
  Description of Artificial Sequence: Synthetic oligonucleotide
aauugaacuuaauagagag

SEQ ID NO: 987800 - RNA, 19 nt, Artificial Sequence
  Description of Artificial Sequence: Synthetic oligonucleotide
uguucauucauccauaugc

SEQ ID NO: 987801 - RNA, 19 nt, Artificial Sequence
  Description of Artificial Sequence: Synthetic oligonucleotide
acagcauuuaaauugaugg

SEQ ID NO: 987802 - RNA, 19 nt, Artificial Sequence
  Description of Artificial Sequence: Synthetic oligonucleotide
ugugauguggugaagaccg

SEQ ID NO: 987803 - RNA, 19 nt, Artificial Sequence
  Description of Artificial Sequence: Synthetic oligonucleotide
aacuuggugauauuauucc

SEQ ID NO: 987804 - RNA, 19 nt, Artificial Sequence
  Description of Artificial Sequence: Synthetic oligonucleotide
uuaauagagaggaaaaggc

SEQ ID NO: 987805 - RNA, 19 nt, Artificial Sequence
  Description of Artificial Sequence: Synthetic oligonucleotide
gaugaaauacguuaugagc

SEQ ID NO: 987806 - RNA, 19 nt, Artificial Sequence
  Description of Artificial Sequence: Synthetic oligonucleotide
uauuaucccaugaagaacu

SEQ ID NO: 987807 - RNA, 19 nt, Artificial Sequence
  Description of Artificial Sequence: Synthetic oligonucleotide
gaaacuucuaaguacuacc

SEQ ID NO: 987808 - RNA, 19 nt, Artificial Sequence
  Description of Artificial Sequence: Synthetic oligonucleotide
uuuaccaugccuucuuugg

SEQ ID NO: 987809 - RNA, 19 nt, Artificial Sequence
  Description of Artificial Sequence: Synthetic oligonucleotide
ucugcaauacuguugaaca

SEQ ID NO: 987810 - RNA, 19 nt, Artificial Sequence
  Description of Artificial Sequence: Synthetic oligonucleotide
cuuaauagagaggaaaagg

SEQ ID NO: 987811 - RNA, 19 nt, Artificial Sequence
  Description of Artificial Sequence: Synthetic oligonucleotide
aaaauuugggucagcaugg

SEQ ID NO: 987812 - RNA, 19 nt, Artificial Sequence
  Description of Artificial Sequence: Synthetic oligonucleotide
cauacuuuucaauuugggg

SEQ ID NO: 987813 - RNA, 19 nt, Artificial Sequence
  Description of Artificial Sequence: Synthetic oligonucleotide
uaaucgaugaugacaaaug

SEQ ID NO: 987814 - RNA, 19 nt, Artificial Sequence
  Description of Artificial Sequence: Synthetic oligonucleotide
caaaauuugggucagcaug

SEQ ID NO: 987815 - RNA, 19 nt, Artificial Sequence
  Description of Artificial Sequence: Synthetic oligonucleotide
cuaaguacuaccauugcac

SEQ ID NO: 987816 - RNA, 19 nt, Artificial Sequence
  Description of Artificial Sequence: Synthetic oligonucleotide
guuaugagccccuacagcc

SEQ ID NO: 987817 - RNA, 19 nt, Artificial Sequence
  Description of Artificial Sequence: Synthetic oligonucleotide
aagcgcuauagcuggaggc

SEQ ID NO: 987818 - RNA, 19 nt, Artificial Sequence
  Description of Artificial Sequence: Synthetic oligonucleotide
agauccaacuacuauugac

SEQ ID NO: 987819 - RNA, 19 nt, Artificial Sequence
  Description of Artificial Sequence: Synthetic oligonucleotide
ucuggugcaauccuaacga

SEQ ID NO: 987820 - RNA, 19 nt, Artificial Sequence
  Description of Artificial Sequence: Synthetic oligonucleotide
auaauguugcuguagugag

SEQ ID NO: 987821 - RNA, 19 nt, Artificial Sequence
  Description of Artificial Sequence: Synthetic oligonucleotide
auauccgaauaucagauca

SEQ ID NO: 987822 - RNA, 19 nt, Artificial Sequence
  Description of Artificial Sequence: Synthetic oligonucleotide
uuauauccgaauaucagau

SEQ ID NO: 987823 - RNA, 19 nt, Artificial Sequence
  Description of Artificial Sequence: Synthetic oligonucleotide
acaccuuuacgguagaguc

SEQ ID NO: 987824 - RNA, 19 nt, Artificial Sequence
  Description of Artificial Sequence: Synthetic oligonucleotide
aagaacuuaugacaguggu

SEQ ID NO: 987825 - RNA, 19 nt, Artificial Sequence
  Description of Artificial Sequence: Synthetic oligonucleotide
aauccuaacgagguaaaag

SEQ ID NO: 987826 - RNA, 19 nt, Artificial Sequence
  Description of Artificial Sequence: Synthetic oligonucleotide
aaacuaacagugugcuuac

SEQ ID NO: 987827 - RNA, 19 nt, Artificial Sequence
  Description of Artificial Sequence: Synthetic oligonucleotide
agacauagcauauacucug

SEQ ID NO: 987828 - RNA, 19 nt, Artificial Sequence
  Description of Artificial Sequence: Synthetic oligonucleotide
uuuuguacugcucguguag

SEQ ID NO: 987829 - RNA, 19 nt, Artificial Sequence
  Description of Artificial Sequence: Synthetic oligonucleotide
acagaagcgcuauagcugg

SEQ ID NO: 987830 - RNA, 19 nt, Artificial Sequence
  Description of Artificial Sequence: Synthetic oligonucleotide
augguauugacacugacau

SEQ ID NO: 987831 - RNA, 19 nt, Artificial Sequence
  Description of Artificial Sequence: Synthetic oligonucleotide
agaauugaacuuaauagag

SEQ ID NO: 987832 - RNA, 19 nt, Artificial Sequence
  Description of Artificial Sequence: Synthetic oligonucleotide
agaugcagaauauagccug

SEQ ID NO: 987833 - RNA, 19 nt, Artificial Sequence
  Description of Artificial Sequence: Synthetic oligonucleotide
gcuuacagcauuuaaauug

SEQ ID NO: 987834 - RNA, 19 nt, Artificial Sequence
  Description of Artificial Sequence: Synthetic oligonucleotide
uaccauugcacauucacca

SEQ ID NO: 987835 - RNA, 19 nt, Artificial Sequence
  Description of Artificial Sequence: Synthetic oligonucleotide
ucuaaguacuaccauugca

SEQ ID NO: 987836 - RNA, 19 nt, Artificial Sequence
  Description of Artificial Sequence: Synthetic oligonucleotide
uuuggugccagaaacuaac

SEQ ID NO: 987837 - RNA, 19 nt, Artificial Sequence
  Description of Artificial Sequence: Synthetic oligonucleotide
uguggugaaacuucuaagu

SEQ ID NO: 987838 - RNA, 19 nt, Artificial Sequence
  Description of Artificial Sequence: Synthetic oligonucleotide
aaggaggucccaaacaaac

SEQ ID NO: 987839 - RNA, 19 nt, Artificial Sequence
  Description of Artificial Sequence: Synthetic oligonucleotide
ugggcuaaaagcagcauca

SEQ ID NO: 987840 - RNA, 19 nt, Artificial Sequence
  Description of Artificial Sequence: Synthetic oligonucleotide
aaggugcucggacacauag

SEQ ID NO: 987841 - RNA, 19 nt, Artificial Sequence
  Description of Artificial Sequence: Synthetic oligonucleotide
ugaaauacguuaugagccc

SEQ ID NO: 987842 - RNA, 19 nt, Artificial Sequence
  Description of Artificial Sequence: Synthetic oligonucleotide
acuaacagugugcuuacag

SEQ ID NO: 987843 - RNA, 19 nt, Artificial Sequence
  Description of Artificial Sequence: Synthetic oligonucleotide
uuaaauugaugguauugac

SEQ ID NO: 987844 - RNA, 19 nt, Artificial Sequence
  Description of Artificial Sequence: Synthetic oligonucleotide
aauagacauuauuauccca

SEQ ID NO: 987845 - RNA, 19 nt, Artificial Sequence
  Description of Artificial Sequence: Synthetic oligonucleotide
ugcagaauauagccugucg

SEQ ID NO: 987846 - RNA, 19 nt, Artificial Sequence
  Description of Artificial Sequence: Synthetic oligonucleotide
agcauuuuggauuccuuag

SEQ ID NO: 987847 - RNA, 19 nt, Artificial Sequence
  Description of Artificial Sequence: Synthetic oligonucleotide
accuuuacgguagaguccc

SEQ ID NO: 987848 - RNA, 19 nt, Artificial Sequence
  Description of Artificial Sequence: Synthetic oligonucleotide
augauaugcuucuuuguag

SEQ ID NO: 987849 - RNA, 19 nt, Artificial Sequence
  Description of Artificial Sequence: Synthetic oligonucleotide
cuaacgagguaaaagagca

SEQ ID NO: 987850 - RNA, 19 nt, Artificial Sequence
  Description of Artificial Sequence: Synthetic oligonucleotide
auccuaacgagguaaaaga

SEQ ID NO: 987851 - RNA, 19 nt, Artificial Sequence
  Description of Artificial Sequence: Synthetic oligonucleotide
aucgaucaccuucagacag

SEQ ID NO: 987852 - RNA, 19 nt, Artificial Sequence
  Description of Artificial Sequence: Synthetic oligonucleotide
auauacucuggugcaaucc

SEQ ID NO: 987853 - RNA, 19 nt, Artificial Sequence
  Description of Artificial Sequence: Synthetic oligonucleotide
uacugcaauuuccaaaaca

SEQ ID NO: 987854 - RNA, 19 nt, Artificial Sequence
  Description of Artificial Sequence: Synthetic oligonucleotide
uccuaacgagguaaaagag

SEQ ID NO: 987855 - RNA, 19 nt, Artificial Sequence
  Description of Artificial Sequence: Synthetic oligonucleotide
aagaccgaagagccauugc

SEQ ID NO: 987856 - RNA, 19 nt, Artificial Sequence
  Description of Artificial Sequence: Synthetic oligonucleotide
ucuacucccgugcugagga

SEQ ID NO: 987857 - RNA, 19 nt, Artificial Sequence
  Description of Artificial Sequence: Synthetic oligonucleotide
ucugcuuauauccgaauau

SEQ ID NO: 987858 - RNA, 19 nt, Artificial Sequence
  Description of Artificial Sequence: Synthetic oligonucleotide
aacgagguaaaagagcaca

SEQ ID NO: 987859 - RNA, 19 nt, Artificial Sequence
  Description of Artificial Sequence: Synthetic oligonucleotide
ccgaauaucagaucaaucc

SEQ ID NO: 987860 - RNA, 19 nt, Artificial Sequence
  Description of Artificial Sequence: Synthetic oligonucleotide
uacguuaugagccccuaca

SEQ ID NO: 987861 - RNA, 19 nt, Artificial Sequence
  Description of Artificial Sequence: Synthetic oligonucleotide
ugauauuauuccaggccag

SEQ ID NO: 987862 - RNA, 19 nt, Artificial Sequence
  Description of Artificial Sequence: Synthetic oligonucleotide
uauuauuccaggccagacu

SEQ ID NO: 987863 - RNA, 19 nt, Artificial Sequence
  Description of Artificial Sequence: Synthetic oligonucleotide
ugauccuucgaggaugugg

SEQ ID NO: 987864 - RNA, 19 nt, Artificial Sequence
  Description of Artificial Sequence: Synthetic oligonucleotide
gaaacuaacagugugcuua

SEQ ID NO: 987865 - RNA, 19 nt, Artificial Sequence
  Description of Artificial Sequence: Synthetic oligonucleotide
cuuauauccgaauaucaga

SEQ ID NO: 987866 - RNA, 19 nt, Artificial Sequence
  Description of Artificial Sequence: Synthetic oligonucleotide
aauauagccugucguuaug

SEQ ID NO: 987867 - RNA, 19 nt, Artificial Sequence
  Description of Artificial Sequence: Synthetic oligonucleotide
uuaggaaguugacaccacc

SEQ ID NO: 987868 - RNA, 19 nt, Artificial Sequence
  Description of Artificial Sequence: Synthetic oligonucleotide
uucaaaguggaaucuugug

SEQ ID NO: 987869 - RNA, 19 nt, Artificial Sequence
  Description of Artificial Sequence: Synthetic oligonucleotide
accuucauaggucagggga

SEQ ID NO: 987870 - RNA, 19 nt, Artificial Sequence
  Description of Artificial Sequence: Synthetic oligonucleotide
ugaggucccaaauauuuac

SEQ ID NO: 987871 - RNA, 19 nt, Artificial Sequence
  Description of Artificial Sequence: Synthetic oligonucleotide
gacauggcgacuaucuggg

SEQ ID NO: 987872 - RNA, 19 nt, Artificial Sequence
  Description of Artificial Sequence: Synthetic oligonucleotide
gauguggugucacaaauaa

SEQ ID NO: 987873 - RNA, 19 nt, Artificial Sequence
  Description of Artificial Sequence: Synthetic oligonucleotide
aauauuuaccaugccuucu

SEQ ID NO: 987874 - RNA, 19 nt, Artificial Sequence
  Description of Artificial Sequence: Synthetic oligonucleotide
gguauugacacugacauca

SEQ ID NO: 987875 - RNA, 19 nt, Artificial Sequence
  Description of Artificial Sequence: Synthetic oligonucleotide
uaaguacuaccauugcaca

SEQ ID NO: 987876 - RNA, 19 nt, Artificial Sequence
  Description of Artificial Sequence: Synthetic oligonucleotide
auauagccugucguuaugc

SEQ ID NO: 987877 - RNA, 19 nt, Artificial Sequence
  Description of Artificial Sequence: Synthetic oligonucleotide
accaugccuucuuuggugc

SEQ ID NO: 987878 - RNA, 19 nt, Artificial Sequence
  Description of Artificial Sequence: Synthetic oligonucleotide
cuucaaacgacuccucccc

SEQ ID NO: 987879 - RNA, 19 nt, Artificial Sequence
  Description of Artificial Sequence: Synthetic oligonucleotide
acuuaauagagaggaaaag

SEQ ID NO: 987880 - RNA, 19 nt, Artificial Sequence
  Description of Artificial Sequence: Synthetic oligonucleotide
uuuacgguagagucccaag

SEQ ID NO: 987881 - RNA, 19 nt, Artificial Sequence
  Description of Artificial Sequence: Synthetic oligonucleotide
aaaauccguugcaccaucc

SEQ ID NO: 987882 - RNA, 19 nt, Artificial Sequence
  Description of Artificial Sequence: Synthetic oligonucleotide
acuaucugggcuaaaagca

SEQ ID NO: 987883 - RNA, 19 nt, Artificial Sequence
  Description of Artificial Sequence: Synthetic oligonucleotide
uuacgguagagucccaaga

SEQ ID NO: 987884 - RNA, 19 nt, Artificial Sequence
  Description of Artificial Sequence: Synthetic oligonucleotide
ugucacagaagcgcuauag

SEQ ID NO: 987885 - RNA, 19 nt, Artificial Sequence
  Description of Artificial Sequence: Synthetic oligonucleotide
uccaacgcaucuuuguucu

SEQ ID NO: 987886 - RNA, 19 nt, Artificial Sequence
  Description of Artificial Sequence: Synthetic oligonucleotide
uuuaccugcccuaaucgau

SEQ ID NO: 987887 - RNA, 19 nt, Artificial Sequence
  Description of Artificial Sequence: Synthetic oligonucleotide
aaacuucuaaguacuacca

SEQ ID NO: 987888 - RNA, 19 nt, Artificial Sequence
  Description of Artificial Sequence: Synthetic oligonucleotide
ucuagcucggccaccaagu

SEQ ID NO: 987889 - RNA, 19 nt, Artificial Sequence
  Description of Artificial Sequence: Synthetic oligonucleotide
aggaacaccggaccacacc

SEQ ID NO: 987890 - RNA, 19 nt, Artificial Sequence
  Description of Artificial Sequence: Synthetic oligonucleotide
ugucacggcaccugugugg

SEQ ID NO: 987891 - RNA, 19 nt, Artificial Sequence
  Description of Artificial Sequence: Synthetic oligonucleotide
ucccauacaugaacuuugg

SEQ ID NO: 987892 - RNA, 19 nt, Artificial Sequence
  Description of Artificial Sequence: Synthetic oligonucleotide
cuaccauugcacauucacc

SEQ ID NO: 987893 - RNA, 19 nt, Artificial Sequence
  Description of Artificial Sequence: Synthetic oligonucleotide
gaacuuaugacaguggugu

SEQ ID NO: 987894 - RNA, 19 nt, Artificial Sequence
  Description of Artificial Sequence: Synthetic oligonucleotide
caaauaacuguuuuggugu

SEQ ID NO: 987895 - RNA, 19 nt, Artificial Sequence
  Description of Artificial Sequence: Synthetic oligonucleotide
gacagaauuuccaucccag

SEQ ID NO: 987896 - RNA, 19 nt, Artificial Sequence
  Description of Artificial Sequence: Synthetic oligonucleotide
uugcaagacacugcuaucc

SEQ ID NO: 987897 - RNA, 19 nt, Artificial Sequence
  Description of Artificial Sequence: Synthetic oligonucleotide
uucuaaguacuaccauugc

SEQ ID NO: 987898 - RNA, 19 nt, Artificial Sequence
  Description of Artificial Sequence: Synthetic oligonucleotide
uuuuaccugcccuaaucga

SEQ ID NO: 987899 - RNA, 19 nt, Artificial Sequence
  Description of Artificial Sequence: Synthetic oligonucleotide
cacagaagcgcuauagcug

SEQ ID NO: 987900 - RNA, 19 nt, Artificial Sequence
  Description of Artificial Sequence: Synthetic oligonucleotide
auugcaagacacugcuauc

SEQ ID NO: 987901 - RNA, 19 nt, Artificial Sequence
  Description of Artificial Sequence: Synthetic oligonucleotide
uuaccugcccuaaucgaug

SEQ ID NO: 987902 - RNA, 19 nt, Artificial Sequence
  Description of Artificial Sequence: Synthetic oligonucleotide
agccccuacagccucacuc

SEQ ID NO: 987903 - RNA, 19 nt, Artificial Sequence
  Description of Artificial Sequence: Synthetic oligonucleotide
ugaugucuucgucauaaaa

SEQ ID NO: 987904 - RNA, 19 nt, Artificial Sequence
  Description of Artificial Sequence: Synthetic oligonucleotide
ugggacauacuuuucaauu

SEQ ID NO: 987905 - RNA, 19 nt, Artificial Sequence
  Description of Artificial Sequence: Synthetic oligonucleotide
uagacauuauuaucccaug

SEQ ID NO: 987906 - RNA, 19 nt, Artificial Sequence
  Description of Artificial Sequence: Synthetic oligonucleotide
augucuucgucauaaaauu

SEQ ID NO: 987907 - RNA, 19 nt, Artificial Sequence
  Description of Artificial Sequence: Synthetic oligonucleotide
gacgaagcaccucuguggc

SEQ ID NO: 987908 - RNA, 19 nt, Artificial Sequence
  Description of Artificial Sequence: Synthetic oligonucleotide
ucuacaccaccuucauagg

SEQ ID NO: 987909 - RNA, 19 nt, Artificial Sequence
  Description of Artificial Sequence: Synthetic oligonucleotide
gaagcgcuauagcuggagg

SEQ ID NO: 987910 - RNA, 19 nt, Artificial Sequence
  Description of Artificial Sequence: Synthetic oligonucleotide
ucuugugauguggugaaga

SEQ ID NO: 987911 - RNA, 19 nt, Artificial Sequence
  Description of Artificial Sequence: Synthetic oligonucleotide
aauccguugcaccauccaa

SEQ ID NO: 987912 - RNA, 19 nt, Artificial Sequence
  Description of Artificial Sequence: Synthetic oligonucleotide
aaauccguugcaccaucca

SEQ ID NO: 987913 - RNA, 19 nt, Artificial Sequence
  Description of Artificial Sequence: Synthetic oligonucleotide
aacgacuccuccccuggag

SEQ ID NO: 987914 - RNA, 19 nt, Artificial Sequence
  Description of Artificial Sequence: Synthetic oligonucleotide
aaguacuaccauugcacau

SEQ ID NO: 987915 - RNA, 19 nt, Artificial Sequence
  Description of Artificial Sequence: Synthetic oligonucleotide
uucuagcucggccaccaag

SEQ ID NO: 987916 - RNA, 19 nt, Artificial Sequence
  Description of Artificial Sequence: Synthetic oligonucleotide
gacauagcauauacucugg

SEQ ID NO: 987917 - RNA, 19 nt, Artificial Sequence
  Description of Artificial Sequence: Synthetic oligonucleotide
ggacauggcgacuaucugg

SEQ ID NO: 987918 - RNA, 19 nt, Artificial Sequence
  Description of Artificial Sequence: Synthetic oligonucleotide
cuugugauguggugaagac

SEQ ID NO: 987919 - RNA, 19 nt, Artificial Sequence
  Description of Artificial Sequence: Synthetic oligonucleotide
uccauaugcaugucacggc

SEQ ID NO: 987920 - RNA, 19 nt, Artificial Sequence
  Description of Artificial Sequence: Synthetic oligonucleotide
uucugcuuauauccgaaua

SEQ ID NO: 987921 - RNA, 19 nt, Artificial Sequence
  Description of Artificial Sequence: Synthetic oligonucleotide
uauagccugucguuaugcc

SEQ ID NO: 987922 - RNA, 19 nt, Artificial Sequence
  Description of Artificial Sequence: Synthetic oligonucleotide
ugcaauccuaacgagguaa

SEQ ID NO: 987923 - RNA, 19 nt, Artificial Sequence
  Description of Artificial Sequence: Synthetic oligonucleotide
uguauccgcucacugauuu

SEQ ID NO: 987924 - RNA, 19 nt, Artificial Sequence
  Description of Artificial Sequence: Synthetic oligonucleotide
uaccaugccuucuuuggug

SEQ ID NO: 987925 - RNA, 19 nt, Artificial Sequence
  Description of Artificial Sequence: Synthetic oligonucleotide
gaugguauugacacugaca

SEQ ID NO: 987926 - RNA, 19 nt, Artificial Sequence
  Description of Artificial Sequence: Synthetic oligonucleotide
ugacucccauacaugaacu

SEQ ID NO: 987927 - RNA, 19 nt, Artificial Sequence
  Description of Artificial Sequence: Synthetic oligonucleotide
acguuaugagccccuacag

SEQ ID NO: 987928 - RNA, 19 nt, Artificial Sequence
  Description of Artificial Sequence: Synthetic oligonucleotide
agauaagacagaauuucca

SEQ ID NO: 987929 - RNA, 19 nt, Artificial Sequence
  Description of Artificial Sequence: Synthetic oligonucleotide
ucccagacgaagcaccucu

SEQ ID NO: 987930 - RNA, 19 nt, Artificial Sequence
  Description of Artificial Sequence: Synthetic oligonucleotide
uccgaauaucagaucaauc

SEQ ID NO: 987931 - RNA, 19 nt, Artificial Sequence
  Description of Artificial Sequence: Synthetic oligonucleotide
uuuguacugcucguguagc

SEQ ID NO: 987932 - RNA, 19 nt, Artificial Sequence
  Description of Artificial Sequence: Synthetic oligonucleotide
gugacucccauacaugaac

SEQ ID NO: 987933 - RNA, 19 nt, Artificial Sequence
  Description of Artificial Sequence: Synthetic oligonucleotide
agagcacauagccugggga

SEQ ID NO: 987934 - RNA, 19 nt, Artificial Sequence
  Description of Artificial Sequence: Synthetic oligonucleotide
auacguuaugagccccuac

SEQ ID NO: 987935 - RNA, 19 nt, Artificial Sequence
  Description of Artificial Sequence: Synthetic oligonucleotide
agaucaauccacucaugaa

SEQ ID NO: 987936 - RNA, 19 nt, Artificial Sequence
  Description of Artificial Sequence: Synthetic oligonucleotide
cauccauaugcaugucacg

SEQ ID NO: 987937 - RNA, 19 nt, Artificial Sequence
  Description of Artificial Sequence: Synthetic oligonucleotide
uaaaauccguugcaccauc

SEQ ID NO: 987938 - RNA, 19 nt, Artificial Sequence
  Description of Artificial Sequence: Synthetic oligonucleotide
gaaauacguuaugagcccc

SEQ ID NO: 987939 - RNA, 19 nt, Artificial Sequence
  Description of Artificial Sequence: Synthetic oligonucleotide
accgacuuccagauaagac

SEQ ID NO: 987940 - RNA, 19 nt, Artificial Sequence
  Description of Artificial Sequence: Synthetic oligonucleotide
uuuccaacgcaucuuuguu

SEQ ID NO: 987941 - RNA, 19 nt, Artificial Sequence
  Description of Artificial Sequence: Synthetic oligonucleotide
auauuuaccaugccuucuu

SEQ ID NO: 987942 - RNA, 19 nt, Artificial Sequence
  Description of Artificial Sequence: Synthetic oligonucleotide
uauauccgaauaucagauc

SEQ ID NO: 987943 - RNA, 19 nt, Artificial Sequence
  Description of Artificial Sequence: Synthetic oligonucleotide
guggaaucuugugaugugg

SEQ ID NO: 987944 - RNA, 19 nt, Artificial Sequence
  Description of Artificial Sequence: Synthetic oligonucleotide
agacagaauuuccauccca

SEQ ID NO: 987945 - RNA, 19 nt, Artificial Sequence
  Description of Artificial Sequence: Synthetic oligonucleotide
uauccgaauaucagaucaa

SEQ ID NO: 987946 - RNA, 19 nt, Artificial Sequence
  Description of Artificial Sequence: Synthetic oligonucleotide
ccuaacgagguaaaagagc

SEQ ID NO: 987947 - RNA, 19 nt, Artificial Sequence
  Description of Artificial Sequence: Synthetic oligonucleotide
aagaguagugacucccaua

SEQ ID NO: 987948 - RNA, 19 nt, Artificial Sequence
  Description of Artificial Sequence: Synthetic oligonucleotide
gucacagaagcgcuauagc

SEQ ID NO: 987949 - RNA, 19 nt, Artificial Sequence
  Description of Artificial Sequence: Synthetic oligonucleotide
ugcaauacuguugaacauu

SEQ ID NO: 987950 - RNA, 19 nt, Artificial Sequence
  Description of Artificial Sequence: Synthetic oligonucleotide
uacucuggugcaauccuaa

SEQ ID NO: 987951 - RNA, 19 nt, Artificial Sequence
  Description of Artificial Sequence: Synthetic oligonucleotide
caccuuuacgguagagucc

SEQ ID NO: 987952 - RNA, 19 nt, Artificial Sequence
  Description of Artificial Sequence: Synthetic oligonucleotide
uggggaagaguagugacuc

SEQ ID NO: 987953 - RNA, 19 nt, Artificial Sequence
  Description of Artificial Sequence: Synthetic oligonucleotide
uuccaacgcaucuuuguuc

SEQ ID NO: 987954 - RNA, 19 nt, Artificial Sequence
  Description of Artificial Sequence: Synthetic oligonucleotide
ccaagaugcagaauauagc

SEQ ID NO: 987955 - RNA, 19 nt, Artificial Sequence
  Description of Artificial Sequence: Synthetic oligonucleotide
ucgaucaccuucagacagc

SEQ ID NO: 987956 - RNA, 19 nt, Artificial Sequence
  Description of Artificial Sequence: Synthetic oligonucleotide
auacuguugaacauucuau

SEQ ID NO: 987957 - RNA, 19 nt, Artificial Sequence
  Description of Artificial Sequence: Synthetic oligonucleotide
acucuggugcaauccuaac

SEQ ID NO: 987958 - RNA, 19 nt, Artificial Sequence
  Description of Artificial Sequence: Synthetic oligonucleotide
ucccgugcugaggacaugg

SEQ ID NO: 987959 - RNA, 19 nt, Artificial Sequence
  Description of Artificial Sequence: Synthetic oligonucleotide
cagaucaauccacucauga

SEQ ID NO: 987960 - RNA, 19 nt, Artificial Sequence
  Description of Artificial Sequence: Synthetic oligonucleotide
cguugcaccauccaaacag

SEQ ID NO: 987961 - RNA, 19 nt, Artificial Sequence
  Description of Artificial Sequence: Synthetic oligonucleotide
caggggaugaaauacguua

SEQ ID NO: 987962 - RNA, 19 nt, Artificial Sequence
  Description of Artificial Sequence: Synthetic oligonucleotide
ucgucaaccaucuguccuc

SEQ ID NO: 987963 - RNA, 19 nt, Artificial Sequence
  Description of Artificial Sequence: Synthetic oligonucleotide
aguacuaccauugcacauu

SEQ ID NO: 987964 - RNA, 19 nt, Artificial Sequence
  Description of Artificial Sequence: Synthetic oligonucleotide
aaauacguuaugagccccu

SEQ ID NO: 987965 - RNA, 19 nt, Artificial Sequence
  Description of Artificial Sequence: Synthetic oligonucleotide
uaugagccccuacagccuc

SEQ ID NO: 987966 - RNA, 19 nt, Artificial Sequence
  Description of Artificial Sequence: Synthetic oligonucleotide
accaugauuuaggaaguug

SEQ ID NO: 987967 - RNA, 19 nt, Artificial Sequence
  Description of Artificial Sequence: Synthetic oligonucleotide
ugcaccauccaaacaguuu

SEQ ID NO: 987968 - RNA, 19 nt, Artificial Sequence
  Description of Artificial Sequence: Synthetic oligonucleotide
cauuuuggauuccuuagaa

SEQ ID NO: 987969 - RNA, 19 nt, Artificial Sequence
  Description of Artificial Sequence: Synthetic oligonucleotide
uaacgagguaaaagagcac

SEQ ID NO: 987970 - RNA, 19 nt, Artificial Sequence
  Description of Artificial Sequence: Synthetic oligonucleotide
cugggcuaaaagcagcauc

SEQ ID NO: 987971 - RNA, 19 nt, Artificial Sequence
  Description of Artificial Sequence: Synthetic oligonucleotide
agccauugcaagacacugc

SEQ ID NO: 987972 - RNA, 19 nt, Artificial Sequence
  Description of Artificial Sequence: Synthetic oligonucleotide
gaaccuggggaaucuguca

SEQ ID NO: 987973 - RNA, 19 nt, Artificial Sequence
  Description of Artificial Sequence: Synthetic oligonucleotide
cagaccgacuuccagauaa

SEQ ID NO: 987974 - RNA, 19 nt, Artificial Sequence
  Description of Artificial Sequence: Synthetic oligonucleotide
uugccccuaagacugucgu

SEQ ID NO: 987975 - RNA, 19 nt, Artificial Sequence
  Description of Artificial Sequence: Synthetic oligonucleotide
auuuuguacugcucgugua

SEQ ID NO: 987976 - RNA, 19 nt, Artificial Sequence
  Description of Artificial Sequence: Synthetic oligonucleotide
cauauacucuggugcaauc

SEQ ID NO: 987977 - RNA, 19 nt, Artificial Sequence
  Description of Artificial Sequence: Synthetic oligonucleotide
uuugggucagcauggucua

SEQ ID NO: 987978 - RNA, 19 nt, Artificial Sequence
  Description of Artificial Sequence: Synthetic oligonucleotide
uauuuaccaugccuucuuu

SEQ ID NO: 987979 - RNA, 19 nt, Artificial Sequence
  Description of Artificial Sequence: Synthetic oligonucleotide
gaagaccgaagagccauug

SEQ ID NO: 987980 - RNA, 19 nt, Artificial Sequence
  Description of Artificial Sequence: Synthetic oligonucleotide
uuaugccaacagaucuuac

SEQ ID NO: 987981 - RNA, 19 nt, Artificial Sequence
  Description of Artificial Sequence: Synthetic oligonucleotide
acucccuuucugcuuauau

SEQ ID NO: 987982 - RNA, 19 nt, Artificial Sequence
  Description of Artificial Sequence: Synthetic oligonucleotide
aaauuugggucagcauggu

SEQ ID NO: 987983 - RNA, 19 nt, Artificial Sequence
  Description of Artificial Sequence: Synthetic oligonucleotide
ucuuucccagauccaacua

SEQ ID NO: 987984 - RNA, 19 nt, Artificial Sequence
  Description of Artificial Sequence: Synthetic oligonucleotide
aggacauggcgacuaucug

SEQ ID NO: 987985 - RNA, 19 nt, Artificial Sequence
  Description of Artificial Sequence: Synthetic oligonucleotide
acauggcgacuaucugggc

SEQ ID NO: 987986 - RNA, 19 nt, Artificial Sequence
  Description of Artificial Sequence: Synthetic oligonucleotide
gaauauagccugucguuau

SEQ ID NO: 987987 - RNA, 19 nt, Artificial Sequence
  Description of Artificial Sequence: Synthetic oligonucleotide
cugcccuaaucgaugauga

SEQ ID NO: 987988 - RNA, 19 nt, Artificial Sequence
  Description of Artificial Sequence: Synthetic oligonucleotide
auaugcuucuuuguagcau

SEQ ID NO: 987989 - RNA, 19 nt, Artificial Sequence
  Description of Artificial Sequence: Synthetic oligonucleotide
gaaguugacaccaccaauu

SEQ ID NO: 987990 - RNA, 19 nt, Artificial Sequence
  Description of Artificial Sequence: Synthetic oligonucleotide
uaccugcccuaaucgauga

SEQ ID NO: 987991 - RNA, 19 nt, Artificial Sequence
  Description of Artificial Sequence: Synthetic oligonucleotide
ucuguagacauagcauaua

SEQ ID NO: 987992 - RNA, 19 nt, Artificial Sequence
  Description of Artificial Sequence: Synthetic oligonucleotide
agcgcuauagcuggaggcu

SEQ ID NO: 987993 - RNA, 19 nt, Artificial Sequence
  Description of Artificial Sequence: Synthetic oligonucleotide
ccggaccacaccuuuacgg

SEQ ID NO: 987994 - RNA, 19 nt, Artificial Sequence
  Description of Artificial Sequence: Synthetic oligonucleotide
augcagaauauagccuguc

SEQ ID NO: 987995 - RNA, 19 nt, Artificial Sequence
  Description of Artificial Sequence: Synthetic oligonucleotide
aauacguuaugagccccua

SEQ ID NO: 987996 - RNA, 19 nt, Artificial Sequence
  Description of Artificial Sequence: Synthetic oligonucleotide
uggucuacaccaccuucau

SEQ ID NO: 987997 - RNA, 19 nt, Artificial Sequence
  Description of Artificial Sequence: Synthetic oligonucleotide
cuguucauucauccauaug

SEQ ID NO: 987998 - RNA, 19 nt, Artificial Sequence
  Description of Artificial Sequence: Synthetic oligonucleotide
ggucaggggaugaaauacg

SEQ ID NO: 987999 - RNA, 19 nt, Artificial Sequence
  Description of Artificial Sequence: Synthetic oligonucleotide
accggaccacaccuuuacg

SEQ ID NO: 988000 - RNA, 19 nt, Artificial Sequence
  Description of Artificial Sequence: Synthetic oligonucleotide
aaacgacuccuccccugga

SEQ ID NO: 988001 - RNA, 19 nt, Artificial Sequence
  Description of Artificial Sequence: Synthetic oligonucleotide
uaugcaugucacggcaccu

SEQ ID NO: 988002 - RNA, 19 nt, Artificial Sequence
  Description of Artificial Sequence: Synthetic oligonucleotide
cucguguagcugcaacuug

SEQ ID NO: 988003 - RNA, 19 nt, Artificial Sequence
  Description of Artificial Sequence: Synthetic oligonucleotide
agcugcaacuuggugauau

SEQ ID NO: 988004 - RNA, 19 nt, Artificial Sequence
  Description of Artificial Sequence: Synthetic oligonucleotide
ugcaggaacaccggaccac

SEQ ID NO: 988005 - RNA, 19 nt, Artificial Sequence
  Description of Artificial Sequence: Synthetic oligonucleotide
agaaacuaacagugugcuu

SEQ ID NO: 988006 - RNA, 19 nt, Artificial Sequence
  Description of Artificial Sequence: Synthetic oligonucleotide
ugguauugacacugacauc

SEQ ID NO: 988007 - RNA, 19 nt, Artificial Sequence
  Description of Artificial Sequence: Synthetic oligonucleotide
acgacuccuccccuggaga

SEQ ID NO: 988008 - RNA, 19 nt, Artificial Sequence
  Description of Artificial Sequence: Synthetic oligonucleotide
cacggcaccuguguggccc

SEQ ID NO: 988009 - RNA, 19 nt, Artificial Sequence
  Description of Artificial Sequence: Synthetic oligonucleotide
gucguuaugccaacagauc

SEQ ID NO: 988010 - RNA, 19 nt, Artificial Sequence
  Description of Artificial Sequence: Synthetic oligonucleotide
aggugcucggacacauagc

SEQ ID NO: 988011 - RNA, 19 nt, Artificial Sequence
  Description of Artificial Sequence: Synthetic oligonucleotide
ccauacaugaacuuuggcu

SEQ ID NO: 988012 - RNA, 19 nt, Artificial Sequence
  Description of Artificial Sequence: Synthetic oligonucleotide
auccgaauaucagaucaau

SEQ ID NO: 988013 - RNA, 19 nt, Artificial Sequence
  Description of Artificial Sequence: Synthetic oligonucleotide
uucagacagccgucuacuc

SEQ ID NO: 988014 - RNA, 19 nt, Artificial Sequence
  Description of Artificial Sequence: Synthetic oligonucleotide
uucccagauccaacuacua

SEQ ID NO: 988015 - RNA, 19 nt, Artificial Sequence
  Description of Artificial Sequence: Synthetic oligonucleotide
caccuucauaggucagggg

SEQ ID NO: 988016 - RNA, 19 nt, Artificial Sequence
  Description of Artificial Sequence: Synthetic oligonucleotide
agccugucguuaugccaac

SEQ ID NO: 988017 - RNA, 19 nt, Artificial Sequence
  Description of Artificial Sequence: Synthetic oligonucleotide
caaacuggugucuuuuggu

SEQ ID NO: 988018 - RNA, 19 nt, Artificial Sequence
  Description of Artificial Sequence: Synthetic oligonucleotide
caccggaccacaccuuuac

SEQ ID NO: 988019 - RNA, 19 nt, Artificial Sequence
  Description of Artificial Sequence: Synthetic oligonucleotide
acucccauacaugaacuuu

SEQ ID NO: 988020 - RNA, 19 nt, Artificial Sequence
  Description of Artificial Sequence: Synthetic oligonucleotide
ggggaugaaauacguuaug

SEQ ID NO: 988021 - RNA, 19 nt, Artificial Sequence
  Description of Artificial Sequence: Synthetic oligonucleotide
uacuaccauugcacauuca

SEQ ID NO: 988022 - RNA, 19 nt, Artificial Sequence
  Description of Artificial Sequence: Synthetic oligonucleotide
guuaugccaacagaucuua

SEQ ID NO: 988023 - RNA, 19 nt, Artificial Sequence
  Description of Artificial Sequence: Synthetic oligonucleotide
ugccccuaagacugucgug

SEQ ID NO: 988024 - RNA, 19 nt, Artificial Sequence
  Description of Artificial Sequence: Synthetic oligonucleotide
auguugcuguagugagguc

SEQ ID NO: 988025 - RNA, 19 nt, Artificial Sequence
  Description of Artificial Sequence: Synthetic oligonucleotide
aggggaugaaauacguuau

SEQ ID NO: 988026 - RNA, 19 nt, Artificial Sequence
  Description of Artificial Sequence: Synthetic oligonucleotide
cccuaaucgaugaugacaa

SEQ ID NO: 988027 - RNA, 19 nt, Artificial Sequence
  Description of Artificial Sequence: Synthetic oligonucleotide
ugcccuaaucgaugaugac

SEQ ID NO: 988028 - RNA, 19 nt, Artificial Sequence
  Description of Artificial Sequence: Synthetic oligonucleotide
caucauguucuagcucggc

SEQ ID NO: 988029 - RNA, 19 nt, Artificial Sequence
  Description of Artificial Sequence: Synthetic oligonucleotide
ccugucguuaugccaacag

SEQ ID NO: 988030 - RNA, 19 nt, Artificial Sequence
  Description of Artificial Sequence: Synthetic oligonucleotide
cuaaucgaugaugacaaau

SEQ ID NO: 988031 - RNA, 19 nt, Artificial Sequence
  Description of Artificial Sequence: Synthetic oligonucleotide
gaccgaagagccauugcaa

SEQ ID NO: 988032 - RNA, 19 nt, Artificial Sequence
  Description of Artificial Sequence: Synthetic oligonucleotide
gaucaccuucagacagccg

SEQ ID NO: 988033 - RNA, 19 nt, Artificial Sequence
  Description of Artificial Sequence: Synthetic oligonucleotide
ugaagaccgaagagccauu

SEQ ID NO: 988034 - RNA, 19 nt, Artificial Sequence
  Description of Artificial Sequence: Synthetic oligonucleotide
aacuaacagugugcuuaca

SEQ ID NO: 988035 - RNA, 19 nt, Artificial Sequence
  Description of Artificial Sequence: Synthetic oligonucleotide
agugugccugucugcacau

SEQ ID NO: 988036 - RNA, 19 nt, Artificial Sequence
  Description of Artificial Sequence: Synthetic oligonucleotide
gucugcccaaauuccaaaa

SEQ ID NO: 988037 - RNA, 19 nt, Artificial Sequence
  Description of Artificial Sequence: Synthetic oligonucleotide
ggugcaauccuaacgaggu

SEQ ID NO: 988038 - RNA, 19 nt, Artificial Sequence
  Description of Artificial Sequence: Synthetic oligonucleotide
gaguagugacucccauaca

SEQ ID NO: 988039 - RNA, 19 nt, Artificial Sequence
  Description of Artificial Sequence: Synthetic oligonucleotide
cugcucguguagcugcaac

SEQ ID NO: 988040 - RNA, 19 nt, Artificial Sequence
  Description of Artificial Sequence: Synthetic oligonucleotide
gaagaguagugacucccau

SEQ ID NO: 988041 - RNA, 19 nt, Artificial Sequence
  Description of Artificial Sequence: Synthetic oligonucleotide
cgaauaucagaucaaucca

SEQ ID NO: 988042 - RNA, 19 nt, Artificial Sequence
  Description of Artificial Sequence: Synthetic oligonucleotide
ggaacaccggaccacaccu

SEQ ID NO: 988043 - RNA, 19 nt, Artificial Sequence
  Description of Artificial Sequence: Synthetic oligonucleotide
caucagugugucuuggcgu

SEQ ID NO: 988044 - RNA, 19 nt, Artificial Sequence
  Description of Artificial Sequence: Synthetic oligonucleotide
uggcgucuuccaaaugcua

SEQ ID NO: 988045 - RNA, 19 nt, Artificial Sequence
  Description of Artificial Sequence: Synthetic oligonucleotide
caaggaggucccaaacaaa

SEQ ID NO: 988046 - RNA, 19 nt, Artificial Sequence
  Description of Artificial Sequence: Synthetic oligonucleotide
ugaggacauggcgacuauc

SEQ ID NO: 988047 - RNA, 19 nt, Artificial Sequence
  Description of Artificial Sequence: Synthetic oligonucleotide
acgagguaaaagagcacau

SEQ ID NO: 988048 - RNA, 19 nt, Artificial Sequence
  Description of Artificial Sequence: Synthetic oligonucleotide
gaccgacuuccagauaaga

SEQ ID NO: 988049 - RNA, 19 nt, Artificial Sequence
  Description of Artificial Sequence: Synthetic oligonucleotide
gcccuaaucgaugaugaca

SEQ ID NO: 988050 - RNA, 19 nt, Artificial Sequence
  Description of Artificial Sequence: Synthetic oligonucleotide
ggauuccuuagaaaacauc

SEQ ID NO: 988051 - RNA, 19 nt, Artificial Sequence
  Description of Artificial Sequence: Synthetic oligonucleotide
aucuugugauguggugaag

SEQ ID NO: 988052 - RNA, 19 nt, Artificial Sequence
  Description of Artificial Sequence: Synthetic oligonucleotide
gaugcagaauauagccugu

SEQ ID NO: 988053 - RNA, 19 nt, Artificial Sequence
  Description of Artificial Sequence: Synthetic oligonucleotide
ccauaugcaugucacggca

SEQ ID NO: 988054 - RNA, 19 nt, Artificial Sequence
  Description of Artificial Sequence: Synthetic oligonucleotide
caugucacggcaccugugu

SEQ ID NO: 988055 - RNA, 19 nt, Artificial Sequence
  Description of Artificial Sequence: Synthetic oligonucleotide
ucagugugucuuggcgucu

SEQ ID NO: 988056 - RNA, 19 nt, Artificial Sequence
  Description of Artificial Sequence: Synthetic oligonucleotide
guguaauaauguugcugua

SEQ ID NO: 988057 - RNA, 19 nt, Artificial Sequence
  Description of Artificial Sequence: Synthetic oligonucleotide
ccuucagacagccgucuac

SEQ ID NO: 988058 - RNA, 19 nt, Artificial Sequence
  Description of Artificial Sequence: Synthetic oligonucleotide
acgaagcaccucuguggcu

SEQ ID NO: 988059 - RNA, 19 nt, Artificial Sequence
  Description of Artificial Sequence: Synthetic oligonucleotide
agaccgacuuccagauaag

SEQ ID NO: 988060 - RNA, 19 nt, Artificial Sequence
  Description of Artificial Sequence: Synthetic oligonucleotide
agugacucccauacaugaa

SEQ ID NO: 988061 - RNA, 19 nt, Artificial Sequence
  Description of Artificial Sequence: Synthetic oligonucleotide
ccaaggaggucccaaacaa

SEQ ID NO: 988062 - RNA, 19 nt, Artificial Sequence
  Description of Artificial Sequence: Synthetic oligonucleotide
aucccuguaacugccucuu

SEQ ID NO: 988063 - RNA, 19 nt, Artificial Sequence
  Description of Artificial Sequence: Synthetic oligonucleotide
ccuucgaggaugugguguc

SEQ ID NO: 988064 - RNA, 19 nt, Artificial Sequence
  Description of Artificial Sequence: Synthetic oligonucleotide
cauugcacauucaccaguu

SEQ ID NO: 988065 - RNA, 19 nt, Artificial Sequence
  Description of Artificial Sequence: Synthetic oligonucleotide
ccugcccuaaucgaugaug

SEQ ID NO: 988066 - RNA, 19 nt, Artificial Sequence
  Description of Artificial Sequence: Synthetic oligonucleotide
cuuuacgguagagucccaa

SEQ ID NO: 988067 - RNA, 19 nt, Artificial Sequence
  Description of Artificial Sequence: Synthetic oligonucleotide
caguucaccagaccgacuu

SEQ ID NO: 988068 - RNA, 19 nt, Artificial Sequence
  Description of Artificial Sequence: Synthetic oligonucleotide
agccgucuacucccgugcu

SEQ ID NO: 988069 - RNA, 19 nt, Artificial Sequence
  Description of Artificial Sequence: Synthetic oligonucleotide
cgacuaucugggcuaaaag

SEQ ID NO: 988070 - RNA, 19 nt, Artificial Sequence
  Description of Artificial Sequence: Synthetic oligonucleotide
cugcaggaacaccggacca

SEQ ID NO: 988071 - RNA, 19 nt, Artificial Sequence
  Description of Artificial Sequence: Synthetic oligonucleotide
agugugcuuacagcauuua

SEQ ID NO: 988072 - RNA, 19 nt, Artificial Sequence
  Description of Artificial Sequence: Synthetic oligonucleotide
agacagccgucuacucccg

SEQ ID NO: 988073 - RNA, 19 nt, Artificial Sequence
  Description of Artificial Sequence: Synthetic oligonucleotide
cuucagacagccgucuacu

SEQ ID NO: 988074 - RNA, 19 nt, Artificial Sequence
  Description of Artificial Sequence: Synthetic oligonucleotide
cucggccaccaagucaaac

SEQ ID NO: 988075 - RNA, 19 nt, Artificial Sequence
  Description of Artificial Sequence: Synthetic oligonucleotide
ggaagaguagugacuccca

SEQ ID NO: 988076 - RNA, 19 nt, Artificial Sequence
  Description of Artificial Sequence: Synthetic oligonucleotide
guugcaccauccaaacagu

SEQ ID NO: 988077 - RNA, 19 nt, Artificial Sequence
  Description of Artificial Sequence: Synthetic oligonucleotide
cuacucccgugcugaggac

SEQ ID NO: 988078 - RNA, 19 nt, Artificial Sequence
  Description of Artificial Sequence: Synthetic oligonucleotide
caauacuguugaacauucu

SEQ ID NO: 988079 - RNA, 19 nt, Artificial Sequence
  Description of Artificial Sequence: Synthetic oligonucleotide
accuucagacagccgucua

SEQ ID NO: 988080 - RNA, 19 nt, Artificial Sequence
  Description of Artificial Sequence: Synthetic oligonucleotide
caauccuaacgagguaaaa

SEQ ID NO: 988081 - RNA, 19 nt, Artificial Sequence
  Description of Artificial Sequence: Synthetic oligonucleotide
ggugucuuuuggugccuga

SEQ ID NO: 988082 - RNA, 19 nt, Artificial Sequence
  Description of Artificial Sequence: Synthetic oligonucleotide
acaguucaccagaccgacu

SEQ ID NO: 988083 - RNA, 19 nt, Artificial Sequence
  Description of Artificial Sequence: Synthetic oligonucleotide
ccgaagagccauugcaaga

SEQ ID NO: 988084 - RNA, 19 nt, Artificial Sequence
  Description of Artificial Sequence: Synthetic oligonucleotide
cacugcuaucccuguaacu

SEQ ID NO: 988085 - RNA, 19 nt, Artificial Sequence
  Description of Artificial Sequence: Synthetic oligonucleotide
uuuccucggucaggucuuc

SEQ ID NO: 988086 - RNA, 19 nt, Artificial Sequence
  Description of Artificial Sequence: Synthetic oligonucleotide
cuguagugaggucccaaau

SEQ ID NO: 988087 - RNA, 19 nt, Artificial Sequence
  Description of Artificial Sequence: Synthetic oligonucleotide
accugcccuaaucgaugau

SEQ ID NO: 988088 - RNA, 19 nt, Artificial Sequence
  Description of Artificial Sequence: Synthetic oligonucleotide
gugcaauccuaacgaggua

SEQ ID NO: 988089 - RNA, 19 nt, Artificial Sequence
  Description of Artificial Sequence: Synthetic oligonucleotide
ggauguggugucacaaaua

SEQ ID NO: 988090 - RNA, 19 nt, Artificial Sequence
  Description of Artificial Sequence: Synthetic oligonucleotide
cccuguauccgcucacuga

SEQ ID NO: 988091 - RNA, 19 nt, Artificial Sequence
  Description of Artificial Sequence: Synthetic oligonucleotide
uggcgacuaucugggcuaa

SEQ ID NO: 988092 - RNA, 19 nt, Artificial Sequence
  Description of Artificial Sequence: Synthetic oligonucleotide
cuucgaggaugugguguca

SEQ ID NO: 988093 - RNA, 19 nt, Artificial Sequence
  Description of Artificial Sequence: Synthetic oligonucleotide
gccgucuacucccgugcug

SEQ ID NO: 988094 - RNA, 19 nt, Artificial Sequence
  Description of Artificial Sequence: Synthetic oligonucleotide
gcaauccuaacgagguaaa

SEQ ID NO: 988095 - RNA, 19 nt, Artificial Sequence
  Description of Artificial Sequence: Synthetic oligonucleotide
ccuguauccgcucacugau

SEQ ID NO: 988096 - RNA, 19 nt, Artificial Sequence
  Description of Artificial Sequence: Synthetic oligonucleotide
gugauguggugaagaccga

SEQ ID NO: 988097 - RNA, 19 nt, Artificial Sequence
  Description of Artificial Sequence: Synthetic oligonucleotide
ccggaagcuccacaucguc

SEQ ID NO: 988098 - RNA, 19 nt, Artificial Sequence
  Description of Artificial Sequence: Synthetic oligonucleotide
gaaggugcucggacacaua

SEQ ID NO: 988099 - RNA, 19 nt, Artificial Sequence
  Description of Artificial Sequence: Synthetic oligonucleotide
cccagacgaagcaccucug

SEQ ID NO: 988100 - RNA, 19 nt, Artificial Sequence
  Description of Artificial Sequence: Synthetic oligonucleotide
ccaaaauuugggucagcau

SEQ ID NO: 988101 - RNA, 19 nt, Artificial Sequence
  Description of Artificial Sequence: Synthetic oligonucleotide
ccgucuacucccgugcuga

SEQ ID NO: 988102 - RNA, 19 nt, Artificial Sequence
  Description of Artificial Sequence: Synthetic oligonucleotide
ccauugcacauucaccagu

SEQ ID NO: 988103 - RNA, 19 nt, Artificial Sequence
  Description of Artificial Sequence: Synthetic oligonucleotide
gcauauacucuggugcaau

SEQ ID NO: 988104 - RNA, 19 nt, Artificial Sequence
  Description of Artificial Sequence: Synthetic oligonucleotide
acaccggaccacaccuuua

SEQ ID NO: 988105 - RNA, 19 nt, Artificial Sequence
  Description of Artificial Sequence: Synthetic oligonucleotide
gacagccgucuacucccgu

SEQ ID NO: 988106 - RNA, 19 nt, Artificial Sequence
  Description of Artificial Sequence: Synthetic oligonucleotide
ccacaccuuuacgguagag

SEQ ID NO: 988107 - RNA, 19 nt, Artificial Sequence
  Description of Artificial Sequence: Synthetic oligonucleotide
ggggugauccuucgaggau

SEQ ID NO: 988108 - RNA, 19 nt, Artificial Sequence
  Description of Artificial Sequence: Synthetic oligonucleotide
cucccgugcugaggacaug

SEQ ID NO: 988109 - RNA, 19 nt, Artificial Sequence
  Description of Artificial Sequence: Synthetic oligonucleotide
cuguauccgcucacugauu

SEQ ID NO: 988110 - RNA, 19 nt, Artificial Sequence
  Description of Artificial Sequence: Synthetic oligonucleotide
cugaggacauggcgacuau

SEQ ID NO: 988111 - RNA, 19 nt, Artificial Sequence
  Description of Artificial Sequence: Synthetic oligonucleotide
cgagguaaaagagcacaua

SEQ ID NO: 988112 - RNA, 19 nt, Artificial Sequence
  Description of Artificial Sequence: Synthetic oligonucleotide
ccauugcaagacacugcua

SEQ ID NO: 988113 - RNA, 19 nt, Artificial Sequence
  Description of Artificial Sequence: Synthetic oligonucleotide
ccguugcaccauccaaaca

SEQ ID NO: 988114 - RNA, 19 nt, Artificial Sequence
  Description of Artificial Sequence: Synthetic oligonucleotide
ccuuuacgguagaguccca

SEQ ID NO: 988115 - RNA, 19 nt, Artificial Sequence
  Description of Artificial Sequence: Synthetic oligonucleotide
cuccuccccuggagaaccu

SEQ ID NO: 988116 - RNA, 19 nt, Artificial Sequence
  Description of Artificial Sequence: Synthetic oligonucleotide
cucggacacauagcugcuu

SEQ ID NO: 988117 - RNA, 19 nt, Artificial Sequence
  Description of Artificial Sequence: Synthetic oligonucleotide
cacucccuuucugcuuaua

SEQ ID NO: 988118 - RNA, 19 nt, Artificial Sequence
  Description of Artificial Sequence: Synthetic oligonucleotide
cagugugucuuggcgucuu

SEQ ID NO: 988119 - RNA, 19 nt, Artificial Sequence
  Description of Artificial Sequence: Synthetic oligonucleotide
ggcgacuaucugggcuaaa

SEQ ID NO: 988120 - RNA, 19 nt, Artificial Sequence
  Description of Artificial Sequence: Synthetic oligonucleotide
ccccuaagacugucguguu

SEQ ID NO: 988121 - RNA, 19 nt, Artificial Sequence
  Description of Artificial Sequence: Synthetic oligonucleotide
ccaacgcaucuuuguucuu

SEQ ID NO: 988122 - RNA, 19 nt, Artificial Sequence
  Description of Artificial Sequence: Synthetic oligonucleotide
auaacuuacaaauaaagag

SEQ ID NO: 988123 - RNA, 19 nt, Artificial Sequence
  Description of Artificial Sequence: Synthetic oligonucleotide
uauauauauauauauauac

SEQ ID NO: 988124 - RNA, 19 nt, Artificial Sequence
  Description of Artificial Sequence: Synthetic oligonucleotide
aaucaugccaaucacaaag

SEQ ID NO: 988125 - RNA, 19 nt, Artificial Sequence
  Description of Artificial Sequence: Synthetic oligonucleotide
aaauuauauauauauauau

SEQ ID NO: 988126 - RNA, 19 nt, Artificial Sequence
  Description of Artificial Sequence: Synthetic oligonucleotide
uauauauauacuuauauau

SEQ ID NO: 988127 - RNA, 19 nt, Artificial Sequence
  Description of Artificial Sequence: Synthetic oligonucleotide
uuagucaaaacucaagucc

SEQ ID NO: 988128 - RNA, 19 nt, Artificial Sequence
  Description of Artificial Sequence: Synthetic oligonucleotide
uauacuuauauauauauaa

SEQ ID NO: 988129 - RNA, 19 nt, Artificial Sequence
  Description of Artificial Sequence: Synthetic oligonucleotide
uuauauauauauaauuuca

SEQ ID NO: 988130 - RNA, 19 nt, Artificial Sequence
  Description of Artificial Sequence: Synthetic oligonucleotide
auaaauuauauauauauau

SEQ ID NO: 988131 - RNA, 19 nt, Artificial Sequence
  Description of Artificial Sequence: Synthetic oligonucleotide
aacuauuguaaauaaaaca

SEQ ID NO: 988132 - RNA, 19 nt, Artificial Sequence
  Description of Artificial Sequence: Synthetic oligonucleotide
auuauauauauauauauau

SEQ ID NO: 988133 - RNA, 19 nt, Artificial Sequence
  Description of Artificial Sequence: Synthetic oligonucleotide
uauauaauuucaaaucagc

SEQ ID NO: 988134 - RNA, 19 nt, Artificial Sequence
  Description of Artificial Sequence: Synthetic oligonucleotide
ucuucuuauagcuagaggu

SEQ ID NO: 988135 - RNA, 19 nt, Artificial Sequence
  Description of Artificial Sequence: Synthetic oligonucleotide
uauauauauauacuuauau

SEQ ID NO: 988136 - RNA, 19 nt, Artificial Sequence
  Description of Artificial Sequence: Synthetic oligonucleotide
agacugaccacccagacgg

SEQ ID NO: 988137 - RNA, 19 nt, Artificial Sequence
  Description of Artificial Sequence: Synthetic oligonucleotide
uacaauacgguucauguca

SEQ ID NO: 988138 - RNA, 19 nt, Artificial Sequence
  Description of Artificial Sequence: Synthetic oligonucleotide
aacauaacucuacaauacg

SEQ ID NO: 988139 - RNA, 19 nt, Artificial Sequence
  Description of Artificial Sequence: Synthetic oligonucleotide
auaagguacauccauagug

SEQ ID NO: 988140 - RNA, 19 nt, Artificial Sequence
  Description of Artificial Sequence: Synthetic oligonucleotide
uauauauauauauauacuu

SEQ ID NO: 988141 - RNA, 19 nt, Artificial Sequence
  Description of Artificial Sequence: Synthetic oligonucleotide
uauauauacuuauauauau

SEQ ID NO: 988142 - RNA, 19 nt, Artificial Sequence
  Description of Artificial Sequence: Synthetic oligonucleotide
uauauacuuauauauauau

SEQ ID NO: 988143 - RNA, 19 nt, Artificial Sequence
  Description of Artificial Sequence: Synthetic oligonucleotide
gaagcuauagagcacuggg

SEQ ID NO: 988144 - RNA, 19 nt, Artificial Sequence
  Description of Artificial Sequence: Synthetic oligonucleotide
caugcgaggaagaagaugc

SEQ ID NO: 988145 - RNA, 19 nt, Artificial Sequence
  Description of Artificial Sequence: Synthetic oligonucleotide
aagaccaccacguaggaga

SEQ ID NO: 988146 - RNA, 19 nt, Artificial Sequence
  Description of Artificial Sequence: Synthetic oligonucleotide
uauauauauauauacuuau

SEQ ID NO: 988147 - RNA, 19 nt, Artificial Sequence
  Description of Artificial Sequence: Synthetic oligonucleotide
cuuauauauauauaauuuc

SEQ ID NO: 988148 - RNA, 19 nt, Artificial Sequence
  Description of Artificial Sequence: Synthetic oligonucleotide
uuaaauacaaaagccacca

SEQ ID NO: 988149 - RNA, 19 nt, Artificial Sequence
  Description of Artificial Sequence: Synthetic oligonucleotide
ucagcuaacaauuaauguc

SEQ ID NO: 988150 - RNA, 19 nt, Artificial Sequence
  Description of Artificial Sequence: Synthetic oligonucleotide
aaaagaugaggugugugac

SEQ ID NO: 988151 - RNA, 19 nt, Artificial Sequence
  Description of Artificial Sequence: Synthetic oligonucleotide
uuucaaaucagcuaacaau

SEQ ID NO: 988152 - RNA, 19 nt, Artificial Sequence
  Description of Artificial Sequence: Synthetic oligonucleotide
uaaauuauauauauauaua

SEQ ID NO: 988153 - RNA, 19 nt, Artificial Sequence
  Description of Artificial Sequence: Synthetic oligonucleotide
uauauauauauaauuucaa

SEQ ID NO: 988154 - RNA, 19 nt, Artificial Sequence
  Description of Artificial Sequence: Synthetic oligonucleotide
aguacuccgucucugacac

SEQ ID NO: 988155 - RNA, 19 nt, Artificial Sequence
  Description of Artificial Sequence: Synthetic oligonucleotide
uauaauuucaaaucagcua

SEQ ID NO: 988156 - RNA, 19 nt, Artificial Sequence
  Description of Artificial Sequence: Synthetic oligonucleotide
uuauauauauauauauaua

SEQ ID NO: 988157 - RNA, 19 nt, Artificial Sequence
  Description of Artificial Sequence: Synthetic oligonucleotide
gaauacaacagcauuacac

SEQ ID NO: 988158 - RNA, 19 nt, Artificial Sequence
  Description of Artificial Sequence: Synthetic oligonucleotide
agcauuacaccucccauac

SEQ ID NO: 988159 - RNA, 19 nt, Artificial Sequence
  Description of Artificial Sequence: Synthetic oligonucleotide
aacucuacaauacgguuca

SEQ ID NO: 988160 - RNA, 19 nt, Artificial Sequence
  Description of Artificial Sequence: Synthetic oligonucleotide
uacuugaaaaugaaggccu

SEQ ID NO: 988161 - RNA, 19 nt, Artificial Sequence
  Description of Artificial Sequence: Synthetic oligonucleotide
agaaacauaacucuacaau

SEQ ID NO: 988162 - RNA, 19 nt, Artificial Sequence
  Description of Artificial Sequence: Synthetic oligonucleotide
uaagguacauccauaguga

SEQ ID NO: 988163 - RNA, 19 nt, Artificial Sequence
  Description of Artificial Sequence: Synthetic oligonucleotide
ugugcaggcacaaaacacc

SEQ ID NO: 988164 - RNA, 19 nt, Artificial Sequence
  Description of Artificial Sequence: Synthetic oligonucleotide
guagguaucgggcagagac

SEQ ID NO: 988165 - RNA, 19 nt, Artificial Sequence
  Description of Artificial Sequence: Synthetic oligonucleotide
ucccauacaauauuuaaaa

SEQ ID NO: 988166 - RNA, 19 nt, Artificial Sequence
  Description of Artificial Sequence: Synthetic oligonucleotide
aaggagagcguguacagca

SEQ ID NO: 988167 - RNA, 19 nt, Artificial Sequence
  Description of Artificial Sequence: Synthetic oligonucleotide
acagucacacaccuucucc

SEQ ID NO: 988168 - RNA, 19 nt, Artificial Sequence
  Description of Artificial Sequence: Synthetic oligonucleotide
uacuuauauauauauaauu

SEQ ID NO: 988169 - RNA, 19 nt, Artificial Sequence
  Description of Artificial Sequence: Synthetic oligonucleotide
uagucaaaacucaagucca

SEQ ID NO: 988170 - RNA, 19 nt, Artificial Sequence
  Description of Artificial Sequence: Synthetic oligonucleotide
cuagagagcgaucacuugg

SEQ ID NO: 988171 - RNA, 19 nt, Artificial Sequence
  Description of Artificial Sequence: Synthetic oligonucleotide
uguagugcaagauggagaa

SEQ ID NO: 988172 - RNA, 19 nt, Artificial Sequence
  Description of Artificial Sequence: Synthetic oligonucleotide
auuuauaagguacauccau

SEQ ID NO: 988173 - RNA, 19 nt, Artificial Sequence
  Description of Artificial Sequence: Synthetic oligonucleotide
uggaauguagugcaagaug

SEQ ID NO: 988174 - RNA, 19 nt, Artificial Sequence
  Description of Artificial Sequence: Synthetic oligonucleotide
ugcugcacgagacugacca

SEQ ID NO: 988175 - RNA, 19 nt, Artificial Sequence
  Description of Artificial Sequence: Synthetic oligonucleotide
uuuuguuccauauccugug

SEQ ID NO: 988176 - RNA, 19 nt, Artificial Sequence
  Description of Artificial Sequence: Synthetic oligonucleotide
aaucagcuaacaauuaaug

SEQ ID NO: 988177 - RNA, 19 nt, Artificial Sequence
  Description of Artificial Sequence: Synthetic oligonucleotide
accacaaugcagucgcugc

SEQ ID NO: 988178 - RNA, 19 nt, Artificial Sequence
  Description of Artificial Sequence: Synthetic oligonucleotide
uccauagugagaaaauaaa

SEQ ID NO: 988179 - RNA, 19 nt, Artificial Sequence
  Description of Artificial Sequence: Synthetic oligonucleotide
uggucugaauacaacagca

SEQ ID NO: 988180 - RNA, 19 nt, Artificial Sequence
  Description of Artificial Sequence: Synthetic oligonucleotide
aauuauauauauauauaua

SEQ ID NO: 988181 - RNA, 19 nt, Artificial Sequence
  Description of Artificial Sequence: Synthetic oligonucleotide
auauauauauacuuauaua

SEQ ID NO: 988182 - RNA, 19 nt, Artificial Sequence
  Description of Artificial Sequence: Synthetic oligonucleotide
aauaaagagaacacccugu

SEQ ID NO: 988183 - RNA, 19 nt, Artificial Sequence
  Description of Artificial Sequence: Synthetic oligonucleotide
uacaaaagccaccaaguaa

SEQ ID NO: 988184 - RNA, 19 nt, Artificial Sequence
  Description of Artificial Sequence: Synthetic oligonucleotide
aggucucguuguuagaagc

SEQ ID NO: 988185 - RNA, 19 nt, Artificial Sequence
  Description of Artificial Sequence: Synthetic oligonucleotide
ucaaaacucaaguccagcu

SEQ ID NO: 988186 - RNA, 19 nt, Artificial Sequence
  Description of Artificial Sequence: Synthetic oligonucleotide
uguugucguagccuugugg

SEQ ID NO: 988187 - RNA, 19 nt, Artificial Sequence
  Description of Artificial Sequence: Synthetic oligonucleotide
cuugauacugugcucgggg

SEQ ID NO: 988188 - RNA, 19 nt, Artificial Sequence
  Description of Artificial Sequence: Synthetic oligonucleotide
acaaacugcauugcggggc

SEQ ID NO: 988189 - RNA, 19 nt, Artificial Sequence
  Description of Artificial Sequence: Synthetic oligonucleotide
ugaagggaauggcaaaacc

SEQ ID NO: 988190 - RNA, 19 nt, Artificial Sequence
  Description of Artificial Sequence: Synthetic oligonucleotide
ucuauuuauuguacagaug

SEQ ID NO: 988191 - RNA, 19 nt, Artificial Sequence
  Description of Artificial Sequence: Synthetic oligonucleotide
ggaauguagugcaagaugg

SEQ ID NO: 988192 - RNA, 19 nt, Artificial Sequence
  Description of Artificial Sequence: Synthetic oligonucleotide
acggaguuggcaaucaugc

SEQ ID NO: 988193 - RNA, 19 nt, Artificial Sequence
  Description of Artificial Sequence: Synthetic oligonucleotide
aacaauuaaugucauccuu

SEQ ID NO: 988194 - RNA, 19 nt, Artificial Sequence
  Description of Artificial Sequence: Synthetic oligonucleotide
agcucguaccuguaguugc

SEQ ID NO: 988195 - RNA, 19 nt, Artificial Sequence
  Description of Artificial Sequence: Synthetic oligonucleotide
auauauauauauauauacu

SEQ ID NO: 988196 - RNA, 19 nt, Artificial Sequence
  Description of Artificial Sequence: Synthetic oligonucleotide
uuguucacggguuugcagc

SEQ ID NO: 988197 - RNA, 19 nt, Artificial Sequence
  Description of Artificial Sequence: Synthetic oligonucleotide
aacagcauuacaccuccca

SEQ ID NO: 988198 - RNA, 19 nt, Artificial Sequence
  Description of Artificial Sequence: Synthetic oligonucleotide
uuuauaagguacauccaua

SEQ ID NO: 988199 - RNA, 19 nt, Artificial Sequence
  Description of Artificial Sequence: Synthetic oligonucleotide
gaggcuggcuuuuauauac

SEQ ID NO: 988200 - RNA, 19 nt, Artificial Sequence
  Description of Artificial Sequence: Synthetic oligonucleotide
uaacucuacaauacgguuc

SEQ ID NO: 988201 - RNA, 19 nt, Artificial Sequence
  Description of Artificial Sequence: Synthetic oligonucleotide
acuuauauauauauaauuu

SEQ ID NO: 988202 - RNA, 19 nt, Artificial Sequence
  Description of Artificial Sequence: Synthetic oligonucleotide
aagguacauccauagugag

SEQ ID NO: 988203 - RNA, 19 nt, Artificial Sequence
  Description of Artificial Sequence: Synthetic oligonucleotide
cuuagucaaaacucaaguc

SEQ ID NO: 988204 - RNA, 19 nt, Artificial Sequence
  Description of Artificial Sequence: Synthetic oligonucleotide
aauuucaaaucagcuaaca

SEQ ID NO: 988205 - RNA, 19 nt, Artificial Sequence
  Description of Artificial Sequence: Synthetic oligonucleotide
aagcaaccggacccaaagc

SEQ ID NO: 988206 - RNA, 19 nt, Artificial Sequence
  Description of Artificial Sequence: Synthetic oligonucleotide
uguuagaagcagaugugac

SEQ ID NO: 988207 - RNA, 19 nt, Artificial Sequence
  Description of Artificial Sequence: Synthetic oligonucleotide
uauuguacagauguccaug

SEQ ID NO: 988208 - RNA, 19 nt, Artificial Sequence
  Description of Artificial Sequence: Synthetic oligonucleotide
uuggcugaguacuugaaaa

SEQ ID NO: 988209 - RNA, 19 nt, Artificial Sequence
  Description of Artificial Sequence: Synthetic oligonucleotide
uucuuauagcuagaggugc

SEQ ID NO: 988210 - RNA, 19 nt, Artificial Sequence
  Description of Artificial Sequence: Synthetic oligonucleotide
auauaauuucaaaucagcu

SEQ ID NO: 988211 - RNA, 19 nt, Artificial Sequence
  Description of Artificial Sequence: Synthetic oligonucleotide
ugcagcgccgugaagagca

SEQ ID NO: 988212 - RNA, 19 nt, Artificial Sequence
  Description of Artificial Sequence: Synthetic oligonucleotide
uacauugcuuucuuguaga

SEQ ID NO: 988213 - RNA, 19 nt, Artificial Sequence
  Description of Artificial Sequence: Synthetic oligonucleotide
augccuaucagccacuccu

SEQ ID NO: 988214 - RNA, 19 nt, Artificial Sequence
  Description of Artificial Sequence: Synthetic oligonucleotide
ugaaggagagcguguacag

SEQ ID NO: 988215 - RNA, 19 nt, Artificial Sequence
  Description of Artificial Sequence: Synthetic oligonucleotide
augccuauauccccacgcc

SEQ ID NO: 988216 - RNA, 19 nt, Artificial Sequence
  Description of Artificial Sequence: Synthetic oligonucleotide
gaugcagacaacacggcgc

SEQ ID NO: 988217 - RNA, 19 nt, Artificial Sequence
  Description of Artificial Sequence: Synthetic oligonucleotide
uggauguuaaccccagaac

SEQ ID NO: 988218 - RNA, 19 nt, Artificial Sequence
  Description of Artificial Sequence: Synthetic oligonucleotide
uuuguucacggguuugcag

SEQ ID NO: 988219 - RNA, 19 nt, Artificial Sequence
  Description of Artificial Sequence: Synthetic oligonucleotide
gaugcucccgaaaagguug

SEQ ID NO: 988220 - RNA, 19 nt, Artificial Sequence
  Description of Artificial Sequence: Synthetic oligonucleotide
aaaucagcuaacaauuaau

SEQ ID NO: 988221 - RNA, 19 nt, Artificial Sequence
  Description of Artificial Sequence: Synthetic oligonucleotide
ugugugacaugcagcgccg

SEQ ID NO: 988222 - RNA, 19 nt, Artificial Sequence
  Description of Artificial Sequence: Synthetic oligonucleotide
acaaaagccaccaaguaaa

SEQ ID NO: 988223 - RNA, 19 nt, Artificial Sequence
  Description of Artificial Sequence: Synthetic oligonucleotide
aauuaaugucauccuuagu

SEQ ID NO: 988224 - RNA, 19 nt, Artificial Sequence
  Description of Artificial Sequence: Synthetic oligonucleotide
uuauagcuagaggugcugg

SEQ ID NO: 988225 - RNA, 19 nt, Artificial Sequence
  Description of Artificial Sequence: Synthetic oligonucleotide
cagcuaacaauuaauguca

SEQ ID NO: 988226 - RNA, 19 nt, Artificial Sequence
  Description of Artificial Sequence: Synthetic oligonucleotide
agauguagcaguguguugu

SEQ ID NO: 988227 - RNA, 19 nt, Artificial Sequence
  Description of Artificial Sequence: Synthetic oligonucleotide
gaugugaccgucuucaggu

SEQ ID NO: 988228 - RNA, 19 nt, Artificial Sequence
  Description of Artificial Sequence: Synthetic oligonucleotide
aaacaccacacagauauaa

SEQ ID NO: 988229 - RNA, 19 nt, Artificial Sequence
  Description of Artificial Sequence: Synthetic oligonucleotide
uuccauauccugugcaggc

SEQ ID NO: 988230 - RNA, 19 nt, Artificial Sequence
  Description of Artificial Sequence: Synthetic oligonucleotide
uuguacagauguccaugcg

SEQ ID NO: 988231 - RNA, 19 nt, Artificial Sequence
  Description of Artificial Sequence: Synthetic oligonucleotide
gaauggaauguagugcaag

SEQ ID NO: 988232 - RNA, 19 nt, Artificial Sequence
  Description of Artificial Sequence: Synthetic oligonucleotide
aaagcuacauugcuuucuu

SEQ ID NO: 988233 - RNA, 19 nt, Artificial Sequence
  Description of Artificial Sequence: Synthetic oligonucleotide
augcagacaacacggcgcg

SEQ ID NO: 988234 - RNA, 19 nt, Artificial Sequence
  Description of Artificial Sequence: Synthetic oligonucleotide
acucaaguccagcuaaucu

SEQ ID NO: 988235 - RNA, 19 nt, Artificial Sequence
  Description of Artificial Sequence: Synthetic oligonucleotide
auauauauauauauacuua

SEQ ID NO: 988236 - RNA, 19 nt, Artificial Sequence
  Description of Artificial Sequence: Synthetic oligonucleotide
caagcaaccggacccaaag

SEQ ID NO: 988237 - RNA, 19 nt, Artificial Sequence
  Description of Artificial Sequence: Synthetic oligonucleotide
ucuuauagcuagaggugcu

SEQ ID NO: 988238 - RNA, 19 nt, Artificial Sequence
  Description of Artificial Sequence: Synthetic oligonucleotide
gauggaaaagaugaggugu

SEQ ID NO: 988239 - RNA, 19 nt, Artificial Sequence
  Description of Artificial Sequence: Synthetic oligonucleotide
uuguuagaagcagauguga

SEQ ID NO: 988240 - RNA, 19 nt, Artificial Sequence
  Description of Artificial Sequence: Synthetic oligonucleotide
ugaagcuauagagcacugg

SEQ ID NO: 988241 - RNA, 19 nt, Artificial Sequence
  Description of Artificial Sequence: Synthetic oligonucleotide
ugaauacaacagcauuaca

SEQ ID NO: 988242 - RNA, 19 nt, Artificial Sequence
  Description of Artificial Sequence: Synthetic oligonucleotide
aacucaaguccagcuaauc

SEQ ID NO: 988243 - RNA, 19 nt, Artificial Sequence
  Description of Artificial Sequence: Synthetic oligonucleotide
agagcgaucacuugguguu

SEQ ID NO: 988244 - RNA, 19 nt, Artificial Sequence
  Description of Artificial Sequence: Synthetic oligonucleotide
cauaaauuauauauauaua

SEQ ID NO: 988245 - RNA, 19 nt, Artificial Sequence
  Description of Artificial Sequence: Synthetic oligonucleotide
auaacucuacaauacgguu

SEQ ID NO: 988246 - RNA, 19 nt, Artificial Sequence
  Description of Artificial Sequence: Synthetic oligonucleotide
uucauaccgcucaagcaac

SEQ ID NO: 988247 - RNA, 19 nt, Artificial Sequence
  Description of Artificial Sequence: Synthetic oligonucleotide
auguuaaccccagaaccac

SEQ ID NO: 988248 - RNA, 19 nt, Artificial Sequence
  Description of Artificial Sequence: Synthetic oligonucleotide
uacuccgucucugacacgc

SEQ ID NO: 988249 - RNA, 19 nt, Artificial Sequence
  Description of Artificial Sequence: Synthetic oligonucleotide
uugcgguugaugaagcuau

SEQ ID NO: 988250 - RNA, 19 nt, Artificial Sequence
  Description of Artificial Sequence: Synthetic oligonucleotide
auaccgcucaagcaaccgg

SEQ ID NO: 988251 - RNA, 19 nt, Artificial Sequence
  Description of Artificial Sequence: Synthetic oligonucleotide
guacagauguccaugcgcc

SEQ ID NO: 988252 - RNA, 19 nt, Artificial Sequence
  Description of Artificial Sequence: Synthetic oligonucleotide
ucuccuggucacccgaugc

SEQ ID NO: 988253 - RNA, 19 nt, Artificial Sequence
  Description of Artificial Sequence: Synthetic oligonucleotide
uguuaaccccagaaccacc

SEQ ID NO: 988254 - RNA, 19 nt, Artificial Sequence
  Description of Artificial Sequence: Synthetic oligonucleotide
gugaugacgacccacaggu

SEQ ID NO: 988255 - RNA, 19 nt, Artificial Sequence
  Description of Artificial Sequence: Synthetic oligonucleotide
auauauauacuuauauaua

SEQ ID NO: 988256 - RNA, 19 nt, Artificial Sequence
  Description of Artificial Sequence: Synthetic oligonucleotide
uacaccucccauacaauau

SEQ ID NO: 988257 - RNA, 19 nt, Artificial Sequence
  Description of Artificial Sequence: Synthetic oligonucleotide
uguucacggguuugcagcc

SEQ ID NO: 988258 - RNA, 19 nt, Artificial Sequence
  Description of Artificial Sequence: Synthetic oligonucleotide
ugaugaagcuauagagcac

SEQ ID NO: 988259 - RNA, 19 nt, Artificial Sequence
  Description of Artificial Sequence: Synthetic oligonucleotide
uugcaugugagcucaccca

SEQ ID NO: 988260 - RNA, 19 nt, Artificial Sequence
  Description of Artificial Sequence: Synthetic oligonucleotide
cuucauaccgcucaagcaa

SEQ ID NO: 988261 - RNA, 19 nt, Artificial Sequence
  Description of Artificial Sequence: Synthetic oligonucleotide
gagauagcgguccacgcuc

SEQ ID NO: 988262 - RNA, 19 nt, Artificial Sequence
  Description of Artificial Sequence: Synthetic oligonucleotide
uagcuagaggugcugguga

SEQ ID NO: 988263 - RNA, 19 nt, Artificial Sequence
  Description of Artificial Sequence: Synthetic oligonucleotide
uccgucucugacacgcggg

SEQ ID NO: 988264 - RNA, 19 nt, Artificial Sequence
  Description of Artificial Sequence: Synthetic oligonucleotide
ucucguuguuagaagcaga

SEQ ID NO: 988265 - RNA, 19 nt, Artificial Sequence
  Description of Artificial Sequence: Synthetic oligonucleotide
uuacaccucccauacaaua

SEQ ID NO: 988266 - RNA, 19 nt, Artificial Sequence
  Description of Artificial Sequence: Synthetic oligonucleotide
uuauuguacagauguccau

SEQ ID NO: 988267 - RNA, 19 nt, Artificial Sequence
  Description of Artificial Sequence: Synthetic oligonucleotide
ugccuauauccccacgccc

SEQ ID NO: 988268 - RNA, 19 nt, Artificial Sequence
  Description of Artificial Sequence: Synthetic oligonucleotide
cuaaucugaggccuacgug

SEQ ID NO: 988269 - RNA, 19 nt, Artificial Sequence
  Description of Artificial Sequence: Synthetic oligonucleotide
agagauagcgguccacgcu

SEQ ID NO: 988270 - RNA, 19 nt, Artificial Sequence
  Description of Artificial Sequence: Synthetic oligonucleotide
uaccgcucaagcaaccgga

SEQ ID NO: 988271 - RNA, 19 nt, Artificial Sequence
  Description of Artificial Sequence: Synthetic oligonucleotide
uuaugcugcacgagacuga

SEQ ID NO: 988272 - RNA, 19 nt, Artificial Sequence
  Description of Artificial Sequence: Synthetic oligonucleotide
uaggucucguuguuagaag

SEQ ID NO: 988273 - RNA, 19 nt, Artificial Sequence
  Description of Artificial Sequence: Synthetic oligonucleotide
augcaugcgaggaagaaga

SEQ ID NO: 988274 - RNA, 19 nt, Artificial Sequence
  Description of Artificial Sequence: Synthetic oligonucleotide
uucacggguuugcagccag

SEQ ID NO: 988275 - RNA, 19 nt, Artificial Sequence
  Description of Artificial Sequence: Synthetic oligonucleotide
uguaguugcgguugaugaa

SEQ ID NO: 988276 - RNA, 19 nt, Artificial Sequence
  Description of Artificial Sequence: Synthetic oligonucleotide
agaagcagaugugaccguc

SEQ ID NO: 988277 - RNA, 19 nt, Artificial Sequence
  Description of Artificial Sequence: Synthetic oligonucleotide
ugcauugcggggcaguuuu

SEQ ID NO: 988278 - RNA, 19 nt, Artificial Sequence
  Description of Artificial Sequence: Synthetic oligonucleotide
gagagauagcgguccacgc

SEQ ID NO: 988279 - RNA, 19 nt, Artificial Sequence
  Description of Artificial Sequence: Synthetic oligonucleotide
auacuuauauauauauaau

SEQ ID NO: 988280 - RNA, 19 nt, Artificial Sequence
  Description of Artificial Sequence: Synthetic oligonucleotide
caugcgccuguccugaggc

SEQ ID NO: 988281 - RNA, 19 nt, Artificial Sequence
  Description of Artificial Sequence: Synthetic oligonucleotide
ugcacgagacugaccaccc

SEQ ID NO: 988282 - RNA, 19 nt, Artificial Sequence
  Description of Artificial Sequence: Synthetic oligonucleotide
uuggugaggccugucuugg

SEQ ID NO: 988283 - RNA, 19 nt, Artificial Sequence
  Description of Artificial Sequence: Synthetic oligonucleotide
ugcaugugagcucacccau

SEQ ID NO: 988284 - RNA, 19 nt, Artificial Sequence
  Description of Artificial Sequence: Synthetic oligonucleotide
aguguguugucguagccuu

SEQ ID NO: 988285 - RNA, 19 nt, Artificial Sequence
  Description of Artificial Sequence: Synthetic oligonucleotide
gacaacacggcgcggccag

SEQ ID NO: 988286 - RNA, 19 nt, Artificial Sequence
  Description of Artificial Sequence: Synthetic oligonucleotide
uccagcuaaucugaggccu

SEQ ID NO: 988287 - RNA, 19 nt, Artificial Sequence
  Description of Artificial Sequence: Synthetic oligonucleotide
aaggaccggcaguaggucu

SEQ ID NO: 988288 - RNA, 19 nt, Artificial Sequence
  Description of Artificial Sequence: Synthetic oligonucleotide
gaugaagcuauagagcacu

SEQ ID NO: 988289 - RNA, 19 nt, Artificial Sequence
  Description of Artificial Sequence: Synthetic oligonucleotide
uacguggucugaauacaac

SEQ ID NO: 988290 - RNA, 19 nt, Artificial Sequence
  Description of Artificial Sequence: Synthetic oligonucleotide
acaauacgguucaugucac

SEQ ID NO: 988291 - RNA, 19 nt, Artificial Sequence
  Description of Artificial Sequence: Synthetic oligonucleotide
agcguguacagcagcacac

SEQ ID NO: 988292 - RNA, 19 nt, Artificial Sequence
  Description of Artificial Sequence: Synthetic oligonucleotide
auccccacgcccucuagag

SEQ ID NO: 988293 - RNA, 19 nt, Artificial Sequence
  Description of Artificial Sequence: Synthetic oligonucleotide
cacgagacugaccacccag

SEQ ID NO: 988294 - RNA, 19 nt, Artificial Sequence
  Description of Artificial Sequence: Synthetic oligonucleotide
aagcuacauugcuuucuug

SEQ ID NO: 988295 - RNA, 19 nt, Artificial Sequence
  Description of Artificial Sequence: Synthetic oligonucleotide
cauuuauaagguacaucca

SEQ ID NO: 988296 - RNA, 19 nt, Artificial Sequence
  Description of Artificial Sequence: Synthetic oligonucleotide
uugauacugugcucggggu

SEQ ID NO: 988297 - RNA, 19 nt, Artificial Sequence
  Description of Artificial Sequence: Synthetic oligonucleotide
cacggcaugguauggcagc

SEQ ID NO: 988298 - RNA, 19 nt, Artificial Sequence
  Description of Artificial Sequence: Synthetic oligonucleotide
acagcauuacaccucccau

SEQ ID NO: 988299 - RNA, 19 nt, Artificial Sequence
  Description of Artificial Sequence: Synthetic oligonucleotide
ugugaccuugcaugugagc

SEQ ID NO: 988300 - RNA, 19 nt, Artificial Sequence
  Description of Artificial Sequence: Synthetic oligonucleotide
auauauauauauacuuaua

SEQ ID NO: 988301 - RNA, 19 nt, Artificial Sequence
  Description of Artificial Sequence: Synthetic oligonucleotide
accaaggaugcagacaaca

SEQ ID NO: 988302 - RNA, 19 nt, Artificial Sequence
  Description of Artificial Sequence: Synthetic oligonucleotide
ggugaugacgacccacagg

SEQ ID NO: 988303 - RNA, 19 nt, Artificial Sequence
  Description of Artificial Sequence: Synthetic oligonucleotide
uguguugucguagccuugu

SEQ ID NO: 988304 - RNA, 19 nt, Artificial Sequence
  Description of Artificial Sequence: Synthetic oligonucleotide
cauaacucuacaauacggu

SEQ ID NO: 988305 - RNA, 19 nt, Artificial Sequence
  Description of Artificial Sequence: Synthetic oligonucleotide
auauauacuuauauauaua

SEQ ID NO: 988306 - RNA, 19 nt, Artificial Sequence
  Description of Artificial Sequence: Synthetic oligonucleotide
ggcacugugugacaugcag

SEQ ID NO: 988307 - RNA, 19 nt, Artificial Sequence
  Description of Artificial Sequence: Synthetic oligonucleotide
caugcaugcgaggaagaag

SEQ ID NO: 988308 - RNA, 19 nt, Artificial Sequence
  Description of Artificial Sequence: Synthetic oligonucleotide
guugucguagccuuguggu

SEQ ID NO: 988309 - RNA, 19 nt, Artificial Sequence
  Description of Artificial Sequence: Synthetic oligonucleotide
aagaaccacggcaugguau

SEQ ID NO: 988310 - RNA, 19 nt, Artificial Sequence
  Description of Artificial Sequence: Synthetic oligonucleotide
caaauaaagagaacacccu

SEQ ID NO: 988311 - RNA, 19 nt, Artificial Sequence
  Description of Artificial Sequence: Synthetic oligonucleotide
caugcagcgccgugaagag

SEQ ID NO: 988312 - RNA, 19 nt, Artificial Sequence
  Description of Artificial Sequence: Synthetic oligonucleotide
auccauagugagaaaauaa

SEQ ID NO: 988313 - RNA, 19 nt, Artificial Sequence
  Description of Artificial Sequence: Synthetic oligonucleotide
agcagaugugaccgucuuc

SEQ ID NO: 988314 - RNA, 19 nt, Artificial Sequence
  Description of Artificial Sequence: Synthetic oligonucleotide
ugacacgcgggaggcaucg

SEQ ID NO: 988315 - RNA, 19 nt, Artificial Sequence
  Description of Artificial Sequence: Synthetic oligonucleotide
gaagaagaugcucccgaaa

SEQ ID NO: 988316 - RNA, 19 nt, Artificial Sequence
  Description of Artificial Sequence: Synthetic oligonucleotide
ugauacugugcucggggua

SEQ ID NO: 988317 - RNA, 19 nt, Artificial Sequence
  Description of Artificial Sequence: Synthetic oligonucleotide
aacacccuguucccuuugu

SEQ ID NO: 988318 - RNA, 19 nt, Artificial Sequence
  Description of Artificial Sequence: Synthetic oligonucleotide
auguagugcaagauggaga

SEQ ID NO: 988319 - RNA, 19 nt, Artificial Sequence
  Description of Artificial Sequence: Synthetic oligonucleotide
auauacuuauauauauaua

SEQ ID NO: 988320 - RNA, 19 nt, Artificial Sequence
  Description of Artificial Sequence: Synthetic oligonucleotide
aaucugaggccuacguggu

SEQ ID NO: 988321 - RNA, 19 nt, Artificial Sequence
  Description of Artificial Sequence: Synthetic oligonucleotide
cuuauagcuagaggugcug

SEQ ID NO: 988322 - RNA, 19 nt, Artificial Sequence
  Description of Artificial Sequence: Synthetic oligonucleotide
gucucguuguuagaagcag

SEQ ID NO: 988323 - RNA, 19 nt, Artificial Sequence
  Description of Artificial Sequence: Synthetic oligonucleotide
cuggauguuaaccccagaa

SEQ ID NO: 988324 - RNA, 19 nt, Artificial Sequence
  Description of Artificial Sequence: Synthetic oligonucleotide
cucccauacaauauuuaaa

SEQ ID NO: 988325 - RNA, 19 nt, Artificial Sequence
  Description of Artificial Sequence: Synthetic oligonucleotide
ugagcucacccaugggcca

SEQ ID NO: 988326 - RNA, 19 nt, Artificial Sequence
  Description of Artificial Sequence: Synthetic oligonucleotide
ggcaacaugccuauauccc

SEQ ID NO: 988327 - RNA, 19 nt, Artificial Sequence
  Description of Artificial Sequence: Synthetic oligonucleotide
uauccccacgcccucuaga

SEQ ID NO: 988328 - RNA, 19 nt, Artificial Sequence
  Description of Artificial Sequence: Synthetic oligonucleotide
acggcaugguauggcagcc

SEQ ID NO: 988329 - RNA, 19 nt, Artificial Sequence
  Description of Artificial Sequence: Synthetic oligonucleotide
acaugccuauauccccacg

SEQ ID NO: 988330 - RNA, 19 nt, Artificial Sequence
  Description of Artificial Sequence: Synthetic oligonucleotide
agaaggaccggcaguaggu

SEQ ID NO: 988331 - RNA, 19 nt, Artificial Sequence
  Description of Artificial Sequence: Synthetic oligonucleotide
cugcacgagacugaccacc

SEQ ID NO: 988332 - RNA, 19 nt, Artificial Sequence
  Description of Artificial Sequence: Synthetic oligonucleotide
uggcaggugaauggaaugu

SEQ ID NO: 988333 - RNA, 19 nt, Artificial Sequence
  Description of Artificial Sequence: Synthetic oligonucleotide
ggcuuuuauauacagcucu

SEQ ID NO: 988334 - RNA, 19 nt, Artificial Sequence
  Description of Artificial Sequence: Synthetic oligonucleotide
gaagaccaccacguaggag

SEQ ID NO: 988335 - RNA, 19 nt, Artificial Sequence
  Description of Artificial Sequence: Synthetic oligonucleotide
cuggcaacaugccuauauc

SEQ ID NO: 988336 - RNA, 19 nt, Artificial Sequence
  Description of Artificial Sequence: Synthetic oligonucleotide
agcuuggugaggccugucu

SEQ ID NO: 988337 - RNA, 19 nt, Artificial Sequence
  Description of Artificial Sequence: Synthetic oligonucleotide
agccaagacuggcauaaau

SEQ ID NO: 988338 - RNA, 19 nt, Artificial Sequence
  Description of Artificial Sequence: Synthetic oligonucleotide
ucguuguuagaagcagaug

SEQ ID NO: 988339 - RNA, 19 nt, Artificial Sequence
  Description of Artificial Sequence: Synthetic oligonucleotide
gaguuggcaaucaugccaa

SEQ ID NO: 988340 - RNA, 19 nt, Artificial Sequence
  Description of Artificial Sequence: Synthetic oligonucleotide
uucuccuggucacccgaug

SEQ ID NO: 988341 - RNA, 19 nt, Artificial Sequence
  Description of Artificial Sequence: Synthetic oligonucleotide
gagcguguacagcagcaca

SEQ ID NO: 988342 - RNA, 19 nt, Artificial Sequence
  Description of Artificial Sequence: Synthetic oligonucleotide
gcagccagaaacauaacuc

SEQ ID NO: 988343 - RNA, 19 nt, Artificial Sequence
  Description of Artificial Sequence: Synthetic oligonucleotide
aucaugccaaucacaaaga

SEQ ID NO: 988344 - RNA, 19 nt, Artificial Sequence
  Description of Artificial Sequence: Synthetic oligonucleotide
uacagauguccaugcgccu

SEQ ID NO: 988345 - RNA, 19 nt, Artificial Sequence
  Description of Artificial Sequence: Synthetic oligonucleotide
gaccuugcaugugagcuca

SEQ ID NO: 988346 - RNA, 19 nt, Artificial Sequence
  Description of Artificial Sequence: Synthetic oligonucleotide
caaaacucaaguccagcua

SEQ ID NO: 988347 - RNA, 19 nt, Artificial Sequence
  Description of Artificial Sequence: Synthetic oligonucleotide
aguaggucucguuguuaga

SEQ ID NO: 988348 - RNA, 19 nt, Artificial Sequence
  Description of Artificial Sequence: Synthetic oligonucleotide
guaggucucguuguuagaa

SEQ ID NO: 988349 - RNA, 19 nt, Artificial Sequence
  Description of Artificial Sequence: Synthetic oligonucleotide
ucaugcaugcgaggaagaa

SEQ ID NO: 988350 - RNA, 19 nt, Artificial Sequence
  Description of Artificial Sequence: Synthetic oligonucleotide
ucgggguagaaggaccggc

SEQ ID NO: 988351 - RNA, 19 nt, Artificial Sequence
  Description of Artificial Sequence: Synthetic oligonucleotide
guaucgggcagagacacaa

SEQ ID NO: 988352 - RNA, 19 nt, Artificial Sequence
  Description of Artificial Sequence: Synthetic oligonucleotide
cuccgucucugacacgcgg

SEQ ID NO: 988353 - RNA, 19 nt, Artificial Sequence
  Description of Artificial Sequence: Synthetic oligonucleotide
acacggcgcggccagcuuc

SEQ ID NO: 988354 - RNA, 19 nt, Artificial Sequence
  Description of Artificial Sequence: Synthetic oligonucleotide
acgcgggaggcaucgauga

SEQ ID NO: 988355 - RNA, 19 nt, Artificial Sequence
  Description of Artificial Sequence: Synthetic oligonucleotide
aguugcgguugaugaagcu

SEQ ID NO: 988356 - RNA, 19 nt, Artificial Sequence
  Description of Artificial Sequence: Synthetic oligonucleotide
gagagcgaucacuuggugu

SEQ ID NO: 988357 - RNA, 19 nt, Artificial Sequence
  Description of Artificial Sequence: Synthetic oligonucleotide
ucguaccuguaguugcggu

SEQ ID NO: 988358 - RNA, 19 nt, Artificial Sequence
  Description of Artificial Sequence: Synthetic oligonucleotide
uugucguagccuugugguc

SEQ ID NO: 988359 - RNA, 19 nt, Artificial Sequence
  Description of Artificial Sequence: Synthetic oligonucleotide
cacgcucaugcaugcgagg

SEQ ID NO: 988360 - RNA, 19 nt, Artificial Sequence
  Description of Artificial Sequence: Synthetic oligonucleotide
cguggucugaauacaacag

SEQ ID NO: 988361 - RNA, 19 nt, Artificial Sequence
  Description of Artificial Sequence: Synthetic oligonucleotide
caugccuaucagccacucc

SEQ ID NO: 988362 - RNA, 19 nt, Artificial Sequence
  Description of Artificial Sequence: Synthetic oligonucleotide
cacaaugcagucgcugcug

SEQ ID NO: 988363 - RNA, 19 nt, Artificial Sequence
  Description of Artificial Sequence: Synthetic oligonucleotide
agcuaaucugaggccuacg

SEQ ID NO: 988364 - RNA, 19 nt, Artificial Sequence
  Description of Artificial Sequence: Synthetic oligonucleotide
ccacugguuaugcugcacg

SEQ ID NO: 988365 - RNA, 19 nt, Artificial Sequence
  Description of Artificial Sequence: Synthetic oligonucleotide
aggaccggcaguaggucuc

SEQ ID NO: 988366 - RNA, 19 nt, Artificial Sequence
  Description of Artificial Sequence: Synthetic oligonucleotide
cagacaacacggcgcggcc

SEQ ID NO: 988367 - RNA, 19 nt, Artificial Sequence
  Description of Artificial Sequence: Synthetic oligonucleotide
cgugaagagcacauucucc

SEQ ID NO: 988368 - RNA, 19 nt, Artificial Sequence
  Description of Artificial Sequence: Synthetic oligonucleotide
gaacacccuguucccuuug

SEQ ID NO: 988369 - RNA, 19 nt, Artificial Sequence
  Description of Artificial Sequence: Synthetic oligonucleotide
caaacugcauugcggggca

SEQ ID NO: 988370 - RNA, 19 nt, Artificial Sequence
  Description of Artificial Sequence: Synthetic oligonucleotide
ccaaggaugcagacaacac

SEQ ID NO: 988371 - RNA, 19 nt, Artificial Sequence
  Description of Artificial Sequence: Synthetic oligonucleotide
cacgcgggaggcaucgaug

SEQ ID NO: 988372 - RNA, 19 nt, Artificial Sequence
  Description of Artificial Sequence: Synthetic oligonucleotide
gccuacguggucugaauac

SEQ ID NO: 988373 - RNA, 19 nt, Artificial Sequence
  Description of Artificial Sequence: Synthetic oligonucleotide
auggagagauagcggucca

SEQ ID NO: 988374 - RNA, 19 nt, Artificial Sequence
  Description of Artificial Sequence: Synthetic oligonucleotide
cucguaccuguaguugcgg

SEQ ID NO: 988375 - RNA, 19 nt, Artificial Sequence
  Description of Artificial Sequence: Synthetic oligonucleotide
ugcaugcgaggaagaagau

SEQ ID NO: 988376 - RNA, 19 nt, Artificial Sequence
  Description of Artificial Sequence: Synthetic oligonucleotide
acgcucaugcaugcgagga

SEQ ID NO: 988377 - RNA, 19 nt, Artificial Sequence
  Description of Artificial Sequence: Synthetic oligonucleotide
cgcucaagcaaccggaccc

SEQ ID NO: 988378 - RNA, 19 nt, Artificial Sequence
  Description of Artificial Sequence: Synthetic oligonucleotide
agguacauccauagugaga

SEQ ID NO: 988379 - RNA, 19 nt, Artificial Sequence
  Description of Artificial Sequence: Synthetic oligonucleotide
gaucacuugguguucuguu

SEQ ID NO: 988380 - RNA, 19 nt, Artificial Sequence
  Description of Artificial Sequence: Synthetic oligonucleotide
agagaacacccuguucccu

SEQ ID NO: 988381 - RNA, 19 nt, Artificial Sequence
  Description of Artificial Sequence: Synthetic oligonucleotide
ugaugacgacccacagguc

SEQ ID NO: 988382 - RNA, 19 nt, Artificial Sequence
  Description of Artificial Sequence: Synthetic oligonucleotide
uauagagcacuggguugac

SEQ ID NO: 988383 - RNA, 19 nt, Artificial Sequence
  Description of Artificial Sequence: Synthetic oligonucleotide
gaagaaccacggcauggua

SEQ ID NO: 988384 - RNA, 19 nt, Artificial Sequence
  Description of Artificial Sequence: Synthetic oligonucleotide
caccacaaugcagucgcug

SEQ ID NO: 988385 - RNA, 19 nt, Artificial Sequence
  Description of Artificial Sequence: Synthetic oligonucleotide
uaucgggcagagacacaaa

SEQ ID NO: 988386 - RNA, 19 nt, Artificial Sequence
  Description of Artificial Sequence: Synthetic oligonucleotide
aaccaccacggaguuggca

SEQ ID NO: 988387 - RNA, 19 nt, Artificial Sequence
  Description of Artificial Sequence: Synthetic oligonucleotide
gcuaacaauuaaugucauc

SEQ ID NO: 988388 - RNA, 19 nt, Artificial Sequence
  Description of Artificial Sequence: Synthetic oligonucleotide
accgcucaagcaaccggac

SEQ ID NO: 988389 - RNA, 19 nt, Artificial Sequence
  Description of Artificial Sequence: Synthetic oligonucleotide
cugaggcuggcuuuuauau

SEQ ID NO: 988390 - RNA, 19 nt, Artificial Sequence
  Description of Artificial Sequence: Synthetic oligonucleotide
cacccgaugcugacauggc

SEQ ID NO: 988391 - RNA, 19 nt, Artificial Sequence
  Description of Artificial Sequence: Synthetic oligonucleotide
cucguuguuagaagcagau

SEQ ID NO: 988392 - RNA, 19 nt, Artificial Sequence
  Description of Artificial Sequence: Synthetic oligonucleotide
cguuguuagaagcagaugu

SEQ ID NO: 988393 - RNA, 19 nt, Artificial Sequence
  Description of Artificial Sequence: Synthetic oligonucleotide
guugcgguugaugaagcua

SEQ ID NO: 988394 - RNA, 19 nt, Artificial Sequence
  Description of Artificial Sequence: Synthetic oligonucleotide
caagacuggcauaaauuau

SEQ ID NO: 988395 - RNA, 19 nt, Artificial Sequence
  Description of Artificial Sequence: Synthetic oligonucleotide
aaacugcauugcggggcag

SEQ ID NO: 988396 - RNA, 19 nt, Artificial Sequence
  Description of Artificial Sequence: Synthetic oligonucleotide
auuacaccucccauacaau

SEQ ID NO: 988397 - RNA, 19 nt, Artificial Sequence
  Description of Artificial Sequence: Synthetic oligonucleotide
cagcauuacaccucccaua

SEQ ID NO: 988398 - RNA, 19 nt, Artificial Sequence
  Description of Artificial Sequence: Synthetic oligonucleotide
aaaacaccacacagauaua

SEQ ID NO: 988399 - RNA, 19 nt, Artificial Sequence
  Description of Artificial Sequence: Synthetic oligonucleotide
caggugaauggaauguagu

SEQ ID NO: 988400 - RNA, 19 nt, Artificial Sequence
  Description of Artificial Sequence: Synthetic oligonucleotide
agggcccaguguuccacug

SEQ ID NO: 988401 - RNA, 19 nt, Artificial Sequence
  Description of Artificial Sequence: Synthetic oligonucleotide
cagcucguaccuguaguug

SEQ ID NO: 988402 - RNA, 19 nt, Artificial Sequence
  Description of Artificial Sequence: Synthetic oligonucleotide
gcagacaacacggcgcggc

SEQ ID NO: 988403 - RNA, 19 nt, Artificial Sequence
  Description of Artificial Sequence: Synthetic oligonucleotide
agcgaucacuugguguucu

SEQ ID NO: 988404 - RNA, 19 nt, Artificial Sequence
  Description of Artificial Sequence: Synthetic oligonucleotide
cucaugcaugcgaggaaga

SEQ ID NO: 988405 - RNA, 19 nt, Artificial Sequence
  Description of Artificial Sequence: Synthetic oligonucleotide
ugcagacaacacggcgcgg

SEQ ID NO: 988406 - RNA, 19 nt, Artificial Sequence
  Description of Artificial Sequence: Synthetic oligonucleotide
auauccugugcaggcacaa

SEQ ID NO: 988407 - RNA, 19 nt, Artificial Sequence
  Description of Artificial Sequence: Synthetic oligonucleotide
uggugaggccugucuuggc

SEQ ID NO: 988408 - RNA, 19 nt, Artificial Sequence
  Description of Artificial Sequence: Synthetic oligonucleotide
ucacggguuugcagccaga

SEQ ID NO: 988409 - RNA, 19 nt, Artificial Sequence
  Description of Artificial Sequence: Synthetic oligonucleotide
gcuuucuuguagaaaccac

SEQ ID NO: 988410 - RNA, 19 nt, Artificial Sequence
  Description of Artificial Sequence: Synthetic oligonucleotide
cuucaucagcucguaccug

SEQ ID NO: 988411 - RNA, 19 nt, Artificial Sequence
  Description of Artificial Sequence: Synthetic oligonucleotide
cagggugaguguccaggug

SEQ ID NO: 988412 - RNA, 19 nt, Artificial Sequence
  Description of Artificial Sequence: Synthetic oligonucleotide
cccgaugcugacauggcuc

SEQ ID NO: 988413 - RNA, 19 nt, Artificial Sequence
  Description of Artificial Sequence: Synthetic oligonucleotide
cuuuguucacggguuugca

SEQ ID NO: 988414 - RNA, 19 nt, Artificial Sequence
  Description of Artificial Sequence: Synthetic oligonucleotide
gugugaccuugcaugugag

SEQ ID NO: 988415 - RNA, 19 nt, Artificial Sequence
  Description of Artificial Sequence: Synthetic oligonucleotide
caaagcuacauugcuuucu

SEQ ID NO: 988416 - RNA, 19 nt, Artificial Sequence
  Description of Artificial Sequence: Synthetic oligonucleotide
acagaagguucuauuuauu

SEQ ID NO: 988417 - RNA, 19 nt, Artificial Sequence
  Description of Artificial Sequence: Synthetic oligonucleotide
acacgcgggaggcaucgau

SEQ ID NO: 988418 - RNA, 19 nt, Artificial Sequence
  Description of Artificial Sequence: Synthetic oligonucleotide
cugaggccuacguggucug

SEQ ID NO: 988419 - RNA, 19 nt, Artificial Sequence
  Description of Artificial Sequence: Synthetic oligonucleotide
gcucguaccuguaguugcg

SEQ ID NO: 988420 - RNA, 19 nt, Artificial Sequence
  Description of Artificial Sequence: Synthetic oligonucleotide
cuaucagccacuccuugau

SEQ ID NO: 988421 - RNA, 19 nt, Artificial Sequence
  Description of Artificial Sequence: Synthetic oligonucleotide
gcucgggguagaaggaccg

SEQ ID NO: 988422 - RNA, 19 nt, Artificial Sequence
  Description of Artificial Sequence: Synthetic oligonucleotide
agccagaaacauaacucua

SEQ ID NO: 988423 - RNA, 19 nt, Artificial Sequence
  Description of Artificial Sequence: Synthetic oligonucleotide
acggguuugcagccagaaa

SEQ ID NO: 988424 - RNA, 19 nt, Artificial Sequence
  Description of Artificial Sequence: Synthetic oligonucleotide
ccuuuguucacggguuugc

SEQ ID NO: 988425 - RNA, 19 nt, Artificial Sequence
  Description of Artificial Sequence: Synthetic oligonucleotide
acgagacugaccacccaga

SEQ ID NO: 988426 - RNA, 19 nt, Artificial Sequence
  Description of Artificial Sequence: Synthetic oligonucleotide
ccucccauacaauauuuaa

SEQ ID NO: 988427 - RNA, 19 nt, Artificial Sequence
  Description of Artificial Sequence: Synthetic oligonucleotide
auagagcacuggguugaca

SEQ ID NO: 988428 - RNA, 19 nt, Artificial Sequence
  Description of Artificial Sequence: Synthetic oligonucleotide
guguugucguagccuugug

SEQ ID NO: 988429 - RNA, 19 nt, Artificial Sequence
  Description of Artificial Sequence: Synthetic oligonucleotide
gcuaaucugaggccuacgu

SEQ ID NO: 988430 - RNA, 19 nt, Artificial Sequence
  Description of Artificial Sequence: Synthetic oligonucleotide
gcaugcgaggaagaagaug

SEQ ID NO: 988431 - RNA, 19 nt, Artificial Sequence
  Description of Artificial Sequence: Synthetic oligonucleotide
cucgggguagaaggaccgg

SEQ ID NO: 988432 - RNA, 19 nt, Artificial Sequence
  Description of Artificial Sequence: Synthetic oligonucleotide
acaacacggcgcggccagc

SEQ ID NO: 988433 - RNA, 19 nt, Artificial Sequence
  Description of Artificial Sequence: Synthetic oligonucleotide
caauacgguucaugucaca

SEQ ID NO: 988434 - RNA, 19 nt, Artificial Sequence
  Description of Artificial Sequence: Synthetic oligonucleotide
aaccggacccaaagcuaca

SEQ ID NO: 988435 - RNA, 19 nt, Artificial Sequence
  Description of Artificial Sequence: Synthetic oligonucleotide
agaugaucuuccggcugcu

SEQ ID NO: 988436 - RNA, 19 nt, Artificial Sequence
  Description of Artificial Sequence: Synthetic oligonucleotide
gaagcagaugugaccgucu

SEQ ID NO: 988437 - RNA, 19 nt, Artificial Sequence
  Description of Artificial Sequence: Synthetic oligonucleotide
aggccuacguggucugaau

SEQ ID NO: 988438 - RNA, 19 nt, Artificial Sequence
  Description of Artificial Sequence: Synthetic oligonucleotide
uggucacccgaugcugaca

SEQ ID NO: 988439 - RNA, 19 nt, Artificial Sequence
  Description of Artificial Sequence: Synthetic oligonucleotide
aacacggcgcggccagcuu

SEQ ID NO: 988440 - RNA, 19 nt, Artificial Sequence
  Description of Artificial Sequence: Synthetic oligonucleotide
ccacgcucaugcaugcgag

SEQ ID NO: 988441 - RNA, 19 nt, Artificial Sequence
  Description of Artificial Sequence: Synthetic oligonucleotide
cagcuaaucugaggccuac

SEQ ID NO: 988442 - RNA, 19 nt, Artificial Sequence
  Description of Artificial Sequence: Synthetic oligonucleotide
guacuccgucucugacacg

SEQ ID NO: 988443 - RNA, 19 nt, Artificial Sequence
  Description of Artificial Sequence: Synthetic oligonucleotide
ccgugaagagcacauucuc

SEQ ID NO: 988444 - RNA, 19 nt, Artificial Sequence
  Description of Artificial Sequence: Synthetic oligonucleotide
ggucucguuguuagaagca

SEQ ID NO: 988445 - RNA, 19 nt, Artificial Sequence
  Description of Artificial Sequence: Synthetic oligonucleotide
agacaacacggcgcggcca

SEQ ID NO: 988446 - RNA, 19 nt, Artificial Sequence
  Description of Artificial Sequence: Synthetic oligonucleotide
agcgccgugaagagcacau

SEQ ID NO: 988447 - RNA, 19 nt, Artificial Sequence
  Description of Artificial Sequence: Synthetic oligonucleotide
acgacccacaggucugcaa

SEQ ID NO: 988448 - RNA, 19 nt, Artificial Sequence
  Description of Artificial Sequence: Synthetic oligonucleotide
gcgggaggcaucgaugagc

SEQ ID NO: 988449 - RNA, 19 nt, Artificial Sequence
  Description of Artificial Sequence: Synthetic oligonucleotide
agauagcgguccacgcuca

SEQ ID NO: 988450 - RNA, 19 nt, Artificial Sequence
  Description of Artificial Sequence: Synthetic oligonucleotide
ggcaugguauggcagccaa

SEQ ID NO: 988451 - RNA, 19 nt, Artificial Sequence
  Description of Artificial Sequence: Synthetic oligonucleotide
augugaccgucuucaggua

SEQ ID NO: 988452 - RNA, 19 nt, Artificial Sequence
  Description of Artificial Sequence: Synthetic oligonucleotide
ugaccgucuucagguagua

SEQ ID NO: 988453 - RNA, 19 nt, Artificial Sequence
  Description of Artificial Sequence: Synthetic oligonucleotide
ccgaaaagguugauggaaa

SEQ ID NO: 988454 - RNA, 19 nt, Artificial Sequence
  Description of Artificial Sequence: Synthetic oligonucleotide
agcgguccacgcucaugca

SEQ ID NO: 988455 - RNA, 19 nt, Artificial Sequence
  Description of Artificial Sequence: Synthetic oligonucleotide
gagcucacccaugggccac

SEQ ID NO: 988456 - RNA, 19 nt, Artificial Sequence
  Description of Artificial Sequence: Synthetic oligonucleotide
ccacuccuugauacugugc

SEQ ID NO: 988457 - RNA, 19 nt, Artificial Sequence
  Description of Artificial Sequence: Synthetic oligonucleotide
gcuagaggugcuggugaag

SEQ ID NO: 988458 - RNA, 19 nt, Artificial Sequence
  Description of Artificial Sequence: Synthetic oligonucleotide
accggacccaaagcuacau

SEQ ID NO: 988459 - RNA, 19 nt, Artificial Sequence
  Description of Artificial Sequence: Synthetic oligonucleotide
gaggccuacguggucugaa

SEQ ID NO: 988460 - RNA, 19 nt, Artificial Sequence
  Description of Artificial Sequence: Synthetic oligonucleotide
gguuaugcugcacgagacu

SEQ ID NO: 988461 - RNA, 19 nt, Artificial Sequence
  Description of Artificial Sequence: Synthetic oligonucleotide
ccaacacaccaggaagacc

SEQ ID NO: 988462 - RNA, 19 nt, Artificial Sequence
  Description of Artificial Sequence: Synthetic oligonucleotide
ugaggccuacguggucuga

SEQ ID NO: 988463 - RNA, 19 nt, Artificial Sequence
  Description of Artificial Sequence: Synthetic oligonucleotide
cugacacgcgggaggcauc

SEQ ID NO: 988464 - RNA, 19 nt, Artificial Sequence
  Description of Artificial Sequence: Synthetic oligonucleotide
uacugugcucgggguagaa

SEQ ID NO: 988465 - RNA, 19 nt, Artificial Sequence
  Description of Artificial Sequence: Synthetic oligonucleotide
accggcaguaggucucguu

SEQ ID NO: 988466 - RNA, 19 nt, Artificial Sequence
  Description of Artificial Sequence: Synthetic oligonucleotide
agaccaccacguaggagaa

SEQ ID NO: 988467 - RNA, 19 nt, Artificial Sequence
  Description of Artificial Sequence: Synthetic oligonucleotide
augcgaggaagaagaugcu

SEQ ID NO: 988468 - RNA, 19 nt, Artificial Sequence
  Description of Artificial Sequence: Synthetic oligonucleotide
ccacggcaugguauggcag

SEQ ID NO: 988469 - RNA, 19 nt, Artificial Sequence
  Description of Artificial Sequence: Synthetic oligonucleotide
ccuauauccccacgcccuc

SEQ ID NO: 988470 - RNA, 19 nt, Artificial Sequence
  Description of Artificial Sequence: Synthetic oligonucleotide
ccuugcaugugagcucacc

SEQ ID NO: 988471 - RNA, 19 nt, Artificial Sequence
  Description of Artificial Sequence: Synthetic oligonucleotide
ggcgcggccagcuucuucu

SEQ ID NO: 988472 - RNA, 19 nt, Artificial Sequence
  Description of Artificial Sequence: Synthetic oligonucleotide
cccaaagcuacauugcuuu

SEQ ID NO: 988473 - RNA, 19 nt, Artificial Sequence
  Description of Artificial Sequence: Synthetic oligonucleotide
aagcacagucacacaccuu

SEQ ID NO: 988474 - RNA, 19 nt, Artificial Sequence
  Description of Artificial Sequence: Synthetic oligonucleotide
ggucacccgaugcugacau

SEQ ID NO: 988475 - RNA, 19 nt, Artificial Sequence
  Description of Artificial Sequence: Synthetic oligonucleotide
ccgcucaagcaaccggacc

SEQ ID NO: 988476 - RNA, 19 nt, Artificial Sequence
  Description of Artificial Sequence: Synthetic oligonucleotide
cgccgugaagagcacauuc

SEQ ID NO: 988477 - RNA, 19 nt, Artificial Sequence
  Description of Artificial Sequence: Synthetic oligonucleotide
ccugucuuggcugaguacu

SEQ ID NO: 988478 - RNA, 19 nt, Artificial Sequence
  Description of Artificial Sequence: Synthetic oligonucleotide
ccuacguggucugaauaca

SEQ ID NO: 988479 - RNA, 19 nt, Artificial Sequence
  Description of Artificial Sequence: Synthetic oligonucleotide
gcgaucacuugguguucug

SEQ ID NO: 988480 - RNA, 19 nt, Artificial Sequence
  Description of Artificial Sequence: Synthetic oligonucleotide
gugaccgucuucagguagu

SEQ ID NO: 988481 - RNA, 19 nt, Artificial Sequence
  Description of Artificial Sequence: Synthetic oligonucleotide
agcuggcaggugaauggaa

SEQ ID NO: 988482 - RNA, 19 nt, Artificial Sequence
  Description of Artificial Sequence: Synthetic oligonucleotide
cguguacagcagcacacuc

SEQ ID NO: 988483 - RNA, 19 nt, Artificial Sequence
  Description of Artificial Sequence: Synthetic oligonucleotide
accuugcaugugagcucac

SEQ ID NO: 988484 - RNA, 19 nt, Artificial Sequence
  Description of Artificial Sequence: Synthetic oligonucleotide
gccuauauccccacgcccu

SEQ ID NO: 988485 - RNA, 19 nt, Artificial Sequence
  Description of Artificial Sequence: Synthetic oligonucleotide
ucguagccuuguggucuug

SEQ ID NO: 988486 - RNA, 19 nt, Artificial Sequence
  Description of Artificial Sequence: Synthetic oligonucleotide
gcauuacaccucccauaca

SEQ ID NO: 988487 - RNA, 19 nt, Artificial Sequence
  Description of Artificial Sequence: Synthetic oligonucleotide
ggccuacguggucugaaua

SEQ ID NO: 988488 - RNA, 19 nt, Artificial Sequence
  Description of Artificial Sequence: Synthetic oligonucleotide
ggucugaauacaacagcau

SEQ ID NO: 988489 - RNA, 19 nt, Artificial Sequence
  Description of Artificial Sequence: Synthetic oligonucleotide
cccucuagagagcgaucac

SEQ ID NO: 988490 - RNA, 19 nt, Artificial Sequence
  Description of Artificial Sequence: Synthetic oligonucleotide
accuguaguugcgguugau

SEQ ID NO: 988491 - RNA, 19 nt, Artificial Sequence
  Description of Artificial Sequence: Synthetic oligonucleotide
ccaugggccacugguuaug

SEQ ID NO: 988492 - RNA, 19 nt, Artificial Sequence
  Description of Artificial Sequence: Synthetic oligonucleotide
ccuuguggucuuggccugg

SEQ ID NO: 988493 - RNA, 19 nt, Artificial Sequence
  Description of Artificial Sequence: Synthetic oligonucleotide
cccacgcccucuagagagc

SEQ ID NO: 988494 - RNA, 19 nt, Artificial Sequence
  Description of Artificial Sequence: Synthetic oligonucleotide
gccgugaagagcacauucu

SEQ ID NO: 988495 - RNA, 19 nt, Artificial Sequence
  Description of Artificial Sequence: Synthetic oligonucleotide
aggcacugugugacaugca

SEQ ID NO: 988496 - RNA, 19 nt, Artificial Sequence
  Description of Artificial Sequence: Synthetic oligonucleotide
gcaugguauggcagccaac

SEQ ID NO: 988497 - RNA, 19 nt, Artificial Sequence
  Description of Artificial Sequence: Synthetic oligonucleotide
cuauauccccacgcccucu

SEQ ID NO: 988498 - RNA, 19 nt, Artificial Sequence
  Description of Artificial Sequence: Synthetic oligonucleotide
ggugaguguccaggugaca

SEQ ID NO: 988499 - RNA, 19 nt, Artificial Sequence
  Description of Artificial Sequence: Synthetic oligonucleotide
cacgcccucuagagagcga

SEQ ID NO: 988500 - RNA, 19 nt, Artificial Sequence
  Description of Artificial Sequence: Synthetic oligonucleotide
cuucuccuggucacccgau

SEQ ID NO: 988501 - RNA, 19 nt, Artificial Sequence
  Description of Artificial Sequence: Synthetic oligonucleotide
gucguagccuuguggucuu

SEQ ID NO: 988502 - RNA, 19 nt, Artificial Sequence
  Description of Artificial Sequence: Synthetic oligonucleotide
gcacgagacugaccaccca

SEQ ID NO: 988503 - RNA, 19 nt, Artificial Sequence
  Description of Artificial Sequence: Synthetic oligonucleotide
ccagcuaaucugaggccua

SEQ ID NO: 988504 - RNA, 19 nt, Artificial Sequence
  Description of Artificial Sequence: Synthetic oligonucleotide
ccgucucugacacgcggga

SEQ ID NO: 988505 - RNA, 19 nt, Artificial Sequence
  Description of Artificial Sequence: Synthetic oligonucleotide
caacacggcgcggccagcu

SEQ ID NO: 988506 - RNA, 19 nt, Artificial Sequence
  Description of Artificial Sequence: Synthetic oligonucleotide
gcgguccacgcucaugcau

SEQ ID NO: 988507 - RNA, 19 nt, Artificial Sequence
  Description of Artificial Sequence: Synthetic oligonucleotide
cagccaagacuggcauaaa

SEQ ID NO: 988508 - RNA, 19 nt, Artificial Sequence
  Description of Artificial Sequence: Synthetic oligonucleotide
cgcgggaggcaucgaugag

SEQ ID NO: 988509 - RNA, 19 nt, Artificial Sequence
  Description of Artificial Sequence: Synthetic oligonucleotide
gcagcgccgugaagagcac

SEQ ID NO: 988510 - RNA, 19 nt, Artificial Sequence
  Description of Artificial Sequence: Synthetic oligonucleotide
cgcccucuagagagcgauc

SEQ ID NO: 988511 - RNA, 19 nt, Artificial Sequence
  Description of Artificial Sequence: Synthetic oligonucleotide
cacuggcaacaugccuaua

SEQ ID NO: 988512 - RNA, 19 nt, Artificial Sequence
  Description of Artificial Sequence: Synthetic oligonucleotide
cgaucacuugguguucugu

SEQ ID NO: 988513 - RNA, 19 nt, Artificial Sequence
  Description of Artificial Sequence: Synthetic oligonucleotide
gcaagcugccagggugagu

SEQ ID NO: 988514 - RNA, 19 nt, Artificial Sequence
  Description of Artificial Sequence: Synthetic oligonucleotide
cggcaugguauggcagcca

SEQ ID NO: 988515 - RNA, 19 nt, Artificial Sequence
  Description of Artificial Sequence: Synthetic oligonucleotide
ccggacccaaagcuacauu

SEQ ID NO: 988516 - RNA, 19 nt, Artificial Sequence
  Description of Artificial Sequence: Synthetic oligonucleotide
gcgccgugaagagcacauu

SEQ ID NO: 988517 - RNA, 19 nt, Artificial Sequence
  Description of Artificial Sequence: Synthetic oligonucleotide
aagaguccaacucagacug

SEQ ID NO: 988518 - RNA, 19 nt, Artificial Sequence
  Description of Artificial Sequence: Synthetic oligonucleotide
uguacauccauucaucccc

SEQ ID NO: 988519 - RNA, 19 nt, Artificial Sequence
  Description of Artificial Sequence: Synthetic oligonucleotide
uguguaaacguguugauga

SEQ ID NO: 988520 - RNA, 19 nt, Artificial Sequence
  Description of Artificial Sequence: Synthetic oligonucleotide
uccaaaguucaucaggagg

SEQ ID NO: 988521 - RNA, 19 nt, Artificial Sequence
  Description of Artificial Sequence: Synthetic oligonucleotide
gaaggcagagcucagaggc

SEQ ID NO: 988522 - RNA, 19 nt, Artificial Sequence
  Description of Artificial Sequence: Synthetic oligonucleotide
aaacguguugaugacauuc

SEQ ID NO: 988523 - RNA, 19 nt, Artificial Sequence
  Description of Artificial Sequence: Synthetic oligonucleotide
auucgaaggauccaaaaug

SEQ ID NO: 988524 - RNA, 19 nt, Artificial Sequence
  Description of Artificial Sequence: Synthetic oligonucleotide
aguucugucagccguuucc

SEQ ID NO: 988525 - RNA, 19 nt, Artificial Sequence
  Description of Artificial Sequence: Synthetic oligonucleotide
aaaagcggaggccccaggc

SEQ ID NO: 988526 - RNA, 19 nt, Artificial Sequence
  Description of Artificial Sequence: Synthetic oligonucleotide
aaucaucucucgaagcucc

SEQ ID NO: 988527 - RNA, 19 nt, Artificial Sequence
  Description of Artificial Sequence: Synthetic oligonucleotide
cucguagaugucaacaugg

SEQ ID NO: 988528 - RNA, 19 nt, Artificial Sequence
  Description of Artificial Sequence: Synthetic oligonucleotide
uggaacauucacaacccgg

SEQ ID NO: 988529 - RNA, 19 nt, Artificial Sequence
  Description of Artificial Sequence: Synthetic oligonucleotide
uuggccuagacccacacug

SEQ ID NO: 988530 - RNA, 19 nt, Artificial Sequence
  Description of Artificial Sequence: Synthetic oligonucleotide
cuguguagaagccagcugg

SEQ ID NO: 988531 - RNA, 19 nt, Artificial Sequence
  Description of Artificial Sequence: Synthetic oligonucleotide
caagcuuggggucaaaggg

SEQ ID NO: 988532 - RNA, 19 nt, Artificial Sequence
  Description of Artificial Sequence: Synthetic oligonucleotide
cuugaauggcuguauagcc

SEQ ID NO: 988533 - RNA, 19 nt, Artificial Sequence
  Description of Artificial Sequence: Synthetic oligonucleotide
aauucgaaggauccaaaau

SEQ ID NO: 988534 - RNA, 19 nt, Artificial Sequence
  Description of Artificial Sequence: Synthetic oligonucleotide
ugcaauagaggccuggaac

SEQ ID NO: 988535 - RNA, 19 nt, Artificial Sequence
  Description of Artificial Sequence: Synthetic oligonucleotide
auuguaccagcccacaaag

SEQ ID NO: 988536 - RNA, 19 nt, Artificial Sequence
  Description of Artificial Sequence: Synthetic oligonucleotide
accacguugccccagaaag

SEQ ID NO: 988537 - RNA, 19 nt, Artificial Sequence
  Description of Artificial Sequence: Synthetic oligonucleotide
gaagcuguccgucauaguc

SEQ ID NO: 988538 - RNA, 19 nt, Artificial Sequence
  Description of Artificial Sequence: Synthetic oligonucleotide
cauccauucauccccagcc

SEQ ID NO: 988539 - RNA, 19 nt, Artificial Sequence
  Description of Artificial Sequence: Synthetic oligonucleotide
uggugauaacaccuguggg

SEQ ID NO: 988540 - RNA, 19 nt, Artificial Sequence
  Description of Artificial Sequence: Synthetic oligonucleotide
ucaacuugcagaaggcaga

SEQ ID NO: 988541 - RNA, 19 nt, Artificial Sequence
  Description of Artificial Sequence: Synthetic oligonucleotide
ucaaagggcacacugggau

SEQ ID NO: 988542 - RNA, 19 nt, Artificial Sequence
  Description of Artificial Sequence: Synthetic oligonucleotide
guggugauaacaccugugg

SEQ ID NO: 988543 - RNA, 19 nt, Artificial Sequence
  Description of Artificial Sequence: Synthetic oligonucleotide
acauucuuuacuucggggu

SEQ ID NO: 988544 - RNA, 19 nt, Artificial Sequence
  Description of Artificial Sequence: Synthetic oligonucleotide
uuuacuucgggguggucag

SEQ ID NO: 988545 - RNA, 19 nt, Artificial Sequence
  Description of Artificial Sequence: Synthetic oligonucleotide
acuggcaaggucaacuugc

SEQ ID NO: 988546 - RNA, 19 nt, Artificial Sequence
  Description of Artificial Sequence: Synthetic oligonucleotide
gagaacggcgaccagcggg

SEQ ID NO: 988547 - RNA, 19 nt, Artificial Sequence
  Description of Artificial Sequence: Synthetic oligonucleotide
uuauacccaacgcugcuca

SEQ ID NO: 988548 - RNA, 19 nt, Artificial Sequence
  Description of Artificial Sequence: Synthetic oligonucleotide
aaauucgaaggauccaaaa

SEQ ID NO: 988549 - RNA, 19 nt, Artificial Sequence
  Description of Artificial Sequence: Synthetic oligonucleotide
ucgaaggauccaaaauggg

SEQ ID NO: 988550 - RNA, 19 nt, Artificial Sequence
  Description of Artificial Sequence: Synthetic oligonucleotide
uuuaacaggugcugggcug

SEQ ID NO: 988551 - RNA, 19 nt, Artificial Sequence
  Description of Artificial Sequence: Synthetic oligonucleotide
ucgagauaccuccucagca

SEQ ID NO: 988552 - RNA, 19 nt, Artificial Sequence
  Description of Artificial Sequence: Synthetic oligonucleotide
uguccgaagcaacaguucu

SEQ ID NO: 988553 - RNA, 19 nt, Artificial Sequence
  Description of Artificial Sequence: Synthetic oligonucleotide
auagucguggugauaacac

SEQ ID NO: 988554 - RNA, 19 nt, Artificial Sequence
  Description of Artificial Sequence: Synthetic oligonucleotide
ucguagaugucaacauggg

SEQ ID NO: 988555 - RNA, 19 nt, Artificial Sequence
  Description of Artificial Sequence: Synthetic oligonucleotide
cugagaacggcgaccagcg

SEQ ID NO: 988556 - RNA, 19 nt, Artificial Sequence
  Description of Artificial Sequence: Synthetic oligonucleotide
aacucagacugccucccuc

SEQ ID NO: 988557 - RNA, 19 nt, Artificial Sequence
  Description of Artificial Sequence: Synthetic oligonucleotide
uggaggcccaagaaauucg

SEQ ID NO: 988558 - RNA, 19 nt, Artificial Sequence
  Description of Artificial Sequence: Synthetic oligonucleotide
ucucguagaugucaacaug

SEQ ID NO: 988559 - RNA, 19 nt, Artificial Sequence
  Description of Artificial Sequence: Synthetic oligonucleotide
ugggaagaguccaacucag

SEQ ID NO: 988560 - RNA, 19 nt, Artificial Sequence
  Description of Artificial Sequence: Synthetic oligonucleotide
aggcccaagaaauucgaag

SEQ ID NO: 988561 - RNA, 19 nt, Artificial Sequence
  Description of Artificial Sequence: Synthetic oligonucleotide
uggcuguauagccaggucu

SEQ ID NO: 988562 - RNA, 19 nt, Artificial Sequence
  Description of Artificial Sequence: Synthetic oligonucleotide
agcaccaccgcaugguagg

SEQ ID NO: 988563 - RNA, 19 nt, Artificial Sequence
  Description of Artificial Sequence: Synthetic oligonucleotide
aaugggccggguuccuggc

SEQ ID NO: 988564 - RNA, 19 nt, Artificial Sequence
  Description of Artificial Sequence: Synthetic oligonucleotide
cuugcagggguccacgccg

SEQ ID NO: 988565 - RNA, 19 nt, Artificial Sequence
  Description of Artificial Sequence: Synthetic oligonucleotide
cuggccucgagauaccucc

SEQ ID NO: 988566 - RNA, 19 nt, Artificial Sequence
  Description of Artificial Sequence: Synthetic oligonucleotide
aagcuguccgucauagucg

SEQ ID NO: 988567 - RNA, 19 nt, Artificial Sequence
  Description of Artificial Sequence: Synthetic oligonucleotide
aaaggcccgggcugagacc

SEQ ID NO: 988568 - RNA, 19 nt, Artificial Sequence
  Description of Artificial Sequence: Synthetic oligonucleotide
gaucugaggggucucuugc

SEQ ID NO: 988569 - RNA, 19 nt, Artificial Sequence
  Description of Artificial Sequence: Synthetic oligonucleotide
uggcaacugaaucaucucu

SEQ ID NO: 988570 - RNA, 19 nt, Artificial Sequence
  Description of Artificial Sequence: Synthetic oligonucleotide
uccgucauagucgugguga

SEQ ID NO: 988571 - RNA, 19 nt, Artificial Sequence
  Description of Artificial Sequence: Synthetic oligonucleotide
uucaucaggagggaaucag

SEQ ID NO: 988572 - RNA, 19 nt, Artificial Sequence
  Description of Artificial Sequence: Synthetic oligonucleotide
ucuuccguggguacugccc

SEQ ID NO: 988573 - RNA, 19 nt, Artificial Sequence
  Description of Artificial Sequence: Synthetic oligonucleotide
ucuuauacccaacgcugcu

SEQ ID NO: 988574 - RNA, 19 nt, Artificial Sequence
  Description of Artificial Sequence: Synthetic oligonucleotide
cauucuuuacuucggggug

SEQ ID NO: 988575 - RNA, 19 nt, Artificial Sequence
  Description of Artificial Sequence: Synthetic oligonucleotide
ucuugcguggagaacugcu

SEQ ID NO: 988576 - RNA, 19 nt, Artificial Sequence
  Description of Artificial Sequence: Synthetic oligonucleotide
auagaggccuggaacauuc

SEQ ID NO: 988577 - RNA, 19 nt, Artificial Sequence
  Description of Artificial Sequence: Synthetic oligonucleotide
cuacccguugcccaucugg

SEQ ID NO: 988578 - RNA, 19 nt, Artificial Sequence
  Description of Artificial Sequence: Synthetic oligonucleotide
auucuuuacuucggggugg

SEQ ID NO: 988579 - RNA, 19 nt, Artificial Sequence
  Description of Artificial Sequence: Synthetic oligonucleotide
uggugaaggccacuugcag

SEQ ID NO: 988580 - RNA, 19 nt, Artificial Sequence
  Description of Artificial Sequence: Synthetic oligonucleotide
ucagcacuguaucugggaa

SEQ ID NO: 988581 - RNA, 19 nt, Artificial Sequence
  Description of Artificial Sequence: Synthetic oligonucleotide
gaaagagacuggccggacc

SEQ ID NO: 988582 - RNA, 19 nt, Artificial Sequence
  Description of Artificial Sequence: Synthetic oligonucleotide
uggggcggcucuuauaccc

SEQ ID NO: 988583 - RNA, 19 nt, Artificial Sequence
  Description of Artificial Sequence: Synthetic oligonucleotide
uucucccagucugagaaag

SEQ ID NO: 988584 - RNA, 19 nt, Artificial Sequence
  Description of Artificial Sequence: Synthetic oligonucleotide
gauaacaccuguggguccc

SEQ ID NO: 988585 - RNA, 19 nt, Artificial Sequence
  Description of Artificial Sequence: Synthetic oligonucleotide
agaaauucgaaggauccaa

SEQ ID NO: 988586 - RNA, 19 nt, Artificial Sequence
  Description of Artificial Sequence: Synthetic oligonucleotide
auaacucagcaccaccgca

SEQ ID NO: 988587 - RNA, 19 nt, Artificial Sequence
  Description of Artificial Sequence: Synthetic oligonucleotide
ucgacugcugagcagcgcu

SEQ ID NO: 988588 - RNA, 19 nt, Artificial Sequence
  Description of Artificial Sequence: Synthetic oligonucleotide
cuguccgucauagucgugg

SEQ ID NO: 988589 - RNA, 19 nt, Artificial Sequence
  Description of Artificial Sequence: Synthetic oligonucleotide
aaggcucgcagcgacuccg

SEQ ID NO: 988590 - RNA, 19 nt, Artificial Sequence
  Description of Artificial Sequence: Synthetic oligonucleotide
gacuccgaggugcggagcg

SEQ ID NO: 988591 - RNA, 19 nt, Artificial Sequence
  Description of Artificial Sequence: Synthetic oligonucleotide
agaacggcgaccagcgggc

SEQ ID NO: 988592 - RNA, 19 nt, Artificial Sequence
  Description of Artificial Sequence: Synthetic oligonucleotide
uaauggugaaggccacuug

SEQ ID NO: 988593 - RNA, 19 nt, Artificial Sequence
  Description of Artificial Sequence: Synthetic oligonucleotide
gaagcuccggcaccgacac

SEQ ID NO: 988594 - RNA, 19 nt, Artificial Sequence
  Description of Artificial Sequence: Synthetic oligonucleotide
gaucugagcgggcugugug

SEQ ID NO: 988595 - RNA, 19 nt, Artificial Sequence
  Description of Artificial Sequence: Synthetic oligonucleotide
guagaagccagcugggcca

SEQ ID NO: 988596 - RNA, 19 nt, Artificial Sequence
  Description of Artificial Sequence: Synthetic oligonucleotide
cuuccguggguacugcccg

SEQ ID NO: 988597 - RNA, 19 nt, Artificial Sequence
  Description of Artificial Sequence: Synthetic oligonucleotide
auacccaacgcugcucagc

SEQ ID NO: 988598 - RNA, 19 nt, Artificial Sequence
  Description of Artificial Sequence: Synthetic oligonucleotide
uaacucagcaccaccgcau

SEQ ID NO: 988599 - RNA, 19 nt, Artificial Sequence
  Description of Artificial Sequence: Synthetic oligonucleotide
gcaacugaaucaucucucg

SEQ ID NO: 988600 - RNA, 19 nt, Artificial Sequence
  Description of Artificial Sequence: Synthetic oligonucleotide
guaggcuuccugaagcucc

SEQ ID NO: 988601 - RNA, 19 nt, Artificial Sequence
  Description of Artificial Sequence: Synthetic oligonucleotide
ugauaacaccugugggucc

SEQ ID NO: 988602 - RNA, 19 nt, Artificial Sequence
  Description of Artificial Sequence: Synthetic oligonucleotide
ucagacugccucccuccgg

SEQ ID NO: 988603 - RNA, 19 nt, Artificial Sequence
  Description of Artificial Sequence: Synthetic oligonucleotide
aagggauguccuccacauc

SEQ ID NO: 988604 - RNA, 19 nt, Artificial Sequence
  Description of Artificial Sequence: Synthetic oligonucleotide
uccgaagcaacaguucugu

SEQ ID NO: 988605 - RNA, 19 nt, Artificial Sequence
  Description of Artificial Sequence: Synthetic oligonucleotide
guggguacugcccgagugg

SEQ ID NO: 988606 - RNA, 19 nt, Artificial Sequence
  Description of Artificial Sequence: Synthetic oligonucleotide
ugagcagcgcuugaauggc

SEQ ID NO: 988607 - RNA, 19 nt, Artificial Sequence
  Description of Artificial Sequence: Synthetic oligonucleotide
cuguaucugggaagagucc

SEQ ID NO: 988608 - RNA, 19 nt, Artificial Sequence
  Description of Artificial Sequence: Synthetic oligonucleotide
cagccguuuccuuggacgg

SEQ ID NO: 988609 - RNA, 19 nt, Artificial Sequence
  Description of Artificial Sequence: Synthetic oligonucleotide
aucuuccguggguacugcc

SEQ ID NO: 988610 - RNA, 19 nt, Artificial Sequence
  Description of Artificial Sequence: Synthetic oligonucleotide
cucgagauaccuccucagc

SEQ ID NO: 988611 - RNA, 19 nt, Artificial Sequence
  Description of Artificial Sequence: Synthetic oligonucleotide
ucucuugcguggagaacug

SEQ ID NO: 988612 - RNA, 19 nt, Artificial Sequence
  Description of Artificial Sequence: Synthetic oligonucleotide
gggaaugacuccaagcuug

SEQ ID NO: 988613 - RNA, 19 nt, Artificial Sequence
  Description of Artificial Sequence: Synthetic oligonucleotide
acaagggauguccuccaca

SEQ ID NO: 988614 - RNA, 19 nt, Artificial Sequence
  Description of Artificial Sequence: Synthetic oligonucleotide
ucccagucugagaaagaga

SEQ ID NO: 988615 - RNA, 19 nt, Artificial Sequence
  Description of Artificial Sequence: Synthetic oligonucleotide
agucguggugauaacaccu

SEQ ID NO: 988616 - RNA, 19 nt, Artificial Sequence
  Description of Artificial Sequence: Synthetic oligonucleotide
uuaacaggugcugggcugu

SEQ ID NO: 988617 - RNA, 19 nt, Artificial Sequence
  Description of Artificial Sequence: Synthetic oligonucleotide
uccggcaccgacacauccc

SEQ ID NO: 988618 - RNA, 19 nt, Artificial Sequence
  Description of Artificial Sequence: Synthetic oligonucleotide
cuccucgccaggaauuccc

SEQ ID NO: 988619 - RNA, 19 nt, Artificial Sequence
  Description of Artificial Sequence: Synthetic oligonucleotide
agccuguacauccauucau

SEQ ID NO: 988620 - RNA, 19 nt, Artificial Sequence
  Description of Artificial Sequence: Synthetic oligonucleotide
gaacagcgaucugagcggg

SEQ ID NO: 988621 - RNA, 19 nt, Artificial Sequence
  Description of Artificial Sequence: Synthetic oligonucleotide
aacggcgaccagcgggcgg

SEQ ID NO: 988622 - RNA, 19 nt, Artificial Sequence
  Description of Artificial Sequence: Synthetic oligonucleotide
caaaggcccgggcugagac

SEQ ID NO: 988623 - RNA, 19 nt, Artificial Sequence
  Description of Artificial Sequence: Synthetic oligonucleotide
agaaagagacuggccggac

SEQ ID NO: 988624 - RNA, 19 nt, Artificial Sequence
  Description of Artificial Sequence: Synthetic oligonucleotide
ucguggugauaacaccugu

SEQ ID NO: 988625 - RNA, 19 nt, Artificial Sequence
  Description of Artificial Sequence: Synthetic oligonucleotide
ugcccuggccucgagauac

SEQ ID NO: 988626 - RNA, 19 nt, Artificial Sequence
  Description of Artificial Sequence: Synthetic oligonucleotide
ugggaaugacuccaagcuu

SEQ ID NO: 988627 - RNA, 19 nt, Artificial Sequence
  Description of Artificial Sequence: Synthetic oligonucleotide
aggcggaugccugcuaccc

SEQ ID NO: 988628 - RNA, 19 nt, Artificial Sequence
  Description of Artificial Sequence: Synthetic oligonucleotide
uggcaaggucaacuugcag

SEQ ID NO: 988629 - RNA, 19 nt, Artificial Sequence
  Description of Artificial Sequence: Synthetic oligonucleotide
cuucucguagaugucaaca

SEQ ID NO: 988630 - RNA, 19 nt, Artificial Sequence
  Description of Artificial Sequence: Synthetic oligonucleotide
uacccguugcccaucuggu

SEQ ID NO: 988631 - RNA, 19 nt, Artificial Sequence
  Description of Artificial Sequence: Synthetic oligonucleotide
uauacccaacgcugcucag

SEQ ID NO: 988632 - RNA, 19 nt, Artificial Sequence
  Description of Artificial Sequence: Synthetic oligonucleotide
caggugccacgccaaagcg

SEQ ID NO: 988633 - RNA, 19 nt, Artificial Sequence
  Description of Artificial Sequence: Synthetic oligonucleotide
uucaccugacucugccuca

SEQ ID NO: 988634 - RNA, 19 nt, Artificial Sequence
  Description of Artificial Sequence: Synthetic oligonucleotide
cuguauagccaggucuggg

SEQ ID NO: 988635 - RNA, 19 nt, Artificial Sequence
  Description of Artificial Sequence: Synthetic oligonucleotide
acgccaaagcgcaccaggc

SEQ ID NO: 988636 - RNA, 19 nt, Artificial Sequence
  Description of Artificial Sequence: Synthetic oligonucleotide
agcuguccgucauagucgu

SEQ ID NO: 988637 - RNA, 19 nt, Artificial Sequence
  Description of Artificial Sequence: Synthetic oligonucleotide
auggggcggcucuuauacc

SEQ ID NO: 988638 - RNA, 19 nt, Artificial Sequence
  Description of Artificial Sequence: Synthetic oligonucleotide
cacccagccacugcaauag

SEQ ID NO: 988639 - RNA, 19 nt, Artificial Sequence
  Description of Artificial Sequence: Synthetic oligonucleotide
aacccggccuucuguguug

SEQ ID NO: 988640 - RNA, 19 nt, Artificial Sequence
  Description of Artificial Sequence: Synthetic oligonucleotide
ggugauaacaccugugggu

SEQ ID NO: 988641 - RNA, 19 nt, Artificial Sequence
  Description of Artificial Sequence: Synthetic oligonucleotide
aacagcgaucugagcgggc

SEQ ID NO: 988642 - RNA, 19 nt, Artificial Sequence
  Description of Artificial Sequence: Synthetic oligonucleotide
caucaggagggaaucagaa

SEQ ID NO: 988643 - RNA, 19 nt, Artificial Sequence
  Description of Artificial Sequence: Synthetic oligonucleotide
ugguaggcuuccugaagcu

SEQ ID NO: 988644 - RNA, 19 nt, Artificial Sequence
  Description of Artificial Sequence: Synthetic oligonucleotide
uggacucaccaacacccuc

SEQ ID NO: 988645 - RNA, 19 nt, Artificial Sequence
  Description of Artificial Sequence: Synthetic oligonucleotide
cauuguaccagcccacaaa

SEQ ID NO: 988646 - RNA, 19 nt, Artificial Sequence
  Description of Artificial Sequence: Synthetic oligonucleotide
aggugccacgccaaagcgc

SEQ ID NO: 988647 - RNA, 19 nt, Artificial Sequence
  Description of Artificial Sequence: Synthetic oligonucleotide
acgccggcccacuauccac

SEQ ID NO: 988648 - RNA, 19 nt, Artificial Sequence
  Description of Artificial Sequence: Synthetic oligonucleotide
aauagaggccuggaacauu

SEQ ID NO: 988649 - RNA, 19 nt, Artificial Sequence
  Description of Artificial Sequence: Synthetic oligonucleotide
ucugagcgggcugugugug

SEQ ID NO: 988650 - RNA, 19 nt, Artificial Sequence
  Description of Artificial Sequence: Synthetic oligonucleotide
gaaauucgaaggauccaaa

SEQ ID NO: 988651 - RNA, 19 nt, Artificial Sequence
  Description of Artificial Sequence: Synthetic oligonucleotide
gagaaagagacuggccgga

SEQ ID NO: 988652 - RNA, 19 nt, Artificial Sequence
  Description of Artificial Sequence: Synthetic oligonucleotide
cuuauacccaacgcugcuc

SEQ ID NO: 988653 - RNA, 19 nt, Artificial Sequence
  Description of Artificial Sequence: Synthetic oligonucleotide
acuggccggaccccucgac

SEQ ID NO: 988654 - RNA, 19 nt, Artificial Sequence
  Description of Artificial Sequence: Synthetic oligonucleotide
uggccggaccccucgacug

SEQ ID NO: 988655 - RNA, 19 nt, Artificial Sequence
  Description of Artificial Sequence: Synthetic oligonucleotide
cacaucccugcccaccacc

SEQ ID NO: 988656 - RNA, 19 nt, Artificial Sequence
  Description of Artificial Sequence: Synthetic oligonucleotide
gcggcucuuauacccaacg

SEQ ID NO: 988657 - RNA, 19 nt, Artificial Sequence
  Description of Artificial Sequence: Synthetic oligonucleotide
guaaacguguugaugacau

SEQ ID NO: 988658 - RNA, 19 nt, Artificial Sequence
  Description of Artificial Sequence: Synthetic oligonucleotide
aaagcgcaccaggccaaag

SEQ ID NO: 988659 - RNA, 19 nt, Artificial Sequence
  Description of Artificial Sequence: Synthetic oligonucleotide
agacugccucccuccggcc

SEQ ID NO: 988660 - RNA, 19 nt, Artificial Sequence
  Description of Artificial Sequence: Synthetic oligonucleotide
cuagacccacacuggcaag

SEQ ID NO: 988661 - RNA, 19 nt, Artificial Sequence
  Description of Artificial Sequence: Synthetic oligonucleotide
gcugagcagcgcuugaaug

SEQ ID NO: 988662 - RNA, 19 nt, Artificial Sequence
  Description of Artificial Sequence: Synthetic oligonucleotide
gaagcccauuguaccagcc

SEQ ID NO: 988663 - RNA, 19 nt, Artificial Sequence
  Description of Artificial Sequence: Synthetic oligonucleotide
ucccuccuuggccuagacc

SEQ ID NO: 988664 - RNA, 19 nt, Artificial Sequence
  Description of Artificial Sequence: Synthetic oligonucleotide
uguccgucauagucguggu

SEQ ID NO: 988665 - RNA, 19 nt, Artificial Sequence
  Description of Artificial Sequence: Synthetic oligonucleotide
auaacaccugugggucccc

SEQ ID NO: 988666 - RNA, 19 nt, Artificial Sequence
  Description of Artificial Sequence: Synthetic oligonucleotide
ccaaagguucccuccuugg

SEQ ID NO: 988667 - RNA, 19 nt, Artificial Sequence
  Description of Artificial Sequence: Synthetic oligonucleotide
ggaaugacuccaagcuugg

SEQ ID NO: 988668 - RNA, 19 nt, Artificial Sequence
  Description of Artificial Sequence: Synthetic oligonucleotide
ggggacauccuuaauucug

SEQ ID NO: 988669 - RNA, 19 nt, Artificial Sequence
  Description of Artificial Sequence: Synthetic oligonucleotide
uggguacugcccgagugga

SEQ ID NO: 988670 - RNA, 19 nt, Artificial Sequence
  Description of Artificial Sequence: Synthetic oligonucleotide
acagcgaucugagcgggcu

SEQ ID NO: 988671 - RNA, 19 nt, Artificial Sequence
  Description of Artificial Sequence: Synthetic oligonucleotide
uccacgccggcccacuauc

SEQ ID NO: 988672 - RNA, 19 nt, Artificial Sequence
  Description of Artificial Sequence: Synthetic oligonucleotide
ugacuccaagcuugggguc

SEQ ID NO: 988673 - RNA, 19 nt, Artificial Sequence
  Description of Artificial Sequence: Synthetic oligonucleotide
cugguaacugccaggcgga

SEQ ID NO: 988674 - RNA, 19 nt, Artificial Sequence
  Description of Artificial Sequence: Synthetic oligonucleotide
uucuuuacuucgggguggu

SEQ ID NO: 988675 - RNA, 19 nt, Artificial Sequence
  Description of Artificial Sequence: Synthetic oligonucleotide
gucguggugauaacaccug

SEQ ID NO: 988676 - RNA, 19 nt, Artificial Sequence
  Description of Artificial Sequence: Synthetic oligonucleotide
agcuccucgccaggaauuc

SEQ ID NO: 988677 - RNA, 19 nt, Artificial Sequence
  Description of Artificial Sequence: Synthetic oligonucleotide
gaccccucgacugcugagc

SEQ ID NO: 988678 - RNA, 19 nt, Artificial Sequence
  Description of Artificial Sequence: Synthetic oligonucleotide
ggcuguauagccaggucug

SEQ ID NO: 988679 - RNA, 19 nt, Artificial Sequence
  Description of Artificial Sequence: Synthetic oligonucleotide
cacuggcaaggucaacuug

SEQ ID NO: 988680 - RNA, 19 nt, Artificial Sequence
  Description of Artificial Sequence: Synthetic oligonucleotide
uagaggccuggaacauuca

SEQ ID NO: 988681 - RNA, 19 nt, Artificial Sequence
  Description of Artificial Sequence: Synthetic oligonucleotide
ccgggccacauccagagcc

SEQ ID NO: 988682 - RNA, 19 nt, Artificial Sequence
  Description of Artificial Sequence: Synthetic oligonucleotide
uuacuucgggguggucagg

SEQ ID NO: 988683 - RNA, 19 nt, Artificial Sequence
  Description of Artificial Sequence: Synthetic oligonucleotide
caacugaaucaucucucga

SEQ ID NO: 988684 - RNA, 19 nt, Artificial Sequence
  Description of Artificial Sequence: Synthetic oligonucleotide
cucgcagcgacuccgaggu

SEQ ID NO: 988685 - RNA, 19 nt, Artificial Sequence
  Description of Artificial Sequence: Synthetic oligonucleotide
gccaaagcgcaccaggcca

SEQ ID NO: 988686 - RNA, 19 nt, Artificial Sequence
  Description of Artificial Sequence: Synthetic oligonucleotide
ggcucuuauacccaacgcu

SEQ ID NO: 988687 - RNA, 19 nt, Artificial Sequence
  Description of Artificial Sequence: Synthetic oligonucleotide
gaagcuccuuaauggugaa

SEQ ID NO: 988688 - RNA, 19 nt, Artificial Sequence
  Description of Artificial Sequence: Synthetic oligonucleotide
cacuugcagggguccacgc

SEQ ID NO: 988689 - RNA, 19 nt, Artificial Sequence
  Description of Artificial Sequence: Synthetic oligonucleotide
cuuuaacaggugcugggcu

SEQ ID NO: 988690 - RNA, 19 nt, Artificial Sequence
  Description of Artificial Sequence: Synthetic oligonucleotide
ugucagccguuuccuugga

SEQ ID NO: 988691 - RNA, 19 nt, Artificial Sequence
  Description of Artificial Sequence: Synthetic oligonucleotide
gcagcgaagagccauggcu

SEQ ID NO: 988692 - RNA, 19 nt, Artificial Sequence
  Description of Artificial Sequence: Synthetic oligonucleotide
caggcggaugccugcuacc

SEQ ID NO: 988693 - RNA, 19 nt, Artificial Sequence
  Description of Artificial Sequence: Synthetic oligonucleotide
gucaggugccacgccaaag

SEQ ID NO: 988694 - RNA, 19 nt, Artificial Sequence
  Description of Artificial Sequence: Synthetic oligonucleotide
ccaaaaugggccggguucc

SEQ ID NO: 988695 - RNA, 19 nt, Artificial Sequence
  Description of Artificial Sequence: Synthetic oligonucleotide
guccgaagcaacaguucug

SEQ ID NO: 988696 - RNA, 19 nt, Artificial Sequence
  Description of Artificial Sequence: Synthetic oligonucleotide
agcgaucugagcgggcugu

SEQ ID NO: 988697 - RNA, 19 nt, Artificial Sequence
  Description of Artificial Sequence: Synthetic oligonucleotide
ccugacucugccucaguac

SEQ ID NO: 988698 - RNA, 19 nt, Artificial Sequence
  Description of Artificial Sequence: Synthetic oligonucleotide
agcagcgcuugaauggcug

SEQ ID NO: 988699 - RNA, 19 nt, Artificial Sequence
  Description of Artificial Sequence: Synthetic oligonucleotide
acuccgaggugcggagcgc

SEQ ID NO: 988700 - RNA, 19 nt, Artificial Sequence
  Description of Artificial Sequence: Synthetic oligonucleotide
cccgcgucuucccucaugg

SEQ ID NO: 988701 - RNA, 19 nt, Artificial Sequence
  Description of Artificial Sequence: Synthetic oligonucleotide
accccucgacugcugagca

SEQ ID NO: 988702 - RNA, 19 nt, Artificial Sequence
  Description of Artificial Sequence: Synthetic oligonucleotide
caccgacacaucccugccc

SEQ ID NO: 988703 - RNA, 19 nt, Artificial Sequence
  Description of Artificial Sequence: Synthetic oligonucleotide
ccucggauccaccagcuuc

SEQ ID NO: 988704 - RNA, 19 nt, Artificial Sequence
  Description of Artificial Sequence: Synthetic oligonucleotide
cagccccgccuucaggucc

SEQ ID NO: 988705 - RNA, 19 nt, Artificial Sequence
  Description of Artificial Sequence: Synthetic oligonucleotide
cacguugccccagaaagaa

SEQ ID NO: 988706 - RNA, 19 nt, Artificial Sequence
  Description of Artificial Sequence: Synthetic oligonucleotide
cagguagcuccucgccagg

SEQ ID NO: 988707 - RNA, 19 nt, Artificial Sequence
  Description of Artificial Sequence: Synthetic oligonucleotide
cggaccagcgccaccagcg

SEQ ID NO: 988708 - RNA, 19 nt, Artificial Sequence
  Description of Artificial Sequence: Synthetic oligonucleotide
gcccaagaaauucgaagga

SEQ ID NO: 988709 - RNA, 19 nt, Artificial Sequence
  Description of Artificial Sequence: Synthetic oligonucleotide
cccgaguggacucaccaac

SEQ ID NO: 988710 - RNA, 19 nt, Artificial Sequence
  Description of Artificial Sequence: Synthetic oligonucleotide
cacaagggauguccuccac

SEQ ID NO: 988711 - RNA, 19 nt, Artificial Sequence
  Description of Artificial Sequence: Synthetic oligonucleotide
cagcagcgaagagccaugg

SEQ ID NO: 988712 - RNA, 19 nt, Artificial Sequence
  Description of Artificial Sequence: Synthetic oligonucleotide
acguugccccagaaagaac

SEQ ID NO: 988713 - RNA, 19 nt, Artificial Sequence
  Description of Artificial Sequence: Synthetic oligonucleotide
ugagcgggcugugugugua

SEQ ID NO: 988714 - RNA, 19 nt, Artificial Sequence
  Description of Artificial Sequence: Synthetic oligonucleotide
cacccuccagucugguaac

SEQ ID NO: 988715 - RNA, 19 nt, Artificial Sequence
  Description of Artificial Sequence: Synthetic oligonucleotide
ccagucugguaacugccag

SEQ ID NO: 988716 - RNA, 19 nt, Artificial Sequence
  Description of Artificial Sequence: Synthetic oligonucleotide
ccagaaucacagcuguguc

SEQ ID NO: 988717 - RNA, 19 nt, Artificial Sequence
  Description of Artificial Sequence: Synthetic oligonucleotide
agcgcuugaauggcuguau

SEQ ID NO: 988718 - RNA, 19 nt, Artificial Sequence
  Description of Artificial Sequence: Synthetic oligonucleotide
uuccguggguacugcccga

SEQ ID NO: 988719 - RNA, 19 nt, Artificial Sequence
  Description of Artificial Sequence: Synthetic oligonucleotide
agacccacacuggcaaggu

SEQ ID NO: 988720 - RNA, 19 nt, Artificial Sequence
  Description of Artificial Sequence: Synthetic oligonucleotide
uggccucgagauaccuccu

SEQ ID NO: 988721 - RNA, 19 nt, Artificial Sequence
  Description of Artificial Sequence: Synthetic oligonucleotide
guccgucauagucguggug

SEQ ID NO: 988722 - RNA, 19 nt, Artificial Sequence
  Description of Artificial Sequence: Synthetic oligonucleotide
aggugcucaggugggguca

SEQ ID NO: 988723 - RNA, 19 nt, Artificial Sequence
  Description of Artificial Sequence: Synthetic oligonucleotide
ggcggaugccugcuacccg

SEQ ID NO: 988724 - RNA, 19 nt, Artificial Sequence
  Description of Artificial Sequence: Synthetic oligonucleotide
guggggucagcaggauccg

SEQ ID NO: 988725 - RNA, 19 nt, Artificial Sequence
  Description of Artificial Sequence: Synthetic oligonucleotide
caucuuccguggguacugc

SEQ ID NO: 988726 - RNA, 19 nt, Artificial Sequence
  Description of Artificial Sequence: Synthetic oligonucleotide
cccucgacugcugagcagc

SEQ ID NO: 988727 - RNA, 19 nt, Artificial Sequence
  Description of Artificial Sequence: Synthetic oligonucleotide
cagccuguacauccauuca

SEQ ID NO: 988728 - RNA, 19 nt, Artificial Sequence
  Description of Artificial Sequence: Synthetic oligonucleotide
gccacugcaauagaggccu

SEQ ID NO: 988729 - RNA, 19 nt, Artificial Sequence
  Description of Artificial Sequence: Synthetic oligonucleotide
gagaccaccccagguagcu

SEQ ID NO: 988730 - RNA, 19 nt, Artificial Sequence
  Description of Artificial Sequence: Synthetic oligonucleotide
gaacggcgaccagcgggcg

SEQ ID NO: 988731 - RNA, 19 nt, Artificial Sequence
  Description of Artificial Sequence: Synthetic oligonucleotide
ggucaacuugcagaaggca

SEQ ID NO: 988732 - RNA, 19 nt, Artificial Sequence
  Description of Artificial Sequence: Synthetic oligonucleotide
ggcagauucugugaugucu

SEQ ID NO: 988733 - RNA, 19 nt, Artificial Sequence
  Description of Artificial Sequence: Synthetic oligonucleotide
cucccucgguuucccagug

SEQ ID NO: 988734 - RNA, 19 nt, Artificial Sequence
  Description of Artificial Sequence: Synthetic oligonucleotide
gcccacuauccacacaguc

SEQ ID NO: 988735 - RNA, 19 nt, Artificial Sequence
  Description of Artificial Sequence: Synthetic oligonucleotide
gaacugcuggcagaagccu

SEQ ID NO: 988736 - RNA, 19 nt, Artificial Sequence
  Description of Artificial Sequence: Synthetic oligonucleotide
agaccaccccagguagcuc

SEQ ID NO: 988737 - RNA, 19 nt, Artificial Sequence
  Description of Artificial Sequence: Synthetic oligonucleotide
gguaacugccaggcggaug

SEQ ID NO: 988738 - RNA, 19 nt, Artificial Sequence
  Description of Artificial Sequence: Synthetic oligonucleotide
cugcaauagaggccuggaa

SEQ ID NO: 988739 - RNA, 19 nt, Artificial Sequence
  Description of Artificial Sequence: Synthetic oligonucleotide
ccuggcaacugaaucaucu

SEQ ID NO: 988740 - RNA, 19 nt, Artificial Sequence
  Description of Artificial Sequence: Synthetic oligonucleotide
ccuagacccacacuggcaa

SEQ ID NO: 988741 - RNA, 19 nt, Artificial Sequence
  Description of Artificial Sequence: Synthetic oligonucleotide
cucgacugcugagcagcgc

SEQ ID NO: 988742 - RNA, 19 nt, Artificial Sequence
  Description of Artificial Sequence: Synthetic oligonucleotide
ggccgcgcggaccagcgcc

SEQ ID NO: 988743 - RNA, 19 nt, Artificial Sequence
  Description of Artificial Sequence: Synthetic oligonucleotide
gccuguacauccauucauc

SEQ ID NO: 988744 - RNA, 19 nt, Artificial Sequence
  Description of Artificial Sequence: Synthetic oligonucleotide
uaacaccuguggguccccu

SEQ ID NO: 988745 - RNA, 19 nt, Artificial Sequence
  Description of Artificial Sequence: Synthetic oligonucleotide
gcaccgacacaucccugcc

SEQ ID NO: 988746 - RNA, 19 nt, Artificial Sequence
  Description of Artificial Sequence: Synthetic oligonucleotide
gaggcccaagaaauucgaa

SEQ ID NO: 988747 - RNA, 19 nt, Artificial Sequence
  Description of Artificial Sequence: Synthetic oligonucleotide
cacuguaucugggaagagu

SEQ ID NO: 988748 - RNA, 19 nt, Artificial Sequence
  Description of Artificial Sequence: Synthetic oligonucleotide
cagcgaucugagcgggcug

SEQ ID NO: 988749 - RNA, 19 nt, Artificial Sequence
  Description of Artificial Sequence: Synthetic oligonucleotide
gguacugcccgaguggacu

SEQ ID NO: 988750 - RNA, 19 nt, Artificial Sequence
  Description of Artificial Sequence: Synthetic oligonucleotide
ggaccccucgacugcugag

SEQ ID NO: 988751 - RNA, 19 nt, Artificial Sequence
  Description of Artificial Sequence: Synthetic oligonucleotide
cuucacccagccacugcaa

SEQ ID NO: 988752 - RNA, 19 nt, Artificial Sequence
  Description of Artificial Sequence: Synthetic oligonucleotide
ggaggcccaagaaauucga

SEQ ID NO: 988753 - RNA, 19 nt, Artificial Sequence
  Description of Artificial Sequence: Synthetic oligonucleotide
cugcccgaguggacucacc

SEQ ID NO: 988754 - RNA, 19 nt, Artificial Sequence
  Description of Artificial Sequence: Synthetic oligonucleotide
gguggucaggugccacgcc

SEQ ID NO: 988755 - RNA, 19 nt, Artificial Sequence
  Description of Artificial Sequence: Synthetic oligonucleotide
cacaaaggcccgggcugag

SEQ ID NO: 988756 - RNA, 19 nt, Artificial Sequence
  Description of Artificial Sequence: Synthetic oligonucleotide
cauucacaacccggccuuc

SEQ ID NO: 988757 - RNA, 19 nt, Artificial Sequence
  Description of Artificial Sequence: Synthetic oligonucleotide
ccucgacugcugagcagcg

SEQ ID NO: 988758 - RNA, 19 nt, Artificial Sequence
  Description of Artificial Sequence: Synthetic oligonucleotide
ccugcccaccaccacguug

SEQ ID NO: 988759 - RNA, 19 nt, Artificial Sequence
  Description of Artificial Sequence: Synthetic oligonucleotide
ccuggagggaggcggccgg

SEQ ID NO: 988760 - RNA, 19 nt, Artificial Sequence
  Description of Artificial Sequence: Synthetic oligonucleotide
ucuuuacuucggggugguc

SEQ ID NO: 988761 - RNA, 19 nt, Artificial Sequence
  Description of Artificial Sequence: Synthetic oligonucleotide
ggucuggugguccucugcu

SEQ ID NO: 988762 - RNA, 19 nt, Artificial Sequence
  Description of Artificial Sequence: Synthetic oligonucleotide
ccccagggcagauucugug

SEQ ID NO: 988763 - RNA, 19 nt, Artificial Sequence
  Description of Artificial Sequence: Synthetic oligonucleotide
ccaggcggaugccugcuac

SEQ ID NO: 988764 - RNA, 19 nt, Artificial Sequence
  Description of Artificial Sequence: Synthetic oligonucleotide
ccacuugcagggguccacg

SEQ ID NO: 988765 - RNA, 19 nt, Artificial Sequence
  Description of Artificial Sequence: Synthetic oligonucleotide
ucgcagcgacuccgaggug

SEQ ID NO: 988766 - RNA, 19 nt, Artificial Sequence
  Description of Artificial Sequence: Synthetic oligonucleotide
ugguaacugccaggcggau

SEQ ID NO: 988767 - RNA, 19 nt, Artificial Sequence
  Description of Artificial Sequence: Synthetic oligonucleotide
ggguagagucagccuguac

SEQ ID NO: 988768 - RNA, 19 nt, Artificial Sequence
  Description of Artificial Sequence: Synthetic oligonucleotide
uggggucgggaugcuccug

SEQ ID NO: 988769 - RNA, 19 nt, Artificial Sequence
  Description of Artificial Sequence: Synthetic oligonucleotide
gccugcuacccguugccca

SEQ ID NO: 988770 - RNA, 19 nt, Artificial Sequence
  Description of Artificial Sequence: Synthetic oligonucleotide
cacgccggcccacuaucca

SEQ ID NO: 988771 - RNA, 19 nt, Artificial Sequence
  Description of Artificial Sequence: Synthetic oligonucleotide
ccucgccaggaauucccag

SEQ ID NO: 988772 - RNA, 19 nt, Artificial Sequence
  Description of Artificial Sequence: Synthetic oligonucleotide
gacuggccggaccccucga

SEQ ID NO: 988773 - RNA, 19 nt, Artificial Sequence
  Description of Artificial Sequence: Synthetic oligonucleotide
caccacguugccccagaaa

SEQ ID NO: 988774 - RNA, 19 nt, Artificial Sequence
  Description of Artificial Sequence: Synthetic oligonucleotide
agcgggcuguguguguaaa

SEQ ID NO: 988775 - RNA, 19 nt, Artificial Sequence
  Description of Artificial Sequence: Synthetic oligonucleotide
cggcucuuauacccaacgc

SEQ ID NO: 988776 - RNA, 19 nt, Artificial Sequence
  Description of Artificial Sequence: Synthetic oligonucleotide
ccgaguggacucaccaaca

SEQ ID NO: 988777 - RNA, 19 nt, Artificial Sequence
  Description of Artificial Sequence: Synthetic oligonucleotide
caauagaggccuggaacau

SEQ ID NO: 988778 - RNA, 19 nt, Artificial Sequence
  Description of Artificial Sequence: Synthetic oligonucleotide
gguucccuccuuggccuag

SEQ ID NO: 988779 - RNA, 19 nt, Artificial Sequence
  Description of Artificial Sequence: Synthetic oligonucleotide
ggucucuugcguggagaac

SEQ ID NO: 988780 - RNA, 19 nt, Artificial Sequence
  Description of Artificial Sequence: Synthetic oligonucleotide
ggccggaccccucgacugc

SEQ ID NO: 988781 - RNA, 19 nt, Artificial Sequence
  Description of Artificial Sequence: Synthetic oligonucleotide
ccacguugccccagaaaga

SEQ ID NO: 988782 - RNA, 19 nt, Artificial Sequence
  Description of Artificial Sequence: Synthetic oligonucleotide
ccaacgcugcucagcacca

SEQ ID NO: 988783 - RNA, 19 nt, Artificial Sequence
  Description of Artificial Sequence: Synthetic oligonucleotide
acccuccagucugguaacu

SEQ ID NO: 988784 - RNA, 19 nt, Artificial Sequence
  Description of Artificial Sequence: Synthetic oligonucleotide
gcgggcuguguguguaaac

SEQ ID NO: 988785 - RNA, 19 nt, Artificial Sequence
  Description of Artificial Sequence: Synthetic oligonucleotide
cgaccagcgggcgggaagg

SEQ ID NO: 988786 - RNA, 19 nt, Artificial Sequence
  Description of Artificial Sequence: Synthetic oligonucleotide
ggcugagaacggcgaccag

SEQ ID NO: 988787 - RNA, 19 nt, Artificial Sequence
  Description of Artificial Sequence: Synthetic oligonucleotide
ccacgccggcccacuaucc

SEQ ID NO: 988788 - RNA, 19 nt, Artificial Sequence
  Description of Artificial Sequence: Synthetic oligonucleotide
gcccauuguaccagcccac

SEQ ID NO: 988789 - RNA, 19 nt, Artificial Sequence
  Description of Artificial Sequence: Synthetic oligonucleotide
gcuccucgccaggaauucc

SEQ ID NO: 988790 - RNA, 19 nt, Artificial Sequence
  Description of Artificial Sequence: Synthetic oligonucleotide
cagcgacuccgaggugcgg

SEQ ID NO: 988791 - RNA, 19 nt, Artificial Sequence
  Description of Artificial Sequence: Synthetic oligonucleotide
cuccggccccgcgucuucc

SEQ ID NO: 988792 - RNA, 19 nt, Artificial Sequence
  Description of Artificial Sequence: Synthetic oligonucleotide
gcuguccgaagcaacaguu

SEQ ID NO: 988793 - RNA, 19 nt, Artificial Sequence
  Description of Artificial Sequence: Synthetic oligonucleotide
gguccccucuucacccagc

SEQ ID NO: 988794 - RNA, 19 nt, Artificial Sequence
  Description of Artificial Sequence: Synthetic oligonucleotide
ggucaggugccacgccaaa

SEQ ID NO: 988795 - RNA, 19 nt, Artificial Sequence
  Description of Artificial Sequence: Synthetic oligonucleotide
caaagcgcaccaggccaaa

SEQ ID NO: 988796 - RNA, 19 nt, Artificial Sequence
  Description of Artificial Sequence: Synthetic oligonucleotide
gcuacccguugcccaucug

SEQ ID NO: 988797 - RNA, 19 nt, Artificial Sequence
  Description of Artificial Sequence: Synthetic oligonucleotide
ggccccgcgucuucccuca

SEQ ID NO: 988798 - RNA, 19 nt, Artificial Sequence
  Description of Artificial Sequence: Synthetic oligonucleotide
gcagccccgccuucagguc

SEQ ID NO: 988799 - RNA, 19 nt, Artificial Sequence
  Description of Artificial Sequence: Synthetic oligonucleotide
gccggcccacuauccacac

SEQ ID NO: 988800 - RNA, 19 nt, Artificial Sequence
  Description of Artificial Sequence: Synthetic oligonucleotide
gagcagcgcuugaauggcu

SEQ ID NO: 988801 - RNA, 19 nt, Artificial Sequence
  Description of Artificial Sequence: Synthetic oligonucleotide
caaaaugggccggguuccu

SEQ ID NO: 988802 - RNA, 19 nt, Artificial Sequence
  Description of Artificial Sequence: Synthetic oligonucleotide
ggcggcucuuauacccaac

SEQ ID NO: 988803 - RNA, 19 nt, Artificial Sequence
  Description of Artificial Sequence: Synthetic oligonucleotide
gcagcgcuugaauggcugu

SEQ ID NO: 988804 - RNA, 19 nt, Artificial Sequence
  Description of Artificial Sequence: Synthetic oligonucleotide
gcgcuugaauggcuguaua

SEQ ID NO: 988805 - RNA, 19 nt, Artificial Sequence
  Description of Artificial Sequence: Synthetic oligonucleotide
gcgcggaccagcgccacca

SEQ ID NO: 988806 - RNA, 19 nt, Artificial Sequence
  Description of Artificial Sequence: Synthetic oligonucleotide
gcccgaguggacucaccaa

SEQ ID NO: 988807 - RNA, 19 nt, Artificial Sequence
  Description of Artificial Sequence: Synthetic oligonucleotide
ccccucgacugcugagcag

SEQ ID NO: 988808 - RNA, 19 nt, Artificial Sequence
  Description of Artificial Sequence: Synthetic oligonucleotide
ggggcggcucuuauaccca

SEQ ID NO: 988809 - RNA, 19 nt, Artificial Sequence
  Description of Artificial Sequence: Synthetic oligonucleotide
cccaagaaauucgaaggau

SEQ ID NO: 988810 - RNA, 19 nt, Artificial Sequence
  Description of Artificial Sequence: Synthetic oligonucleotide
gggcggcucuuauacccaa

SEQ ID NO: 988811 - RNA, 19 nt, Artificial Sequence
  Description of Artificial Sequence: Synthetic oligonucleotide
ccgggcugagaccacccca

SEQ ID NO: 988812 - RNA, 19 nt, Artificial Sequence
  Description of Artificial Sequence: Synthetic oligonucleotide
cccauuguaccagcccaca

SEQ ID NO: 988813 - RNA, 19 nt, Artificial Sequence
  Description of Artificial Sequence: Synthetic oligonucleotide
cugagcgggcugugugugu

SEQ ID NO: 988814 - RNA, 19 nt, Artificial Sequence
  Description of Artificial Sequence: Synthetic oligonucleotide
ccaccgcaugguaggcuuc

SEQ ID NO: 988815 - RNA, 19 nt, Artificial Sequence
  Description of Artificial Sequence: Synthetic oligonucleotide
guccacgccggcccacuau

SEQ ID NO: 988816 - RNA, 19 nt, Artificial Sequence
  Description of Artificial Sequence: Synthetic oligonucleotide
ccggccuucuguguuggga

SEQ ID NO: 988817 - RNA, 19 nt, Artificial Sequence
  Description of Artificial Sequence: Synthetic oligonucleotide
ccacaaaggcccgggcuga

SEQ ID NO: 988818 - RNA, 19 nt, Artificial Sequence
  Description of Artificial Sequence: Synthetic oligonucleotide
ccacugcaauagaggccug

SEQ ID NO: 988819 - RNA, 19 nt, Artificial Sequence
  Description of Artificial Sequence: Synthetic oligonucleotide
cguugcccaucuggugugg

SEQ ID NO: 988820 - RNA, 19 nt, Artificial Sequence
  Description of Artificial Sequence: Synthetic oligonucleotide
gugccacgccaaagcgcac

SEQ ID NO: 988821 - RNA, 19 nt, Artificial Sequence
  Description of Artificial Sequence: Synthetic oligonucleotide
ccccgcgucuucccucaug

SEQ ID NO: 988822 - RNA, 19 nt, Artificial Sequence
  Description of Artificial Sequence: Synthetic oligonucleotide
ccggcaccgacacaucccu

SEQ ID NO: 988823 - RNA, 19 nt, Artificial Sequence
  Description of Artificial Sequence: Synthetic oligonucleotide
ccacgccaaagcgcaccag

SEQ ID NO: 988824 - RNA, 19 nt, Artificial Sequence
  Description of Artificial Sequence: Synthetic oligonucleotide
caccaccgcaugguaggcu

SEQ ID NO: 988825 - RNA, 19 nt, Artificial Sequence
  Description of Artificial Sequence: Synthetic oligonucleotide
gcgggaaggcucgcagcga

SEQ ID NO: 988826 - RNA, 19 nt, Artificial Sequence
  Description of Artificial Sequence: Synthetic oligonucleotide
ccggaccccucgacugcug

SEQ ID NO: 988827 - RNA, 19 nt, Artificial Sequence
  Description of Artificial Sequence: Synthetic oligonucleotide
ccagcccacaagggauguc

SEQ ID NO: 988828 - RNA, 19 nt, Artificial Sequence
  Description of Artificial Sequence: Synthetic oligonucleotide
gguccacgccggcccacua

SEQ ID NO: 988829 - RNA, 19 nt, Artificial Sequence
  Description of Artificial Sequence: Synthetic oligonucleotide
cgacuccgaggugcggagc

SEQ ID NO: 988830 - RNA, 19 nt, Artificial Sequence
  Description of Artificial Sequence: Synthetic oligonucleotide
gggaaggcucgcagcgacu

SEQ ID NO: 988831 - RNA, 19 nt, Artificial Sequence
  Description of Artificial Sequence: Synthetic oligonucleotide
ccgucauagucguggugau

SEQ ID NO: 988832 - RNA, 19 nt, Artificial Sequence
  Description of Artificial Sequence: Synthetic oligonucleotide
cggcaccgacacaucccug

SEQ ID NO: 988833 - RNA, 19 nt, Artificial Sequence
  Description of Artificial Sequence: Synthetic oligonucleotide
cggaccccucgacugcuga

SEQ ID NO: 988834 - RNA, 19 nt, Artificial Sequence
  Description of Artificial Sequence: Synthetic oligonucleotide
ggcccacuauccacacagu

SEQ ID NO: 988835 - RNA, 19 nt, Artificial Sequence
  Description of Artificial Sequence: Synthetic oligonucleotide
ccaccacguugccccagaa

SEQ ID NO: 988836 - RNA, 19 nt, Artificial Sequence
  Description of Artificial Sequence: Synthetic oligonucleotide
ccggcccacuauccacaca

SEQ ID NO: 988837 - RNA, 19 nt, Artificial Sequence
  Description of Artificial Sequence: Synthetic oligonucleotide
gccggaccccucgacugcu

SEQ ID NO: 988838 - RNA, 19 nt, Artificial Sequence
  Description of Artificial Sequence: Synthetic oligonucleotide
cgucauagucguggugaua

SEQ ID NO: 988839 - RNA, 19 nt, Artificial Sequence
  Description of Artificial Sequence: Synthetic oligonucleotide
ccgcgcggaccagcgccac

SEQ ID NO: 988840 - RNA, 19 nt, Artificial Sequence
  Description of Artificial Sequence: Synthetic oligonucleotide
ccguggguacugcccgagu

SEQ ID NO: 988841 - RNA, 19 nt, Artificial Sequence
  Description of Artificial Sequence: Synthetic oligonucleotide
gccccgccuucagguccug

SEQ ID NO: 988842 - RNA, 19 nt, Artificial Sequence
  Description of Artificial Sequence: Synthetic oligonucleotide
ccggugccagcuccugguu

SEQ ID NO: 988843 - RNA, 19 nt, Artificial Sequence
  Description of Artificial Sequence: Synthetic oligonucleotide
ccccggccgcgcggaccag

SEQ ID NO: 988844 - RNA, 19 nt, Artificial Sequence
  Description of Artificial Sequence: Synthetic oligonucleotide
gccccgcgucuucccucau

SEQ ID NO: 988845 - RNA, 19 nt, Artificial Sequence
  Description of Artificial Sequence: Synthetic oligonucleotide
auaacuguaacauuaggug

SEQ ID NO: 988846 - RNA, 19 nt, Artificial Sequence
  Description of Artificial Sequence: Synthetic oligonucleotide
ucugaaauaauuuucccca

SEQ ID NO: 988847 - RNA, 19 nt, Artificial Sequence
  Description of Artificial Sequence: Synthetic oligonucleotide
aaugagcccauacuuaggg

SEQ ID NO: 988848 - RNA, 19 nt, Artificial Sequence
  Description of Artificial Sequence: Synthetic oligonucleotide
aucugaaauaauuuucccc

SEQ ID NO: 988849 - RNA, 19 nt, Artificial Sequence
  Description of Artificial Sequence: Synthetic oligonucleotide
ucuaauaaggaaauugccu

SEQ ID NO: 988850 - RNA, 19 nt, Artificial Sequence
  Description of Artificial Sequence: Synthetic oligonucleotide
aauaagaccagcaugguga

SEQ ID NO: 988851 - RNA, 19 nt, Artificial Sequence
  Description of Artificial Sequence: Synthetic oligonucleotide
aaagcaucauaucggauag

SEQ ID NO: 988852 - RNA, 19 nt, Artificial Sequence
  Description of Artificial Sequence: Synthetic oligonucleotide
cauaaguucauuaacaaca

SEQ ID NO: 988853 - RNA, 19 nt, Artificial Sequence
  Description of Artificial Sequence: Synthetic oligonucleotide
aaauucucaaucuggccuc

SEQ ID NO: 988854 - RNA, 19 nt, Artificial Sequence
  Description of Artificial Sequence: Synthetic oligonucleotide
guuguuuaguucuuuaucc

SEQ ID NO: 988855 - RNA, 19 nt, Artificial Sequence
  Description of Artificial Sequence: Synthetic oligonucleotide
ucuguaucgagacaggcug

SEQ ID NO: 988856 - RNA, 19 nt, Artificial Sequence
  Description of Artificial Sequence: Synthetic oligonucleotide
aacauuaggugcgauggcc

SEQ ID NO: 988857 - RNA, 19 nt, Artificial Sequence
  Description of Artificial Sequence: Synthetic oligonucleotide
ucuauacucagaaauuuca

SEQ ID NO: 988858 - RNA, 19 nt, Artificial Sequence
  Description of Artificial Sequence: Synthetic oligonucleotide
ucucauaaguucauuaaca

SEQ ID NO: 988859 - RNA, 19 nt, Artificial Sequence
  Description of Artificial Sequence: Synthetic oligonucleotide
aaaagcaucauaucggaua

SEQ ID NO: 988860 - RNA, 19 nt, Artificial Sequence
  Description of Artificial Sequence: Synthetic oligonucleotide
uucauuaacaacaggacua

SEQ ID NO: 988861 - RNA, 19 nt, Artificial Sequence
  Description of Artificial Sequence: Synthetic oligonucleotide
cauacuuagggguaucucg

SEQ ID NO: 988862 - RNA, 19 nt, Artificial Sequence
  Description of Artificial Sequence: Synthetic oligonucleotide
auacaacugaguucuauac

SEQ ID NO: 988863 - RNA, 19 nt, Artificial Sequence
  Description of Artificial Sequence: Synthetic oligonucleotide
uuaaagauggcguagccaa

SEQ ID NO: 988864 - RNA, 19 nt, Artificial Sequence
  Description of Artificial Sequence: Synthetic oligonucleotide
ucucgucuagauuuaaggg

SEQ ID NO: 988865 - RNA, 19 nt, Artificial Sequence
  Description of Artificial Sequence: Synthetic oligonucleotide
guaacauuaggugcgaugg

SEQ ID NO: 988866 - RNA, 19 nt, Artificial Sequence
  Description of Artificial Sequence: Synthetic oligonucleotide
ucgaauuccucucauaagu

SEQ ID NO: 988867 - RNA, 19 nt, Artificial Sequence
  Description of Artificial Sequence: Synthetic oligonucleotide
aacuguaacauuaggugcg

SEQ ID NO: 988868 - RNA, 19 nt, Artificial Sequence
  Description of Artificial Sequence: Synthetic oligonucleotide
aacgccuaaccucucggcc

SEQ ID NO: 988869 - RNA, 19 nt, Artificial Sequence
  Description of Artificial Sequence: Synthetic oligonucleotide
aucucgucuagauuuaagg

SEQ ID NO: 988870 - RNA, 19 nt, Artificial Sequence
  Description of Artificial Sequence: Synthetic oligonucleotide
uuaagcaugauguguccgg

SEQ ID NO: 988871 - RNA, 19 nt, Artificial Sequence
  Description of Artificial Sequence: Synthetic oligonucleotide
ucgucuagauuuaagggcc

SEQ ID NO: 988872 - RNA, 19 nt, Artificial Sequence
  Description of Artificial Sequence: Synthetic oligonucleotide
aaucauuguaucuacuuua

SEQ ID NO: 988873 - RNA, 19 nt, Artificial Sequence
  Description of Artificial Sequence: Synthetic oligonucleotide
agcaucauaucggauagcc

SEQ ID NO: 988874 - RNA, 19 nt, Artificial Sequence
  Description of Artificial Sequence: Synthetic oligonucleotide
gaagcgagagcgcaaaugc

SEQ ID NO: 988875 - RNA, 19 nt, Artificial Sequence
  Description of Artificial Sequence: Synthetic oligonucleotide
ugauaaaugagcccauacu

SEQ ID NO: 988876 - RNA, 19 nt, Artificial Sequence
  Description of Artificial Sequence: Synthetic oligonucleotide
ugauguguccgguugacag

SEQ ID NO: 988877 - RNA, 19 nt, Artificial Sequence
  Description of Artificial Sequence: Synthetic oligonucleotide
gauuuaagggcccugaaaa

SEQ ID NO: 988878 - RNA, 19 nt, Artificial Sequence
  Description of Artificial Sequence: Synthetic oligonucleotide
acaacaggacuauggauac

SEQ ID NO: 988879 - RNA, 19 nt, Artificial Sequence
  Description of Artificial Sequence: Synthetic oligonucleotide
acucucuguaaacacuugc

SEQ ID NO: 988880 - RNA, 19 nt, Artificial Sequence
  Description of Artificial Sequence: Synthetic oligonucleotide
uguguuugggacuugucug

SEQ ID NO: 988881 - RNA, 19 nt, Artificial Sequence
  Description of Artificial Sequence: Synthetic oligonucleotide
cucgucuagauuuaagggc

SEQ ID NO: 988882 - RNA, 19 nt, Artificial Sequence
  Description of Artificial Sequence: Synthetic oligonucleotide
aucuaauaaggaaauugcc

SEQ ID NO: 988883 - RNA, 19 nt, Artificial Sequence
  Description of Artificial Sequence: Synthetic oligonucleotide
ucuaccucagcuuuaauuu

SEQ ID NO: 988884 - RNA, 19 nt, Artificial Sequence
  Description of Artificial Sequence: Synthetic oligonucleotide
auaucggauagccaaaaca

SEQ ID NO: 988885 - RNA, 19 nt, Artificial Sequence
  Description of Artificial Sequence: Synthetic oligonucleotide
aaacgccuaaccucucggc

SEQ ID NO: 988886 - RNA, 19 nt, Artificial Sequence
  Description of Artificial Sequence: Synthetic oligonucleotide
ucuaccucuucuauuuugc

SEQ ID NO: 988887 - RNA, 19 nt, Artificial Sequence
  Description of Artificial Sequence: Synthetic oligonucleotide
ucagcacugaauuucaauc

SEQ ID NO: 988888 - RNA, 19 nt, Artificial Sequence
  Description of Artificial Sequence: Synthetic oligonucleotide
aacugaguucuauacucag

SEQ ID NO: 988889 - RNA, 19 nt, Artificial Sequence
  Description of Artificial Sequence: Synthetic oligonucleotide
cuaggaauugcugugcugg

SEQ ID NO: 988890 - RNA, 19 nt, Artificial Sequence
  Description of Artificial Sequence: Synthetic oligonucleotide
agagggaucauaugucuuc

SEQ ID NO: 988891 - RNA, 19 nt, Artificial Sequence
  Description of Artificial Sequence: Synthetic oligonucleotide
uauucauacaacugaguuc

SEQ ID NO: 988892 - RNA, 19 nt, Artificial Sequence
  Description of Artificial Sequence: Synthetic oligonucleotide
gacgucucaaauaagacca

SEQ ID NO: 988893 - RNA, 19 nt, Artificial Sequence
  Description of Artificial Sequence: Synthetic oligonucleotide
cucuucgucagaaagcggc

SEQ ID NO: 988894 - RNA, 19 nt, Artificial Sequence
  Description of Artificial Sequence: Synthetic oligonucleotide
uguaacauuaggugcgaug

SEQ ID NO: 988895 - RNA, 19 nt, Artificial Sequence
  Description of Artificial Sequence: Synthetic oligonucleotide
uucgauuuugcagauauuc

SEQ ID NO: 988896 - RNA, 19 nt, Artificial Sequence
  Description of Artificial Sequence: Synthetic oligonucleotide
uacuuuaucagcacugaau

SEQ ID NO: 988897 - RNA, 19 nt, Artificial Sequence
  Description of Artificial Sequence: Synthetic oligonucleotide
uuguguuugggacuugucu

SEQ ID NO: 988898 - RNA, 19 nt, Artificial Sequence
  Description of Artificial Sequence: Synthetic oligonucleotide
aaacuaucaaccucuugaa

SEQ ID NO: 988899 - RNA, 19 nt, Artificial Sequence
  Description of Artificial Sequence: Synthetic oligonucleotide
uuaucagcacugaauuuca

SEQ ID NO: 988900 - RNA, 19 nt, Artificial Sequence
  Description of Artificial Sequence: Synthetic oligonucleotide
uuuucugcgccaagaaucu

SEQ ID NO: 988901 - RNA, 19 nt, Artificial Sequence
  Description of Artificial Sequence: Synthetic oligonucleotide
ugaaacgccuaaccucucg

SEQ ID NO: 988902 - RNA, 19 nt, Artificial Sequence
  Description of Artificial Sequence: Synthetic oligonucleotide
agaugcauaguucuuccug

SEQ ID NO: 988903 - RNA, 19 nt, Artificial Sequence
  Description of Artificial Sequence: Synthetic oligonucleotide
ucgauuuugcagauauuca

SEQ ID NO: 988904 - RNA, 19 nt, Artificial Sequence
  Description of Artificial Sequence: Synthetic oligonucleotide
gaucauaugucuucacuuc

SEQ ID NO: 988905 - RNA, 19 nt, Artificial Sequence
  Description of Artificial Sequence: Synthetic oligonucleotide
auuuaagggcccugaaaag

SEQ ID NO: 988906 - RNA, 19 nt, Artificial Sequence
  Description of Artificial Sequence: Synthetic oligonucleotide
uugcaaauaucuucuucag

SEQ ID NO: 988907 - RNA, 19 nt, Artificial Sequence
  Description of Artificial Sequence: Synthetic oligonucleotide
uuuaucaccccuccuaguu

SEQ ID NO: 988908 - RNA, 19 nt, Artificial Sequence
  Description of Artificial Sequence: Synthetic oligonucleotide
gaaacgccuaaccucucgg

SEQ ID NO: 988909 - RNA, 19 nt, Artificial Sequence
  Description of Artificial Sequence: Synthetic oligonucleotide
uuguuuaguucuuuaucca

SEQ ID NO: 988910 - RNA, 19 nt, Artificial Sequence
  Description of Artificial Sequence: Synthetic oligonucleotide
uuuaagggcccugaaaagu

SEQ ID NO: 988911 - RNA, 19 nt, Artificial Sequence
  Description of Artificial Sequence: Synthetic oligonucleotide
auggcucuucgucagaaag

SEQ ID NO: 988912 - RNA, 19 nt, Artificial Sequence
  Description of Artificial Sequence: Synthetic oligonucleotide
gaucgaauuccucucauaa

SEQ ID NO: 988913 - RNA, 19 nt, Artificial Sequence
  Description of Artificial Sequence: Synthetic oligonucleotide
uggacuaggaauugcugug

SEQ ID NO: 988914 - RNA, 19 nt, Artificial Sequence
  Description of Artificial Sequence: Synthetic oligonucleotide
gaacaaucauuguaucuac

SEQ ID NO: 988915 - RNA, 19 nt, Artificial Sequence
  Description of Artificial Sequence: Synthetic oligonucleotide
uucuauacucagaaauuuc

SEQ ID NO: 988916 - RNA, 19 nt, Artificial Sequence
  Description of Artificial Sequence: Synthetic oligonucleotide
uccaacuaacuccccaacc

SEQ ID NO: 988917 - RNA, 19 nt, Artificial Sequence
  Description of Artificial Sequence: Synthetic oligonucleotide
ucucacgugguucuacccc

SEQ ID NO: 988918 - RNA, 19 nt, Artificial Sequence
  Description of Artificial Sequence: Synthetic oligonucleotide
caucauaucggauagccaa

SEQ ID NO: 988919 - RNA, 19 nt, Artificial Sequence
  Description of Artificial Sequence: Synthetic oligonucleotide
ucggauagccaaaacaguu

SEQ ID NO: 988920 - RNA, 19 nt, Artificial Sequence
  Description of Artificial Sequence: Synthetic oligonucleotide
auaauguaguuguuuaguu

SEQ ID NO: 988921 - RNA, 19 nt, Artificial Sequence
  Description of Artificial Sequence: Synthetic oligonucleotide
agcacugaauuucaaucug

SEQ ID NO: 988922 - RNA, 19 nt, Artificial Sequence
  Description of Artificial Sequence: Synthetic oligonucleotide
ugugaucgaauuccucuca

SEQ ID NO: 988923 - RNA, 19 nt, Artificial Sequence
  Description of Artificial Sequence: Synthetic oligonucleotide
agcaugauguguccgguug

SEQ ID NO: 988924 - RNA, 19 nt, Artificial Sequence
  Description of Artificial Sequence: Synthetic oligonucleotide
uuacagauggcuccucuuc

SEQ ID NO: 988925 - RNA, 19 nt, Artificial Sequence
  Description of Artificial Sequence: Synthetic oligonucleotide
accuuaaagauggcguagc

SEQ ID NO: 988926 - RNA, 19 nt, Artificial Sequence
  Description of Artificial Sequence: Synthetic oligonucleotide
ugugggccaauccaagaca

SEQ ID NO: 988927 - RNA, 19 nt, Artificial Sequence
  Description of Artificial Sequence: Synthetic oligonucleotide
uaauuuuaaucuugggcuu

SEQ ID NO: 988928 - RNA, 19 nt, Artificial Sequence
  Description of Artificial Sequence: Synthetic oligonucleotide
aucgaauuccucucauaag

SEQ ID NO: 988929 - RNA, 19 nt, Artificial Sequence
  Description of Artificial Sequence: Synthetic oligonucleotide
guguuugggacuugucugg

SEQ ID NO: 988930 - RNA, 19 nt, Artificial Sequence
  Description of Artificial Sequence: Synthetic oligonucleotide
aucauaugucuucacuuca

SEQ ID NO: 988931 - RNA, 19 nt, Artificial Sequence
  Description of Artificial Sequence: Synthetic oligonucleotide
ggaagugccagccauacca

SEQ ID NO: 988932 - RNA, 19 nt, Artificial Sequence
  Description of Artificial Sequence: Synthetic oligonucleotide
aucucacgugguucuaccc

SEQ ID NO: 988933 - RNA, 19 nt, Artificial Sequence
  Description of Artificial Sequence: Synthetic oligonucleotide
gaaauugccugaacaauca

SEQ ID NO: 988934 - RNA, 19 nt, Artificial Sequence
  Description of Artificial Sequence: Synthetic oligonucleotide
uuagggguaucucgucuag

SEQ ID NO: 988935 - RNA, 19 nt, Artificial Sequence
  Description of Artificial Sequence: Synthetic oligonucleotide
gauuuugcccuccaucaga

SEQ ID NO: 988936 - RNA, 19 nt, Artificial Sequence
  Description of Artificial Sequence: Synthetic oligonucleotide
gagagcgcaaaugcguucg

SEQ ID NO: 988937 - RNA, 19 nt, Artificial Sequence
  Description of Artificial Sequence: Synthetic oligonucleotide
ucuacuuuaucagcacuga

SEQ ID NO: 988938 - RNA, 19 nt, Artificial Sequence
  Description of Artificial Sequence: Synthetic oligonucleotide
cauaacuguaacauuaggu

SEQ ID NO: 988939 - RNA, 19 nt, Artificial Sequence
  Description of Artificial Sequence: Synthetic oligonucleotide
gauggcguagccaacggac

SEQ ID NO: 988940 - RNA, 19 nt, Artificial Sequence
  Description of Artificial Sequence: Synthetic oligonucleotide
aaugagccgugcuccaacu

SEQ ID NO: 988941 - RNA, 19 nt, Artificial Sequence
  Description of Artificial Sequence: Synthetic oligonucleotide
cuuaagcaugauguguccg

SEQ ID NO: 988942 - RNA, 19 nt, Artificial Sequence
  Description of Artificial Sequence: Synthetic oligonucleotide
uuagaacaaguugcaagug

SEQ ID NO: 988943 - RNA, 19 nt, Artificial Sequence
  Description of Artificial Sequence: Synthetic oligonucleotide
uuccgcuguauccugaaau

SEQ ID NO: 988944 - RNA, 19 nt, Artificial Sequence
  Description of Artificial Sequence: Synthetic oligonucleotide
cuggccucuaauuuggcuc

SEQ ID NO: 988945 - RNA, 19 nt, Artificial Sequence
  Description of Artificial Sequence: Synthetic oligonucleotide
uucgagaaaucuuuccuuu

SEQ ID NO: 988946 - RNA, 19 nt, Artificial Sequence
  Description of Artificial Sequence: Synthetic oligonucleotide
guacuguagaagcugcaug

SEQ ID NO: 988947 - RNA, 19 nt, Artificial Sequence
  Description of Artificial Sequence: Synthetic oligonucleotide
ucgagaaaucuuuccuuug

SEQ ID NO: 988948 - RNA, 19 nt, Artificial Sequence
  Description of Artificial Sequence: Synthetic oligonucleotide
uaacauuaggugcgauggc

SEQ ID NO: 988949 - RNA, 19 nt, Artificial Sequence
  Description of Artificial Sequence: Synthetic oligonucleotide
auagauaucucggcggcug

SEQ ID NO: 988950 - RNA, 19 nt, Artificial Sequence
  Description of Artificial Sequence: Synthetic oligonucleotide
uuauugauuuugcccucca

SEQ ID NO: 988951 - RNA, 19 nt, Artificial Sequence
  Description of Artificial Sequence: Synthetic oligonucleotide
ggacgucucaaauaagacc

SEQ ID NO: 988952 - RNA, 19 nt, Artificial Sequence
  Description of Artificial Sequence: Synthetic oligonucleotide
uccccaaccauaacuguaa

SEQ ID NO: 988953 - RNA, 19 nt, Artificial Sequence
  Description of Artificial Sequence: Synthetic oligonucleotide
ugagccgugcuccaacuaa

SEQ ID NO: 988954 - RNA, 19 nt, Artificial Sequence
  Description of Artificial Sequence: Synthetic oligonucleotide
ggcguuucaaauucuuucc

SEQ ID NO: 988955 - RNA, 19 nt, Artificial Sequence
  Description of Artificial Sequence: Synthetic oligonucleotide
guaucuacuuuaucagcac

SEQ ID NO: 988956 - RNA, 19 nt, Artificial Sequence
  Description of Artificial Sequence: Synthetic oligonucleotide
ugcuccaacuaacucccca

SEQ ID NO: 988957 - RNA, 19 nt, Artificial Sequence
  Description of Artificial Sequence: Synthetic oligonucleotide
ucuucgucagaaagcggcu

SEQ ID NO: 988958 - RNA, 19 nt, Artificial Sequence
  Description of Artificial Sequence: Synthetic oligonucleotide
uugugaucgaauuccucuc

SEQ ID NO: 988959 - RNA, 19 nt, Artificial Sequence
  Description of Artificial Sequence: Synthetic oligonucleotide
uccucucauaaguucauua

SEQ ID NO: 988960 - RNA, 19 nt, Artificial Sequence
  Description of Artificial Sequence: Synthetic oligonucleotide
ucauuaacaacaggacuau

SEQ ID NO: 988961 - RNA, 19 nt, Artificial Sequence
  Description of Artificial Sequence: Synthetic oligonucleotide
acagaauuacaguuccuuu

SEQ ID NO: 988962 - RNA, 19 nt, Artificial Sequence
  Description of Artificial Sequence: Synthetic oligonucleotide
guucauuaacaacaggacu

SEQ ID NO: 988963 - RNA, 19 nt, Artificial Sequence
  Description of Artificial Sequence: Synthetic oligonucleotide
caccccuccuaguuuagcg

SEQ ID NO: 988964 - RNA, 19 nt, Artificial Sequence
  Description of Artificial Sequence: Synthetic oligonucleotide
gaugcauaguucuuccugu

SEQ ID NO: 988965 - RNA, 19 nt, Artificial Sequence
  Description of Artificial Sequence: Synthetic oligonucleotide
ucauuguaucuacuuuauc

SEQ ID NO: 988966 - RNA, 19 nt, Artificial Sequence
  Description of Artificial Sequence: Synthetic oligonucleotide
auaugucuucacuucacuu

SEQ ID NO: 988967 - RNA, 19 nt, Artificial Sequence
  Description of Artificial Sequence: Synthetic oligonucleotide
aucagcacugaauuucaau

SEQ ID NO: 988968 - RNA, 19 nt, Artificial Sequence
  Description of Artificial Sequence: Synthetic oligonucleotide
ucaugggcuucuuuuacua

SEQ ID NO: 988969 - RNA, 19 nt, Artificial Sequence
  Description of Artificial Sequence: Synthetic oligonucleotide
agggaagugccagccauac

SEQ ID NO: 988970 - RNA, 19 nt, Artificial Sequence
  Description of Artificial Sequence: Synthetic oligonucleotide
cucucggccacugaaggcc

SEQ ID NO: 988971 - RNA, 19 nt, Artificial Sequence
  Description of Artificial Sequence: Synthetic oligonucleotide
aagcgagagcgcaaaugcg

SEQ ID NO: 988972 - RNA, 19 nt, Artificial Sequence
  Description of Artificial Sequence: Synthetic oligonucleotide
acuaggaauugcugugcug

SEQ ID NO: 988973 - RNA, 19 nt, Artificial Sequence
  Description of Artificial Sequence: Synthetic oligonucleotide
uccgguugacagaauuaca

SEQ ID NO: 988974 - RNA, 19 nt, Artificial Sequence
  Description of Artificial Sequence: Synthetic oligonucleotide
ugguucuaccccaggaauc

SEQ ID NO: 988975 - RNA, 19 nt, Artificial Sequence
  Description of Artificial Sequence: Synthetic oligonucleotide
ggugcgauggccaucauuc

SEQ ID NO: 988976 - RNA, 19 nt, Artificial Sequence
  Description of Artificial Sequence: Synthetic oligonucleotide
cagaaauuucaaucaccug

SEQ ID NO: 988977 - RNA, 19 nt, Artificial Sequence
  Description of Artificial Sequence: Synthetic oligonucleotide
uguaucgagacaggcugug

SEQ ID NO: 988978 - RNA, 19 nt, Artificial Sequence
  Description of Artificial Sequence: Synthetic oligonucleotide
caucucacgugguucuacc

SEQ ID NO: 988979 - RNA, 19 nt, Artificial Sequence
  Description of Artificial Sequence: Synthetic oligonucleotide
gaaccuuaaagauggcgua

SEQ ID NO: 988980 - RNA, 19 nt, Artificial Sequence
  Description of Artificial Sequence: Synthetic oligonucleotide
ccgguugacagaauuacag

SEQ ID NO: 988981 - RNA, 19 nt, Artificial Sequence
  Description of Artificial Sequence: Synthetic oligonucleotide
auuugugaucgaauuccuc

SEQ ID NO: 988982 - RNA, 19 nt, Artificial Sequence
  Description of Artificial Sequence: Synthetic oligonucleotide
uagauuuaagggcccugaa

SEQ ID NO: 988983 - RNA, 19 nt, Artificial Sequence
  Description of Artificial Sequence: Synthetic oligonucleotide
ggacuauggauacagcuga

SEQ ID NO: 988984 - RNA, 19 nt, Artificial Sequence
  Description of Artificial Sequence: Synthetic oligonucleotide
uagauaucucggcggcugc

SEQ ID NO: 988985 - RNA, 19 nt, Artificial Sequence
  Description of Artificial Sequence: Synthetic oligonucleotide
uaucaccccuccuaguuua

SEQ ID NO: 988986 - RNA, 19 nt, Artificial Sequence
  Description of Artificial Sequence: Synthetic oligonucleotide
agagcgcaaaugcguucgc

SEQ ID NO: 988987 - RNA, 19 nt, Artificial Sequence
  Description of Artificial Sequence: Synthetic oligonucleotide
aguuuagcgucagccacag

SEQ ID NO: 988988 - RNA, 19 nt, Artificial Sequence
  Description of Artificial Sequence: Synthetic oligonucleotide
ucaacucccauugcagaac

SEQ ID NO: 988989 - RNA, 19 nt, Artificial Sequence
  Description of Artificial Sequence: Synthetic oligonucleotide
uguccgguugacagaauua

SEQ ID NO: 988990 - RNA, 19 nt, Artificial Sequence
  Description of Artificial Sequence: Synthetic oligonucleotide
cugugggccaauccaagac

SEQ ID NO: 988991 - RNA, 19 nt, Artificial Sequence
  Description of Artificial Sequence: Synthetic oligonucleotide
ucuggcguuucaaauucuu

SEQ ID NO: 988992 - RNA, 19 nt, Artificial Sequence
  Description of Artificial Sequence: Synthetic oligonucleotide
cuaccccaggaaucaagcc

SEQ ID NO: 988993 - RNA, 19 nt, Artificial Sequence
  Description of Artificial Sequence: Synthetic oligonucleotide
cccauagauaucucggcgg

SEQ ID NO: 988994 - RNA, 19 nt, Artificial Sequence
  Description of Artificial Sequence: Synthetic oligonucleotide
ucgagacaggcugugggcc

SEQ ID NO: 988995 - RNA, 19 nt, Artificial Sequence
  Description of Artificial Sequence: Synthetic oligonucleotide
uuaucaccccuccuaguuu

SEQ ID NO: 988996 - RNA, 19 nt, Artificial Sequence
  Description of Artificial Sequence: Synthetic oligonucleotide
gauguguccgguugacaga

SEQ ID NO: 988997 - RNA, 19 nt, Artificial Sequence
  Description of Artificial Sequence: Synthetic oligonucleotide
agcauucgagaaaucuuuc

SEQ ID NO: 988998 - RNA, 19 nt, Artificial Sequence
  Description of Artificial Sequence: Synthetic oligonucleotide
acggacgucucaaauaaga

SEQ ID NO: 988999 - RNA, 19 nt, Artificial Sequence
  Description of Artificial Sequence: Synthetic oligonucleotide
uggguacacagauguagaa

SEQ ID NO: 989000 - RNA, 19 nt, Artificial Sequence
  Description of Artificial Sequence: Synthetic oligonucleotide
cucccaacugaaucuuaag

SEQ ID NO: 989001 - RNA, 19 nt, Artificial Sequence
  Description of Artificial Sequence: Synthetic oligonucleotide
cauucgauuuugcagauau

SEQ ID NO: 989002 - RNA, 19 nt, Artificial Sequence
  Description of Artificial Sequence: Synthetic oligonucleotide
ucaccuggguacacagaug

SEQ ID NO: 989003 - RNA, 19 nt, Artificial Sequence
  Description of Artificial Sequence: Synthetic oligonucleotide
ucauaucggauagccaaaa

SEQ ID NO: 989004 - RNA, 19 nt, Artificial Sequence
  Description of Artificial Sequence: Synthetic oligonucleotide
uccgcuguauccugaaauu

SEQ ID NO: 989005 - RNA, 19 nt, Artificial Sequence
  Description of Artificial Sequence: Synthetic oligonucleotide
cuuaaagauggcguagcca

SEQ ID NO: 989006 - RNA, 19 nt, Artificial Sequence
  Description of Artificial Sequence: Synthetic oligonucleotide
uguuugggacuugucuggc

SEQ ID NO: 989007 - RNA, 19 nt, Artificial Sequence
  Description of Artificial Sequence: Synthetic oligonucleotide
auuaggugcgauggccauc

SEQ ID NO: 989008 - RNA, 19 nt, Artificial Sequence
  Description of Artificial Sequence: Synthetic oligonucleotide
ugaucgaauuccucucaua

SEQ ID NO: 989009 - RNA, 19 nt, Artificial Sequence
  Description of Artificial Sequence: Synthetic oligonucleotide
cauucgagaaaucuuuccu

SEQ ID NO: 989010 - RNA, 19 nt, Artificial Sequence
  Description of Artificial Sequence: Synthetic oligonucleotide
ccgugcuccaacuaacucc

SEQ ID NO: 989011 - RNA, 19 nt, Artificial Sequence
  Description of Artificial Sequence: Synthetic oligonucleotide
caugcuuggccaaauucaa

SEQ ID NO: 989012 - RNA, 19 nt, Artificial Sequence
  Description of Artificial Sequence: Synthetic oligonucleotide
ccuacaccgcauaauguag

SEQ ID NO: 989013 - RNA, 19 nt, Artificial Sequence
  Description of Artificial Sequence: Synthetic oligonucleotide
acuuuuguguucauacuuu

SEQ ID NO: 989014 - RNA, 19 nt, Artificial Sequence
  Description of Artificial Sequence: Synthetic oligonucleotide
aucauuguaucuacuuuau

SEQ ID NO: 989015 - RNA, 19 nt, Artificial Sequence
  Description of Artificial Sequence: Synthetic oligonucleotide
caaugagccgugcuccaac

SEQ ID NO: 989016 - RNA, 19 nt, Artificial Sequence
  Description of Artificial Sequence: Synthetic oligonucleotide
aucuguaucgagacaggcu

SEQ ID NO: 989017 - RNA, 19 nt, Artificial Sequence
  Description of Artificial Sequence: Synthetic oligonucleotide
gaaagaguggcagaugcau

SEQ ID NO: 989018 - RNA, 19 nt, Artificial Sequence
  Description of Artificial Sequence: Synthetic oligonucleotide
uacaccgcauaauguaguu

SEQ ID NO: 989019 - RNA, 19 nt, Artificial Sequence
  Description of Artificial Sequence: Synthetic oligonucleotide
guccgguugacagaauuac

SEQ ID NO: 989020 - RNA, 19 nt, Artificial Sequence
  Description of Artificial Sequence: Synthetic oligonucleotide
agcgagagcgcaaaugcgu

SEQ ID NO: 989021 - RNA, 19 nt, Artificial Sequence
  Description of Artificial Sequence: Synthetic oligonucleotide
cuagauuuaagggcccuga

SEQ ID NO: 989022 - RNA, 19 nt, Artificial Sequence
  Description of Artificial Sequence: Synthetic oligonucleotide
gauauucauacaacugagu

SEQ ID NO: 989023 - RNA, 19 nt, Artificial Sequence
  Description of Artificial Sequence: Synthetic oligonucleotide
caccgcauaauguaguugu

SEQ ID NO: 989024 - RNA, 19 nt, Artificial Sequence
  Description of Artificial Sequence: Synthetic oligonucleotide
uucuuaucccucuguccuc

SEQ ID NO: 989025 - RNA, 19 nt, Artificial Sequence
  Description of Artificial Sequence: Synthetic oligonucleotide
auggcguagccaacggacg

SEQ ID NO: 989026 - RNA, 19 nt, Artificial Sequence
  Description of Artificial Sequence: Synthetic oligonucleotide
uggccgcgagcucucaccc

SEQ ID NO: 989027 - RNA, 19 nt, Artificial Sequence
  Description of Artificial Sequence: Synthetic oligonucleotide
cuggccgcgagcucucacc

SEQ ID NO: 989028 - RNA, 19 nt, Artificial Sequence
  Description of Artificial Sequence: Synthetic oligonucleotide
cuaaugcuuccgcuguauc

SEQ ID NO: 989029 - RNA, 19 nt, Artificial Sequence
  Description of Artificial Sequence: Synthetic oligonucleotide
gaauugcugugcuggugca

SEQ ID NO: 989030 - RNA, 19 nt, Artificial Sequence
  Description of Artificial Sequence: Synthetic oligonucleotide
acauuaggugcgauggcca

SEQ ID NO: 989031 - RNA, 19 nt, Artificial Sequence
  Description of Artificial Sequence: Synthetic oligonucleotide
uucuggcguuucaaauucu

SEQ ID NO: 989032 - RNA, 19 nt, Artificial Sequence
  Description of Artificial Sequence: Synthetic oligonucleotide
ccauagauaucucggcggc

SEQ ID NO: 989033 - RNA, 19 nt, Artificial Sequence
  Description of Artificial Sequence: Synthetic oligonucleotide
ggccaaauucaaaagagaa

SEQ ID NO: 989034 - RNA, 19 nt, Artificial Sequence
  Description of Artificial Sequence: Synthetic oligonucleotide
ccuuuaucaccccuccuag

SEQ ID NO: 989035 - RNA, 19 nt, Artificial Sequence
  Description of Artificial Sequence: Synthetic oligonucleotide
gugcgauggccaucauucg

SEQ ID NO: 989036 - RNA, 19 nt, Artificial Sequence
  Description of Artificial Sequence: Synthetic oligonucleotide
aacggacgucucaaauaag

SEQ ID NO: 989037 - RNA, 19 nt, Artificial Sequence
  Description of Artificial Sequence: Synthetic oligonucleotide
guaucgagacaggcugugg

SEQ ID NO: 989038 - RNA, 19 nt, Artificial Sequence
  Description of Artificial Sequence: Synthetic oligonucleotide
gcaaguguggagucaccag

SEQ ID NO: 989039 - RNA, 19 nt, Artificial Sequence
  Description of Artificial Sequence: Synthetic oligonucleotide
gagggaucauaugucuuca

SEQ ID NO: 989040 - RNA, 19 nt, Artificial Sequence
  Description of Artificial Sequence: Synthetic oligonucleotide
uccuuuguguuugggacuu

SEQ ID NO: 989041 - RNA, 19 nt, Artificial Sequence
  Description of Artificial Sequence: Synthetic oligonucleotide
caugauguguccgguugac

SEQ ID NO: 989042 - RNA, 19 nt, Artificial Sequence
  Description of Artificial Sequence: Synthetic oligonucleotide
uuccuuacagauggcuccu

SEQ ID NO: 989043 - RNA, 19 nt, Artificial Sequence
  Description of Artificial Sequence: Synthetic oligonucleotide
guaaaugcugcuaaugcuu

SEQ ID NO: 989044 - RNA, 19 nt, Artificial Sequence
  Description of Artificial Sequence: Synthetic oligonucleotide
cacugaaggcccgcuaggc

SEQ ID NO: 989045 - RNA, 19 nt, Artificial Sequence
  Description of Artificial Sequence: Synthetic oligonucleotide
gcgccaagaaucuguacug

SEQ ID NO: 989046 - RNA, 19 nt, Artificial Sequence
  Description of Artificial Sequence: Synthetic oligonucleotide
caccagagggaucauaugu

SEQ ID NO: 989047 - RNA, 19 nt, Artificial Sequence
  Description of Artificial Sequence: Synthetic oligonucleotide
ugcuuccgcuguauccuga

SEQ ID NO: 989048 - RNA, 19 nt, Artificial Sequence
  Description of Artificial Sequence: Synthetic oligonucleotide
ccuuaaagauggcguagcc

SEQ ID NO: 989049 - RNA, 19 nt, Artificial Sequence
  Description of Artificial Sequence: Synthetic oligonucleotide
auguguccgguugacagaa

SEQ ID NO: 989050 - RNA, 19 nt, Artificial Sequence
  Description of Artificial Sequence: Synthetic oligonucleotide
ggaagcgagagcgcaaaug

SEQ ID NO: 989051 - RNA, 19 nt, Artificial Sequence
  Description of Artificial Sequence: Synthetic oligonucleotide
ccaacuaacuccccaacca

SEQ ID NO: 989052 - RNA, 19 nt, Artificial Sequence
  Description of Artificial Sequence: Synthetic oligonucleotide
acaccgcauaauguaguug

SEQ ID NO: 989053 - RNA, 19 nt, Artificial Sequence
  Description of Artificial Sequence: Synthetic oligonucleotide
cauuaacaacaggacuaug

SEQ ID NO: 989054 - RNA, 19 nt, Artificial Sequence
  Description of Artificial Sequence: Synthetic oligonucleotide
aguugcaaguguggaguca

SEQ ID NO: 989055 - RNA, 19 nt, Artificial Sequence
  Description of Artificial Sequence: Synthetic oligonucleotide
ugcuaaugccuuuccuguu

SEQ ID NO: 989056 - RNA, 19 nt, Artificial Sequence
  Description of Artificial Sequence: Synthetic oligonucleotide
ugcauggcucuucgucaga

SEQ ID NO: 989057 - RNA, 19 nt, Artificial Sequence
  Description of Artificial Sequence: Synthetic oligonucleotide
gagcgcaaaugcguucgcc

SEQ ID NO: 989058 - RNA, 19 nt, Artificial Sequence
  Description of Artificial Sequence: Synthetic oligonucleotide
uaucucggcggcugcuuuc

SEQ ID NO: 989059 - RNA, 19 nt, Artificial Sequence
  Description of Artificial Sequence: Synthetic oligonucleotide
cagccauaccacucccuac

SEQ ID NO: 989060 - RNA, 19 nt, Artificial Sequence
  Description of Artificial Sequence: Synthetic oligonucleotide
ucggaagcgagagcgcaaa

SEQ ID NO: 989061 - RNA, 19 nt, Artificial Sequence
  Description of Artificial Sequence: Synthetic oligonucleotide
gacuaggaauugcugugcu

SEQ ID NO: 989062 - RNA, 19 nt, Artificial Sequence
  Description of Artificial Sequence: Synthetic oligonucleotide
aucauaucggauagccaaa

SEQ ID NO: 989063 - RNA, 19 nt, Artificial Sequence
  Description of Artificial Sequence: Synthetic oligonucleotide
ggacuaggaauugcugugc

SEQ ID NO: 989064 - RNA, 19 nt, Artificial Sequence
  Description of Artificial Sequence: Synthetic oligonucleotide
cacgugguucuaccccagg

SEQ ID NO: 989065 - RNA, 19 nt, Artificial Sequence
  Description of Artificial Sequence: Synthetic oligonucleotide
gagcucucaccccacugaa

SEQ ID NO: 989066 - RNA, 19 nt, Artificial Sequence
  Description of Artificial Sequence: Synthetic oligonucleotide
ccuaguuuagcgucagcca

SEQ ID NO: 989067 - RNA, 19 nt, Artificial Sequence
  Description of Artificial Sequence: Synthetic oligonucleotide
ucgucagaaagcggcuccu

SEQ ID NO: 989068 - RNA, 19 nt, Artificial Sequence
  Description of Artificial Sequence: Synthetic oligonucleotide
cuucgucagaaagcggcuc

SEQ ID NO: 989069 - RNA, 19 nt, Artificial Sequence
  Description of Artificial Sequence: Synthetic oligonucleotide
gagccgugcuccaacuaac

SEQ ID NO: 989070 - RNA, 19 nt, Artificial Sequence
  Description of Artificial Sequence: Synthetic oligonucleotide
auaucucggcggcugcuuu

SEQ ID NO: 989071 - RNA, 19 nt, Artificial Sequence
  Description of Artificial Sequence: Synthetic oligonucleotide
agaaagcggcuccuccuua

SEQ ID NO: 989072 - RNA, 19 nt, Artificial Sequence
  Description of Artificial Sequence: Synthetic oligonucleotide
acgucucaaauaagaccag

SEQ ID NO: 989073 - RNA, 19 nt, Artificial Sequence
  Description of Artificial Sequence: Synthetic oligonucleotide
ucaccccuccuaguuuagc

SEQ ID NO: 989074 - RNA, 19 nt, Artificial Sequence
  Description of Artificial Sequence: Synthetic oligonucleotide
agauaucucggcggcugcu

SEQ ID NO: 989075 - RNA, 19 nt, Artificial Sequence
  Description of Artificial Sequence: Synthetic oligonucleotide
uagggguaucucgucuaga

SEQ ID NO: 989076 - RNA, 19 nt, Artificial Sequence
  Description of Artificial Sequence: Synthetic oligonucleotide
cagcauucgagaaaucuuu

SEQ ID NO: 989077 - RNA, 19 nt, Artificial Sequence
  Description of Artificial Sequence: Synthetic oligonucleotide
cccgcuaggccucggaagc

SEQ ID NO: 989078 - RNA, 19 nt, Artificial Sequence
  Description of Artificial Sequence: Synthetic oligonucleotide
caccaacucucuguaaaca

SEQ ID NO: 989079 - RNA, 19 nt, Artificial Sequence
  Description of Artificial Sequence: Synthetic oligonucleotide
cuccccaaccauaacugua

SEQ ID NO: 989080 - RNA, 19 nt, Artificial Sequence
  Description of Artificial Sequence: Synthetic oligonucleotide
cuacaccgcauaauguagu

SEQ ID NO: 989081 - RNA, 19 nt, Artificial Sequence
  Description of Artificial Sequence: Synthetic oligonucleotide
augauguguccgguugaca

SEQ ID NO: 989082 - RNA, 19 nt, Artificial Sequence
  Description of Artificial Sequence: Synthetic oligonucleotide
aggugcgauggccaucauu

SEQ ID NO: 989083 - RNA, 19 nt, Artificial Sequence
  Description of Artificial Sequence: Synthetic oligonucleotide
ggacuugucuggccuacca

SEQ ID NO: 989084 - RNA, 19 nt, Artificial Sequence
  Description of Artificial Sequence: Synthetic oligonucleotide
aucucggcggcugcuuuca

SEQ ID NO: 989085 - RNA, 19 nt, Artificial Sequence
  Description of Artificial Sequence: Synthetic oligonucleotide
cggacgucucaaauaagac

SEQ ID NO: 989086 - RNA, 19 nt, Artificial Sequence
  Description of Artificial Sequence: Synthetic oligonucleotide
ccauaccacucccuacacc

SEQ ID NO: 989087 - RNA, 19 nt, Artificial Sequence
  Description of Artificial Sequence: Synthetic oligonucleotide
gagcccauacuuaggggua

SEQ ID NO: 989088 - RNA, 19 nt, Artificial Sequence
  Description of Artificial Sequence: Synthetic oligonucleotide
cuuuaucaccccuccuagu

SEQ ID NO: 989089 - RNA, 19 nt, Artificial Sequence
  Description of Artificial Sequence: Synthetic oligonucleotide
augagccgugcuccaacua

SEQ ID NO: 989090 - RNA, 19 nt, Artificial Sequence
  Description of Artificial Sequence: Synthetic oligonucleotide
ucggccacugaaggcccgc

SEQ ID NO: 989091 - RNA, 19 nt, Artificial Sequence
  Description of Artificial Sequence: Synthetic oligonucleotide
ggcggcugcuuucacuuca

SEQ ID NO: 989092 - RNA, 19 nt, Artificial Sequence
  Description of Artificial Sequence: Synthetic oligonucleotide
caaaagcaucauaucggau

SEQ ID NO: 989093 - RNA, 19 nt, Artificial Sequence
  Description of Artificial Sequence: Synthetic oligonucleotide
caacuaacuccccaaccau

SEQ ID NO: 989094 - RNA, 19 nt, Artificial Sequence
  Description of Artificial Sequence: Synthetic oligonucleotide
gcaugauguguccgguuga

SEQ ID NO: 989095 - RNA, 19 nt, Artificial Sequence
  Description of Artificial Sequence: Synthetic oligonucleotide
cuaggccucggaagcgaga

SEQ ID NO: 989096 - RNA, 19 nt, Artificial Sequence
  Description of Artificial Sequence: Synthetic oligonucleotide
ugcuggugcauggcucuuc

SEQ ID NO: 989097 - RNA, 19 nt, Artificial Sequence
  Description of Artificial Sequence: Synthetic oligonucleotide
caacucccauugcagaacu

SEQ ID NO: 989098 - RNA, 19 nt, Artificial Sequence
  Description of Artificial Sequence: Synthetic oligonucleotide
aucaccccuccuaguuuag

SEQ ID NO: 989099 - RNA, 19 nt, Artificial Sequence
  Description of Artificial Sequence: Synthetic oligonucleotide
agccgugcuccaacuaacu

SEQ ID NO: 989100 - RNA, 19 nt, Artificial Sequence
  Description of Artificial Sequence: Synthetic oligonucleotide
ggccaauccaagacacaug

SEQ ID NO: 989101 - RNA, 19 nt, Artificial Sequence
  Description of Artificial Sequence: Synthetic oligonucleotide
agcccauacuuagggguau

SEQ ID NO: 989102 - RNA, 19 nt, Artificial Sequence
  Description of Artificial Sequence: Synthetic oligonucleotide
guuuagcgucagccacagc

SEQ ID NO: 989103 - RNA, 19 nt, Artificial Sequence
  Description of Artificial Sequence: Synthetic oligonucleotide
gugaucgaauuccucucau

SEQ ID NO: 989104 - RNA, 19 nt, Artificial Sequence
  Description of Artificial Sequence: Synthetic oligonucleotide
cuuacagauggcuccucuu

SEQ ID NO: 989105 - RNA, 19 nt, Artificial Sequence
  Description of Artificial Sequence: Synthetic oligonucleotide
agccaacggacgucucaaa

SEQ ID NO: 989106 - RNA, 19 nt, Artificial Sequence
  Description of Artificial Sequence: Synthetic oligonucleotide
cccuacaccgcauaaugua

SEQ ID NO: 989107 - RNA, 19 nt, Artificial Sequence
  Description of Artificial Sequence: Synthetic oligonucleotide
auucgauuuugcagauauu

SEQ ID NO: 989108 - RNA, 19 nt, Artificial Sequence
  Description of Artificial Sequence: Synthetic oligonucleotide
gggaagugccagccauacc

SEQ ID NO: 989109 - RNA, 19 nt, Artificial Sequence
  Description of Artificial Sequence: Synthetic oligonucleotide
ccccuccuaguuuagcguc

SEQ ID NO: 989110 - RNA, 19 nt, Artificial Sequence
  Description of Artificial Sequence: Synthetic oligonucleotide
cgucucaaauaagaccagc

SEQ ID NO: 989111 - RNA, 19 nt, Artificial Sequence
  Description of Artificial Sequence: Synthetic oligonucleotide
ucucggcggcugcuuucac

SEQ ID NO: 989112 - RNA, 19 nt, Artificial Sequence
  Description of Artificial Sequence: Synthetic oligonucleotide
guguccgguugacagaauu

SEQ ID NO: 989113 - RNA, 19 nt, Artificial Sequence
  Description of Artificial Sequence: Synthetic oligonucleotide
gcgagcucucaccccacug

SEQ ID NO: 989114 - RNA, 19 nt, Artificial Sequence
  Description of Artificial Sequence: Synthetic oligonucleotide
gcucuucgucagaaagcgg

SEQ ID NO: 989115 - RNA, 19 nt, Artificial Sequence
  Description of Artificial Sequence: Synthetic oligonucleotide
cauuaggugcgauggccau

SEQ ID NO: 989116 - RNA, 19 nt, Artificial Sequence
  Description of Artificial Sequence: Synthetic oligonucleotide
gccgugcuccaacuaacuc

SEQ ID NO: 989117 - RNA, 19 nt, Artificial Sequence
  Description of Artificial Sequence: Synthetic oligonucleotide
gccgcgagcucucacccca

SEQ ID NO: 989118 - RNA, 19 nt, Artificial Sequence
  Description of Artificial Sequence: Synthetic oligonucleotide
agcugcaugcuuggccaaa

SEQ ID NO: 989119 - RNA, 19 nt, Artificial Sequence
  Description of Artificial Sequence: Synthetic oligonucleotide
gauaucucggcggcugcuu

SEQ ID NO: 989120 - RNA, 19 nt, Artificial Sequence
  Description of Artificial Sequence: Synthetic oligonucleotide
accgcauaauguaguuguu

SEQ ID NO: 989121 - RNA, 19 nt, Artificial Sequence
  Description of Artificial Sequence: Synthetic oligonucleotide
ggccaucauucgauuuugc

SEQ ID NO: 989122 - RNA, 19 nt, Artificial Sequence
  Description of Artificial Sequence: Synthetic oligonucleotide
gcucccaacugaaucuuaa

SEQ ID NO: 989123 - RNA, 19 nt, Artificial Sequence
  Description of Artificial Sequence: Synthetic oligonucleotide
ccuccuaguuuagcgucag

SEQ ID NO: 989124 - RNA, 19 nt, Artificial Sequence
  Description of Artificial Sequence: Synthetic oligonucleotide
caacaggacuauggauaca

SEQ ID NO: 989125 - RNA, 19 nt, Artificial Sequence
  Description of Artificial Sequence: Synthetic oligonucleotide
cauagauaucucggcggcu

SEQ ID NO: 989126 - RNA, 19 nt, Artificial Sequence
  Description of Artificial Sequence: Synthetic oligonucleotide
ccaucucacgugguucuac

SEQ ID NO: 989127 - RNA, 19 nt, Artificial Sequence
  Description of Artificial Sequence: Synthetic oligonucleotide
gggccaauccaagacacau

SEQ ID NO: 989128 - RNA, 19 nt, Artificial Sequence
  Description of Artificial Sequence: Synthetic oligonucleotide
ccccaaccauaacuguaac

SEQ ID NO: 989129 - RNA, 19 nt, Artificial Sequence
  Description of Artificial Sequence: Synthetic oligonucleotide
gccuaccagagaagcauga

SEQ ID NO: 989130 - RNA, 19 nt, Artificial Sequence
  Description of Artificial Sequence: Synthetic oligonucleotide
ggguacacagauguagaau

SEQ ID NO: 989131 - RNA, 19 nt, Artificial Sequence
  Description of Artificial Sequence: Synthetic oligonucleotide
gggucacggcgcugcgcgg

SEQ ID NO: 989132 - RNA, 19 nt, Artificial Sequence
  Description of Artificial Sequence: Synthetic oligonucleotide
cucggcggcugcuuucacu

SEQ ID NO: 989133 - RNA, 19 nt, Artificial Sequence
  Description of Artificial Sequence: Synthetic oligonucleotide
uaggugcgauggccaucau

SEQ ID NO: 989134 - RNA, 19 nt, Artificial Sequence
  Description of Artificial Sequence: Synthetic oligonucleotide
cgagagcgcaaaugcguuc

SEQ ID NO: 989135 - RNA, 19 nt, Artificial Sequence
  Description of Artificial Sequence: Synthetic oligonucleotide
cgagcucucaccccacuga

SEQ ID NO: 989136 - RNA, 19 nt, Artificial Sequence
  Description of Artificial Sequence: Synthetic oligonucleotide
cccuccuaguuuagcguca

SEQ ID NO: 989137 - RNA, 19 nt, Artificial Sequence
  Description of Artificial Sequence: Synthetic oligonucleotide
ggccgcgagcucucacccc

SEQ ID NO: 989138 - RNA, 19 nt, Artificial Sequence
  Description of Artificial Sequence: Synthetic oligonucleotide
gcgauggccaucauucgau

SEQ ID NO: 989139 - RNA, 19 nt, Artificial Sequence
  Description of Artificial Sequence: Synthetic oligonucleotide
gcugccaucucacgugguu

SEQ ID NO: 989140 - RNA, 19 nt, Artificial Sequence
  Description of Artificial Sequence: Synthetic oligonucleotide
ggcccgcuaggccucggaa

SEQ ID NO: 989141 - RNA, 19 nt, Artificial Sequence
  Description of Artificial Sequence: Synthetic oligonucleotide
cuucuaccucagcuuuaau

SEQ ID NO: 989142 - RNA, 19 nt, Artificial Sequence
  Description of Artificial Sequence: Synthetic oligonucleotide
cuguaacauuaggugcgau

SEQ ID NO: 989143 - RNA, 19 nt, Artificial Sequence
  Description of Artificial Sequence: Synthetic oligonucleotide
cugcaugcuuggccaaauu

SEQ ID NO: 989144 - RNA, 19 nt, Artificial Sequence
  Description of Artificial Sequence: Synthetic oligonucleotide
cggauagccaaaacaguuu

SEQ ID NO: 989145 - RNA, 19 nt, Artificial Sequence
  Description of Artificial Sequence: Synthetic oligonucleotide
ccucuaauuuggcucuguu

SEQ ID NO: 989146 - RNA, 19 nt, Artificial Sequence
  Description of Artificial Sequence: Synthetic oligonucleotide
gcgagagcgcaaaugcguu

SEQ ID NO: 989147 - RNA, 19 nt, Artificial Sequence
  Description of Artificial Sequence: Synthetic oligonucleotide
ccgcgagcucucaccccac

SEQ ID NO: 989148 - RNA, 19 nt, Artificial Sequence
  Description of Artificial Sequence: Synthetic oligonucleotide
ccgcauaauguaguuguuu

SEQ ID NO: 989149 - RNA, 19 nt, Artificial Sequence
  Description of Artificial Sequence: Synthetic oligonucleotide
gccaucucacgugguucua

SEQ ID NO: 989150 - RNA, 19 nt, Artificial Sequence
  Description of Artificial Sequence: Synthetic oligonucleotide
ccgcuguauccugaaauuu

SEQ ID NO: 989151 - RNA, 19 nt, Artificial Sequence
  Description of Artificial Sequence: Synthetic oligonucleotide
cgccaagaaucuguacugu

SEQ ID NO: 989152 - RNA, 19 nt, Artificial Sequence
  Description of Artificial Sequence: Synthetic oligonucleotide
ggcuggccgcgagcucuca

SEQ ID NO: 989153 - RNA, 19 nt, Artificial Sequence
  Description of Artificial Sequence: Synthetic oligonucleotide
gcgcggcuggccgcgagcu

SEQ ID NO: 989154 - RNA, 19 nt, Artificial Sequence
  Description of Artificial Sequence: Synthetic oligonucleotide
cgauggccaucauucgauu

SEQ ID NO: 989155 - RNA, 19 nt, Artificial Sequence
  Description of Artificial Sequence: Synthetic oligonucleotide
cgcgagcucucaccccacu

SEQ ID NO: 989156 - RNA, 19 nt, Artificial Sequence
  Description of Artificial Sequence: Synthetic oligonucleotide
aagugaacgcugcagagac

SEQ ID NO: 989157 - RNA, 19 nt, Artificial Sequence
  Description of Artificial Sequence: Synthetic oligonucleotide
cucgguaagacgcagaugg

SEQ ID NO: 989158 - RNA, 19 nt, Artificial Sequence
  Description of Artificial Sequence: Synthetic oligonucleotide
aauauugggaguucaacau

SEQ ID NO: 989159 - RNA, 19 nt, Artificial Sequence
  Description of Artificial Sequence: Synthetic oligonucleotide
gauuccuugggcuggaagg

SEQ ID NO: 989160 - RNA, 19 nt, Artificial Sequence
  Description of Artificial Sequence: Synthetic oligonucleotide
aucucuuaucacuacacac

SEQ ID NO: 989161 - RNA, 19 nt, Artificial Sequence
  Description of Artificial Sequence: Synthetic oligonucleotide
aauuuuaaccgguagcaaa

SEQ ID NO: 989162 - RNA, 19 nt, Artificial Sequence
  Description of Artificial Sequence: Synthetic oligonucleotide
uauugggaguucaacaucc

SEQ ID NO: 989163 - RNA, 19 nt, Artificial Sequence
  Description of Artificial Sequence: Synthetic oligonucleotide
uuacgaaugacagccaugg

SEQ ID NO: 989164 - RNA, 19 nt, Artificial Sequence
  Description of Artificial Sequence: Synthetic oligonucleotide
aguacgaguggucggagcc

SEQ ID NO: 989165 - RNA, 19 nt, Artificial Sequence
  Description of Artificial Sequence: Synthetic oligonucleotide
uagaauuuuaaccgguagc

SEQ ID NO: 989166 - RNA, 19 nt, Artificial Sequence
  Description of Artificial Sequence: Synthetic oligonucleotide
ugcaccguaaggucgaugg

SEQ ID NO: 989167 - RNA, 19 nt, Artificial Sequence
  Description of Artificial Sequence: Synthetic oligonucleotide
ucucuuaucacuacacaca

SEQ ID NO: 989168 - RNA, 19 nt, Artificial Sequence
  Description of Artificial Sequence: Synthetic oligonucleotide
ucuacagcggccugaaggg

SEQ ID NO: 989169 - RNA, 19 nt, Artificial Sequence
  Description of Artificial Sequence: Synthetic oligonucleotide
aaaccuaagucccugguaa

SEQ ID NO: 989170 - RNA, 19 nt, Artificial Sequence
  Description of Artificial Sequence: Synthetic oligonucleotide
agauucuuaaguucccaac

SEQ ID NO: 989171 - RNA, 19 nt, Artificial Sequence
  Description of Artificial Sequence: Synthetic oligonucleotide
auugacgccacgcagcggg

SEQ ID NO: 989172 - RNA, 19 nt, Artificial Sequence
  Description of Artificial Sequence: Synthetic oligonucleotide
ucuacuugcaccguaaggu

SEQ ID NO: 989173 - RNA, 19 nt, Artificial Sequence
  Description of Artificial Sequence: Synthetic oligonucleotide
acauaacagagauaaaccu

SEQ ID NO: 989174 - RNA, 19 nt, Artificial Sequence
  Description of Artificial Sequence: Synthetic oligonucleotide
aacagagauaaaccuaagu

SEQ ID NO: 989175 - RNA, 19 nt, Artificial Sequence
  Description of Artificial Sequence: Synthetic oligonucleotide
agaugugguuuucugaauc

SEQ ID NO: 989176 - RNA, 19 nt, Artificial Sequence
  Description of Artificial Sequence: Synthetic oligonucleotide
accgguagcaaacauaaca

SEQ ID NO: 989177 - RNA, 19 nt, Artificial Sequence
  Description of Artificial Sequence: Synthetic oligonucleotide
accguauaggucuugcgac

SEQ ID NO: 989178 - RNA, 19 nt, Artificial Sequence
  Description of Artificial Sequence: Synthetic oligonucleotide
ugggaguucaacauccgcc

SEQ ID NO: 989179 - RNA, 19 nt, Artificial Sequence
  Description of Artificial Sequence: Synthetic oligonucleotide
aaccguauaggucuugcga

SEQ ID NO: 989180 - RNA, 19 nt, Artificial Sequence
  Description of Artificial Sequence: Synthetic oligonucleotide
uaaagccaggcauagcugc

SEQ ID NO: 989181 - RNA, 19 nt, Artificial Sequence
  Description of Artificial Sequence: Synthetic oligonucleotide
uaaagaugugguuuucuga

SEQ ID NO: 989182 - RNA, 19 nt, Artificial Sequence
  Description of Artificial Sequence: Synthetic oligonucleotide
acuuuagucuaauuguaca

SEQ ID NO: 989183 - RNA, 19 nt, Artificial Sequence
  Description of Artificial Sequence: Synthetic oligonucleotide
gauaaaccuaagucccugg

SEQ ID NO: 989184 - RNA, 19 nt, Artificial Sequence
  Description of Artificial Sequence: Synthetic oligonucleotide
cuuaaccagaaucuggaac

SEQ ID NO: 989185 - RNA, 19 nt, Artificial Sequence
  Description of Artificial Sequence: Synthetic oligonucleotide
agucccgcugcccuaaacc

SEQ ID NO: 989186 - RNA, 19 nt, Artificial Sequence
  Description of Artificial Sequence: Synthetic oligonucleotide
ucacgaauucugcagguug

SEQ ID NO: 989187 - RNA, 19 nt, Artificial Sequence
  Description of Artificial Sequence: Synthetic oligonucleotide
uacuugcaccguaaggucg

SEQ ID NO: 989188 - RNA, 19 nt, Artificial Sequence
  Description of Artificial Sequence: Synthetic oligonucleotide
uaaaccucagcacugucaa

SEQ ID NO: 989189 - RNA, 19 nt, Artificial Sequence
  Description of Artificial Sequence: Synthetic oligonucleotide
acgaaugacagccauggca

SEQ ID NO: 989190 - RNA, 19 nt, Artificial Sequence
  Description of Artificial Sequence: Synthetic oligonucleotide
cucgcgaaguucuucacgg

SEQ ID NO: 989191 - RNA, 19 nt, Artificial Sequence
  Description of Artificial Sequence: Synthetic oligonucleotide
aaagcugucuccaaucgcu

SEQ ID NO: 989192 - RNA, 19 nt, Artificial Sequence
  Description of Artificial Sequence: Synthetic oligonucleotide
aaacauuugcuuaaccaga

SEQ ID NO: 989193 - RNA, 19 nt, Artificial Sequence
  Description of Artificial Sequence: Synthetic oligonucleotide
aggagcaaacaaaugaggg

SEQ ID NO: 989194 - RNA, 19 nt, Artificial Sequence
  Description of Artificial Sequence: Synthetic oligonucleotide
ugcaaacucuacuugcacc

SEQ ID NO: 989195 - RNA, 19 nt, Artificial Sequence
  Description of Artificial Sequence: Synthetic oligonucleotide
auagcugcgacgcgcggcc

SEQ ID NO: 989196 - RNA, 19 nt, Artificial Sequence
  Description of Artificial Sequence: Synthetic oligonucleotide
cuugcgaccgcccuggaag

SEQ ID NO: 989197 - RNA, 19 nt, Artificial Sequence
  Description of Artificial Sequence: Synthetic oligonucleotide
ugagggugccagaugagag

SEQ ID NO: 989198 - RNA, 19 nt, Artificial Sequence
  Description of Artificial Sequence: Synthetic oligonucleotide
gauacuacccuucaucucu

SEQ ID NO: 989199 - RNA, 19 nt, Artificial Sequence
  Description of Artificial Sequence: Synthetic oligonucleotide
gagucacgaauucugcagg

SEQ ID NO: 989200 - RNA, 19 nt, Artificial Sequence
  Description of Artificial Sequence: Synthetic oligonucleotide
aguuccuaagagucccacc

SEQ ID NO: 989201 - RNA, 19 nt, Artificial Sequence
  Description of Artificial Sequence: Synthetic oligonucleotide
gaaggagucacgaauucug

SEQ ID NO: 989202 - RNA, 19 nt, Artificial Sequence
  Description of Artificial Sequence: Synthetic oligonucleotide
gcaaacucuacuugcaccg

SEQ ID NO: 989203 - RNA, 19 nt, Artificial Sequence
  Description of Artificial Sequence: Synthetic oligonucleotide
ucucgcgaaguucuucacg

SEQ ID NO: 989204 - RNA, 19 nt, Artificial Sequence
  Description of Artificial Sequence: Synthetic oligonucleotide
uggaagugaacgcugcaga

SEQ ID NO: 989205 - RNA, 19 nt, Artificial Sequence
  Description of Artificial Sequence: Synthetic oligonucleotide
ugcccuaaaccucagcacu

SEQ ID NO: 989206 - RNA, 19 nt, Artificial Sequence
  Description of Artificial Sequence: Synthetic oligonucleotide
agagcccucucauaaauga

SEQ ID NO: 989207 - RNA, 19 nt, Artificial Sequence
  Description of Artificial Sequence: Synthetic oligonucleotide
ucacaucaucucccgaggg

SEQ ID NO: 989208 - RNA, 19 nt, Artificial Sequence
  Description of Artificial Sequence: Synthetic oligonucleotide
ugggaaacguguagaagug

SEQ ID NO: 989209 - RNA, 19 nt, Artificial Sequence
  Description of Artificial Sequence: Synthetic oligonucleotide
gucggagccaguaucaggg

SEQ ID NO: 989210 - RNA, 19 nt, Artificial Sequence
  Description of Artificial Sequence: Synthetic oligonucleotide
gugaacgcugcagagacgg

SEQ ID NO: 989211 - RNA, 19 nt, Artificial Sequence
  Description of Artificial Sequence: Synthetic oligonucleotide
agcacguaaagccaggcau

SEQ ID NO: 989212 - RNA, 19 nt, Artificial Sequence
  Description of Artificial Sequence: Synthetic oligonucleotide
cucauugacgccacgcagc

SEQ ID NO: 989213 - RNA, 19 nt, Artificial Sequence
  Description of Artificial Sequence: Synthetic oligonucleotide
uuaaccgguagcaaacaua

SEQ ID NO: 989214 - RNA, 19 nt, Artificial Sequence
  Description of Artificial Sequence: Synthetic oligonucleotide
uagaaagguccuagaaggc

SEQ ID NO: 989215 - RNA, 19 nt, Artificial Sequence
  Description of Artificial Sequence: Synthetic oligonucleotide
guuguagcagcccgguacg

SEQ ID NO: 989216 - RNA, 19 nt, Artificial Sequence
  Description of Artificial Sequence: Synthetic oligonucleotide
acgcgaaccguauaggucu

SEQ ID NO: 989217 - RNA, 19 nt, Artificial Sequence
  Description of Artificial Sequence: Synthetic oligonucleotide
guaagcaugaaaaggagaa

SEQ ID NO: 989218 - RNA, 19 nt, Artificial Sequence
  Description of Artificial Sequence: Synthetic oligonucleotide
aacgcgaaccguauagguc

SEQ ID NO: 989219 - RNA, 19 nt, Artificial Sequence
  Description of Artificial Sequence: Synthetic oligonucleotide
uccuacuucaggagcaaac

SEQ ID NO: 989220 - RNA, 19 nt, Artificial Sequence
  Description of Artificial Sequence: Synthetic oligonucleotide
gauucuuaaguucccaacu

SEQ ID NO: 989221 - RNA, 19 nt, Artificial Sequence
  Description of Artificial Sequence: Synthetic oligonucleotide
aaccuaaagaugugguuuu

SEQ ID NO: 989222 - RNA, 19 nt, Artificial Sequence
  Description of Artificial Sequence: Synthetic oligonucleotide
aaccuaagucccugguaag

SEQ ID NO: 989223 - RNA, 19 nt, Artificial Sequence
  Description of Artificial Sequence: Synthetic oligonucleotide
ucccugguaagcuggaucu

SEQ ID NO: 989224 - RNA, 19 nt, Artificial Sequence
  Description of Artificial Sequence: Synthetic oligonucleotide
acuacacacaccaaagcug

SEQ ID NO: 989225 - RNA, 19 nt, Artificial Sequence
  Description of Artificial Sequence: Synthetic oligonucleotide
acgacaaggaguacgagug

SEQ ID NO: 989226 - RNA, 19 nt, Artificial Sequence
  Description of Artificial Sequence: Synthetic oligonucleotide
agaccaacuaguccccauc

SEQ ID NO: 989227 - RNA, 19 nt, Artificial Sequence
  Description of Artificial Sequence: Synthetic oligonucleotide
cauuccaugcuucuuacga

SEQ ID NO: 989228 - RNA, 19 nt, Artificial Sequence
  Description of Artificial Sequence: Synthetic oligonucleotide
ucgcuggccaaccuaaaga

SEQ ID NO: 989229 - RNA, 19 nt, Artificial Sequence
  Description of Artificial Sequence: Synthetic oligonucleotide
gaaccguauaggucuugcg

SEQ ID NO: 989230 - RNA, 19 nt, Artificial Sequence
  Description of Artificial Sequence: Synthetic oligonucleotide
cuagaauaugcuugcugac

SEQ ID NO: 989231 - RNA, 19 nt, Artificial Sequence
  Description of Artificial Sequence: Synthetic oligonucleotide
ucacuauugccgcccggcg

SEQ ID NO: 989232 - RNA, 19 nt, Artificial Sequence
  Description of Artificial Sequence: Synthetic oligonucleotide
uaccugacgacaaggagua

SEQ ID NO: 989233 - RNA, 19 nt, Artificial Sequence
  Description of Artificial Sequence: Synthetic oligonucleotide
gaagcacccacugacgccc

SEQ ID NO: 989234 - RNA, 19 nt, Artificial Sequence
  Description of Artificial Sequence: Synthetic oligonucleotide
accugaaacagguaagcau

SEQ ID NO: 989235 - RNA, 19 nt, Artificial Sequence
  Description of Artificial Sequence: Synthetic oligonucleotide
ucuuaucacuacacacacc

SEQ ID NO: 989236 - RNA, 19 nt, Artificial Sequence
  Description of Artificial Sequence: Synthetic oligonucleotide
agaugagagucccgcugcc

SEQ ID NO: 989237 - RNA, 19 nt, Artificial Sequence
  Description of Artificial Sequence: Synthetic oligonucleotide
cacgaauucugcagguugc

SEQ ID NO: 989238 - RNA, 19 nt, Artificial Sequence
  Description of Artificial Sequence: Synthetic oligonucleotide
cagauggcggauacuaccc

SEQ ID NO: 989239 - RNA, 19 nt, Artificial Sequence
  Description of Artificial Sequence: Synthetic oligonucleotide
gaagcacggccgcagaggc

SEQ ID NO: 989240 - RNA, 19 nt, Artificial Sequence
  Description of Artificial Sequence: Synthetic oligonucleotide
auaaaccuaagucccuggu

SEQ ID NO: 989241 - RNA, 19 nt, Artificial Sequence
  Description of Artificial Sequence: Synthetic oligonucleotide
accuaagucccugguaagc

SEQ ID NO: 989242 - RNA, 19 nt, Artificial Sequence
  Description of Artificial Sequence: Synthetic oligonucleotide
cucuacuugcaccguaagg

SEQ ID NO: 989243 - RNA, 19 nt, Artificial Sequence
  Description of Artificial Sequence: Synthetic oligonucleotide
uuuaaccgguagcaaacau

SEQ ID NO: 989244 - RNA, 19 nt, Artificial Sequence
  Description of Artificial Sequence: Synthetic oligonucleotide
aaacuuuagucuaauugua

SEQ ID NO: 989245 - RNA, 19 nt, Artificial Sequence
  Description of Artificial Sequence: Synthetic oligonucleotide
uccaugcuucuuacgaaug

SEQ ID NO: 989246 - RNA, 19 nt, Artificial Sequence
  Description of Artificial Sequence: Synthetic oligonucleotide
gaucucuuaucacuacaca

SEQ ID NO: 989247 - RNA, 19 nt, Artificial Sequence
  Description of Artificial Sequence: Synthetic oligonucleotide
acuauugccgcccggcgca

SEQ ID NO: 989248 - RNA, 19 nt, Artificial Sequence
  Description of Artificial Sequence: Synthetic oligonucleotide
acguguagaagugcagcgc

SEQ ID NO: 989249 - RNA, 19 nt, Artificial Sequence
  Description of Artificial Sequence: Synthetic oligonucleotide
aggauaaguuucaaguuca

SEQ ID NO: 989250 - RNA, 19 nt, Artificial Sequence
  Description of Artificial Sequence: Synthetic oligonucleotide
cacaggccgaaccugaaac

SEQ ID NO: 989251 - RNA, 19 nt, Artificial Sequence
  Description of Artificial Sequence: Synthetic oligonucleotide
gaaacguguagaagugcag

SEQ ID NO: 989252 - RNA, 19 nt, Artificial Sequence
  Description of Artificial Sequence: Synthetic oligonucleotide
ucugaaucccaaaguuccu

SEQ ID NO: 989253 - RNA, 19 nt, Artificial Sequence
  Description of Artificial Sequence: Synthetic oligonucleotide
ugagaucucuuaucacuac

SEQ ID NO: 989254 - RNA, 19 nt, Artificial Sequence
  Description of Artificial Sequence: Synthetic oligonucleotide
gguaagacgcagauggcgg

SEQ ID NO: 989255 - RNA, 19 nt, Artificial Sequence
  Description of Artificial Sequence: Synthetic oligonucleotide
aagaugugguuuucugaau

SEQ ID NO: 989256 - RNA, 19 nt, Artificial Sequence
  Description of Artificial Sequence: Synthetic oligonucleotide
uuuuaaccgguagcaaaca

SEQ ID NO: 989257 - RNA, 19 nt, Artificial Sequence
  Description of Artificial Sequence: Synthetic oligonucleotide
guagcaaacauaacagaga

SEQ ID NO: 989258 - RNA, 19 nt, Artificial Sequence
  Description of Artificial Sequence: Synthetic oligonucleotide
aacuccuacuucaggagca

SEQ ID NO: 989259 - RNA, 19 nt, Artificial Sequence
  Description of Artificial Sequence: Synthetic oligonucleotide
ugguaccugacgacaagga

SEQ ID NO: 989260 - RNA, 19 nt, Artificial Sequence
  Description of Artificial Sequence: Synthetic oligonucleotide
cagaugagagucccgcugc

SEQ ID NO: 989261 - RNA, 19 nt, Artificial Sequence
  Description of Artificial Sequence: Synthetic oligonucleotide
gugccuagaauaugcuugc

SEQ ID NO: 989262 - RNA, 19 nt, Artificial Sequence
  Description of Artificial Sequence: Synthetic oligonucleotide
aaccugaaacagguaagca

SEQ ID NO: 989263 - RNA, 19 nt, Artificial Sequence
  Description of Artificial Sequence: Synthetic oligonucleotide
agaagcacggccgcagagg

SEQ ID NO: 989264 - RNA, 19 nt, Artificial Sequence
  Description of Artificial Sequence: Synthetic oligonucleotide
aucgcuggccaaccuaaag

SEQ ID NO: 989265 - RNA, 19 nt, Artificial Sequence
  Description of Artificial Sequence: Synthetic oligonucleotide
aaucacaggccgaaccuga

SEQ ID NO: 989266 - RNA, 19 nt, Artificial Sequence
  Description of Artificial Sequence: Synthetic oligonucleotide
cuaagucccugguaagcug

SEQ ID NO: 989267 - RNA, 19 nt, Artificial Sequence
  Description of Artificial Sequence: Synthetic oligonucleotide
ucccuuagaggccucucac

SEQ ID NO: 989268 - RNA, 19 nt, Artificial Sequence
  Description of Artificial Sequence: Synthetic oligonucleotide
aaacucuacuugcaccgua

SEQ ID NO: 989269 - RNA, 19 nt, Artificial Sequence
  Description of Artificial Sequence: Synthetic oligonucleotide
ggaagugaacgcugcagag

SEQ ID NO: 989270 - RNA, 19 nt, Artificial Sequence
  Description of Artificial Sequence: Synthetic oligonucleotide
augagagucccgcugcccu

SEQ ID NO: 989271 - RNA, 19 nt, Artificial Sequence
  Description of Artificial Sequence: Synthetic oligonucleotide
agggugagaagcacggccg

SEQ ID NO: 989272 - RNA, 19 nt, Artificial Sequence
  Description of Artificial Sequence: Synthetic oligonucleotide
gggaacgcgaaccguauag

SEQ ID NO: 989273 - RNA, 19 nt, Artificial Sequence
  Description of Artificial Sequence: Synthetic oligonucleotide
agcaggcgauccuucucgc

SEQ ID NO: 989274 - RNA, 19 nt, Artificial Sequence
  Description of Artificial Sequence: Synthetic oligonucleotide
auuccaugcuucuuacgaa

SEQ ID NO: 989275 - RNA, 19 nt, Artificial Sequence
  Description of Artificial Sequence: Synthetic oligonucleotide
gguaccugacgacaaggag

SEQ ID NO: 989276 - RNA, 19 nt, Artificial Sequence
  Description of Artificial Sequence: Synthetic oligonucleotide
cucacuauugccgcccggc

SEQ ID NO: 989277 - RNA, 19 nt, Artificial Sequence
  Description of Artificial Sequence: Synthetic oligonucleotide
agguaagcaugaaaaggag

SEQ ID NO: 989278 - RNA, 19 nt, Artificial Sequence
  Description of Artificial Sequence: Synthetic oligonucleotide
agucacgaauucugcaggu

SEQ ID NO: 989279 - RNA, 19 nt, Artificial Sequence
  Description of Artificial Sequence: Synthetic oligonucleotide
acaaaugagggugccagau

SEQ ID NO: 989280 - RNA, 19 nt, Artificial Sequence
  Description of Artificial Sequence: Synthetic oligonucleotide
accaacuaguccccaucag

SEQ ID NO: 989281 - RNA, 19 nt, Artificial Sequence
  Description of Artificial Sequence: Synthetic oligonucleotide
acucuacuugcaccguaag

SEQ ID NO: 989282 - RNA, 19 nt, Artificial Sequence
  Description of Artificial Sequence: Synthetic oligonucleotide
gcagauggcggauacuacc

SEQ ID NO: 989283 - RNA, 19 nt, Artificial Sequence
  Description of Artificial Sequence: Synthetic oligonucleotide
uucuuacgaaugacagcca

SEQ ID NO: 989284 - RNA, 19 nt, Artificial Sequence
  Description of Artificial Sequence: Synthetic oligonucleotide
uccuugggaaacguguaga

SEQ ID NO: 989285 - RNA, 19 nt, Artificial Sequence
  Description of Artificial Sequence: Synthetic oligonucleotide
gugguaccugacgacaagg

SEQ ID NO: 989286 - RNA, 19 nt, Artificial Sequence
  Description of Artificial Sequence: Synthetic oligonucleotide
gacgacaaggaguacgagu

SEQ ID NO: 989287 - RNA, 19 nt, Artificial Sequence
  Description of Artificial Sequence: Synthetic oligonucleotide
uggguagaaagguccuaga

SEQ ID NO: 989288 - RNA, 19 nt, Artificial Sequence
  Description of Artificial Sequence: Synthetic oligonucleotide
gaccaacuaguccccauca

SEQ ID NO: 989289 - RNA, 19 nt, Artificial Sequence
  Description of Artificial Sequence: Synthetic oligonucleotide
gcugaagggaaccauucac

SEQ ID NO: 989290 - RNA, 19 nt, Artificial Sequence
  Description of Artificial Sequence: Synthetic oligonucleotide
gagacgguggcccguggug

SEQ ID NO: 989291 - RNA, 19 nt, Artificial Sequence
  Description of Artificial Sequence: Synthetic oligonucleotide
aacauccgccugaggauuc

SEQ ID NO: 989292 - RNA, 19 nt, Artificial Sequence
  Description of Artificial Sequence: Synthetic oligonucleotide
cacguaaagccaggcauag

SEQ ID NO: 989293 - RNA, 19 nt, Artificial Sequence
  Description of Artificial Sequence: Synthetic oligonucleotide
ucgguaagacgcagauggc

SEQ ID NO: 989294 - RNA, 19 nt, Artificial Sequence
  Description of Artificial Sequence: Synthetic oligonucleotide
agccaggcauagcugcgac

SEQ ID NO: 989295 - RNA, 19 nt, Artificial Sequence
  Description of Artificial Sequence: Synthetic oligonucleotide
accagaauauugggaguuc

SEQ ID NO: 989296 - RNA, 19 nt, Artificial Sequence
  Description of Artificial Sequence: Synthetic oligonucleotide
cgugccuagaauaugcuug

SEQ ID NO: 989297 - RNA, 19 nt, Artificial Sequence
  Description of Artificial Sequence: Synthetic oligonucleotide
gaguacgaguggucggagc

SEQ ID NO: 989298 - RNA, 19 nt, Artificial Sequence
  Description of Artificial Sequence: Synthetic oligonucleotide
ucuucgacggccgggucug

SEQ ID NO: 989299 - RNA, 19 nt, Artificial Sequence
  Description of Artificial Sequence: Synthetic oligonucleotide
acaggccgaaccugaaaca

SEQ ID NO: 989300 - RNA, 19 nt, Artificial Sequence
  Description of Artificial Sequence: Synthetic oligonucleotide
uccgugguaccugacgaca

SEQ ID NO: 989301 - RNA, 19 nt, Artificial Sequence
  Description of Artificial Sequence: Synthetic oligonucleotide
guaaagccaggcauagcug

SEQ ID NO: 989302 - RNA, 19 nt, Artificial Sequence
  Description of Artificial Sequence: Synthetic oligonucleotide
gauccuucucgcgaaguuc

SEQ ID NO: 989303 - RNA, 19 nt, Artificial Sequence
  Description of Artificial Sequence: Synthetic oligonucleotide
ucuccaaucgcuggccaac

SEQ ID NO: 989304 - RNA, 19 nt, Artificial Sequence
  Description of Artificial Sequence: Synthetic oligonucleotide
gagccaguaucagggaagc

SEQ ID NO: 989305 - RNA, 19 nt, Artificial Sequence
  Description of Artificial Sequence: Synthetic oligonucleotide
uacgaguggucggagccag

SEQ ID NO: 989306 - RNA, 19 nt, Artificial Sequence
  Description of Artificial Sequence: Synthetic oligonucleotide
gaauuuuaaccgguagcaa

SEQ ID NO: 989307 - RNA, 19 nt, Artificial Sequence
  Description of Artificial Sequence: Synthetic oligonucleotide
aacucuacuugcaccguaa

SEQ ID NO: 989308 - RNA, 19 nt, Artificial Sequence
  Description of Artificial Sequence: Synthetic oligonucleotide
uugcgcucuucgacggccg

SEQ ID NO: 989309 - RNA, 19 nt, Artificial Sequence
  Description of Artificial Sequence: Synthetic oligonucleotide
caggccgaaccugaaacag

SEQ ID NO: 989310 - RNA, 19 nt, Artificial Sequence
  Description of Artificial Sequence: Synthetic oligonucleotide
gcuucuuacgaaugacagc

SEQ ID NO: 989311 - RNA, 19 nt, Artificial Sequence
  Description of Artificial Sequence: Synthetic oligonucleotide
aggucuccgcgcuacuuug

SEQ ID NO: 989312 - RNA, 19 nt, Artificial Sequence
  Description of Artificial Sequence: Synthetic oligonucleotide
cuugcgcucuucgacggcc

SEQ ID NO: 989313 - RNA, 19 nt, Artificial Sequence
  Description of Artificial Sequence: Synthetic oligonucleotide
ccugacgacaaggaguacg

SEQ ID NO: 989314 - RNA, 19 nt, Artificial Sequence
  Description of Artificial Sequence: Synthetic oligonucleotide
gaugagagucccgcugccc

SEQ ID NO: 989315 - RNA, 19 nt, Artificial Sequence
  Description of Artificial Sequence: Synthetic oligonucleotide
uguagcagcccgguacgca

SEQ ID NO: 989316 - RNA, 19 nt, Artificial Sequence
  Description of Artificial Sequence: Synthetic oligonucleotide
cuuugcgcucauugacgcc

SEQ ID NO: 989317 - RNA, 19 nt, Artificial Sequence
  Description of Artificial Sequence: Synthetic oligonucleotide
uucucgacgggcggcgccg

SEQ ID NO: 989318 - RNA, 19 nt, Artificial Sequence
  Description of Artificial Sequence: Synthetic oligonucleotide
aaccgguagcaaacauaac

SEQ ID NO: 989319 - RNA, 19 nt, Artificial Sequence
  Description of Artificial Sequence: Synthetic oligonucleotide
cgggacacguucuugagcc

SEQ ID NO: 989320 - RNA, 19 nt, Artificial Sequence
  Description of Artificial Sequence: Synthetic oligonucleotide
cacuacacacaccaaagcu

SEQ ID NO: 989321 - RNA, 19 nt, Artificial Sequence
  Description of Artificial Sequence: Synthetic oligonucleotide
cagcccgguacgcagcacg

SEQ ID NO: 989322 - RNA, 19 nt, Artificial Sequence
  Description of Artificial Sequence: Synthetic oligonucleotide
acugacgcccgcacgggac

SEQ ID NO: 989323 - RNA, 19 nt, Artificial Sequence
  Description of Artificial Sequence: Synthetic oligonucleotide
agauggcggauacuacccu

SEQ ID NO: 989324 - RNA, 19 nt, Artificial Sequence
  Description of Artificial Sequence: Synthetic oligonucleotide
accuaaagaugugguuuuc

SEQ ID NO: 989325 - RNA, 19 nt, Artificial Sequence
  Description of Artificial Sequence: Synthetic oligonucleotide
ugaaacagguaagcaugaa

SEQ ID NO: 989326 - RNA, 19 nt, Artificial Sequence
  Description of Artificial Sequence: Synthetic oligonucleotide
auggcggauacuacccuuc

SEQ ID NO: 989327 - RNA, 19 nt, Artificial Sequence
  Description of Artificial Sequence: Synthetic oligonucleotide
gacgccacgcagcgggaag

SEQ ID NO: 989328 - RNA, 19 nt, Artificial Sequence
  Description of Artificial Sequence: Synthetic oligonucleotide
agcgcacucagcggccucc

SEQ ID NO: 989329 - RNA, 19 nt, Artificial Sequence
  Description of Artificial Sequence: Synthetic oligonucleotide
cauagcugcgacgcgcggc

SEQ ID NO: 989330 - RNA, 19 nt, Artificial Sequence
  Description of Artificial Sequence: Synthetic oligonucleotide
gaacgcgaaccguauaggu

SEQ ID NO: 989331 - RNA, 19 nt, Artificial Sequence
  Description of Artificial Sequence: Synthetic oligonucleotide
guaagacgcagauggcgga

SEQ ID NO: 989332 - RNA, 19 nt, Artificial Sequence
  Description of Artificial Sequence: Synthetic oligonucleotide
ucacaggccgaaccugaaa

SEQ ID NO: 989333 - RNA, 19 nt, Artificial Sequence
  Description of Artificial Sequence: Synthetic oligonucleotide
acguaaagccaggcauagc

SEQ ID NO: 989334 - RNA, 19 nt, Artificial Sequence
  Description of Artificial Sequence: Synthetic oligonucleotide
uugcugcugcugcugcugc

SEQ ID NO: 989335 - RNA, 19 nt, Artificial Sequence
  Description of Artificial Sequence: Synthetic oligonucleotide
ggaaacguguagaagugca

SEQ ID NO: 989336 - RNA, 19 nt, Artificial Sequence
  Description of Artificial Sequence: Synthetic oligonucleotide
gccuagaauaugcuugcug

SEQ ID NO: 989337 - RNA, 19 nt, Artificial Sequence
  Description of Artificial Sequence: Synthetic oligonucleotide
ggucggagccaguaucagg

SEQ ID NO: 989338 - RNA, 19 nt, Artificial Sequence
  Description of Artificial Sequence: Synthetic oligonucleotide
ucggcugcaacuggguggu

SEQ ID NO: 989339 - RNA, 19 nt, Artificial Sequence
  Description of Artificial Sequence: Synthetic oligonucleotide
uccaaucgcuggccaaccu

SEQ ID NO: 989340 - RNA, 19 nt, Artificial Sequence
  Description of Artificial Sequence: Synthetic oligonucleotide
ggagccaguaucagggaag

SEQ ID NO: 989341 - RNA, 19 nt, Artificial Sequence
  Description of Artificial Sequence: Synthetic oligonucleotide
acauccgccugaggauucc

SEQ ID NO: 989342 - RNA, 19 nt, Artificial Sequence
  Description of Artificial Sequence: Synthetic oligonucleotide
gcggauacuacccuucauc

SEQ ID NO: 989343 - RNA, 19 nt, Artificial Sequence
  Description of Artificial Sequence: Synthetic oligonucleotide
guaccugacgacaaggagu

SEQ ID NO: 989344 - RNA, 19 nt, Artificial Sequence
  Description of Artificial Sequence: Synthetic oligonucleotide
aggaguacgaguggucgga

SEQ ID NO: 989345 - RNA, 19 nt, Artificial Sequence
  Description of Artificial Sequence: Synthetic oligonucleotide
ccucucauaaaugaccuuc

SEQ ID NO: 989346 - RNA, 19 nt, Artificial Sequence
  Description of Artificial Sequence: Synthetic oligonucleotide
cacgggacacguucuugag

SEQ ID NO: 989347 - RNA, 19 nt, Artificial Sequence
  Description of Artificial Sequence: Synthetic oligonucleotide
guauaggucuugcgaccgc

SEQ ID NO: 989348 - RNA, 19 nt, Artificial Sequence
  Description of Artificial Sequence: Synthetic oligonucleotide
cacggaucccgaagccugg

SEQ ID NO: 989349 - RNA, 19 nt, Artificial Sequence
  Description of Artificial Sequence: Synthetic oligonucleotide
caaucgcuggccaaccuaa

SEQ ID NO: 989350 - RNA, 19 nt, Artificial Sequence
  Description of Artificial Sequence: Synthetic oligonucleotide
uucucgcgaaguucuucac

SEQ ID NO: 989351 - RNA, 19 nt, Artificial Sequence
  Description of Artificial Sequence: Synthetic oligonucleotide
ggaacgcgaaccguauagg

SEQ ID NO: 989352 - RNA, 19 nt, Artificial Sequence
  Description of Artificial Sequence: Synthetic oligonucleotide
ucgacggccgggucuggcc

SEQ ID NO: 989353 - RNA, 19 nt, Artificial Sequence
  Description of Artificial Sequence: Synthetic oligonucleotide
gguaagcaugaaaaggaga

SEQ ID NO: 989354 - RNA, 19 nt, Artificial Sequence
  Description of Artificial Sequence: Synthetic oligonucleotide
guugcugcugcugcugcug

SEQ ID NO: 989355 - RNA, 19 nt, Artificial Sequence
  Description of Artificial Sequence: Synthetic oligonucleotide
cacaucaucucccgaggga

SEQ ID NO: 989356 - RNA, 19 nt, Artificial Sequence
  Description of Artificial Sequence: Synthetic oligonucleotide
gaagggugagaagcacggc

SEQ ID NO: 989357 - RNA, 19 nt, Artificial Sequence
  Description of Artificial Sequence: Synthetic oligonucleotide
ugcgcucauugacgccacg

SEQ ID NO: 989358 - RNA, 19 nt, Artificial Sequence
  Description of Artificial Sequence: Synthetic oligonucleotide
agguucggcugcaacuggg

SEQ ID NO: 989359 - RNA, 19 nt, Artificial Sequence
  Description of Artificial Sequence: Synthetic oligonucleotide
acuugcaccguaaggucga

SEQ ID NO: 989360 - RNA, 19 nt, Artificial Sequence
  Description of Artificial Sequence: Synthetic oligonucleotide
aagccaggcauagcugcga

SEQ ID NO: 989361 - RNA, 19 nt, Artificial Sequence
  Description of Artificial Sequence: Synthetic oligonucleotide
gauaaguuucaaguucaau

SEQ ID NO: 989362 - RNA, 19 nt, Artificial Sequence
  Description of Artificial Sequence: Synthetic oligonucleotide
aggucuugcgaccgcccug

SEQ ID NO: 989363 - RNA, 19 nt, Artificial Sequence
  Description of Artificial Sequence: Synthetic oligonucleotide
cagguucggcugcaacugg

SEQ ID NO: 989364 - RNA, 19 nt, Artificial Sequence
  Description of Artificial Sequence: Synthetic oligonucleotide
ggucuugcgaccgcccugg

SEQ ID NO: 989365 - RNA, 19 nt, Artificial Sequence
  Description of Artificial Sequence: Synthetic oligonucleotide
aggccgaaccugaaacagg

SEQ ID NO: 989366 - RNA, 19 nt, Artificial Sequence
  Description of Artificial Sequence: Synthetic oligonucleotide
caggcgauccuucucgcga

SEQ ID NO: 989367 - RNA, 19 nt, Artificial Sequence
  Description of Artificial Sequence: Synthetic oligonucleotide
gcgcaagucgucccgggcg

SEQ ID NO: 989368 - RNA, 19 nt, Artificial Sequence
  Description of Artificial Sequence: Synthetic oligonucleotide
cuacccacccggccgcccg

SEQ ID NO: 989369 - RNA, 19 nt, Artificial Sequence
  Description of Artificial Sequence: Synthetic oligonucleotide
cgaaccugaaacagguaag

SEQ ID NO: 989370 - RNA, 19 nt, Artificial Sequence
  Description of Artificial Sequence: Synthetic oligonucleotide
uggucggagccaguaucag

SEQ ID NO: 989371 - RNA, 19 nt, Artificial Sequence
  Description of Artificial Sequence: Synthetic oligonucleotide
ucgcgaaguucuucacgga

SEQ ID NO: 989372 - RNA, 19 nt, Artificial Sequence
  Description of Artificial Sequence: Synthetic oligonucleotide
cguucuugagccagaggcg

SEQ ID NO: 989373 - RNA, 19 nt, Artificial Sequence
  Description of Artificial Sequence: Synthetic oligonucleotide
ugguaagcuggaucuccau

SEQ ID NO: 989374 - RNA, 19 nt, Artificial Sequence
  Description of Artificial Sequence: Synthetic oligonucleotide
agugaacgcugcagagacg

SEQ ID NO: 989375 - RNA, 19 nt, Artificial Sequence
  Description of Artificial Sequence: Synthetic oligonucleotide
cagagcgcacucagcggcc

SEQ ID NO: 989376 - RNA, 19 nt, Artificial Sequence
  Description of Artificial Sequence: Synthetic oligonucleotide
auugccgcccggcgcaagu

SEQ ID NO: 989377 - RNA, 19 nt, Artificial Sequence
  Description of Artificial Sequence: Synthetic oligonucleotide
ucggagccaguaucaggga

SEQ ID NO: 989378 - RNA, 19 nt, Artificial Sequence
  Description of Artificial Sequence: Synthetic oligonucleotide
acgaauucugcagguugcu

SEQ ID NO: 989379 - RNA, 19 nt, Artificial Sequence
  Description of Artificial Sequence: Synthetic oligonucleotide
cuucucgacgggcggcgcc

SEQ ID NO: 989380 - RNA, 19 nt, Artificial Sequence
  Description of Artificial Sequence: Synthetic oligonucleotide
uugcgaccgcccuggaagu

SEQ ID NO: 989381 - RNA, 19 nt, Artificial Sequence
  Description of Artificial Sequence: Synthetic oligonucleotide
aaugaccuucuggguagaa

SEQ ID NO: 989382 - RNA, 19 nt, Artificial Sequence
  Description of Artificial Sequence: Synthetic oligonucleotide
ugaacgcugcagagacggu

SEQ ID NO: 989383 - RNA, 19 nt, Artificial Sequence
  Description of Artificial Sequence: Synthetic oligonucleotide
ggauacuacccuucaucuc

SEQ ID NO: 989384 - RNA, 19 nt, Artificial Sequence
  Description of Artificial Sequence: Synthetic oligonucleotide
gguacgcagcacguaaagc

SEQ ID NO: 989385 - RNA, 19 nt, Artificial Sequence
  Description of Artificial Sequence: Synthetic oligonucleotide
cugccuacggcgggcagcc

SEQ ID NO: 989386 - RNA, 19 nt, Artificial Sequence
  Description of Artificial Sequence: Synthetic oligonucleotide
ccguauaggucuugcgacc

SEQ ID NO: 989387 - RNA, 19 nt, Artificial Sequence
  Description of Artificial Sequence: Synthetic oligonucleotide
ugcugcugcugcugcugcc

SEQ ID NO: 989388 - RNA, 19 nt, Artificial Sequence
  Description of Artificial Sequence: Synthetic oligonucleotide
gcgaaguucuucacggagc

SEQ ID NO: 989389 - RNA, 19 nt, Artificial Sequence
  Description of Artificial Sequence: Synthetic oligonucleotide
cuccaaucgcuggccaacc

SEQ ID NO: 989390 - RNA, 19 nt, Artificial Sequence
  Description of Artificial Sequence: Synthetic oligonucleotide
caaccuaaagaugugguuu

SEQ ID NO: 989391 - RNA, 19 nt, Artificial Sequence
  Description of Artificial Sequence: Synthetic oligonucleotide
augaccuucuggguagaaa

SEQ ID NO: 989392 - RNA, 19 nt, Artificial Sequence
  Description of Artificial Sequence: Synthetic oligonucleotide
uugcgcucauugacgccac

SEQ ID NO: 989393 - RNA, 19 nt, Artificial Sequence
  Description of Artificial Sequence: Synthetic oligonucleotide
ugggaacgcgaaccguaua

SEQ ID NO: 989394 - RNA, 19 nt, Artificial Sequence
  Description of Artificial Sequence: Synthetic oligonucleotide
uugacgccacgcagcggga

SEQ ID NO: 989395 - RNA, 19 nt, Artificial Sequence
  Description of Artificial Sequence: Synthetic oligonucleotide
gggaaacguguagaagugc

SEQ ID NO: 989396 - RNA, 19 nt, Artificial Sequence
  Description of Artificial Sequence: Synthetic oligonucleotide
gcuggaaggagucacgaau

SEQ ID NO: 989397 - RNA, 19 nt, Artificial Sequence
  Description of Artificial Sequence: Synthetic oligonucleotide
ccacggaucccgaagccug

SEQ ID NO: 989398 - RNA, 19 nt, Artificial Sequence
  Description of Artificial Sequence: Synthetic oligonucleotide
cugcugcugcugcugcugc

SEQ ID NO: 989399 - RNA, 19 nt, Artificial Sequence
  Description of Artificial Sequence: Synthetic oligonucleotide
aggcgauccuucucgcgaa

SEQ ID NO: 989400 - RNA, 19 nt, Artificial Sequence
  Description of Artificial Sequence: Synthetic oligonucleotide
ccaacuaguccccaucaga

SEQ ID NO: 989401 - RNA, 19 nt, Artificial Sequence
  Description of Artificial Sequence: Synthetic oligonucleotide
guggucggagccaguauca

SEQ ID NO: 989402 - RNA, 19 nt, Artificial Sequence
  Description of Artificial Sequence: Synthetic oligonucleotide
gcaggcgauccuucucgcg

SEQ ID NO: 989403 - RNA, 19 nt, Artificial Sequence
  Description of Artificial Sequence: Synthetic oligonucleotide
ugccuagaauaugcuugcu

SEQ ID NO: 989404 - RNA, 19 nt, Artificial Sequence
  Description of Artificial Sequence: Synthetic oligonucleotide
gcaccguaaggucgauggg

SEQ ID NO: 989405 - RNA, 19 nt, Artificial Sequence
  Description of Artificial Sequence: Synthetic oligonucleotide
caagucgucccgggcgggg

SEQ ID NO: 989406 - RNA, 19 nt, Artificial Sequence
  Description of Artificial Sequence: Synthetic oligonucleotide
cgcuacuuugcgcucauug

SEQ ID NO: 989407 - RNA, 19 nt, Artificial Sequence
  Description of Artificial Sequence: Synthetic oligonucleotide
gagucccgcugcccuaaac

SEQ ID NO: 989408 - RNA, 19 nt, Artificial Sequence
  Description of Artificial Sequence: Synthetic oligonucleotide
ccgaaccugaaacagguaa

SEQ ID NO: 989409 - RNA, 19 nt, Artificial Sequence
  Description of Artificial Sequence: Synthetic oligonucleotide
gauggcggauacuacccuu

SEQ ID NO: 989410 - RNA, 19 nt, Artificial Sequence
  Description of Artificial Sequence: Synthetic oligonucleotide
ugcugcugcugcugcugcu

SEQ ID NO: 989411 - RNA, 19 nt, Artificial Sequence
  Description of Artificial Sequence: Synthetic oligonucleotide
cgguaagacgcagauggcg

SEQ ID NO: 989412 - RNA, 19 nt, Artificial Sequence
  Description of Artificial Sequence: Synthetic oligonucleotide
gugggcgccggagccacgg

SEQ ID NO: 989413 - RNA, 19 nt, Artificial Sequence
  Description of Artificial Sequence: Synthetic oligonucleotide
cguaaagccaggcauagcu

SEQ ID NO: 989414 - RNA, 19 nt, Artificial Sequence
  Description of Artificial Sequence: Synthetic oligonucleotide
ugcagagacgguggcccgu

SEQ ID NO: 989415 - RNA, 19 nt, Artificial Sequence
  Description of Artificial Sequence: Synthetic oligonucleotide
cagcacguaaagccaggca

SEQ ID NO: 989416 - RNA, 19 nt, Artificial Sequence
  Description of Artificial Sequence: Synthetic oligonucleotide
uugcaccguaaggucgaug

SEQ ID NO: 989417 - RNA, 19 nt, Artificial Sequence
  Description of Artificial Sequence: Synthetic oligonucleotide
aaucgcuggccaaccuaaa

SEQ ID NO: 989418 - RNA, 19 nt, Artificial Sequence
  Description of Artificial Sequence: Synthetic oligonucleotide
caguaucagggaagcccuc

SEQ ID NO: 989419 - RNA, 19 nt, Artificial Sequence
  Description of Artificial Sequence: Synthetic oligonucleotide
cgcgaaguucuucacggag

SEQ ID NO: 989420 - RNA, 19 nt, Artificial Sequence
  Description of Artificial Sequence: Synthetic oligonucleotide
cauugacgccacgcagcgg

SEQ ID NO: 989421 - RNA, 19 nt, Artificial Sequence
  Description of Artificial Sequence: Synthetic oligonucleotide
cugaaucccaaaguuccua

SEQ ID NO: 989422 - RNA, 19 nt, Artificial Sequence
  Description of Artificial Sequence: Synthetic oligonucleotide
cuccgcgcuacuuugcgcu

SEQ ID NO: 989423 - RNA, 19 nt, Artificial Sequence
  Description of Artificial Sequence: Synthetic oligonucleotide
gccaggcauagcugcgacg

SEQ ID NO: 989424 - RNA, 19 nt, Artificial Sequence
  Description of Artificial Sequence: Synthetic oligonucleotide
gacgcggcagcggcggcug

SEQ ID NO: 989425 - RNA, 19 nt, Artificial Sequence
  Description of Artificial Sequence: Synthetic oligonucleotide
cuaagagucccaccugcau

SEQ ID NO: 989426 - RNA, 19 nt, Artificial Sequence
  Description of Artificial Sequence: Synthetic oligonucleotide
cagagacgguggcccgugg

SEQ ID NO: 989427 - RNA, 19 nt, Artificial Sequence
  Description of Artificial Sequence: Synthetic oligonucleotide
ugaccgcccgcgccgcgcu

SEQ ID NO: 989428 - RNA, 19 nt, Artificial Sequence
  Description of Artificial Sequence: Synthetic oligonucleotide
gggccaagaugucccguug

SEQ ID NO: 989429 - RNA, 19 nt, Artificial Sequence
  Description of Artificial Sequence: Synthetic oligonucleotide
uccgcgcuacuuugcgcuc

SEQ ID NO: 989430 - RNA, 19 nt, Artificial Sequence
  Description of Artificial Sequence: Synthetic oligonucleotide
uauugccgcccggcgcaag

SEQ ID NO: 989431 - RNA, 19 nt, Artificial Sequence
  Description of Artificial Sequence: Synthetic oligonucleotide
cuuagaggccucucacuau

SEQ ID NO: 989432 - RNA, 19 nt, Artificial Sequence
  Description of Artificial Sequence: Synthetic oligonucleotide
agcguccuugggaaacgug

SEQ ID NO: 989433 - RNA, 19 nt, Artificial Sequence
  Description of Artificial Sequence: Synthetic oligonucleotide
guacgaguggucggagcca

SEQ ID NO: 989434 - RNA, 19 nt, Artificial Sequence
  Description of Artificial Sequence: Synthetic oligonucleotide
uacccacccggccgcccgc

SEQ ID NO: 989435 - RNA, 19 nt, Artificial Sequence
  Description of Artificial Sequence: Synthetic oligonucleotide
cggugugaguuguuguagc

SEQ ID NO: 989436 - RNA, 19 nt, Artificial Sequence
  Description of Artificial Sequence: Synthetic oligonucleotide
accugacgacaaggaguac

SEQ ID NO: 989437 - RNA, 19 nt, Artificial Sequence
  Description of Artificial Sequence: Synthetic oligonucleotide
ccuuagaggccucucacua

SEQ ID NO: 989438 - RNA, 19 nt, Artificial Sequence
  Description of Artificial Sequence: Synthetic oligonucleotide
ugcgaccgcccuggaagug

SEQ ID NO: 989439 - RNA, 19 nt, Artificial Sequence
  Description of Artificial Sequence: Synthetic oligonucleotide
ucgacgggcggcgccgcgc

SEQ ID NO: 989440 - RNA, 19 nt, Artificial Sequence
  Description of Artificial Sequence: Synthetic oligonucleotide
ggcgcaagucgucccgggc

SEQ ID NO: 989441 - RNA, 19 nt, Artificial Sequence
  Description of Artificial Sequence: Synthetic oligonucleotide
gcagcacguaaagccaggc

SEQ ID NO: 989442 - RNA, 19 nt, Artificial Sequence
  Description of Artificial Sequence: Synthetic oligonucleotide
gccuacggcgggcagccgc

SEQ ID NO: 989443 - RNA, 19 nt, Artificial Sequence
  Description of Artificial Sequence: Synthetic oligonucleotide
cgcgcuacccacccggccg

SEQ ID NO: 989444 - RNA, 19 nt, Artificial Sequence
  Description of Artificial Sequence: Synthetic oligonucleotide
ugcaucccuccaggauaag

SEQ ID NO: 989445 - RNA, 19 nt, Artificial Sequence
  Description of Artificial Sequence: Synthetic oligonucleotide
cgacaaggaguacgagugg

SEQ ID NO: 989446 - RNA, 19 nt, Artificial Sequence
  Description of Artificial Sequence: Synthetic oligonucleotide
gagagucccgcugcccuaa

SEQ ID NO: 989447 - RNA, 19 nt, Artificial Sequence
  Description of Artificial Sequence: Synthetic oligonucleotide
ggugggaacgcgaaccgua

SEQ ID NO: 989448 - RNA, 19 nt, Artificial Sequence
  Description of Artificial Sequence: Synthetic oligonucleotide
ggaaccauucacauuccau

SEQ ID NO: 989449 - RNA, 19 nt, Artificial Sequence
  Description of Artificial Sequence: Synthetic oligonucleotide
gcugcugcugcugcugcug

SEQ ID NO: 989450 - RNA, 19 nt, Artificial Sequence
  Description of Artificial Sequence: Synthetic oligonucleotide
ccuaaaccucagcacuguc

SEQ ID NO: 989451 - RNA, 19 nt, Artificial Sequence
  Description of Artificial Sequence: Synthetic oligonucleotide
gcgcucauugacgccacgc

SEQ ID NO: 989452 - RNA, 19 nt, Artificial Sequence
  Description of Artificial Sequence: Synthetic oligonucleotide
ugacgccacgcagcgggaa

SEQ ID NO: 989453 - RNA, 19 nt, Artificial Sequence
  Description of Artificial Sequence: Synthetic oligonucleotide
cgaaccguauaggucuugc

SEQ ID NO: 989454 - RNA, 19 nt, Artificial Sequence
  Description of Artificial Sequence: Synthetic oligonucleotide
acgcagcgggaagauggug

SEQ ID NO: 989455 - RNA, 19 nt, Artificial Sequence
  Description of Artificial Sequence: Synthetic oligonucleotide
ggauaaguuucaaguucaa

SEQ ID NO: 989456 - RNA, 19 nt, Artificial Sequence
  Description of Artificial Sequence: Synthetic oligonucleotide
acgccacgcagcgggaaga

SEQ ID NO: 989457 - RNA, 19 nt, Artificial Sequence
  Description of Artificial Sequence: Synthetic oligonucleotide
ggaaggagucacgaauucu

SEQ ID NO: 989458 - RNA, 19 nt, Artificial Sequence
  Description of Artificial Sequence: Synthetic oligonucleotide
cucuucgacggccgggucu

SEQ ID NO: 989459 - RNA, 19 nt, Artificial Sequence
  Description of Artificial Sequence: Synthetic oligonucleotide
cgcaagucgucccgggcgg

SEQ ID NO: 989460 - RNA, 19 nt, Artificial Sequence
  Description of Artificial Sequence: Synthetic oligonucleotide
cugaccgcccgcgccgcgc

SEQ ID NO: 989461 - RNA, 19 nt, Artificial Sequence
  Description of Artificial Sequence: Synthetic oligonucleotide
ccgcgcgagucccuuagag

SEQ ID NO: 989462 - RNA, 19 nt, Artificial Sequence
  Description of Artificial Sequence: Synthetic oligonucleotide
ggccgaaccugaaacaggu

SEQ ID NO: 989463 - RNA, 19 nt, Artificial Sequence
  Description of Artificial Sequence: Synthetic oligonucleotide
gcugccuacggcgggcagc

SEQ ID NO: 989464 - RNA, 19 nt, Artificial Sequence
  Description of Artificial Sequence: Synthetic oligonucleotide
cucgacgggcggcgccgcg

SEQ ID NO: 989465 - RNA, 19 nt, Artificial Sequence
  Description of Artificial Sequence: Synthetic oligonucleotide
cgguacgcagcacguaaag

SEQ ID NO: 989466 - RNA, 19 nt, Artificial Sequence
  Description of Artificial Sequence: Synthetic oligonucleotide
gcgggaagauggugggaac

SEQ ID NO: 989467 - RNA, 19 nt, Artificial Sequence
  Description of Artificial Sequence: Synthetic oligonucleotide
ucucgacgggcggcgccgc

SEQ ID NO: 989468 - RNA, 19 nt, Artificial Sequence
  Description of Artificial Sequence: Synthetic oligonucleotide
agcccgguacgcagcacgu

SEQ ID NO: 989469 - RNA, 19 nt, Artificial Sequence
  Description of Artificial Sequence: Synthetic oligonucleotide
acgcccgcacgggacacgu

SEQ ID NO: 989470 - RNA, 19 nt, Artificial Sequence
  Description of Artificial Sequence: Synthetic oligonucleotide
cacggccgcagaggcagac

SEQ ID NO: 989471 - RNA, 19 nt, Artificial Sequence
  Description of Artificial Sequence: Synthetic oligonucleotide
caccaaagcugucuccaau

SEQ ID NO: 989472 - RNA, 19 nt, Artificial Sequence
  Description of Artificial Sequence: Synthetic oligonucleotide
ggucuccgcgcuacuuugc

SEQ ID NO: 989473 - RNA, 19 nt, Artificial Sequence
  Description of Artificial Sequence: Synthetic oligonucleotide
cagaggcgccgcagcucag

SEQ ID NO: 989474 - RNA, 19 nt, Artificial Sequence
  Description of Artificial Sequence: Synthetic oligonucleotide
agagucccgcugcccuaaa

SEQ ID NO: 989475 - RNA, 19 nt, Artificial Sequence
  Description of Artificial Sequence: Synthetic oligonucleotide
gcguccuugggaaacgugu

SEQ ID NO: 989476 - RNA, 19 nt, Artificial Sequence
  Description of Artificial Sequence: Synthetic oligonucleotide
gcacguaaagccaggcaua

SEQ ID NO: 989477 - RNA, 19 nt, Artificial Sequence
  Description of Artificial Sequence: Synthetic oligonucleotide
cgcgagucccuuagaggcc

SEQ ID NO: 989478 - RNA, 19 nt, Artificial Sequence
  Description of Artificial Sequence: Synthetic oligonucleotide
cacugacgcccgcacggga

SEQ ID NO: 989479 - RNA, 19 nt, Artificial Sequence
  Description of Artificial Sequence: Synthetic oligonucleotide
cggauacuacccuucaucu

SEQ ID NO: 989480 - RNA, 19 nt, Artificial Sequence
  Description of Artificial Sequence: Synthetic oligonucleotide
caaacucuacuugcaccgu

SEQ ID NO: 989481 - RNA, 19 nt, Artificial Sequence
  Description of Artificial Sequence: Synthetic oligonucleotide
gcccucucauaaaugaccu

SEQ ID NO: 989482 - RNA, 19 nt, Artificial Sequence
  Description of Artificial Sequence: Synthetic oligonucleotide
gggccccgugccuagaaua

SEQ ID NO: 989483 - RNA, 19 nt, Artificial Sequence
  Description of Artificial Sequence: Synthetic oligonucleotide
uagcugcgacgcgcggccc

SEQ ID NO: 989484 - RNA, 19 nt, Artificial Sequence
  Description of Artificial Sequence: Synthetic oligonucleotide
acggccgcagaggcagaca

SEQ ID NO: 989485 - RNA, 19 nt, Artificial Sequence
  Description of Artificial Sequence: Synthetic oligonucleotide
gcaagucgucccgggcggg

SEQ ID NO: 989486 - RNA, 19 nt, Artificial Sequence
  Description of Artificial Sequence: Synthetic oligonucleotide
cuucgacggccgggucugg

SEQ ID NO: 989487 - RNA, 19 nt, Artificial Sequence
  Description of Artificial Sequence: Synthetic oligonucleotide
ugccuacggcgggcagccg

SEQ ID NO: 989488 - RNA, 19 nt, Artificial Sequence
  Description of Artificial Sequence: Synthetic oligonucleotide
ggcagacaccagguucggc

SEQ ID NO: 989489 - RNA, 19 nt, Artificial Sequence
  Description of Artificial Sequence: Synthetic oligonucleotide
cccgguacgcagcacguaa

SEQ ID NO: 989490 - RNA, 19 nt, Artificial Sequence
  Description of Artificial Sequence: Synthetic oligonucleotide
ccgagggaguggugggcgc

SEQ ID NO: 989491 - RNA, 19 nt, Artificial Sequence
  Description of Artificial Sequence: Synthetic oligonucleotide
gcugcgacgcgcggcccgg

SEQ ID NO: 989492 - RNA, 19 nt, Artificial Sequence
  Description of Artificial Sequence: Synthetic oligonucleotide
ccaaucgcuggccaaccua

SEQ ID NO: 989493 - RNA, 19 nt, Artificial Sequence
  Description of Artificial Sequence: Synthetic oligonucleotide
cacgcagcgggaagauggu

SEQ ID NO: 989494 - RNA, 19 nt, Artificial Sequence
  Description of Artificial Sequence: Synthetic oligonucleotide
gcgcucuucgacggccggg

SEQ ID NO: 989495 - RNA, 19 nt, Artificial Sequence
  Description of Artificial Sequence: Synthetic oligonucleotide
ccuaagucccugguaagcu

SEQ ID NO: 989496 - RNA, 19 nt, Artificial Sequence
  Description of Artificial Sequence: Synthetic oligonucleotide
cccuaccaccaccagcuga

SEQ ID NO: 989497 - RNA, 19 nt, Artificial Sequence
  Description of Artificial Sequence: Synthetic oligonucleotide
caucucccgagggaguggu

SEQ ID NO: 989498 - RNA, 19 nt, Artificial Sequence
  Description of Artificial Sequence: Synthetic oligonucleotide
gucacgaauucugcagguu

SEQ ID NO: 989499 - RNA, 19 nt, Artificial Sequence
  Description of Artificial Sequence: Synthetic oligonucleotide
gugggaacgcgaaccguau

SEQ ID NO: 989500 - RNA, 19 nt, Artificial Sequence
  Description of Artificial Sequence: Synthetic oligonucleotide
ccuacggcgggcagccgca

SEQ ID NO: 989501 - RNA, 19 nt, Artificial Sequence
  Description of Artificial Sequence: Synthetic oligonucleotide
cgcucauugacgccacgca

SEQ ID NO: 989502 - RNA, 19 nt, Artificial Sequence
  Description of Artificial Sequence: Synthetic oligonucleotide
gaccgcccuggaagugaac

SEQ ID NO: 989503 - RNA, 19 nt, Artificial Sequence
  Description of Artificial Sequence: Synthetic oligonucleotide
gcgacgcgcggcccggccc

SEQ ID NO: 989504 - RNA, 19 nt, Artificial Sequence
  Description of Artificial Sequence: Synthetic oligonucleotide
gcgaccgcccuggaaguga

SEQ ID NO: 989505 - RNA, 19 nt, Artificial Sequence
  Description of Artificial Sequence: Synthetic oligonucleotide
cgacggccgggucuggccc

SEQ ID NO: 989506 - RNA, 19 nt, Artificial Sequence
  Description of Artificial Sequence: Synthetic oligonucleotide
gccccgugccuagaauaug

SEQ ID NO: 989507 - RNA, 19 nt, Artificial Sequence
  Description of Artificial Sequence: Synthetic oligonucleotide
gcgaaccguauaggucuug

SEQ ID NO: 989508 - RNA, 19 nt, Artificial Sequence
  Description of Artificial Sequence: Synthetic oligonucleotide
gcugaccgcccgcgccgcg

SEQ ID NO: 989509 - RNA, 19 nt, Artificial Sequence
  Description of Artificial Sequence: Synthetic oligonucleotide
gcaucccuccaggauaagu

SEQ ID NO: 989510 - RNA, 19 nt, Artificial Sequence
  Description of Artificial Sequence: Synthetic oligonucleotide
gguucggcugcaacugggu

SEQ ID NO: 989511 - RNA, 19 nt, Artificial Sequence
  Description of Artificial Sequence: Synthetic oligonucleotide
acgaguggucggagccagu

SEQ ID NO: 989512 - RNA, 19 nt, Artificial Sequence
  Description of Artificial Sequence: Synthetic oligonucleotide
cuacagcggccugaagggu

SEQ ID NO: 989513 - RNA, 19 nt, Artificial Sequence
  Description of Artificial Sequence: Synthetic oligonucleotide
ccgugguaccugacgacaa

SEQ ID NO: 989514 - RNA, 19 nt, Artificial Sequence
  Description of Artificial Sequence: Synthetic oligonucleotide
gcgagucccuuagaggccu

SEQ ID NO: 989515 - RNA, 19 nt, Artificial Sequence
  Description of Artificial Sequence: Synthetic oligonucleotide
gcugcugcugcugcugccu

SEQ ID NO: 989516 - RNA, 19 nt, Artificial Sequence
  Description of Artificial Sequence: Synthetic oligonucleotide
ccgcgcuacccacccggcc

SEQ ID NO: 989517 - RNA, 19 nt, Artificial Sequence
  Description of Artificial Sequence: Synthetic oligonucleotide
ccggcgcaagucgucccgg

SEQ ID NO: 989518 - RNA, 19 nt, Artificial Sequence
  Description of Artificial Sequence: Synthetic oligonucleotide
ggcggauacuacccuucau

SEQ ID NO: 989519 - RNA, 19 nt, Artificial Sequence
  Description of Artificial Sequence: Synthetic oligonucleotide
gcuacccacccggccgccc

SEQ ID NO: 989520 - RNA, 19 nt, Artificial Sequence
  Description of Artificial Sequence: Synthetic oligonucleotide
ccgguacgcagcacguaaa

SEQ ID NO: 989521 - RNA, 19 nt, Artificial Sequence
  Description of Artificial Sequence: Synthetic oligonucleotide
cggcgcaagucgucccggg

SEQ ID NO: 989522 - RNA, 19 nt, Artificial Sequence
  Description of Artificial Sequence: Synthetic oligonucleotide
cgccgcgcgagucccuuag

SEQ ID NO: 989523 - RNA, 19 nt, Artificial Sequence
  Description of Artificial Sequence: Synthetic oligonucleotide
cuauugccgcccggcgcaa

SEQ ID NO: 989524 - RNA, 19 nt, Artificial Sequence
  Description of Artificial Sequence: Synthetic oligonucleotide
accggccucuugcgcucuu

SEQ ID NO: 989525 - RNA, 19 nt, Artificial Sequence
  Description of Artificial Sequence: Synthetic oligonucleotide
gccacggaucccgaagccu

SEQ ID NO: 989526 - RNA, 19 nt, Artificial Sequence
  Description of Artificial Sequence: Synthetic oligonucleotide
cugcgacgcgcggcccggc

SEQ ID NO: 989527 - RNA, 19 nt, Artificial Sequence
  Description of Artificial Sequence: Synthetic oligonucleotide
gccgcgcuacccacccggc

SEQ ID NO: 989528 - RNA, 19 nt, Artificial Sequence
  Description of Artificial Sequence: Synthetic oligonucleotide
ggccccgugccuagaauau

SEQ ID NO: 989529 - RNA, 19 nt, Artificial Sequence
  Description of Artificial Sequence: Synthetic oligonucleotide
gacgcgcggcccggcccac

SEQ ID NO: 989530 - RNA, 19 nt, Artificial Sequence
  Description of Artificial Sequence: Synthetic oligonucleotide
cccgugccuagaauaugcu

SEQ ID NO: 989531 - RNA, 19 nt, Artificial Sequence
  Description of Artificial Sequence: Synthetic oligonucleotide
cagcguccuugggaaacgu

SEQ ID NO: 989532 - RNA, 19 nt, Artificial Sequence
  Description of Artificial Sequence: Synthetic oligonucleotide
gccgcgcgagucccuuaga

SEQ ID NO: 989533 - RNA, 19 nt, Artificial Sequence
  Description of Artificial Sequence: Synthetic oligonucleotide
cuugcaccguaaggucgau

SEQ ID NO: 989534 - RNA, 19 nt, Artificial Sequence
  Description of Artificial Sequence: Synthetic oligonucleotide
ccgugccuagaauaugcuu

SEQ ID NO: 989535 - RNA, 19 nt, Artificial Sequence
  Description of Artificial Sequence: Synthetic oligonucleotide
gccgaaccugaaacaggua

SEQ ID NO: 989536 - RNA, 19 nt, Artificial Sequence
  Description of Artificial Sequence: Synthetic oligonucleotide
cgaguggucggagccagua

SEQ ID NO: 989537 - RNA, 19 nt, Artificial Sequence
  Description of Artificial Sequence: Synthetic oligonucleotide
cacggagcuuggccucggu

SEQ ID NO: 989538 - RNA, 19 nt, Artificial Sequence
  Description of Artificial Sequence: Synthetic oligonucleotide
ccgcccggcgcaagucguc

SEQ ID NO: 989539 - RNA, 19 nt, Artificial Sequence
  Description of Artificial Sequence: Synthetic oligonucleotide
gcgccuugucccgguguga

SEQ ID NO: 989540 - RNA, 19 nt, Artificial Sequence
  Description of Artificial Sequence: Synthetic oligonucleotide
ccgcgcuacuuugcgcuca

SEQ ID NO: 989541 - RNA, 19 nt, Artificial Sequence
  Description of Artificial Sequence: Synthetic oligonucleotide
gcgcacucagcggccucca

SEQ ID NO: 989542 - RNA, 19 nt, Artificial Sequence
  Description of Artificial Sequence: Synthetic oligonucleotide
ccggccucuugcgcucuuc

SEQ ID NO: 989543 - RNA, 19 nt, Artificial Sequence
  Description of Artificial Sequence: Synthetic oligonucleotide
cgaccgcccuggaagugaa

SEQ ID NO: 989544 - RNA, 19 nt, Artificial Sequence
  Description of Artificial Sequence: Synthetic oligonucleotide
ccggagccacggaucccga

SEQ ID NO: 989545 - RNA, 19 nt, Artificial Sequence
  Description of Artificial Sequence: Synthetic oligonucleotide
cccucucauaaaugaccuu

SEQ ID NO: 989546 - RNA, 19 nt, Artificial Sequence
  Description of Artificial Sequence: Synthetic oligonucleotide
gcccgguacgcagcacgua

SEQ ID NO: 989547 - RNA, 19 nt, Artificial Sequence
  Description of Artificial Sequence: Synthetic oligonucleotide
ccguggugggcuggaaggu

SEQ ID NO: 989548 - RNA, 19 nt, Artificial Sequence
  Description of Artificial Sequence: Synthetic oligonucleotide
cgcucuucgacggccgggu

SEQ ID NO: 989549 - RNA, 19 nt, Artificial Sequence
  Description of Artificial Sequence: Synthetic oligonucleotide
gcacggccgcagaggcaga

SEQ ID NO: 989550 - RNA, 19 nt, Artificial Sequence
  Description of Artificial Sequence: Synthetic oligonucleotide
gcgccgcgcgagucccuua

SEQ ID NO: 989551 - RNA, 19 nt, Artificial Sequence
  Description of Artificial Sequence: Synthetic oligonucleotide
cgcgaaccguauaggucuu

SEQ ID NO: 989552 - RNA, 19 nt, Artificial Sequence
  Description of Artificial Sequence: Synthetic oligonucleotide
gccgcagcucagcguccuu

SEQ ID NO: 989553 - RNA, 19 nt, Artificial Sequence
  Description of Artificial Sequence: Synthetic oligonucleotide
cgcgcuacuuugcgcucau

SEQ ID NO: 989554 - RNA, 19 nt, Artificial Sequence
  Description of Artificial Sequence: Synthetic oligonucleotide
gcgcuacuuugcgcucauu

SEQ ID NO: 989555 - RNA, 19 nt, Artificial Sequence
  Description of Artificial Sequence: Synthetic oligonucleotide
aacggaauccacuacagcc

SEQ ID NO: 989556 - RNA, 19 nt, Artificial Sequence
  Description of Artificial Sequence: Synthetic oligonucleotide
uuaacagggaguuaguugg

SEQ ID NO: 989557 - RNA, 19 nt, Artificial Sequence
  Description of Artificial Sequence: Synthetic oligonucleotide
auagacaagaccugcaugc

SEQ ID NO: 989558 - RNA, 19 nt, Artificial Sequence
  Description of Artificial Sequence: Synthetic oligonucleotide
aauucagagcuauaccgcc

SEQ ID NO: 989559 - RNA, 19 nt, Artificial Sequence
  Description of Artificial Sequence: Synthetic oligonucleotide
aauguauacucauagacaa

SEQ ID NO: 989560 - RNA, 19 nt, Artificial Sequence
  Description of Artificial Sequence: Synthetic oligonucleotide
aacuaauguuuccugaagg

SEQ ID NO: 989561 - RNA, 19 nt, Artificial Sequence
  Description of Artificial Sequence: Synthetic oligonucleotide
uuauguuucaucuccauga

SEQ ID NO: 989562 - RNA, 19 nt, Artificial Sequence
  Description of Artificial Sequence: Synthetic oligonucleotide
ugaacuuuaguucgaagag

SEQ ID NO: 989563 - RNA, 19 nt, Artificial Sequence
  Description of Artificial Sequence: Synthetic oligonucleotide
aucaguuucagauuuaugu

SEQ ID NO: 989564 - RNA, 19 nt, Artificial Sequence
  Description of Artificial Sequence: Synthetic oligonucleotide
aacgacaaauccuuuaucu

SEQ ID NO: 989565 - RNA, 19 nt, Artificial Sequence
  Description of Artificial Sequence: Synthetic oligonucleotide
uguguucaaguccacaccg

SEQ ID NO: 989566 - RNA, 19 nt, Artificial Sequence
  Description of Artificial Sequence: Synthetic oligonucleotide
uauucuaaggacacguugc

SEQ ID NO: 989567 - RNA, 19 nt, Artificial Sequence
  Description of Artificial Sequence: Synthetic oligonucleotide
augauaaggacauuggaug

SEQ ID NO: 989568 - RNA, 19 nt, Artificial Sequence
  Description of Artificial Sequence: Synthetic oligonucleotide
aguuaugucauccugggcu

SEQ ID NO: 989569 - RNA, 19 nt, Artificial Sequence
  Description of Artificial Sequence: Synthetic oligonucleotide
guaguuaucccacacaccc

SEQ ID NO: 989570 - RNA, 19 nt, Artificial Sequence
  Description of Artificial Sequence: Synthetic oligonucleotide
aguaaugugacagaacggg

SEQ ID NO: 989571 - RNA, 19 nt, Artificial Sequence
  Description of Artificial Sequence: Synthetic oligonucleotide
uucagcuugaacuuuaacu

SEQ ID NO: 989572 - RNA, 19 nt, Artificial Sequence
  Description of Artificial Sequence: Synthetic oligonucleotide
uugggaauaaugagcaagg

SEQ ID NO: 989573 - RNA, 19 nt, Artificial Sequence
  Description of Artificial Sequence: Synthetic oligonucleotide
ugcgaguucagcaugaacu

SEQ ID NO: 989574 - RNA, 19 nt, Artificial Sequence
  Description of Artificial Sequence: Synthetic oligonucleotide
uuuaacagggaguuaguug

SEQ ID NO: 989575 - RNA, 19 nt, Artificial Sequence
  Description of Artificial Sequence: Synthetic oligonucleotide
augaacuuuaguucgaaga

SEQ ID NO: 989576 - RNA, 19 nt, Artificial Sequence
  Description of Artificial Sequence: Synthetic oligonucleotide
uguauacucauagacaaga

SEQ ID NO: 989577 - RNA, 19 nt, Artificial Sequence
  Description of Artificial Sequence: Synthetic oligonucleotide
agaguucugugcaagaacc

SEQ ID NO: 989578 - RNA, 19 nt, Artificial Sequence
  Description of Artificial Sequence: Synthetic oligonucleotide
aaacggaauccacuacagc

SEQ ID NO: 989579 - RNA, 19 nt, Artificial Sequence
  Description of Artificial Sequence: Synthetic oligonucleotide
uuuauguuucaucuccaug

SEQ ID NO: 989580 - RNA, 19 nt, Artificial Sequence
  Description of Artificial Sequence: Synthetic oligonucleotide
aaugauaaggacauuggau

SEQ ID NO: 989581 - RNA, 19 nt, Artificial Sequence
  Description of Artificial Sequence: Synthetic oligonucleotide
uugcauuucgugaagcagc

SEQ ID NO: 989582 - RNA, 19 nt, Artificial Sequence
  Description of Artificial Sequence: Synthetic oligonucleotide
cacaccgacaaguugaccc

SEQ ID NO: 989583 - RNA, 19 nt, Artificial Sequence
  Description of Artificial Sequence: Synthetic oligonucleotide
aaaacuggagugccuuuuc

SEQ ID NO: 989584 - RNA, 19 nt, Artificial Sequence
  Description of Artificial Sequence: Synthetic oligonucleotide
aauaacgacaaauccuuua

SEQ ID NO: 989585 - RNA, 19 nt, Artificial Sequence
  Description of Artificial Sequence: Synthetic oligonucleotide
acaaccacaucuuaauaug

SEQ ID NO: 989586 - RNA, 19 nt, Artificial Sequence
  Description of Artificial Sequence: Synthetic oligonucleotide
acaagcaagugucagccuc

SEQ ID NO: 989587 - RNA, 19 nt, Artificial Sequence
  Description of Artificial Sequence: Synthetic oligonucleotide
auauucuaaggacacguug

SEQ ID NO: 989588 - RNA, 19 nt, Artificial Sequence
  Description of Artificial Sequence: Synthetic oligonucleotide
uaacuaauguuuccugaag

SEQ ID NO: 989589 - RNA, 19 nt, Artificial Sequence
  Description of Artificial Sequence: Synthetic oligonucleotide
auacucauagacaagaccu

SEQ ID NO: 989590 - RNA, 19 nt, Artificial Sequence
  Description of Artificial Sequence: Synthetic oligonucleotide
ucucauauucuaaggacac

SEQ ID NO: 989591 - RNA, 19 nt, Artificial Sequence
  Description of Artificial Sequence: Synthetic oligonucleotide
uguuugguccuuuaaccag

SEQ ID NO: 989592 - RNA, 19 nt, Artificial Sequence
  Description of Artificial Sequence: Synthetic oligonucleotide
uuaaucagagcuucugcca

SEQ ID NO: 989593 - RNA, 19 nt, Artificial Sequence
  Description of Artificial Sequence: Synthetic oligonucleotide
auuguuacauuucucaaua

SEQ ID NO: 989594 - RNA, 19 nt, Artificial Sequence
  Description of Artificial Sequence: Synthetic oligonucleotide
uauaccgccacaagcaagu

SEQ ID NO: 989595 - RNA, 19 nt, Artificial Sequence
  Description of Artificial Sequence: Synthetic oligonucleotide
gguuaauaacgacaaaucc

SEQ ID NO: 989596 - RNA, 19 nt, Artificial Sequence
  Description of Artificial Sequence: Synthetic oligonucleotide
cucuguuaagacaucugcg

SEQ ID NO: 989597 - RNA, 19 nt, Artificial Sequence
  Description of Artificial Sequence: Synthetic oligonucleotide
ccaguaaugugacagaacg

SEQ ID NO: 989598 - RNA, 19 nt, Artificial Sequence
  Description of Artificial Sequence: Synthetic oligonucleotide
uaaauuacccagauguguu

SEQ ID NO: 989599 - RNA, 19 nt, Artificial Sequence
  Description of Artificial Sequence: Synthetic oligonucleotide
uauuuaaucagagcuucug

SEQ ID NO: 989600 - RNA, 19 nt, Artificial Sequence
  Description of Artificial Sequence: Synthetic oligonucleotide
cuucuauugcaccagcgcc

SEQ ID NO: 989601 - RNA, 19 nt, Artificial Sequence
  Description of Artificial Sequence: Synthetic oligonucleotide
gacacuaugaaaaccauaa

SEQ ID NO: 989602 - RNA, 19 nt, Artificial Sequence
  Description of Artificial Sequence: Synthetic oligonucleotide
caucuaaggaauucagagc

SEQ ID NO: 989603 - RNA, 19 nt, Artificial Sequence
  Description of Artificial Sequence: Synthetic oligonucleotide
aaggucaaaaccagaguuc

SEQ ID NO: 989604 - RNA, 19 nt, Artificial Sequence
  Description of Artificial Sequence: Synthetic oligonucleotide
cuugggaauaaugagcaag

SEQ ID NO: 989605 - RNA, 19 nt, Artificial Sequence
  Description of Artificial Sequence: Synthetic oligonucleotide
ugauaaggacauuggaugu

SEQ ID NO: 989606 - RNA, 19 nt, Artificial Sequence
  Description of Artificial Sequence: Synthetic oligonucleotide
aaaacggaauccacuacag

SEQ ID NO: 989607 - RNA, 19 nt, Artificial Sequence
  Description of Artificial Sequence: Synthetic oligonucleotide
acaaaacggaauccacuac

SEQ ID NO: 989608 - RNA, 19 nt, Artificial Sequence
  Description of Artificial Sequence: Synthetic oligonucleotide
ugcaagugcauccaaggaa

SEQ ID NO: 989609 - RNA, 19 nt, Artificial Sequence
  Description of Artificial Sequence: Synthetic oligonucleotide
uguuaagacaucugcgagu

SEQ ID NO: 989610 - RNA, 19 nt, Artificial Sequence
  Description of Artificial Sequence: Synthetic oligonucleotide
auaacgacaaauccuuuau

SEQ ID NO: 989611 - RNA, 19 nt, Artificial Sequence
  Description of Artificial Sequence: Synthetic oligonucleotide
aguuggcuaauuuaaaaua

SEQ ID NO: 989612 - RNA, 19 nt, Artificial Sequence
  Description of Artificial Sequence: Synthetic oligonucleotide
uccuuuaaccaguaaugug

SEQ ID NO: 989613 - RNA, 19 nt, Artificial Sequence
  Description of Artificial Sequence: Synthetic oligonucleotide
ucuuugauuugagucagug

SEQ ID NO: 989614 - RNA, 19 nt, Artificial Sequence
  Description of Artificial Sequence: Synthetic oligonucleotide
uuaguaagcuugaugucuc

SEQ ID NO: 989615 - RNA, 19 nt, Artificial Sequence
  Description of Artificial Sequence: Synthetic oligonucleotide
auuaaagaagcuguugggu

SEQ ID NO: 989616 - RNA, 19 nt, Artificial Sequence
  Description of Artificial Sequence: Synthetic oligonucleotide
acaucgaugaguguuucuc

SEQ ID NO: 989617 - RNA, 19 nt, Artificial Sequence
  Description of Artificial Sequence: Synthetic oligonucleotide
aaccauaaauuacccagau

SEQ ID NO: 989618 - RNA, 19 nt, Artificial Sequence
  Description of Artificial Sequence: Synthetic oligonucleotide
uguuggguguugaauuugc

SEQ ID NO: 989619 - RNA, 19 nt, Artificial Sequence
  Description of Artificial Sequence: Synthetic oligonucleotide
auuugagucagugugugcu

SEQ ID NO: 989620 - RNA, 19 nt, Artificial Sequence
  Description of Artificial Sequence: Synthetic oligonucleotide
acauuucucaauaaaggug

SEQ ID NO: 989621 - RNA, 19 nt, Artificial Sequence
  Description of Artificial Sequence: Synthetic oligonucleotide
uaguuggcuaauuuaaaau

SEQ ID NO: 989622 - RNA, 19 nt, Artificial Sequence
  Description of Artificial Sequence: Synthetic oligonucleotide
uucuauugcaccagcgccu

SEQ ID NO: 989623 - RNA, 19 nt, Artificial Sequence
  Description of Artificial Sequence: Synthetic oligonucleotide
uguucaaguccacaccgac

SEQ ID NO: 989624 - RNA, 19 nt, Artificial Sequence
  Description of Artificial Sequence: Synthetic oligonucleotide
uuauccugggaugaagacc

SEQ ID NO: 989625 - RNA, 19 nt, Artificial Sequence
  Description of Artificial Sequence: Synthetic oligonucleotide
uugauuugagucagugugu

SEQ ID NO: 989626 - RNA, 19 nt, Artificial Sequence
  Description of Artificial Sequence: Synthetic oligonucleotide
gaaaaccauaaauuaccca

SEQ ID NO: 989627 - RNA, 19 nt, Artificial Sequence
  Description of Artificial Sequence: Synthetic oligonucleotide
gagcuauaccgccacaagc

SEQ ID NO: 989628 - RNA, 19 nt, Artificial Sequence
  Description of Artificial Sequence: Synthetic oligonucleotide
uacucauagacaagaccug

SEQ ID NO: 989629 - RNA, 19 nt, Artificial Sequence
  Description of Artificial Sequence: Synthetic oligonucleotide
ugcauuucgugaagcagca

SEQ ID NO: 989630 - RNA, 19 nt, Artificial Sequence
  Description of Artificial Sequence: Synthetic oligonucleotide
acgacaaauccuuuaucug

SEQ ID NO: 989631 - RNA, 19 nt, Artificial Sequence
  Description of Artificial Sequence: Synthetic oligonucleotide
ggacauuggauguaguacc

SEQ ID NO: 989632 - RNA, 19 nt, Artificial Sequence
  Description of Artificial Sequence: Synthetic oligonucleotide
auaaggacauuggauguag

SEQ ID NO: 989633 - RNA, 19 nt, Artificial Sequence
  Description of Artificial Sequence: Synthetic oligonucleotide
ggguuuaggcucuucaccg

SEQ ID NO: 989634 - RNA, 19 nt, Artificial Sequence
  Description of Artificial Sequence: Synthetic oligonucleotide
guuaauaacgacaaauccu

SEQ ID NO: 989635 - RNA, 19 nt, Artificial Sequence
  Description of Artificial Sequence: Synthetic oligonucleotide
uggguguugaauuugcauu

SEQ ID NO: 989636 - RNA, 19 nt, Artificial Sequence
  Description of Artificial Sequence: Synthetic oligonucleotide
cuucaguuauuauccuggg

SEQ ID NO: 989637 - RNA, 19 nt, Artificial Sequence
  Description of Artificial Sequence: Synthetic oligonucleotide
ugagcccugccuuucacgc

SEQ ID NO: 989638 - RNA, 19 nt, Artificial Sequence
  Description of Artificial Sequence: Synthetic oligonucleotide
ucugcuuacuuugacuugu

SEQ ID NO: 989639 - RNA, 19 nt, Artificial Sequence
  Description of Artificial Sequence: Synthetic oligonucleotide
cuguuaagacaucugcgag

SEQ ID NO: 989640 - RNA, 19 nt, Artificial Sequence
  Description of Artificial Sequence: Synthetic oligonucleotide
acaccgacaaguugacccg

SEQ ID NO: 989641 - RNA, 19 nt, Artificial Sequence
  Description of Artificial Sequence: Synthetic oligonucleotide
gacaaaacggaauccacua

SEQ ID NO: 989642 - RNA, 19 nt, Artificial Sequence
  Description of Artificial Sequence: Synthetic oligonucleotide
ugauuugagucagugugug

SEQ ID NO: 989643 - RNA, 19 nt, Artificial Sequence
  Description of Artificial Sequence: Synthetic oligonucleotide
agugugugcuuguuugguc

SEQ ID NO: 989644 - RNA, 19 nt, Artificial Sequence
  Description of Artificial Sequence: Synthetic oligonucleotide
aaaggggucaauccccuuu

SEQ ID NO: 989645 - RNA, 19 nt, Artificial Sequence
  Description of Artificial Sequence: Synthetic oligonucleotide
aaacaaguccccugauuaa

SEQ ID NO: 989646 - RNA, 19 nt, Artificial Sequence
  Description of Artificial Sequence: Synthetic oligonucleotide
cagaaauguagagaucugc

SEQ ID NO: 989647 - RNA, 19 nt, Artificial Sequence
  Description of Artificial Sequence: Synthetic oligonucleotide
uuuaguucgaagagauguu

SEQ ID NO: 989648 - RNA, 19 nt, Artificial Sequence
  Description of Artificial Sequence: Synthetic oligonucleotide
aguuaguuggcuaauuuaa

SEQ ID NO: 989649 - RNA, 19 nt, Artificial Sequence
  Description of Artificial Sequence: Synthetic oligonucleotide
guggcgaucacaguacagg

SEQ ID NO: 989650 - RNA, 19 nt, Artificial Sequence
  Description of Artificial Sequence: Synthetic oligonucleotide
uauguuucaucuccaugau

SEQ ID NO: 989651 - RNA, 19 nt, Artificial Sequence
  Description of Artificial Sequence: Synthetic oligonucleotide
aguuauuauccugggauga

SEQ ID NO: 989652 - RNA, 19 nt, Artificial Sequence
  Description of Artificial Sequence: Synthetic oligonucleotide
aucgaugaguguuucucug

SEQ ID NO: 989653 - RNA, 19 nt, Artificial Sequence
  Description of Artificial Sequence: Synthetic oligonucleotide
agagcuauaccgccacaag

SEQ ID NO: 989654 - RNA, 19 nt, Artificial Sequence
  Description of Artificial Sequence: Synthetic oligonucleotide
aguuaucccacacacccau

SEQ ID NO: 989655 - RNA, 19 nt, Artificial Sequence
  Description of Artificial Sequence: Synthetic oligonucleotide
guugguccucaguacaucc

SEQ ID NO: 989656 - RNA, 19 nt, Artificial Sequence
  Description of Artificial Sequence: Synthetic oligonucleotide
auucuaaggacacguugca

SEQ ID NO: 989657 - RNA, 19 nt, Artificial Sequence
  Description of Artificial Sequence: Synthetic oligonucleotide
uuggauguaguaccaucac

SEQ ID NO: 989658 - RNA, 19 nt, Artificial Sequence
  Description of Artificial Sequence: Synthetic oligonucleotide
gugugugcuuguuuggucc

SEQ ID NO: 989659 - RNA, 19 nt, Artificial Sequence
  Description of Artificial Sequence: Synthetic oligonucleotide
cauuucgugaagcagcaca

SEQ ID NO: 989660 - RNA, 19 nt, Artificial Sequence
  Description of Artificial Sequence: Synthetic oligonucleotide
ucgaagagauguucuggcc

SEQ ID NO: 989661 - RNA, 19 nt, Artificial Sequence
  Description of Artificial Sequence: Synthetic oligonucleotide
uguuuaacagggaguuagu

SEQ ID NO: 989662 - RNA, 19 nt, Artificial Sequence
  Description of Artificial Sequence: Synthetic oligonucleotide
uucggccccaaguuggucc

SEQ ID NO: 989663 - RNA, 19 nt, Artificial Sequence
  Description of Artificial Sequence: Synthetic oligonucleotide
cuuuaguucgaagagaugu

SEQ ID NO: 989664 - RNA, 19 nt, Artificial Sequence
  Description of Artificial Sequence: Synthetic oligonucleotide
auuggauguaguaccauca

SEQ ID NO: 989665 - RNA, 19 nt, Artificial Sequence
  Description of Artificial Sequence: Synthetic oligonucleotide
caaaacggaauccacuaca

SEQ ID NO: 989666 - RNA, 19 nt, Artificial Sequence
  Description of Artificial Sequence: Synthetic oligonucleotide
aacacagccaucaucgaua

SEQ ID NO: 989667 - RNA, 19 nt, Artificial Sequence
  Description of Artificial Sequence: Synthetic oligonucleotide
cauccaaggaaaagggguc

SEQ ID NO: 989668 - RNA, 19 nt, Artificial Sequence
  Description of Artificial Sequence: Synthetic oligonucleotide
caguuauuauccugggaug

SEQ ID NO: 989669 - RNA, 19 nt, Artificial Sequence
  Description of Artificial Sequence: Synthetic oligonucleotide
uugugucaauguuaguuaa

SEQ ID NO: 989670 - RNA, 19 nt, Artificial Sequence
  Description of Artificial Sequence: Synthetic oligonucleotide
uuaguucgaagagauguuc

SEQ ID NO: 989671 - RNA, 19 nt, Artificial Sequence
  Description of Artificial Sequence: Synthetic oligonucleotide
ccuuuaaccaguaauguga

SEQ ID NO: 989672 - RNA, 19 nt, Artificial Sequence
  Description of Artificial Sequence: Synthetic oligonucleotide
caugaacuuuaguucgaag

SEQ ID NO: 989673 - RNA, 19 nt, Artificial Sequence
  Description of Artificial Sequence: Synthetic oligonucleotide
accauaaauuacccagaug

SEQ ID NO: 989674 - RNA, 19 nt, Artificial Sequence
  Description of Artificial Sequence: Synthetic oligonucleotide
cuucauaucaggaugccgu

SEQ ID NO: 989675 - RNA, 19 nt, Artificial Sequence
  Description of Artificial Sequence: Synthetic oligonucleotide
ugugucaauguuaguuaaa

SEQ ID NO: 989676 - RNA, 19 nt, Artificial Sequence
  Description of Artificial Sequence: Synthetic oligonucleotide
acccagauguguucugcac

SEQ ID NO: 989677 - RNA, 19 nt, Artificial Sequence
  Description of Artificial Sequence: Synthetic oligonucleotide
auuuauguuucaucuccau

SEQ ID NO: 989678 - RNA, 19 nt, Artificial Sequence
  Description of Artificial Sequence: Synthetic oligonucleotide
cacuucuauugcaccagcg

SEQ ID NO: 989679 - RNA, 19 nt, Artificial Sequence
  Description of Artificial Sequence: Synthetic oligonucleotide
gacacguugcacgugagga

SEQ ID NO: 989680 - RNA, 19 nt, Artificial Sequence
  Description of Artificial Sequence: Synthetic oligonucleotide
cuaauguuuccugaagguc

SEQ ID NO: 989681 - RNA, 19 nt, Artificial Sequence
  Description of Artificial Sequence: Synthetic oligonucleotide
gauuugagucagugugugc

SEQ ID NO: 989682 - RNA, 19 nt, Artificial Sequence
  Description of Artificial Sequence: Synthetic oligonucleotide
uaacgacaaauccuuuauc

SEQ ID NO: 989683 - RNA, 19 nt, Artificial Sequence
  Description of Artificial Sequence: Synthetic oligonucleotide
cuauaccgccacaagcaag

SEQ ID NO: 989684 - RNA, 19 nt, Artificial Sequence
  Description of Artificial Sequence: Synthetic oligonucleotide
ggcuuuaggguuuaggcuc

SEQ ID NO: 989685 - RNA, 19 nt, Artificial Sequence
  Description of Artificial Sequence: Synthetic oligonucleotide
cauugccaucuuuaguaag

SEQ ID NO: 989686 - RNA, 19 nt, Artificial Sequence
  Description of Artificial Sequence: Synthetic oligonucleotide
agcuauaccgccacaagca

SEQ ID NO: 989687 - RNA, 19 nt, Artificial Sequence
  Description of Artificial Sequence: Synthetic oligonucleotide
ucauggugcccuucggccc

SEQ ID NO: 989688 - RNA, 19 nt, Artificial Sequence
  Description of Artificial Sequence: Synthetic oligonucleotide
gcuuguaucaguuucagau

SEQ ID NO: 989689 - RNA, 19 nt, Artificial Sequence
  Description of Artificial Sequence: Synthetic oligonucleotide
gauuguuacauuucucaau

SEQ ID NO: 989690 - RNA, 19 nt, Artificial Sequence
  Description of Artificial Sequence: Synthetic oligonucleotide
uggcgaucacaguacagga

SEQ ID NO: 989691 - RNA, 19 nt, Artificial Sequence
  Description of Artificial Sequence: Synthetic oligonucleotide
ggagaggccgagaacaacg

SEQ ID NO: 989692 - RNA, 19 nt, Artificial Sequence
  Description of Artificial Sequence: Synthetic oligonucleotide
agaacggggauuguuacau

SEQ ID NO: 989693 - RNA, 19 nt, Artificial Sequence
  Description of Artificial Sequence: Synthetic oligonucleotide
cacaguaguuaucccacac

SEQ ID NO: 989694 - RNA, 19 nt, Artificial Sequence
  Description of Artificial Sequence: Synthetic oligonucleotide
uaacagggaguuaguuggc

SEQ ID NO: 989695 - RNA, 19 nt, Artificial Sequence
  Description of Artificial Sequence: Synthetic oligonucleotide
ugucauccugggcuguagc

SEQ ID NO: 989696 - RNA, 19 nt, Artificial Sequence
  Description of Artificial Sequence: Synthetic oligonucleotide
ucgaugaguguuucucugu

SEQ ID NO: 989697 - RNA, 19 nt, Artificial Sequence
  Description of Artificial Sequence: Synthetic oligonucleotide
uaguuaucccacacaccca

SEQ ID NO: 989698 - RNA, 19 nt, Artificial Sequence
  Description of Artificial Sequence: Synthetic oligonucleotide
acaaguugacccgauucug

SEQ ID NO: 989699 - RNA, 19 nt, Artificial Sequence
  Description of Artificial Sequence: Synthetic oligonucleotide
auguucacggccaacgcug

SEQ ID NO: 989700 - RNA, 19 nt, Artificial Sequence
  Description of Artificial Sequence: Synthetic oligonucleotide
ugggaauaaugagcaaggc

SEQ ID NO: 989701 - RNA, 19 nt, Artificial Sequence
  Description of Artificial Sequence: Synthetic oligonucleotide
uuacccagauguguucugc

SEQ ID NO: 989702 - RNA, 19 nt, Artificial Sequence
  Description of Artificial Sequence: Synthetic oligonucleotide
gacaaguugacccgauucu

SEQ ID NO: 989703 - RNA, 19 nt, Artificial Sequence
  Description of Artificial Sequence: Synthetic oligonucleotide
accaguaaugugacagaac

SEQ ID NO: 989704 - RNA, 19 nt, Artificial Sequence
  Description of Artificial Sequence: Synthetic oligonucleotide
auuacccagauguguucug

SEQ ID NO: 989705 - RNA, 19 nt, Artificial Sequence
  Description of Artificial Sequence: Synthetic oligonucleotide
uguucacggccaacgcugc

SEQ ID NO: 989706 - RNA, 19 nt, Artificial Sequence
  Description of Artificial Sequence: Synthetic oligonucleotide
aaggggucaauccccuuuu

SEQ ID NO: 989707 - RNA, 19 nt, Artificial Sequence
  Description of Artificial Sequence: Synthetic oligonucleotide
uugagucagugugugcuug

SEQ ID NO: 989708 - RNA, 19 nt, Artificial Sequence
  Description of Artificial Sequence: Synthetic oligonucleotide
uucgcccaauguauacuca

SEQ ID NO: 989709 - RNA, 19 nt, Artificial Sequence
  Description of Artificial Sequence: Synthetic oligonucleotide
gcaacgaugccuucuuuug

SEQ ID NO: 989710 - RNA, 19 nt, Artificial Sequence
  Description of Artificial Sequence: Synthetic oligonucleotide
agcaacgaugccuucuuuu

SEQ ID NO: 989711 - RNA, 19 nt, Artificial Sequence
  Description of Artificial Sequence: Synthetic oligonucleotide
uaaggacauuggauguagu

SEQ ID NO: 989712 - RNA, 19 nt, Artificial Sequence
  Description of Artificial Sequence: Synthetic oligonucleotide
ugcaagaaccuugggaaua

SEQ ID NO: 989713 - RNA, 19 nt, Artificial Sequence
  Description of Artificial Sequence: Synthetic oligonucleotide
aguugguccucaguacauc

SEQ ID NO: 989714 - RNA, 19 nt, Artificial Sequence
  Description of Artificial Sequence: Synthetic oligonucleotide
cucuucgcccaauguauac

SEQ ID NO: 989715 - RNA, 19 nt, Artificial Sequence
  Description of Artificial Sequence: Synthetic oligonucleotide
agcccugccuuucacgcug

SEQ ID NO: 989716 - RNA, 19 nt, Artificial Sequence
  Description of Artificial Sequence: Synthetic oligonucleotide
ucuucgcccaauguauacu

SEQ ID NO: 989717 - RNA, 19 nt, Artificial Sequence
  Description of Artificial Sequence: Synthetic oligonucleotide
ucaauccccuuuugguuaa

SEQ ID NO: 989718 - RNA, 19 nt, Artificial Sequence
  Description of Artificial Sequence: Synthetic oligonucleotide
caaguugacccgauucuga

SEQ ID NO: 989719 - RNA, 19 nt, Artificial Sequence
  Description of Artificial Sequence: Synthetic oligonucleotide
agagcaacgaugccuucuu

SEQ ID NO: 989720 - RNA, 19 nt, Artificial Sequence
  Description of Artificial Sequence: Synthetic oligonucleotide
ggggucaauccccuuuugg

SEQ ID NO: 989721 - RNA, 19 nt, Artificial Sequence
  Description of Artificial Sequence: Synthetic oligonucleotide
uuugagucagugugugcuu

SEQ ID NO: 989722 - RNA, 19 nt, Artificial Sequence
  Description of Artificial Sequence: Synthetic oligonucleotide
auguauacucauagacaag

SEQ ID NO: 989723 - RNA, 19 nt, Artificial Sequence
  Description of Artificial Sequence: Synthetic oligonucleotide
uucuaaggacacguugcac

SEQ ID NO: 989724 - RNA, 19 nt, Artificial Sequence
  Description of Artificial Sequence: Synthetic oligonucleotide
cucggcuuuaggguuuagg

SEQ ID NO: 989725 - RNA, 19 nt, Artificial Sequence
  Description of Artificial Sequence: Synthetic oligonucleotide
ugagucagugugugcuugu

SEQ ID NO: 989726 - RNA, 19 nt, Artificial Sequence
  Description of Artificial Sequence: Synthetic oligonucleotide
caucuuaauauguaauuuu

SEQ ID NO: 989727 - RNA, 19 nt, Artificial Sequence
  Description of Artificial Sequence: Synthetic oligonucleotide
ucgcccaauguauacucau

SEQ ID NO: 989728 - RNA, 19 nt, Artificial Sequence
  Description of Artificial Sequence: Synthetic oligonucleotide
cacguugcacgugaggaug

SEQ ID NO: 989729 - RNA, 19 nt, Artificial Sequence
  Description of Artificial Sequence: Synthetic oligonucleotide
cacuacagccucuguuaag

SEQ ID NO: 989730 - RNA, 19 nt, Artificial Sequence
  Description of Artificial Sequence: Synthetic oligonucleotide
aucaccacagacauucuuu

SEQ ID NO: 989731 - RNA, 19 nt, Artificial Sequence
  Description of Artificial Sequence: Synthetic oligonucleotide
gauaaggacauuggaugua

SEQ ID NO: 989732 - RNA, 19 nt, Artificial Sequence
  Description of Artificial Sequence: Synthetic oligonucleotide
ucagagcuauaccgccaca

SEQ ID NO: 989733 - RNA, 19 nt, Artificial Sequence
  Description of Artificial Sequence: Synthetic oligonucleotide
ugguggcgaucacaguaca

SEQ ID NO: 989734 - RNA, 19 nt, Artificial Sequence
  Description of Artificial Sequence: Synthetic oligonucleotide
ugcccuucggccccaaguu

SEQ ID NO: 989735 - RNA, 19 nt, Artificial Sequence
  Description of Artificial Sequence: Synthetic oligonucleotide
gucaucuaaggaauucaga

SEQ ID NO: 989736 - RNA, 19 nt, Artificial Sequence
  Description of Artificial Sequence: Synthetic oligonucleotide
gauguucuggccacaucga

SEQ ID NO: 989737 - RNA, 19 nt, Artificial Sequence
  Description of Artificial Sequence: Synthetic oligonucleotide
aguugacccgauucugaau

SEQ ID NO: 989738 - RNA, 19 nt, Artificial Sequence
  Description of Artificial Sequence: Synthetic oligonucleotide
acacaguaguuaucccaca

SEQ ID NO: 989739 - RNA, 19 nt, Artificial Sequence
  Description of Artificial Sequence: Synthetic oligonucleotide
gccgcgcugauguucacgg

SEQ ID NO: 989740 - RNA, 19 nt, Artificial Sequence
  Description of Artificial Sequence: Synthetic oligonucleotide
guuaguuggcuaauuuaaa

SEQ ID NO: 989741 - RNA, 19 nt, Artificial Sequence
  Description of Artificial Sequence: Synthetic oligonucleotide
cucuucggcacucuuguaa

SEQ ID NO: 989742 - RNA, 19 nt, Artificial Sequence
  Description of Artificial Sequence: Synthetic oligonucleotide
caguuaugucauccugggc

SEQ ID NO: 989743 - RNA, 19 nt, Artificial Sequence
  Description of Artificial Sequence: Synthetic oligonucleotide
aaaaggggucaauccccuu

SEQ ID NO: 989744 - RNA, 19 nt, Artificial Sequence
  Description of Artificial Sequence: Synthetic oligonucleotide
gacccgauucugaauguuc

SEQ ID NO: 989745 - RNA, 19 nt, Artificial Sequence
  Description of Artificial Sequence: Synthetic oligonucleotide
acagggaguuaguuggcua

SEQ ID NO: 989746 - RNA, 19 nt, Artificial Sequence
  Description of Artificial Sequence: Synthetic oligonucleotide
uggcucaccuguguucaag

SEQ ID NO: 989747 - RNA, 19 nt, Artificial Sequence
  Description of Artificial Sequence: Synthetic oligonucleotide
guugcacgugaggauguag

SEQ ID NO: 989748 - RNA, 19 nt, Artificial Sequence
  Description of Artificial Sequence: Synthetic oligonucleotide
guagcuacuuuugcuauua

SEQ ID NO: 989749 - RNA, 19 nt, Artificial Sequence
  Description of Artificial Sequence: Synthetic oligonucleotide
acacguugcacgugaggau

SEQ ID NO: 989750 - RNA, 19 nt, Artificial Sequence
  Description of Artificial Sequence: Synthetic oligonucleotide
gguuuaggcucuucaccgc

SEQ ID NO: 989751 - RNA, 19 nt, Artificial Sequence
  Description of Artificial Sequence: Synthetic oligonucleotide
acccgauucugaauguuca

SEQ ID NO: 989752 - RNA, 19 nt, Artificial Sequence
  Description of Artificial Sequence: Synthetic oligonucleotide
ugccauugccacuucuauu

SEQ ID NO: 989753 - RNA, 19 nt, Artificial Sequence
  Description of Artificial Sequence: Synthetic oligonucleotide
acggccaacgcugccugcg

SEQ ID NO: 989754 - RNA, 19 nt, Artificial Sequence
  Description of Artificial Sequence: Synthetic oligonucleotide
acuuuaguucgaagagaug

SEQ ID NO: 989755 - RNA, 19 nt, Artificial Sequence
  Description of Artificial Sequence: Synthetic oligonucleotide
cugccuuucacgcugggcu

SEQ ID NO: 989756 - RNA, 19 nt, Artificial Sequence
  Description of Artificial Sequence: Synthetic oligonucleotide
cauaucaggaugccgugcu

SEQ ID NO: 989757 - RNA, 19 nt, Artificial Sequence
  Description of Artificial Sequence: Synthetic oligonucleotide
ggacacguugcacgugagg

SEQ ID NO: 989758 - RNA, 19 nt, Artificial Sequence
  Description of Artificial Sequence: Synthetic oligonucleotide
ugccgcgcugauguucacg

SEQ ID NO: 989759 - RNA, 19 nt, Artificial Sequence
  Description of Artificial Sequence: Synthetic oligonucleotide
cccuucggccccaaguugg

SEQ ID NO: 989760 - RNA, 19 nt, Artificial Sequence
  Description of Artificial Sequence: Synthetic oligonucleotide
cagcacauugccaucuuua

SEQ ID NO: 989761 - RNA, 19 nt, Artificial Sequence
  Description of Artificial Sequence: Synthetic oligonucleotide
cugcgaguucagcaugaac

SEQ ID NO: 989762 - RNA, 19 nt, Artificial Sequence
  Description of Artificial Sequence: Synthetic oligonucleotide
uagcuacuuuugcuauuaa

SEQ ID NO: 989763 - RNA, 19 nt, Artificial Sequence
  Description of Artificial Sequence: Synthetic oligonucleotide
cagauguguucugcacugg

SEQ ID NO: 989764 - RNA, 19 nt, Artificial Sequence
  Description of Artificial Sequence: Synthetic oligonucleotide
ucggccccaaguugguccu

SEQ ID NO: 989765 - RNA, 19 nt, Artificial Sequence
  Description of Artificial Sequence: Synthetic oligonucleotide
cgacaaauccuuuaucuga

SEQ ID NO: 989766 - RNA, 19 nt, Artificial Sequence
  Description of Artificial Sequence: Synthetic oligonucleotide
aauccccuuuugguuaaua

SEQ ID NO: 989767 - RNA, 19 nt, Artificial Sequence
  Description of Artificial Sequence: Synthetic oligonucleotide
agacacuaugaaaaccaua

SEQ ID NO: 989768 - RNA, 19 nt, Artificial Sequence
  Description of Artificial Sequence: Synthetic oligonucleotide
aggggucaauccccuuuug

SEQ ID NO: 989769 - RNA, 19 nt, Artificial Sequence
  Description of Artificial Sequence: Synthetic oligonucleotide
ccgauucugaauguucagc

SEQ ID NO: 989770 - RNA, 19 nt, Artificial Sequence
  Description of Artificial Sequence: Synthetic oligonucleotide
cuaaggaauucagagcuau

SEQ ID NO: 989771 - RNA, 19 nt, Artificial Sequence
  Description of Artificial Sequence: Synthetic oligonucleotide
gcgaucacaguacaggagu

SEQ ID NO: 989772 - RNA, 19 nt, Artificial Sequence
  Description of Artificial Sequence: Synthetic oligonucleotide
aggccgagaacaacgugcu

SEQ ID NO: 989773 - RNA, 19 nt, Artificial Sequence
  Description of Artificial Sequence: Synthetic oligonucleotide
ugcgcccgggccaccucgg

SEQ ID NO: 989774 - RNA, 19 nt, Artificial Sequence
  Description of Artificial Sequence: Synthetic oligonucleotide
ugugcuuguuugguccuuu

SEQ ID NO: 989775 - RNA, 19 nt, Artificial Sequence
  Description of Artificial Sequence: Synthetic oligonucleotide
ugccuuucacgcugggcuu

SEQ ID NO: 989776 - RNA, 19 nt, Artificial Sequence
  Description of Artificial Sequence: Synthetic oligonucleotide
cagaacggggauuguuaca

SEQ ID NO: 989777 - RNA, 19 nt, Artificial Sequence
  Description of Artificial Sequence: Synthetic oligonucleotide
gccgagcucagggagaggc

SEQ ID NO: 989778 - RNA, 19 nt, Artificial Sequence
  Description of Artificial Sequence: Synthetic oligonucleotide
uuucgugaagcagcacauu

SEQ ID NO: 989779 - RNA, 19 nt, Artificial Sequence
  Description of Artificial Sequence: Synthetic oligonucleotide
guuugguccuuuaaccagu

SEQ ID NO: 989780 - RNA, 19 nt, Artificial Sequence
  Description of Artificial Sequence: Synthetic oligonucleotide
gggucaauccccuuuuggu

SEQ ID NO: 989781 - RNA, 19 nt, Artificial Sequence
  Description of Artificial Sequence: Synthetic oligonucleotide
guaucaguuucagauuuau

SEQ ID NO: 989782 - RNA, 19 nt, Artificial Sequence
  Description of Artificial Sequence: Synthetic oligonucleotide
caucgaugaguguuucucu

SEQ ID NO: 989783 - RNA, 19 nt, Artificial Sequence
  Description of Artificial Sequence: Synthetic oligonucleotide
cgacaaguugacccgauuc

SEQ ID NO: 989784 - RNA, 19 nt, Artificial Sequence
  Description of Artificial Sequence: Synthetic oligonucleotide
guucacggccaacgcugcc

SEQ ID NO: 989785 - RNA, 19 nt, Artificial Sequence
  Description of Artificial Sequence: Synthetic oligonucleotide
ucugcgaguucagcaugaa

SEQ ID NO: 989786 - RNA, 19 nt, Artificial Sequence
  Description of Artificial Sequence: Synthetic oligonucleotide
caagcaagugucagccucu

SEQ ID NO: 989787 - RNA, 19 nt, Artificial Sequence
  Description of Artificial Sequence: Synthetic oligonucleotide
uccugggaugaagacccuc

SEQ ID NO: 989788 - RNA, 19 nt, Artificial Sequence
  Description of Artificial Sequence: Synthetic oligonucleotide
caagugcauccaaggaaaa

SEQ ID NO: 989789 - RNA, 19 nt, Artificial Sequence
  Description of Artificial Sequence: Synthetic oligonucleotide
agcucagggagaggccgag

SEQ ID NO: 989790 - RNA, 19 nt, Artificial Sequence
  Description of Artificial Sequence: Synthetic oligonucleotide
cagagcuauaccgccacaa

SEQ ID NO: 989791 - RNA, 19 nt, Artificial Sequence
  Description of Artificial Sequence: Synthetic oligonucleotide
cccgauucugaauguucag

SEQ ID NO: 989792 - RNA, 19 nt, Artificial Sequence
  Description of Artificial Sequence: Synthetic oligonucleotide
acgcugggcuuguauuuaa

SEQ ID NO: 989793 - RNA, 19 nt, Artificial Sequence
  Description of Artificial Sequence: Synthetic oligonucleotide
gguggcgaucacaguacag

SEQ ID NO: 989794 - RNA, 19 nt, Artificial Sequence
  Description of Artificial Sequence: Synthetic oligonucleotide
cauauucuaaggacacguu

SEQ ID NO: 989795 - RNA, 19 nt, Artificial Sequence
  Description of Artificial Sequence: Synthetic oligonucleotide
guuuaacagggaguuaguu

SEQ ID NO: 989796 - RNA, 19 nt, Artificial Sequence
  Description of Artificial Sequence: Synthetic oligonucleotide
gcuauaccgccacaagcaa

SEQ ID NO: 989797 - RNA, 19 nt, Artificial Sequence
  Description of Artificial Sequence: Synthetic oligonucleotide
cccaauguauacucauaga

SEQ ID NO: 989798 - RNA, 19 nt, Artificial Sequence
  Description of Artificial Sequence: Synthetic oligonucleotide
auaccgccacaagcaagug

SEQ ID NO: 989799 - RNA, 19 nt, Artificial Sequence
  Description of Artificial Sequence: Synthetic oligonucleotide
cuucggcacucuuguaaaa

SEQ ID NO: 989800 - RNA, 19 nt, Artificial Sequence
  Description of Artificial Sequence: Synthetic oligonucleotide
gccggccgagcucagggag

SEQ ID NO: 989801 - RNA, 19 nt, Artificial Sequence
  Description of Artificial Sequence: Synthetic oligonucleotide
acguugcacgugaggaugu

SEQ ID NO: 989802 - RNA, 19 nt, Artificial Sequence
  Description of Artificial Sequence: Synthetic oligonucleotide
uuggcucaccuguguucaa

SEQ ID NO: 989803 - RNA, 19 nt, Artificial Sequence
  Description of Artificial Sequence: Synthetic oligonucleotide
guuaucccacacacccauc

SEQ ID NO: 989804 - RNA, 19 nt, Artificial Sequence
  Description of Artificial Sequence: Synthetic oligonucleotide
cgauucugaauguucagcu

SEQ ID NO: 989805 - RNA, 19 nt, Artificial Sequence
  Description of Artificial Sequence: Synthetic oligonucleotide
cauguuuaacagggaguua

SEQ ID NO: 989806 - RNA, 19 nt, Artificial Sequence
  Description of Artificial Sequence: Synthetic oligonucleotide
cugggacaacacagccauc

SEQ ID NO: 989807 - RNA, 19 nt, Artificial Sequence
  Description of Artificial Sequence: Synthetic oligonucleotide
ugacggcccucaagccauc

SEQ ID NO: 989808 - RNA, 19 nt, Artificial Sequence
  Description of Artificial Sequence: Synthetic oligonucleotide
gcccuucggccccaaguug

SEQ ID NO: 989809 - RNA, 19 nt, Artificial Sequence
  Description of Artificial Sequence: Synthetic oligonucleotide
cuucggccccaaguugguc

SEQ ID NO: 989810 - RNA, 19 nt, Artificial Sequence
  Description of Artificial Sequence: Synthetic oligonucleotide
accgacaaguugacccgau

SEQ ID NO: 989811 - RNA, 19 nt, Artificial Sequence
  Description of Artificial Sequence: Synthetic oligonucleotide
cagcgccugggacaacaca

SEQ ID NO: 989812 - RNA, 19 nt, Artificial Sequence
  Description of Artificial Sequence: Synthetic oligonucleotide
ccugccuuucacgcugggc

SEQ ID NO: 989813 - RNA, 19 nt, Artificial Sequence
  Description of Artificial Sequence: Synthetic oligonucleotide
gagcccugccuuucacgcu

SEQ ID NO: 989814 - RNA, 19 nt, Artificial Sequence
  Description of Artificial Sequence: Synthetic oligonucleotide
gccuuucacgcugggcuug

SEQ ID NO: 989815 - RNA, 19 nt, Artificial Sequence
  Description of Artificial Sequence: Synthetic oligonucleotide
ggcucaccuguguucaagu

SEQ ID NO: 989816 - RNA, 19 nt, Artificial Sequence
  Description of Artificial Sequence: Synthetic oligonucleotide
gaacggggauuguuacauu

SEQ ID NO: 989817 - RNA, 19 nt, Artificial Sequence
  Description of Artificial Sequence: Synthetic oligonucleotide
ggccacaucgaugaguguu

SEQ ID NO: 989818 - RNA, 19 nt, Artificial Sequence
  Description of Artificial Sequence: Synthetic oligonucleotide
caccgacaaguugacccga

SEQ ID NO: 989819 - RNA, 19 nt, Artificial Sequence
  Description of Artificial Sequence: Synthetic oligonucleotide
cacgcugggcuuguauuua

SEQ ID NO: 989820 - RNA, 19 nt, Artificial Sequence
  Description of Artificial Sequence: Synthetic oligonucleotide
cgccacaagcaagugucag

SEQ ID NO: 989821 - RNA, 19 nt, Artificial Sequence
  Description of Artificial Sequence: Synthetic oligonucleotide
gagcaacgaugccuucuuu

SEQ ID NO: 989822 - RNA, 19 nt, Artificial Sequence
  Description of Artificial Sequence: Synthetic oligonucleotide
ccacaucgaugaguguuuc

SEQ ID NO: 989823 - RNA, 19 nt, Artificial Sequence
  Description of Artificial Sequence: Synthetic oligonucleotide
cgugccgcgcugauguuca

SEQ ID NO: 989824 - RNA, 19 nt, Artificial Sequence
  Description of Artificial Sequence: Synthetic oligonucleotide
gagucagugugugcuuguu

SEQ ID NO: 989825 - RNA, 19 nt, Artificial Sequence
  Description of Artificial Sequence: Synthetic oligonucleotide
auccugggaugaagacccu

SEQ ID NO: 989826 - RNA, 19 nt, Artificial Sequence
  Description of Artificial Sequence: Synthetic oligonucleotide
cugaaucaccacagacauu

SEQ ID NO: 989827 - RNA, 19 nt, Artificial Sequence
  Description of Artificial Sequence: Synthetic oligonucleotide
accucggcuuuaggguuua

SEQ ID NO: 989828 - RNA, 19 nt, Artificial Sequence
  Description of Artificial Sequence: Synthetic oligonucleotide
ccacaccgacaaguugacc

SEQ ID NO: 989829 - RNA, 19 nt, Artificial Sequence
  Description of Artificial Sequence: Synthetic oligonucleotide
ggccgagaacaacgugcuc

SEQ ID NO: 989830 - RNA, 19 nt, Artificial Sequence
  Description of Artificial Sequence: Synthetic oligonucleotide
gcccucaagccaucucuua

SEQ ID NO: 989831 - RNA, 19 nt, Artificial Sequence
  Description of Artificial Sequence: Synthetic oligonucleotide
ccgcgcugauguucacggc

SEQ ID NO: 989832 - RNA, 19 nt, Artificial Sequence
  Description of Artificial Sequence: Synthetic oligonucleotide
cggcuuuaggguuuaggcu

SEQ ID NO: 989833 - RNA, 19 nt, Artificial Sequence
  Description of Artificial Sequence: Synthetic oligonucleotide
gugccgcgcugauguucac

SEQ ID NO: 989834 - RNA, 19 nt, Artificial Sequence
  Description of Artificial Sequence: Synthetic oligonucleotide
ccccgugccgcgcugaugu

SEQ ID NO: 989835 - RNA, 19 nt, Artificial Sequence
  Description of Artificial Sequence: Synthetic oligonucleotide
ccgcucucaugaucucauc

SEQ ID NO: 989836 - RNA, 19 nt, Artificial Sequence
  Description of Artificial Sequence: Synthetic oligonucleotide
ccgugccgcgcugauguuc

SEQ ID NO: 989837 - RNA, 19 nt, Artificial Sequence
  Description of Artificial Sequence: Synthetic oligonucleotide
ggccgagcucagggagagg

SEQ ID NO: 989838 - RNA, 19 nt, Artificial Sequence
  Description of Artificial Sequence: Synthetic oligonucleotide
ccgccacaagcaaguguca

SEQ ID NO: 989839 - RNA, 19 nt, Artificial Sequence
  Description of Artificial Sequence: Synthetic oligonucleotide
gcucuucggcacucuugua

SEQ ID NO: 989840 - RNA, 19 nt, Artificial Sequence
  Description of Artificial Sequence: Synthetic oligonucleotide
cgcccaauguauacucaua

SEQ ID NO: 989841 - RNA, 19 nt, Artificial Sequence
  Description of Artificial Sequence: Synthetic oligonucleotide
cuuucacgcugggcuugua

SEQ ID NO: 989842 - RNA, 19 nt, Artificial Sequence
  Description of Artificial Sequence: Synthetic oligonucleotide
ccuucggccccaaguuggu

SEQ ID NO: 989843 - RNA, 19 nt, Artificial Sequence
  Description of Artificial Sequence: Synthetic oligonucleotide
caauccccuuuugguuaau

SEQ ID NO: 989844 - RNA, 19 nt, Artificial Sequence
  Description of Artificial Sequence: Synthetic oligonucleotide
ccgacaaguugacccgauu

SEQ ID NO: 989845 - RNA, 19 nt, Artificial Sequence
  Description of Artificial Sequence: Synthetic oligonucleotide
cguugcacgugaggaugua

SEQ ID NO: 989846 - RNA, 19 nt, Artificial Sequence
  Description of Artificial Sequence: Synthetic oligonucleotide
ggccccgugccgcgcugau

SEQ ID NO: 989847 - RNA, 19 nt, Artificial Sequence
  Description of Artificial Sequence: Synthetic oligonucleotide
cccgugccgcgcugauguu

SEQ ID NO: 989848 - RNA, 19 nt, Artificial Sequence
  Description of Artificial Sequence: Synthetic oligonucleotide
agugagaucacucagcuuc

SEQ ID NO: 989849 - RNA, 19 nt, Artificial Sequence
  Description of Artificial Sequence: Synthetic oligonucleotide
aauucgaugauguaggcgu

SEQ ID NO: 989850 - RNA, 19 nt, Artificial Sequence
  Description of Artificial Sequence: Synthetic oligonucleotide
uugguauugagccugagag

SEQ ID NO: 989851 - RNA, 19 nt, Artificial Sequence
  Description of Artificial Sequence: Synthetic oligonucleotide
uuagaagaagaugugaugg

SEQ ID NO: 989852 - RNA, 19 nt, Artificial Sequence
  Description of Artificial Sequence: Synthetic oligonucleotide
aauaaagagcccugagagc

SEQ ID NO: 989853 - RNA, 19 nt, Artificial Sequence
  Description of Artificial Sequence: Synthetic oligonucleotide
aaaauucgaugauguaggc

SEQ ID NO: 989854 - RNA, 19 nt, Artificial Sequence
  Description of Artificial Sequence: Synthetic oligonucleotide
aaaacuuaugugccccggc

SEQ ID NO: 989855 - RNA, 19 nt, Artificial Sequence
  Description of Artificial Sequence: Synthetic oligonucleotide
aaucuugaguucauggacc

SEQ ID NO: 989856 - RNA, 19 nt, Artificial Sequence
  Description of Artificial Sequence: Synthetic oligonucleotide
ucaagaauagagaaagccu

SEQ ID NO: 989857 - RNA, 19 nt, Artificial Sequence
  Description of Artificial Sequence: Synthetic oligonucleotide
uuuaccuugaggguggagg

SEQ ID NO: 989858 - RNA, 19 nt, Artificial Sequence
  Description of Artificial Sequence: Synthetic oligonucleotide
aagcaauguguuugcaagc

SEQ ID NO: 989859 - RNA, 19 nt, Artificial Sequence
  Description of Artificial Sequence: Synthetic oligonucleotide
caagaauagagaaagccug

SEQ ID NO: 989860 - RNA, 19 nt, Artificial Sequence
  Description of Artificial Sequence: Synthetic oligonucleotide
agggucuagaccuacucgc

SEQ ID NO: 989861 - RNA, 19 nt, Artificial Sequence
  Description of Artificial Sequence: Synthetic oligonucleotide
ugcuccucgagauagagca

SEQ ID NO: 989862 - RNA, 19 nt, Artificial Sequence
  Description of Artificial Sequence: Synthetic oligonucleotide
cugacgagauccaaggucg

SEQ ID NO: 989863 - RNA, 19 nt, Artificial Sequence
  Description of Artificial Sequence: Synthetic oligonucleotide
cucaagaauagagaaagcc

SEQ ID NO: 989864 - RNA, 19 nt, Artificial Sequence
  Description of Artificial Sequence: Synthetic oligonucleotide
gaaaaggugccaugagucg

SEQ ID NO: 989865 - RNA, 19 nt, Artificial Sequence
  Description of Artificial Sequence: Synthetic oligonucleotide
ugugcaaggagggaggagg

SEQ ID NO: 989866 - RNA, 19 nt, Artificial Sequence
  Description of Artificial Sequence: Synthetic oligonucleotide
agaaccagauuucugggag

SEQ ID NO: 989867 - RNA, 19 nt, Artificial Sequence
  Description of Artificial Sequence: Synthetic oligonucleotide
ucuucuagggcauggcagg

SEQ ID NO: 989868 - RNA, 19 nt, Artificial Sequence
  Description of Artificial Sequence: Synthetic oligonucleotide
auuagaagaagaugugaug

SEQ ID NO: 989869 - RNA, 19 nt, Artificial Sequence
  Description of Artificial Sequence: Synthetic oligonucleotide
gauguaggcguccaggaug

SEQ ID NO: 989870 - RNA, 19 nt, Artificial Sequence
  Description of Artificial Sequence: Synthetic oligonucleotide
aacaccaauaaagagcccu

SEQ ID NO: 989871 - RNA, 19 nt, Artificial Sequence
  Description of Artificial Sequence: Synthetic oligonucleotide
uaaagacauuagaagaaga

SEQ ID NO: 989872 - RNA, 19 nt, Artificial Sequence
  Description of Artificial Sequence: Synthetic oligonucleotide
aaggcgagagcacaggcug

SEQ ID NO: 989873 - RNA, 19 nt, Artificial Sequence
  Description of Artificial Sequence: Synthetic oligonucleotide
auacucuucaaucuugagu

SEQ ID NO: 989874 - RNA, 19 nt, Artificial Sequence
  Description of Artificial Sequence: Synthetic oligonucleotide
agaccuacucgcuguaacc

SEQ ID NO: 989875 - RNA, 19 nt, Artificial Sequence
  Description of Artificial Sequence: Synthetic oligonucleotide
agcaauguguuugcaagcc

SEQ ID NO: 989876 - RNA, 19 nt, Artificial Sequence
  Description of Artificial Sequence: Synthetic oligonucleotide
ucuagcagaaucagugucu

SEQ ID NO: 989877 - RNA, 19 nt, Artificial Sequence
  Description of Artificial Sequence: Synthetic oligonucleotide
gagcugacgagauccaagg

SEQ ID NO: 989878 - RNA, 19 nt, Artificial Sequence
  Description of Artificial Sequence: Synthetic oligonucleotide
gauggaacgguagagcgcc

SEQ ID NO: 989879 - RNA, 19 nt, Artificial Sequence
  Description of Artificial Sequence: Synthetic oligonucleotide
cuugguuucagaccgucag

SEQ ID NO: 989880 - RNA, 19 nt, Artificial Sequence
  Description of Artificial Sequence: Synthetic oligonucleotide
aaugcggagcaagaacucg

SEQ ID NO: 989881 - RNA, 19 nt, Artificial Sequence
  Description of Artificial Sequence: Synthetic oligonucleotide
gaauagagaaagccugacc

SEQ ID NO: 989882 - RNA, 19 nt, Artificial Sequence
  Description of Artificial Sequence: Synthetic oligonucleotide
cucgagauagagcagccgg

SEQ ID NO: 989883 - RNA, 19 nt, Artificial Sequence
  Description of Artificial Sequence: Synthetic oligonucleotide
agcaagauccaguggcagc

SEQ ID NO: 989884 - RNA, 19 nt, Artificial Sequence
  Description of Artificial Sequence: Synthetic oligonucleotide
auguuuucgaaaaggugcc

SEQ ID NO: 989885 - RNA, 19 nt, Artificial Sequence
  Description of Artificial Sequence: Synthetic oligonucleotide
cucgcuguaacccuuguug

SEQ ID NO: 989886 - RNA, 19 nt, Artificial Sequence
  Description of Artificial Sequence: Synthetic oligonucleotide
uguguuugcaagccagggc

SEQ ID NO: 989887 - RNA, 19 nt, Artificial Sequence
  Description of Artificial Sequence: Synthetic oligonucleotide
uuugcaccaccuuugggug

SEQ ID NO: 989888 - RNA, 19 nt, Artificial Sequence
  Description of Artificial Sequence: Synthetic oligonucleotide
ugaaacgggagagauggcc

SEQ ID NO: 989889 - RNA, 19 nt, Artificial Sequence
  Description of Artificial Sequence: Synthetic oligonucleotide
ucgaaaaggugccaugagu

SEQ ID NO: 989890 - RNA, 19 nt, Artificial Sequence
  Description of Artificial Sequence: Synthetic oligonucleotide
aaggucgauaccaccaggg

SEQ ID NO: 989891 - RNA, 19 nt, Artificial Sequence
  Description of Artificial Sequence: Synthetic oligonucleotide
cacucgauucucuugggcc

SEQ ID NO: 989892 - RNA, 19 nt, Artificial Sequence
  Description of Artificial Sequence: Synthetic oligonucleotide
aauggcggggaccucuuug

SEQ ID NO: 989893 - RNA, 19 nt, Artificial Sequence
  Description of Artificial Sequence: Synthetic oligonucleotide
ccucgaaaacacaagaagg

SEQ ID NO: 989894 - RNA, 19 nt, Artificial Sequence
  Description of Artificial Sequence: Synthetic oligonucleotide
auuucugggagagaguuca

SEQ ID NO: 989895 - RNA, 19 nt, Artificial Sequence
  Description of Artificial Sequence: Synthetic oligonucleotide
ucagaacagcagcagaagu

SEQ ID NO: 989896 - RNA, 19 nt, Artificial Sequence
  Description of Artificial Sequence: Synthetic oligonucleotide
agggcgugagacccgagcc

SEQ ID NO: 989897 - RNA, 19 nt, Artificial Sequence
  Description of Artificial Sequence: Synthetic oligonucleotide
uuuucgaaaaggugccaug

SEQ ID NO: 989898 - RNA, 19 nt, Artificial Sequence
  Description of Artificial Sequence: Synthetic oligonucleotide
uaaaggcgagagcacaggc

SEQ ID NO: 989899 - RNA, 19 nt, Artificial Sequence
  Description of Artificial Sequence: Synthetic oligonucleotide
acggaagcaauguguuugc

SEQ ID NO: 989900 - RNA, 19 nt, Artificial Sequence
  Description of Artificial Sequence: Synthetic oligonucleotide
aauguguuugcaagccagg

SEQ ID NO: 989901 - RNA, 19 nt, Artificial Sequence
  Description of Artificial Sequence: Synthetic oligonucleotide
gagggucuagaccuacucg

SEQ ID NO: 989902 - RNA, 19 nt, Artificial Sequence
  Description of Artificial Sequence: Synthetic oligonucleotide
agaagguuuauugguauug

SEQ ID NO: 989903 - RNA, 19 nt, Artificial Sequence
  Description of Artificial Sequence: Synthetic oligonucleotide
ucuagggcauggcaggccc

SEQ ID NO: 989904 - RNA, 19 nt, Artificial Sequence
  Description of Artificial Sequence: Synthetic oligonucleotide
aaccagauuucugggagag

SEQ ID NO: 989905 - RNA, 19 nt, Artificial Sequence
  Description of Artificial Sequence: Synthetic oligonucleotide
ucugaugacugucuccagu

SEQ ID NO: 989906 - RNA, 19 nt, Artificial Sequence
  Description of Artificial Sequence: Synthetic oligonucleotide
agauccaaggucgauacca

SEQ ID NO: 989907 - RNA, 19 nt, Artificial Sequence
  Description of Artificial Sequence: Synthetic oligonucleotide
augugccccggcuaaagac

SEQ ID NO: 989908 - RNA, 19 nt, Artificial Sequence
  Description of Artificial Sequence: Synthetic oligonucleotide
gguauugagccugagagug

SEQ ID NO: 989909 - RNA, 19 nt, Artificial Sequence
  Description of Artificial Sequence: Synthetic oligonucleotide
auggaggcaauggggaucc

SEQ ID NO: 989910 - RNA, 19 nt, Artificial Sequence
  Description of Artificial Sequence: Synthetic oligonucleotide
ucggaaaccgcccgaaaac

SEQ ID NO: 989911 - RNA, 19 nt, Artificial Sequence
  Description of Artificial Sequence: Synthetic oligonucleotide
aggucgauaccaccagggc

SEQ ID NO: 989912 - RNA, 19 nt, Artificial Sequence
  Description of Artificial Sequence: Synthetic oligonucleotide
acgguagagcgccaggacg

SEQ ID NO: 989913 - RNA, 19 nt, Artificial Sequence
  Description of Artificial Sequence: Synthetic oligonucleotide
ucucaagaauagagaaagc

SEQ ID NO: 989914 - RNA, 19 nt, Artificial Sequence
  Description of Artificial Sequence: Synthetic oligonucleotide
gauuccuugcacaccaggc

SEQ ID NO: 989915 - RNA, 19 nt, Artificial Sequence
  Description of Artificial Sequence: Synthetic oligonucleotide
ucuuugcaccaccuuuggg

SEQ ID NO: 989916 - RNA, 19 nt, Artificial Sequence
  Description of Artificial Sequence: Synthetic oligonucleotide
gauggggucugaaagccag

SEQ ID NO: 989917 - RNA, 19 nt, Artificial Sequence
  Description of Artificial Sequence: Synthetic oligonucleotide
ggagcaagaacucggaaac

SEQ ID NO: 989918 - RNA, 19 nt, Artificial Sequence
  Description of Artificial Sequence: Synthetic oligonucleotide
aaaggugccaugagucggg

SEQ ID NO: 989919 - RNA, 19 nt, Artificial Sequence
  Description of Artificial Sequence: Synthetic oligonucleotide
uaacuagccuuugauuucc

SEQ ID NO: 989920 - RNA, 19 nt, Artificial Sequence
  Description of Artificial Sequence: Synthetic oligonucleotide
cuaacuagccuuugauuuc

SEQ ID NO: 989921 - RNA, 19 nt, Artificial Sequence
  Description of Artificial Sequence: Synthetic oligonucleotide
caugcgagaggccacgggc

SEQ ID NO: 989922 - RNA, 19 nt, Artificial Sequence
  Description of Artificial Sequence: Synthetic oligonucleotide
ugggguuaguccaucuagc

SEQ ID NO: 989923 - RNA, 19 nt, Artificial Sequence
  Description of Artificial Sequence: Synthetic oligonucleotide
agucuuuaccuugagggug

SEQ ID NO: 989924 - RNA, 19 nt, Artificial Sequence
  Description of Artificial Sequence: Synthetic oligonucleotide
ccacugaaccacaugaugg

SEQ ID NO: 989925 - RNA, 19 nt, Artificial Sequence
  Description of Artificial Sequence: Synthetic oligonucleotide
agcccgagagacaugaaac

SEQ ID NO: 989926 - RNA, 19 nt, Artificial Sequence
  Description of Artificial Sequence: Synthetic oligonucleotide
aagccuugcuccucgagau

SEQ ID NO: 989927 - RNA, 19 nt, Artificial Sequence
  Description of Artificial Sequence: Synthetic oligonucleotide
cagauccccacaagcaugg

SEQ ID NO: 989928 - RNA, 19 nt, Artificial Sequence
  Description of Artificial Sequence: Synthetic oligonucleotide
gugggguuaguccaucuag

SEQ ID NO: 989929 - RNA, 19 nt, Artificial Sequence
  Description of Artificial Sequence: Synthetic oligonucleotide
gaaacgggagagauggccc

SEQ ID NO: 989930 - RNA, 19 nt, Artificial Sequence
  Description of Artificial Sequence: Synthetic oligonucleotide
aacucucccagccuccgga

SEQ ID NO: 989931 - RNA, 19 nt, Artificial Sequence
  Description of Artificial Sequence: Synthetic oligonucleotide
uuucagaccgucagcuaga

SEQ ID NO: 989932 - RNA, 19 nt, Artificial Sequence
  Description of Artificial Sequence: Synthetic oligonucleotide
ggucgauaccaccagggcg

SEQ ID NO: 989933 - RNA, 19 nt, Artificial Sequence
  Description of Artificial Sequence: Synthetic oligonucleotide
uagaccuacucgcuguaac

SEQ ID NO: 989934 - RNA, 19 nt, Artificial Sequence
  Description of Artificial Sequence: Synthetic oligonucleotide
gagccuguaggguaguuca

SEQ ID NO: 989935 - RNA, 19 nt, Artificial Sequence
  Description of Artificial Sequence: Synthetic oligonucleotide
auagucuucuagggcaugg

SEQ ID NO: 989936 - RNA, 19 nt, Artificial Sequence
  Description of Artificial Sequence: Synthetic oligonucleotide
ucgcuguaacccuuguugc

SEQ ID NO: 989937 - RNA, 19 nt, Artificial Sequence
  Description of Artificial Sequence: Synthetic oligonucleotide
ugggcuugacauguuuucg

SEQ ID NO: 989938 - RNA, 19 nt, Artificial Sequence
  Description of Artificial Sequence: Synthetic oligonucleotide
gcaauggggauccaggagc

SEQ ID NO: 989939 - RNA, 19 nt, Artificial Sequence
  Description of Artificial Sequence: Synthetic oligonucleotide
gaaaccgcccgaaaacacc

SEQ ID NO: 989940 - RNA, 19 nt, Artificial Sequence
  Description of Artificial Sequence: Synthetic oligonucleotide
gccucgaaaacacaagaag

SEQ ID NO: 989941 - RNA, 19 nt, Artificial Sequence
  Description of Artificial Sequence: Synthetic oligonucleotide
uauugagccugagagugcu

SEQ ID NO: 989942 - RNA, 19 nt, Artificial Sequence
  Description of Artificial Sequence: Synthetic oligonucleotide
ucaugcgagaggccacggg

SEQ ID NO: 989943 - RNA, 19 nt, Artificial Sequence
  Description of Artificial Sequence: Synthetic oligonucleotide
cugaaagccagguguccgg

SEQ ID NO: 989944 - RNA, 19 nt, Artificial Sequence
  Description of Artificial Sequence: Synthetic oligonucleotide
auguguuugcaagccaggg

SEQ ID NO: 989945 - RNA, 19 nt, Artificial Sequence
  Description of Artificial Sequence: Synthetic oligonucleotide
ggugccaugagucgggagc

SEQ ID NO: 989946 - RNA, 19 nt, Artificial Sequence
  Description of Artificial Sequence: Synthetic oligonucleotide
agaggcuaaggccaccacu

SEQ ID NO: 989947 - RNA, 19 nt, Artificial Sequence
  Description of Artificial Sequence: Synthetic oligonucleotide
gauccaguggcagcugagg

SEQ ID NO: 989948 - RNA, 19 nt, Artificial Sequence
  Description of Artificial Sequence: Synthetic oligonucleotide
auggaggcccgugaguagc

SEQ ID NO: 989949 - RNA, 19 nt, Artificial Sequence
  Description of Artificial Sequence: Synthetic oligonucleotide
gaagccuugcuccucgaga

SEQ ID NO: 989950 - RNA, 19 nt, Artificial Sequence
  Description of Artificial Sequence: Synthetic oligonucleotide
cagcuagaugucuucauuc

SEQ ID NO: 989951 - RNA, 19 nt, Artificial Sequence
  Description of Artificial Sequence: Synthetic oligonucleotide
acggaccuguaccugaucu

SEQ ID NO: 989952 - RNA, 19 nt, Artificial Sequence
  Description of Artificial Sequence: Synthetic oligonucleotide
aggccuccgaagcucaggg

SEQ ID NO: 989953 - RNA, 19 nt, Artificial Sequence
  Description of Artificial Sequence: Synthetic oligonucleotide
ugcacggaagcaauguguu

SEQ ID NO: 989954 - RNA, 19 nt, Artificial Sequence
  Description of Artificial Sequence: Synthetic oligonucleotide
ugggcucugcuaacuagcc

SEQ ID NO: 989955 - RNA, 19 nt, Artificial Sequence
  Description of Artificial Sequence: Synthetic oligonucleotide
agugucucagcaaggcaac

SEQ ID NO: 989956 - RNA, 19 nt, Artificial Sequence
  Description of Artificial Sequence: Synthetic oligonucleotide
ucgagauagagcagccggu

SEQ ID NO: 989957 - RNA, 19 nt, Artificial Sequence
  Description of Artificial Sequence: Synthetic oligonucleotide
gagccucgaaaacacaaga

SEQ ID NO: 989958 - RNA, 19 nt, Artificial Sequence
  Description of Artificial Sequence: Synthetic oligonucleotide
cuuugcaccaccuuugggu

SEQ ID NO: 989959 - RNA, 19 nt, Artificial Sequence
  Description of Artificial Sequence: Synthetic oligonucleotide
ugguauugagccugagagu

SEQ ID NO: 989960 - RNA, 19 nt, Artificial Sequence
  Description of Artificial Sequence: Synthetic oligonucleotide
aaaccgcccgaaaacaccu

SEQ ID NO: 989961 - RNA, 19 nt, Artificial Sequence
  Description of Artificial Sequence: Synthetic oligonucleotide
gaccuacucgcuguaaccc

SEQ ID NO: 989962 - RNA, 19 nt, Artificial Sequence
  Description of Artificial Sequence: Synthetic oligonucleotide
uuaugugccccggcuaaag

SEQ ID NO: 989963 - RNA, 19 nt, Artificial Sequence
  Description of Artificial Sequence: Synthetic oligonucleotide
guaaaggcgagagcacagg

SEQ ID NO: 989964 - RNA, 19 nt, Artificial Sequence
  Description of Artificial Sequence: Synthetic oligonucleotide
aacuuaugugccccggcua

SEQ ID NO: 989965 - RNA, 19 nt, Artificial Sequence
  Description of Artificial Sequence: Synthetic oligonucleotide
auguaggcguccaggaugg

SEQ ID NO: 989966 - RNA, 19 nt, Artificial Sequence
  Description of Artificial Sequence: Synthetic oligonucleotide
acuuaugugccccggcuaa

SEQ ID NO: 989967 - RNA, 19 nt, Artificial Sequence
  Description of Artificial Sequence: Synthetic oligonucleotide
agucuucuagggcauggca

SEQ ID NO: 989968 - RNA, 19 nt, Artificial Sequence
  Description of Artificial Sequence: Synthetic oligonucleotide
cucgaaaacacaagaaggu

SEQ ID NO: 989969 - RNA, 19 nt, Artificial Sequence
  Description of Artificial Sequence: Synthetic oligonucleotide
uccucgagauagagcagcc

SEQ ID NO: 989970 - RNA, 19 nt, Artificial Sequence
  Description of Artificial Sequence: Synthetic oligonucleotide
uaugugccccggcuaaaga

SEQ ID NO: 989971 - RNA, 19 nt, Artificial Sequence
  Description of Artificial Sequence: Synthetic oligonucleotide
cucuuugcaccaccuuugg

SEQ ID NO: 989972 - RNA, 19 nt, Artificial Sequence
  Description of Artificial Sequence: Synthetic oligonucleotide
gaagguuuauugguauuga

SEQ ID NO: 989973 - RNA, 19 nt, Artificial Sequence
  Description of Artificial Sequence: Synthetic oligonucleotide
ucgaaaacacaagaagguu

SEQ ID NO: 989974 - RNA, 19 nt, Artificial Sequence
  Description of Artificial Sequence: Synthetic oligonucleotide
aggccacgggcugagacgc

SEQ ID NO: 989975 - RNA, 19 nt, Artificial Sequence
  Description of Artificial Sequence: Synthetic oligonucleotide
uccacaaccugggugcagc

SEQ ID NO: 989976 - RNA, 19 nt, Artificial Sequence
  Description of Artificial Sequence: Synthetic oligonucleotide
agucgggagcuuuggcugg

SEQ ID NO: 989977 - RNA, 19 nt, Artificial Sequence
  Description of Artificial Sequence: Synthetic oligonucleotide
uguugcacauacucuucaa

SEQ ID NO: 989978 - RNA, 19 nt, Artificial Sequence
  Description of Artificial Sequence: Synthetic oligonucleotide
uagcaggcgggcacuaccc

SEQ ID NO: 989979 - RNA, 19 nt, Artificial Sequence
  Description of Artificial Sequence: Synthetic oligonucleotide
cauuagaagaagaugugau

SEQ ID NO: 989980 - RNA, 19 nt, Artificial Sequence
  Description of Artificial Sequence: Synthetic oligonucleotide
agacaugucugaugacugu

SEQ ID NO: 989981 - RNA, 19 nt, Artificial Sequence
  Description of Artificial Sequence: Synthetic oligonucleotide
cagaaucagugucuccacc

SEQ ID NO: 989982 - RNA, 19 nt, Artificial Sequence
  Description of Artificial Sequence: Synthetic oligonucleotide
aggcguccaggauggaacg

SEQ ID NO: 989983 - RNA, 19 nt, Artificial Sequence
  Description of Artificial Sequence: Synthetic oligonucleotide
aggcccgugaguagcaggc

SEQ ID NO: 989984 - RNA, 19 nt, Artificial Sequence
  Description of Artificial Sequence: Synthetic oligonucleotide
ugcggagcaagaacucgga

SEQ ID NO: 989985 - RNA, 19 nt, Artificial Sequence
  Description of Artificial Sequence: Synthetic oligonucleotide
acuacccuggcccgauguc

SEQ ID NO: 989986 - RNA, 19 nt, Artificial Sequence
  Description of Artificial Sequence: Synthetic oligonucleotide
ugacccacugaaccacaug

SEQ ID NO: 989987 - RNA, 19 nt, Artificial Sequence
  Description of Artificial Sequence: Synthetic oligonucleotide
cugucuccagugcugcacg

SEQ ID NO: 989988 - RNA, 19 nt, Artificial Sequence
  Description of Artificial Sequence: Synthetic oligonucleotide
gagacgccaggcaucuugg

SEQ ID NO: 989989 - RNA, 19 nt, Artificial Sequence
  Description of Artificial Sequence: Synthetic oligonucleotide
ugucuccagugcugcacgg

SEQ ID NO: 989990 - RNA, 19 nt, Artificial Sequence
  Description of Artificial Sequence: Synthetic oligonucleotide
agauagagcagccggucua

SEQ ID NO: 989991 - RNA, 19 nt, Artificial Sequence
  Description of Artificial Sequence: Synthetic oligonucleotide
ugauggggucugaaagcca

SEQ ID NO: 989992 - RNA, 19 nt, Artificial Sequence
  Description of Artificial Sequence: Synthetic oligonucleotide
agaagccuugcuccucgag

SEQ ID NO: 989993 - RNA, 19 nt, Artificial Sequence
  Description of Artificial Sequence: Synthetic oligonucleotide
uugcuccucgagauagagc

SEQ ID NO: 989994 - RNA, 19 nt, Artificial Sequence
  Description of Artificial Sequence: Synthetic oligonucleotide
gacccuggggauuccuugc

SEQ ID NO: 989995 - RNA, 19 nt, Artificial Sequence
  Description of Artificial Sequence: Synthetic oligonucleotide
ucuagcgcuucuugccaug

SEQ ID NO: 989996 - RNA, 19 nt, Artificial Sequence
  Description of Artificial Sequence: Synthetic oligonucleotide
caggcgggcacuacccugg

SEQ ID NO: 989997 - RNA, 19 nt, Artificial Sequence
  Description of Artificial Sequence: Synthetic oligonucleotide
ccgagagacaugaaacggg

SEQ ID NO: 989998 - RNA, 19 nt, Artificial Sequence
  Description of Artificial Sequence: Synthetic oligonucleotide
accacucgauucucuuggg

SEQ ID NO: 989999 - RNA, 19 nt, Artificial Sequence
  Description of Artificial Sequence: Synthetic oligonucleotide
ugacugucuccagugcugc

SEQ ID NO: 990000 - RNA, 19 nt, Artificial Sequence
  Description of Artificial Sequence: Synthetic oligonucleotide
uggcccgaugucuccagag

SEQ ID NO: 990001 - RNA, 19 nt, Artificial Sequence
  Description of Artificial Sequence: Synthetic oligonucleotide
ccaucuagcgcuucuugcc

SEQ ID NO: 990002 - RNA, 19 nt, Artificial Sequence
  Description of Artificial Sequence: Synthetic oligonucleotide
augcggagcaagaacucgg

SEQ ID NO: 990003 - RNA, 19 nt, Artificial Sequence
  Description of Artificial Sequence: Synthetic oligonucleotide
gagagacaugaaacgggag

SEQ ID NO: 990004 - RNA, 19 nt, Artificial Sequence
  Description of Artificial Sequence: Synthetic oligonucleotide
gaaccagauuucugggaga

SEQ ID NO: 990005 - RNA, 19 nt, Artificial Sequence
  Description of Artificial Sequence: Synthetic oligonucleotide
gcuacccacugacucaggg

SEQ ID NO: 990006 - RNA, 19 nt, Artificial Sequence
  Description of Artificial Sequence: Synthetic oligonucleotide
uguuuucgaaaaggugcca

SEQ ID NO: 990007 - RNA, 19 nt, Artificial Sequence
  Description of Artificial Sequence: Synthetic oligonucleotide
acacucagauccccacaag

SEQ ID NO: 990008 - RNA, 19 nt, Artificial Sequence
  Description of Artificial Sequence: Synthetic oligonucleotide
ucuagaccuacucgcugua

SEQ ID NO: 990009 - RNA, 19 nt, Artificial Sequence
  Description of Artificial Sequence: Synthetic oligonucleotide
caaugcggagcaagaacuc

SEQ ID NO: 990010 - RNA, 19 nt, Artificial Sequence
  Description of Artificial Sequence: Synthetic oligonucleotide
accuacucgcuguaacccu

SEQ ID NO: 990011 - RNA, 19 nt, Artificial Sequence
  Description of Artificial Sequence: Synthetic oligonucleotide
ggguuaguccaucuagcgc

SEQ ID NO: 990012 - RNA, 19 nt, Artificial Sequence
  Description of Artificial Sequence: Synthetic oligonucleotide
accaacucucccagccucc

SEQ ID NO: 990013 - RNA, 19 nt, Artificial Sequence
  Description of Artificial Sequence: Synthetic oligonucleotide
cggucuagcagaaucagug

SEQ ID NO: 990014 - RNA, 19 nt, Artificial Sequence
  Description of Artificial Sequence: Synthetic oligonucleotide
aggcaacacucagaucccc

SEQ ID NO: 990015 - RNA, 19 nt, Artificial Sequence
  Description of Artificial Sequence: Synthetic oligonucleotide
cagccggucuagcagaauc

SEQ ID NO: 990016 - RNA, 19 nt, Artificial Sequence
  Description of Artificial Sequence: Synthetic oligonucleotide
ugacgagauccaaggucga

SEQ ID NO: 990017 - RNA, 19 nt, Artificial Sequence
  Description of Artificial Sequence: Synthetic oligonucleotide
guccaucuagcgcuucuug

SEQ ID NO: 990018 - RNA, 19 nt, Artificial Sequence
  Description of Artificial Sequence: Synthetic oligonucleotide
uggaacgguagagcgccag

SEQ ID NO: 990019 - RNA, 19 nt, Artificial Sequence
  Description of Artificial Sequence: Synthetic oligonucleotide
gagauccaaggucgauacc

SEQ ID NO: 990020 - RNA, 19 nt, Artificial Sequence
  Description of Artificial Sequence: Synthetic oligonucleotide
uagcagaaucagugucucc

SEQ ID NO: 990021 - RNA, 19 nt, Artificial Sequence
  Description of Artificial Sequence: Synthetic oligonucleotide
acgggcugagacgccaggc

SEQ ID NO: 990022 - RNA, 19 nt, Artificial Sequence
  Description of Artificial Sequence: Synthetic oligonucleotide
ggccacacggaccuguacc

SEQ ID NO: 990023 - RNA, 19 nt, Artificial Sequence
  Description of Artificial Sequence: Synthetic oligonucleotide
ggaccuguaccugaucucc

SEQ ID NO: 990024 - RNA, 19 nt, Artificial Sequence
  Description of Artificial Sequence: Synthetic oligonucleotide
gagcaagaacucggaaacc

SEQ ID NO: 990025 - RNA, 19 nt, Artificial Sequence
  Description of Artificial Sequence: Synthetic oligonucleotide
cauggaggcccgugaguag

SEQ ID NO: 990026 - RNA, 19 nt, Artificial Sequence
  Description of Artificial Sequence: Synthetic oligonucleotide
guccggguaaaggcgagag

SEQ ID NO: 990027 - RNA, 19 nt, Artificial Sequence
  Description of Artificial Sequence: Synthetic oligonucleotide
aggaacucugauggggucu

SEQ ID NO: 990028 - RNA, 19 nt, Artificial Sequence
  Description of Artificial Sequence: Synthetic oligonucleotide
acaugaaacgggagagaug

SEQ ID NO: 990029 - RNA, 19 nt, Artificial Sequence
  Description of Artificial Sequence: Synthetic oligonucleotide
cagggcgugagacccgagc

SEQ ID NO: 990030 - RNA, 19 nt, Artificial Sequence
  Description of Artificial Sequence: Synthetic oligonucleotide
cagaaccagauuucuggga

SEQ ID NO: 990031 - RNA, 19 nt, Artificial Sequence
  Description of Artificial Sequence: Synthetic oligonucleotide
ccgggcucaacucugcagg

SEQ ID NO: 990032 - RNA, 19 nt, Artificial Sequence
  Description of Artificial Sequence: Synthetic oligonucleotide
cuacucgcuguaacccuug

SEQ ID NO: 990033 - RNA, 19 nt, Artificial Sequence
  Description of Artificial Sequence: Synthetic oligonucleotide
aacucggaaaccgcccgaa

SEQ ID NO: 990034 - RNA, 19 nt, Artificial Sequence
  Description of Artificial Sequence: Synthetic oligonucleotide
ggaacgguagagcgccagg

SEQ ID NO: 990035 - RNA, 19 nt, Artificial Sequence
  Description of Artificial Sequence: Synthetic oligonucleotide
cuccaggaacucugauggg

SEQ ID NO: 990036 - RNA, 19 nt, Artificial Sequence
  Description of Artificial Sequence: Synthetic oligonucleotide
acaagcauggaggcccgug

SEQ ID NO: 990037 - RNA, 19 nt, Artificial Sequence
  Description of Artificial Sequence: Synthetic oligonucleotide
guauugagccugagagugc

SEQ ID NO: 990038 - RNA, 19 nt, Artificial Sequence
  Description of Artificial Sequence: Synthetic oligonucleotide
caucuagcgcuucuugcca

SEQ ID NO: 990039 - RNA, 19 nt, Artificial Sequence
  Description of Artificial Sequence: Synthetic oligonucleotide
gucgauaccaccagggcgu

SEQ ID NO: 990040 - RNA, 19 nt, Artificial Sequence
  Description of Artificial Sequence: Synthetic oligonucleotide
cuucuagggcauggcaggc

SEQ ID NO: 990041 - RNA, 19 nt, Artificial Sequence
  Description of Artificial Sequence: Synthetic oligonucleotide
caccaacucucccagccuc

SEQ ID NO: 990042 - RNA, 19 nt, Artificial Sequence
  Description of Artificial Sequence: Synthetic oligonucleotide
aggagccucgaaaacacaa

SEQ ID NO: 990043 - RNA, 19 nt, Artificial Sequence
  Description of Artificial Sequence: Synthetic oligonucleotide
caacaccaauaaagagccc

SEQ ID NO: 990044 - RNA, 19 nt, Artificial Sequence
  Description of Artificial Sequence: Synthetic oligonucleotide
augaaacgggagagauggc

SEQ ID NO: 990045 - RNA, 19 nt, Artificial Sequence
  Description of Artificial Sequence: Synthetic oligonucleotide
ggucuagaccuacucgcug

SEQ ID NO: 990046 - RNA, 19 nt, Artificial Sequence
  Description of Artificial Sequence: Synthetic oligonucleotide
gcggggaccucuuugcacc

SEQ ID NO: 990047 - RNA, 19 nt, Artificial Sequence
  Description of Artificial Sequence: Synthetic oligonucleotide
agaccgucagcuagauguc

SEQ ID NO: 990048 - RNA, 19 nt, Artificial Sequence
  Description of Artificial Sequence: Synthetic oligonucleotide
cucggaaaccgcccgaaaa

SEQ ID NO: 990049 - RNA, 19 nt, Artificial Sequence
  Description of Artificial Sequence: Synthetic oligonucleotide
ggagccucgaaaacacaag

SEQ ID NO: 990050 - RNA, 19 nt, Artificial Sequence
  Description of Artificial Sequence: Synthetic oligonucleotide
gugccccacaggcugucgg

SEQ ID NO: 990051 - RNA, 19 nt, Artificial Sequence
  Description of Artificial Sequence: Synthetic oligonucleotide
ccggcuaaagacauuagaa

SEQ ID NO: 990052 - RNA, 19 nt, Artificial Sequence
  Description of Artificial Sequence: Synthetic oligonucleotide
cccgagagacaugaaacgg

SEQ ID NO: 990053 - RNA, 19 nt, Artificial Sequence
  Description of Artificial Sequence: Synthetic oligonucleotide
aggaggugaggagcugacg

SEQ ID NO: 990054 - RNA, 19 nt, Artificial Sequence
  Description of Artificial Sequence: Synthetic oligonucleotide
cagcuacccacugacucag

SEQ ID NO: 990055 - RNA, 19 nt, Artificial Sequence
  Description of Artificial Sequence: Synthetic oligonucleotide
aucuagcgcuucuugccau

SEQ ID NO: 990056 - RNA, 19 nt, Artificial Sequence
  Description of Artificial Sequence: Synthetic oligonucleotide
cgagauccaaggucgauac

SEQ ID NO: 990057 - RNA, 19 nt, Artificial Sequence
  Description of Artificial Sequence: Synthetic oligonucleotide
caagcauggaggcccguga

SEQ ID NO: 990058 - RNA, 19 nt, Artificial Sequence
  Description of Artificial Sequence: Synthetic oligonucleotide
cacacggaccuguaccuga

SEQ ID NO: 990059 - RNA, 19 nt, Artificial Sequence
  Description of Artificial Sequence: Synthetic oligonucleotide
gagauagagcagccggucu

SEQ ID NO: 990060 - RNA, 19 nt, Artificial Sequence
  Description of Artificial Sequence: Synthetic oligonucleotide
ggcccgaugucuccagagg

SEQ ID NO: 990061 - RNA, 19 nt, Artificial Sequence
  Description of Artificial Sequence: Synthetic oligonucleotide
cccacugaaccacaugaug

SEQ ID NO: 990062 - RNA, 19 nt, Artificial Sequence
  Description of Artificial Sequence: Synthetic oligonucleotide
agauccaguggcagcugag

SEQ ID NO: 990063 - RNA, 19 nt, Artificial Sequence
  Description of Artificial Sequence: Synthetic oligonucleotide
gucucagcaaggcaacacu

SEQ ID NO: 990064 - RNA, 19 nt, Artificial Sequence
  Description of Artificial Sequence: Synthetic oligonucleotide
cccaaugcggagcaagaac

SEQ ID NO: 990065 - RNA, 19 nt, Artificial Sequence
  Description of Artificial Sequence: Synthetic oligonucleotide
acgggagagauggcccugg

SEQ ID NO: 990066 - RNA, 19 nt, Artificial Sequence
  Description of Artificial Sequence: Synthetic oligonucleotide
aggcgcugggcucugcuaa

SEQ ID NO: 990067 - RNA, 19 nt, Artificial Sequence
  Description of Artificial Sequence: Synthetic oligonucleotide
acgagauccaaggucgaua

SEQ ID NO: 990068 - RNA, 19 nt, Artificial Sequence
  Description of Artificial Sequence: Synthetic oligonucleotide
gccuccgaagcucagggca

SEQ ID NO: 990069 - RNA, 19 nt, Artificial Sequence
  Description of Artificial Sequence: Synthetic oligonucleotide
agccucgaaaacacaagaa

SEQ ID NO: 990070 - RNA, 19 nt, Artificial Sequence
  Description of Artificial Sequence: Synthetic oligonucleotide
gcaagaacucggaaaccgc

SEQ ID NO: 990071 - RNA, 19 nt, Artificial Sequence
  Description of Artificial Sequence: Synthetic oligonucleotide
aaccgcccgaaaacaccuc

SEQ ID NO: 990072 - RNA, 19 nt, Artificial Sequence
  Description of Artificial Sequence: Synthetic oligonucleotide
uucuugccaugagcugggg

SEQ ID NO: 990073 - RNA, 19 nt, Artificial Sequence
  Description of Artificial Sequence: Synthetic oligonucleotide
cauagucuucuagggcaug

SEQ ID NO: 990074 - RNA, 19 nt, Artificial Sequence
  Description of Artificial Sequence: Synthetic oligonucleotide
gcugcacggaagcaaugug

SEQ ID NO: 990075 - RNA, 19 nt, Artificial Sequence
  Description of Artificial Sequence: Synthetic oligonucleotide
ugccccacaggcugucggu

SEQ ID NO: 990076 - RNA, 19 nt, Artificial Sequence
  Description of Artificial Sequence: Synthetic oligonucleotide
ccaaggucgauaccaccag

SEQ ID NO: 990077 - RNA, 19 nt, Artificial Sequence
  Description of Artificial Sequence: Synthetic oligonucleotide
caacacucagauccccaca

SEQ ID NO: 990078 - RNA, 19 nt, Artificial Sequence
  Description of Artificial Sequence: Synthetic oligonucleotide
ccagguguccggguaaagg

SEQ ID NO: 990079 - RNA, 19 nt, Artificial Sequence
  Description of Artificial Sequence: Synthetic oligonucleotide
cugcacggaagcaaugugu

SEQ ID NO: 990080 - RNA, 19 nt, Artificial Sequence
  Description of Artificial Sequence: Synthetic oligonucleotide
gcccgugaguagcaggcgg

SEQ ID NO: 990081 - RNA, 19 nt, Artificial Sequence
  Description of Artificial Sequence: Synthetic oligonucleotide
gggcuugacauguuuucga

SEQ ID NO: 990082 - RNA, 19 nt, Artificial Sequence
  Description of Artificial Sequence: Synthetic oligonucleotide
aacccuuguugcacauacu

SEQ ID NO: 990083 - RNA, 19 nt, Artificial Sequence
  Description of Artificial Sequence: Synthetic oligonucleotide
acccuggggauuccuugca

SEQ ID NO: 990084 - RNA, 19 nt, Artificial Sequence
  Description of Artificial Sequence: Synthetic oligonucleotide
uucagaccgucagcuagau

SEQ ID NO: 990085 - RNA, 19 nt, Artificial Sequence
  Description of Artificial Sequence: Synthetic oligonucleotide
cucgauucucuugggccug

SEQ ID NO: 990086 - RNA, 19 nt, Artificial Sequence
  Description of Artificial Sequence: Synthetic oligonucleotide
gaggcuaaggccaccacuu

SEQ ID NO: 990087 - RNA, 19 nt, Artificial Sequence
  Description of Artificial Sequence: Synthetic oligonucleotide
uggccacacggaccuguac

SEQ ID NO: 990088 - RNA, 19 nt, Artificial Sequence
  Description of Artificial Sequence: Synthetic oligonucleotide
aacuagccuuugauuuccu

SEQ ID NO: 990089 - RNA, 19 nt, Artificial Sequence
  Description of Artificial Sequence: Synthetic oligonucleotide
agccggucuagcagaauca

SEQ ID NO: 990090 - RNA, 19 nt, Artificial Sequence
  Description of Artificial Sequence: Synthetic oligonucleotide
ggaaaccgcccgaaaacac

SEQ ID NO: 990091 - RNA, 19 nt, Artificial Sequence
  Description of Artificial Sequence: Synthetic oligonucleotide
ucgauucucuugggccugc

SEQ ID NO: 990092 - RNA, 19 nt, Artificial Sequence
  Description of Artificial Sequence: Synthetic oligonucleotide
cucaugcgagaggccacgg

SEQ ID NO: 990093 - RNA, 19 nt, Artificial Sequence
  Description of Artificial Sequence: Synthetic oligonucleotide
cacgggcugagacgccagg

SEQ ID NO: 990094 - RNA, 19 nt, Artificial Sequence
  Description of Artificial Sequence: Synthetic oligonucleotide
guuuucgaaaaggugccau

SEQ ID NO: 990095 - RNA, 19 nt, Artificial Sequence
  Description of Artificial Sequence: Synthetic oligonucleotide
ccaaugcggagcaagaacu

SEQ ID NO: 990096 - RNA, 19 nt, Artificial Sequence
  Description of Artificial Sequence: Synthetic oligonucleotide
uuggggcccgacagacugu

SEQ ID NO: 990097 - RNA, 19 nt, Artificial Sequence
  Description of Artificial Sequence: Synthetic oligonucleotide
acucgcuguaacccuuguu

SEQ ID NO: 990098 - RNA, 19 nt, Artificial Sequence
  Description of Artificial Sequence: Synthetic oligonucleotide
ccaggggugucuugguggc

SEQ ID NO: 990099 - RNA, 19 nt, Artificial Sequence
  Description of Artificial Sequence: Synthetic oligonucleotide
acucggaaaccgcccgaaa

SEQ ID NO: 990100 - RNA, 19 nt, Artificial Sequence
  Description of Artificial Sequence: Synthetic oligonucleotide
uuaguccaucuagcgcuuc

SEQ ID NO: 990101 - RNA, 19 nt, Artificial Sequence
  Description of Artificial Sequence: Synthetic oligonucleotide
cccgacagacugugcaagg

SEQ ID NO: 990102 - RNA, 19 nt, Artificial Sequence
  Description of Artificial Sequence: Synthetic oligonucleotide
caccagggcgugagacccg

SEQ ID NO: 990103 - RNA, 19 nt, Artificial Sequence
  Description of Artificial Sequence: Synthetic oligonucleotide
auaccaccagggcgugaga

SEQ ID NO: 990104 - RNA, 19 nt, Artificial Sequence
  Description of Artificial Sequence: Synthetic oligonucleotide
cuggucuaggcgcugggcu

SEQ ID NO: 990105 - RNA, 19 nt, Artificial Sequence
  Description of Artificial Sequence: Synthetic oligonucleotide
ccgaugucuccagaggaag

SEQ ID NO: 990106 - RNA, 19 nt, Artificial Sequence
  Description of Artificial Sequence: Synthetic oligonucleotide
guucauggacccuggggau

SEQ ID NO: 990107 - RNA, 19 nt, Artificial Sequence
  Description of Artificial Sequence: Synthetic oligonucleotide
gcccgaugucuccagagga

SEQ ID NO: 990108 - RNA, 19 nt, Artificial Sequence
  Description of Artificial Sequence: Synthetic oligonucleotide
guaggcguccaggauggaa

SEQ ID NO: 990109 - RNA, 19 nt, Artificial Sequence
  Description of Artificial Sequence: Synthetic oligonucleotide
gccgggcucaacucugcag

SEQ ID NO: 990110 - RNA, 19 nt, Artificial Sequence
  Description of Artificial Sequence: Synthetic oligonucleotide
guaccugaucuccuccccu

SEQ ID NO: 990111 - RNA, 19 nt, Artificial Sequence
  Description of Artificial Sequence: Synthetic oligonucleotide
gccuguaggguaguucaug

SEQ ID NO: 990112 - RNA, 19 nt, Artificial Sequence
  Description of Artificial Sequence: Synthetic oligonucleotide
agagcgccaggacgcgggu

SEQ ID NO: 990113 - RNA, 19 nt, Artificial Sequence
  Description of Artificial Sequence: Synthetic oligonucleotide
caucuuggggcccgacaga

SEQ ID NO: 990114 - RNA, 19 nt, Artificial Sequence
  Description of Artificial Sequence: Synthetic oligonucleotide
ggcggggaccucuuugcac

SEQ ID NO: 990115 - RNA, 19 nt, Artificial Sequence
  Description of Artificial Sequence: Synthetic oligonucleotide
guguccggguaaaggcgag

SEQ ID NO: 990116 - RNA, 19 nt, Artificial Sequence
  Description of Artificial Sequence: Synthetic oligonucleotide
cagccagcugucuccucuc

SEQ ID NO: 990117 - RNA, 19 nt, Artificial Sequence
  Description of Artificial Sequence: Synthetic oligonucleotide
ccagcuacccacugacuca

SEQ ID NO: 990118 - RNA, 19 nt, Artificial Sequence
  Description of Artificial Sequence: Synthetic oligonucleotide
gcaagauccaguggcagcu

SEQ ID NO: 990119 - RNA, 19 nt, Artificial Sequence
  Description of Artificial Sequence: Synthetic oligonucleotide
cuagcgcuucuugccauga

SEQ ID NO: 990120 - RNA, 19 nt, Artificial Sequence
  Description of Artificial Sequence: Synthetic oligonucleotide
ccaugagucgggagcuuug

SEQ ID NO: 990121 - RNA, 19 nt, Artificial Sequence
  Description of Artificial Sequence: Synthetic oligonucleotide
gagccgggcucaacucugc

SEQ ID NO: 990122 - RNA, 19 nt, Artificial Sequence
  Description of Artificial Sequence: Synthetic oligonucleotide
ggagccuguaggguaguuc

SEQ ID NO: 990123 - RNA, 19 nt, Artificial Sequence
  Description of Artificial Sequence: Synthetic oligonucleotide
cuccucuccucaugcgaga

SEQ ID NO: 990124 - RNA, 19 nt, Artificial Sequence
  Description of Artificial Sequence: Synthetic oligonucleotide
accagggcgugagacccga

SEQ ID NO: 990125 - RNA, 19 nt, Artificial Sequence
  Description of Artificial Sequence: Synthetic oligonucleotide
ccucaugcgagaggccacg

SEQ ID NO: 990126 - RNA, 19 nt, Artificial Sequence
  Description of Artificial Sequence: Synthetic oligonucleotide
accgucagcuagaugucuu

SEQ ID NO: 990127 - RNA, 19 nt, Artificial Sequence
  Description of Artificial Sequence: Synthetic oligonucleotide
cccggcuaaagacauuaga

SEQ ID NO: 990128 - RNA, 19 nt, Artificial Sequence
  Description of Artificial Sequence: Synthetic oligonucleotide
ccucgagauagagcagccg

SEQ ID NO: 990129 - RNA, 19 nt, Artificial Sequence
  Description of Artificial Sequence: Synthetic oligonucleotide
ggucacugaguuucaugua

SEQ ID NO: 990130 - RNA, 19 nt, Artificial Sequence
  Description of Artificial Sequence: Synthetic oligonucleotide
ggcguccaggauggaacgg

SEQ ID NO: 990131 - RNA, 19 nt, Artificial Sequence
  Description of Artificial Sequence: Synthetic oligonucleotide
cagugcugcacggaagcaa

SEQ ID NO: 990132 - RNA, 19 nt, Artificial Sequence
  Description of Artificial Sequence: Synthetic oligonucleotide
ccuuguugcacauacucuu

SEQ ID NO: 990133 - RNA, 19 nt, Artificial Sequence
  Description of Artificial Sequence: Synthetic oligonucleotide
gcccgacagacugugcaag

SEQ ID NO: 990134 - RNA, 19 nt, Artificial Sequence
  Description of Artificial Sequence: Synthetic oligonucleotide
ggcagacaugucugaugac

SEQ ID NO: 990135 - RNA, 19 nt, Artificial Sequence
  Description of Artificial Sequence: Synthetic oligonucleotide
ucuaggcgcugggcucugc

SEQ ID NO: 990136 - RNA, 19 nt, Artificial Sequence
  Description of Artificial Sequence: Synthetic oligonucleotide
ccucuccucaugcgagagg

SEQ ID NO: 990137 - RNA, 19 nt, Artificial Sequence
  Description of Artificial Sequence: Synthetic oligonucleotide
ccaacucucccagccuccg

SEQ ID NO: 990138 - RNA, 19 nt, Artificial Sequence
  Description of Artificial Sequence: Synthetic oligonucleotide
cacggaccuguaccugauc

SEQ ID NO: 990139 - RNA, 19 nt, Artificial Sequence
  Description of Artificial Sequence: Synthetic oligonucleotide
cauggacccuggggauucc

SEQ ID NO: 990140 - RNA, 19 nt, Artificial Sequence
  Description of Artificial Sequence: Synthetic oligonucleotide
gguuucagaccgucagcua

SEQ ID NO: 990141 - RNA, 19 nt, Artificial Sequence
  Description of Artificial Sequence: Synthetic oligonucleotide
gugucucagcaaggcaaca

SEQ ID NO: 990142 - RNA, 19 nt, Artificial Sequence
  Description of Artificial Sequence: Synthetic oligonucleotide
auggacccuggggauuccu

SEQ ID NO: 990143 - RNA, 19 nt, Artificial Sequence
  Description of Artificial Sequence: Synthetic oligonucleotide
cuuaugugccccggcuaaa

SEQ ID NO: 990144 - RNA, 19 nt, Artificial Sequence
  Description of Artificial Sequence: Synthetic oligonucleotide
ccgucagcuagaugucuuc

SEQ ID NO: 990145 - RNA, 19 nt, Artificial Sequence
  Description of Artificial Sequence: Synthetic oligonucleotide
cuagaccuacucgcuguaa

SEQ ID NO: 990146 - RNA, 19 nt, Artificial Sequence
  Description of Artificial Sequence: Synthetic oligonucleotide
acacggaccuguaccugau

SEQ ID NO: 990147 - RNA, 19 nt, Artificial Sequence
  Description of Artificial Sequence: Synthetic oligonucleotide
gcugagggucuagaccuac

SEQ ID NO: 990148 - RNA, 19 nt, Artificial Sequence
  Description of Artificial Sequence: Synthetic oligonucleotide
gaccgucagcuagaugucu

SEQ ID NO: 990149 - RNA, 19 nt, Artificial Sequence
  Description of Artificial Sequence: Synthetic oligonucleotide
gaacucugauggggucuga

SEQ ID NO: 990150 - RNA, 19 nt, Artificial Sequence
  Description of Artificial Sequence: Synthetic oligonucleotide
aggcgagagcacaggcugu

SEQ ID NO: 990151 - RNA, 19 nt, Artificial Sequence
  Description of Artificial Sequence: Synthetic oligonucleotide
guaacccuuguugcacaua

SEQ ID NO: 990152 - RNA, 19 nt, Artificial Sequence
  Description of Artificial Sequence: Synthetic oligonucleotide
cuacccuggcccgaugucu

SEQ ID NO: 990153 - RNA, 19 nt, Artificial Sequence
  Description of Artificial Sequence: Synthetic oligonucleotide
cacuacccuggcccgaugu

SEQ ID NO: 990154 - RNA, 19 nt, Artificial Sequence
  Description of Artificial Sequence: Synthetic oligonucleotide
ccuugcacaccaggccucc

SEQ ID NO: 990155 - RNA, 19 nt, Artificial Sequence
  Description of Artificial Sequence: Synthetic oligonucleotide
gacgagauccaaggucgau

SEQ ID NO: 990156 - RNA, 19 nt, Artificial Sequence
  Description of Artificial Sequence: Synthetic oligonucleotide
ggcccgugaguagcaggcg

SEQ ID NO: 990157 - RNA, 19 nt, Artificial Sequence
  Description of Artificial Sequence: Synthetic oligonucleotide
gcuccucgagauagagcag

SEQ ID NO: 990158 - RNA, 19 nt, Artificial Sequence
  Description of Artificial Sequence: Synthetic oligonucleotide
cgagauagagcagccgguc

SEQ ID NO: 990159 - RNA, 19 nt, Artificial Sequence
  Description of Artificial Sequence: Synthetic oligonucleotide
gacccaggggugucuuggu

SEQ ID NO: 990160 - RNA, 19 nt, Artificial Sequence
  Description of Artificial Sequence: Synthetic oligonucleotide
ggcgcugggcucugcuaac

SEQ ID NO: 990161 - RNA, 19 nt, Artificial Sequence
  Description of Artificial Sequence: Synthetic oligonucleotide
gugagacccgagccgggcu

SEQ ID NO: 990162 - RNA, 19 nt, Artificial Sequence
  Description of Artificial Sequence: Synthetic oligonucleotide
gaccucuuugcaccaccuu

SEQ ID NO: 990163 - RNA, 19 nt, Artificial Sequence
  Description of Artificial Sequence: Synthetic oligonucleotide
cauccacaaccugggugca

SEQ ID NO: 990164 - RNA, 19 nt, Artificial Sequence
  Description of Artificial Sequence: Synthetic oligonucleotide
ccuggcccgaugucuccag

SEQ ID NO: 990165 - RNA, 19 nt, Artificial Sequence
  Description of Artificial Sequence: Synthetic oligonucleotide
gcgcuucuugccaugagcu

SEQ ID NO: 990166 - RNA, 19 nt, Artificial Sequence
  Description of Artificial Sequence: Synthetic oligonucleotide
ugccccggcuaaagacauu

SEQ ID NO: 990167 - RNA, 19 nt, Artificial Sequence
  Description of Artificial Sequence: Synthetic oligonucleotide
agccuguaggguaguucau

SEQ ID NO: 990168 - RNA, 19 nt, Artificial Sequence
  Description of Artificial Sequence: Synthetic oligonucleotide
cgagccgggcucaacucug

SEQ ID NO: 990169 - RNA, 19 nt, Artificial Sequence
  Description of Artificial Sequence: Synthetic oligonucleotide
cucaacucugcaggcccaa

SEQ ID NO: 990170 - RNA, 19 nt, Artificial Sequence
  Description of Artificial Sequence: Synthetic oligonucleotide
ggcccgacagacugugcaa

SEQ ID NO: 990171 - RNA, 19 nt, Artificial Sequence
  Description of Artificial Sequence: Synthetic oligonucleotide
ggccaccacuucagaacag

SEQ ID NO: 990172 - RNA, 19 nt, Artificial Sequence
  Description of Artificial Sequence: Synthetic oligonucleotide
ggaggcccgugaguagcag

SEQ ID NO: 990173 - RNA, 19 nt, Artificial Sequence
  Description of Artificial Sequence: Synthetic oligonucleotide
ggcccaaugcggagcaaga

SEQ ID NO: 990174 - RNA, 19 nt, Artificial Sequence
  Description of Artificial Sequence: Synthetic oligonucleotide
aggacgcgggugagguuca

SEQ ID NO: 990175 - RNA, 19 nt, Artificial Sequence
  Description of Artificial Sequence: Synthetic oligonucleotide
cccagcccgagagacauga

SEQ ID NO: 990176 - RNA, 19 nt, Artificial Sequence
  Description of Artificial Sequence: Synthetic oligonucleotide
ccccggcuaaagacauuag

SEQ ID NO: 990177 - RNA, 19 nt, Artificial Sequence
  Description of Artificial Sequence: Synthetic oligonucleotide
gccccggcuaaagacauua

SEQ ID NO: 990178 - RNA, 19 nt, Artificial Sequence
  Description of Artificial Sequence: Synthetic oligonucleotide
cccgaugucuccagaggaa

SEQ ID NO: 990179 - RNA, 19 nt, Artificial Sequence
  Description of Artificial Sequence: Synthetic oligonucleotide
cugacccacugaaccacau

SEQ ID NO: 990180 - RNA, 19 nt, Artificial Sequence
  Description of Artificial Sequence: Synthetic oligonucleotide
gggaauggcggggaccucu

SEQ ID NO: 990181 - RNA, 19 nt, Artificial Sequence
  Description of Artificial Sequence: Synthetic oligonucleotide
gcggagcaagaacucggaa

SEQ ID NO: 990182 - RNA, 19 nt, Artificial Sequence
  Description of Artificial Sequence: Synthetic oligonucleotide
ccuggccugagcccacauc

SEQ ID NO: 990183 - RNA, 19 nt, Artificial Sequence
  Description of Artificial Sequence: Synthetic oligonucleotide
cggaccuguaccugaucuc

SEQ ID NO: 990184 - RNA, 19 nt, Artificial Sequence
  Description of Artificial Sequence: Synthetic oligonucleotide
auggaacgguagagcgcca

SEQ ID NO: 990185 - RNA, 19 nt, Artificial Sequence
  Description of Artificial Sequence: Synthetic oligonucleotide
gacccgagccgggcucaac

SEQ ID NO: 990186 - RNA, 19 nt, Artificial Sequence
  Description of Artificial Sequence: Synthetic oligonucleotide
cccgagccgggcucaacuc

SEQ ID NO: 990187 - RNA, 19 nt, Artificial Sequence
  Description of Artificial Sequence: Synthetic oligonucleotide
gggucuagaccuacucgcu

SEQ ID NO: 990188 - RNA, 19 nt, Artificial Sequence
  Description of Artificial Sequence: Synthetic oligonucleotide
ccccacaagcauggaggcc

SEQ ID NO: 990189 - RNA, 19 nt, Artificial Sequence
  Description of Artificial Sequence: Synthetic oligonucleotide
ccgacagacugugcaagga

SEQ ID NO: 990190 - RNA, 19 nt, Artificial Sequence
  Description of Artificial Sequence: Synthetic oligonucleotide
agcugagggucuagaccua

SEQ ID NO: 990191 - RNA, 19 nt, Artificial Sequence
  Description of Artificial Sequence: Synthetic oligonucleotide
ugggcccgaagggcagcaa

SEQ ID NO: 990192 - RNA, 19 nt, Artificial Sequence
  Description of Artificial Sequence: Synthetic oligonucleotide
caaccugggugcagccagu

SEQ ID NO: 990193 - RNA, 19 nt, Artificial Sequence
  Description of Artificial Sequence: Synthetic oligonucleotide
gccccacaggcugucggug

SEQ ID NO: 990194 - RNA, 19 nt, Artificial Sequence
  Description of Artificial Sequence: Synthetic oligonucleotide
gaauggcggggaccucuuu

SEQ ID NO: 990195 - RNA, 19 nt, Artificial Sequence
  Description of Artificial Sequence: Synthetic oligonucleotide
ccaggccuccgaagcucag

SEQ ID NO: 990196 - RNA, 19 nt, Artificial Sequence
  Description of Artificial Sequence: Synthetic oligonucleotide
cggaaaccgcccgaaaaca

SEQ ID NO: 990197 - RNA, 19 nt, Artificial Sequence
  Description of Artificial Sequence: Synthetic oligonucleotide
gccacgggcugagacgcca

SEQ ID NO: 990198 - RNA, 19 nt, Artificial Sequence
  Description of Artificial Sequence: Synthetic oligonucleotide
ccuugcuccucgagauaga

SEQ ID NO: 990199 - RNA, 19 nt, Artificial Sequence
  Description of Artificial Sequence: Synthetic oligonucleotide
cagugagaucacucagcuu

SEQ ID NO: 990200 - RNA, 19 nt, Artificial Sequence
  Description of Artificial Sequence: Synthetic oligonucleotide
ggagugugccccacaggcu

SEQ ID NO: 990201 - RNA, 19 nt, Artificial Sequence
  Description of Artificial Sequence: Synthetic oligonucleotide
ccccacaggcugucgguga

SEQ ID NO: 990202 - RNA, 19 nt, Artificial Sequence
  Description of Artificial Sequence: Synthetic oligonucleotide
guccagcuacccacugacu

SEQ ID NO: 990203 - RNA, 19 nt, Artificial Sequence
  Description of Artificial Sequence: Synthetic oligonucleotide
agacccgagccgggcucaa

SEQ ID NO: 990204 - RNA, 19 nt, Artificial Sequence
  Description of Artificial Sequence: Synthetic oligonucleotide
gcacggaagcaauguguuu

SEQ ID NO: 990205 - RNA, 19 nt, Artificial Sequence
  Description of Artificial Sequence: Synthetic oligonucleotide
ccuacucgcuguaacccuu

SEQ ID NO: 990206 - RNA, 19 nt, Artificial Sequence
  Description of Artificial Sequence: Synthetic oligonucleotide
gcgagaggccacgggcuga

SEQ ID NO: 990207 - RNA, 19 nt, Artificial Sequence
  Description of Artificial Sequence: Synthetic oligonucleotide
ccagggcgugagacccgag

SEQ ID NO: 990208 - RNA, 19 nt, Artificial Sequence
  Description of Artificial Sequence: Synthetic oligonucleotide
gccccagcccgagagacau

SEQ ID NO: 990209 - RNA, 19 nt, Artificial Sequence
  Description of Artificial Sequence: Synthetic oligonucleotide
gcgccaggacgcgggugag

SEQ ID NO: 990210 - RNA, 19 nt, Artificial Sequence
  Description of Artificial Sequence: Synthetic oligonucleotide
ggccacgggcugagacgcc

SEQ ID NO: 990211 - RNA, 19 nt, Artificial Sequence
  Description of Artificial Sequence: Synthetic oligonucleotide
ggcacuacccuggcccgau

SEQ ID NO: 990212 - RNA, 19 nt, Artificial Sequence
  Description of Artificial Sequence: Synthetic oligonucleotide
ggacgcgggugagguucac

SEQ ID NO: 990213 - RNA, 19 nt, Artificial Sequence
  Description of Artificial Sequence: Synthetic oligonucleotide
ggaauggcggggaccucuu

SEQ ID NO: 990214 - RNA, 19 nt, Artificial Sequence
  Description of Artificial Sequence: Synthetic oligonucleotide
cacaagcauggaggcccgu

SEQ ID NO: 990215 - RNA, 19 nt, Artificial Sequence
  Description of Artificial Sequence: Synthetic oligonucleotide
caggcccaaugcggagcaa

SEQ ID NO: 990216 - RNA, 19 nt, Artificial Sequence
  Description of Artificial Sequence: Synthetic oligonucleotide
ccagcccgagagacaugaa

SEQ ID NO: 990217 - RNA, 19 nt, Artificial Sequence
  Description of Artificial Sequence: Synthetic oligonucleotide
ccccuucccugggcauucc

SEQ ID NO: 990218 - RNA, 19 nt, Artificial Sequence
  Description of Artificial Sequence: Synthetic oligonucleotide
gcagccggucuagcagaau

SEQ ID NO: 990219 - RNA, 19 nt, Artificial Sequence
  Description of Artificial Sequence: Synthetic oligonucleotide
cgauucucuugggccugcu

SEQ ID NO: 990220 - RNA, 19 nt, Artificial Sequence
  Description of Artificial Sequence: Synthetic oligonucleotide
ccggagccuguaggguagu

SEQ ID NO: 990221 - RNA, 19 nt, Artificial Sequence
  Description of Artificial Sequence: Synthetic oligonucleotide
aaaacauugcuucaaugcc

SEQ ID NO: 990222 - RNA, 19 nt, Artificial Sequence
  Description of Artificial Sequence: Synthetic oligonucleotide
auugcuuaaaccuaguucg

SEQ ID NO: 990223 - RNA, 19 nt, Artificial Sequence
  Description of Artificial Sequence: Synthetic oligonucleotide
aaaagugaugaacacaggg

SEQ ID NO: 990224 - RNA, 19 nt, Artificial Sequence
  Description of Artificial Sequence: Synthetic oligonucleotide
aaauccacaauucugucac

SEQ ID NO: 990225 - RNA, 19 nt, Artificial Sequence
  Description of Artificial Sequence: Synthetic oligonucleotide
uugaauaaaccaaauauug

SEQ ID NO: 990226 - RNA, 19 nt, Artificial Sequence
  Description of Artificial Sequence: Synthetic oligonucleotide
uuuacuuucagaauucagc

SEQ ID NO: 990227 - RNA, 19 nt, Artificial Sequence
  Description of Artificial Sequence: Synthetic oligonucleotide
auauccaccaggcacaugc

SEQ ID NO: 990228 - RNA, 19 nt, Artificial Sequence
  Description of Artificial Sequence: Synthetic oligonucleotide
aagagcaagagccucauuc

SEQ ID NO: 990229 - RNA, 19 nt, Artificial Sequence
  Description of Artificial Sequence: Synthetic oligonucleotide
aagaaggcagcauaugcgc

SEQ ID NO: 990230 - RNA, 19 nt, Artificial Sequence
  Description of Artificial Sequence: Synthetic oligonucleotide
gaaaacauugcuucaaugc

SEQ ID NO: 990231 - RNA, 19 nt, Artificial Sequence
  Description of Artificial Sequence: Synthetic oligonucleotide
aaauuuccuuucuugacgg

SEQ ID NO: 990232 - RNA, 19 nt, Artificial Sequence
  Description of Artificial Sequence: Synthetic oligonucleotide
aauucugguaaacacagga

SEQ ID NO: 990233 - RNA, 19 nt, Artificial Sequence
  Description of Artificial Sequence: Synthetic oligonucleotide
auuaauguaaccuggcaag

SEQ ID NO: 990234 - RNA, 19 nt, Artificial Sequence
  Description of Artificial Sequence: Synthetic oligonucleotide
aaagugaugaacacagggc

SEQ ID NO: 990235 - RNA, 19 nt, Artificial Sequence
  Description of Artificial Sequence: Synthetic oligonucleotide
accaaauauugcuuaaacc

SEQ ID NO: 990236 - RNA, 19 nt, Artificial Sequence
  Description of Artificial Sequence: Synthetic oligonucleotide
uucuauuaauguaaccugg

SEQ ID NO: 990237 - RNA, 19 nt, Artificial Sequence
  Description of Artificial Sequence: Synthetic oligonucleotide
uuucuauuaauguaaccug

SEQ ID NO: 990238 - RNA, 19 nt, Artificial Sequence
  Description of Artificial Sequence: Synthetic oligonucleotide
uuacuuucagaauucagca

SEQ ID NO: 990239 - RNA, 19 nt, Artificial Sequence
  Description of Artificial Sequence: Synthetic oligonucleotide
ucuuggacgagccagacaa

SEQ ID NO: 990240 - RNA, 19 nt, Artificial Sequence
  Description of Artificial Sequence: Synthetic oligonucleotide
aacaagguuguuuaacugu

SEQ ID NO: 990241 - RNA, 19 nt, Artificial Sequence
  Description of Artificial Sequence: Synthetic oligonucleotide
aguggcaaaacaucaagag

SEQ ID NO: 990242 - RNA, 19 nt, Artificial Sequence
  Description of Artificial Sequence: Synthetic oligonucleotide
uauuaauguaaccuggcaa

SEQ ID NO: 990243 - RNA, 19 nt, Artificial Sequence
  Description of Artificial Sequence: Synthetic oligonucleotide
agagccucauucuaaacgg

SEQ ID NO: 990244 - RNA, 19 nt, Artificial Sequence
  Description of Artificial Sequence: Synthetic oligonucleotide
uauugcuuaaaccuaguuc

SEQ ID NO: 990245 - RNA, 19 nt, Artificial Sequence
  Description of Artificial Sequence: Synthetic oligonucleotide
uuugggaaguugaacuugg

SEQ ID NO: 990246 - RNA, 19 nt, Artificial Sequence
  Description of Artificial Sequence: Synthetic oligonucleotide
uuugucaucauuguguacu

SEQ ID NO: 990247 - RNA, 19 nt, Artificial Sequence
  Description of Artificial Sequence: Synthetic oligonucleotide
auggugaguucacauagcc

SEQ ID NO: 990248 - RNA, 19 nt, Artificial Sequence
  Description of Artificial Sequence: Synthetic oligonucleotide
auucuaaacggggacaccc

SEQ ID NO: 990249 - RNA, 19 nt, Artificial Sequence
  Description of Artificial Sequence: Synthetic oligonucleotide
aaauauugcuuaaaccuag

SEQ ID NO: 990250 - RNA, 19 nt, Artificial Sequence
  Description of Artificial Sequence: Synthetic oligonucleotide
ucuauuaauguaaccuggc

SEQ ID NO: 990251 - RNA, 19 nt, Artificial Sequence
  Description of Artificial Sequence: Synthetic oligonucleotide
ugcauugugagcuuugaga

SEQ ID NO: 990252 - RNA, 19 nt, Artificial Sequence
  Description of Artificial Sequence: Synthetic oligonucleotide
ugaaugaacccguagcagc

SEQ ID NO: 990253 - RNA, 19 nt, Artificial Sequence
  Description of Artificial Sequence: Synthetic oligonucleotide
aaaagcacaauguccgcca

SEQ ID NO: 990254 - RNA, 19 nt, Artificial Sequence
  Description of Artificial Sequence: Synthetic oligonucleotide
uguuccuuguaugauaaag

SEQ ID NO: 990255 - RNA, 19 nt, Artificial Sequence
  Description of Artificial Sequence: Synthetic oligonucleotide
ucuacagaaaacaucugau

SEQ ID NO: 990256 - RNA, 19 nt, Artificial Sequence
  Description of Artificial Sequence: Synthetic oligonucleotide
aaucauguguuccuuguau

SEQ ID NO: 990257 - RNA, 19 nt, Artificial Sequence
  Description of Artificial Sequence: Synthetic oligonucleotide
cuuuggaugguuucugugc

SEQ ID NO: 990258 - RNA, 19 nt, Artificial Sequence
  Description of Artificial Sequence: Synthetic oligonucleotide
auuagugauaauuccuugu

SEQ ID NO: 990259 - RNA, 19 nt, Artificial Sequence
  Description of Artificial Sequence: Synthetic oligonucleotide
agaguagccgugcucuucc

SEQ ID NO: 990260 - RNA, 19 nt, Artificial Sequence
  Description of Artificial Sequence: Synthetic oligonucleotide
uucuugacggcuuagcuuc

SEQ ID NO: 990261 - RNA, 19 nt, Artificial Sequence
  Description of Artificial Sequence: Synthetic oligonucleotide
aacccguagcagcaggggc

SEQ ID NO: 990262 - RNA, 19 nt, Artificial Sequence
  Description of Artificial Sequence: Synthetic oligonucleotide
uuuagcuucugucuacgga

SEQ ID NO: 990263 - RNA, 19 nt, Artificial Sequence
  Description of Artificial Sequence: Synthetic oligonucleotide
ugugucucagaacaacggc

SEQ ID NO: 990264 - RNA, 19 nt, Artificial Sequence
  Description of Artificial Sequence: Synthetic oligonucleotide
ugcuacuccacaagcaugc

SEQ ID NO: 990265 - RNA, 19 nt, Artificial Sequence
  Description of Artificial Sequence: Synthetic oligonucleotide
acuuucagaauucagcaau

SEQ ID NO: 990266 - RNA, 19 nt, Artificial Sequence
  Description of Artificial Sequence: Synthetic oligonucleotide
ggugaguucacauagccug

SEQ ID NO: 990267 - RNA, 19 nt, Artificial Sequence
  Description of Artificial Sequence: Synthetic oligonucleotide
guuguuuaacuguugcugc

SEQ ID NO: 990268 - RNA, 19 nt, Artificial Sequence
  Description of Artificial Sequence: Synthetic oligonucleotide
cauuccuguaaaauacucc

SEQ ID NO: 990269 - RNA, 19 nt, Artificial Sequence
  Description of Artificial Sequence: Synthetic oligonucleotide
gacaccaagaacucccugc

SEQ ID NO: 990270 - RNA, 19 nt, Artificial Sequence
  Description of Artificial Sequence: Synthetic oligonucleotide
uucagaauucagcaauucu

SEQ ID NO: 990271 - RNA, 19 nt, Artificial Sequence
  Description of Artificial Sequence: Synthetic oligonucleotide
agugauaauuccuuguuuu

SEQ ID NO: 990272 - RNA, 19 nt, Artificial Sequence
  Description of Artificial Sequence: Synthetic oligonucleotide
ugucugaucugcaaaucug

SEQ ID NO: 990273 - RNA, 19 nt, Artificial Sequence
  Description of Artificial Sequence: Synthetic oligonucleotide
ugaaagaagcccguguuug

SEQ ID NO: 990274 - RNA, 19 nt, Artificial Sequence
  Description of Artificial Sequence: Synthetic oligonucleotide
aauaaagggucacuugguu

SEQ ID NO: 990275 - RNA, 19 nt, Artificial Sequence
  Description of Artificial Sequence: Synthetic oligonucleotide
acuugaacagaguagccgu

SEQ ID NO: 990276 - RNA, 19 nt, Artificial Sequence
  Description of Artificial Sequence: Synthetic oligonucleotide
acguguucugaaugaaccc

SEQ ID NO: 990277 - RNA, 19 nt, Artificial Sequence
  Description of Artificial Sequence: Synthetic oligonucleotide
ucaauggacauuuugccuu

SEQ ID NO: 990278 - RNA, 19 nt, Artificial Sequence
  Description of Artificial Sequence: Synthetic oligonucleotide
aacagaguagccgugcucu

SEQ ID NO: 990279 - RNA, 19 nt, Artificial Sequence
  Description of Artificial Sequence: Synthetic oligonucleotide
gaccuguauguccacaucc

SEQ ID NO: 990280 - RNA, 19 nt, Artificial Sequence
  Description of Artificial Sequence: Synthetic oligonucleotide
ugcagaaauccacaauucu

SEQ ID NO: 990281 - RNA, 19 nt, Artificial Sequence
  Description of Artificial Sequence: Synthetic oligonucleotide
cuugaaaugaccuguaugu

SEQ ID NO: 990282 - RNA, 19 nt, Artificial Sequence
  Description of Artificial Sequence: Synthetic oligonucleotide
uguguuccuuguaugauaa

SEQ ID NO: 990283 - RNA, 19 nt, Artificial Sequence
  Description of Artificial Sequence: Synthetic oligonucleotide
caauucuggacuaucggug

SEQ ID NO: 990284 - RNA, 19 nt, Artificial Sequence
  Description of Artificial Sequence: Synthetic oligonucleotide
uuagugauaauuccuuguu

SEQ ID NO: 990285 - RNA, 19 nt, Artificial Sequence
  Description of Artificial Sequence: Synthetic oligonucleotide
agucaaggguccaagaggg

SEQ ID NO: 990286 - RNA, 19 nt, Artificial Sequence
  Description of Artificial Sequence: Synthetic oligonucleotide
uaugcgcaagcacaauucc

SEQ ID NO: 990287 - RNA, 19 nt, Artificial Sequence
  Description of Artificial Sequence: Synthetic oligonucleotide
aaaccuaguucgucacuuc

SEQ ID NO: 990288 - RNA, 19 nt, Artificial Sequence
  Description of Artificial Sequence: Synthetic oligonucleotide
ugacggcuuagcuucauag

SEQ ID NO: 990289 - RNA, 19 nt, Artificial Sequence
  Description of Artificial Sequence: Synthetic oligonucleotide
auaaaccaaauauugcuua

SEQ ID NO: 990290 - RNA, 19 nt, Artificial Sequence
  Description of Artificial Sequence: Synthetic oligonucleotide
ucauguguuccuuguauga

SEQ ID NO: 990291 - RNA, 19 nt, Artificial Sequence
  Description of Artificial Sequence: Synthetic oligonucleotide
ucagaagacucuuggagaa

SEQ ID NO: 990292 - RNA, 19 nt, Artificial Sequence
  Description of Artificial Sequence: Synthetic oligonucleotide
aauaaaccaaauauugcuu

SEQ ID NO: 990293 - RNA, 19 nt, Artificial Sequence
  Description of Artificial Sequence: Synthetic oligonucleotide
caaagcucggucaauggac

SEQ ID NO: 990294 - RNA, 19 nt, Artificial Sequence
  Description of Artificial Sequence: Synthetic oligonucleotide
uagcaccauguaaacaagg

SEQ ID NO: 990295 - RNA, 19 nt, Artificial Sequence
  Description of Artificial Sequence: Synthetic oligonucleotide
uccugucuugaaaugaccu

SEQ ID NO: 990296 - RNA, 19 nt, Artificial Sequence
  Description of Artificial Sequence: Synthetic oligonucleotide
accccaauguuaaacauuc

SEQ ID NO: 990297 - RNA, 19 nt, Artificial Sequence
  Description of Artificial Sequence: Synthetic oligonucleotide
gagccagacaacucuuugg

SEQ ID NO: 990298 - RNA, 19 nt, Artificial Sequence
  Description of Artificial Sequence: Synthetic oligonucleotide
ucuacggaguuugucauca

SEQ ID NO: 990299 - RNA, 19 nt, Artificial Sequence
  Description of Artificial Sequence: Synthetic oligonucleotide
gacggcuuagcuucauagg

SEQ ID NO: 990300 - RNA, 19 nt, Artificial Sequence
  Description of Artificial Sequence: Synthetic oligonucleotide
gaaauccacaauucuguca

SEQ ID NO: 990301 - RNA, 19 nt, Artificial Sequence
  Description of Artificial Sequence: Synthetic oligonucleotide
cacgugaugaaagaagccc

SEQ ID NO: 990302 - RNA, 19 nt, Artificial Sequence
  Description of Artificial Sequence: Synthetic oligonucleotide
ugucacuucaucagaguuc

SEQ ID NO: 990303 - RNA, 19 nt, Artificial Sequence
  Description of Artificial Sequence: Synthetic oligonucleotide
uccuguaaaauacuccaua

SEQ ID NO: 990304 - RNA, 19 nt, Artificial Sequence
  Description of Artificial Sequence: Synthetic oligonucleotide
auagcacuugaacagagua

SEQ ID NO: 990305 - RNA, 19 nt, Artificial Sequence
  Description of Artificial Sequence: Synthetic oligonucleotide
uucgucacuucucuucuug

SEQ ID NO: 990306 - RNA, 19 nt, Artificial Sequence
  Description of Artificial Sequence: Synthetic oligonucleotide
guuuucuauuaauguaacc

SEQ ID NO: 990307 - RNA, 19 nt, Artificial Sequence
  Description of Artificial Sequence: Synthetic oligonucleotide
ucugaucugcaaaucugca

SEQ ID NO: 990308 - RNA, 19 nt, Artificial Sequence
  Description of Artificial Sequence: Synthetic oligonucleotide
aaugccuguuuccguuaac

SEQ ID NO: 990309 - RNA, 19 nt, Artificial Sequence
  Description of Artificial Sequence: Synthetic oligonucleotide
gaugugagaaggcucccug

SEQ ID NO: 990310 - RNA, 19 nt, Artificial Sequence
  Description of Artificial Sequence: Synthetic oligonucleotide
cacggauuagugauaauuc

SEQ ID NO: 990311 - RNA, 19 nt, Artificial Sequence
  Description of Artificial Sequence: Synthetic oligonucleotide
acaagcaugcagcgcgacc

SEQ ID NO: 990312 - RNA, 19 nt, Artificial Sequence
  Description of Artificial Sequence: Synthetic oligonucleotide
gaaaugaccuguaugucca

SEQ ID NO: 990313 - RNA, 19 nt, Artificial Sequence
  Description of Artificial Sequence: Synthetic oligonucleotide
aguaagacaccaagaacuc

SEQ ID NO: 990314 - RNA, 19 nt, Artificial Sequence
  Description of Artificial Sequence: Synthetic oligonucleotide
aaccuaguucgucacuucu

SEQ ID NO: 990315 - RNA, 19 nt, Artificial Sequence
  Description of Artificial Sequence: Synthetic oligonucleotide
acaacggcaaguccugcuc

SEQ ID NO: 990316 - RNA, 19 nt, Artificial Sequence
  Description of Artificial Sequence: Synthetic oligonucleotide
aagccaguggcaaaacauc

SEQ ID NO: 990317 - RNA, 19 nt, Artificial Sequence
  Description of Artificial Sequence: Synthetic oligonucleotide
ggauggugaguucacauag

SEQ ID NO: 990318 - RNA, 19 nt, Artificial Sequence
  Description of Artificial Sequence: Synthetic oligonucleotide
acggcuuagcuucauagga

SEQ ID NO: 990319 - RNA, 19 nt, Artificial Sequence
  Description of Artificial Sequence: Synthetic oligonucleotide
auaugcgcaagcacaauuc

SEQ ID NO: 990320 - RNA, 19 nt, Artificial Sequence
  Description of Artificial Sequence: Synthetic oligonucleotide
ugugucuugcauugugagc

SEQ ID NO: 990321 - RNA, 19 nt, Artificial Sequence
  Description of Artificial Sequence: Synthetic oligonucleotide
accagguuuggcuugauuu

SEQ ID NO: 990322 - RNA, 19 nt, Artificial Sequence
  Description of Artificial Sequence: Synthetic oligonucleotide
ucagaacaacggcaagucc

SEQ ID NO: 990323 - RNA, 19 nt, Artificial Sequence
  Description of Artificial Sequence: Synthetic oligonucleotide
aucauguguuccuuguaug

SEQ ID NO: 990324 - RNA, 19 nt, Artificial Sequence
  Description of Artificial Sequence: Synthetic oligonucleotide
aaaucugcacagaaucaug

SEQ ID NO: 990325 - RNA, 19 nt, Artificial Sequence
  Description of Artificial Sequence: Synthetic oligonucleotide
agagcaagagccucauucu

SEQ ID NO: 990326 - RNA, 19 nt, Artificial Sequence
  Description of Artificial Sequence: Synthetic oligonucleotide
uuaugugucucagaacaac

SEQ ID NO: 990327 - RNA, 19 nt, Artificial Sequence
  Description of Artificial Sequence: Synthetic oligonucleotide
aagcaugcagcgcgacccc

SEQ ID NO: 990328 - RNA, 19 nt, Artificial Sequence
  Description of Artificial Sequence: Synthetic oligonucleotide
ugcuugaauaaaccaaaua

SEQ ID NO: 990329 - RNA, 19 nt, Artificial Sequence
  Description of Artificial Sequence: Synthetic oligonucleotide
cacaauguccgccaaggug

SEQ ID NO: 990330 - RNA, 19 nt, Artificial Sequence
  Description of Artificial Sequence: Synthetic oligonucleotide
ugguuuacuuucagaauuc

SEQ ID NO: 990331 - RNA, 19 nt, Artificial Sequence
  Description of Artificial Sequence: Synthetic oligonucleotide
guaaacaagguuguuuaac

SEQ ID NO: 990332 - RNA, 19 nt, Artificial Sequence
  Description of Artificial Sequence: Synthetic oligonucleotide
cauuguguacucugacagg

SEQ ID NO: 990333 - RNA, 19 nt, Artificial Sequence
  Description of Artificial Sequence: Synthetic oligonucleotide
uuuugggcugacagcagca

SEQ ID NO: 990334 - RNA, 19 nt, Artificial Sequence
  Description of Artificial Sequence: Synthetic oligonucleotide
cagcaauucuggacuaucg

SEQ ID NO: 990335 - RNA, 19 nt, Artificial Sequence
  Description of Artificial Sequence: Synthetic oligonucleotide
ugcagcgcgaccccaaugu

SEQ ID NO: 990336 - RNA, 19 nt, Artificial Sequence
  Description of Artificial Sequence: Synthetic oligonucleotide
auuugcuugaauaaaccaa

SEQ ID NO: 990337 - RNA, 19 nt, Artificial Sequence
  Description of Artificial Sequence: Synthetic oligonucleotide
uuaauguaaccuggcaaga

SEQ ID NO: 990338 - RNA, 19 nt, Artificial Sequence
  Description of Artificial Sequence: Synthetic oligonucleotide
caagcaugcagcgcgaccc

SEQ ID NO: 990339 - RNA, 19 nt, Artificial Sequence
  Description of Artificial Sequence: Synthetic oligonucleotide
gguuguuuaacuguugcug

SEQ ID NO: 990340 - RNA, 19 nt, Artificial Sequence
  Description of Artificial Sequence: Synthetic oligonucleotide
uguuuggacgcagugcuca

SEQ ID NO: 990341 - RNA, 19 nt, Artificial Sequence
  Description of Artificial Sequence: Synthetic oligonucleotide
acuccacaagcaugcagcg

SEQ ID NO: 990342 - RNA, 19 nt, Artificial Sequence
  Description of Artificial Sequence: Synthetic oligonucleotide
ugugguuuacuuucagaau

SEQ ID NO: 990343 - RNA, 19 nt, Artificial Sequence
  Description of Artificial Sequence: Synthetic oligonucleotide
aguagccgugcucuuccgc

SEQ ID NO: 990344 - RNA, 19 nt, Artificial Sequence
  Description of Artificial Sequence: Synthetic oligonucleotide
uaguucgucacuucucuuc

SEQ ID NO: 990345 - RNA, 19 nt, Artificial Sequence
  Description of Artificial Sequence: Synthetic oligonucleotide
ucuaaacggggacacccac

SEQ ID NO: 990346 - RNA, 19 nt, Artificial Sequence
  Description of Artificial Sequence: Synthetic oligonucleotide
uccuuguaugauaaaguuu

SEQ ID NO: 990347 - RNA, 19 nt, Artificial Sequence
  Description of Artificial Sequence: Synthetic oligonucleotide
uaguuccagacucuuggac

SEQ ID NO: 990348 - RNA, 19 nt, Artificial Sequence
  Description of Artificial Sequence: Synthetic oligonucleotide
acauuccuguaaaauacuc

SEQ ID NO: 990349 - RNA, 19 nt, Artificial Sequence
  Description of Artificial Sequence: Synthetic oligonucleotide
uugcuacuccacaagcaug

SEQ ID NO: 990350 - RNA, 19 nt, Artificial Sequence
  Description of Artificial Sequence: Synthetic oligonucleotide
acgugaugaaagaagcccg

SEQ ID NO: 990351 - RNA, 19 nt, Artificial Sequence
  Description of Artificial Sequence: Synthetic oligonucleotide
ucaaggguccaagagggac

SEQ ID NO: 990352 - RNA, 19 nt, Artificial Sequence
  Description of Artificial Sequence: Synthetic oligonucleotide
aguucgucacuucucuucu

SEQ ID NO: 990353 - RNA, 19 nt, Artificial Sequence
  Description of Artificial Sequence: Synthetic oligonucleotide
uggacuaucggugggacau

SEQ ID NO: 990354 - RNA, 19 nt, Artificial Sequence
  Description of Artificial Sequence: Synthetic oligonucleotide
accaccgcaggcaagcagc

SEQ ID NO: 990355 - RNA, 19 nt, Artificial Sequence
  Description of Artificial Sequence: Synthetic oligonucleotide
ugucuguugcuacuccaca

SEQ ID NO: 990356 - RNA, 19 nt, Artificial Sequence
  Description of Artificial Sequence: Synthetic oligonucleotide
uuucuugacggcuuagcuu

SEQ ID NO: 990357 - RNA, 19 nt, Artificial Sequence
  Description of Artificial Sequence: Synthetic oligonucleotide
cugugucuugcauugugag

SEQ ID NO: 990358 - RNA, 19 nt, Artificial Sequence
  Description of Artificial Sequence: Synthetic oligonucleotide
agaauucagcaauucuggu

SEQ ID NO: 990359 - RNA, 19 nt, Artificial Sequence
  Description of Artificial Sequence: Synthetic oligonucleotide
uccugaauccucugauacc

SEQ ID NO: 990360 - RNA, 19 nt, Artificial Sequence
  Description of Artificial Sequence: Synthetic oligonucleotide
gacauccugucuugaaaug

SEQ ID NO: 990361 - RNA, 19 nt, Artificial Sequence
  Description of Artificial Sequence: Synthetic oligonucleotide
aucggugggacauccuguc

SEQ ID NO: 990362 - RNA, 19 nt, Artificial Sequence
  Description of Artificial Sequence: Synthetic oligonucleotide
aaguugaacuuggacgugu

SEQ ID NO: 990363 - RNA, 19 nt, Artificial Sequence
  Description of Artificial Sequence: Synthetic oligonucleotide
uguaaacaagguuguuuaa

SEQ ID NO: 990364 - RNA, 19 nt, Artificial Sequence
  Description of Artificial Sequence: Synthetic oligonucleotide
aauauugcuuaaaccuagu

SEQ ID NO: 990365 - RNA, 19 nt, Artificial Sequence
  Description of Artificial Sequence: Synthetic oligonucleotide
agacucuuggacgagccag

SEQ ID NO: 990366 - RNA, 19 nt, Artificial Sequence
  Description of Artificial Sequence: Synthetic oligonucleotide
acaggcuuuaagacaaguc

SEQ ID NO: 990367 - RNA, 19 nt, Artificial Sequence
  Description of Artificial Sequence: Synthetic oligonucleotide
uucuaaacggggacaccca

SEQ ID NO: 990368 - RNA, 19 nt, Artificial Sequence
  Description of Artificial Sequence: Synthetic oligonucleotide
ugaacagaguagccgugcu

SEQ ID NO: 990369 - RNA, 19 nt, Artificial Sequence
  Description of Artificial Sequence: Synthetic oligonucleotide
ugcggagaaaacauugcuu

SEQ ID NO: 990370 - RNA, 19 nt, Artificial Sequence
  Description of Artificial Sequence: Synthetic oligonucleotide
cuuuagcuucugucuacgg

SEQ ID NO: 990371 - RNA, 19 nt, Artificial Sequence
  Description of Artificial Sequence: Synthetic oligonucleotide
uccauagauagcacuugaa

SEQ ID NO: 990372 - RNA, 19 nt, Artificial Sequence
  Description of Artificial Sequence: Synthetic oligonucleotide
augaacccguagcagcagg

SEQ ID NO: 990373 - RNA, 19 nt, Artificial Sequence
  Description of Artificial Sequence: Synthetic oligonucleotide
uucaaugccuguuuccguu

SEQ ID NO: 990374 - RNA, 19 nt, Artificial Sequence
  Description of Artificial Sequence: Synthetic oligonucleotide
cuauuaauguaaccuggca

SEQ ID NO: 990375 - RNA, 19 nt, Artificial Sequence
  Description of Artificial Sequence: Synthetic oligonucleotide
gacgcagugcucaaucacc

SEQ ID NO: 990376 - RNA, 19 nt, Artificial Sequence
  Description of Artificial Sequence: Synthetic oligonucleotide
gugaaguacaguccuucug

SEQ ID NO: 990377 - RNA, 19 nt, Artificial Sequence
  Description of Artificial Sequence: Synthetic oligonucleotide
cuaucggugggacauccug

SEQ ID NO: 990378 - RNA, 19 nt, Artificial Sequence
  Description of Artificial Sequence: Synthetic oligonucleotide
uagugauaauuccuuguuu

SEQ ID NO: 990379 - RNA, 19 nt, Artificial Sequence
  Description of Artificial Sequence: Synthetic oligonucleotide
uuggacgcagugcucaauc

SEQ ID NO: 990380 - RNA, 19 nt, Artificial Sequence
  Description of Artificial Sequence: Synthetic oligonucleotide
uaucggugggacauccugu

SEQ ID NO: 990381 - RNA, 19 nt, Artificial Sequence
  Description of Artificial Sequence: Synthetic oligonucleotide
gcugucuuuacuuuuggca

SEQ ID NO: 990382 - RNA, 19 nt, Artificial Sequence
  Description of Artificial Sequence: Synthetic oligonucleotide
ugcgcgguccauauccacc

SEQ ID NO: 990383 - RNA, 19 nt, Artificial Sequence
  Description of Artificial Sequence: Synthetic oligonucleotide
aaagcucggucaauggaca

SEQ ID NO: 990384 - RNA, 19 nt, Artificial Sequence
  Description of Artificial Sequence: Synthetic oligonucleotide
cugucuacggaguuuguca

SEQ ID NO: 990385 - RNA, 19 nt, Artificial Sequence
  Description of Artificial Sequence: Synthetic oligonucleotide
acucuuggagaaaauucuc

SEQ ID NO: 990386 - RNA, 19 nt, Artificial Sequence
  Description of Artificial Sequence: Synthetic oligonucleotide
gugauaauuccuuguuuuc

SEQ ID NO: 990387 - RNA, 19 nt, Artificial Sequence
  Description of Artificial Sequence: Synthetic oligonucleotide
uaaaccuaguucgucacuu

SEQ ID NO: 990388 - RNA, 19 nt, Artificial Sequence
  Description of Artificial Sequence: Synthetic oligonucleotide
uggugaguucacauagccu

SEQ ID NO: 990389 - RNA, 19 nt, Artificial Sequence
  Description of Artificial Sequence: Synthetic oligonucleotide
augccccugggcuuucacc

SEQ ID NO: 990390 - RNA, 19 nt, Artificial Sequence
  Description of Artificial Sequence: Synthetic oligonucleotide
gaagcccguguuuggacgc

SEQ ID NO: 990391 - RNA, 19 nt, Artificial Sequence
  Description of Artificial Sequence: Synthetic oligonucleotide
agguuguuuaacuguugcu

SEQ ID NO: 990392 - RNA, 19 nt, Artificial Sequence
  Description of Artificial Sequence: Synthetic oligonucleotide
uuucagaauucagcaauuc

SEQ ID NO: 990393 - RNA, 19 nt, Artificial Sequence
  Description of Artificial Sequence: Synthetic oligonucleotide
aaugaccuguauguccaca

SEQ ID NO: 990394 - RNA, 19 nt, Artificial Sequence
  Description of Artificial Sequence: Synthetic oligonucleotide
aaguacaguccuucugcaa

SEQ ID NO: 990395 - RNA, 19 nt, Artificial Sequence
  Description of Artificial Sequence: Synthetic oligonucleotide
cugaaugaacccguagcag

SEQ ID NO: 990396 - RNA, 19 nt, Artificial Sequence
  Description of Artificial Sequence: Synthetic oligonucleotide
ugucuacggaguuugucau

SEQ ID NO: 990397 - RNA, 19 nt, Artificial Sequence
  Description of Artificial Sequence: Synthetic oligonucleotide
cugcucuacagaaaacauc

SEQ ID NO: 990398 - RNA, 19 nt, Artificial Sequence
  Description of Artificial Sequence: Synthetic oligonucleotide
uugcuuaaaccuaguucgu

SEQ ID NO: 990399 - RNA, 19 nt, Artificial Sequence
  Description of Artificial Sequence: Synthetic oligonucleotide
ugcugucuuuacuuuuggc

SEQ ID NO: 990400 - RNA, 19 nt, Artificial Sequence
  Description of Artificial Sequence: Synthetic oligonucleotide
aagggugcggagaaaacau

SEQ ID NO: 990401 - RNA, 19 nt, Artificial Sequence
  Description of Artificial Sequence: Synthetic oligonucleotide
gucugaucugcaaaucugc

SEQ ID NO: 990402 - RNA, 19 nt, Artificial Sequence
  Description of Artificial Sequence: Synthetic oligonucleotide
uuagcaggggaaacugcuc

SEQ ID NO: 990403 - RNA, 19 nt, Artificial Sequence
  Description of Artificial Sequence: Synthetic oligonucleotide
uucccuugccagagggagg

SEQ ID NO: 990404 - RNA, 19 nt, Artificial Sequence
  Description of Artificial Sequence: Synthetic oligonucleotide
auauugcuuaaaccuaguu

SEQ ID NO: 990405 - RNA, 19 nt, Artificial Sequence
  Description of Artificial Sequence: Synthetic oligonucleotide
guuccagacucuuggacga

SEQ ID NO: 990406 - RNA, 19 nt, Artificial Sequence
  Description of Artificial Sequence: Synthetic oligonucleotide
cuuguaugauaaaguuuuc

SEQ ID NO: 990407 - RNA, 19 nt, Artificial Sequence
  Description of Artificial Sequence: Synthetic oligonucleotide
uuggacgagccagacaacu

SEQ ID NO: 990408 - RNA, 19 nt, Artificial Sequence
  Description of Artificial Sequence: Synthetic oligonucleotide
aaugccaccuuuaguucca

SEQ ID NO: 990409 - RNA, 19 nt, Artificial Sequence
  Description of Artificial Sequence: Synthetic oligonucleotide
ucuugguccuccuguaaau

SEQ ID NO: 990410 - RNA, 19 nt, Artificial Sequence
  Description of Artificial Sequence: Synthetic oligonucleotide
gaauccucugauaccaaga

SEQ ID NO: 990411 - RNA, 19 nt, Artificial Sequence
  Description of Artificial Sequence: Synthetic oligonucleotide
agugcucaaucaccauguc

SEQ ID NO: 990412 - RNA, 19 nt, Artificial Sequence
  Description of Artificial Sequence: Synthetic oligonucleotide
gcagaaauccacaauucug

SEQ ID NO: 990413 - RNA, 19 nt, Artificial Sequence
  Description of Artificial Sequence: Synthetic oligonucleotide
uuccuguaaaauacuccau

SEQ ID NO: 990414 - RNA, 19 nt, Artificial Sequence
  Description of Artificial Sequence: Synthetic oligonucleotide
uugaaaugaccuguauguc

SEQ ID NO: 990415 - RNA, 19 nt, Artificial Sequence
  Description of Artificial Sequence: Synthetic oligonucleotide
gauggugaguucacauagc

SEQ ID NO: 990416 - RNA, 19 nt, Artificial Sequence
  Description of Artificial Sequence: Synthetic oligonucleotide
ggguccaagagggacaagg

SEQ ID NO: 990417 - RNA, 19 nt, Artificial Sequence
  Description of Artificial Sequence: Synthetic oligonucleotide
caggcuuuaagacaagucu

SEQ ID NO: 990418 - RNA, 19 nt, Artificial Sequence
  Description of Artificial Sequence: Synthetic oligonucleotide
aaggcagcauaugcgcaag

SEQ ID NO: 990419 - RNA, 19 nt, Artificial Sequence
  Description of Artificial Sequence: Synthetic oligonucleotide
ugcacagaaucauguguuc

SEQ ID NO: 990420 - RNA, 19 nt, Artificial Sequence
  Description of Artificial Sequence: Synthetic oligonucleotide
uuccucaaagcucggucaa

SEQ ID NO: 990421 - RNA, 19 nt, Artificial Sequence
  Description of Artificial Sequence: Synthetic oligonucleotide
cuuccucaaagcucgguca

SEQ ID NO: 990422 - RNA, 19 nt, Artificial Sequence
  Description of Artificial Sequence: Synthetic oligonucleotide
auaggauuucuggauuaug

SEQ ID NO: 990423 - RNA, 19 nt, Artificial Sequence
  Description of Artificial Sequence: Synthetic oligonucleotide
cagaaucauguguuccuug

SEQ ID NO: 990424 - RNA, 19 nt, Artificial Sequence
  Description of Artificial Sequence: Synthetic oligonucleotide
gaaggcagcauaugcgcaa

SEQ ID NO: 990425 - RNA, 19 nt, Artificial Sequence
  Description of Artificial Sequence: Synthetic oligonucleotide
agcaccauguaaacaaggu

SEQ ID NO: 990426 - RNA, 19 nt, Artificial Sequence
  Description of Artificial Sequence: Synthetic oligonucleotide
gcuuaaaccuaguucguca

SEQ ID NO: 990427 - RNA, 19 nt, Artificial Sequence
  Description of Artificial Sequence: Synthetic oligonucleotide
uguacucugacaggcucac

SEQ ID NO: 990428 - RNA, 19 nt, Artificial Sequence
  Description of Artificial Sequence: Synthetic oligonucleotide
guacaguccuucugcaaac

SEQ ID NO: 990429 - RNA, 19 nt, Artificial Sequence
  Description of Artificial Sequence: Synthetic oligonucleotide
gaacccguagcagcagggg

SEQ ID NO: 990430 - RNA, 19 nt, Artificial Sequence
  Description of Artificial Sequence: Synthetic oligonucleotide
uuguguacucugacaggcu

SEQ ID NO: 990431 - RNA, 19 nt, Artificial Sequence
  Description of Artificial Sequence: Synthetic oligonucleotide
cagaacaacggcaaguccu

SEQ ID NO: 990432 - RNA, 19 nt, Artificial Sequence
  Description of Artificial Sequence: Synthetic oligonucleotide
augaaagaagcccguguuu

SEQ ID NO: 990433 - RNA, 19 nt, Artificial Sequence
  Description of Artificial Sequence: Synthetic oligonucleotide
agguuuggcuugauuuagc

SEQ ID NO: 990434 - RNA, 19 nt, Artificial Sequence
  Description of Artificial Sequence: Synthetic oligonucleotide
caagcacaauuccaacaug

SEQ ID NO: 990435 - RNA, 19 nt, Artificial Sequence
  Description of Artificial Sequence: Synthetic oligonucleotide
gugguuuacuuucagaauu

SEQ ID NO: 990436 - RNA, 19 nt, Artificial Sequence
  Description of Artificial Sequence: Synthetic oligonucleotide
ggcacgugaugaaagaagc

SEQ ID NO: 990437 - RNA, 19 nt, Artificial Sequence
  Description of Artificial Sequence: Synthetic oligonucleotide
auguguuccuuguaugaua

SEQ ID NO: 990438 - RNA, 19 nt, Artificial Sequence
  Description of Artificial Sequence: Synthetic oligonucleotide
gacuaucggugggacaucc

SEQ ID NO: 990439 - RNA, 19 nt, Artificial Sequence
  Description of Artificial Sequence: Synthetic oligonucleotide
uucaggugugguuuacuuu

SEQ ID NO: 990440 - RNA, 19 nt, Artificial Sequence
  Description of Artificial Sequence: Synthetic oligonucleotide
uguucugaaugaacccgua

SEQ ID NO: 990441 - RNA, 19 nt, Artificial Sequence
  Description of Artificial Sequence: Synthetic oligonucleotide
gagcugaacagcugucuga

SEQ ID NO: 990442 - RNA, 19 nt, Artificial Sequence
  Description of Artificial Sequence: Synthetic oligonucleotide
gccaccuuuaguuccagac

SEQ ID NO: 990443 - RNA, 19 nt, Artificial Sequence
  Description of Artificial Sequence: Synthetic oligonucleotide
uacggaguuugucaucauu

SEQ ID NO: 990444 - RNA, 19 nt, Artificial Sequence
  Description of Artificial Sequence: Synthetic oligonucleotide
ggcaaguccugcucuacag

SEQ ID NO: 990445 - RNA, 19 nt, Artificial Sequence
  Description of Artificial Sequence: Synthetic oligonucleotide
ucugucuacggaguuuguc

SEQ ID NO: 990446 - RNA, 19 nt, Artificial Sequence
  Description of Artificial Sequence: Synthetic oligonucleotide
aggcagcauaugcgcaagc

SEQ ID NO: 990447 - RNA, 19 nt, Artificial Sequence
  Description of Artificial Sequence: Synthetic oligonucleotide
gagccucauucuaaacggg

SEQ ID NO: 990448 - RNA, 19 nt, Artificial Sequence
  Description of Artificial Sequence: Synthetic oligonucleotide
uggacgcagugcucaauca

SEQ ID NO: 990449 - RNA, 19 nt, Artificial Sequence
  Description of Artificial Sequence: Synthetic oligonucleotide
gucacuugguuccucuaca

SEQ ID NO: 990450 - RNA, 19 nt, Artificial Sequence
  Description of Artificial Sequence: Synthetic oligonucleotide
gaacagaguagccgugcuc

SEQ ID NO: 990451 - RNA, 19 nt, Artificial Sequence
  Description of Artificial Sequence: Synthetic oligonucleotide
accgcaggcaagcagcaau

SEQ ID NO: 990452 - RNA, 19 nt, Artificial Sequence
  Description of Artificial Sequence: Synthetic oligonucleotide
agccgugcucuuccgcagc

SEQ ID NO: 990453 - RNA, 19 nt, Artificial Sequence
  Description of Artificial Sequence: Synthetic oligonucleotide
ugcuuaaaccuaguucguc

SEQ ID NO: 990454 - RNA, 19 nt, Artificial Sequence
  Description of Artificial Sequence: Synthetic oligonucleotide
guagccgugcucuuccgca

SEQ ID NO: 990455 - RNA, 19 nt, Artificial Sequence
  Description of Artificial Sequence: Synthetic oligonucleotide
ggauuucuggauuaugugu

SEQ ID NO: 990456 - RNA, 19 nt, Artificial Sequence
  Description of Artificial Sequence: Synthetic oligonucleotide
gucaauggacauuuugccu

SEQ ID NO: 990457 - RNA, 19 nt, Artificial Sequence
  Description of Artificial Sequence: Synthetic oligonucleotide
accuaguucgucacuucuc

SEQ ID NO: 990458 - RNA, 19 nt, Artificial Sequence
  Description of Artificial Sequence: Synthetic oligonucleotide
auacuccauauuugcuuga

SEQ ID NO: 990459 - RNA, 19 nt, Artificial Sequence
  Description of Artificial Sequence: Synthetic oligonucleotide
cggucaauggacauuuugc

SEQ ID NO: 990460 - RNA, 19 nt, Artificial Sequence
  Description of Artificial Sequence: Synthetic oligonucleotide
ccaguggcaaaacaucaag

SEQ ID NO: 990461 - RNA, 19 nt, Artificial Sequence
  Description of Artificial Sequence: Synthetic oligonucleotide
cuucauaggauuucuggau

SEQ ID NO: 990462 - RNA, 19 nt, Artificial Sequence
  Description of Artificial Sequence: Synthetic oligonucleotide
accaagagguuagcagggg

SEQ ID NO: 990463 - RNA, 19 nt, Artificial Sequence
  Description of Artificial Sequence: Synthetic oligonucleotide
gguaucagcugugucuugc

SEQ ID NO: 990464 - RNA, 19 nt, Artificial Sequence
  Description of Artificial Sequence: Synthetic oligonucleotide
ucuggacuaucggugggac

SEQ ID NO: 990465 - RNA, 19 nt, Artificial Sequence
  Description of Artificial Sequence: Synthetic oligonucleotide
ccuaugagucuucucuggg

SEQ ID NO: 990466 - RNA, 19 nt, Artificial Sequence
  Description of Artificial Sequence: Synthetic oligonucleotide
uucuggacuaucgguggga

SEQ ID NO: 990467 - RNA, 19 nt, Artificial Sequence
  Description of Artificial Sequence: Synthetic oligonucleotide
guuugucaucauuguguac

SEQ ID NO: 990468 - RNA, 19 nt, Artificial Sequence
  Description of Artificial Sequence: Synthetic oligonucleotide
ugaguucacauagccuggu

SEQ ID NO: 990469 - RNA, 19 nt, Artificial Sequence
  Description of Artificial Sequence: Synthetic oligonucleotide
cacauagccugguccacuc

SEQ ID NO: 990470 - RNA, 19 nt, Artificial Sequence
  Description of Artificial Sequence: Synthetic oligonucleotide
ucaaugccuguuuccguua

SEQ ID NO: 990471 - RNA, 19 nt, Artificial Sequence
  Description of Artificial Sequence: Synthetic oligonucleotide
cuguuccagucaagggucc

SEQ ID NO: 990472 - RNA, 19 nt, Artificial Sequence
  Description of Artificial Sequence: Synthetic oligonucleotide
aagcucggucaauggacau

SEQ ID NO: 990473 - RNA, 19 nt, Artificial Sequence
  Description of Artificial Sequence: Synthetic oligonucleotide
ggauuaugugucucagaac

SEQ ID NO: 990474 - RNA, 19 nt, Artificial Sequence
  Description of Artificial Sequence: Synthetic oligonucleotide
aacggcaaguccugcucua

SEQ ID NO: 990475 - RNA, 19 nt, Artificial Sequence
  Description of Artificial Sequence: Synthetic oligonucleotide
gaguagccgugcucuuccg

SEQ ID NO: 990476 - RNA, 19 nt, Artificial Sequence
  Description of Artificial Sequence: Synthetic oligonucleotide
guaaccuggcaagaaggca

SEQ ID NO: 990477 - RNA, 19 nt, Artificial Sequence
  Description of Artificial Sequence: Synthetic oligonucleotide
acuccauauuugcuugaau

SEQ ID NO: 990478 - RNA, 19 nt, Artificial Sequence
  Description of Artificial Sequence: Synthetic oligonucleotide
ugggacauccugucuugaa

SEQ ID NO: 990479 - RNA, 19 nt, Artificial Sequence
  Description of Artificial Sequence: Synthetic oligonucleotide
ucacauagccugguccacu

SEQ ID NO: 990480 - RNA, 19 nt, Artificial Sequence
  Description of Artificial Sequence: Synthetic oligonucleotide
aauggacauuuugccuucu

SEQ ID NO: 990481 - RNA, 19 nt, Artificial Sequence
  Description of Artificial Sequence: Synthetic oligonucleotide
ucuugacggcuuagcuuca

SEQ ID NO: 990482 - RNA, 19 nt, Artificial Sequence
  Description of Artificial Sequence: Synthetic oligonucleotide
cuuccgcagcgguugcgcg

SEQ ID NO: 990483 - RNA, 19 nt, Artificial Sequence
  Description of Artificial Sequence: Synthetic oligonucleotide
uagccgugcucuuccgcag

SEQ ID NO: 990484 - RNA, 19 nt, Artificial Sequence
  Description of Artificial Sequence: Synthetic oligonucleotide
gugagcuuugagaaugcca

SEQ ID NO: 990485 - RNA, 19 nt, Artificial Sequence
  Description of Artificial Sequence: Synthetic oligonucleotide
cucauucuaaacggggaca

SEQ ID NO: 990486 - RNA, 19 nt, Artificial Sequence
  Description of Artificial Sequence: Synthetic oligonucleotide
agcugaacagcugucugau

SEQ ID NO: 990487 - RNA, 19 nt, Artificial Sequence
  Description of Artificial Sequence: Synthetic oligonucleotide
aggcuuuaagacaagucuu

SEQ ID NO: 990488 - RNA, 19 nt, Artificial Sequence
  Description of Artificial Sequence: Synthetic oligonucleotide
ugucaucauuguguacucu

SEQ ID NO: 990489 - RNA, 19 nt, Artificial Sequence
  Description of Artificial Sequence: Synthetic oligonucleotide
gugaugaaagaagcccgug

SEQ ID NO: 990490 - RNA, 19 nt, Artificial Sequence
  Description of Artificial Sequence: Synthetic oligonucleotide
cuggcaagaaggcagcaua

SEQ ID NO: 990491 - RNA, 19 nt, Artificial Sequence
  Description of Artificial Sequence: Synthetic oligonucleotide
gaaggcucccuguugguau

SEQ ID NO: 990492 - RNA, 19 nt, Artificial Sequence
  Description of Artificial Sequence: Synthetic oligonucleotide
gcagcauaugcgcaagcac

SEQ ID NO: 990493 - RNA, 19 nt, Artificial Sequence
  Description of Artificial Sequence: Synthetic oligonucleotide
auuaugugucucagaacaa

SEQ ID NO: 990494 - RNA, 19 nt, Artificial Sequence
  Description of Artificial Sequence: Synthetic oligonucleotide
ccugucuugaaaugaccug

SEQ ID NO: 990495 - RNA, 19 nt, Artificial Sequence
  Description of Artificial Sequence: Synthetic oligonucleotide
ggugcggagaaaacauugc

SEQ ID NO: 990496 - RNA, 19 nt, Artificial Sequence
  Description of Artificial Sequence: Synthetic oligonucleotide
agcauaugcgcaagcacaa

SEQ ID NO: 990497 - RNA, 19 nt, Artificial Sequence
  Description of Artificial Sequence: Synthetic oligonucleotide
cguguucugaaugaacccg

SEQ ID NO: 990498 - RNA, 19 nt, Artificial Sequence
  Description of Artificial Sequence: Synthetic oligonucleotide
ucggugggacauccugucu

SEQ ID NO: 990499 - RNA, 19 nt, Artificial Sequence
  Description of Artificial Sequence: Synthetic oligonucleotide
gggcacgugaugaaagaag

SEQ ID NO: 990500 - RNA, 19 nt, Artificial Sequence
  Description of Artificial Sequence: Synthetic oligonucleotide
acggcaaguccugcucuac

SEQ ID NO: 990501 - RNA, 19 nt, Artificial Sequence
  Description of Artificial Sequence: Synthetic oligonucleotide
agaguucaggugugguuua

SEQ ID NO: 990502 - RNA, 19 nt, Artificial Sequence
  Description of Artificial Sequence: Synthetic oligonucleotide
gagcaagagccucauucua

SEQ ID NO: 990503 - RNA, 19 nt, Artificial Sequence
  Description of Artificial Sequence: Synthetic oligonucleotide
gggugcggagaaaacauug

SEQ ID NO: 990504 - RNA, 19 nt, Artificial Sequence
  Description of Artificial Sequence: Synthetic oligonucleotide
ucugugcaccagccuugcc

SEQ ID NO: 990505 - RNA, 19 nt, Artificial Sequence
  Description of Artificial Sequence: Synthetic oligonucleotide
gaaggcuguuccagucaag

SEQ ID NO: 990506 - RNA, 19 nt, Artificial Sequence
  Description of Artificial Sequence: Synthetic oligonucleotide
cuuggacgagccagacaac

SEQ ID NO: 990507 - RNA, 19 nt, Artificial Sequence
  Description of Artificial Sequence: Synthetic oligonucleotide
uugacggcuuagcuucaua

SEQ ID NO: 990508 - RNA, 19 nt, Artificial Sequence
  Description of Artificial Sequence: Synthetic oligonucleotide
cccgccacugcagaaaucc

SEQ ID NO: 990509 - RNA, 19 nt, Artificial Sequence
  Description of Artificial Sequence: Synthetic oligonucleotide
uucugucuacggaguuugu

SEQ ID NO: 990510 - RNA, 19 nt, Artificial Sequence
  Description of Artificial Sequence: Synthetic oligonucleotide
cuggauuaugugucucaga

SEQ ID NO: 990511 - RNA, 19 nt, Artificial Sequence
  Description of Artificial Sequence: Synthetic oligonucleotide
ugguaucagcugugucuug

SEQ ID NO: 990512 - RNA, 19 nt, Artificial Sequence
  Description of Artificial Sequence: Synthetic oligonucleotide
ccagacucuuggacgagcc

SEQ ID NO: 990513 - RNA, 19 nt, Artificial Sequence
  Description of Artificial Sequence: Synthetic oligonucleotide
ggagaaaacauugcuucaa

SEQ ID NO: 990514 - RNA, 19 nt, Artificial Sequence
  Description of Artificial Sequence: Synthetic oligonucleotide
agcgcgaccccaauguuaa

SEQ ID NO: 990515 - RNA, 19 nt, Artificial Sequence
  Description of Artificial Sequence: Synthetic oligonucleotide
agaggcggaagggcagagg

SEQ ID NO: 990516 - RNA, 19 nt, Artificial Sequence
  Description of Artificial Sequence: Synthetic oligonucleotide
acuggucagaagacucuug

SEQ ID NO: 990517 - RNA, 19 nt, Artificial Sequence
  Description of Artificial Sequence: Synthetic oligonucleotide
ggacgcagugcucaaucac

SEQ ID NO: 990518 - RNA, 19 nt, Artificial Sequence
  Description of Artificial Sequence: Synthetic oligonucleotide
cuugcauugugagcuuuga

SEQ ID NO: 990519 - RNA, 19 nt, Artificial Sequence
  Description of Artificial Sequence: Synthetic oligonucleotide
gagggacaagggugcggag

SEQ ID NO: 990520 - RNA, 19 nt, Artificial Sequence
  Description of Artificial Sequence: Synthetic oligonucleotide
augcgcaagcacaauucca

SEQ ID NO: 990521 - RNA, 19 nt, Artificial Sequence
  Description of Artificial Sequence: Synthetic oligonucleotide
gugcggagaaaacauugcu

SEQ ID NO: 990522 - RNA, 19 nt, Artificial Sequence
  Description of Artificial Sequence: Synthetic oligonucleotide
uuccguuaacuuggucaug

SEQ ID NO: 990523 - RNA, 19 nt, Artificial Sequence
  Description of Artificial Sequence: Synthetic oligonucleotide
cugaugugagaaggcuccc

SEQ ID NO: 990524 - RNA, 19 nt, Artificial Sequence
  Description of Artificial Sequence: Synthetic oligonucleotide
gagguuagcaggggaaacu

SEQ ID NO: 990525 - RNA, 19 nt, Artificial Sequence
  Description of Artificial Sequence: Synthetic oligonucleotide
uugcgcgguccauauccac

SEQ ID NO: 990526 - RNA, 19 nt, Artificial Sequence
  Description of Artificial Sequence: Synthetic oligonucleotide
uguccgccaaggugaagua

SEQ ID NO: 990527 - RNA, 19 nt, Artificial Sequence
  Description of Artificial Sequence: Synthetic oligonucleotide
acccguagcagcaggggca

SEQ ID NO: 990528 - RNA, 19 nt, Artificial Sequence
  Description of Artificial Sequence: Synthetic oligonucleotide
ggggacacccacaaucaug

SEQ ID NO: 990529 - RNA, 19 nt, Artificial Sequence
  Description of Artificial Sequence: Synthetic oligonucleotide
gauagcacuugaacagagu

SEQ ID NO: 990530 - RNA, 19 nt, Artificial Sequence
  Description of Artificial Sequence: Synthetic oligonucleotide
gucuacggaguuugucauc

SEQ ID NO: 990531 - RNA, 19 nt, Artificial Sequence
  Description of Artificial Sequence: Synthetic oligonucleotide
augcagcgcgaccccaaug

SEQ ID NO: 990532 - RNA, 19 nt, Artificial Sequence
  Description of Artificial Sequence: Synthetic oligonucleotide
cgguccauauccaccaggc

SEQ ID NO: 990533 - RNA, 19 nt, Artificial Sequence
  Description of Artificial Sequence: Synthetic oligonucleotide
uuuggacgcagugcucaau

SEQ ID NO: 990534 - RNA, 19 nt, Artificial Sequence
  Description of Artificial Sequence: Synthetic oligonucleotide
gggacauccugucuugaaa

SEQ ID NO: 990535 - RNA, 19 nt, Artificial Sequence
  Description of Artificial Sequence: Synthetic oligonucleotide
gaguucaggugugguuuac

SEQ ID NO: 990536 - RNA, 19 nt, Artificial Sequence
  Description of Artificial Sequence: Synthetic oligonucleotide
uccgcagcgguugcgcggu

SEQ ID NO: 990537 - RNA, 19 nt, Artificial Sequence
  Description of Artificial Sequence: Synthetic oligonucleotide
cauaugcgcaagcacaauu

SEQ ID NO: 990538 - RNA, 19 nt, Artificial Sequence
  Description of Artificial Sequence: Synthetic oligonucleotide
cuguaaaauacuccauauu

SEQ ID NO: 990539 - RNA, 19 nt, Artificial Sequence
  Description of Artificial Sequence: Synthetic oligonucleotide
gguuccucuacagcuguca

SEQ ID NO: 990540 - RNA, 19 nt, Artificial Sequence
  Description of Artificial Sequence: Synthetic oligonucleotide
gcacgugaugaaagaagcc

SEQ ID NO: 990541 - RNA, 19 nt, Artificial Sequence
  Description of Artificial Sequence: Synthetic oligonucleotide
agaaggcucccuguuggua

SEQ ID NO: 990542 - RNA, 19 nt, Artificial Sequence
  Description of Artificial Sequence: Synthetic oligonucleotide
gggacacccacaaucaugu

SEQ ID NO: 990543 - RNA, 19 nt, Artificial Sequence
  Description of Artificial Sequence: Synthetic oligonucleotide
uccucaaagcucggucaau

SEQ ID NO: 990544 - RNA, 19 nt, Artificial Sequence
  Description of Artificial Sequence: Synthetic oligonucleotide
ggcagcauaugcgcaagca

SEQ ID NO: 990545 - RNA, 19 nt, Artificial Sequence
  Description of Artificial Sequence: Synthetic oligonucleotide
cuucaaugccuguuuccgu

SEQ ID NO: 990546 - RNA, 19 nt, Artificial Sequence
  Description of Artificial Sequence: Synthetic oligonucleotide
caugccccugggcuuucac

SEQ ID NO: 990547 - RNA, 19 nt, Artificial Sequence
  Description of Artificial Sequence: Synthetic oligonucleotide
gggauggugaguucacaua

SEQ ID NO: 990548 - RNA, 19 nt, Artificial Sequence
  Description of Artificial Sequence: Synthetic oligonucleotide
cuggacuaucggugggaca

SEQ ID NO: 990549 - RNA, 19 nt, Artificial Sequence
  Description of Artificial Sequence: Synthetic oligonucleotide
guguucugaaugaacccgu

SEQ ID NO: 990550 - RNA, 19 nt, Artificial Sequence
  Description of Artificial Sequence: Synthetic oligonucleotide
caaugccuguuuccguuaa

SEQ ID NO: 990551 - RNA, 19 nt, Artificial Sequence
  Description of Artificial Sequence: Synthetic oligonucleotide
agcagcaauucuggacuau

SEQ ID NO: 990552 - RNA, 19 nt, Artificial Sequence
  Description of Artificial Sequence: Synthetic oligonucleotide
gccgugcucuuccgcagcg

SEQ ID NO: 990553 - RNA, 19 nt, Artificial Sequence
  Description of Artificial Sequence: Synthetic oligonucleotide
agacaacucuuuggauggu

SEQ ID NO: 990554 - RNA, 19 nt, Artificial Sequence
  Description of Artificial Sequence: Synthetic oligonucleotide
cacaagcaugcagcgcgac

SEQ ID NO: 990555 - RNA, 19 nt, Artificial Sequence
  Description of Artificial Sequence: Synthetic oligonucleotide
cagacucuuggacgagcca

SEQ ID NO: 990556 - RNA, 19 nt, Artificial Sequence
  Description of Artificial Sequence: Synthetic oligonucleotide
acuaucggugggacauccu

SEQ ID NO: 990557 - RNA, 19 nt, Artificial Sequence
  Description of Artificial Sequence: Synthetic oligonucleotide
agcucggucaauggacauu

SEQ ID NO: 990558 - RNA, 19 nt, Artificial Sequence
  Description of Artificial Sequence: Synthetic oligonucleotide
ggcaagcagcaauucugga

SEQ ID NO: 990559 - RNA, 19 nt, Artificial Sequence
  Description of Artificial Sequence: Synthetic oligonucleotide
ccccaauguuaaacauucc

SEQ ID NO: 990560 - RNA, 19 nt, Artificial Sequence
  Description of Artificial Sequence: Synthetic oligonucleotide
guugcgcgguccauaucca

SEQ ID NO: 990561 - RNA, 19 nt, Artificial Sequence
  Description of Artificial Sequence: Synthetic oligonucleotide
cagaggcggaagggcagag

SEQ ID NO: 990562 - RNA, 19 nt, Artificial Sequence
  Description of Artificial Sequence: Synthetic oligonucleotide
agcccguguuuggacgcag

SEQ ID NO: 990563 - RNA, 19 nt, Artificial Sequence
  Description of Artificial Sequence: Synthetic oligonucleotide
gcucuacagaaaacaucug

SEQ ID NO: 990564 - RNA, 19 nt, Artificial Sequence
  Description of Artificial Sequence: Synthetic oligonucleotide
gcugucugaucugcaaauc

SEQ ID NO: 990565 - RNA, 19 nt, Artificial Sequence
  Description of Artificial Sequence: Synthetic oligonucleotide
ccagguuuggcuugauuua

SEQ ID NO: 990566 - RNA, 19 nt, Artificial Sequence
  Description of Artificial Sequence: Synthetic oligonucleotide
ccaagagguuagcagggga

SEQ ID NO: 990567 - RNA, 19 nt, Artificial Sequence
  Description of Artificial Sequence: Synthetic oligonucleotide
cgagccagacaacucuuug

SEQ ID NO: 990568 - RNA, 19 nt, Artificial Sequence
  Description of Artificial Sequence: Synthetic oligonucleotide
cagcgcgaccccaauguua

SEQ ID NO: 990569 - RNA, 19 nt, Artificial Sequence
  Description of Artificial Sequence: Synthetic oligonucleotide
ccuaguucgucacuucucu

SEQ ID NO: 990570 - RNA, 19 nt, Artificial Sequence
  Description of Artificial Sequence: Synthetic oligonucleotide
cgccacugcagaaauccac

SEQ ID NO: 990571 - RNA, 19 nt, Artificial Sequence
  Description of Artificial Sequence: Synthetic oligonucleotide
gacaacucuuuggaugguu

SEQ ID NO: 990572 - RNA, 19 nt, Artificial Sequence
  Description of Artificial Sequence: Synthetic oligonucleotide
cccguguuuggacgcagug

SEQ ID NO: 990573 - RNA, 19 nt, Artificial Sequence
  Description of Artificial Sequence: Synthetic oligonucleotide
gcacggauuagugauaauu

SEQ ID NO: 990574 - RNA, 19 nt, Artificial Sequence
  Description of Artificial Sequence: Synthetic oligonucleotide
cccagaaguuccaaaauuu

SEQ ID NO: 990575 - RNA, 19 nt, Artificial Sequence
  Description of Artificial Sequence: Synthetic oligonucleotide
cauaggauuucuggauuau

SEQ ID NO: 990576 - RNA, 19 nt, Artificial Sequence
  Description of Artificial Sequence: Synthetic oligonucleotide
gcaccauguaaacaagguu

SEQ ID NO: 990577 - RNA, 19 nt, Artificial Sequence
  Description of Artificial Sequence: Synthetic oligonucleotide
cggauuagugauaauuccu

SEQ ID NO: 990578 - RNA, 19 nt, Artificial Sequence
  Description of Artificial Sequence: Synthetic oligonucleotide
agcgguugcgcgguccaua

SEQ ID NO: 990579 - RNA, 19 nt, Artificial Sequence
  Description of Artificial Sequence: Synthetic oligonucleotide
agggugcggagaaaacauu

SEQ ID NO: 990580 - RNA, 19 nt, Artificial Sequence
  Description of Artificial Sequence: Synthetic oligonucleotide
ccacauccugggacagugc

SEQ ID NO: 990581 - RNA, 19 nt, Artificial Sequence
  Description of Artificial Sequence: Synthetic oligonucleotide
cacaggcuuuaagacaagu

SEQ ID NO: 990582 - RNA, 19 nt, Artificial Sequence
  Description of Artificial Sequence: Synthetic oligonucleotide
uggcuugauuuagcaccau

SEQ ID NO: 990583 - RNA, 19 nt, Artificial Sequence
  Description of Artificial Sequence: Synthetic oligonucleotide
acgagccagacaacucuuu

SEQ ID NO: 990584 - RNA, 19 nt, Artificial Sequence
  Description of Artificial Sequence: Synthetic oligonucleotide
cgcgaccccaauguuaaac

SEQ ID NO: 990585 - RNA, 19 nt, Artificial Sequence
  Description of Artificial Sequence: Synthetic oligonucleotide
gacgagccagacaacucuu

SEQ ID NO: 990586 - RNA, 19 nt, Artificial Sequence
  Description of Artificial Sequence: Synthetic oligonucleotide
ggggcacgugaugaaagaa

SEQ ID NO: 990587 - RNA, 19 nt, Artificial Sequence
  Description of Artificial Sequence: Synthetic oligonucleotide
cuaguucgucacuucucuu

SEQ ID NO: 990588 - RNA, 19 nt, Artificial Sequence
  Description of Artificial Sequence: Synthetic oligonucleotide
gcagcgguugcgcggucca

SEQ ID NO: 990589 - RNA, 19 nt, Artificial Sequence
  Description of Artificial Sequence: Synthetic oligonucleotide
cuguuuccguuaacuuggu

SEQ ID NO: 990590 - RNA, 19 nt, Artificial Sequence
  Description of Artificial Sequence: Synthetic oligonucleotide
gcucggucaauggacauuu

SEQ ID NO: 990591 - RNA, 19 nt, Artificial Sequence
  Description of Artificial Sequence: Synthetic oligonucleotide
gcuuuaagacaagucuuuu

SEQ ID NO: 990592 - RNA, 19 nt, Artificial Sequence
  Description of Artificial Sequence: Synthetic oligonucleotide
cccguagcagcaggggcac

SEQ ID NO: 990593 - RNA, 19 nt, Artificial Sequence
  Description of Artificial Sequence: Synthetic oligonucleotide
guucgucacuucucuucuu

SEQ ID NO: 990594 - RNA, 19 nt, Artificial Sequence
  Description of Artificial Sequence: Synthetic oligonucleotide
gccagacaacucuuuggau

SEQ ID NO: 990595 - RNA, 19 nt, Artificial Sequence
  Description of Artificial Sequence: Synthetic oligonucleotide
ggacuaucggugggacauc

SEQ ID NO: 990596 - RNA, 19 nt, Artificial Sequence
  Description of Artificial Sequence: Synthetic oligonucleotide
ccacaagcaugcagcgcga

SEQ ID NO: 990597 - RNA, 19 nt, Artificial Sequence
  Description of Artificial Sequence: Synthetic oligonucleotide
caugcagcgcgaccccaau

SEQ ID NO: 990598 - RNA, 19 nt, Artificial Sequence
  Description of Artificial Sequence: Synthetic oligonucleotide
caccaagaacucccugcau

SEQ ID NO: 990599 - RNA, 19 nt, Artificial Sequence
  Description of Artificial Sequence: Synthetic oligonucleotide
gucuugcauugugagcuuu

SEQ ID NO: 990600 - RNA, 19 nt, Artificial Sequence
  Description of Artificial Sequence: Synthetic oligonucleotide
ccaccgcaggcaagcagca

SEQ ID NO: 990601 - RNA, 19 nt, Artificial Sequence
  Description of Artificial Sequence: Synthetic oligonucleotide
cuacggaguuugucaucau

SEQ ID NO: 990602 - RNA, 19 nt, Artificial Sequence
  Description of Artificial Sequence: Synthetic oligonucleotide
ccgugcucuuccgcagcgg

SEQ ID NO: 990603 - RNA, 19 nt, Artificial Sequence
  Description of Artificial Sequence: Synthetic oligonucleotide
cuugacggcuuagcuucau

SEQ ID NO: 990604 - RNA, 19 nt, Artificial Sequence
  Description of Artificial Sequence: Synthetic oligonucleotide
gcgguugcgcgguccauau

SEQ ID NO: 990605 - RNA, 19 nt, Artificial Sequence
  Description of Artificial Sequence: Synthetic oligonucleotide
guacucugacaggcucacu

SEQ ID NO: 990606 - RNA, 19 nt, Artificial Sequence
  Description of Artificial Sequence: Synthetic oligonucleotide
ccgccacugcagaaaucca

SEQ ID NO: 990607 - RNA, 19 nt, Artificial Sequence
  Description of Artificial Sequence: Synthetic oligonucleotide
caccagguuuggcuugauu

SEQ ID NO: 990608 - RNA, 19 nt, Artificial Sequence
  Description of Artificial Sequence: Synthetic oligonucleotide
cucggucaauggacauuuu

SEQ ID NO: 990609 - RNA, 19 nt, Artificial Sequence
  Description of Artificial Sequence: Synthetic oligonucleotide
gcauaugcgcaagcacaau

SEQ ID NO: 990610 - RNA, 19 nt, Artificial Sequence
  Description of Artificial Sequence: Synthetic oligonucleotide
cgcagcgguugcgcggucc

SEQ ID NO: 990611 - RNA, 19 nt, Artificial Sequence
  Description of Artificial Sequence: Synthetic oligonucleotide
ggcacggauuagugauaau

SEQ ID NO: 990612 - RNA, 19 nt, Artificial Sequence
  Description of Artificial Sequence: Synthetic oligonucleotide
cggcuuagcuucauaggau

SEQ ID NO: 990613 - RNA, 19 nt, Artificial Sequence
  Description of Artificial Sequence: Synthetic oligonucleotide
ccguuaacuuggucauggu

SEQ ID NO: 990614 - RNA, 19 nt, Artificial Sequence
  Description of Artificial Sequence: Synthetic oligonucleotide
ccguagcagcaggggcacg

SEQ ID NO: 990615 - RNA, 19 nt, Artificial Sequence
  Description of Artificial Sequence: Synthetic oligonucleotide
gcagcgcgaccccaauguu

SEQ ID NO: 990616 - RNA, 19 nt, Artificial Sequence
  Description of Artificial Sequence: Synthetic oligonucleotide
ccauguaaacaagguuguu

SEQ ID NO: 990617 - RNA, 19 nt, Artificial Sequence
  Description of Artificial Sequence: Synthetic oligonucleotide
gcaugccccugggcuuuca

SEQ ID NO: 990618 - RNA, 19 nt, Artificial Sequence
  Description of Artificial Sequence: Synthetic oligonucleotide
cgguugcgcgguccauauc

SEQ ID NO: 990619 - RNA, 19 nt, Artificial Sequence
  Description of Artificial Sequence: Synthetic oligonucleotide
gcccguguuuggacgcagu

SEQ ID NO: 990620 - RNA, 19 nt, Artificial Sequence
  Description of Artificial Sequence: Synthetic oligonucleotide
ccgcagcgguugcgcgguc

SEQ ID NO: 990621 - RNA, 19 nt, Artificial Sequence
  Description of Artificial Sequence: Synthetic oligonucleotide
ucuacuuccaccuucagag

SEQ ID NO: 990622 - RNA, 19 nt, Artificial Sequence
  Description of Artificial Sequence: Synthetic oligonucleotide
aaucuugccaauuucccac

SEQ ID NO: 990623 - RNA, 19 nt, Artificial Sequence
  Description of Artificial Sequence: Synthetic oligonucleotide
agugcauaaccuuuuaagc

SEQ ID NO: 990624 - RNA, 19 nt, Artificial Sequence
  Description of Artificial Sequence: Synthetic oligonucleotide
ucugcuauaccucauguag

SEQ ID NO: 990625 - RNA, 19 nt, Artificial Sequence
  Description of Artificial Sequence: Synthetic oligonucleotide
gauuguaucccacaaaccc

SEQ ID NO: 990626 - RNA, 19 nt, Artificial Sequence
  Description of Artificial Sequence: Synthetic oligonucleotide
agauuaaguucucaguucc

SEQ ID NO: 990627 - RNA, 19 nt, Artificial Sequence
  Description of Artificial Sequence: Synthetic oligonucleotide
uuaugauaggccuucauag

SEQ ID NO: 990628 - RNA, 19 nt, Artificial Sequence
  Description of Artificial Sequence: Synthetic oligonucleotide
uuuacuuggucccagaccu

SEQ ID NO: 990629 - RNA, 19 nt, Artificial Sequence
  Description of Artificial Sequence: Synthetic oligonucleotide
uuaagcucauuauuaaagg

SEQ ID NO: 990630 - RNA, 19 nt, Artificial Sequence
  Description of Artificial Sequence: Synthetic oligonucleotide
aagauuaaguucucaguuc

SEQ ID NO: 990631 - RNA, 19 nt, Artificial Sequence
  Description of Artificial Sequence: Synthetic oligonucleotide
ugaugaaccauuaaagacu

SEQ ID NO: 990632 - RNA, 19 nt, Artificial Sequence
  Description of Artificial Sequence: Synthetic oligonucleotide
uuuggaaucguaauaccag

SEQ ID NO: 990633 - RNA, 19 nt, Artificial Sequence
  Description of Artificial Sequence: Synthetic oligonucleotide
uaugcuucaucgaaaagcc

SEQ ID NO: 990634 - RNA, 19 nt, Artificial Sequence
  Description of Artificial Sequence: Synthetic oligonucleotide
ugcaggggaauuaugauag

SEQ ID NO: 990635 - RNA, 19 nt, Artificial Sequence
  Description of Artificial Sequence: Synthetic oligonucleotide
ucucaguuccuuaagaaug

SEQ ID NO: 990636 - RNA, 19 nt, Artificial Sequence
  Description of Artificial Sequence: Synthetic oligonucleotide
uucguauucguuuaaauau

SEQ ID NO: 990637 - RNA, 19 nt, Artificial Sequence
  Description of Artificial Sequence: Synthetic oligonucleotide
aauuaauacacagaccaca

SEQ ID NO: 990638 - RNA, 19 nt, Artificial Sequence
  Description of Artificial Sequence: Synthetic oligonucleotide
ucauuauuaaaggaauccg

SEQ ID NO: 990639 - RNA, 19 nt, Artificial Sequence
  Description of Artificial Sequence: Synthetic oligonucleotide
uauuaaaggaauccgugcu

SEQ ID NO: 990640 - RNA, 19 nt, Artificial Sequence
  Description of Artificial Sequence: Synthetic oligonucleotide
gacuguauggauuguaucc

SEQ ID NO: 990641 - RNA, 19 nt, Artificial Sequence
  Description of Artificial Sequence: Synthetic oligonucleotide
gagugcauaaccuuuuaag

SEQ ID NO: 990642 - RNA, 19 nt, Artificial Sequence
  Description of Artificial Sequence: Synthetic oligonucleotide
aaaggaauccgugcuuucc

SEQ ID NO: 990643 - RNA, 19 nt, Artificial Sequence
  Description of Artificial Sequence: Synthetic oligonucleotide
gaaucugagacaccgcggg

SEQ ID NO: 990644 - RNA, 19 nt, Artificial Sequence
  Description of Artificial Sequence: Synthetic oligonucleotide
ugcuauaccucauguaggg

SEQ ID NO: 990645 - RNA, 19 nt, Artificial Sequence
  Description of Artificial Sequence: Synthetic oligonucleotide
uguaugcaagguaugcagg

SEQ ID NO: 990646 - RNA, 19 nt, Artificial Sequence
  Description of Artificial Sequence: Synthetic oligonucleotide
cugaugaaccauuaaagac

SEQ ID NO: 990647 - RNA, 19 nt, Artificial Sequence
  Description of Artificial Sequence: Synthetic oligonucleotide
uaguuuucgcugaugaacc

SEQ ID NO: 990648 - RNA, 19 nt, Artificial Sequence
  Description of Artificial Sequence: Synthetic oligonucleotide
cucauguagggcaucagcg

SEQ ID NO: 990649 - RNA, 19 nt, Artificial Sequence
  Description of Artificial Sequence: Synthetic oligonucleotide
uguacucuaucuuuucugc

SEQ ID NO: 990650 - RNA, 19 nt, Artificial Sequence
  Description of Artificial Sequence: Synthetic oligonucleotide
accauuaaagacuggaccu

SEQ ID NO: 990651 - RNA, 19 nt, Artificial Sequence
  Description of Artificial Sequence: Synthetic oligonucleotide
gaaucguaauaccagagga

SEQ ID NO: 990652 - RNA, 19 nt, Artificial Sequence
  Description of Artificial Sequence: Synthetic oligonucleotide
aaaaggcgcccgcagcucc

SEQ ID NO: 990653 - RNA, 19 nt, Artificial Sequence
  Description of Artificial Sequence: Synthetic oligonucleotide
cuaugauguugauaguugg

SEQ ID NO: 990654 - RNA, 19 nt, Artificial Sequence
  Description of Artificial Sequence: Synthetic oligonucleotide
agauucauuguacucuauc

SEQ ID NO: 990655 - RNA, 19 nt, Artificial Sequence
  Description of Artificial Sequence: Synthetic oligonucleotide
uccuuaagaaugaaucuga

SEQ ID NO: 990656 - RNA, 19 nt, Artificial Sequence
  Description of Artificial Sequence: Synthetic oligonucleotide
acaacuuuaggucaggguu

SEQ ID NO: 990657 - RNA, 19 nt, Artificial Sequence
  Description of Artificial Sequence: Synthetic oligonucleotide
aguuuuaggacaaauaaaa

SEQ ID NO: 990658 - RNA, 19 nt, Artificial Sequence
  Description of Artificial Sequence: Synthetic oligonucleotide
gaagccuuuacuugguccc

SEQ ID NO: 990659 - RNA, 19 nt, Artificial Sequence
  Description of Artificial Sequence: Synthetic oligonucleotide
guaugcuucaucgaaaagc

SEQ ID NO: 990660 - RNA, 19 nt, Artificial Sequence
  Description of Artificial Sequence: Synthetic oligonucleotide
agaccuuucugcuauaccu

SEQ ID NO: 990661 - RNA, 19 nt, Artificial Sequence
  Description of Artificial Sequence: Synthetic oligonucleotide
acuguauggauuguauccc

SEQ ID NO: 990662 - RNA, 19 nt, Artificial Sequence
  Description of Artificial Sequence: Synthetic oligonucleotide
ucagaacucuuccaguuug

SEQ ID NO: 990663 - RNA, 19 nt, Artificial Sequence
  Description of Artificial Sequence: Synthetic oligonucleotide
ugaaccauuaaagacugga

SEQ ID NO: 990664 - RNA, 19 nt, Artificial Sequence
  Description of Artificial Sequence: Synthetic oligonucleotide
aguauuacuaucacugguc

SEQ ID NO: 990665 - RNA, 19 nt, Artificial Sequence
  Description of Artificial Sequence: Synthetic oligonucleotide
uugccaauuucccacaacu

SEQ ID NO: 990666 - RNA, 19 nt, Artificial Sequence
  Description of Artificial Sequence: Synthetic oligonucleotide
ucauauaaggcucuccuuu

SEQ ID NO: 990667 - RNA, 19 nt, Artificial Sequence
  Description of Artificial Sequence: Synthetic oligonucleotide
ucauguagggcaucagcgg

SEQ ID NO: 990668 - RNA, 19 nt, Artificial Sequence
  Description of Artificial Sequence: Synthetic oligonucleotide
uuaauguaugcaagguaug

SEQ ID NO: 990669 - RNA, 19 nt, Artificial Sequence
  Description of Artificial Sequence: Synthetic oligonucleotide
uucgucacggcgaggaggg

SEQ ID NO: 990670 - RNA, 19 nt, Artificial Sequence
  Description of Artificial Sequence: Synthetic oligonucleotide
uuucucuggaaacgggcgg

SEQ ID NO: 990671 - RNA, 19 nt, Artificial Sequence
  Description of Artificial Sequence: Synthetic oligonucleotide
guaugcaagguaugcaggg

SEQ ID NO: 990672 - RNA, 19 nt, Artificial Sequence
  Description of Artificial Sequence: Synthetic oligonucleotide
aaucugagacaccgcgggc

SEQ ID NO: 990673 - RNA, 19 nt, Artificial Sequence
  Description of Artificial Sequence: Synthetic oligonucleotide
gaugaaccauuaaagacug

SEQ ID NO: 990674 - RNA, 19 nt, Artificial Sequence
  Description of Artificial Sequence: Synthetic oligonucleotide
aauuucccacaacuuuagg

SEQ ID NO: 990675 - RNA, 19 nt, Artificial Sequence
  Description of Artificial Sequence: Synthetic oligonucleotide
gcugaaugcucauauaagg

SEQ ID NO: 990676 - RNA, 19 nt, Artificial Sequence
  Description of Artificial Sequence: Synthetic oligonucleotide
auucguuuaaauauucuug

SEQ ID NO: 990677 - RNA, 19 nt, Artificial Sequence
  Description of Artificial Sequence: Synthetic oligonucleotide
uggaaucguaauaccagag

SEQ ID NO: 990678 - RNA, 19 nt, Artificial Sequence
  Description of Artificial Sequence: Synthetic oligonucleotide
cuagcuguugugacaaccg

SEQ ID NO: 990679 - RNA, 19 nt, Artificial Sequence
  Description of Artificial Sequence: Synthetic oligonucleotide
aaugaaucugagacaccgc

SEQ ID NO: 990680 - RNA, 19 nt, Artificial Sequence
  Description of Artificial Sequence: Synthetic oligonucleotide
cuaguuuucgcugaugaac

SEQ ID NO: 990681 - RNA, 19 nt, Artificial Sequence
  Description of Artificial Sequence: Synthetic oligonucleotide
uauggauuguaucccacaa

SEQ ID NO: 990682 - RNA, 19 nt, Artificial Sequence
  Description of Artificial Sequence: Synthetic oligonucleotide
uccaguuugggucccgucc

SEQ ID NO: 990683 - RNA, 19 nt, Artificial Sequence
  Description of Artificial Sequence: Synthetic oligonucleotide
uaugauaggccuucauaga

SEQ ID NO: 990684 - RNA, 19 nt, Artificial Sequence
  Description of Artificial Sequence: Synthetic oligonucleotide
auuaugauaggccuucaua

SEQ ID NO: 990685 - RNA, 19 nt, Artificial Sequence
  Description of Artificial Sequence: Synthetic oligonucleotide
uaaucuugccaauuuccca

SEQ ID NO: 990686 - RNA, 19 nt, Artificial Sequence
  Description of Artificial Sequence: Synthetic oligonucleotide
ugcgagacugucucugucg

SEQ ID NO: 990687 - RNA, 19 nt, Artificial Sequence
  Description of Artificial Sequence: Synthetic oligonucleotide
aacuuuaggucaggguugg

SEQ ID NO: 990688 - RNA, 19 nt, Artificial Sequence
  Description of Artificial Sequence: Synthetic oligonucleotide
aggaucucacugaugaggc

SEQ ID NO: 990689 - RNA, 19 nt, Artificial Sequence
  Description of Artificial Sequence: Synthetic oligonucleotide
cuuuacuuggucccagacc

SEQ ID NO: 990690 - RNA, 19 nt, Artificial Sequence
  Description of Artificial Sequence: Synthetic oligonucleotide
uguugugacaaccgaccgc

SEQ ID NO: 990691 - RNA, 19 nt, Artificial Sequence
  Description of Artificial Sequence: Synthetic oligonucleotide
ucauagauucauuguacuc

SEQ ID NO: 990692 - RNA, 19 nt, Artificial Sequence
  Description of Artificial Sequence: Synthetic oligonucleotide
uuggaaucguaauaccaga

SEQ ID NO: 990693 - RNA, 19 nt, Artificial Sequence
  Description of Artificial Sequence: Synthetic oligonucleotide
cugacaugaggcuaugaug

SEQ ID NO: 990694 - RNA, 19 nt, Artificial Sequence
  Description of Artificial Sequence: Synthetic oligonucleotide
aauuaugauaggccuucau

SEQ ID NO: 990695 - RNA, 19 nt, Artificial Sequence
  Description of Artificial Sequence: Synthetic oligonucleotide
uguaugcuucaucgaaaag

SEQ ID NO: 990696 - RNA, 19 nt, Artificial Sequence
  Description of Artificial Sequence: Synthetic oligonucleotide
ucgcugaugaaccauuaaa

SEQ ID NO: 990697 - RNA, 19 nt, Artificial Sequence
  Description of Artificial Sequence: Synthetic oligonucleotide
ggaaucguaauaccagagg

SEQ ID NO: 990698 - RNA, 19 nt, Artificial Sequence
  Description of Artificial Sequence: Synthetic oligonucleotide
gugagaucucgccacaugc

SEQ ID NO: 990699 - RNA, 19 nt, Artificial Sequence
  Description of Artificial Sequence: Synthetic oligonucleotide
ucuagcuguugugacaacc

SEQ ID NO: 990700 - RNA, 19 nt, Artificial Sequence
  Description of Artificial Sequence: Synthetic oligonucleotide
ggugguaucaauggaaaag

SEQ ID NO: 990701 - RNA, 19 nt, Artificial Sequence
  Description of Artificial Sequence: Synthetic oligonucleotide
cuauaccucauguagggca

SEQ ID NO: 990702 - RNA, 19 nt, Artificial Sequence
  Description of Artificial Sequence: Synthetic oligonucleotide
cugcuauaccucauguagg

SEQ ID NO: 990703 - RNA, 19 nt, Artificial Sequence
  Description of Artificial Sequence: Synthetic oligonucleotide
caauuucccacaacuuuag

SEQ ID NO: 990704 - RNA, 19 nt, Artificial Sequence
  Description of Artificial Sequence: Synthetic oligonucleotide
gaagauuaaguucucaguu

SEQ ID NO: 990705 - RNA, 19 nt, Artificial Sequence
  Description of Artificial Sequence: Synthetic oligonucleotide
gccaguauuacuaucacug

SEQ ID NO: 990706 - RNA, 19 nt, Artificial Sequence
  Description of Artificial Sequence: Synthetic oligonucleotide
cauguagggcaucagcggc

SEQ ID NO: 990707 - RNA, 19 nt, Artificial Sequence
  Description of Artificial Sequence: Synthetic oligonucleotide
aggaccugcauucuagcug

SEQ ID NO: 990708 - RNA, 19 nt, Artificial Sequence
  Description of Artificial Sequence: Synthetic oligonucleotide
acugacaugaggcuaugau

SEQ ID NO: 990709 - RNA, 19 nt, Artificial Sequence
  Description of Artificial Sequence: Synthetic oligonucleotide
uucaccauucuguuggcuc

SEQ ID NO: 990710 - RNA, 19 nt, Artificial Sequence
  Description of Artificial Sequence: Synthetic oligonucleotide
caaccgaccgcacaucagg

SEQ ID NO: 990711 - RNA, 19 nt, Artificial Sequence
  Description of Artificial Sequence: Synthetic oligonucleotide
gcaucagcggcuuaucugg

SEQ ID NO: 990712 - RNA, 19 nt, Artificial Sequence
  Description of Artificial Sequence: Synthetic oligonucleotide
uaauaccagaggaugccgu

SEQ ID NO: 990713 - RNA, 19 nt, Artificial Sequence
  Description of Artificial Sequence: Synthetic oligonucleotide
uguauggauuguaucccac

SEQ ID NO: 990714 - RNA, 19 nt, Artificial Sequence
  Description of Artificial Sequence: Synthetic oligonucleotide
uccucuaucugaaggaguu

SEQ ID NO: 990715 - RNA, 19 nt, Artificial Sequence
  Description of Artificial Sequence: Synthetic oligonucleotide
ugugacaaccgaccgcaca

SEQ ID NO: 990716 - RNA, 19 nt, Artificial Sequence
  Description of Artificial Sequence: Synthetic oligonucleotide
uucgcuucccuuugucccg

SEQ ID NO: 990717 - RNA, 19 nt, Artificial Sequence
  Description of Artificial Sequence: Synthetic oligonucleotide
uccgggauuucuccgcggg

SEQ ID NO: 990718 - RNA, 19 nt, Artificial Sequence
  Description of Artificial Sequence: Synthetic oligonucleotide
gacuuuggugguaucaaug

SEQ ID NO: 990719 - RNA, 19 nt, Artificial Sequence
  Description of Artificial Sequence: Synthetic oligonucleotide
gaaugcucauauaaggcuc

SEQ ID NO: 990720 - RNA, 19 nt, Artificial Sequence
  Description of Artificial Sequence: Synthetic oligonucleotide
aggcugaaugcucauauaa

SEQ ID NO: 990721 - RNA, 19 nt, Artificial Sequence
  Description of Artificial Sequence: Synthetic oligonucleotide
agucgaagugccuucuuca

SEQ ID NO: 990722 - RNA, 19 nt, Artificial Sequence
  Description of Artificial Sequence: Synthetic oligonucleotide
ucgaagugccuucuucacc

SEQ ID NO: 990723 - RNA, 19 nt, Artificial Sequence
  Description of Artificial Sequence: Synthetic oligonucleotide
caauaaucuugccaauuuc

SEQ ID NO: 990724 - RNA, 19 nt, Artificial Sequence
  Description of Artificial Sequence: Synthetic oligonucleotide
gacucggcgaggcuuagug

SEQ ID NO: 990725 - RNA, 19 nt, Artificial Sequence
  Description of Artificial Sequence: Synthetic oligonucleotide
uauaccucauguagggcau

SEQ ID NO: 990726 - RNA, 19 nt, Artificial Sequence
  Description of Artificial Sequence: Synthetic oligonucleotide
auagauucauuguacucua

SEQ ID NO: 990727 - RNA, 19 nt, Artificial Sequence
  Description of Artificial Sequence: Synthetic oligonucleotide
aaugcucauauaaggcucu

SEQ ID NO: 990728 - RNA, 19 nt, Artificial Sequence
  Description of Artificial Sequence: Synthetic oligonucleotide
ucugcuucguauucguuua

SEQ ID NO: 990729 - RNA, 19 nt, Artificial Sequence
  Description of Artificial Sequence: Synthetic oligonucleotide
uaaucgucuggaucuucag

SEQ ID NO: 990730 - RNA, 19 nt, Artificial Sequence
  Description of Artificial Sequence: Synthetic oligonucleotide
gaauccgugcuuuccagga

SEQ ID NO: 990731 - RNA, 19 nt, Artificial Sequence
  Description of Artificial Sequence: Synthetic oligonucleotide
uaucacuggucccuucuac

SEQ ID NO: 990732 - RNA, 19 nt, Artificial Sequence
  Description of Artificial Sequence: Synthetic oligonucleotide
uuaaguucucaguuccuua

SEQ ID NO: 990733 - RNA, 19 nt, Artificial Sequence
  Description of Artificial Sequence: Synthetic oligonucleotide
aucgggucuucccagggag

SEQ ID NO: 990734 - RNA, 19 nt, Artificial Sequence
  Description of Artificial Sequence: Synthetic oligonucleotide
cacacucucacugaggauc

SEQ ID NO: 990735 - RNA, 19 nt, Artificial Sequence
  Description of Artificial Sequence: Synthetic oligonucleotide
aaucguaauaccagaggau

SEQ ID NO: 990736 - RNA, 19 nt, Artificial Sequence
  Description of Artificial Sequence: Synthetic oligonucleotide
ucguauucguuuaaauauu

SEQ ID NO: 990737 - RNA, 19 nt, Artificial Sequence
  Description of Artificial Sequence: Synthetic oligonucleotide
auuaaaggaauccgugcuu

SEQ ID NO: 990738 - RNA, 19 nt, Artificial Sequence
  Description of Artificial Sequence: Synthetic oligonucleotide
acuaucacuggucccuucu

SEQ ID NO: 990739 - RNA, 19 nt, Artificial Sequence
  Description of Artificial Sequence: Synthetic oligonucleotide
guaauaccagaggaugccg

SEQ ID NO: 990740 - RNA, 19 nt, Artificial Sequence
  Description of Artificial Sequence: Synthetic oligonucleotide
uuggaaagacuuugguggu

SEQ ID NO: 990741 - RNA, 19 nt, Artificial Sequence
  Description of Artificial Sequence: Synthetic oligonucleotide
uuuuacugacaugaggcua

SEQ ID NO: 990742 - RNA, 19 nt, Artificial Sequence
  Description of Artificial Sequence: Synthetic oligonucleotide
auauaaggcucuccuuucu

SEQ ID NO: 990743 - RNA, 19 nt, Artificial Sequence
  Description of Artificial Sequence: Synthetic oligonucleotide
aaccgaccgcacaucaggc

SEQ ID NO: 990744 - RNA, 19 nt, Artificial Sequence
  Description of Artificial Sequence: Synthetic oligonucleotide
gaucucgccacaugccacc

SEQ ID NO: 990745 - RNA, 19 nt, Artificial Sequence
  Description of Artificial Sequence: Synthetic oligonucleotide
guugugacaaccgaccgca

SEQ ID NO: 990746 - RNA, 19 nt, Artificial Sequence
  Description of Artificial Sequence: Synthetic oligonucleotide
ucccacaacuuuaggucag

SEQ ID NO: 990747 - RNA, 19 nt, Artificial Sequence
  Description of Artificial Sequence: Synthetic oligonucleotide
ugacuguauggauuguauc

SEQ ID NO: 990748 - RNA, 19 nt, Artificial Sequence
  Description of Artificial Sequence: Synthetic oligonucleotide
cauuauuaaaggaauccgu

SEQ ID NO: 990749 - RNA, 19 nt, Artificial Sequence
  Description of Artificial Sequence: Synthetic oligonucleotide
auucgucacggcgaggagg

SEQ ID NO: 990750 - RNA, 19 nt, Artificial Sequence
  Description of Artificial Sequence: Synthetic oligonucleotide
cuucguauucguuuaaaua

SEQ ID NO: 990751 - RNA, 19 nt, Artificial Sequence
  Description of Artificial Sequence: Synthetic oligonucleotide
aaacaaggcaacauuuauu

SEQ ID NO: 990752 - RNA, 19 nt, Artificial Sequence
  Description of Artificial Sequence: Synthetic oligonucleotide
caugaggcuaugauguuga

SEQ ID NO: 990753 - RNA, 19 nt, Artificial Sequence
  Description of Artificial Sequence: Synthetic oligonucleotide
uuuggaagauuaaguucuc

SEQ ID NO: 990754 - RNA, 19 nt, Artificial Sequence
  Description of Artificial Sequence: Synthetic oligonucleotide
acucggcgaggcuuagugc

SEQ ID NO: 990755 - RNA, 19 nt, Artificial Sequence
  Description of Artificial Sequence: Synthetic oligonucleotide
ucuaguuuucgcugaugaa

SEQ ID NO: 990756 - RNA, 19 nt, Artificial Sequence
  Description of Artificial Sequence: Synthetic oligonucleotide
augauguugauaguuggaa

SEQ ID NO: 990757 - RNA, 19 nt, Artificial Sequence
  Description of Artificial Sequence: Synthetic oligonucleotide
ugauaguuggaaagacuuu

SEQ ID NO: 990758 - RNA, 19 nt, Artificial Sequence
  Description of Artificial Sequence: Synthetic oligonucleotide
agugagaucucgccacaug

SEQ ID NO: 990759 - RNA, 19 nt, Artificial Sequence
  Description of Artificial Sequence: Synthetic oligonucleotide
caggggaauuaugauaggc

SEQ ID NO: 990760 - RNA, 19 nt, Artificial Sequence
  Description of Artificial Sequence: Synthetic oligonucleotide
gacaccgcgggccgaaaag

SEQ ID NO: 990761 - RNA, 19 nt, Artificial Sequence
  Description of Artificial Sequence: Synthetic oligonucleotide
gguuggaagccuuuacuug

SEQ ID NO: 990762 - RNA, 19 nt, Artificial Sequence
  Description of Artificial Sequence: Synthetic oligonucleotide
ggugguuucucuggaaacg

SEQ ID NO: 990763 - RNA, 19 nt, Artificial Sequence
  Description of Artificial Sequence: Synthetic oligonucleotide
ugauaggccuucauagauu

SEQ ID NO: 990764 - RNA, 19 nt, Artificial Sequence
  Description of Artificial Sequence: Synthetic oligonucleotide
gcugaugaaccauuaaaga

SEQ ID NO: 990765 - RNA, 19 nt, Artificial Sequence
  Description of Artificial Sequence: Synthetic oligonucleotide
agcuguugugacaaccgac

SEQ ID NO: 990766 - RNA, 19 nt, Artificial Sequence
  Description of Artificial Sequence: Synthetic oligonucleotide
accuuucugcuauaccuca

SEQ ID NO: 990767 - RNA, 19 nt, Artificial Sequence
  Description of Artificial Sequence: Synthetic oligonucleotide
aggaauccgugcuuuccag

SEQ ID NO: 990768 - RNA, 19 nt, Artificial Sequence
  Description of Artificial Sequence: Synthetic oligonucleotide
uuugccacuugcucuuccu

SEQ ID NO: 990769 - RNA, 19 nt, Artificial Sequence
  Description of Artificial Sequence: Synthetic oligonucleotide
agcucauuauuaaaggaau

SEQ ID NO: 990770 - RNA, 19 nt, Artificial Sequence
  Description of Artificial Sequence: Synthetic oligonucleotide
uguccucaggagucgaagu

SEQ ID NO: 990771 - RNA, 19 nt, Artificial Sequence
  Description of Artificial Sequence: Synthetic oligonucleotide
cauagauucauuguacucu

SEQ ID NO: 990772 - RNA, 19 nt, Artificial Sequence
  Description of Artificial Sequence: Synthetic oligonucleotide
accagaggaugccgugacc

SEQ ID NO: 990773 - RNA, 19 nt, Artificial Sequence
  Description of Artificial Sequence: Synthetic oligonucleotide
ucuccgacacucuccucag

SEQ ID NO: 990774 - RNA, 19 nt, Artificial Sequence
  Description of Artificial Sequence: Synthetic oligonucleotide
aguuguuguaggcgagaug

SEQ ID NO: 990775 - RNA, 19 nt, Artificial Sequence
  Description of Artificial Sequence: Synthetic oligonucleotide
uucaucgaaaagccaucau

SEQ ID NO: 990776 - RNA, 19 nt, Artificial Sequence
  Description of Artificial Sequence: Synthetic oligonucleotide
cuggaccugucucuugagg

SEQ ID NO: 990777 - RNA, 19 nt, Artificial Sequence
  Description of Artificial Sequence: Synthetic oligonucleotide
gucuccgacacucuccuca

SEQ ID NO: 990778 - RNA, 19 nt, Artificial Sequence
  Description of Artificial Sequence: Synthetic oligonucleotide
cugacugcguucagcuugc

SEQ ID NO: 990779 - RNA, 19 nt, Artificial Sequence
  Description of Artificial Sequence: Synthetic oligonucleotide
guauggauuguaucccaca

SEQ ID NO: 990780 - RNA, 19 nt, Artificial Sequence
  Description of Artificial Sequence: Synthetic oligonucleotide
uuggaagauuaaguucuca

SEQ ID NO: 990781 - RNA, 19 nt, Artificial Sequence
  Description of Artificial Sequence: Synthetic oligonucleotide
gagucgaagugccuucuuc

SEQ ID NO: 990782 - RNA, 19 nt, Artificial Sequence
  Description of Artificial Sequence: Synthetic oligonucleotide
auaaucgucuggaucuuca

SEQ ID NO: 990783 - RNA, 19 nt, Artificial Sequence
  Description of Artificial Sequence: Synthetic oligonucleotide
ucgggucuucccagggagg

SEQ ID NO: 990784 - RNA, 19 nt, Artificial Sequence
  Description of Artificial Sequence: Synthetic oligonucleotide
aguuuucgcugaugaacca

SEQ ID NO: 990785 - RNA, 19 nt, Artificial Sequence
  Description of Artificial Sequence: Synthetic oligonucleotide
ggaauuaugauaggccuuc

SEQ ID NO: 990786 - RNA, 19 nt, Artificial Sequence
  Description of Artificial Sequence: Synthetic oligonucleotide
agccaguauuacuaucacu

SEQ ID NO: 990787 - RNA, 19 nt, Artificial Sequence
  Description of Artificial Sequence: Synthetic oligonucleotide
cuuugucccgcgcucgccc

SEQ ID NO: 990788 - RNA, 19 nt, Artificial Sequence
  Description of Artificial Sequence: Synthetic oligonucleotide
ucccacaaacccuggugug

SEQ ID NO: 990789 - RNA, 19 nt, Artificial Sequence
  Description of Artificial Sequence: Synthetic oligonucleotide
augcgagacugucucuguc

SEQ ID NO: 990790 - RNA, 19 nt, Artificial Sequence
  Description of Artificial Sequence: Synthetic oligonucleotide
ccaguauuacuaucacugg

SEQ ID NO: 990791 - RNA, 19 nt, Artificial Sequence
  Description of Artificial Sequence: Synthetic oligonucleotide
agaggaugccgugacccgg

SEQ ID NO: 990792 - RNA, 19 nt, Artificial Sequence
  Description of Artificial Sequence: Synthetic oligonucleotide
gcuaugauguugauaguug

SEQ ID NO: 990793 - RNA, 19 nt, Artificial Sequence
  Description of Artificial Sequence: Synthetic oligonucleotide
agaucucgccacaugccac

SEQ ID NO: 990794 - RNA, 19 nt, Artificial Sequence
  Description of Artificial Sequence: Synthetic oligonucleotide
uuucgcugaugaaccauua

SEQ ID NO: 990795 - RNA, 19 nt, Artificial Sequence
  Description of Artificial Sequence: Synthetic oligonucleotide
uccucuacuguugcgcugu

SEQ ID NO: 990796 - RNA, 19 nt, Artificial Sequence
  Description of Artificial Sequence: Synthetic oligonucleotide
auggauuguaucccacaaa

SEQ ID NO: 990797 - RNA, 19 nt, Artificial Sequence
  Description of Artificial Sequence: Synthetic oligonucleotide
cucggcgaggcuuagugca

SEQ ID NO: 990798 - RNA, 19 nt, Artificial Sequence
  Description of Artificial Sequence: Synthetic oligonucleotide
ugccaauuucccacaacuu

SEQ ID NO: 990799 - RNA, 19 nt, Artificial Sequence
  Description of Artificial Sequence: Synthetic oligonucleotide
ggaauccgugcuuuccagg

SEQ ID NO: 990800 - RNA, 19 nt, Artificial Sequence
  Description of Artificial Sequence: Synthetic oligonucleotide
gauucgucacggcgaggag

SEQ ID NO: 990801 - RNA, 19 nt, Artificial Sequence
  Description of Artificial Sequence: Synthetic oligonucleotide
uacuguugcgcuguugcuc

SEQ ID NO: 990802 - RNA, 19 nt, Artificial Sequence
  Description of Artificial Sequence: Synthetic oligonucleotide
cagaggaugccgugacccg

SEQ ID NO: 990803 - RNA, 19 nt, Artificial Sequence
  Description of Artificial Sequence: Synthetic oligonucleotide
cgcugaugaaccauuaaag

SEQ ID NO: 990804 - RNA, 19 nt, Artificial Sequence
  Description of Artificial Sequence: Synthetic oligonucleotide
uccucuaaugcagcuucug

SEQ ID NO: 990805 - RNA, 19 nt, Artificial Sequence
  Description of Artificial Sequence: Synthetic oligonucleotide
ucgcacuuuccacacgcuc

SEQ ID NO: 990806 - RNA, 19 nt, Artificial Sequence
  Description of Artificial Sequence: Synthetic oligonucleotide
gauuucuccgcgggccgcg

SEQ ID NO: 990807 - RNA, 19 nt, Artificial Sequence
  Description of Artificial Sequence: Synthetic oligonucleotide
cgaaaagccaucaucauaa

SEQ ID NO: 990808 - RNA, 19 nt, Artificial Sequence
  Description of Artificial Sequence: Synthetic oligonucleotide
gucgaagugccuucuucac

SEQ ID NO: 990809 - RNA, 19 nt, Artificial Sequence
  Description of Artificial Sequence: Synthetic oligonucleotide
uucuccaugcgagacuguc

SEQ ID NO: 990810 - RNA, 19 nt, Artificial Sequence
  Description of Artificial Sequence: Synthetic oligonucleotide
ucaggagucgaagugccuu

SEQ ID NO: 990811 - RNA, 19 nt, Artificial Sequence
  Description of Artificial Sequence: Synthetic oligonucleotide
gcuuuggaaucguaauacc

SEQ ID NO: 990812 - RNA, 19 nt, Artificial Sequence
  Description of Artificial Sequence: Synthetic oligonucleotide
agacuuuggugguaucaau

SEQ ID NO: 990813 - RNA, 19 nt, Artificial Sequence
  Description of Artificial Sequence: Synthetic oligonucleotide
ggcaucagcggcuuaucug

SEQ ID NO: 990814 - RNA, 19 nt, Artificial Sequence
  Description of Artificial Sequence: Synthetic oligonucleotide
aagguaugcaggggaauua

SEQ ID NO: 990815 - RNA, 19 nt, Artificial Sequence
  Description of Artificial Sequence: Synthetic oligonucleotide
ucggcgaggcuuagugcag

SEQ ID NO: 990816 - RNA, 19 nt, Artificial Sequence
  Description of Artificial Sequence: Synthetic oligonucleotide
caccacacucucacugagg

SEQ ID NO: 990817 - RNA, 19 nt, Artificial Sequence
  Description of Artificial Sequence: Synthetic oligonucleotide
gccaccaauaaucuugcca

SEQ ID NO: 990818 - RNA, 19 nt, Artificial Sequence
  Description of Artificial Sequence: Synthetic oligonucleotide
uccgcgcucgcacuuucca

SEQ ID NO: 990819 - RNA, 19 nt, Artificial Sequence
  Description of Artificial Sequence: Synthetic oligonucleotide
uuugucccgcgcucgcccc

SEQ ID NO: 990820 - RNA, 19 nt, Artificial Sequence
  Description of Artificial Sequence: Synthetic oligonucleotide
gaccuuucugcuauaccuc

SEQ ID NO: 990821 - RNA, 19 nt, Artificial Sequence
  Description of Artificial Sequence: Synthetic oligonucleotide
ggcugaaugcucauauaag

SEQ ID NO: 990822 - RNA, 19 nt, Artificial Sequence
  Description of Artificial Sequence: Synthetic oligonucleotide
augacuguauggauuguau

SEQ ID NO: 990823 - RNA, 19 nt, Artificial Sequence
  Description of Artificial Sequence: Synthetic oligonucleotide
ccaccaauaaucuugccaa

SEQ ID NO: 990824 - RNA, 19 nt, Artificial Sequence
  Description of Artificial Sequence: Synthetic oligonucleotide
uaccuccaugcugucaacc

SEQ ID NO: 990825 - RNA, 19 nt, Artificial Sequence
  Description of Artificial Sequence: Synthetic oligonucleotide
uuagugcagccgaggauuu

SEQ ID NO: 990826 - RNA, 19 nt, Artificial Sequence
  Description of Artificial Sequence: Synthetic oligonucleotide
cuguauggauuguauccca

SEQ ID NO: 990827 - RNA, 19 nt, Artificial Sequence
  Description of Artificial Sequence: Synthetic oligonucleotide
accaauaaucuugccaauu

SEQ ID NO: 990828 - RNA, 19 nt, Artificial Sequence
  Description of Artificial Sequence: Synthetic oligonucleotide
uaguuguuguaggcgagau

SEQ ID NO: 990829 - RNA, 19 nt, Artificial Sequence
  Description of Artificial Sequence: Synthetic oligonucleotide
ggggaauuaugauaggccu

SEQ ID NO: 990830 - RNA, 19 nt, Artificial Sequence
  Description of Artificial Sequence: Synthetic oligonucleotide
ggauuguaucccacaaacc

SEQ ID NO: 990831 - RNA, 19 nt, Artificial Sequence
  Description of Artificial Sequence: Synthetic oligonucleotide
cuguugcucucugagccag

SEQ ID NO: 990832 - RNA, 19 nt, Artificial Sequence
  Description of Artificial Sequence: Synthetic oligonucleotide
gagacugucucugucgacu

SEQ ID NO: 990833 - RNA, 19 nt, Artificial Sequence
  Description of Artificial Sequence: Synthetic oligonucleotide
uccucggcuuuguuugcca

SEQ ID NO: 990834 - RNA, 19 nt, Artificial Sequence
  Description of Artificial Sequence: Synthetic oligonucleotide
uggcuguaugcuucaucga

SEQ ID NO: 990835 - RNA, 19 nt, Artificial Sequence
  Description of Artificial Sequence: Synthetic oligonucleotide
gucacggcgaggagggcgg

SEQ ID NO: 990836 - RNA, 19 nt, Artificial Sequence
  Description of Artificial Sequence: Synthetic oligonucleotide
uguuggcucucugugguuu

SEQ ID NO: 990837 - RNA, 19 nt, Artificial Sequence
  Description of Artificial Sequence: Synthetic oligonucleotide
ggagcuuccgcgcucgcac

SEQ ID NO: 990838 - RNA, 19 nt, Artificial Sequence
  Description of Artificial Sequence: Synthetic oligonucleotide
gaggcuuagugcagccgag

SEQ ID NO: 990839 - RNA, 19 nt, Artificial Sequence
  Description of Artificial Sequence: Synthetic oligonucleotide
guugauaguuggaaagacu

SEQ ID NO: 990840 - RNA, 19 nt, Artificial Sequence
  Description of Artificial Sequence: Synthetic oligonucleotide
ggcgagaugacuguaugga

SEQ ID NO: 990841 - RNA, 19 nt, Artificial Sequence
  Description of Artificial Sequence: Synthetic oligonucleotide
ggcuguaugcuucaucgaa

SEQ ID NO: 990842 - RNA, 19 nt, Artificial Sequence
  Description of Artificial Sequence: Synthetic oligonucleotide
caccgcgggccgaaaaggc

SEQ ID NO: 990843 - RNA, 19 nt, Artificial Sequence
  Description of Artificial Sequence: Synthetic oligonucleotide
caguauuacuaucacuggu

SEQ ID NO: 990844 - RNA, 19 nt, Artificial Sequence
  Description of Artificial Sequence: Synthetic oligonucleotide
caggagucgaagugccuuc

SEQ ID NO: 990845 - RNA, 19 nt, Artificial Sequence
  Description of Artificial Sequence: Synthetic oligonucleotide
cguauucguuuaaauauuc

SEQ ID NO: 990846 - RNA, 19 nt, Artificial Sequence
  Description of Artificial Sequence: Synthetic oligonucleotide
gaucgggucuucccaggga

SEQ ID NO: 990847 - RNA, 19 nt, Artificial Sequence
  Description of Artificial Sequence: Synthetic oligonucleotide
gaugaggcggugguuucuc

SEQ ID NO: 990848 - RNA, 19 nt, Artificial Sequence
  Description of Artificial Sequence: Synthetic oligonucleotide
cguaauaccagaggaugcc

SEQ ID NO: 990849 - RNA, 19 nt, Artificial Sequence
  Description of Artificial Sequence: Synthetic oligonucleotide
cuucuaguuuucgcugaug

SEQ ID NO: 990850 - RNA, 19 nt, Artificial Sequence
  Description of Artificial Sequence: Synthetic oligonucleotide
ugaugaggcggugguuucu

SEQ ID NO: 990851 - RNA, 19 nt, Artificial Sequence
  Description of Artificial Sequence: Synthetic oligonucleotide
accgaccgcacaucaggca

SEQ ID NO: 990852 - RNA, 19 nt, Artificial Sequence
  Description of Artificial Sequence: Synthetic oligonucleotide
ggaccugucucuugaggac

SEQ ID NO: 990853 - RNA, 19 nt, Artificial Sequence
  Description of Artificial Sequence: Synthetic oligonucleotide
gcucauauaaggcucuccu

SEQ ID NO: 990854 - RNA, 19 nt, Artificial Sequence
  Description of Artificial Sequence: Synthetic oligonucleotide
guugcgcuguugcucucug

SEQ ID NO: 990855 - RNA, 19 nt, Artificial Sequence
  Description of Artificial Sequence: Synthetic oligonucleotide
augcucauauaaggcucuc

SEQ ID NO: 990856 - RNA, 19 nt, Artificial Sequence
  Description of Artificial Sequence: Synthetic oligonucleotide
gcgccgauucgucacggcg

SEQ ID NO: 990857 - RNA, 19 nt, Artificial Sequence
  Description of Artificial Sequence: Synthetic oligonucleotide
uccgugcuuuccaggaauu

SEQ ID NO: 990858 - RNA, 19 nt, Artificial Sequence
  Description of Artificial Sequence: Synthetic oligonucleotide
gccgugacccggcuguugg

SEQ ID NO: 990859 - RNA, 19 nt, Artificial Sequence
  Description of Artificial Sequence: Synthetic oligonucleotide
auaccucauguagggcauc

SEQ ID NO: 990860 - RNA, 19 nt, Artificial Sequence
  Description of Artificial Sequence: Synthetic oligonucleotide
ccaguuugggucccguccc

SEQ ID NO: 990861 - RNA, 19 nt, Artificial Sequence
  Description of Artificial Sequence: Synthetic oligonucleotide
cauggggucuguggguggc

SEQ ID NO: 990862 - RNA, 19 nt, Artificial Sequence
  Description of Artificial Sequence: Synthetic oligonucleotide
gaaaaggcgcccgcagcuc

SEQ ID NO: 990863 - RNA, 19 nt, Artificial Sequence
  Description of Artificial Sequence: Synthetic oligonucleotide
guaguuguuguaggcgaga

SEQ ID NO: 990864 - RNA, 19 nt, Artificial Sequence
  Description of Artificial Sequence: Synthetic oligonucleotide
guauucguuuaaauauucu

SEQ ID NO: 990865 - RNA, 19 nt, Artificial Sequence
  Description of Artificial Sequence: Synthetic oligonucleotide
uuuugcgggccuguuccuc

SEQ ID NO: 990866 - RNA, 19 nt, Artificial Sequence
  Description of Artificial Sequence: Synthetic oligonucleotide
augaaccauuaaagacugg

SEQ ID NO: 990867 - RNA, 19 nt, Artificial Sequence
  Description of Artificial Sequence: Synthetic oligonucleotide
cuguuggugcccggguucc

SEQ ID NO: 990868 - RNA, 19 nt, Artificial Sequence
  Description of Artificial Sequence: Synthetic oligonucleotide
gugacaaccgaccgcacau

SEQ ID NO: 990869 - RNA, 19 nt, Artificial Sequence
  Description of Artificial Sequence: Synthetic oligonucleotide
accgcgggccgaaaaggcg

SEQ ID NO: 990870 - RNA, 19 nt, Artificial Sequence
  Description of Artificial Sequence: Synthetic oligonucleotide
cuuagugcagccgaggauu

SEQ ID NO: 990871 - RNA, 19 nt, Artificial Sequence
  Description of Artificial Sequence: Synthetic oligonucleotide
cuggugucgcuccucuauc

SEQ ID NO: 990872 - RNA, 19 nt, Artificial Sequence
  Description of Artificial Sequence: Synthetic oligonucleotide
uguugcucucugagccagu

SEQ ID NO: 990873 - RNA, 19 nt, Artificial Sequence
  Description of Artificial Sequence: Synthetic oligonucleotide
ccaauuucccacaacuuua

SEQ ID NO: 990874 - RNA, 19 nt, Artificial Sequence
  Description of Artificial Sequence: Synthetic oligonucleotide
gauuaaguucucaguuccu

SEQ ID NO: 990875 - RNA, 19 nt, Artificial Sequence
  Description of Artificial Sequence: Synthetic oligonucleotide
uuccgcgcucgcacuuucc

SEQ ID NO: 990876 - RNA, 19 nt, Artificial Sequence
  Description of Artificial Sequence: Synthetic oligonucleotide
cacaacuuuaggucagggu

SEQ ID NO: 990877 - RNA, 19 nt, Artificial Sequence
  Description of Artificial Sequence: Synthetic oligonucleotide
cuccucuacuguugcgcug

SEQ ID NO: 990878 - RNA, 19 nt, Artificial Sequence
  Description of Artificial Sequence: Synthetic oligonucleotide
acacgcuccgggauuucuc

SEQ ID NO: 990879 - RNA, 19 nt, Artificial Sequence
  Description of Artificial Sequence: Synthetic oligonucleotide
ucaggcgaucgggucuucc

SEQ ID NO: 990880 - RNA, 19 nt, Artificial Sequence
  Description of Artificial Sequence: Synthetic oligonucleotide
uucuagcuguugugacaac

SEQ ID NO: 990881 - RNA, 19 nt, Artificial Sequence
  Description of Artificial Sequence: Synthetic oligonucleotide
accugcauucuagcuguug

SEQ ID NO: 990882 - RNA, 19 nt, Artificial Sequence
  Description of Artificial Sequence: Synthetic oligonucleotide
ggcgaucgggucuucccag

SEQ ID NO: 990883 - RNA, 19 nt, Artificial Sequence
  Description of Artificial Sequence: Synthetic oligonucleotide
cuccgggauuucuccgcgg

SEQ ID NO: 990884 - RNA, 19 nt, Artificial Sequence
  Description of Artificial Sequence: Synthetic oligonucleotide
uugugacaaccgaccgcac

SEQ ID NO: 990885 - RNA, 19 nt, Artificial Sequence
  Description of Artificial Sequence: Synthetic oligonucleotide
gcaggggaauuaugauagg

SEQ ID NO: 990886 - RNA, 19 nt, Artificial Sequence
  Description of Artificial Sequence: Synthetic oligonucleotide
cuugccuuuugcgggccug

SEQ ID NO: 990887 - RNA, 19 nt, Artificial Sequence
  Description of Artificial Sequence: Synthetic oligonucleotide
cuccucaggcgaucggguc

SEQ ID NO: 990888 - RNA, 19 nt, Artificial Sequence
  Description of Artificial Sequence: Synthetic oligonucleotide
gcaccacacucucacugag

SEQ ID NO: 990889 - RNA, 19 nt, Artificial Sequence
  Description of Artificial Sequence: Synthetic oligonucleotide
aaggcgcccgcagcuccgg

SEQ ID NO: 990890 - RNA, 19 nt, Artificial Sequence
  Description of Artificial Sequence: Synthetic oligonucleotide
ccuuuacuuggucccagac

SEQ ID NO: 990891 - RNA, 19 nt, Artificial Sequence
  Description of Artificial Sequence: Synthetic oligonucleotide
ccuccaugcugucaacccc

SEQ ID NO: 990892 - RNA, 19 nt, Artificial Sequence
  Description of Artificial Sequence: Synthetic oligonucleotide
gccgaaaaggcgcccgcag

SEQ ID NO: 990893 - RNA, 19 nt, Artificial Sequence
  Description of Artificial Sequence: Synthetic oligonucleotide
ggcuuagugcagccgagga

SEQ ID NO: 990894 - RNA, 19 nt, Artificial Sequence
  Description of Artificial Sequence: Synthetic oligonucleotide
ucgccacaugccaccaaua

SEQ ID NO: 990895 - RNA, 19 nt, Artificial Sequence
  Description of Artificial Sequence: Synthetic oligonucleotide
gccgauucgucacggcgag

SEQ ID NO: 990896 - RNA, 19 nt, Artificial Sequence
  Description of Artificial Sequence: Synthetic oligonucleotide
ugagacaccgcgggccgaa

SEQ ID NO: 990897 - RNA, 19 nt, Artificial Sequence
  Description of Artificial Sequence: Synthetic oligonucleotide
uggaggcuuuggaaucgua

SEQ ID NO: 990898 - RNA, 19 nt, Artificial Sequence
  Description of Artificial Sequence: Synthetic oligonucleotide
ugacaaccgaccgcacauc

SEQ ID NO: 990899 - RNA, 19 nt, Artificial Sequence
  Description of Artificial Sequence: Synthetic oligonucleotide
augaggcggugguuucucu

SEQ ID NO: 990900 - RNA, 19 nt, Artificial Sequence
  Description of Artificial Sequence: Synthetic oligonucleotide
cugucgacuuucuuccucu

SEQ ID NO: 990901 - RNA, 19 nt, Artificial Sequence
  Description of Artificial Sequence: Synthetic oligonucleotide
cacaaacccuggugugcug

SEQ ID NO: 990902 - RNA, 19 nt, Artificial Sequence
  Description of Artificial Sequence: Synthetic oligonucleotide
cuugaggaccugcauucua

SEQ ID NO: 990903 - RNA, 19 nt, Artificial Sequence
  Description of Artificial Sequence: Synthetic oligonucleotide
agaugacuguauggauugu

SEQ ID NO: 990904 - RNA, 19 nt, Artificial Sequence
  Description of Artificial Sequence: Synthetic oligonucleotide
cuccucggcuuuguuugcc

SEQ ID NO: 990905 - RNA, 19 nt, Artificial Sequence
  Description of Artificial Sequence: Synthetic oligonucleotide
gcuauaccucauguagggc

SEQ ID NO: 990906 - RNA, 19 nt, Artificial Sequence
  Description of Artificial Sequence: Synthetic oligonucleotide
ccgaccgcacaucaggcac

SEQ ID NO: 990907 - RNA, 19 nt, Artificial Sequence
  Description of Artificial Sequence: Synthetic oligonucleotide
aaacgggcgguggcuguau

SEQ ID NO: 990908 - RNA, 19 nt, Artificial Sequence
  Description of Artificial Sequence: Synthetic oligonucleotide
gcuucaucgaaaagccauc

SEQ ID NO: 990909 - RNA, 19 nt, Artificial Sequence
  Description of Artificial Sequence: Synthetic oligonucleotide
gcgaucgggucuucccagg

SEQ ID NO: 990910 - RNA, 19 nt, Artificial Sequence
  Description of Artificial Sequence: Synthetic oligonucleotide
agacaccgcgggccgaaaa

SEQ ID NO: 990911 - RNA, 19 nt, Artificial Sequence
  Description of Artificial Sequence: Synthetic oligonucleotide
ccgaaaaggcgcccgcagc

SEQ ID NO: 990912 - RNA, 19 nt, Artificial Sequence
  Description of Artificial Sequence: Synthetic oligonucleotide
uguuggugcccggguuccc

SEQ ID NO: 990913 - RNA, 19 nt, Artificial Sequence
  Description of Artificial Sequence: Synthetic oligonucleotide
cucuacuguugcgcuguug

SEQ ID NO: 990914 - RNA, 19 nt, Artificial Sequence
  Description of Artificial Sequence: Synthetic oligonucleotide
ggcgaggcuuagugcagcc

SEQ ID NO: 990915 - RNA, 19 nt, Artificial Sequence
  Description of Artificial Sequence: Synthetic oligonucleotide
gcauggggucugugggugg

SEQ ID NO: 990916 - RNA, 19 nt, Artificial Sequence
  Description of Artificial Sequence: Synthetic oligonucleotide
cucauauaaggcucuccuu

SEQ ID NO: 990917 - RNA, 19 nt, Artificial Sequence
  Description of Artificial Sequence: Synthetic oligonucleotide
cuuccgcgcucgcacuuuc

SEQ ID NO: 990918 - RNA, 19 nt, Artificial Sequence
  Description of Artificial Sequence: Synthetic oligonucleotide
auaggccuucauagauuca

SEQ ID NO: 990919 - RNA, 19 nt, Artificial Sequence
  Description of Artificial Sequence: Synthetic oligonucleotide
ccacaacuuuaggucaggg

SEQ ID NO: 990920 - RNA, 19 nt, Artificial Sequence
  Description of Artificial Sequence: Synthetic oligonucleotide
gcgagacugucucugucga

SEQ ID NO: 990921 - RNA, 19 nt, Artificial Sequence
  Description of Artificial Sequence: Synthetic oligonucleotide
ccgcgggccgaaaaggcgc

SEQ ID NO: 990922 - RNA, 19 nt, Artificial Sequence
  Description of Artificial Sequence: Synthetic oligonucleotide
cuaucacuggucccuucua

SEQ ID NO: 990923 - RNA, 19 nt, Artificial Sequence
  Description of Artificial Sequence: Synthetic oligonucleotide
aggaugccgugacccggcu

SEQ ID NO: 990924 - RNA, 19 nt, Artificial Sequence
  Description of Artificial Sequence: Synthetic oligonucleotide
gguggggcauaagaugguc

SEQ ID NO: 990925 - RNA, 19 nt, Artificial Sequence
  Description of Artificial Sequence: Synthetic oligonucleotide
ggucccagaccuuucugcu

SEQ ID NO: 990926 - RNA, 19 nt, Artificial Sequence
  Description of Artificial Sequence: Synthetic oligonucleotide
cagaccacauaacaccauu

SEQ ID NO: 990927 - RNA, 19 nt, Artificial Sequence
  Description of Artificial Sequence: Synthetic oligonucleotide
gaggacucggcgaggcuua

SEQ ID NO: 990928 - RNA, 19 nt, Artificial Sequence
  Description of Artificial Sequence: Synthetic oligonucleotide
ggcgguggcuguaugcuuc

SEQ ID NO: 990929 - RNA, 19 nt, Artificial Sequence
  Description of Artificial Sequence: Synthetic oligonucleotide
caugcgagacugucucugu

SEQ ID NO: 990930 - RNA, 19 nt, Artificial Sequence
  Description of Artificial Sequence: Synthetic oligonucleotide
cagggaggacucggcgagg

SEQ ID NO: 990931 - RNA, 19 nt, Artificial Sequence
  Description of Artificial Sequence: Synthetic oligonucleotide
cuacuguugcgcuguugcu

SEQ ID NO: 990932 - RNA, 19 nt, Artificial Sequence
  Description of Artificial Sequence: Synthetic oligonucleotide
uucgggcauggggucugug

SEQ ID NO: 990933 - RNA, 19 nt, Artificial Sequence
  Description of Artificial Sequence: Synthetic oligonucleotide
cuacuuccaccuucagagu

SEQ ID NO: 990934 - RNA, 19 nt, Artificial Sequence
  Description of Artificial Sequence: Synthetic oligonucleotide
ccgcacaucaggcaccaca

SEQ ID NO: 990935 - RNA, 19 nt, Artificial Sequence
  Description of Artificial Sequence: Synthetic oligonucleotide
gaaacgggcgguggcugua

SEQ ID NO: 990936 - RNA, 19 nt, Artificial Sequence
  Description of Artificial Sequence: Synthetic oligonucleotide
cucggcuuuguuugccacu

SEQ ID NO: 990937 - RNA, 19 nt, Artificial Sequence
  Description of Artificial Sequence: Synthetic oligonucleotide
gcgaggcuuagugcagccg

SEQ ID NO: 990938 - RNA, 19 nt, Artificial Sequence
  Description of Artificial Sequence: Synthetic oligonucleotide
cucgccacaugccaccaau

SEQ ID NO: 990939 - RNA, 19 nt, Artificial Sequence
  Description of Artificial Sequence: Synthetic oligonucleotide
guaggcgagaugacuguau

SEQ ID NO: 990940 - RNA, 19 nt, Artificial Sequence
  Description of Artificial Sequence: Synthetic oligonucleotide
guggggcauaagauggucu

SEQ ID NO: 990941 - RNA, 19 nt, Artificial Sequence
  Description of Artificial Sequence: Synthetic oligonucleotide
gcgaugcugcccugacugc

SEQ ID NO: 990942 - RNA, 19 nt, Artificial Sequence
  Description of Artificial Sequence: Synthetic oligonucleotide
ggaugccgugacccggcug

SEQ ID NO: 990943 - RNA, 19 nt, Artificial Sequence
  Description of Artificial Sequence: Synthetic oligonucleotide
ccucggcuuuguuugccac

SEQ ID NO: 990944 - RNA, 19 nt, Artificial Sequence
  Description of Artificial Sequence: Synthetic oligonucleotide
gccuuuugcgggccuguuc

SEQ ID NO: 990945 - RNA, 19 nt, Artificial Sequence
  Description of Artificial Sequence: Synthetic oligonucleotide
gggccgaaaaggcgcccgc

SEQ ID NO: 990946 - RNA, 19 nt, Artificial Sequence
  Description of Artificial Sequence: Synthetic oligonucleotide
ggugcccggguucccuccc

SEQ ID NO: 990947 - RNA, 19 nt, Artificial Sequence
  Description of Artificial Sequence: Synthetic oligonucleotide
cgucacggcgaggagggcg

SEQ ID NO: 990948 - RNA, 19 nt, Artificial Sequence
  Description of Artificial Sequence: Synthetic oligonucleotide
cgaggcuuagugcagccga

SEQ ID NO: 990949 - RNA, 19 nt, Artificial Sequence
  Description of Artificial Sequence: Synthetic oligonucleotide
aggggcgaugcugcccuga

SEQ ID NO: 990950 - RNA, 19 nt, Artificial Sequence
  Description of Artificial Sequence: Synthetic oligonucleotide
caccaauaaucuugccaau

SEQ ID NO: 990951 - RNA, 19 nt, Artificial Sequence
  Description of Artificial Sequence: Synthetic oligonucleotide
ccggcuucgcuucccuuug

SEQ ID NO: 990952 - RNA, 19 nt, Artificial Sequence
  Description of Artificial Sequence: Synthetic oligonucleotide
cgaccgcacaucaggcacc

SEQ ID NO: 990953 - RNA, 19 nt, Artificial Sequence
  Description of Artificial Sequence: Synthetic oligonucleotide
gagcuuccgcgcucgcacu

SEQ ID NO: 990954 - RNA, 19 nt, Artificial Sequence
  Description of Artificial Sequence: Synthetic oligonucleotide
ccauagggaugcucuccuc

SEQ ID NO: 990955 - RNA, 19 nt, Artificial Sequence
  Description of Artificial Sequence: Synthetic oligonucleotide
ccgggauuucuccgcgggc

SEQ ID NO: 990956 - RNA, 19 nt, Artificial Sequence
  Description of Artificial Sequence: Synthetic oligonucleotide
ccgggcgccgauucgucac

SEQ ID NO: 990957 - RNA, 19 nt, Artificial Sequence
  Description of Artificial Sequence: Synthetic oligonucleotide
ggcgccgauucgucacggc

SEQ ID NO: 990958 - RNA, 19 nt, Artificial Sequence
  Description of Artificial Sequence: Synthetic oligonucleotide
ugccuuuugcgggccuguu

SEQ ID NO: 990959 - RNA, 19 nt, Artificial Sequence
  Description of Artificial Sequence: Synthetic oligonucleotide
cacggcgaggagggcggag

SEQ ID NO: 990960 - RNA, 19 nt, Artificial Sequence
  Description of Artificial Sequence: Synthetic oligonucleotide
gacugucucugucgacuuu

SEQ ID NO: 990961 - RNA, 19 nt, Artificial Sequence
  Description of Artificial Sequence: Synthetic oligonucleotide
ggucccgucccagccgggc

SEQ ID NO: 990962 - RNA, 19 nt, Artificial Sequence
  Description of Artificial Sequence: Synthetic oligonucleotide
ucgucacggcgaggagggc

SEQ ID NO: 990963 - RNA, 19 nt, Artificial Sequence
  Description of Artificial Sequence: Synthetic oligonucleotide
caucagcggcuuaucuggu

SEQ ID NO: 990964 - RNA, 19 nt, Artificial Sequence
  Description of Artificial Sequence: Synthetic oligonucleotide
cccuuugucccgcgcucgc

SEQ ID NO: 990965 - RNA, 19 nt, Artificial Sequence
  Description of Artificial Sequence: Synthetic oligonucleotide
gcuuagugcagccgaggau

SEQ ID NO: 990966 - RNA, 19 nt, Artificial Sequence
  Description of Artificial Sequence: Synthetic oligonucleotide
gcgagaugacuguauggau

SEQ ID NO: 990967 - RNA, 19 nt, Artificial Sequence
  Description of Artificial Sequence: Synthetic oligonucleotide
guuggugcccggguucccu

SEQ ID NO: 990968 - RNA, 19 nt, Artificial Sequence
  Description of Artificial Sequence: Synthetic oligonucleotide
ccucuaucugaaggaguuc

SEQ ID NO: 990969 - RNA, 19 nt, Artificial Sequence
  Description of Artificial Sequence: Synthetic oligonucleotide
ccuuugucccgcgcucgcc

SEQ ID NO: 990970 - RNA, 19 nt, Artificial Sequence
  Description of Artificial Sequence: Synthetic oligonucleotide
gggaauuaugauaggccuu

SEQ ID NO: 990971 - RNA, 19 nt, Artificial Sequence
  Description of Artificial Sequence: Synthetic oligonucleotide
ccagccgggcgccgauucg

SEQ ID NO: 990972 - RNA, 19 nt, Artificial Sequence
  Description of Artificial Sequence: Synthetic oligonucleotide
gggcauaagauggucuuuu

SEQ ID NO: 990973 - RNA, 19 nt, Artificial Sequence
  Description of Artificial Sequence: Synthetic oligonucleotide
gggcgccgauucgucacgg

SEQ ID NO: 990974 - RNA, 19 nt, Artificial Sequence
  Description of Artificial Sequence: Synthetic oligonucleotide
ggcggugguuucucuggaa

SEQ ID NO: 990975 - RNA, 19 nt, Artificial Sequence
  Description of Artificial Sequence: Synthetic oligonucleotide
cuccgacacucuccucaga

SEQ ID NO: 990976 - RNA, 19 nt, Artificial Sequence
  Description of Artificial Sequence: Synthetic oligonucleotide
ccucagaacucuuccaguu

SEQ ID NO: 990977 - RNA, 19 nt, Artificial Sequence
  Description of Artificial Sequence: Synthetic oligonucleotide
ccgcgcucgcacuuuccac

SEQ ID NO: 990978 - RNA, 19 nt, Artificial Sequence
  Description of Artificial Sequence: Synthetic oligonucleotide
cgagacugucucugucgac

SEQ ID NO: 990979 - RNA, 19 nt, Artificial Sequence
  Description of Artificial Sequence: Synthetic oligonucleotide
cgccgauucgucacggcga

SEQ ID NO: 990980 - RNA, 19 nt, Artificial Sequence
  Description of Artificial Sequence: Synthetic oligonucleotide
cgaaaaggcgcccgcagcu

SEQ ID NO: 990981 - RNA, 19 nt, Artificial Sequence
  Description of Artificial Sequence: Synthetic oligonucleotide
gugcccggguucccuccca

SEQ ID NO: 990982 - RNA, 19 nt, Artificial Sequence
  Description of Artificial Sequence: Synthetic oligonucleotide
ggccgaaaaggcgcccgca

SEQ ID NO: 990983 - RNA, 19 nt, Artificial Sequence
  Description of Artificial Sequence: Synthetic oligonucleotide
gcccggguucccucccagc

SEQ ID NO: 990984 - RNA, 19 nt, Artificial Sequence
  Description of Artificial Sequence: Synthetic oligonucleotide
cgccacaugccaccaauaa

SEQ ID NO: 990985 - RNA, 19 nt, Artificial Sequence
  Description of Artificial Sequence: Synthetic oligonucleotide
ggucuccgacacucuccuc

SEQ ID NO: 990986 - RNA, 19 nt, Artificial Sequence
  Description of Artificial Sequence: Synthetic oligonucleotide
cgcgggccgaaaaggcgcc

SEQ ID NO: 990987 - RNA, 19 nt, Artificial Sequence
  Description of Artificial Sequence: Synthetic oligonucleotide
gggcauggggucugugggu

SEQ ID NO: 990988 - RNA, 19 nt, Artificial Sequence
  Description of Artificial Sequence: Synthetic oligonucleotide
gagacaccgcgggccgaaa

SEQ ID NO: 990989 - RNA, 19 nt, Artificial Sequence
  Description of Artificial Sequence: Synthetic oligonucleotide
cgggccgaaaaggcgcccg

SEQ ID NO: 990990 - RNA, 19 nt, Artificial Sequence
  Description of Artificial Sequence: Synthetic oligonucleotide
cgggcgccgauucgucacg

SEQ ID NO: 990991 - RNA, 19 nt, Artificial Sequence
  Description of Artificial Sequence: Synthetic oligonucleotide
cucaggcgaucgggucuuc

SEQ ID NO: 990992 - RNA, 19 nt, Artificial Sequence
  Description of Artificial Sequence: Synthetic oligonucleotide
ccgauucgucacggcgagg

SEQ ID NO: 990993 - RNA, 19 nt, Artificial Sequence
  Description of Artificial Sequence: Synthetic oligonucleotide
cagugagaucucgccacau

SEQ ID NO: 990994 - RNA, 19 nt, Artificial Sequence
  Description of Artificial Sequence: Synthetic oligonucleotide
ggagucgaagugccuucuu

SEQ ID NO: 990995 - RNA, 19 nt, Artificial Sequence
  Description of Artificial Sequence: Synthetic oligonucleotide
augccgugacccggcuguu

SEQ ID NO: 990996 - RNA, 19 nt, Artificial Sequence
  Description of Artificial Sequence: Synthetic oligonucleotide
ucccagccgggcgccgauu

SEQ ID NO: 990997 - RNA, 19 nt, Artificial Sequence
  Description of Artificial Sequence: Synthetic oligonucleotide
cccggcuguuggugcccgg

SEQ ID NO: 990998 - RNA, 19 nt, Artificial Sequence
  Description of Artificial Sequence: Synthetic oligonucleotide
ccgccccucgcgccggagc

SEQ ID NO: 990999 - RNA, 19 nt, Artificial Sequence
  Description of Artificial Sequence: Synthetic oligonucleotide
gggucccgucccagccggg

SEQ ID NO: 991000 - RNA, 19 nt, Artificial Sequence
  Description of Artificial Sequence: Synthetic oligonucleotide
gcgggccgaaaaggcgccc

SEQ ID NO: 991001 - RNA, 19 nt, Artificial Sequence
  Description of Artificial Sequence: Synthetic oligonucleotide
ccccucgcgccggagcuuc

SEQ ID NO: 991002 - RNA, 19 nt, Artificial Sequence
  Description of Artificial Sequence: Synthetic oligonucleotide
cagcugcaauuuucuccau

SEQ ID NO: 991003 - RNA, 19 nt, Artificial Sequence
  Description of Artificial Sequence: Synthetic oligonucleotide
ggacucggcgaggcuuagu

SEQ ID NO: 991004 - RNA, 19 nt, Artificial Sequence
  Description of Artificial Sequence: Synthetic oligonucleotide
cggcuuaucugguggcuuu

SEQ ID NO: 991005 - RNA, 19 nt, Artificial Sequence
  Description of Artificial Sequence: Synthetic oligonucleotide
cggagcuuccgcgcucgca

SEQ ID NO: 991006 - RNA, 19 nt, Artificial Sequence
  Description of Artificial Sequence: Synthetic oligonucleotide
ccucaggcgaucgggucuu

SEQ ID NO: 991007 - RNA, 19 nt, Artificial Sequence
  Description of Artificial Sequence: Synthetic oligonucleotide
ccgugcuuuccaggaauuu

SEQ ID NO: 991008 - RNA, 19 nt, Artificial Sequence
  Description of Artificial Sequence: Synthetic oligonucleotide
ggguucccucccagccugu

SEQ ID NO: 991009 - RNA, 19 nt, Artificial Sequence
  Description of Artificial Sequence: Synthetic oligonucleotide
cgccccucgcgccggagcu

SEQ ID NO: 991010 - RNA, 19 nt, Artificial Sequence
  Description of Artificial Sequence: Synthetic oligonucleotide
cgggccgcggccggcucuc

SEQ ID NO: 991011 - RNA, 19 nt, Artificial Sequence
  Description of Artificial Sequence: Synthetic oligonucleotide
ccucuacuguugcgcuguu

SEQ ID NO: 991012 - RNA, 19 nt, Artificial Sequence
  Description of Artificial Sequence: Synthetic oligonucleotide
cggcuucgcuucccuuugu

SEQ ID NO: 991013 - RNA, 19 nt, Artificial Sequence
  Description of Artificial Sequence: Synthetic oligonucleotide
gccccucgcgccggagcuu

SEQ ID NO: 991014 - RNA, 19 nt, Artificial Sequence
  Description of Artificial Sequence: Synthetic oligonucleotide
aauacacagacacacaggc

SEQ ID NO: 991015 - RNA, 19 nt, Artificial Sequence
  Description of Artificial Sequence: Synthetic oligonucleotide
aauacaacgggucuggagg

SEQ ID NO: 991016 - RNA, 19 nt, Artificial Sequence
  Description of Artificial Sequence: Synthetic oligonucleotide
aaagaauugagaaggaagc

SEQ ID NO: 991017 - RNA, 19 nt, Artificial Sequence
  Description of Artificial Sequence: Synthetic oligonucleotide
agagcuaacauuuucaguc

SEQ ID NO: 991018 - RNA, 19 nt, Artificial Sequence
  Description of Artificial Sequence: Synthetic oligonucleotide
aacucuacagucuugugac

SEQ ID NO: 991019 - RNA, 19 nt, Artificial Sequence
  Description of Artificial Sequence: Synthetic oligonucleotide
ugaauuuccaacucuacag

SEQ ID NO: 991020 - RNA, 19 nt, Artificial Sequence
  Description of Artificial Sequence: Synthetic oligonucleotide
aaacacgaaggguauauuc

SEQ ID NO: 991021 - RNA, 19 nt, Artificial Sequence
  Description of Artificial Sequence: Synthetic oligonucleotide
uuacccaauacacagacac

SEQ ID NO: 991022 - RNA, 19 nt, Artificial Sequence
  Description of Artificial Sequence: Synthetic oligonucleotide
ucuccaaaucucaauauag

SEQ ID NO: 991023 - RNA, 19 nt, Artificial Sequence
  Description of Artificial Sequence: Synthetic oligonucleotide
uccaagauaacucucgugu

SEQ ID NO: 991024 - RNA, 19 nt, Artificial Sequence
  Description of Artificial Sequence: Synthetic oligonucleotide
uccuauaaauucaaguuca

SEQ ID NO: 991025 - RNA, 19 nt, Artificial Sequence
  Description of Artificial Sequence: Synthetic oligonucleotide
agaaugaacagacgucucc

SEQ ID NO: 991026 - RNA, 19 nt, Artificial Sequence
  Description of Artificial Sequence: Synthetic oligonucleotide
aagaauugagaaggaagcc

SEQ ID NO: 991027 - RNA, 19 nt, Artificial Sequence
  Description of Artificial Sequence: Synthetic oligonucleotide
ucaguaaagaauugagaag

SEQ ID NO: 991028 - RNA, 19 nt, Artificial Sequence
  Description of Artificial Sequence: Synthetic oligonucleotide
ucuacuucuuuacuaagca

SEQ ID NO: 991029 - RNA, 19 nt, Artificial Sequence
  Description of Artificial Sequence: Synthetic oligonucleotide
auaacucucguguacauga

SEQ ID NO: 991030 - RNA, 19 nt, Artificial Sequence
  Description of Artificial Sequence: Synthetic oligonucleotide
aaggguauauucugcucac

SEQ ID NO: 991031 - RNA, 19 nt, Artificial Sequence
  Description of Artificial Sequence: Synthetic oligonucleotide
ucugccgaacaauauaacc

SEQ ID NO: 991032 - RNA, 19 nt, Artificial Sequence
  Description of Artificial Sequence: Synthetic oligonucleotide
uuccuauaaauucaaguuc

SEQ ID NO: 991033 - RNA, 19 nt, Artificial Sequence
  Description of Artificial Sequence: Synthetic oligonucleotide
cugccgaacaauauaaccc

SEQ ID NO: 991034 - RNA, 19 nt, Artificial Sequence
  Description of Artificial Sequence: Synthetic oligonucleotide
acuggcacuacucucuacg

SEQ ID NO: 991035 - RNA, 19 nt, Artificial Sequence
  Description of Artificial Sequence: Synthetic oligonucleotide
ucuugugaccuacaccagg

SEQ ID NO: 991036 - RNA, 19 nt, Artificial Sequence
  Description of Artificial Sequence: Synthetic oligonucleotide
acauuacuggucuuugaac

SEQ ID NO: 991037 - RNA, 19 nt, Artificial Sequence
  Description of Artificial Sequence: Synthetic oligonucleotide
uuauaugccugccgggccg

SEQ ID NO: 991038 - RNA, 19 nt, Artificial Sequence
  Description of Artificial Sequence: Synthetic oligonucleotide
agaagagacgcguuccugg

SEQ ID NO: 991039 - RNA, 19 nt, Artificial Sequence
  Description of Artificial Sequence: Synthetic oligonucleotide
ugucucuugcacauuacug

SEQ ID NO: 991040 - RNA, 19 nt, Artificial Sequence
  Description of Artificial Sequence: Synthetic oligonucleotide
uuagaaaggacuggcacug

SEQ ID NO: 991041 - RNA, 19 nt, Artificial Sequence
  Description of Artificial Sequence: Synthetic oligonucleotide
uccagcaugguuuuauaug

SEQ ID NO: 991042 - RNA, 19 nt, Artificial Sequence
  Description of Artificial Sequence: Synthetic oligonucleotide
ugcuaaauucaaacucagg

SEQ ID NO: 991043 - RNA, 19 nt, Artificial Sequence
  Description of Artificial Sequence: Synthetic oligonucleotide
ucaaucacagguguagaag

SEQ ID NO: 991044 - RNA, 19 nt, Artificial Sequence
  Description of Artificial Sequence: Synthetic oligonucleotide
caugguuuuauaugccugc

SEQ ID NO: 991045 - RNA, 19 nt, Artificial Sequence
  Description of Artificial Sequence: Synthetic oligonucleotide
uuuuauaugccugccgggc

SEQ ID NO: 991046 - RNA, 19 nt, Artificial Sequence
  Description of Artificial Sequence: Synthetic oligonucleotide
gagcuaacauuuucagucg

SEQ ID NO: 991047 - RNA, 19 nt, Artificial Sequence
  Description of Artificial Sequence: Synthetic oligonucleotide
uuuauaugccugccgggcc

SEQ ID NO: 991048 - RNA, 19 nt, Artificial Sequence
  Description of Artificial Sequence: Synthetic oligonucleotide
agcacuuucuuggagucgc

SEQ ID NO: 991049 - RNA, 19 nt, Artificial Sequence
  Description of Artificial Sequence: Synthetic oligonucleotide
ugguuuuauaugccugccg

SEQ ID NO: 991050 - RNA, 19 nt, Artificial Sequence
  Description of Artificial Sequence: Synthetic oligonucleotide
aggaucaguugaugaagcc

SEQ ID NO: 991051 - RNA, 19 nt, Artificial Sequence
  Description of Artificial Sequence: Synthetic oligonucleotide
uuuucagucgcugcugcgg

SEQ ID NO: 991052 - RNA, 19 nt, Artificial Sequence
  Description of Artificial Sequence: Synthetic oligonucleotide
gaauacaacgggucuggag

SEQ ID NO: 991053 - RNA, 19 nt, Artificial Sequence
  Description of Artificial Sequence: Synthetic oligonucleotide
cagacuacgccccagugcc

SEQ ID NO: 991054 - RNA, 19 nt, Artificial Sequence
  Description of Artificial Sequence: Synthetic oligonucleotide
auuucacccgcuaccaucc

SEQ ID NO: 991055 - RNA, 19 nt, Artificial Sequence
  Description of Artificial Sequence: Synthetic oligonucleotide
aaucacagguguagaagac

SEQ ID NO: 991056 - RNA, 19 nt, Artificial Sequence
  Description of Artificial Sequence: Synthetic oligonucleotide
acagucuugugaccuacac

SEQ ID NO: 991057 - RNA, 19 nt, Artificial Sequence
  Description of Artificial Sequence: Synthetic oligonucleotide
ugucugccgaacaauauaa

SEQ ID NO: 991058 - RNA, 19 nt, Artificial Sequence
  Description of Artificial Sequence: Synthetic oligonucleotide
acaaucaaugauggugugc

SEQ ID NO: 991059 - RNA, 19 nt, Artificial Sequence
  Description of Artificial Sequence: Synthetic oligonucleotide
auauaacccauuggugucc

SEQ ID NO: 991060 - RNA, 19 nt, Artificial Sequence
  Description of Artificial Sequence: Synthetic oligonucleotide
auccuuagaaaggacuggc

SEQ ID NO: 991061 - RNA, 19 nt, Artificial Sequence
  Description of Artificial Sequence: Synthetic oligonucleotide
acugagaauacaacggguc

SEQ ID NO: 991062 - RNA, 19 nt, Artificial Sequence
  Description of Artificial Sequence: Synthetic oligonucleotide
aacucucguguacaugaag

SEQ ID NO: 991063 - RNA, 19 nt, Artificial Sequence
  Description of Artificial Sequence: Synthetic oligonucleotide
ucucguguacaugaagggg

SEQ ID NO: 991064 - RNA, 19 nt, Artificial Sequence
  Description of Artificial Sequence: Synthetic oligonucleotide
ucagacuacgccccagugc

SEQ ID NO: 991065 - RNA, 19 nt, Artificial Sequence
  Description of Artificial Sequence: Synthetic oligonucleotide
aggguuaucacagagcuaa

SEQ ID NO: 991066 - RNA, 19 nt, Artificial Sequence
  Description of Artificial Sequence: Synthetic oligonucleotide
ucucaauauagugugguuc

SEQ ID NO: 991067 - RNA, 19 nt, Artificial Sequence
  Description of Artificial Sequence: Synthetic oligonucleotide
acucucguguacaugaagg

SEQ ID NO: 991068 - RNA, 19 nt, Artificial Sequence
  Description of Artificial Sequence: Synthetic oligonucleotide
aacccauugguguccaaga

SEQ ID NO: 991069 - RNA, 19 nt, Artificial Sequence
  Description of Artificial Sequence: Synthetic oligonucleotide
ugaacagacgucuccugug

SEQ ID NO: 991070 - RNA, 19 nt, Artificial Sequence
  Description of Artificial Sequence: Synthetic oligonucleotide
agugcuaccccaguggcuc

SEQ ID NO: 991071 - RNA, 19 nt, Artificial Sequence
  Description of Artificial Sequence: Synthetic oligonucleotide
agaauugagaaggaagccu

SEQ ID NO: 991072 - RNA, 19 nt, Artificial Sequence
  Description of Artificial Sequence: Synthetic oligonucleotide
ugagaauacaacgggucug

SEQ ID NO: 991073 - RNA, 19 nt, Artificial Sequence
  Description of Artificial Sequence: Synthetic oligonucleotide
ugcgguugagugcaaacac

SEQ ID NO: 991074 - RNA, 19 nt, Artificial Sequence
  Description of Artificial Sequence: Synthetic oligonucleotide
ggcacaaucaaugauggug

SEQ ID NO: 991075 - RNA, 19 nt, Artificial Sequence
  Description of Artificial Sequence: Synthetic oligonucleotide
guacauccggucuuggaag

SEQ ID NO: 991076 - RNA, 19 nt, Artificial Sequence
  Description of Artificial Sequence: Synthetic oligonucleotide
ucucuugcacauuacuggu

SEQ ID NO: 991077 - RNA, 19 nt, Artificial Sequence
  Description of Artificial Sequence: Synthetic oligonucleotide
ucguguacaugaaggggag

SEQ ID NO: 991078 - RNA, 19 nt, Artificial Sequence
  Description of Artificial Sequence: Synthetic oligonucleotide
gauggacucacagugcuac

SEQ ID NO: 991079 - RNA, 19 nt, Artificial Sequence
  Description of Artificial Sequence: Synthetic oligonucleotide
caugaaggggagcuguuag

SEQ ID NO: 991080 - RNA, 19 nt, Artificial Sequence
  Description of Artificial Sequence: Synthetic oligonucleotide
uacguccugugccacagcc

SEQ ID NO: 991081 - RNA, 19 nt, Artificial Sequence
  Description of Artificial Sequence: Synthetic oligonucleotide
ugcgucucucagaagagac

SEQ ID NO: 991082 - RNA, 19 nt, Artificial Sequence
  Description of Artificial Sequence: Synthetic oligonucleotide
agugcaaacacgaagggua

SEQ ID NO: 991083 - RNA, 19 nt, Artificial Sequence
  Description of Artificial Sequence: Synthetic oligonucleotide
uuggccuuagggauuuccc

SEQ ID NO: 991084 - RNA, 19 nt, Artificial Sequence
  Description of Artificial Sequence: Synthetic oligonucleotide
gcugcauucucucuugccg

SEQ ID NO: 991085 - RNA, 19 nt, Artificial Sequence
  Description of Artificial Sequence: Synthetic oligonucleotide
agugaauuuccaacucuac

SEQ ID NO: 991086 - RNA, 19 nt, Artificial Sequence
  Description of Artificial Sequence: Synthetic oligonucleotide
agcagaaugaacagacguc

SEQ ID NO: 991087 - RNA, 19 nt, Artificial Sequence
  Description of Artificial Sequence: Synthetic oligonucleotide
acagacgucuccuguguag

SEQ ID NO: 991088 - RNA, 19 nt, Artificial Sequence
  Description of Artificial Sequence: Synthetic oligonucleotide
guaugggugggcugggagg

SEQ ID NO: 991089 - RNA, 19 nt, Artificial Sequence
  Description of Artificial Sequence: Synthetic oligonucleotide
cugcuaaauucaaacucag

SEQ ID NO: 991090 - RNA, 19 nt, Artificial Sequence
  Description of Artificial Sequence: Synthetic oligonucleotide
ugcccuuaggcccagugaa

SEQ ID NO: 991091 - RNA, 19 nt, Artificial Sequence
  Description of Artificial Sequence: Synthetic oligonucleotide
cauuucacccgcuaccauc

SEQ ID NO: 991092 - RNA, 19 nt, Artificial Sequence
  Description of Artificial Sequence: Synthetic oligonucleotide
cuaacauuuucagucgcug

SEQ ID NO: 991093 - RNA, 19 nt, Artificial Sequence
  Description of Artificial Sequence: Synthetic oligonucleotide
uugccguucuuucaaaauu

SEQ ID NO: 991094 - RNA, 19 nt, Artificial Sequence
  Description of Artificial Sequence: Synthetic oligonucleotide
uccaccuuuggacugcguc

SEQ ID NO: 991095 - RNA, 19 nt, Artificial Sequence
  Description of Artificial Sequence: Synthetic oligonucleotide
ugccguucuuucaaaauua

SEQ ID NO: 991096 - RNA, 19 nt, Artificial Sequence
  Description of Artificial Sequence: Synthetic oligonucleotide
uccuuagaaaggacuggca

SEQ ID NO: 991097 - RNA, 19 nt, Artificial Sequence
  Description of Artificial Sequence: Synthetic oligonucleotide
gauggugugcagagugucg

SEQ ID NO: 991098 - RNA, 19 nt, Artificial Sequence
  Description of Artificial Sequence: Synthetic oligonucleotide
cucguguacaugaagggga

SEQ ID NO: 991099 - RNA, 19 nt, Artificial Sequence
  Description of Artificial Sequence: Synthetic oligonucleotide
ucaucagcggggcacugga

SEQ ID NO: 991100 - RNA, 19 nt, Artificial Sequence
  Description of Artificial Sequence: Synthetic oligonucleotide
ggaucaguugaugaagccg

SEQ ID NO: 991101 - RNA, 19 nt, Artificial Sequence
  Description of Artificial Sequence: Synthetic oligonucleotide
ggguauauucugcucacag

SEQ ID NO: 991102 - RNA, 19 nt, Artificial Sequence
  Description of Artificial Sequence: Synthetic oligonucleotide
uuucagucgcugcugcgga

SEQ ID NO: 991103 - RNA, 19 nt, Artificial Sequence
  Description of Artificial Sequence: Synthetic oligonucleotide
uugccugcgucucucagaa

SEQ ID NO: 991104 - RNA, 19 nt, Artificial Sequence
  Description of Artificial Sequence: Synthetic oligonucleotide
uucagacuacgccccagug

SEQ ID NO: 991105 - RNA, 19 nt, Artificial Sequence
  Description of Artificial Sequence: Synthetic oligonucleotide
uccaacucuacagucuugu

SEQ ID NO: 991106 - RNA, 19 nt, Artificial Sequence
  Description of Artificial Sequence: Synthetic oligonucleotide
ugaagccgucuucuuuagg

SEQ ID NO: 991107 - RNA, 19 nt, Artificial Sequence
  Description of Artificial Sequence: Synthetic oligonucleotide
gagagucugaagauacagc

SEQ ID NO: 991108 - RNA, 19 nt, Artificial Sequence
  Description of Artificial Sequence: Synthetic oligonucleotide
agugugguuccuuuccagu

SEQ ID NO: 991109 - RNA, 19 nt, Artificial Sequence
  Description of Artificial Sequence: Synthetic oligonucleotide
acgaaggguauauucugcu

SEQ ID NO: 991110 - RNA, 19 nt, Artificial Sequence
  Description of Artificial Sequence: Synthetic oligonucleotide
ucaccauuucacccgcuac

SEQ ID NO: 991111 - RNA, 19 nt, Artificial Sequence
  Description of Artificial Sequence: Synthetic oligonucleotide
gauaacucucguguacaug

SEQ ID NO: 991112 - RNA, 19 nt, Artificial Sequence
  Description of Artificial Sequence: Synthetic oligonucleotide
ucucucagaagagacgcgu

SEQ ID NO: 991113 - RNA, 19 nt, Artificial Sequence
  Description of Artificial Sequence: Synthetic oligonucleotide
acugcuccgacugagaaua

SEQ ID NO: 991114 - RNA, 19 nt, Artificial Sequence
  Description of Artificial Sequence: Synthetic oligonucleotide
agaaaggacuggcacugcu

SEQ ID NO: 991115 - RNA, 19 nt, Artificial Sequence
  Description of Artificial Sequence: Synthetic oligonucleotide
cacagagcuaacauuuuca

SEQ ID NO: 991116 - RNA, 19 nt, Artificial Sequence
  Description of Artificial Sequence: Synthetic oligonucleotide
cagagugucguccagucca

SEQ ID NO: 991117 - RNA, 19 nt, Artificial Sequence
  Description of Artificial Sequence: Synthetic oligonucleotide
caucauagcugaagauccc

SEQ ID NO: 991118 - RNA, 19 nt, Artificial Sequence
  Description of Artificial Sequence: Synthetic oligonucleotide
ugaagauccccacgaugcu

SEQ ID NO: 991119 - RNA, 19 nt, Artificial Sequence
  Description of Artificial Sequence: Synthetic oligonucleotide
ugaugaagccgucuucuuu

SEQ ID NO: 991120 - RNA, 19 nt, Artificial Sequence
  Description of Artificial Sequence: Synthetic oligonucleotide
cuaccaucccugcacuggg

SEQ ID NO: 991121 - RNA, 19 nt, Artificial Sequence
  Description of Artificial Sequence: Synthetic oligonucleotide
ugugcagagugucguccag

SEQ ID NO: 991122 - RNA, 19 nt, Artificial Sequence
  Description of Artificial Sequence: Synthetic oligonucleotide
guagucucggaaccuccgg

SEQ ID NO: 991123 - RNA, 19 nt, Artificial Sequence
  Description of Artificial Sequence: Synthetic oligonucleotide
aagauccccacgaugcuga

SEQ ID NO: 991124 - RNA, 19 nt, Artificial Sequence
  Description of Artificial Sequence: Synthetic oligonucleotide
auagugugguuccuuucca

SEQ ID NO: 991125 - RNA, 19 nt, Artificial Sequence
  Description of Artificial Sequence: Synthetic oligonucleotide
caacgggucuggaggaugg

SEQ ID NO: 991126 - RNA, 19 nt, Artificial Sequence
  Description of Artificial Sequence: Synthetic oligonucleotide
ucugcccuuaggcccagug

SEQ ID NO: 991127 - RNA, 19 nt, Artificial Sequence
  Description of Artificial Sequence: Synthetic oligonucleotide
cuuggaagcguaccaguuc

SEQ ID NO: 991128 - RNA, 19 nt, Artificial Sequence
  Description of Artificial Sequence: Synthetic oligonucleotide
cuugcgguugagugcaaac

SEQ ID NO: 991129 - RNA, 19 nt, Artificial Sequence
  Description of Artificial Sequence: Synthetic oligonucleotide
gacucacccucaaucacag

SEQ ID NO: 991130 - RNA, 19 nt, Artificial Sequence
  Description of Artificial Sequence: Synthetic oligonucleotide
uggcaugcgggacuugcug

SEQ ID NO: 991131 - RNA, 19 nt, Artificial Sequence
  Description of Artificial Sequence: Synthetic oligonucleotide
auacaacgggucuggagga

SEQ ID NO: 991132 - RNA, 19 nt, Artificial Sequence
  Description of Artificial Sequence: Synthetic oligonucleotide
guagcagaaugaacagacg

SEQ ID NO: 991133 - RNA, 19 nt, Artificial Sequence
  Description of Artificial Sequence: Synthetic oligonucleotide
agugucguccaguccaccu

SEQ ID NO: 991134 - RNA, 19 nt, Artificial Sequence
  Description of Artificial Sequence: Synthetic oligonucleotide
guuaucacagagcuaacau

SEQ ID NO: 991135 - RNA, 19 nt, Artificial Sequence
  Description of Artificial Sequence: Synthetic oligonucleotide
cugcggacccugaagacac

SEQ ID NO: 991136 - RNA, 19 nt, Artificial Sequence
  Description of Artificial Sequence: Synthetic oligonucleotide
gugaccuacaccaggucag

SEQ ID NO: 991137 - RNA, 19 nt, Artificial Sequence
  Description of Artificial Sequence: Synthetic oligonucleotide
uccuuacccaauacacaga

SEQ ID NO: 991138 - RNA, 19 nt, Artificial Sequence
  Description of Artificial Sequence: Synthetic oligonucleotide
ugugucucuugcacauuac

SEQ ID NO: 991139 - RNA, 19 nt, Artificial Sequence
  Description of Artificial Sequence: Synthetic oligonucleotide
uggacugcgucuucucaca

SEQ ID NO: 991140 - RNA, 19 nt, Artificial Sequence
  Description of Artificial Sequence: Synthetic oligonucleotide
ucguccaguccaccuuugg

SEQ ID NO: 991141 - RNA, 19 nt, Artificial Sequence
  Description of Artificial Sequence: Synthetic oligonucleotide
gaucaguugaugaagccgu

SEQ ID NO: 991142 - RNA, 19 nt, Artificial Sequence
  Description of Artificial Sequence: Synthetic oligonucleotide
ucaccugacuggagcggcg

SEQ ID NO: 991143 - RNA, 19 nt, Artificial Sequence
  Description of Artificial Sequence: Synthetic oligonucleotide
aguaaagaauugagaagga

SEQ ID NO: 991144 - RNA, 19 nt, Artificial Sequence
  Description of Artificial Sequence: Synthetic oligonucleotide
uugacgggauccuucuggu

SEQ ID NO: 991145 - RNA, 19 nt, Artificial Sequence
  Description of Artificial Sequence: Synthetic oligonucleotide
ugcagagugucguccaguc

SEQ ID NO: 991146 - RNA, 19 nt, Artificial Sequence
  Description of Artificial Sequence: Synthetic oligonucleotide
uugcgguugagugcaaaca

SEQ ID NO: 991147 - RNA, 19 nt, Artificial Sequence
  Description of Artificial Sequence: Synthetic oligonucleotide
ugccuugcgguugagugca

SEQ ID NO: 991148 - RNA, 19 nt, Artificial Sequence
  Description of Artificial Sequence: Synthetic oligonucleotide
ucgagggugccuucuucag

SEQ ID NO: 991149 - RNA, 19 nt, Artificial Sequence
  Description of Artificial Sequence: Synthetic oligonucleotide
aguagucucggaaccuccg

SEQ ID NO: 991150 - RNA, 19 nt, Artificial Sequence
  Description of Artificial Sequence: Synthetic oligonucleotide
cucuuccuauaaauucaag

SEQ ID NO: 991151 - RNA, 19 nt, Artificial Sequence
  Description of Artificial Sequence: Synthetic oligonucleotide
cuuagggauuucccucugc

SEQ ID NO: 991152 - RNA, 19 nt, Artificial Sequence
  Description of Artificial Sequence: Synthetic oligonucleotide
augaagccgucuucuuuag

SEQ ID NO: 991153 - RNA, 19 nt, Artificial Sequence
  Description of Artificial Sequence: Synthetic oligonucleotide
cuacaccaggucaguaaag

SEQ ID NO: 991154 - RNA, 19 nt, Artificial Sequence
  Description of Artificial Sequence: Synthetic oligonucleotide
gacacugucugccgaacaa

SEQ ID NO: 991155 - RNA, 19 nt, Artificial Sequence
  Description of Artificial Sequence: Synthetic oligonucleotide
acucgagggugccuucuuc

SEQ ID NO: 991156 - RNA, 19 nt, Artificial Sequence
  Description of Artificial Sequence: Synthetic oligonucleotide
cauccuuacccaauacaca

SEQ ID NO: 991157 - RNA, 19 nt, Artificial Sequence
  Description of Artificial Sequence: Synthetic oligonucleotide
uauaacccauuggugucca

SEQ ID NO: 991158 - RNA, 19 nt, Artificial Sequence
  Description of Artificial Sequence: Synthetic oligonucleotide
cuuaggcccagugaauuuc

SEQ ID NO: 991159 - RNA, 19 nt, Artificial Sequence
  Description of Artificial Sequence: Synthetic oligonucleotide
guaaagaauugagaaggaa

SEQ ID NO: 991160 - RNA, 19 nt, Artificial Sequence
  Description of Artificial Sequence: Synthetic oligonucleotide
ucaauauagugugguuccu

SEQ ID NO: 991161 - RNA, 19 nt, Artificial Sequence
  Description of Artificial Sequence: Synthetic oligonucleotide
ugcucacaggcacaaucaa

SEQ ID NO: 991162 - RNA, 19 nt, Artificial Sequence
  Description of Artificial Sequence: Synthetic oligonucleotide
agauaacucucguguacau

SEQ ID NO: 991163 - RNA, 19 nt, Artificial Sequence
  Description of Artificial Sequence: Synthetic oligonucleotide
gacgucuccuguguaggag

SEQ ID NO: 991164 - RNA, 19 nt, Artificial Sequence
  Description of Artificial Sequence: Synthetic oligonucleotide
cgaacaauauaacccauug

SEQ ID NO: 991165 - RNA, 19 nt, Artificial Sequence
  Description of Artificial Sequence: Synthetic oligonucleotide
ucucccauccuuacccaau

SEQ ID NO: 991166 - RNA, 19 nt, Artificial Sequence
  Description of Artificial Sequence: Synthetic oligonucleotide
cacauuacuggucuuugaa

SEQ ID NO: 991167 - RNA, 19 nt, Artificial Sequence
  Description of Artificial Sequence: Synthetic oligonucleotide
ccuuacccaauacacagac

SEQ ID NO: 991168 - RNA, 19 nt, Artificial Sequence
  Description of Artificial Sequence: Synthetic oligonucleotide
aacgggucuggaggauggc

SEQ ID NO: 991169 - RNA, 19 nt, Artificial Sequence
  Description of Artificial Sequence: Synthetic oligonucleotide
cagacgucuccuguguagg

SEQ ID NO: 991170 - RNA, 19 nt, Artificial Sequence
  Description of Artificial Sequence: Synthetic oligonucleotide
uccaagggguugugugggg

SEQ ID NO: 991171 - RNA, 19 nt, Artificial Sequence
  Description of Artificial Sequence: Synthetic oligonucleotide
ucucggaaccuccggcugu

SEQ ID NO: 991172 - RNA, 19 nt, Artificial Sequence
  Description of Artificial Sequence: Synthetic oligonucleotide
aucugagagguugacgccu

SEQ ID NO: 991173 - RNA, 19 nt, Artificial Sequence
  Description of Artificial Sequence: Synthetic oligonucleotide
uguucagacuacgccccag

SEQ ID NO: 991174 - RNA, 19 nt, Artificial Sequence
  Description of Artificial Sequence: Synthetic oligonucleotide
gcugacaggaacugcuuug

SEQ ID NO: 991175 - RNA, 19 nt, Artificial Sequence
  Description of Artificial Sequence: Synthetic oligonucleotide
ugguacauccggucuugga

SEQ ID NO: 991176 - RNA, 19 nt, Artificial Sequence
  Description of Artificial Sequence: Synthetic oligonucleotide
gguacauccggucuuggaa

SEQ ID NO: 991177 - RNA, 19 nt, Artificial Sequence
  Description of Artificial Sequence: Synthetic oligonucleotide
cauggucagcucaaccauc

SEQ ID NO: 991178 - RNA, 19 nt, Artificial Sequence
  Description of Artificial Sequence: Synthetic oligonucleotide
ugggaggggucugaggccc

SEQ ID NO: 991179 - RNA, 19 nt, Artificial Sequence
  Description of Artificial Sequence: Synthetic oligonucleotide
ucuacagucuugugaccua

SEQ ID NO: 991180 - RNA, 19 nt, Artificial Sequence
  Description of Artificial Sequence: Synthetic oligonucleotide
acgucuccuguguaggaga

SEQ ID NO: 991181 - RNA, 19 nt, Artificial Sequence
  Description of Artificial Sequence: Synthetic oligonucleotide
aucucaauauagugugguu

SEQ ID NO: 991182 - RNA, 19 nt, Artificial Sequence
  Description of Artificial Sequence: Synthetic oligonucleotide
gaaaggacuggcacugcuc

SEQ ID NO: 991183 - RNA, 19 nt, Artificial Sequence
  Description of Artificial Sequence: Synthetic oligonucleotide
uucacccgcuaccaucccu

SEQ ID NO: 991184 - RNA, 19 nt, Artificial Sequence
  Description of Artificial Sequence: Synthetic oligonucleotide
gaggaggcauccuuagaaa

SEQ ID NO: 991185 - RNA, 19 nt, Artificial Sequence
  Description of Artificial Sequence: Synthetic oligonucleotide
uaacucucguguacaugaa

SEQ ID NO: 991186 - RNA, 19 nt, Artificial Sequence
  Description of Artificial Sequence: Synthetic oligonucleotide
ugucguccaguccaccuuu

SEQ ID NO: 991187 - RNA, 19 nt, Artificial Sequence
  Description of Artificial Sequence: Synthetic oligonucleotide
uccggcuguggaucuuggg

SEQ ID NO: 991188 - RNA, 19 nt, Artificial Sequence
  Description of Artificial Sequence: Synthetic oligonucleotide
uuguucagacuacgcccca

SEQ ID NO: 991189 - RNA, 19 nt, Artificial Sequence
  Description of Artificial Sequence: Synthetic oligonucleotide
cuuuggacugcgucuucuc

SEQ ID NO: 991190 - RNA, 19 nt, Artificial Sequence
  Description of Artificial Sequence: Synthetic oligonucleotide
gacucacagugcuacccca

SEQ ID NO: 991191 - RNA, 19 nt, Artificial Sequence
  Description of Artificial Sequence: Synthetic oligonucleotide
aacuccgugccgguuggcu

SEQ ID NO: 991192 - RNA, 19 nt, Artificial Sequence
  Description of Artificial Sequence: Synthetic oligonucleotide
uugugaccuacaccagguc

SEQ ID NO: 991193 - RNA, 19 nt, Artificial Sequence
  Description of Artificial Sequence: Synthetic oligonucleotide
uggaccugugggguggacc

SEQ ID NO: 991194 - RNA, 19 nt, Artificial Sequence
  Description of Artificial Sequence: Synthetic oligonucleotide
cucucuacguccugugcca

SEQ ID NO: 991195 - RNA, 19 nt, Artificial Sequence
  Description of Artificial Sequence: Synthetic oligonucleotide
ugccucucccauccuuacc

SEQ ID NO: 991196 - RNA, 19 nt, Artificial Sequence
  Description of Artificial Sequence: Synthetic oligonucleotide
cagugaauuuccaacucua

SEQ ID NO: 991197 - RNA, 19 nt, Artificial Sequence
  Description of Artificial Sequence: Synthetic oligonucleotide
gaaccuccggcuguggauc

SEQ ID NO: 991198 - RNA, 19 nt, Artificial Sequence
  Description of Artificial Sequence: Synthetic oligonucleotide
acgggauccuucugguaca

SEQ ID NO: 991199 - RNA, 19 nt, Artificial Sequence
  Description of Artificial Sequence: Synthetic oligonucleotide
cgacugagaauacaacggg

SEQ ID NO: 991200 - RNA, 19 nt, Artificial Sequence
  Description of Artificial Sequence: Synthetic oligonucleotide
uacaugaaggggagcuguu

SEQ ID NO: 991201 - RNA, 19 nt, Artificial Sequence
  Description of Artificial Sequence: Synthetic oligonucleotide
ugauggacucacagugcua

SEQ ID NO: 991202 - RNA, 19 nt, Artificial Sequence
  Description of Artificial Sequence: Synthetic oligonucleotide
acauccggucuuggaagcg

SEQ ID NO: 991203 - RNA, 19 nt, Artificial Sequence
  Description of Artificial Sequence: Synthetic oligonucleotide
uuucacccgcuaccauccc

SEQ ID NO: 991204 - RNA, 19 nt, Artificial Sequence
  Description of Artificial Sequence: Synthetic oligonucleotide
ggaacuccgugccgguugg

SEQ ID NO: 991205 - RNA, 19 nt, Artificial Sequence
  Description of Artificial Sequence: Synthetic oligonucleotide
accugacuggagcggcgac

SEQ ID NO: 991206 - RNA, 19 nt, Artificial Sequence
  Description of Artificial Sequence: Synthetic oligonucleotide
gaacagacgucuccugugu

SEQ ID NO: 991207 - RNA, 19 nt, Artificial Sequence
  Description of Artificial Sequence: Synthetic oligonucleotide
acgaugcugacaggaacug

SEQ ID NO: 991208 - RNA, 19 nt, Artificial Sequence
  Description of Artificial Sequence: Synthetic oligonucleotide
aaccuccggcuguggaucu

SEQ ID NO: 991209 - RNA, 19 nt, Artificial Sequence
  Description of Artificial Sequence: Synthetic oligonucleotide
gccugcgucucucagaaga

SEQ ID NO: 991210 - RNA, 19 nt, Artificial Sequence
  Description of Artificial Sequence: Synthetic oligonucleotide
uggaagcguaccaguuccu

SEQ ID NO: 991211 - RNA, 19 nt, Artificial Sequence
  Description of Artificial Sequence: Synthetic oligonucleotide
ucuccagcaugguuuuaua

SEQ ID NO: 991212 - RNA, 19 nt, Artificial Sequence
  Description of Artificial Sequence: Synthetic oligonucleotide
uacgccccagugccuugcg

SEQ ID NO: 991213 - RNA, 19 nt, Artificial Sequence
  Description of Artificial Sequence: Synthetic oligonucleotide
uauaugccugccgggccgc

SEQ ID NO: 991214 - RNA, 19 nt, Artificial Sequence
  Description of Artificial Sequence: Synthetic oligonucleotide
aucaguugaugaagccguc

SEQ ID NO: 991215 - RNA, 19 nt, Artificial Sequence
  Description of Artificial Sequence: Synthetic oligonucleotide
ggacucacagugcuacccc

SEQ ID NO: 991216 - RNA, 19 nt, Artificial Sequence
  Description of Artificial Sequence: Synthetic oligonucleotide
ugcuccgacugagaauaca

SEQ ID NO: 991217 - RNA, 19 nt, Artificial Sequence
  Description of Artificial Sequence: Synthetic oligonucleotide
acaacgggucuggaggaug

SEQ ID NO: 991218 - RNA, 19 nt, Artificial Sequence
  Description of Artificial Sequence: Synthetic oligonucleotide
cuuacccaauacacagaca

SEQ ID NO: 991219 - RNA, 19 nt, Artificial Sequence
  Description of Artificial Sequence: Synthetic oligonucleotide
cugugagucacagcuccac

SEQ ID NO: 991220 - RNA, 19 nt, Artificial Sequence
  Description of Artificial Sequence: Synthetic oligonucleotide
uccggucuuggaagcguac

SEQ ID NO: 991221 - RNA, 19 nt, Artificial Sequence
  Description of Artificial Sequence: Synthetic oligonucleotide
acccauugguguccaagau

SEQ ID NO: 991222 - RNA, 19 nt, Artificial Sequence
  Description of Artificial Sequence: Synthetic oligonucleotide
uugacgccuccagugaguc

SEQ ID NO: 991223 - RNA, 19 nt, Artificial Sequence
  Description of Artificial Sequence: Synthetic oligonucleotide
cacaagccggcguuugguc

SEQ ID NO: 991224 - RNA, 19 nt, Artificial Sequence
  Description of Artificial Sequence: Synthetic oligonucleotide
cucgagggugccuucuuca

SEQ ID NO: 991225 - RNA, 19 nt, Artificial Sequence
  Description of Artificial Sequence: Synthetic oligonucleotide
gucucucagaagagacgcg

SEQ ID NO: 991226 - RNA, 19 nt, Artificial Sequence
  Description of Artificial Sequence: Synthetic oligonucleotide
acugggcuugccugcgucu

SEQ ID NO: 991227 - RNA, 19 nt, Artificial Sequence
  Description of Artificial Sequence: Synthetic oligonucleotide
ggcaugcgggacuugcugc

SEQ ID NO: 991228 - RNA, 19 nt, Artificial Sequence
  Description of Artificial Sequence: Synthetic oligonucleotide
ucacuggcacuacucucua

SEQ ID NO: 991229 - RNA, 19 nt, Artificial Sequence
  Description of Artificial Sequence: Synthetic oligonucleotide
gguuaucacagagcuaaca

SEQ ID NO: 991230 - RNA, 19 nt, Artificial Sequence
  Description of Artificial Sequence: Synthetic oligonucleotide
gcggcgaccccucucaccc

SEQ ID NO: 991231 - RNA, 19 nt, Artificial Sequence
  Description of Artificial Sequence: Synthetic oligonucleotide
acgcguuccuggcagcaga

SEQ ID NO: 991232 - RNA, 19 nt, Artificial Sequence
  Description of Artificial Sequence: Synthetic oligonucleotide
cauugguguccaagauaac

SEQ ID NO: 991233 - RNA, 19 nt, Artificial Sequence
  Description of Artificial Sequence: Synthetic oligonucleotide
gacugagaauacaacgggu

SEQ ID NO: 991234 - RNA, 19 nt, Artificial Sequence
  Description of Artificial Sequence: Synthetic oligonucleotide
gaccccucucacccgagga

SEQ ID NO: 991235 - RNA, 19 nt, Artificial Sequence
  Description of Artificial Sequence: Synthetic oligonucleotide
caguucagggaaguccaac

SEQ ID NO: 991236 - RNA, 19 nt, Artificial Sequence
  Description of Artificial Sequence: Synthetic oligonucleotide
gcgguugagugcaaacacg

SEQ ID NO: 991237 - RNA, 19 nt, Artificial Sequence
  Description of Artificial Sequence: Synthetic oligonucleotide
caucaucugagagguugac

SEQ ID NO: 991238 - RNA, 19 nt, Artificial Sequence
  Description of Artificial Sequence: Synthetic oligonucleotide
aggacuggcacugcuccga

SEQ ID NO: 991239 - RNA, 19 nt, Artificial Sequence
  Description of Artificial Sequence: Synthetic oligonucleotide
gacguggucacuggcacua

SEQ ID NO: 991240 - RNA, 19 nt, Artificial Sequence
  Description of Artificial Sequence: Synthetic oligonucleotide
ugaccuacaccaggucagu

SEQ ID NO: 991241 - RNA, 19 nt, Artificial Sequence
  Description of Artificial Sequence: Synthetic oligonucleotide
cagaagagacgcguuccug

SEQ ID NO: 991242 - RNA, 19 nt, Artificial Sequence
  Description of Artificial Sequence: Synthetic oligonucleotide
cccucaaucacagguguag

SEQ ID NO: 991243 - RNA, 19 nt, Artificial Sequence
  Description of Artificial Sequence: Synthetic oligonucleotide
uucagucgcugcugcggac

SEQ ID NO: 991244 - RNA, 19 nt, Artificial Sequence
  Description of Artificial Sequence: Synthetic oligonucleotide
ggccuuagggauuucccuc

SEQ ID NO: 991245 - RNA, 19 nt, Artificial Sequence
  Description of Artificial Sequence: Synthetic oligonucleotide
cugucugccgaacaauaua

SEQ ID NO: 991246 - RNA, 19 nt, Artificial Sequence
  Description of Artificial Sequence: Synthetic oligonucleotide
gguuguguggggucuucac

SEQ ID NO: 991247 - RNA, 19 nt, Artificial Sequence
  Description of Artificial Sequence: Synthetic oligonucleotide
cguuccuggcagcagagcc

SEQ ID NO: 991248 - RNA, 19 nt, Artificial Sequence
  Description of Artificial Sequence: Synthetic oligonucleotide
ccaguagacucgagggugc

SEQ ID NO: 991249 - RNA, 19 nt, Artificial Sequence
  Description of Artificial Sequence: Synthetic oligonucleotide
guaggagagucugaagaua

SEQ ID NO: 991250 - RNA, 19 nt, Artificial Sequence
  Description of Artificial Sequence: Synthetic oligonucleotide
acugucugccgaacaauau

SEQ ID NO: 991251 - RNA, 19 nt, Artificial Sequence
  Description of Artificial Sequence: Synthetic oligonucleotide
gagacgcguuccuggcagc

SEQ ID NO: 991252 - RNA, 19 nt, Artificial Sequence
  Description of Artificial Sequence: Synthetic oligonucleotide
agcgcucugaggaucaguu

SEQ ID NO: 991253 - RNA, 19 nt, Artificial Sequence
  Description of Artificial Sequence: Synthetic oligonucleotide
cugugucucuugcacauua

SEQ ID NO: 991254 - RNA, 19 nt, Artificial Sequence
  Description of Artificial Sequence: Synthetic oligonucleotide
guacaugaaggggagcugu

SEQ ID NO: 991255 - RNA, 19 nt, Artificial Sequence
  Description of Artificial Sequence: Synthetic oligonucleotide
gucuugugaccuacaccag

SEQ ID NO: 991256 - RNA, 19 nt, Artificial Sequence
  Description of Artificial Sequence: Synthetic oligonucleotide
cugccucucccauccuuac

SEQ ID NO: 991257 - RNA, 19 nt, Artificial Sequence
  Description of Artificial Sequence: Synthetic oligonucleotide
caucagcggggcacuggag

SEQ ID NO: 991258 - RNA, 19 nt, Artificial Sequence
  Description of Artificial Sequence: Synthetic oligonucleotide
ugcgggacuugcugcugcu

SEQ ID NO: 991259 - RNA, 19 nt, Artificial Sequence
  Description of Artificial Sequence: Synthetic oligonucleotide
gacgcguuccuggcagcag

SEQ ID NO: 991260 - RNA, 19 nt, Artificial Sequence
  Description of Artificial Sequence: Synthetic oligonucleotide
acuacgccccagugccuug

SEQ ID NO: 991261 - RNA, 19 nt, Artificial Sequence
  Description of Artificial Sequence: Synthetic oligonucleotide
gacuggaugggguccugua

SEQ ID NO: 991262 - RNA, 19 nt, Artificial Sequence
  Description of Artificial Sequence: Synthetic oligonucleotide
gucuuggaagcguaccagu

SEQ ID NO: 991263 - RNA, 19 nt, Artificial Sequence
  Description of Artificial Sequence: Synthetic oligonucleotide
cuugccguucuuucaaaau

SEQ ID NO: 991264 - RNA, 19 nt, Artificial Sequence
  Description of Artificial Sequence: Synthetic oligonucleotide
cccgcuaccaucccugcac

SEQ ID NO: 991265 - RNA, 19 nt, Artificial Sequence
  Description of Artificial Sequence: Synthetic oligonucleotide
gcagccccgugacacaagc

SEQ ID NO: 991266 - RNA, 19 nt, Artificial Sequence
  Description of Artificial Sequence: Synthetic oligonucleotide
caguagacucgagggugcc

SEQ ID NO: 991267 - RNA, 19 nt, Artificial Sequence
  Description of Artificial Sequence: Synthetic oligonucleotide
cagagcuaacauuuucagu

SEQ ID NO: 991268 - RNA, 19 nt, Artificial Sequence
  Description of Artificial Sequence: Synthetic oligonucleotide
cucuacagucuugugaccu

SEQ ID NO: 991269 - RNA, 19 nt, Artificial Sequence
  Description of Artificial Sequence: Synthetic oligonucleotide
acaugaaggggagcuguua

SEQ ID NO: 991270 - RNA, 19 nt, Artificial Sequence
  Description of Artificial Sequence: Synthetic oligonucleotide
aguagacucgagggugccu

SEQ ID NO: 991271 - RNA, 19 nt, Artificial Sequence
  Description of Artificial Sequence: Synthetic oligonucleotide
ggaaguccaaccugcuaaa

SEQ ID NO: 991272 - RNA, 19 nt, Artificial Sequence
  Description of Artificial Sequence: Synthetic oligonucleotide
uagacucgagggugccuuc

SEQ ID NO: 991273 - RNA, 19 nt, Artificial Sequence
  Description of Artificial Sequence: Synthetic oligonucleotide
ugacgggauccuucuggua

SEQ ID NO: 991274 - RNA, 19 nt, Artificial Sequence
  Description of Artificial Sequence: Synthetic oligonucleotide
ccggcguuuggucuuggcc

SEQ ID NO: 991275 - RNA, 19 nt, Artificial Sequence
  Description of Artificial Sequence: Synthetic oligonucleotide
auaugccugccgggccgcc

SEQ ID NO: 991276 - RNA, 19 nt, Artificial Sequence
  Description of Artificial Sequence: Synthetic oligonucleotide
uggagcggcgaccccucuc

SEQ ID NO: 991277 - RNA, 19 nt, Artificial Sequence
  Description of Artificial Sequence: Synthetic oligonucleotide
ugacuggagcggcgacccc

SEQ ID NO: 991278 - RNA, 19 nt, Artificial Sequence
  Description of Artificial Sequence: Synthetic oligonucleotide
cugguacauccggucuugg

SEQ ID NO: 991279 - RNA, 19 nt, Artificial Sequence
  Description of Artificial Sequence: Synthetic oligonucleotide
ugcuaccccaguggcuccc

SEQ ID NO: 991280 - RNA, 19 nt, Artificial Sequence
  Description of Artificial Sequence: Synthetic oligonucleotide
ggacugcgucuucucacag

SEQ ID NO: 991281 - RNA, 19 nt, Artificial Sequence
  Description of Artificial Sequence: Synthetic oligonucleotide
ggagcggcgaccccucuca

SEQ ID NO: 991282 - RNA, 19 nt, Artificial Sequence
  Description of Artificial Sequence: Synthetic oligonucleotide
agggccacaccagcgcucu

SEQ ID NO: 991283 - RNA, 19 nt, Artificial Sequence
  Description of Artificial Sequence: Synthetic oligonucleotide
gcagagugucguccagucc

SEQ ID NO: 991284 - RNA, 19 nt, Artificial Sequence
  Description of Artificial Sequence: Synthetic oligonucleotide
cacuggcacuacucucuac

SEQ ID NO: 991285 - RNA, 19 nt, Artificial Sequence
  Description of Artificial Sequence: Synthetic oligonucleotide
ugacgccuccagugagucu

SEQ ID NO: 991286 - RNA, 19 nt, Artificial Sequence
  Description of Artificial Sequence: Synthetic oligonucleotide
uacaacgggucuggaggau

SEQ ID NO: 991287 - RNA, 19 nt, Artificial Sequence
  Description of Artificial Sequence: Synthetic oligonucleotide
guucagacuacgccccagu

SEQ ID NO: 991288 - RNA, 19 nt, Artificial Sequence
  Description of Artificial Sequence: Synthetic oligonucleotide
cacuacucucuacguccug

SEQ ID NO: 991289 - RNA, 19 nt, Artificial Sequence
  Description of Artificial Sequence: Synthetic oligonucleotide
ucggaaccuccggcugugg

SEQ ID NO: 991290 - RNA, 19 nt, Artificial Sequence
  Description of Artificial Sequence: Synthetic oligonucleotide
aagccggcguuuggucuug

SEQ ID NO: 991291 - RNA, 19 nt, Artificial Sequence
  Description of Artificial Sequence: Synthetic oligonucleotide
agacucgagggugccuucu

SEQ ID NO: 991292 - RNA, 19 nt, Artificial Sequence
  Description of Artificial Sequence: Synthetic oligonucleotide
cacccgcuaccaucccugc

SEQ ID NO: 991293 - RNA, 19 nt, Artificial Sequence
  Description of Artificial Sequence: Synthetic oligonucleotide
gacugcgucuucucacagu

SEQ ID NO: 991294 - RNA, 19 nt, Artificial Sequence
  Description of Artificial Sequence: Synthetic oligonucleotide
cuacgccccagugccuugc

SEQ ID NO: 991295 - RNA, 19 nt, Artificial Sequence
  Description of Artificial Sequence: Synthetic oligonucleotide
cucggaaccuccggcugug

SEQ ID NO: 991296 - RNA, 19 nt, Artificial Sequence
  Description of Artificial Sequence: Synthetic oligonucleotide
cuacguccugugccacagc

SEQ ID NO: 991297 - RNA, 19 nt, Artificial Sequence
  Description of Artificial Sequence: Synthetic oligonucleotide
acguggucacuggcacuac

SEQ ID NO: 991298 - RNA, 19 nt, Artificial Sequence
  Description of Artificial Sequence: Synthetic oligonucleotide
ugcggacccugaagacacu

SEQ ID NO: 991299 - RNA, 19 nt, Artificial Sequence
  Description of Artificial Sequence: Synthetic oligonucleotide
gcacauuacuggucuuuga

SEQ ID NO: 991300 - RNA, 19 nt, Artificial Sequence
  Description of Artificial Sequence: Synthetic oligonucleotide
ccaacucuacagucuugug

SEQ ID NO: 991301 - RNA, 19 nt, Artificial Sequence
  Description of Artificial Sequence: Synthetic oligonucleotide
acccgcuaccaucccugca

SEQ ID NO: 991302 - RNA, 19 nt, Artificial Sequence
  Description of Artificial Sequence: Synthetic oligonucleotide
auaacccauugguguccaa

SEQ ID NO: 991303 - RNA, 19 nt, Artificial Sequence
  Description of Artificial Sequence: Synthetic oligonucleotide
cucuacguccugugccaca

SEQ ID NO: 991304 - RNA, 19 nt, Artificial Sequence
  Description of Artificial Sequence: Synthetic oligonucleotide
gugcuaccccaguggcucc

SEQ ID NO: 991305 - RNA, 19 nt, Artificial Sequence
  Description of Artificial Sequence: Synthetic oligonucleotide
gcuccgacugagaauacaa

SEQ ID NO: 991306 - RNA, 19 nt, Artificial Sequence
  Description of Artificial Sequence: Synthetic oligonucleotide
cccgaggaggcauccuuag

SEQ ID NO: 991307 - RNA, 19 nt, Artificial Sequence
  Description of Artificial Sequence: Synthetic oligonucleotide
ugccugcgucucucagaag

SEQ ID NO: 991308 - RNA, 19 nt, Artificial Sequence
  Description of Artificial Sequence: Synthetic oligonucleotide
ccgugacacaagcaucuac

SEQ ID NO: 991309 - RNA, 19 nt, Artificial Sequence
  Description of Artificial Sequence: Synthetic oligonucleotide
cgguugagugcaaacacga

SEQ ID NO: 991310 - RNA, 19 nt, Artificial Sequence
  Description of Artificial Sequence: Synthetic oligonucleotide
cuggcacuacucucuacgu

SEQ ID NO: 991311 - RNA, 19 nt, Artificial Sequence
  Description of Artificial Sequence: Synthetic oligonucleotide
cuccagcaugguuuuauau

SEQ ID NO: 991312 - RNA, 19 nt, Artificial Sequence
  Description of Artificial Sequence: Synthetic oligonucleotide
gcccagugaauuuccaacu

SEQ ID NO: 991313 - RNA, 19 nt, Artificial Sequence
  Description of Artificial Sequence: Synthetic oligonucleotide
cgugacacaagcaucuacu

SEQ ID NO: 991314 - RNA, 19 nt, Artificial Sequence
  Description of Artificial Sequence: Synthetic oligonucleotide
cugcuccgacugagaauac

SEQ ID NO: 991315 - RNA, 19 nt, Artificial Sequence
  Description of Artificial Sequence: Synthetic oligonucleotide
guagacucgagggugccuu

SEQ ID NO: 991316 - RNA, 19 nt, Artificial Sequence
  Description of Artificial Sequence: Synthetic oligonucleotide
gcacugcuccgacugagaa

SEQ ID NO: 991317 - RNA, 19 nt, Artificial Sequence
  Description of Artificial Sequence: Synthetic oligonucleotide
ccaaccugcuaaauucaaa

SEQ ID NO: 991318 - RNA, 19 nt, Artificial Sequence
  Description of Artificial Sequence: Synthetic oligonucleotide
gucguccaguccaccuuug

SEQ ID NO: 991319 - RNA, 19 nt, Artificial Sequence
  Description of Artificial Sequence: Synthetic oligonucleotide
ccggucuuggaagcguacc

SEQ ID NO: 991320 - RNA, 19 nt, Artificial Sequence
  Description of Artificial Sequence: Synthetic oligonucleotide
gccuuagggauuucccucu

SEQ ID NO: 991321 - RNA, 19 nt, Artificial Sequence
  Description of Artificial Sequence: Synthetic oligonucleotide
gcuaacauuuucagucgcu

SEQ ID NO: 991322 - RNA, 19 nt, Artificial Sequence
  Description of Artificial Sequence: Synthetic oligonucleotide
gaacuccgugccgguuggc

SEQ ID NO: 991323 - RNA, 19 nt, Artificial Sequence
  Description of Artificial Sequence: Synthetic oligonucleotide
ccagugaauuuccaacucu

SEQ ID NO: 991324 - RNA, 19 nt, Artificial Sequence
  Description of Artificial Sequence: Synthetic oligonucleotide
ccuuagggauuucccucug

SEQ ID NO: 991325 - RNA, 19 nt, Artificial Sequence
  Description of Artificial Sequence: Synthetic oligonucleotide
gaccuacaccaggucagua

SEQ ID NO: 991326 - RNA, 19 nt, Artificial Sequence
  Description of Artificial Sequence: Synthetic oligonucleotide
ggggacguggucacuggca

SEQ ID NO: 991327 - RNA, 19 nt, Artificial Sequence
  Description of Artificial Sequence: Synthetic oligonucleotide
ggaaccuccggcuguggau

SEQ ID NO: 991328 - RNA, 19 nt, Artificial Sequence
  Description of Artificial Sequence: Synthetic oligonucleotide
cuaccccaguggcucccuc

SEQ ID NO: 991329 - RNA, 19 nt, Artificial Sequence
  Description of Artificial Sequence: Synthetic oligonucleotide
cuuggagucgcagcugcau

SEQ ID NO: 991330 - RNA, 19 nt, Artificial Sequence
  Description of Artificial Sequence: Synthetic oligonucleotide
acgccuccagugagucuuc

SEQ ID NO: 991331 - RNA, 19 nt, Artificial Sequence
  Description of Artificial Sequence: Synthetic oligonucleotide
cucucagaagagacgcguu

SEQ ID NO: 991332 - RNA, 19 nt, Artificial Sequence
  Description of Artificial Sequence: Synthetic oligonucleotide
gacuggcacugcuccgacu

SEQ ID NO: 991333 - RNA, 19 nt, Artificial Sequence
  Description of Artificial Sequence: Synthetic oligonucleotide
ggcgaccccucucacccga

SEQ ID NO: 991334 - RNA, 19 nt, Artificial Sequence
  Description of Artificial Sequence: Synthetic oligonucleotide
gguccuguaugggugggcu

SEQ ID NO: 991335 - RNA, 19 nt, Artificial Sequence
  Description of Artificial Sequence: Synthetic oligonucleotide
cagccccgugacacaagca

SEQ ID NO: 991336 - RNA, 19 nt, Artificial Sequence
  Description of Artificial Sequence: Synthetic oligonucleotide
gugucguccaguccaccuu

SEQ ID NO: 991337 - RNA, 19 nt, Artificial Sequence
  Description of Artificial Sequence: Synthetic oligonucleotide
ccaccuuuggacugcgucu

SEQ ID NO: 991338 - RNA, 19 nt, Artificial Sequence
  Description of Artificial Sequence: Synthetic oligonucleotide
ggccacaccagcgcucuga

SEQ ID NO: 991339 - RNA, 19 nt, Artificial Sequence
  Description of Artificial Sequence: Synthetic oligonucleotide
auccggucuuggaagcgua

SEQ ID NO: 991340 - RNA, 19 nt, Artificial Sequence
  Description of Artificial Sequence: Synthetic oligonucleotide
agacuacgccccagugccu

SEQ ID NO: 991341 - RNA, 19 nt, Artificial Sequence
  Description of Artificial Sequence: Synthetic oligonucleotide
caccugacuggagcggcga

SEQ ID NO: 991342 - RNA, 19 nt, Artificial Sequence
  Description of Artificial Sequence: Synthetic oligonucleotide
cagugcuaccccaguggcu

SEQ ID NO: 991343 - RNA, 19 nt, Artificial Sequence
  Description of Artificial Sequence: Synthetic oligonucleotide
cacugcuccgacugagaau

SEQ ID NO: 991344 - RNA, 19 nt, Artificial Sequence
  Description of Artificial Sequence: Synthetic oligonucleotide
ggguuaucacagagcuaac

SEQ ID NO: 991345 - RNA, 19 nt, Artificial Sequence
  Description of Artificial Sequence: Synthetic oligonucleotide
caagccggcguuuggucuu

SEQ ID NO: 991346 - RNA, 19 nt, Artificial Sequence
  Description of Artificial Sequence: Synthetic oligonucleotide
acccucaaucacaggugua

SEQ ID NO: 991347 - RNA, 19 nt, Artificial Sequence
  Description of Artificial Sequence: Synthetic oligonucleotide
cauccggucuuggaagcgu

SEQ ID NO: 991348 - RNA, 19 nt, Artificial Sequence
  Description of Artificial Sequence: Synthetic oligonucleotide
ggaggggucugaggcccag

SEQ ID NO: 991349 - RNA, 19 nt, Artificial Sequence
  Description of Artificial Sequence: Synthetic oligonucleotide
gacucgagggugccuucuu

SEQ ID NO: 991350 - RNA, 19 nt, Artificial Sequence
  Description of Artificial Sequence: Synthetic oligonucleotide
cuugcacauuacuggucuu

SEQ ID NO: 991351 - RNA, 19 nt, Artificial Sequence
  Description of Artificial Sequence: Synthetic oligonucleotide
caguggcucccucugcccu

SEQ ID NO: 991352 - RNA, 19 nt, Artificial Sequence
  Description of Artificial Sequence: Synthetic oligonucleotide
ccccgugacacaagcaucu

SEQ ID NO: 991353 - RNA, 19 nt, Artificial Sequence
  Description of Artificial Sequence: Synthetic oligonucleotide
agccggcguuuggucuugg

SEQ ID NO: 991354 - RNA, 19 nt, Artificial Sequence
  Description of Artificial Sequence: Synthetic oligonucleotide
gccccgugacacaagcauc

SEQ ID NO: 991355 - RNA, 19 nt, Artificial Sequence
  Description of Artificial Sequence: Synthetic oligonucleotide
ggcacugcuccgacugaga

SEQ ID NO: 991356 - RNA, 19 nt, Artificial Sequence
  Description of Artificial Sequence: Synthetic oligonucleotide
gccggcguuuggucuuggc

SEQ ID NO: 991357 - RNA, 19 nt, Artificial Sequence
  Description of Artificial Sequence: Synthetic oligonucleotide
caaacacgaaggguauauu

SEQ ID NO: 991358 - RNA, 19 nt, Artificial Sequence
  Description of Artificial Sequence: Synthetic oligonucleotide
ggagucgcagcugcauucu

SEQ ID NO: 991359 - RNA, 19 nt, Artificial Sequence
  Description of Artificial Sequence: Synthetic oligonucleotide
cuggaccugugggguggac

SEQ ID NO: 991360 - RNA, 19 nt, Artificial Sequence
  Description of Artificial Sequence: Synthetic oligonucleotide
agggguuguguggggucuu

SEQ ID NO: 991361 - RNA, 19 nt, Artificial Sequence
  Description of Artificial Sequence: Synthetic oligonucleotide
ggguuguguggggucuuca

SEQ ID NO: 991362 - RNA, 19 nt, Artificial Sequence
  Description of Artificial Sequence: Synthetic oligonucleotide
cggcguuuggucuuggccu

SEQ ID NO: 991363 - RNA, 19 nt, Artificial Sequence
  Description of Artificial Sequence: Synthetic oligonucleotide
ccucucccauccuuaccca

SEQ ID NO: 991364 - RNA, 19 nt, Artificial Sequence
  Description of Artificial Sequence: Synthetic oligonucleotide
caccuuuggacugcgucuu

SEQ ID NO: 991365 - RNA, 19 nt, Artificial Sequence
  Description of Artificial Sequence: Synthetic oligonucleotide
cucucacccgaggaggcau

SEQ ID NO: 991366 - RNA, 19 nt, Artificial Sequence
  Description of Artificial Sequence: Synthetic oligonucleotide
ggcguuuggucuuggccuu

SEQ ID NO: 991367 - RNA, 19 nt, Artificial Sequence
  Description of Artificial Sequence: Synthetic oligonucleotide
ggacguggucacuggcacu

SEQ ID NO: 991368 - RNA, 19 nt, Artificial Sequence
  Description of Artificial Sequence: Synthetic oligonucleotide
guaugccuccaggugcuuu

SEQ ID NO: 991369 - RNA, 19 nt, Artificial Sequence
  Description of Artificial Sequence: Synthetic oligonucleotide
cgaccccucucacccgagg

SEQ ID NO: 991370 - RNA, 19 nt, Artificial Sequence
  Description of Artificial Sequence: Synthetic oligonucleotide
gcguuuggucuuggccuug

SEQ ID NO: 991371 - RNA, 19 nt, Artificial Sequence
  Description of Artificial Sequence: Synthetic oligonucleotide
gggguuguguggggucuuc

SEQ ID NO: 991372 - RNA, 19 nt, Artificial Sequence
  Description of Artificial Sequence: Synthetic oligonucleotide
uccgugccgguuggcucuu

SEQ ID NO: 991373 - RNA, 19 nt, Artificial Sequence
  Description of Artificial Sequence: Synthetic oligonucleotide
cgcuaccaucccugcacug

SEQ ID NO: 991374 - RNA, 19 nt, Artificial Sequence
  Description of Artificial Sequence: Synthetic oligonucleotide
gggauccuucugguacauc

SEQ ID NO: 991375 - RNA, 19 nt, Artificial Sequence
  Description of Artificial Sequence: Synthetic oligonucleotide
ccgaggaggcauccuuaga

SEQ ID NO: 991376 - RNA, 19 nt, Artificial Sequence
  Description of Artificial Sequence: Synthetic oligonucleotide
gccgaacaauauaacccau

SEQ ID NO: 991377 - RNA, 19 nt, Artificial Sequence
  Description of Artificial Sequence: Synthetic oligonucleotide
accuccggcuguggaucuu

SEQ ID NO: 991378 - RNA, 19 nt, Artificial Sequence
  Description of Artificial Sequence: Synthetic oligonucleotide
ggacuggaugggguccugu

SEQ ID NO: 991379 - RNA, 19 nt, Artificial Sequence
  Description of Artificial Sequence: Synthetic oligonucleotide
gggccacaccagcgcucug

SEQ ID NO: 991380 - RNA, 19 nt, Artificial Sequence
  Description of Artificial Sequence: Synthetic oligonucleotide
ccaagggguuguguggggu

SEQ ID NO: 991381 - RNA, 19 nt, Artificial Sequence
  Description of Artificial Sequence: Synthetic oligonucleotide
ccucucacccgaggaggca

SEQ ID NO: 991382 - RNA, 19 nt, Artificial Sequence
  Description of Artificial Sequence: Synthetic oligonucleotide
ccuugcgguugagugcaaa

SEQ ID NO: 991383 - RNA, 19 nt, Artificial Sequence
  Description of Artificial Sequence: Synthetic oligonucleotide
ccgccauggucagcucaac

SEQ ID NO: 991384 - RNA, 19 nt, Artificial Sequence
  Description of Artificial Sequence: Synthetic oligonucleotide
ccauuucacccgcuaccau

SEQ ID NO: 991385 - RNA, 19 nt, Artificial Sequence
  Description of Artificial Sequence: Synthetic oligonucleotide
cuggaacuccgugccgguu

SEQ ID NO: 991386 - RNA, 19 nt, Artificial Sequence
  Description of Artificial Sequence: Synthetic oligonucleotide
gccccagugccuugcgguu

SEQ ID NO: 991387 - RNA, 19 nt, Artificial Sequence
  Description of Artificial Sequence: Synthetic oligonucleotide
cgagggugccuucuucagu

SEQ ID NO: 991388 - RNA, 19 nt, Artificial Sequence
  Description of Artificial Sequence: Synthetic oligonucleotide
ccgcuaccaucccugcacu

SEQ ID NO: 991389 - RNA, 19 nt, Artificial Sequence
  Description of Artificial Sequence: Synthetic oligonucleotide
cccgugacacaagcaucua

SEQ ID NO: 991390 - RNA, 19 nt, Artificial Sequence
  Description of Artificial Sequence: Synthetic oligonucleotide
ccaacacaagccggcguuu

SEQ ID NO: 991391 - RNA, 19 nt, Artificial Sequence
  Description of Artificial Sequence: Synthetic oligonucleotide
ccgucuucuuuaggguuau

SEQ ID NO: 991392 - RNA, 19 nt, Artificial Sequence
  Description of Artificial Sequence: Synthetic oligonucleotide
cgugccgguuggcucuucu

SEQ ID NO: 991393 - RNA, 19 nt, Artificial Sequence
  Description of Artificial Sequence: Synthetic oligonucleotide
gccuugcgguugagugcaa

SEQ ID NO: 991394 - RNA, 19 nt, Artificial Sequence
  Description of Artificial Sequence: Synthetic oligonucleotide
ccgugccgguuggcucuuc

SEQ ID NO: 991395 - RNA, 19 nt, Artificial Sequence
  Description of Artificial Sequence: Synthetic oligonucleotide
gcggggcacuggaguccaa

SEQ ID NO: 991396 - RNA, 19 nt, Artificial Sequence
  Description of Artificial Sequence: Synthetic oligonucleotide
aacacaacuccccaaaagg

SEQ ID NO: 991397 - RNA, 19 nt, Artificial Sequence
  Description of Artificial Sequence: Synthetic oligonucleotide
aaagcuuagagacuacagg

SEQ ID NO: 991398 - RNA, 19 nt, Artificial Sequence
  Description of Artificial Sequence: Synthetic oligonucleotide
aaaagagauagaaaugagc

SEQ ID NO: 991399 - RNA, 19 nt, Artificial Sequence
  Description of Artificial Sequence: Synthetic oligonucleotide
aaacugaacucaucuaccc

SEQ ID NO: 991400 - RNA, 19 nt, Artificial Sequence
  Description of Artificial Sequence: Synthetic oligonucleotide
aagaccaugauguccaguc

SEQ ID NO: 991401 - RNA, 19 nt, Artificial Sequence
  Description of Artificial Sequence: Synthetic oligonucleotide
aaaacguaaguuccagugg

SEQ ID NO: 991402 - RNA, 19 nt, Artificial Sequence
  Description of Artificial Sequence: Synthetic oligonucleotide
aaaugggugaucuuccguc

SEQ ID NO: 991403 - RNA, 19 nt, Artificial Sequence
  Description of Artificial Sequence: Synthetic oligonucleotide
aaaugguuccuuucagacc

SEQ ID NO: 991404 - RNA, 19 nt, Artificial Sequence
  Description of Artificial Sequence: Synthetic oligonucleotide
uguagaaggacagaaacag

SEQ ID NO: 991405 - RNA, 19 nt, Artificial Sequence
  Description of Artificial Sequence: Synthetic oligonucleotide
uaaaacguaaguuccagug

SEQ ID NO: 991406 - RNA, 19 nt, Artificial Sequence
  Description of Artificial Sequence: Synthetic oligonucleotide
uugauuaaaaggaugggac

SEQ ID NO: 991407 - RNA, 19 nt, Artificial Sequence
  Description of Artificial Sequence: Synthetic oligonucleotide
ugaucggucugucacaugg

SEQ ID NO: 991408 - RNA, 19 nt, Artificial Sequence
  Description of Artificial Sequence: Synthetic oligonucleotide
acauuaaaacguaaguucc

SEQ ID NO: 991409 - RNA, 19 nt, Artificial Sequence
  Description of Artificial Sequence: Synthetic oligonucleotide
aagcuuagagacuacaggu

SEQ ID NO: 991410 - RNA, 19 nt, Artificial Sequence
  Description of Artificial Sequence: Synthetic oligonucleotide
uuaaggagcuuguaguagg

SEQ ID NO: 991411 - RNA, 19 nt, Artificial Sequence
  Description of Artificial Sequence: Synthetic oligonucleotide
agaaacguaggccaucugg

SEQ ID NO: 991412 - RNA, 19 nt, Artificial Sequence
  Description of Artificial Sequence: Synthetic oligonucleotide
aaagguauggagcaggaua

SEQ ID NO: 991413 - RNA, 19 nt, Artificial Sequence
  Description of Artificial Sequence: Synthetic oligonucleotide
caucaaagaacacaacucc

SEQ ID NO: 991414 - RNA, 19 nt, Artificial Sequence
  Description of Artificial Sequence: Synthetic oligonucleotide
acagugauagaaaaccucc

SEQ ID NO: 991415 - RNA, 19 nt, Artificial Sequence
  Description of Artificial Sequence: Synthetic oligonucleotide
ucggccaaaauauugauaa

SEQ ID NO: 991416 - RNA, 19 nt, Artificial Sequence
  Description of Artificial Sequence: Synthetic oligonucleotide
aaacguaaguuccaguggu

SEQ ID NO: 991417 - RNA, 19 nt, Artificial Sequence
  Description of Artificial Sequence: Synthetic oligonucleotide
uuguaguaggcaaauucgg

SEQ ID NO: 991418 - RNA, 19 nt, Artificial Sequence
  Description of Artificial Sequence: Synthetic oligonucleotide
gauaccgaaggacagacca

SEQ ID NO: 991419 - RNA, 19 nt, Artificial Sequence
  Description of Artificial Sequence: Synthetic oligonucleotide
ugauagaaaaccuccccag

SEQ ID NO: 991420 - RNA, 19 nt, Artificial Sequence
  Description of Artificial Sequence: Synthetic oligonucleotide
gacaccacugaugauaccg

SEQ ID NO: 991421 - RNA, 19 nt, Artificial Sequence
  Description of Artificial Sequence: Synthetic oligonucleotide
aggaaaacugaacucaucu

SEQ ID NO: 991422 - RNA, 19 nt, Artificial Sequence
  Description of Artificial Sequence: Synthetic oligonucleotide
caaacaugcacuuccuucc

SEQ ID NO: 991423 - RNA, 19 nt, Artificial Sequence
  Description of Artificial Sequence: Synthetic oligonucleotide
ugaugcuaagcccucaucu

SEQ ID NO: 991424 - RNA, 19 nt, Artificial Sequence
  Description of Artificial Sequence: Synthetic oligonucleotide
aauggacccgggcuggggc

SEQ ID NO: 991425 - RNA, 19 nt, Artificial Sequence
  Description of Artificial Sequence: Synthetic oligonucleotide
acugaugauaccgaaggac

SEQ ID NO: 991426 - RNA, 19 nt, Artificial Sequence
  Description of Artificial Sequence: Synthetic oligonucleotide
aaacguaggccaucuggcg

SEQ ID NO: 991427 - RNA, 19 nt, Artificial Sequence
  Description of Artificial Sequence: Synthetic oligonucleotide
agguagucaguccuuacac

SEQ ID NO: 991428 - RNA, 19 nt, Artificial Sequence
  Description of Artificial Sequence: Synthetic oligonucleotide
ugauuaaaaggaugggaca

SEQ ID NO: 991429 - RNA, 19 nt, Artificial Sequence
  Description of Artificial Sequence: Synthetic oligonucleotide
uuaaaaggaugggacaucc

SEQ ID NO: 991430 - RNA, 19 nt, Artificial Sequence
  Description of Artificial Sequence: Synthetic oligonucleotide
aaugcagauucaaacccac

SEQ ID NO: 991431 - RNA, 19 nt, Artificial Sequence
  Description of Artificial Sequence: Synthetic oligonucleotide
cuacaggucacaaauggac

SEQ ID NO: 991432 - RNA, 19 nt, Artificial Sequence
  Description of Artificial Sequence: Synthetic oligonucleotide
uggacaacgccacacccgg

SEQ ID NO: 991433 - RNA, 19 nt, Artificial Sequence
  Description of Artificial Sequence: Synthetic oligonucleotide
ugaugauaccgaaggacag

SEQ ID NO: 991434 - RNA, 19 nt, Artificial Sequence
  Description of Artificial Sequence: Synthetic oligonucleotide
guauggagcaggauaaugg

SEQ ID NO: 991435 - RNA, 19 nt, Artificial Sequence
  Description of Artificial Sequence: Synthetic oligonucleotide
uccccaaaagguauggagc

SEQ ID NO: 991436 - RNA, 19 nt, Artificial Sequence
  Description of Artificial Sequence: Synthetic oligonucleotide
ugcacuuccuuccuuuucc

SEQ ID NO: 991437 - RNA, 19 nt, Artificial Sequence
  Description of Artificial Sequence: Synthetic oligonucleotide
aauucggaacacuuccugu

SEQ ID NO: 991438 - RNA, 19 nt, Artificial Sequence
  Description of Artificial Sequence: Synthetic oligonucleotide
ugcaucggccaaaauauug

SEQ ID NO: 991439 - RNA, 19 nt, Artificial Sequence
  Description of Artificial Sequence: Synthetic oligonucleotide
ucaguccuuacacgaaagg

SEQ ID NO: 991440 - RNA, 19 nt, Artificial Sequence
  Description of Artificial Sequence: Synthetic oligonucleotide
auacaggacgaggagaucg

SEQ ID NO: 991441 - RNA, 19 nt, Artificial Sequence
  Description of Artificial Sequence: Synthetic oligonucleotide
auuaaaacguaaguuccag

SEQ ID NO: 991442 - RNA, 19 nt, Artificial Sequence
  Description of Artificial Sequence: Synthetic oligonucleotide
uccugauaaagcuuagaga

SEQ ID NO: 991443 - RNA, 19 nt, Artificial Sequence
  Description of Artificial Sequence: Synthetic oligonucleotide
gauagaaaaccuccccagc

SEQ ID NO: 991444 - RNA, 19 nt, Artificial Sequence
  Description of Artificial Sequence: Synthetic oligonucleotide
agugaucaggaaaagggcg

SEQ ID NO: 991445 - RNA, 19 nt, Artificial Sequence
  Description of Artificial Sequence: Synthetic oligonucleotide
uggaccaagaugaaccaga

SEQ ID NO: 991446 - RNA, 19 nt, Artificial Sequence
  Description of Artificial Sequence: Synthetic oligonucleotide
ugagucaugggcaggguga

SEQ ID NO: 991447 - RNA, 19 nt, Artificial Sequence
  Description of Artificial Sequence: Synthetic oligonucleotide
aguaauagggugagucucc

SEQ ID NO: 991448 - RNA, 19 nt, Artificial Sequence
  Description of Artificial Sequence: Synthetic oligonucleotide
aacacccuccacuucaccu

SEQ ID NO: 991449 - RNA, 19 nt, Artificial Sequence
  Description of Artificial Sequence: Synthetic oligonucleotide
uacaccaucacccgacugu

SEQ ID NO: 991450 - RNA, 19 nt, Artificial Sequence
  Description of Artificial Sequence: Synthetic oligonucleotide
aggaaugucaguccugaug

SEQ ID NO: 991451 - RNA, 19 nt, Artificial Sequence
  Description of Artificial Sequence: Synthetic oligonucleotide
ugauaaagcuuagagacua

SEQ ID NO: 991452 - RNA, 19 nt, Artificial Sequence
  Description of Artificial Sequence: Synthetic oligonucleotide
agagauagaaaugagccau

SEQ ID NO: 991453 - RNA, 19 nt, Artificial Sequence
  Description of Artificial Sequence: Synthetic oligonucleotide
ugaugaaugcccagagccc

SEQ ID NO: 991454 - RNA, 19 nt, Artificial Sequence
  Description of Artificial Sequence: Synthetic oligonucleotide
gaugcuaagcccucaucug

SEQ ID NO: 991455 - RNA, 19 nt, Artificial Sequence
  Description of Artificial Sequence: Synthetic oligonucleotide
cagaauacaccaucacccg

SEQ ID NO: 991456 - RNA, 19 nt, Artificial Sequence
  Description of Artificial Sequence: Synthetic oligonucleotide
uaaccuaggucccuuuucu

SEQ ID NO: 991457 - RNA, 19 nt, Artificial Sequence
  Description of Artificial Sequence: Synthetic oligonucleotide
aaauacaggacgaggagau

SEQ ID NO: 991458 - RNA, 19 nt, Artificial Sequence
  Description of Artificial Sequence: Synthetic oligonucleotide
augauaccgaaggacagac

SEQ ID NO: 991459 - RNA, 19 nt, Artificial Sequence
  Description of Artificial Sequence: Synthetic oligonucleotide
gaaacguaggccaucuggc

SEQ ID NO: 991460 - RNA, 19 nt, Artificial Sequence
  Description of Artificial Sequence: Synthetic oligonucleotide
aacugaacucaucuacccu

SEQ ID NO: 991461 - RNA, 19 nt, Artificial Sequence
  Description of Artificial Sequence: Synthetic oligonucleotide
gcaaauucggaacacuucc

SEQ ID NO: 991462 - RNA, 19 nt, Artificial Sequence
  Description of Artificial Sequence: Synthetic oligonucleotide
uaguaggcaaauucggaac

SEQ ID NO: 991463 - RNA, 19 nt, Artificial Sequence
  Description of Artificial Sequence: Synthetic oligonucleotide
cacaucagcgaggagacgg

SEQ ID NO: 991464 - RNA, 19 nt, Artificial Sequence
  Description of Artificial Sequence: Synthetic oligonucleotide
aguaggcaaauucggaaca

SEQ ID NO: 991465 - RNA, 19 nt, Artificial Sequence
  Description of Artificial Sequence: Synthetic oligonucleotide
ugugaugaaugcccagagc

SEQ ID NO: 991466 - RNA, 19 nt, Artificial Sequence
  Description of Artificial Sequence: Synthetic oligonucleotide
agaaaugagccaugaucag

SEQ ID NO: 991467 - RNA, 19 nt, Artificial Sequence
  Description of Artificial Sequence: Synthetic oligonucleotide
gagaaauacaggacgagga

SEQ ID NO: 991468 - RNA, 19 nt, Artificial Sequence
  Description of Artificial Sequence: Synthetic oligonucleotide
uaggugacucccaacuacc

SEQ ID NO: 991469 - RNA, 19 nt, Artificial Sequence
  Description of Artificial Sequence: Synthetic oligonucleotide
uuaaaacguaaguuccagu

SEQ ID NO: 991470 - RNA, 19 nt, Artificial Sequence
  Description of Artificial Sequence: Synthetic oligonucleotide
uacaggacgaggagaucgg

SEQ ID NO: 991471 - RNA, 19 nt, Artificial Sequence
  Description of Artificial Sequence: Synthetic oligonucleotide
aauggucacggacauuaaa

SEQ ID NO: 991472 - RNA, 19 nt, Artificial Sequence
  Description of Artificial Sequence: Synthetic oligonucleotide
agugcaucggccaaaauau

SEQ ID NO: 991473 - RNA, 19 nt, Artificial Sequence
  Description of Artificial Sequence: Synthetic oligonucleotide
ggucacggacauuaaaacg

SEQ ID NO: 991474 - RNA, 19 nt, Artificial Sequence
  Description of Artificial Sequence: Synthetic oligonucleotide
aaggacagaccagaaacgu

SEQ ID NO: 991475 - RNA, 19 nt, Artificial Sequence
  Description of Artificial Sequence: Synthetic oligonucleotide
gacacauggggagaccugg

SEQ ID NO: 991476 - RNA, 19 nt, Artificial Sequence
  Description of Artificial Sequence: Synthetic oligonucleotide
gacgaggagaucgggaggg

SEQ ID NO: 991477 - RNA, 19 nt, Artificial Sequence
  Description of Artificial Sequence: Synthetic oligonucleotide
ggaaacagugacugcauag

SEQ ID NO: 991478 - RNA, 19 nt, Artificial Sequence
  Description of Artificial Sequence: Synthetic oligonucleotide
uggggucuuuaucauacca

SEQ ID NO: 991479 - RNA, 19 nt, Artificial Sequence
  Description of Artificial Sequence: Synthetic oligonucleotide
aauacaccaucacccgacu

SEQ ID NO: 991480 - RNA, 19 nt, Artificial Sequence
  Description of Artificial Sequence: Synthetic oligonucleotide
aaaugcagauucaaaccca

SEQ ID NO: 991481 - RNA, 19 nt, Artificial Sequence
  Description of Artificial Sequence: Synthetic oligonucleotide
uggucacggacauuaaaac

SEQ ID NO: 991482 - RNA, 19 nt, Artificial Sequence
  Description of Artificial Sequence: Synthetic oligonucleotide
gaacucaucuacccuugag

SEQ ID NO: 991483 - RNA, 19 nt, Artificial Sequence
  Description of Artificial Sequence: Synthetic oligonucleotide
ugacucccaacuaccaggc

SEQ ID NO: 991484 - RNA, 19 nt, Artificial Sequence
  Description of Artificial Sequence: Synthetic oligonucleotide
aaugagccaugaucagcag

SEQ ID NO: 991485 - RNA, 19 nt, Artificial Sequence
  Description of Artificial Sequence: Synthetic oligonucleotide
ucugucacauggaccaaga

SEQ ID NO: 991486 - RNA, 19 nt, Artificial Sequence
  Description of Artificial Sequence: Synthetic oligonucleotide
gaauacaccaucacccgac

SEQ ID NO: 991487 - RNA, 19 nt, Artificial Sequence
  Description of Artificial Sequence: Synthetic oligonucleotide
ucccuuaguccucgggugg

SEQ ID NO: 991488 - RNA, 19 nt, Artificial Sequence
  Description of Artificial Sequence: Synthetic oligonucleotide
gaagacaccacugaugaua

SEQ ID NO: 991489 - RNA, 19 nt, Artificial Sequence
  Description of Artificial Sequence: Synthetic oligonucleotide
aaacaugcacuuccuuccu

SEQ ID NO: 991490 - RNA, 19 nt, Artificial Sequence
  Description of Artificial Sequence: Synthetic oligonucleotide
caugauguccagucugggc

SEQ ID NO: 991491 - RNA, 19 nt, Artificial Sequence
  Description of Artificial Sequence: Synthetic oligonucleotide
acguaaguuccagugguac

SEQ ID NO: 991492 - RNA, 19 nt, Artificial Sequence
  Description of Artificial Sequence: Synthetic oligonucleotide
cuccacuucaccuugggga

SEQ ID NO: 991493 - RNA, 19 nt, Artificial Sequence
  Description of Artificial Sequence: Synthetic oligonucleotide
aggucacaaauggacaacg

SEQ ID NO: 991494 - RNA, 19 nt, Artificial Sequence
  Description of Artificial Sequence: Synthetic oligonucleotide
ucaccuugauuaaaaggau

SEQ ID NO: 991495 - RNA, 19 nt, Artificial Sequence
  Description of Artificial Sequence: Synthetic oligonucleotide
ucuggcggauggaaauggg

SEQ ID NO: 991496 - RNA, 19 nt, Artificial Sequence
  Description of Artificial Sequence: Synthetic oligonucleotide
uucaccuuggggagaggag

SEQ ID NO: 991497 - RNA, 19 nt, Artificial Sequence
  Description of Artificial Sequence: Synthetic oligonucleotide
ugcgcuggauacuucggag

SEQ ID NO: 991498 - RNA, 19 nt, Artificial Sequence
  Description of Artificial Sequence: Synthetic oligonucleotide
guagucuaucuccuccagg

SEQ ID NO: 991499 - RNA, 19 nt, Artificial Sequence
  Description of Artificial Sequence: Synthetic oligonucleotide
guaggugacucccaacuac

SEQ ID NO: 991500 - RNA, 19 nt, Artificial Sequence
  Description of Artificial Sequence: Synthetic oligonucleotide
uacacgaaaggcugcgcug

SEQ ID NO: 991501 - RNA, 19 nt, Artificial Sequence
  Description of Artificial Sequence: Synthetic oligonucleotide
cuuagagacuacaggucac

SEQ ID NO: 991502 - RNA, 19 nt, Artificial Sequence
  Description of Artificial Sequence: Synthetic oligonucleotide
ccacugaugauaccgaagg

SEQ ID NO: 991503 - RNA, 19 nt, Artificial Sequence
  Description of Artificial Sequence: Synthetic oligonucleotide
ggagccgggcaucugaucg

SEQ ID NO: 991504 - RNA, 19 nt, Artificial Sequence
  Description of Artificial Sequence: Synthetic oligonucleotide
gugauagaaaaccucccca

SEQ ID NO: 991505 - RNA, 19 nt, Artificial Sequence
  Description of Artificial Sequence: Synthetic oligonucleotide
gaagcggggugagucaugg

SEQ ID NO: 991506 - RNA, 19 nt, Artificial Sequence
  Description of Artificial Sequence: Synthetic oligonucleotide
caugaucagcaguuucagg

SEQ ID NO: 991507 - RNA, 19 nt, Artificial Sequence
  Description of Artificial Sequence: Synthetic oligonucleotide
uguugggcugcacccaggc

SEQ ID NO: 991508 - RNA, 19 nt, Artificial Sequence
  Description of Artificial Sequence: Synthetic oligonucleotide
ccauggcuaaccuaggucc

SEQ ID NO: 991509 - RNA, 19 nt, Artificial Sequence
  Description of Artificial Sequence: Synthetic oligonucleotide
uucccuuaguccucgggug

SEQ ID NO: 991510 - RNA, 19 nt, Artificial Sequence
  Description of Artificial Sequence: Synthetic oligonucleotide
ucauaccagggguucagga

SEQ ID NO: 991511 - RNA, 19 nt, Artificial Sequence
  Description of Artificial Sequence: Synthetic oligonucleotide
auaccagggguucaggaau

SEQ ID NO: 991512 - RNA, 19 nt, Artificial Sequence
  Description of Artificial Sequence: Synthetic oligonucleotide
ucgggugggaugcgcaggg

SEQ ID NO: 991513 - RNA, 19 nt, Artificial Sequence
  Description of Artificial Sequence: Synthetic oligonucleotide
ggaaguaauagggugaguc

SEQ ID NO: 991514 - RNA, 19 nt, Artificial Sequence
  Description of Artificial Sequence: Synthetic oligonucleotide
ggacagaccagaaacguag

SEQ ID NO: 991515 - RNA, 19 nt, Artificial Sequence
  Description of Artificial Sequence: Synthetic oligonucleotide
caaauggacaacgccacac

SEQ ID NO: 991516 - RNA, 19 nt, Artificial Sequence
  Description of Artificial Sequence: Synthetic oligonucleotide
uucaggaaugucaguccug

SEQ ID NO: 991517 - RNA, 19 nt, Artificial Sequence
  Description of Artificial Sequence: Synthetic oligonucleotide
caguccuuacacgaaaggc

SEQ ID NO: 991518 - RNA, 19 nt, Artificial Sequence
  Description of Artificial Sequence: Synthetic oligonucleotide
caccuugauuaaaaggaug

SEQ ID NO: 991519 - RNA, 19 nt, Artificial Sequence
  Description of Artificial Sequence: Synthetic oligonucleotide
agaauacaccaucacccga

SEQ ID NO: 991520 - RNA, 19 nt, Artificial Sequence
  Description of Artificial Sequence: Synthetic oligonucleotide
gguagucaguccuuacacg

SEQ ID NO: 991521 - RNA, 19 nt, Artificial Sequence
  Description of Artificial Sequence: Synthetic oligonucleotide
uuggccugcgaugccaugg

SEQ ID NO: 991522 - RNA, 19 nt, Artificial Sequence
  Description of Artificial Sequence: Synthetic oligonucleotide
gcuuguaguaggcaaauuc

SEQ ID NO: 991523 - RNA, 19 nt, Artificial Sequence
  Description of Artificial Sequence: Synthetic oligonucleotide
auaaagcuuagagacuaca

SEQ ID NO: 991524 - RNA, 19 nt, Artificial Sequence
  Description of Artificial Sequence: Synthetic oligonucleotide
caguccugaugucaguagg

SEQ ID NO: 991525 - RNA, 19 nt, Artificial Sequence
  Description of Artificial Sequence: Synthetic oligonucleotide
acggacauuaaaacguaag

SEQ ID NO: 991526 - RNA, 19 nt, Artificial Sequence
  Description of Artificial Sequence: Synthetic oligonucleotide
guaccgucuccucucacag

SEQ ID NO: 991527 - RNA, 19 nt, Artificial Sequence
  Description of Artificial Sequence: Synthetic oligonucleotide
ugagaccagagcacugaca

SEQ ID NO: 991528 - RNA, 19 nt, Artificial Sequence
  Description of Artificial Sequence: Synthetic oligonucleotide
agaaaggcugaagucagga

SEQ ID NO: 991529 - RNA, 19 nt, Artificial Sequence
  Description of Artificial Sequence: Synthetic oligonucleotide
ggcagaugggaucugucgg

SEQ ID NO: 991530 - RNA, 19 nt, Artificial Sequence
  Description of Artificial Sequence: Synthetic oligonucleotide
gaaguaauagggugagucu

SEQ ID NO: 991531 - RNA, 19 nt, Artificial Sequence
  Description of Artificial Sequence: Synthetic oligonucleotide
agcuuagagacuacagguc

SEQ ID NO: 991532 - RNA, 19 nt, Artificial Sequence
  Description of Artificial Sequence: Synthetic oligonucleotide
agcaggauaauggcugcgg

SEQ ID NO: 991533 - RNA, 19 nt, Artificial Sequence
  Description of Artificial Sequence: Synthetic oligonucleotide
cuggauacuucggagggag

SEQ ID NO: 991534 - RNA, 19 nt, Artificial Sequence
  Description of Artificial Sequence: Synthetic oligonucleotide
guagcggggcacaucagcg

SEQ ID NO: 991535 - RNA, 19 nt, Artificial Sequence
  Description of Artificial Sequence: Synthetic oligonucleotide
aggagcuuguaguaggcaa

SEQ ID NO: 991536 - RNA, 19 nt, Artificial Sequence
  Description of Artificial Sequence: Synthetic oligonucleotide
ucccaguacaccuccuccc

SEQ ID NO: 991537 - RNA, 19 nt, Artificial Sequence
  Description of Artificial Sequence: Synthetic oligonucleotide
ugcgcagggcagaauacac

SEQ ID NO: 991538 - RNA, 19 nt, Artificial Sequence
  Description of Artificial Sequence: Synthetic oligonucleotide
ugcgaugccaugguagucu

SEQ ID NO: 991539 - RNA, 19 nt, Artificial Sequence
  Description of Artificial Sequence: Synthetic oligonucleotide
ugcuaauggucacggacau

SEQ ID NO: 991540 - RNA, 19 nt, Artificial Sequence
  Description of Artificial Sequence: Synthetic oligonucleotide
gaugggaucugucgggcga

SEQ ID NO: 991541 - RNA, 19 nt, Artificial Sequence
  Description of Artificial Sequence: Synthetic oligonucleotide
gauuaaaaggaugggacau

SEQ ID NO: 991542 - RNA, 19 nt, Artificial Sequence
  Description of Artificial Sequence: Synthetic oligonucleotide
caacuaccaggcucaaagc

SEQ ID NO: 991543 - RNA, 19 nt, Artificial Sequence
  Description of Artificial Sequence: Synthetic oligonucleotide
auucggaacacuuccugua

SEQ ID NO: 991544 - RNA, 19 nt, Artificial Sequence
  Description of Artificial Sequence: Synthetic oligonucleotide
cuaaccuaggucccuuuuc

SEQ ID NO: 991545 - RNA, 19 nt, Artificial Sequence
  Description of Artificial Sequence: Synthetic oligonucleotide
agaugggaucugucgggcg

SEQ ID NO: 991546 - RNA, 19 nt, Artificial Sequence
  Description of Artificial Sequence: Synthetic oligonucleotide
aggggaagcggggugaguc

SEQ ID NO: 991547 - RNA, 19 nt, Artificial Sequence
  Description of Artificial Sequence: Synthetic oligonucleotide
uggcccaagugcaucggcc

SEQ ID NO: 991548 - RNA, 19 nt, Artificial Sequence
  Description of Artificial Sequence: Synthetic oligonucleotide
ugauaccgaaggacagacc

SEQ ID NO: 991549 - RNA, 19 nt, Artificial Sequence
  Description of Artificial Sequence: Synthetic oligonucleotide
uacagcccaaggagguuag

SEQ ID NO: 991550 - RNA, 19 nt, Artificial Sequence
  Description of Artificial Sequence: Synthetic oligonucleotide
ggaaaugggugaucuuccg

SEQ ID NO: 991551 - RNA, 19 nt, Artificial Sequence
  Description of Artificial Sequence: Synthetic oligonucleotide
gacagaccagaaacguagg

SEQ ID NO: 991552 - RNA, 19 nt, Artificial Sequence
  Description of Artificial Sequence: Synthetic oligonucleotide
caacgccacacccggaagg

SEQ ID NO: 991553 - RNA, 19 nt, Artificial Sequence
  Description of Artificial Sequence: Synthetic oligonucleotide
ucacggacauuaaaacgua

SEQ ID NO: 991554 - RNA, 19 nt, Artificial Sequence
  Description of Artificial Sequence: Synthetic oligonucleotide
ugacacauggggagaccug

SEQ ID NO: 991555 - RNA, 19 nt, Artificial Sequence
  Description of Artificial Sequence: Synthetic oligonucleotide
ucacaaucaccuugauuaa

SEQ ID NO: 991556 - RNA, 19 nt, Artificial Sequence
  Description of Artificial Sequence: Synthetic oligonucleotide
cuacccgcgaccaggauga

SEQ ID NO: 991557 - RNA, 19 nt, Artificial Sequence
  Description of Artificial Sequence: Synthetic oligonucleotide
uuaguccucgggugggaug

SEQ ID NO: 991558 - RNA, 19 nt, Artificial Sequence
  Description of Artificial Sequence: Synthetic oligonucleotide
auggacaacgccacacccg

SEQ ID NO: 991559 - RNA, 19 nt, Artificial Sequence
  Description of Artificial Sequence: Synthetic oligonucleotide
ugccaugguagucuaucuc

SEQ ID NO: 991560 - RNA, 19 nt, Artificial Sequence
  Description of Artificial Sequence: Synthetic oligonucleotide
gucacggacauuaaaacgu

SEQ ID NO: 991561 - RNA, 19 nt, Artificial Sequence
  Description of Artificial Sequence: Synthetic oligonucleotide
gagauagaaaugagccaug

SEQ ID NO: 991562 - RNA, 19 nt, Artificial Sequence
  Description of Artificial Sequence: Synthetic oligonucleotide
auacagugauagaaaaccu

SEQ ID NO: 991563 - RNA, 19 nt, Artificial Sequence
  Description of Artificial Sequence: Synthetic oligonucleotide
aggagaucgggagggcacc

SEQ ID NO: 991564 - RNA, 19 nt, Artificial Sequence
  Description of Artificial Sequence: Synthetic oligonucleotide
agagacuacaggucacaaa

SEQ ID NO: 991565 - RNA, 19 nt, Artificial Sequence
  Description of Artificial Sequence: Synthetic oligonucleotide
cuuccguccucgcucagug

SEQ ID NO: 991566 - RNA, 19 nt, Artificial Sequence
  Description of Artificial Sequence: Synthetic oligonucleotide
ucuacccuugagccuccag

SEQ ID NO: 991567 - RNA, 19 nt, Artificial Sequence
  Description of Artificial Sequence: Synthetic oligonucleotide
gcugcggucagaaaggcug

SEQ ID NO: 991568 - RNA, 19 nt, Artificial Sequence
  Description of Artificial Sequence: Synthetic oligonucleotide
gagaggaggggugcuaaug

SEQ ID NO: 991569 - RNA, 19 nt, Artificial Sequence
  Description of Artificial Sequence: Synthetic oligonucleotide
gcgaccaggaugaugaccc

SEQ ID NO: 991570 - RNA, 19 nt, Artificial Sequence
  Description of Artificial Sequence: Synthetic oligonucleotide
cuuggcaaccugcacuguc

SEQ ID NO: 991571 - RNA, 19 nt, Artificial Sequence
  Description of Artificial Sequence: Synthetic oligonucleotide
ucggagggagccuccagcu

SEQ ID NO: 991572 - RNA, 19 nt, Artificial Sequence
  Description of Artificial Sequence: Synthetic oligonucleotide
gagacggaggaugugggca

SEQ ID NO: 991573 - RNA, 19 nt, Artificial Sequence
  Description of Artificial Sequence: Synthetic oligonucleotide
ggauacuucggagggagcc

SEQ ID NO: 991574 - RNA, 19 nt, Artificial Sequence
  Description of Artificial Sequence: Synthetic oligonucleotide
agaacacaacuccccaaaa

SEQ ID NO: 991575 - RNA, 19 nt, Artificial Sequence
  Description of Artificial Sequence: Synthetic oligonucleotide
caggauaauggcugcgguc

SEQ ID NO: 991576 - RNA, 19 nt, Artificial Sequence
  Description of Artificial Sequence: Synthetic oligonucleotide
cagggugagaccagagcac

SEQ ID NO: 991577 - RNA, 19 nt, Artificial Sequence
  Description of Artificial Sequence: Synthetic oligonucleotide
aucugaucggucugucaca

SEQ ID NO: 991578 - RNA, 19 nt, Artificial Sequence
  Description of Artificial Sequence: Synthetic oligonucleotide
ggacaucccaaccucagca

SEQ ID NO: 991579 - RNA, 19 nt, Artificial Sequence
  Description of Artificial Sequence: Synthetic oligonucleotide
gacaacgccacacccggaa

SEQ ID NO: 991580 - RNA, 19 nt, Artificial Sequence
  Description of Artificial Sequence: Synthetic oligonucleotide
agugaugcuaagcccucau

SEQ ID NO: 991581 - RNA, 19 nt, Artificial Sequence
  Description of Artificial Sequence: Synthetic oligonucleotide
cucagugaugcuaagcccu

SEQ ID NO: 991582 - RNA, 19 nt, Artificial Sequence
  Description of Artificial Sequence: Synthetic oligonucleotide
aacgccacacccggaaggu

SEQ ID NO: 991583 - RNA, 19 nt, Artificial Sequence
  Description of Artificial Sequence: Synthetic oligonucleotide
acguaggccaucuggcgga

SEQ ID NO: 991584 - RNA, 19 nt, Artificial Sequence
  Description of Artificial Sequence: Synthetic oligonucleotide
auacaccaucacccgacug

SEQ ID NO: 991585 - RNA, 19 nt, Artificial Sequence
  Description of Artificial Sequence: Synthetic oligonucleotide
acaacgccacacccggaag

SEQ ID NO: 991586 - RNA, 19 nt, Artificial Sequence
  Description of Artificial Sequence: Synthetic oligonucleotide
gaucuuccguccucgcuca

SEQ ID NO: 991587 - RNA, 19 nt, Artificial Sequence
  Description of Artificial Sequence: Synthetic oligonucleotide
cauggaccaagaugaacca

SEQ ID NO: 991588 - RNA, 19 nt, Artificial Sequence
  Description of Artificial Sequence: Synthetic oligonucleotide
gagccgggcaucugaucgg

SEQ ID NO: 991589 - RNA, 19 nt, Artificial Sequence
  Description of Artificial Sequence: Synthetic oligonucleotide
caggaaaacugaacucauc

SEQ ID NO: 991590 - RNA, 19 nt, Artificial Sequence
  Description of Artificial Sequence: Synthetic oligonucleotide
acuacaggucacaaaugga

SEQ ID NO: 991591 - RNA, 19 nt, Artificial Sequence
  Description of Artificial Sequence: Synthetic oligonucleotide
gaucccaaccacaccuggc

SEQ ID NO: 991592 - RNA, 19 nt, Artificial Sequence
  Description of Artificial Sequence: Synthetic oligonucleotide
gguagcggggcacaucagc

SEQ ID NO: 991593 - RNA, 19 nt, Artificial Sequence
  Description of Artificial Sequence: Synthetic oligonucleotide
cauaccagggguucaggaa

SEQ ID NO: 991594 - RNA, 19 nt, Artificial Sequence
  Description of Artificial Sequence: Synthetic oligonucleotide
ggcugcgcuggauacuucg

SEQ ID NO: 991595 - RNA, 19 nt, Artificial Sequence
  Description of Artificial Sequence: Synthetic oligonucleotide
uggauacuucggagggagc

SEQ ID NO: 991596 - RNA, 19 nt, Artificial Sequence
  Description of Artificial Sequence: Synthetic oligonucleotide
gggcgagcaguccagguag

SEQ ID NO: 991597 - RNA, 19 nt, Artificial Sequence
  Description of Artificial Sequence: Synthetic oligonucleotide
gaaaugggugaucuuccgu

SEQ ID NO: 991598 - RNA, 19 nt, Artificial Sequence
  Description of Artificial Sequence: Synthetic oligonucleotide
cacccgacuguccuccugc

SEQ ID NO: 991599 - RNA, 19 nt, Artificial Sequence
  Description of Artificial Sequence: Synthetic oligonucleotide
gugcuaauggucacggaca

SEQ ID NO: 991600 - RNA, 19 nt, Artificial Sequence
  Description of Artificial Sequence: Synthetic oligonucleotide
gaggagaucgggagggcac

SEQ ID NO: 991601 - RNA, 19 nt, Artificial Sequence
  Description of Artificial Sequence: Synthetic oligonucleotide
aaccuaggucccuuuucuu

SEQ ID NO: 991602 - RNA, 19 nt, Artificial Sequence
  Description of Artificial Sequence: Synthetic oligonucleotide
cuuacacgaaaggcugcgc

SEQ ID NO: 991603 - RNA, 19 nt, Artificial Sequence
  Description of Artificial Sequence: Synthetic oligonucleotide
gguagucuaucuccuccag

SEQ ID NO: 991604 - RNA, 19 nt, Artificial Sequence
  Description of Artificial Sequence: Synthetic oligonucleotide
guaggcaaauucggaacac

SEQ ID NO: 991605 - RNA, 19 nt, Artificial Sequence
  Description of Artificial Sequence: Synthetic oligonucleotide
gaaugucaguccugauguc

SEQ ID NO: 991606 - RNA, 19 nt, Artificial Sequence
  Description of Artificial Sequence: Synthetic oligonucleotide
acaacacccuccacuucac

SEQ ID NO: 991607 - RNA, 19 nt, Artificial Sequence
  Description of Artificial Sequence: Synthetic oligonucleotide
gcucagugaugcuaagccc

SEQ ID NO: 991608 - RNA, 19 nt, Artificial Sequence
  Description of Artificial Sequence: Synthetic oligonucleotide
cagguagucaguccuuaca

SEQ ID NO: 991609 - RNA, 19 nt, Artificial Sequence
  Description of Artificial Sequence: Synthetic oligonucleotide
gggucuuuaucauaccaaa

SEQ ID NO: 991610 - RNA, 19 nt, Artificial Sequence
  Description of Artificial Sequence: Synthetic oligonucleotide
ucgcucagugaugcuaagc

SEQ ID NO: 991611 - RNA, 19 nt, Artificial Sequence
  Description of Artificial Sequence: Synthetic oligonucleotide
agacggaggaugugggcaa

SEQ ID NO: 991612 - RNA, 19 nt, Artificial Sequence
  Description of Artificial Sequence: Synthetic oligonucleotide
uagagacuacaggucacaa

SEQ ID NO: 991613 - RNA, 19 nt, Artificial Sequence
  Description of Artificial Sequence: Synthetic oligonucleotide
uguccuccugccgucggcc

SEQ ID NO: 991614 - RNA, 19 nt, Artificial Sequence
  Description of Artificial Sequence: Synthetic oligonucleotide
agacuacaggucacaaaug

SEQ ID NO: 991615 - RNA, 19 nt, Artificial Sequence
  Description of Artificial Sequence: Synthetic oligonucleotide
cauacuggagccgggcauc

SEQ ID NO: 991616 - RNA, 19 nt, Artificial Sequence
  Description of Artificial Sequence: Synthetic oligonucleotide
agggugagaccagagcacu

SEQ ID NO: 991617 - RNA, 19 nt, Artificial Sequence
  Description of Artificial Sequence: Synthetic oligonucleotide
cuguccagaacuggagaug

SEQ ID NO: 991618 - RNA, 19 nt, Artificial Sequence
  Description of Artificial Sequence: Synthetic oligonucleotide
ugugggcaauggacccggg

SEQ ID NO: 991619 - RNA, 19 nt, Artificial Sequence
  Description of Artificial Sequence: Synthetic oligonucleotide
ggacgaggagaucgggagg

SEQ ID NO: 991620 - RNA, 19 nt, Artificial Sequence
  Description of Artificial Sequence: Synthetic oligonucleotide
gcgcuggauacuucggagg

SEQ ID NO: 991621 - RNA, 19 nt, Artificial Sequence
  Description of Artificial Sequence: Synthetic oligonucleotide
ucccucuccccacuuuaaa

SEQ ID NO: 991622 - RNA, 19 nt, Artificial Sequence
  Description of Artificial Sequence: Synthetic oligonucleotide
uagcggggcacaucagcga

SEQ ID NO: 991623 - RNA, 19 nt, Artificial Sequence
  Description of Artificial Sequence: Synthetic oligonucleotide
gcuacccgcgaccaggaug

SEQ ID NO: 991624 - RNA, 19 nt, Artificial Sequence
  Description of Artificial Sequence: Synthetic oligonucleotide
ucacccgacuguccuccug

SEQ ID NO: 991625 - RNA, 19 nt, Artificial Sequence
  Description of Artificial Sequence: Synthetic oligonucleotide
gauaauggcugcggucaga

SEQ ID NO: 991626 - RNA, 19 nt, Artificial Sequence
  Description of Artificial Sequence: Synthetic oligonucleotide
gccccauggaaacagugac

SEQ ID NO: 991627 - RNA, 19 nt, Artificial Sequence
  Description of Artificial Sequence: Synthetic oligonucleotide
gugagaccagagcacugac

SEQ ID NO: 991628 - RNA, 19 nt, Artificial Sequence
  Description of Artificial Sequence: Synthetic oligonucleotide
agguuaggaggcucccagu

SEQ ID NO: 991629 - RNA, 19 nt, Artificial Sequence
  Description of Artificial Sequence: Synthetic oligonucleotide
ugucugcccucuuggccug

SEQ ID NO: 991630 - RNA, 19 nt, Artificial Sequence
  Description of Artificial Sequence: Synthetic oligonucleotide
guaauagggugagucucca

SEQ ID NO: 991631 - RNA, 19 nt, Artificial Sequence
  Description of Artificial Sequence: Synthetic oligonucleotide
gccgucggccugcagaggg

SEQ ID NO: 991632 - RNA, 19 nt, Artificial Sequence
  Description of Artificial Sequence: Synthetic oligonucleotide
auacagcccaaggagguua

SEQ ID NO: 991633 - RNA, 19 nt, Artificial Sequence
  Description of Artificial Sequence: Synthetic oligonucleotide
ggggugcuaauggucacgg

SEQ ID NO: 991634 - RNA, 19 nt, Artificial Sequence
  Description of Artificial Sequence: Synthetic oligonucleotide
ccuuacacgaaaggcugcg

SEQ ID NO: 991635 - RNA, 19 nt, Artificial Sequence
  Description of Artificial Sequence: Synthetic oligonucleotide
ggcggauggaaauggguga

SEQ ID NO: 991636 - RNA, 19 nt, Artificial Sequence
  Description of Artificial Sequence: Synthetic oligonucleotide
caucccaaccucagcagaa

SEQ ID NO: 991637 - RNA, 19 nt, Artificial Sequence
  Description of Artificial Sequence: Synthetic oligonucleotide
gugggcaauggacccgggc

SEQ ID NO: 991638 - RNA, 19 nt, Artificial Sequence
  Description of Artificial Sequence: Synthetic oligonucleotide
aacguaaguuccaguggua

SEQ ID NO: 991639 - RNA, 19 nt, Artificial Sequence
  Description of Artificial Sequence: Synthetic oligonucleotide
gugaugcuaagcccucauc

SEQ ID NO: 991640 - RNA, 19 nt, Artificial Sequence
  Description of Artificial Sequence: Synthetic oligonucleotide
acgaggagaucgggagggc

SEQ ID NO: 991641 - RNA, 19 nt, Artificial Sequence
  Description of Artificial Sequence: Synthetic oligonucleotide
gaugacccgaagcgggucu

SEQ ID NO: 991642 - RNA, 19 nt, Artificial Sequence
  Description of Artificial Sequence: Synthetic oligonucleotide
ggauaauggcugcggucag

SEQ ID NO: 991643 - RNA, 19 nt, Artificial Sequence
  Description of Artificial Sequence: Synthetic oligonucleotide
cguaaguuccagugguacc

SEQ ID NO: 991644 - RNA, 19 nt, Artificial Sequence
  Description of Artificial Sequence: Synthetic oligonucleotide
ggucacaaauggacaacgc

SEQ ID NO: 991645 - RNA, 19 nt, Artificial Sequence
  Description of Artificial Sequence: Synthetic oligonucleotide
ggcaaauucggaacacuuc

SEQ ID NO: 991646 - RNA, 19 nt, Artificial Sequence
  Description of Artificial Sequence: Synthetic oligonucleotide
caacacccuccacuucacc

SEQ ID NO: 991647 - RNA, 19 nt, Artificial Sequence
  Description of Artificial Sequence: Synthetic oligonucleotide
ucugucgggcgagcagucc

SEQ ID NO: 991648 - RNA, 19 nt, Artificial Sequence
  Description of Artificial Sequence: Synthetic oligonucleotide
ucuuccguccucgcucagu

SEQ ID NO: 991649 - RNA, 19 nt, Artificial Sequence
  Description of Artificial Sequence: Synthetic oligonucleotide
cacccuccacuucaccuug

SEQ ID NO: 991650 - RNA, 19 nt, Artificial Sequence
  Description of Artificial Sequence: Synthetic oligonucleotide
gaucgggagggcaccccag

SEQ ID NO: 991651 - RNA, 19 nt, Artificial Sequence
  Description of Artificial Sequence: Synthetic oligonucleotide
gaucugucgggcgagcagu

SEQ ID NO: 991652 - RNA, 19 nt, Artificial Sequence
  Description of Artificial Sequence: Synthetic oligonucleotide
acaccacugaugauaccga

SEQ ID NO: 991653 - RNA, 19 nt, Artificial Sequence
  Description of Artificial Sequence: Synthetic oligonucleotide
caucuacccuugagccucc

SEQ ID NO: 991654 - RNA, 19 nt, Artificial Sequence
  Description of Artificial Sequence: Synthetic oligonucleotide
ggagacggaggaugugggc

SEQ ID NO: 991655 - RNA, 19 nt, Artificial Sequence
  Description of Artificial Sequence: Synthetic oligonucleotide
cuacccuugagccuccagu

SEQ ID NO: 991656 - RNA, 19 nt, Artificial Sequence
  Description of Artificial Sequence: Synthetic oligonucleotide
gccauggcuaaccuagguc

SEQ ID NO: 991657 - RNA, 19 nt, Artificial Sequence
  Description of Artificial Sequence: Synthetic oligonucleotide
caggacgaggagaucggga

SEQ ID NO: 991658 - RNA, 19 nt, Artificial Sequence
  Description of Artificial Sequence: Synthetic oligonucleotide
cucgggugggaugcgcagg

SEQ ID NO: 991659 - RNA, 19 nt, Artificial Sequence
  Description of Artificial Sequence: Synthetic oligonucleotide
auggacccgggcuggggcu

SEQ ID NO: 991660 - RNA, 19 nt, Artificial Sequence
  Description of Artificial Sequence: Synthetic oligonucleotide
gcaucggccaaaauauuga

SEQ ID NO: 991661 - RNA, 19 nt, Artificial Sequence
  Description of Artificial Sequence: Synthetic oligonucleotide
gaagguagcggggcacauc

SEQ ID NO: 991662 - RNA, 19 nt, Artificial Sequence
  Description of Artificial Sequence: Synthetic oligonucleotide
cucgcucagugaugcuaag

SEQ ID NO: 991663 - RNA, 19 nt, Artificial Sequence
  Description of Artificial Sequence: Synthetic oligonucleotide
cgcuggauacuucggaggg

SEQ ID NO: 991664 - RNA, 19 nt, Artificial Sequence
  Description of Artificial Sequence: Synthetic oligonucleotide
gauacuucggagggagccu

SEQ ID NO: 991665 - RNA, 19 nt, Artificial Sequence
  Description of Artificial Sequence: Synthetic oligonucleotide
ggaugcgcagggcagaaua

SEQ ID NO: 991666 - RNA, 19 nt, Artificial Sequence
  Description of Artificial Sequence: Synthetic oligonucleotide
caucagcgaggagacggag

SEQ ID NO: 991667 - RNA, 19 nt, Artificial Sequence
  Description of Artificial Sequence: Synthetic oligonucleotide
gggugaucuuccguccucg

SEQ ID NO: 991668 - RNA, 19 nt, Artificial Sequence
  Description of Artificial Sequence: Synthetic oligonucleotide
ggggagaccuggacaaggg

SEQ ID NO: 991669 - RNA, 19 nt, Artificial Sequence
  Description of Artificial Sequence: Synthetic oligonucleotide
caauggacccgggcugggg

SEQ ID NO: 991670 - RNA, 19 nt, Artificial Sequence
  Description of Artificial Sequence: Synthetic oligonucleotide
gguuaggaggcucccagua

SEQ ID NO: 991671 - RNA, 19 nt, Artificial Sequence
  Description of Artificial Sequence: Synthetic oligonucleotide
augacccgaagcgggucuc

SEQ ID NO: 991672 - RNA, 19 nt, Artificial Sequence
  Description of Artificial Sequence: Synthetic oligonucleotide
ggcaauggacccgggcugg

SEQ ID NO: 991673 - RNA, 19 nt, Artificial Sequence
  Description of Artificial Sequence: Synthetic oligonucleotide
auggcuaaccuaggucccu

SEQ ID NO: 991674 - RNA, 19 nt, Artificial Sequence
  Description of Artificial Sequence: Synthetic oligonucleotide
agaccauacuggagccggg

SEQ ID NO: 991675 - RNA, 19 nt, Artificial Sequence
  Description of Artificial Sequence: Synthetic oligonucleotide
ccaugaucagcaguuucag

SEQ ID NO: 991676 - RNA, 19 nt, Artificial Sequence
  Description of Artificial Sequence: Synthetic oligonucleotide
gagaucgggagggcacccc

SEQ ID NO: 991677 - RNA, 19 nt, Artificial Sequence
  Description of Artificial Sequence: Synthetic oligonucleotide
ggagaccauacuggagccg

SEQ ID NO: 991678 - RNA, 19 nt, Artificial Sequence
  Description of Artificial Sequence: Synthetic oligonucleotide
gaucggucugucacaugga

SEQ ID NO: 991679 - RNA, 19 nt, Artificial Sequence
  Description of Artificial Sequence: Synthetic oligonucleotide
aucggccaaaauauugaua

SEQ ID NO: 991680 - RNA, 19 nt, Artificial Sequence
  Description of Artificial Sequence: Synthetic oligonucleotide
gcaaccugcacuguccaga

SEQ ID NO: 991681 - RNA, 19 nt, Artificial Sequence
  Description of Artificial Sequence: Synthetic oligonucleotide
aucugucgggcgagcaguc

SEQ ID NO: 991682 - RNA, 19 nt, Artificial Sequence
  Description of Artificial Sequence: Synthetic oligonucleotide
ggaugggacaucccaaccu

SEQ ID NO: 991683 - RNA, 19 nt, Artificial Sequence
  Description of Artificial Sequence: Synthetic oligonucleotide
acaucagcgaggagacgga

SEQ ID NO: 991684 - RNA, 19 nt, Artificial Sequence
  Description of Artificial Sequence: Synthetic oligonucleotide
gggcagaauacaccaucac

SEQ ID NO: 991685 - RNA, 19 nt, Artificial Sequence
  Description of Artificial Sequence: Synthetic oligonucleotide
cugucgggcgagcagucca

SEQ ID NO: 991686 - RNA, 19 nt, Artificial Sequence
  Description of Artificial Sequence: Synthetic oligonucleotide
ggugaucuuccguccucgc

SEQ ID NO: 991687 - RNA, 19 nt, Artificial Sequence
  Description of Artificial Sequence: Synthetic oligonucleotide
cacggacauuaaaacguaa

SEQ ID NO: 991688 - RNA, 19 nt, Artificial Sequence
  Description of Artificial Sequence: Synthetic oligonucleotide
ugacccgaagcgggucucc

SEQ ID NO: 991689 - RNA, 19 nt, Artificial Sequence
  Description of Artificial Sequence: Synthetic oligonucleotide
uuccguccucgcucaguga

SEQ ID NO: 991690 - RNA, 19 nt, Artificial Sequence
  Description of Artificial Sequence: Synthetic oligonucleotide
ggaggaugugggcaaugga

SEQ ID NO: 991691 - RNA, 19 nt, Artificial Sequence
  Description of Artificial Sequence: Synthetic oligonucleotide
aggugacucccaacuacca

SEQ ID NO: 991692 - RNA, 19 nt, Artificial Sequence
  Description of Artificial Sequence: Synthetic oligonucleotide
auacuggagccgggcaucu

SEQ ID NO: 991693 - RNA, 19 nt, Artificial Sequence
  Description of Artificial Sequence: Synthetic oligonucleotide
cuuggccugcgaugccaug

SEQ ID NO: 991694 - RNA, 19 nt, Artificial Sequence
  Description of Artificial Sequence: Synthetic oligonucleotide
cacaaucaccuugauuaaa

SEQ ID NO: 991695 - RNA, 19 nt, Artificial Sequence
  Description of Artificial Sequence: Synthetic oligonucleotide
acagcccaaggagguuagg

SEQ ID NO: 991696 - RNA, 19 nt, Artificial Sequence
  Description of Artificial Sequence: Synthetic oligonucleotide
aggaaguaauagggugagu

SEQ ID NO: 991697 - RNA, 19 nt, Artificial Sequence
  Description of Artificial Sequence: Synthetic oligonucleotide
aggacagaccagaaacgua

SEQ ID NO: 991698 - RNA, 19 nt, Artificial Sequence
  Description of Artificial Sequence: Synthetic oligonucleotide
cagcccaaggagguuagga

SEQ ID NO: 991699 - RNA, 19 nt, Artificial Sequence
  Description of Artificial Sequence: Synthetic oligonucleotide
cugcggucagaaaggcuga

SEQ ID NO: 991700 - RNA, 19 nt, Artificial Sequence
  Description of Artificial Sequence: Synthetic oligonucleotide
gguuccuuucagaccugag

SEQ ID NO: 991701 - RNA, 19 nt, Artificial Sequence
  Description of Artificial Sequence: Synthetic oligonucleotide
ggggucuuuaucauaccaa

SEQ ID NO: 991702 - RNA, 19 nt, Artificial Sequence
  Description of Artificial Sequence: Synthetic oligonucleotide
ugggaugcgcagggcagaa

SEQ ID NO: 991703 - RNA, 19 nt, Artificial Sequence
  Description of Artificial Sequence: Synthetic oligonucleotide
ggcccaagugcaucggcca

SEQ ID NO: 991704 - RNA, 19 nt, Artificial Sequence
  Description of Artificial Sequence: Synthetic oligonucleotide
aucccaaccucagcagaaa

SEQ ID NO: 991705 - RNA, 19 nt, Artificial Sequence
  Description of Artificial Sequence: Synthetic oligonucleotide
caccccaggcccagggguc

SEQ ID NO: 991706 - RNA, 19 nt, Artificial Sequence
  Description of Artificial Sequence: Synthetic oligonucleotide
ccaccagucccuguugggc

SEQ ID NO: 991707 - RNA, 19 nt, Artificial Sequence
  Description of Artificial Sequence: Synthetic oligonucleotide
acggaggaugugggcaaug

SEQ ID NO: 991708 - RNA, 19 nt, Artificial Sequence
  Description of Artificial Sequence: Synthetic oligonucleotide
gagcuuguaguaggcaaau

SEQ ID NO: 991709 - RNA, 19 nt, Artificial Sequence
  Description of Artificial Sequence: Synthetic oligonucleotide
agguauggagcaggauaau

SEQ ID NO: 991710 - RNA, 19 nt, Artificial Sequence
  Description of Artificial Sequence: Synthetic oligonucleotide
cugacacauggggagaccu

SEQ ID NO: 991711 - RNA, 19 nt, Artificial Sequence
  Description of Artificial Sequence: Synthetic oligonucleotide
uggcuaaccuaggucccuu

SEQ ID NO: 991712 - RNA, 19 nt, Artificial Sequence
  Description of Artificial Sequence: Synthetic oligonucleotide
ccauguucccuuaguccuc

SEQ ID NO: 991713 - RNA, 19 nt, Artificial Sequence
  Description of Artificial Sequence: Synthetic oligonucleotide
caguaccgucuccucucac

SEQ ID NO: 991714 - RNA, 19 nt, Artificial Sequence
  Description of Artificial Sequence: Synthetic oligonucleotide
gggcaccccaggcccaggg

SEQ ID NO: 991715 - RNA, 19 nt, Artificial Sequence
  Description of Artificial Sequence: Synthetic oligonucleotide
cagugguaccaguucccaa

SEQ ID NO: 991716 - RNA, 19 nt, Artificial Sequence
  Description of Artificial Sequence: Synthetic oligonucleotide
aggcugaagucaggaagua

SEQ ID NO: 991717 - RNA, 19 nt, Artificial Sequence
  Description of Artificial Sequence: Synthetic oligonucleotide
ggagaucgggagggcaccc

SEQ ID NO: 991718 - RNA, 19 nt, Artificial Sequence
  Description of Artificial Sequence: Synthetic oligonucleotide
acccgcgaccaggaugaug

SEQ ID NO: 991719 - RNA, 19 nt, Artificial Sequence
  Description of Artificial Sequence: Synthetic oligonucleotide
cacgaaaggcugcgcugga

SEQ ID NO: 991720 - RNA, 19 nt, Artificial Sequence
  Description of Artificial Sequence: Synthetic oligonucleotide
cccgacuguccuccugccg

SEQ ID NO: 991721 - RNA, 19 nt, Artificial Sequence
  Description of Artificial Sequence: Synthetic oligonucleotide
gcaauggacccgggcuggg

SEQ ID NO: 991722 - RNA, 19 nt, Artificial Sequence
  Description of Artificial Sequence: Synthetic oligonucleotide
aggcuacccgcgaccagga

SEQ ID NO: 991723 - RNA, 19 nt, Artificial Sequence
  Description of Artificial Sequence: Synthetic oligonucleotide
cccaaccacaccuggccca

SEQ ID NO: 991724 - RNA, 19 nt, Artificial Sequence
  Description of Artificial Sequence: Synthetic oligonucleotide
ggagguuaggaggcuccca

SEQ ID NO: 991725 - RNA, 19 nt, Artificial Sequence
  Description of Artificial Sequence: Synthetic oligonucleotide
guugggcugcacccaggcu

SEQ ID NO: 991726 - RNA, 19 nt, Artificial Sequence
  Description of Artificial Sequence: Synthetic oligonucleotide
gcccucaucugccuucuua

SEQ ID NO: 991727 - RNA, 19 nt, Artificial Sequence
  Description of Artificial Sequence: Synthetic oligonucleotide
ccgaagcgggucuccugcc

SEQ ID NO: 991728 - RNA, 19 nt, Artificial Sequence
  Description of Artificial Sequence: Synthetic oligonucleotide
ucccaacuaccaggcucaa

SEQ ID NO: 991729 - RNA, 19 nt, Artificial Sequence
  Description of Artificial Sequence: Synthetic oligonucleotide
aggccaucuggcggaugga

SEQ ID NO: 991730 - RNA, 19 nt, Artificial Sequence
  Description of Artificial Sequence: Synthetic oligonucleotide
cagggccauggcuaaccua

SEQ ID NO: 991731 - RNA, 19 nt, Artificial Sequence
  Description of Artificial Sequence: Synthetic oligonucleotide
gcacugacacauggggaga

SEQ ID NO: 991732 - RNA, 19 nt, Artificial Sequence
  Description of Artificial Sequence: Synthetic oligonucleotide
ccaucuggcggauggaaau

SEQ ID NO: 991733 - RNA, 19 nt, Artificial Sequence
  Description of Artificial Sequence: Synthetic oligonucleotide
aucuacccuugagccucca

SEQ ID NO: 991734 - RNA, 19 nt, Artificial Sequence
  Description of Artificial Sequence: Synthetic oligonucleotide
gggaucugucgggcgagca

SEQ ID NO: 991735 - RNA, 19 nt, Artificial Sequence
  Description of Artificial Sequence: Synthetic oligonucleotide
cgggcaucugaucggucug

SEQ ID NO: 991736 - RNA, 19 nt, Artificial Sequence
  Description of Artificial Sequence: Synthetic oligonucleotide
cuuaguccucgggugggau

SEQ ID NO: 991737 - RNA, 19 nt, Artificial Sequence
  Description of Artificial Sequence: Synthetic oligonucleotide
gcuaaccuaggucccuuuu

SEQ ID NO: 991738 - RNA, 19 nt, Artificial Sequence
  Description of Artificial Sequence: Synthetic oligonucleotide
gacccgaagcgggucuccu

SEQ ID NO: 991739 - RNA, 19 nt, Artificial Sequence
  Description of Artificial Sequence: Synthetic oligonucleotide
gcgaugccaugguagucua

SEQ ID NO: 991740 - RNA, 19 nt, Artificial Sequence
  Description of Artificial Sequence: Synthetic oligonucleotide
ccggaagguagcggggcac

SEQ ID NO: 991741 - RNA, 19 nt, Artificial Sequence
  Description of Artificial Sequence: Synthetic oligonucleotide
ccagaaacguaggccaucu

SEQ ID NO: 991742 - RNA, 19 nt, Artificial Sequence
  Description of Artificial Sequence: Synthetic oligonucleotide
ccaguaccgucuccucuca

SEQ ID NO: 991743 - RNA, 19 nt, Artificial Sequence
  Description of Artificial Sequence: Synthetic oligonucleotide
gccucauaccagggguuca

SEQ ID NO: 991744 - RNA, 19 nt, Artificial Sequence
  Description of Artificial Sequence: Synthetic oligonucleotide
gcgagcaguccagguaguc

SEQ ID NO: 991745 - RNA, 19 nt, Artificial Sequence
  Description of Artificial Sequence: Synthetic oligonucleotide
cgagcaguccagguaguca

SEQ ID NO: 991746 - RNA, 19 nt, Artificial Sequence
  Description of Artificial Sequence: Synthetic oligonucleotide
acgccacacccggaaggua

SEQ ID NO: 991747 - RNA, 19 nt, Artificial Sequence
  Description of Artificial Sequence: Synthetic oligonucleotide
ccauacuggagccgggcau

SEQ ID NO: 991748 - RNA, 19 nt, Artificial Sequence
  Description of Artificial Sequence: Synthetic oligonucleotide
gcgaggagacggaggaugu

SEQ ID NO: 991749 - RNA, 19 nt, Artificial Sequence
  Description of Artificial Sequence: Synthetic oligonucleotide
gcggauggaaaugggugau

SEQ ID NO: 991750 - RNA, 19 nt, Artificial Sequence
  Description of Artificial Sequence: Synthetic oligonucleotide
caagugcaucggccaaaau

SEQ ID NO: 991751 - RNA, 19 nt, Artificial Sequence
  Description of Artificial Sequence: Synthetic oligonucleotide
gugcaucggccaaaauauu

SEQ ID NO: 991752 - RNA, 19 nt, Artificial Sequence
  Description of Artificial Sequence: Synthetic oligonucleotide
cccggaagguagcggggca

SEQ ID NO: 991753 - RNA, 19 nt, Artificial Sequence
  Description of Artificial Sequence: Synthetic oligonucleotide
gucggccugcagaggggaa

SEQ ID NO: 991754 - RNA, 19 nt, Artificial Sequence
  Description of Artificial Sequence: Synthetic oligonucleotide
ggacaacgccacacccgga

SEQ ID NO: 991755 - RNA, 19 nt, Artificial Sequence
  Description of Artificial Sequence: Synthetic oligonucleotide
ccuuaguccucggguggga

SEQ ID NO: 991756 - RNA, 19 nt, Artificial Sequence
  Description of Artificial Sequence: Synthetic oligonucleotide
ccgcgaccaggaugaugac

SEQ ID NO: 991757 - RNA, 19 nt, Artificial Sequence
  Description of Artificial Sequence: Synthetic oligonucleotide
cagucccuguugggcugca

SEQ ID NO: 991758 - RNA, 19 nt, Artificial Sequence
  Description of Artificial Sequence: Synthetic oligonucleotide
gcuaauggucacggacauu

SEQ ID NO: 991759 - RNA, 19 nt, Artificial Sequence
  Description of Artificial Sequence: Synthetic oligonucleotide
ggcgagcaguccagguagu

SEQ ID NO: 991760 - RNA, 19 nt, Artificial Sequence
  Description of Artificial Sequence: Synthetic oligonucleotide
cccaacuaccaggcucaaa

SEQ ID NO: 991761 - RNA, 19 nt, Artificial Sequence
  Description of Artificial Sequence: Synthetic oligonucleotide
cgucggccugcagagggga

SEQ ID NO: 991762 - RNA, 19 nt, Artificial Sequence
  Description of Artificial Sequence: Synthetic oligonucleotide
cagcgaggagacggaggau

SEQ ID NO: 991763 - RNA, 19 nt, Artificial Sequence
  Description of Artificial Sequence: Synthetic oligonucleotide
ggcuacccgcgaccaggau

SEQ ID NO: 991764 - RNA, 19 nt, Artificial Sequence
  Description of Artificial Sequence: Synthetic oligonucleotide
gggaugcgcagggcagaau

SEQ ID NO: 991765 - RNA, 19 nt, Artificial Sequence
  Description of Artificial Sequence: Synthetic oligonucleotide
gggcugcacccaggcugcu

SEQ ID NO: 991766 - RNA, 19 nt, Artificial Sequence
  Description of Artificial Sequence: Synthetic oligonucleotide
agaaacauaaucuaagaac

SEQ ID NO: 991767 - RNA, 19 nt, Artificial Sequence
  Description of Artificial Sequence: Synthetic oligonucleotide
uuugguagaagcuucaggg

SEQ ID NO: 991768 - RNA, 19 nt, Artificial Sequence
  Description of Artificial Sequence: Synthetic oligonucleotide
aaaggggacucauaggucc

SEQ ID NO: 991769 - RNA, 19 nt, Artificial Sequence
  Description of Artificial Sequence: Synthetic oligonucleotide
aacauaaucuaagaaccac

SEQ ID NO: 991770 - RNA, 19 nt, Artificial Sequence
  Description of Artificial Sequence: Synthetic oligonucleotide
uguagcugaagcaaggggc

SEQ ID NO: 991771 - RNA, 19 nt, Artificial Sequence
  Description of Artificial Sequence: Synthetic oligonucleotide
uaaauuucaucauccgagg

SEQ ID NO: 991772 - RNA, 19 nt, Artificial Sequence
  Description of Artificial Sequence: Synthetic oligonucleotide
agaccuuuggaguuguagc

SEQ ID NO: 991773 - RNA, 19 nt, Artificial Sequence
  Description of Artificial Sequence: Synthetic oligonucleotide
ugucuuagugcccugaaca

SEQ ID NO: 991774 - RNA, 19 nt, Artificial Sequence
  Description of Artificial Sequence: Synthetic oligonucleotide
agaacaaacaaacccuauc

SEQ ID NO: 991775 - RNA, 19 nt, Artificial Sequence
  Description of Artificial Sequence: Synthetic oligonucleotide
uuuauugacucuuuaaauu

SEQ ID NO: 991776 - RNA, 19 nt, Artificial Sequence
  Description of Artificial Sequence: Synthetic oligonucleotide
agaaaggggacucauaggu

SEQ ID NO: 991777 - RNA, 19 nt, Artificial Sequence
  Description of Artificial Sequence: Synthetic oligonucleotide
ugauaacuagcauuuuagg

SEQ ID NO: 991778 - RNA, 19 nt, Artificial Sequence
  Description of Artificial Sequence: Synthetic oligonucleotide
aggcgugacaucuacuucc

SEQ ID NO: 991779 - RNA, 19 nt, Artificial Sequence
  Description of Artificial Sequence: Synthetic oligonucleotide
cugauaacuagcauuuuag

SEQ ID NO: 991780 - RNA, 19 nt, Artificial Sequence
  Description of Artificial Sequence: Synthetic oligonucleotide
uuuuaggccuguuugaggu

SEQ ID NO: 991781 - RNA, 19 nt, Artificial Sequence
  Description of Artificial Sequence: Synthetic oligonucleotide
gaaugugugcuccagcugc

SEQ ID NO: 991782 - RNA, 19 nt, Artificial Sequence
  Description of Artificial Sequence: Synthetic oligonucleotide
cuugguuaggguuccaggg

SEQ ID NO: 991783 - RNA, 19 nt, Artificial Sequence
  Description of Artificial Sequence: Synthetic oligonucleotide
ugguagagacaaaacgugg

SEQ ID NO: 991784 - RNA, 19 nt, Artificial Sequence
  Description of Artificial Sequence: Synthetic oligonucleotide
gagggauucgauucagugg

SEQ ID NO: 991785 - RNA, 19 nt, Artificial Sequence
  Description of Artificial Sequence: Synthetic oligonucleotide
cuggaaucgaccaugcaag

SEQ ID NO: 991786 - RNA, 19 nt, Artificial Sequence
  Description of Artificial Sequence: Synthetic oligonucleotide
ggaugguagagacaaaacg

SEQ ID NO: 991787 - RNA, 19 nt, Artificial Sequence
  Description of Artificial Sequence: Synthetic oligonucleotide
uagcaagagaaacauaauc

SEQ ID NO: 991788 - RNA, 19 nt, Artificial Sequence
  Description of Artificial Sequence: Synthetic oligonucleotide
ugagcucucaacuuuggga

SEQ ID NO: 991789 - RNA, 19 nt, Artificial Sequence
  Description of Artificial Sequence: Synthetic oligonucleotide
augcaagccacacuucggc

SEQ ID NO: 991790 - RNA, 19 nt, Artificial Sequence
  Description of Artificial Sequence: Synthetic oligonucleotide
uaggcuuuuauccuccugu

SEQ ID NO: 991791 - RNA, 19 nt, Artificial Sequence
  Description of Artificial Sequence: Synthetic oligonucleotide
ucagagagggauucgauuc

SEQ ID NO: 991792 - RNA, 19 nt, Artificial Sequence
  Description of Artificial Sequence: Synthetic oligonucleotide
uguucuaccaggaaugcuu

SEQ ID NO: 991793 - RNA, 19 nt, Artificial Sequence
  Description of Artificial Sequence: Synthetic oligonucleotide
uggcguucuuccuaaaggg

SEQ ID NO: 991794 - RNA, 19 nt, Artificial Sequence
  Description of Artificial Sequence: Synthetic oligonucleotide
caaaacgugggucacuccc

SEQ ID NO: 991795 - RNA, 19 nt, Artificial Sequence
  Description of Artificial Sequence: Synthetic oligonucleotide
aagaugagaguguguccac

SEQ ID NO: 991796 - RNA, 19 nt, Artificial Sequence
  Description of Artificial Sequence: Synthetic oligonucleotide
cuguacacaggaaaggaug

SEQ ID NO: 991797 - RNA, 19 nt, Artificial Sequence
  Description of Artificial Sequence: Synthetic oligonucleotide
augacuguuugguagcaag

SEQ ID NO: 991798 - RNA, 19 nt, Artificial Sequence
  Description of Artificial Sequence: Synthetic oligonucleotide
gaaucgaccaugcaagcca

SEQ ID NO: 991799 - RNA, 19 nt, Artificial Sequence
  Description of Artificial Sequence: Synthetic oligonucleotide
ucaacuuugggaguggcgu

SEQ ID NO: 991800 - RNA, 19 nt, Artificial Sequence
  Description of Artificial Sequence: Synthetic oligonucleotide
uugugcugucggaugaugg

SEQ ID NO: 991801 - RNA, 19 nt, Artificial Sequence
  Description of Artificial Sequence: Synthetic oligonucleotide
ugacccaccaccccaaaga

SEQ ID NO: 991802 - RNA, 19 nt, Artificial Sequence
  Description of Artificial Sequence: Synthetic oligonucleotide
gaucacacccuccauagga

SEQ ID NO: 991803 - RNA, 19 nt, Artificial Sequence
  Description of Artificial Sequence: Synthetic oligonucleotide
gaacaaacaaacccuaucu

SEQ ID NO: 991804 - RNA, 19 nt, Artificial Sequence
  Description of Artificial Sequence: Synthetic oligonucleotide
aguuaagaaggcugagcuc

SEQ ID NO: 991805 - RNA, 19 nt, Artificial Sequence
  Description of Artificial Sequence: Synthetic oligonucleotide
auccgaggagaguuaauac

SEQ ID NO: 991806 - RNA, 19 nt, Artificial Sequence
  Description of Artificial Sequence: Synthetic oligonucleotide
ucuuaccugaggaagcccu

SEQ ID NO: 991807 - RNA, 19 nt, Artificial Sequence
  Description of Artificial Sequence: Synthetic oligonucleotide
cuuugguagaagcuucagg

SEQ ID NO: 991808 - RNA, 19 nt, Artificial Sequence
  Description of Artificial Sequence: Synthetic oligonucleotide
guggcguucuuccuaaagg

SEQ ID NO: 991809 - RNA, 19 nt, Artificial Sequence
  Description of Artificial Sequence: Synthetic oligonucleotide
uguguguaauggaugggca

SEQ ID NO: 991810 - RNA, 19 nt, Artificial Sequence
  Description of Artificial Sequence: Synthetic oligonucleotide
gaggagaguuaauacauga

SEQ ID NO: 991811 - RNA, 19 nt, Artificial Sequence
  Description of Artificial Sequence: Synthetic oligonucleotide
agucgccacaucuccaccc

SEQ ID NO: 991812 - RNA, 19 nt, Artificial Sequence
  Description of Artificial Sequence: Synthetic oligonucleotide
gagugaaugugaaugugag

SEQ ID NO: 991813 - RNA, 19 nt, Artificial Sequence
  Description of Artificial Sequence: Synthetic oligonucleotide
ucacugcauaaauaagugc

SEQ ID NO: 991814 - RNA, 19 nt, Artificial Sequence
  Description of Artificial Sequence: Synthetic oligonucleotide
ucggcuggaauccugcccc

SEQ ID NO: 991815 - RNA, 19 nt, Artificial Sequence
  Description of Artificial Sequence: Synthetic oligonucleotide
aaacaaacccuaucugaaa

SEQ ID NO: 991816 - RNA, 19 nt, Artificial Sequence
  Description of Artificial Sequence: Synthetic oligonucleotide
aggaauaggcuuuuauccu

SEQ ID NO: 991817 - RNA, 19 nt, Artificial Sequence
  Description of Artificial Sequence: Synthetic oligonucleotide
gacagagaaggucgaagcc

SEQ ID NO: 991818 - RNA, 19 nt, Artificial Sequence
  Description of Artificial Sequence: Synthetic oligonucleotide
uggaaaguauucaucuaaa

SEQ ID NO: 991819 - RNA, 19 nt, Artificial Sequence
  Description of Artificial Sequence: Synthetic oligonucleotide
caguguucuaccaggaaug

SEQ ID NO: 991820 - RNA, 19 nt, Artificial Sequence
  Description of Artificial Sequence: Synthetic oligonucleotide
gaaugugaaugugagugug

SEQ ID NO: 991821 - RNA, 19 nt, Artificial Sequence
  Description of Artificial Sequence: Synthetic oligonucleotide
aauaagugcuuuggaaagu

SEQ ID NO: 991822 - RNA, 19 nt, Artificial Sequence
  Description of Artificial Sequence: Synthetic oligonucleotide
agucggaaguccucauagc

SEQ ID NO: 991823 - RNA, 19 nt, Artificial Sequence
  Description of Artificial Sequence: Synthetic oligonucleotide
gauucgauucaguggucag

SEQ ID NO: 991824 - RNA, 19 nt, Artificial Sequence
  Description of Artificial Sequence: Synthetic oligonucleotide
ugucccuuagcuuucccac

SEQ ID NO: 991825 - RNA, 19 nt, Artificial Sequence
  Description of Artificial Sequence: Synthetic oligonucleotide
uccgccagcuguucaaagg

SEQ ID NO: 991826 - RNA, 19 nt, Artificial Sequence
  Description of Artificial Sequence: Synthetic oligonucleotide
gaugguagagacaaaacgu

SEQ ID NO: 991827 - RNA, 19 nt, Artificial Sequence
  Description of Artificial Sequence: Synthetic oligonucleotide
caaagaugagagugugucc

SEQ ID NO: 991828 - RNA, 19 nt, Artificial Sequence
  Description of Artificial Sequence: Synthetic oligonucleotide
gguuggacagagaaggucg

SEQ ID NO: 991829 - RNA, 19 nt, Artificial Sequence
  Description of Artificial Sequence: Synthetic oligonucleotide
uuucaucauccgaggagag

SEQ ID NO: 991830 - RNA, 19 nt, Artificial Sequence
  Description of Artificial Sequence: Synthetic oligonucleotide
acgaaugugugcuccagcu

SEQ ID NO: 991831 - RNA, 19 nt, Artificial Sequence
  Description of Artificial Sequence: Synthetic oligonucleotide
cucucacgcaggaauaggc

SEQ ID NO: 991832 - RNA, 19 nt, Artificial Sequence
  Description of Artificial Sequence: Synthetic oligonucleotide
ugcauaagacauggggagg

SEQ ID NO: 991833 - RNA, 19 nt, Artificial Sequence
  Description of Artificial Sequence: Synthetic oligonucleotide
aacaugcagagugaaugug

SEQ ID NO: 991834 - RNA, 19 nt, Artificial Sequence
  Description of Artificial Sequence: Synthetic oligonucleotide
ugacuguuugguagcaaga

SEQ ID NO: 991835 - RNA, 19 nt, Artificial Sequence
  Description of Artificial Sequence: Synthetic oligonucleotide
aaucgaccaugcaagccac

SEQ ID NO: 991836 - RNA, 19 nt, Artificial Sequence
  Description of Artificial Sequence: Synthetic oligonucleotide
uucccacugucccagaaaa

SEQ ID NO: 991837 - RNA, 19 nt, Artificial Sequence
  Description of Artificial Sequence: Synthetic oligonucleotide
cuuucaaggucacccacac

SEQ ID NO: 991838 - RNA, 19 nt, Artificial Sequence
  Description of Artificial Sequence: Synthetic oligonucleotide
gaaagcuugguuaggguuc

SEQ ID NO: 991839 - RNA, 19 nt, Artificial Sequence
  Description of Artificial Sequence: Synthetic oligonucleotide
uugguuaggguuccagggu

SEQ ID NO: 991840 - RNA, 19 nt, Artificial Sequence
  Description of Artificial Sequence: Synthetic oligonucleotide
caugcaagccacacuucgg

SEQ ID NO: 991841 - RNA, 19 nt, Artificial Sequence
  Description of Artificial Sequence: Synthetic oligonucleotide
cuuuucucuuaccugagga

SEQ ID NO: 991842 - RNA, 19 nt, Artificial Sequence
  Description of Artificial Sequence: Synthetic oligonucleotide
acaaaacgugggucacucc

SEQ ID NO: 991843 - RNA, 19 nt, Artificial Sequence
  Description of Artificial Sequence: Synthetic oligonucleotide
gaauaggcuuuuauccucc

SEQ ID NO: 991844 - RNA, 19 nt, Artificial Sequence
  Description of Artificial Sequence: Synthetic oligonucleotide
ucaucauccgaggagaguu

SEQ ID NO: 991845 - RNA, 19 nt, Artificial Sequence
  Description of Artificial Sequence: Synthetic oligonucleotide
aguuguagcugaagcaagg

SEQ ID NO: 991846 - RNA, 19 nt, Artificial Sequence
  Description of Artificial Sequence: Synthetic oligonucleotide
cauaaauaagugcuuugga

SEQ ID NO: 991847 - RNA, 19 nt, Artificial Sequence
  Description of Artificial Sequence: Synthetic oligonucleotide
aggagaguuaauacaugac

SEQ ID NO: 991848 - RNA, 19 nt, Artificial Sequence
  Description of Artificial Sequence: Synthetic oligonucleotide
aguggcguucuuccuaaag

SEQ ID NO: 991849 - RNA, 19 nt, Artificial Sequence
  Description of Artificial Sequence: Synthetic oligonucleotide
ucucacgcaggaauaggcu

SEQ ID NO: 991850 - RNA, 19 nt, Artificial Sequence
  Description of Artificial Sequence: Synthetic oligonucleotide
uguuugguagcaagagaaa

SEQ ID NO: 991851 - RNA, 19 nt, Artificial Sequence
  Description of Artificial Sequence: Synthetic oligonucleotide
ucccuuagcuuucccacug

SEQ ID NO: 991852 - RNA, 19 nt, Artificial Sequence
  Description of Artificial Sequence: Synthetic oligonucleotide
acguacgaaugugugcucc

SEQ ID NO: 991853 - RNA, 19 nt, Artificial Sequence
  Description of Artificial Sequence: Synthetic oligonucleotide
ugacaucuacuuccgccag

SEQ ID NO: 991854 - RNA, 19 nt, Artificial Sequence
  Description of Artificial Sequence: Synthetic oligonucleotide
gaugcugucccuuagcuuu

SEQ ID NO: 991855 - RNA, 19 nt, Artificial Sequence
  Description of Artificial Sequence: Synthetic oligonucleotide
caguggucagagaaagggg

SEQ ID NO: 991856 - RNA, 19 nt, Artificial Sequence
  Description of Artificial Sequence: Synthetic oligonucleotide
ccacauauugcacauggcc

SEQ ID NO: 991857 - RNA, 19 nt, Artificial Sequence
  Description of Artificial Sequence: Synthetic oligonucleotide
ggaugggguguucagagag

SEQ ID NO: 991858 - RNA, 19 nt, Artificial Sequence
  Description of Artificial Sequence: Synthetic oligonucleotide
gcuuuuauccuccugucac

SEQ ID NO: 991859 - RNA, 19 nt, Artificial Sequence
  Description of Artificial Sequence: Synthetic oligonucleotide
uucggcuggaauccugccc

SEQ ID NO: 991860 - RNA, 19 nt, Artificial Sequence
  Description of Artificial Sequence: Synthetic oligonucleotide
uacgaaugugugcuccagc

SEQ ID NO: 991861 - RNA, 19 nt, Artificial Sequence
  Description of Artificial Sequence: Synthetic oligonucleotide
cucacuacugccgccaccc

SEQ ID NO: 991862 - RNA, 19 nt, Artificial Sequence
  Description of Artificial Sequence: Synthetic oligonucleotide
aggcuuuuauccuccuguc

SEQ ID NO: 991863 - RNA, 19 nt, Artificial Sequence
  Description of Artificial Sequence: Synthetic oligonucleotide
uguaauggaugggcauugg

SEQ ID NO: 991864 - RNA, 19 nt, Artificial Sequence
  Description of Artificial Sequence: Synthetic oligonucleotide
caggucacugcauaaauaa

SEQ ID NO: 991865 - RNA, 19 nt, Artificial Sequence
  Description of Artificial Sequence: Synthetic oligonucleotide
uggcgucagaaccugccag

SEQ ID NO: 991866 - RNA, 19 nt, Artificial Sequence
  Description of Artificial Sequence: Synthetic oligonucleotide
gucagaaccugccagcauc

SEQ ID NO: 991867 - RNA, 19 nt, Artificial Sequence
  Description of Artificial Sequence: Synthetic oligonucleotide
uccacauauugcacauggc

SEQ ID NO: 991868 - RNA, 19 nt, Artificial Sequence
  Description of Artificial Sequence: Synthetic oligonucleotide
caggaaagcuugguuaggg

SEQ ID NO: 991869 - RNA, 19 nt, Artificial Sequence
  Description of Artificial Sequence: Synthetic oligonucleotide
augguaugccccugcuugg

SEQ ID NO: 991870 - RNA, 19 nt, Artificial Sequence
  Description of Artificial Sequence: Synthetic oligonucleotide
uaugccccugcuuggacac

SEQ ID NO: 991871 - RNA, 19 nt, Artificial Sequence
  Description of Artificial Sequence: Synthetic oligonucleotide
uucagagagggauucgauu

SEQ ID NO: 991872 - RNA, 19 nt, Artificial Sequence
  Description of Artificial Sequence: Synthetic oligonucleotide
aggaugcugucccuuagcu

SEQ ID NO: 991873 - RNA, 19 nt, Artificial Sequence
  Description of Artificial Sequence: Synthetic oligonucleotide
gacaaaacgugggucacuc

SEQ ID NO: 991874 - RNA, 19 nt, Artificial Sequence
  Description of Artificial Sequence: Synthetic oligonucleotide
ggucgaagccaucaggcag

SEQ ID NO: 991875 - RNA, 19 nt, Artificial Sequence
  Description of Artificial Sequence: Synthetic oligonucleotide
agagugaaugugaauguga

SEQ ID NO: 991876 - RNA, 19 nt, Artificial Sequence
  Description of Artificial Sequence: Synthetic oligonucleotide
uagagacaaaacguggguc

SEQ ID NO: 991877 - RNA, 19 nt, Artificial Sequence
  Description of Artificial Sequence: Synthetic oligonucleotide
uggaaucgaccaugcaagc

SEQ ID NO: 991878 - RNA, 19 nt, Artificial Sequence
  Description of Artificial Sequence: Synthetic oligonucleotide
gucgucucggcccacaguc

SEQ ID NO: 991879 - RNA, 19 nt, Artificial Sequence
  Description of Artificial Sequence: Synthetic oligonucleotide
cuuucccaguuaagaaggc

SEQ ID NO: 991880 - RNA, 19 nt, Artificial Sequence
  Description of Artificial Sequence: Synthetic oligonucleotide
uggccucucacgcaggaau

SEQ ID NO: 991881 - RNA, 19 nt, Artificial Sequence
  Description of Artificial Sequence: Synthetic oligonucleotide
agcgaacauggccagugug

SEQ ID NO: 991882 - RNA, 19 nt, Artificial Sequence
  Description of Artificial Sequence: Synthetic oligonucleotide
aggcccuuuucucuuaccu

SEQ ID NO: 991883 - RNA, 19 nt, Artificial Sequence
  Description of Artificial Sequence: Synthetic oligonucleotide
guagaagcuucagggacag

SEQ ID NO: 991884 - RNA, 19 nt, Artificial Sequence
  Description of Artificial Sequence: Synthetic oligonucleotide
gucuggaugguagagacaa

SEQ ID NO: 991885 - RNA, 19 nt, Artificial Sequence
  Description of Artificial Sequence: Synthetic oligonucleotide
gaagagacaggcaggcuga

SEQ ID NO: 991886 - RNA, 19 nt, Artificial Sequence
  Description of Artificial Sequence: Synthetic oligonucleotide
ucacgcaggaauaggcuuu

SEQ ID NO: 991887 - RNA, 19 nt, Artificial Sequence
  Description of Artificial Sequence: Synthetic oligonucleotide
ggaauaggcuuuuauccuc

SEQ ID NO: 991888 - RNA, 19 nt, Artificial Sequence
  Description of Artificial Sequence: Synthetic oligonucleotide
agacccaccaauguuccca

SEQ ID NO: 991889 - RNA, 19 nt, Artificial Sequence
  Description of Artificial Sequence: Synthetic oligonucleotide
cacauauugcacauggccu

SEQ ID NO: 991890 - RNA, 19 nt, Artificial Sequence
  Description of Artificial Sequence: Synthetic oligonucleotide
uucuaccaggaaugcuucc

SEQ ID NO: 991891 - RNA, 19 nt, Artificial Sequence
  Description of Artificial Sequence: Synthetic oligonucleotide
uuucaaggucacccacaca

SEQ ID NO: 991892 - RNA, 19 nt, Artificial Sequence
  Description of Artificial Sequence: Synthetic oligonucleotide
ucggaugauggcgucagaa

SEQ ID NO: 991893 - RNA, 19 nt, Artificial Sequence
  Description of Artificial Sequence: Synthetic oligonucleotide
acugcugccaggaagcgaa

SEQ ID NO: 991894 - RNA, 19 nt, Artificial Sequence
  Description of Artificial Sequence: Synthetic oligonucleotide
uuuuauccuccugucacuu

SEQ ID NO: 991895 - RNA, 19 nt, Artificial Sequence
  Description of Artificial Sequence: Synthetic oligonucleotide
cacccuggucccaaauggg

SEQ ID NO: 991896 - RNA, 19 nt, Artificial Sequence
  Description of Artificial Sequence: Synthetic oligonucleotide
auaagugcuuuggaaagua

SEQ ID NO: 991897 - RNA, 19 nt, Artificial Sequence
  Description of Artificial Sequence: Synthetic oligonucleotide
ucgaccaugcaagccacac

SEQ ID NO: 991898 - RNA, 19 nt, Artificial Sequence
  Description of Artificial Sequence: Synthetic oligonucleotide
ucucacuacugccgccacc

SEQ ID NO: 991899 - RNA, 19 nt, Artificial Sequence
  Description of Artificial Sequence: Synthetic oligonucleotide
gucgaagccaucaggcagc

SEQ ID NO: 991900 - RNA, 19 nt, Artificial Sequence
  Description of Artificial Sequence: Synthetic oligonucleotide
auugcacauggccucccca

SEQ ID NO: 991901 - RNA, 19 nt, Artificial Sequence
  Description of Artificial Sequence: Synthetic oligonucleotide
agagagggauucgauucag

SEQ ID NO: 991902 - RNA, 19 nt, Artificial Sequence
  Description of Artificial Sequence: Synthetic oligonucleotide
ggcaucgucagcacaaccc

SEQ ID NO: 991903 - RNA, 19 nt, Artificial Sequence
  Description of Artificial Sequence: Synthetic oligonucleotide
uuugugcugucgucucggc

SEQ ID NO: 991904 - RNA, 19 nt, Artificial Sequence
  Description of Artificial Sequence: Synthetic oligonucleotide
augacccaccaccccaaag

SEQ ID NO: 991905 - RNA, 19 nt, Artificial Sequence
  Description of Artificial Sequence: Synthetic oligonucleotide
gagaggugcucgugggcag

SEQ ID NO: 991906 - RNA, 19 nt, Artificial Sequence
  Description of Artificial Sequence: Synthetic oligonucleotide
gcuggaaucgaccaugcaa

SEQ ID NO: 991907 - RNA, 19 nt, Artificial Sequence
  Description of Artificial Sequence: Synthetic oligonucleotide
aaacgugggucacucccuu

SEQ ID NO: 991908 - RNA, 19 nt, Artificial Sequence
  Description of Artificial Sequence: Synthetic oligonucleotide
acccuccacauauugcaca

SEQ ID NO: 991909 - RNA, 19 nt, Artificial Sequence
  Description of Artificial Sequence: Synthetic oligonucleotide
gagacaaaacgugggucac

SEQ ID NO: 991910 - RNA, 19 nt, Artificial Sequence
  Description of Artificial Sequence: Synthetic oligonucleotide
uuugggaguggcguucuuc

SEQ ID NO: 991911 - RNA, 19 nt, Artificial Sequence
  Description of Artificial Sequence: Synthetic oligonucleotide
ugagucggaaguccucaua

SEQ ID NO: 991912 - RNA, 19 nt, Artificial Sequence
  Description of Artificial Sequence: Synthetic oligonucleotide
gauucaguggucagagaaa

SEQ ID NO: 991913 - RNA, 19 nt, Artificial Sequence
  Description of Artificial Sequence: Synthetic oligonucleotide
ucgugccagugcauaagac

SEQ ID NO: 991914 - RNA, 19 nt, Artificial Sequence
  Description of Artificial Sequence: Synthetic oligonucleotide
ugggcagucgccacaucuc

SEQ ID NO: 991915 - RNA, 19 nt, Artificial Sequence
  Description of Artificial Sequence: Synthetic oligonucleotide
gcaucgucagcacaacccc

SEQ ID NO: 991916 - RNA, 19 nt, Artificial Sequence
  Description of Artificial Sequence: Synthetic oligonucleotide
aggugguuugugcugucgu

SEQ ID NO: 991917 - RNA, 19 nt, Artificial Sequence
  Description of Artificial Sequence: Synthetic oligonucleotide
ccaaaguggaagcuuuccc

SEQ ID NO: 991918 - RNA, 19 nt, Artificial Sequence
  Description of Artificial Sequence: Synthetic oligonucleotide
aucacacccuccauaggag

SEQ ID NO: 991919 - RNA, 19 nt, Artificial Sequence
  Description of Artificial Sequence: Synthetic oligonucleotide
guagagacaaaacgugggu

SEQ ID NO: 991920 - RNA, 19 nt, Artificial Sequence
  Description of Artificial Sequence: Synthetic oligonucleotide
aggucgaagccaucaggca

SEQ ID NO: 991921 - RNA, 19 nt, Artificial Sequence
  Description of Artificial Sequence: Synthetic oligonucleotide
cuuggggaggugggcaucg

SEQ ID NO: 991922 - RNA, 19 nt, Artificial Sequence
  Description of Artificial Sequence: Synthetic oligonucleotide
agugucuuagugcccugaa

SEQ ID NO: 991923 - RNA, 19 nt, Artificial Sequence
  Description of Artificial Sequence: Synthetic oligonucleotide
gcauaagacauggggaggc

SEQ ID NO: 991924 - RNA, 19 nt, Artificial Sequence
  Description of Artificial Sequence: Synthetic oligonucleotide
uuagugcccugaacaugca

SEQ ID NO: 991925 - RNA, 19 nt, Artificial Sequence
  Description of Artificial Sequence: Synthetic oligonucleotide
ugguuugugcugucgucuc

SEQ ID NO: 991926 - RNA, 19 nt, Artificial Sequence
  Description of Artificial Sequence: Synthetic oligonucleotide
aggucacugcauaaauaag

SEQ ID NO: 991927 - RNA, 19 nt, Artificial Sequence
  Description of Artificial Sequence: Synthetic oligonucleotide
gaggcgugacaucuacuuc

SEQ ID NO: 991928 - RNA, 19 nt, Artificial Sequence
  Description of Artificial Sequence: Synthetic oligonucleotide
gggcauugguccuuccagg

SEQ ID NO: 991929 - RNA, 19 nt, Artificial Sequence
  Description of Artificial Sequence: Synthetic oligonucleotide
uacuuccgccagcuguuca

SEQ ID NO: 991930 - RNA, 19 nt, Artificial Sequence
  Description of Artificial Sequence: Synthetic oligonucleotide
ucgucagcacaaccccagc

SEQ ID NO: 991931 - RNA, 19 nt, Artificial Sequence
  Description of Artificial Sequence: Synthetic oligonucleotide
ugauggcgucagaaccugc

SEQ ID NO: 991932 - RNA, 19 nt, Artificial Sequence
  Description of Artificial Sequence: Synthetic oligonucleotide
auggcgucagaaccugcca

SEQ ID NO: 991933 - RNA, 19 nt, Artificial Sequence
  Description of Artificial Sequence: Synthetic oligonucleotide
augauggcgucagaaccug

SEQ ID NO: 991934 - RNA, 19 nt, Artificial Sequence
  Description of Artificial Sequence: Synthetic oligonucleotide
gaugagaguguguccacau

SEQ ID NO: 991935 - RNA, 19 nt, Artificial Sequence
  Description of Artificial Sequence: Synthetic oligonucleotide
gcaagccacacuucggcug

SEQ ID NO: 991936 - RNA, 19 nt, Artificial Sequence
  Description of Artificial Sequence: Synthetic oligonucleotide
ggacucauagguccacccc

SEQ ID NO: 991937 - RNA, 19 nt, Artificial Sequence
  Description of Artificial Sequence: Synthetic oligonucleotide
cuucggcuggaauccugcc

SEQ ID NO: 991938 - RNA, 19 nt, Artificial Sequence
  Description of Artificial Sequence: Synthetic oligonucleotide
guacgaaugugugcuccag

SEQ ID NO: 991939 - RNA, 19 nt, Artificial Sequence
  Description of Artificial Sequence: Synthetic oligonucleotide
ucgugggcagcugacagua

SEQ ID NO: 991940 - RNA, 19 nt, Artificial Sequence
  Description of Artificial Sequence: Synthetic oligonucleotide
ggcguucuuccuaaagggg

SEQ ID NO: 991941 - RNA, 19 nt, Artificial Sequence
  Description of Artificial Sequence: Synthetic oligonucleotide
gugucuuagugcccugaac

SEQ ID NO: 991942 - RNA, 19 nt, Artificial Sequence
  Description of Artificial Sequence: Synthetic oligonucleotide
ugcugagucggaaguccuc

SEQ ID NO: 991943 - RNA, 19 nt, Artificial Sequence
  Description of Artificial Sequence: Synthetic oligonucleotide
guaugccccugcuuggaca

SEQ ID NO: 991944 - RNA, 19 nt, Artificial Sequence
  Description of Artificial Sequence: Synthetic oligonucleotide
ggaaucgaccaugcaagcc

SEQ ID NO: 991945 - RNA, 19 nt, Artificial Sequence
  Description of Artificial Sequence: Synthetic oligonucleotide
agaugagaguguguccaca

SEQ ID NO: 991946 - RNA, 19 nt, Artificial Sequence
  Description of Artificial Sequence: Synthetic oligonucleotide
cugugauccucaggcaggc

SEQ ID NO: 991947 - RNA, 19 nt, Artificial Sequence
  Description of Artificial Sequence: Synthetic oligonucleotide
ugucgucucggcccacagu

SEQ ID NO: 991948 - RNA, 19 nt, Artificial Sequence
  Description of Artificial Sequence: Synthetic oligonucleotide
acuagcauuuuaggccugu

SEQ ID NO: 991949 - RNA, 19 nt, Artificial Sequence
  Description of Artificial Sequence: Synthetic oligonucleotide
aaggggacucauaggucca

SEQ ID NO: 991950 - RNA, 19 nt, Artificial Sequence
  Description of Artificial Sequence: Synthetic oligonucleotide
ucauccgaggagaguuaau

SEQ ID NO: 991951 - RNA, 19 nt, Artificial Sequence
  Description of Artificial Sequence: Synthetic oligonucleotide
uacuuggggaggugggcau

SEQ ID NO: 991952 - RNA, 19 nt, Artificial Sequence
  Description of Artificial Sequence: Synthetic oligonucleotide
ggucacugcauaaauaagu

SEQ ID NO: 991953 - RNA, 19 nt, Artificial Sequence
  Description of Artificial Sequence: Synthetic oligonucleotide
ugggguguucagagaggga

SEQ ID NO: 991954 - RNA, 19 nt, Artificial Sequence
  Description of Artificial Sequence: Synthetic oligonucleotide
cacacccuccauaggagga

SEQ ID NO: 991955 - RNA, 19 nt, Artificial Sequence
  Description of Artificial Sequence: Synthetic oligonucleotide
ggcgucagaaccugccagc

SEQ ID NO: 991956 - RNA, 19 nt, Artificial Sequence
  Description of Artificial Sequence: Synthetic oligonucleotide
guguucagagagggauucg

SEQ ID NO: 991957 - RNA, 19 nt, Artificial Sequence
  Description of Artificial Sequence: Synthetic oligonucleotide
cuugugcugucggaugaug

SEQ ID NO: 991958 - RNA, 19 nt, Artificial Sequence
  Description of Artificial Sequence: Synthetic oligonucleotide
ucccggugauccagggaug

SEQ ID NO: 991959 - RNA, 19 nt, Artificial Sequence
  Description of Artificial Sequence: Synthetic oligonucleotide
cagagagggauucgauuca

SEQ ID NO: 991960 - RNA, 19 nt, Artificial Sequence
  Description of Artificial Sequence: Synthetic oligonucleotide
acaugacuguuugguagca

SEQ ID NO: 991961 - RNA, 19 nt, Artificial Sequence
  Description of Artificial Sequence: Synthetic oligonucleotide
guaauggaugggcauuggu

SEQ ID NO: 991962 - RNA, 19 nt, Artificial Sequence
  Description of Artificial Sequence: Synthetic oligonucleotide
gguguucagagagggauuc

SEQ ID NO: 991963 - RNA, 19 nt, Artificial Sequence
  Description of Artificial Sequence: Synthetic oligonucleotide
gcucgugggcagcugacag

SEQ ID NO: 991964 - RNA, 19 nt, Artificial Sequence
  Description of Artificial Sequence: Synthetic oligonucleotide
cucuuaccugaggaagccc

SEQ ID NO: 991965 - RNA, 19 nt, Artificial Sequence
  Description of Artificial Sequence: Synthetic oligonucleotide
ccagacccaccaauguucc

SEQ ID NO: 991966 - RNA, 19 nt, Artificial Sequence
  Description of Artificial Sequence: Synthetic oligonucleotide
ccacagucucacuacugcc

SEQ ID NO: 991967 - RNA, 19 nt, Artificial Sequence
  Description of Artificial Sequence: Synthetic oligonucleotide
ugguaugccccugcuugga

SEQ ID NO: 991968 - RNA, 19 nt, Artificial Sequence
  Description of Artificial Sequence: Synthetic oligonucleotide
cauccgaggagaguuaaua

SEQ ID NO: 991969 - RNA, 19 nt, Artificial Sequence
  Description of Artificial Sequence: Synthetic oligonucleotide
agacaaaacgugggucacu

SEQ ID NO: 991970 - RNA, 19 nt, Artificial Sequence
  Description of Artificial Sequence: Synthetic oligonucleotide
cuuuuauccuccugucacu

SEQ ID NO: 991971 - RNA, 19 nt, Artificial Sequence
  Description of Artificial Sequence: Synthetic oligonucleotide
ugcugccaggaagcgaaca

SEQ ID NO: 991972 - RNA, 19 nt, Artificial Sequence
  Description of Artificial Sequence: Synthetic oligonucleotide
ucgucucggcccacagucu

SEQ ID NO: 991973 - RNA, 19 nt, Artificial Sequence
  Description of Artificial Sequence: Synthetic oligonucleotide
cacuucggcuggaauccug

SEQ ID NO: 991974 - RNA, 19 nt, Artificial Sequence
  Description of Artificial Sequence: Synthetic oligonucleotide
cccacguacgaaugugugc

SEQ ID NO: 991975 - RNA, 19 nt, Artificial Sequence
  Description of Artificial Sequence: Synthetic oligonucleotide
acaugguaugccccugcuu

SEQ ID NO: 991976 - RNA, 19 nt, Artificial Sequence
  Description of Artificial Sequence: Synthetic oligonucleotide
ccaaggugaccaucgugcc

SEQ ID NO: 991977 - RNA, 19 nt, Artificial Sequence
  Description of Artificial Sequence: Synthetic oligonucleotide
ggcgugacaucuacuuccg

SEQ ID NO: 991978 - RNA, 19 nt, Artificial Sequence
  Description of Artificial Sequence: Synthetic oligonucleotide
uuccccaaaguggaagcuu

SEQ ID NO: 991979 - RNA, 19 nt, Artificial Sequence
  Description of Artificial Sequence: Synthetic oligonucleotide
ggcauugguccuuccagga

SEQ ID NO: 991980 - RNA, 19 nt, Artificial Sequence
  Description of Artificial Sequence: Synthetic oligonucleotide
ucgccacaucuccacccug

SEQ ID NO: 991981 - RNA, 19 nt, Artificial Sequence
  Description of Artificial Sequence: Synthetic oligonucleotide
aacgugggucacucccuuu

SEQ ID NO: 991982 - RNA, 19 nt, Artificial Sequence
  Description of Artificial Sequence: Synthetic oligonucleotide
gucccggugauccagggau

SEQ ID NO: 991983 - RNA, 19 nt, Artificial Sequence
  Description of Artificial Sequence: Synthetic oligonucleotide
cacccuccauaggaggagg

SEQ ID NO: 991984 - RNA, 19 nt, Artificial Sequence
  Description of Artificial Sequence: Synthetic oligonucleotide
uggguaggagaggccucgg

SEQ ID NO: 991985 - RNA, 19 nt, Artificial Sequence
  Description of Artificial Sequence: Synthetic oligonucleotide
caucgucagcacaacccca

SEQ ID NO: 991986 - RNA, 19 nt, Artificial Sequence
  Description of Artificial Sequence: Synthetic oligonucleotide
ggucccaaaugggagcacc

SEQ ID NO: 991987 - RNA, 19 nt, Artificial Sequence
  Description of Artificial Sequence: Synthetic oligonucleotide
ggugguuugugcugucguc

SEQ ID NO: 991988 - RNA, 19 nt, Artificial Sequence
  Description of Artificial Sequence: Synthetic oligonucleotide
gcucucaacuuugggagug

SEQ ID NO: 991989 - RNA, 19 nt, Artificial Sequence
  Description of Artificial Sequence: Synthetic oligonucleotide
gggcagucgccacaucucc

SEQ ID NO: 991990 - RNA, 19 nt, Artificial Sequence
  Description of Artificial Sequence: Synthetic oligonucleotide
ggcuuuuauccuccuguca

SEQ ID NO: 991991 - RNA, 19 nt, Artificial Sequence
  Description of Artificial Sequence: Synthetic oligonucleotide
cagacccaccaauguuccc

SEQ ID NO: 991992 - RNA, 19 nt, Artificial Sequence
  Description of Artificial Sequence: Synthetic oligonucleotide
guuggacagagaaggucga

SEQ ID NO: 991993 - RNA, 19 nt, Artificial Sequence
  Description of Artificial Sequence: Synthetic oligonucleotide
ggauucgauucagugguca

SEQ ID NO: 991994 - RNA, 19 nt, Artificial Sequence
  Description of Artificial Sequence: Synthetic oligonucleotide
ugugcacaggaggcgugac

SEQ ID NO: 991995 - RNA, 19 nt, Artificial Sequence
  Description of Artificial Sequence: Synthetic oligonucleotide
ccuaaaggggcugcccugg

SEQ ID NO: 991996 - RNA, 19 nt, Artificial Sequence
  Description of Artificial Sequence: Synthetic oligonucleotide
gaggaagcccugucccaga

SEQ ID NO: 991997 - RNA, 19 nt, Artificial Sequence
  Description of Artificial Sequence: Synthetic oligonucleotide
gugggcaucgucagcacaa

SEQ ID NO: 991998 - RNA, 19 nt, Artificial Sequence
  Description of Artificial Sequence: Synthetic oligonucleotide
cuaaggggcagggcggcuc

SEQ ID NO: 991999 - RNA, 19 nt, Artificial Sequence
  Description of Artificial Sequence: Synthetic oligonucleotide
ggucagagaaaggggacuc

SEQ ID NO: 992000 - RNA, 19 nt, Artificial Sequence
  Description of Artificial Sequence: Synthetic oligonucleotide
cugucgucucggcccacag

SEQ ID NO: 992001 - RNA, 19 nt, Artificial Sequence
  Description of Artificial Sequence: Synthetic oligonucleotide
gucuuagugcccugaacau

SEQ ID NO: 992002 - RNA, 19 nt, Artificial Sequence
  Description of Artificial Sequence: Synthetic oligonucleotide
caucaccaccacugauaac

SEQ ID NO: 992003 - RNA, 19 nt, Artificial Sequence
  Description of Artificial Sequence: Synthetic oligonucleotide
cccaaaguggaagcuuucc

SEQ ID NO: 992004 - RNA, 19 nt, Artificial Sequence
  Description of Artificial Sequence: Synthetic oligonucleotide
cacguacgaaugugugcuc

SEQ ID NO: 992005 - RNA, 19 nt, Artificial Sequence
  Description of Artificial Sequence: Synthetic oligonucleotide
cagagaaggucgaagccau

SEQ ID NO: 992006 - RNA, 19 nt, Artificial Sequence
  Description of Artificial Sequence: Synthetic oligonucleotide
ugggcaucgucagcacaac

SEQ ID NO: 992007 - RNA, 19 nt, Artificial Sequence
  Description of Artificial Sequence: Synthetic oligonucleotide
gucagagaaaggggacuca

SEQ ID NO: 992008 - RNA, 19 nt, Artificial Sequence
  Description of Artificial Sequence: Synthetic oligonucleotide
ggaaugcuuccacaaagau

SEQ ID NO: 992009 - RNA, 19 nt, Artificial Sequence
  Description of Artificial Sequence: Synthetic oligonucleotide
gugguuugugcugucgucu

SEQ ID NO: 992010 - RNA, 19 nt, Artificial Sequence
  Description of Artificial Sequence: Synthetic oligonucleotide
ggagagacuuccccaaagu

SEQ ID NO: 992011 - RNA, 19 nt, Artificial Sequence
  Description of Artificial Sequence: Synthetic oligonucleotide
ccaccacugauaacuagca

SEQ ID NO: 992012 - RNA, 19 nt, Artificial Sequence
  Description of Artificial Sequence: Synthetic oligonucleotide
gguaugccccugcuuggac

SEQ ID NO: 992013 - RNA, 19 nt, Artificial Sequence
  Description of Artificial Sequence: Synthetic oligonucleotide
caucuacuuccgccagcug

SEQ ID NO: 992014 - RNA, 19 nt, Artificial Sequence
  Description of Artificial Sequence: Synthetic oligonucleotide
gcugagucggaaguccuca

SEQ ID NO: 992015 - RNA, 19 nt, Artificial Sequence
  Description of Artificial Sequence: Synthetic oligonucleotide
gggcaucgucagcacaacc

SEQ ID NO: 992016 - RNA, 19 nt, Artificial Sequence
  Description of Artificial Sequence: Synthetic oligonucleotide
cucacgcaggaauaggcuu

SEQ ID NO: 992017 - RNA, 19 nt, Artificial Sequence
  Description of Artificial Sequence: Synthetic oligonucleotide
ccccacguacgaaugugug

SEQ ID NO: 992018 - RNA, 19 nt, Artificial Sequence
  Description of Artificial Sequence: Synthetic oligonucleotide
ccacaugguaugccccugc

SEQ ID NO: 992019 - RNA, 19 nt, Artificial Sequence
  Description of Artificial Sequence: Synthetic oligonucleotide
ccucucacgcaggaauagg

SEQ ID NO: 992020 - RNA, 19 nt, Artificial Sequence
  Description of Artificial Sequence: Synthetic oligonucleotide
gccucucacgcaggaauag

SEQ ID NO: 992021 - RNA, 19 nt, Artificial Sequence
  Description of Artificial Sequence: Synthetic oligonucleotide
cugaacaugcagagugaau

SEQ ID NO: 992022 - RNA, 19 nt, Artificial Sequence
  Description of Artificial Sequence: Synthetic oligonucleotide
ggugggcaucgucagcaca

SEQ ID NO: 992023 - RNA, 19 nt, Artificial Sequence
  Description of Artificial Sequence: Synthetic oligonucleotide
guacacaggaaaggaugcu

SEQ ID NO: 992024 - RNA, 19 nt, Artificial Sequence
  Description of Artificial Sequence: Synthetic oligonucleotide
ccgaggagaguuaauacau

SEQ ID NO: 992025 - RNA, 19 nt, Artificial Sequence
  Description of Artificial Sequence: Synthetic oligonucleotide
gccaucaccaccacugaua

SEQ ID NO: 992026 - RNA, 19 nt, Artificial Sequence
  Description of Artificial Sequence: Synthetic oligonucleotide
cucccggcagccuggaggu

SEQ ID NO: 992027 - RNA, 19 nt, Artificial Sequence
  Description of Artificial Sequence: Synthetic oligonucleotide
acacuucggcuggaauccu

SEQ ID NO: 992028 - RNA, 19 nt, Artificial Sequence
  Description of Artificial Sequence: Synthetic oligonucleotide
caugacuguuugguagcaa

SEQ ID NO: 992029 - RNA, 19 nt, Artificial Sequence
  Description of Artificial Sequence: Synthetic oligonucleotide
cugcugccaggaagcgaac

SEQ ID NO: 992030 - RNA, 19 nt, Artificial Sequence
  Description of Artificial Sequence: Synthetic oligonucleotide
gcagcgcugugauccucag

SEQ ID NO: 992031 - RNA, 19 nt, Artificial Sequence
  Description of Artificial Sequence: Synthetic oligonucleotide
ggggacucauagguccacc

SEQ ID NO: 992032 - RNA, 19 nt, Artificial Sequence
  Description of Artificial Sequence: Synthetic oligonucleotide
guucagagagggauucgau

SEQ ID NO: 992033 - RNA, 19 nt, Artificial Sequence
  Description of Artificial Sequence: Synthetic oligonucleotide
ggcuaaggggcagggcggc

SEQ ID NO: 992034 - RNA, 19 nt, Artificial Sequence
  Description of Artificial Sequence: Synthetic oligonucleotide
ccccaaggugaccaucgug

SEQ ID NO: 992035 - RNA, 19 nt, Artificial Sequence
  Description of Artificial Sequence: Synthetic oligonucleotide
ccacguacgaaugugugcu

SEQ ID NO: 992036 - RNA, 19 nt, Artificial Sequence
  Description of Artificial Sequence: Synthetic oligonucleotide
ccugugcacaggaggcgug

SEQ ID NO: 992037 - RNA, 19 nt, Artificial Sequence
  Description of Artificial Sequence: Synthetic oligonucleotide
gcgaacauggccagugugu

SEQ ID NO: 992038 - RNA, 19 nt, Artificial Sequence
  Description of Artificial Sequence: Synthetic oligonucleotide
aucgaccaugcaagccaca

SEQ ID NO: 992039 - RNA, 19 nt, Artificial Sequence
  Description of Artificial Sequence: Synthetic oligonucleotide
gucggaugauggcgucaga

SEQ ID NO: 992040 - RNA, 19 nt, Artificial Sequence
  Description of Artificial Sequence: Synthetic oligonucleotide
aggcuagggccagcuguga

SEQ ID NO: 992041 - RNA, 19 nt, Artificial Sequence
  Description of Artificial Sequence: Synthetic oligonucleotide
cucgugggcagcugacagu

SEQ ID NO: 992042 - RNA, 19 nt, Artificial Sequence
  Description of Artificial Sequence: Synthetic oligonucleotide
gccuaggccagcggggcug

SEQ ID NO: 992043 - RNA, 19 nt, Artificial Sequence
  Description of Artificial Sequence: Synthetic oligonucleotide
gcgugacaucuacuuccgc

SEQ ID NO: 992044 - RNA, 19 nt, Artificial Sequence
  Description of Artificial Sequence: Synthetic oligonucleotide
cuuccgccagcuguucaaa

SEQ ID NO: 992045 - RNA, 19 nt, Artificial Sequence
  Description of Artificial Sequence: Synthetic oligonucleotide
gcgucagaaccugccagca

SEQ ID NO: 992046 - RNA, 19 nt, Artificial Sequence
  Description of Artificial Sequence: Synthetic oligonucleotide
caacuuugggaguggcguu

SEQ ID NO: 992047 - RNA, 19 nt, Artificial Sequence
  Description of Artificial Sequence: Synthetic oligonucleotide
ccccaaaguggaagcuuuc

SEQ ID NO: 992048 - RNA, 19 nt, Artificial Sequence
  Description of Artificial Sequence: Synthetic oligonucleotide
ggaugggcauugguccuuc

SEQ ID NO: 992049 - RNA, 19 nt, Artificial Sequence
  Description of Artificial Sequence: Synthetic oligonucleotide
aggugcucgugggcagcug

SEQ ID NO: 992050 - RNA, 19 nt, Artificial Sequence
  Description of Artificial Sequence: Synthetic oligonucleotide
cguacgaaugugugcucca

SEQ ID NO: 992051 - RNA, 19 nt, Artificial Sequence
  Description of Artificial Sequence: Synthetic oligonucleotide
caccacugauaacuagcau

SEQ ID NO: 992052 - RNA, 19 nt, Artificial Sequence
  Description of Artificial Sequence: Synthetic oligonucleotide
gcacaggaggcgugacauc

SEQ ID NO: 992053 - RNA, 19 nt, Artificial Sequence
  Description of Artificial Sequence: Synthetic oligonucleotide
ccuccccagcccugugggg

SEQ ID NO: 992054 - RNA, 19 nt, Artificial Sequence
  Description of Artificial Sequence: Synthetic oligonucleotide
ggaugcugucccuuagcuu

SEQ ID NO: 992055 - RNA, 19 nt, Artificial Sequence
  Description of Artificial Sequence: Synthetic oligonucleotide
cgucucggcccacagucuc

SEQ ID NO: 992056 - RNA, 19 nt, Artificial Sequence
  Description of Artificial Sequence: Synthetic oligonucleotide
gggauucgauucagugguc

SEQ ID NO: 992057 - RNA, 19 nt, Artificial Sequence
  Description of Artificial Sequence: Synthetic oligonucleotide
gcgcugugauccucaggca

SEQ ID NO: 992058 - RNA, 19 nt, Artificial Sequence
  Description of Artificial Sequence: Synthetic oligonucleotide
cggggcugagaggugcucg

SEQ ID NO: 992059 - RNA, 19 nt, Artificial Sequence
  Description of Artificial Sequence: Synthetic oligonucleotide
ugcugucgucucggcccac

SEQ ID NO: 992060 - RNA, 19 nt, Artificial Sequence
  Description of Artificial Sequence: Synthetic oligonucleotide
gccccaggucacugcauaa

SEQ ID NO: 992061 - RNA, 19 nt, Artificial Sequence
  Description of Artificial Sequence: Synthetic oligonucleotide
cggugauccagggauggca

SEQ ID NO: 992062 - RNA, 19 nt, Artificial Sequence
  Description of Artificial Sequence: Synthetic oligonucleotide
ggccucucacgcaggaaua

SEQ ID NO: 992063 - RNA, 19 nt, Artificial Sequence
  Description of Artificial Sequence: Synthetic oligonucleotide
cuagcauuuuaggccuguu

SEQ ID NO: 992064 - RNA, 19 nt, Artificial Sequence
  Description of Artificial Sequence: Synthetic oligonucleotide
gcugucgucucggcccaca

SEQ ID NO: 992065 - RNA, 19 nt, Artificial Sequence
  Description of Artificial Sequence: Synthetic oligonucleotide
cccaggucacugcauaaau

SEQ ID NO: 992066 - RNA, 19 nt, Artificial Sequence
  Description of Artificial Sequence: Synthetic oligonucleotide
gaccaucgugccagugcau

SEQ ID NO: 992067 - RNA, 19 nt, Artificial Sequence
  Description of Artificial Sequence: Synthetic oligonucleotide
cacgcaggaauaggcuuuu

SEQ ID NO: 992068 - RNA, 19 nt, Artificial Sequence
  Description of Artificial Sequence: Synthetic oligonucleotide
ggaagcgaacauggccagu

SEQ ID NO: 992069 - RNA, 19 nt, Artificial Sequence
  Description of Artificial Sequence: Synthetic oligonucleotide
ggccuaggccagcggggcu

SEQ ID NO: 992070 - RNA, 19 nt, Artificial Sequence
  Description of Artificial Sequence: Synthetic oligonucleotide
ccagcagcgcugugauccu

SEQ ID NO: 992071 - RNA, 19 nt, Artificial Sequence
  Description of Artificial Sequence: Synthetic oligonucleotide
cgaccaugcaagccacacu

SEQ ID NO: 992072 - RNA, 19 nt, Artificial Sequence
  Description of Artificial Sequence: Synthetic oligonucleotide
gcuaaggggcagggcggcu

SEQ ID NO: 992073 - RNA, 19 nt, Artificial Sequence
  Description of Artificial Sequence: Synthetic oligonucleotide
cgucagaaccugccagcau

SEQ ID NO: 992074 - RNA, 19 nt, Artificial Sequence
  Description of Artificial Sequence: Synthetic oligonucleotide
aauaguaucgaagugaacg

SEQ ID NO: 992075 - RNA, 19 nt, Artificial Sequence
  Description of Artificial Sequence: Synthetic oligonucleotide
uaagauggaauaaugacga

SEQ ID NO: 992076 - RNA, 19 nt, Artificial Sequence
  Description of Artificial Sequence: Synthetic oligonucleotide
uguaugggcaucaacauga

SEQ ID NO: 992077 - RNA, 19 nt, Artificial Sequence
  Description of Artificial Sequence: Synthetic oligonucleotide
uuaguuuaaacuccauccc

SEQ ID NO: 992078 - RNA, 19 nt, Artificial Sequence
  Description of Artificial Sequence: Synthetic oligonucleotide
uguugauauguacaucggg

SEQ ID NO: 992079 - RNA, 19 nt, Artificial Sequence
  Description of Artificial Sequence: Synthetic oligonucleotide
auggaaaucagggacaaac

SEQ ID NO: 992080 - RNA, 19 nt, Artificial Sequence
  Description of Artificial Sequence: Synthetic oligonucleotide
ugaaaugcgcauucguugg

SEQ ID NO: 992081 - RNA, 19 nt, Artificial Sequence
  Description of Artificial Sequence: Synthetic oligonucleotide
aaccuaucaccccaucacc

SEQ ID NO: 992082 - RNA, 19 nt, Artificial Sequence
  Description of Artificial Sequence: Synthetic oligonucleotide
ucgaagagauuucucauag

SEQ ID NO: 992083 - RNA, 19 nt, Artificial Sequence
  Description of Artificial Sequence: Synthetic oligonucleotide
auaaugacgaugugacccc

SEQ ID NO: 992084 - RNA, 19 nt, Artificial Sequence
  Description of Artificial Sequence: Synthetic oligonucleotide
auaguaucgaagugaacgg

SEQ ID NO: 992085 - RNA, 19 nt, Artificial Sequence
  Description of Artificial Sequence: Synthetic oligonucleotide
uucagguucaauuaguuua

SEQ ID NO: 992086 - RNA, 19 nt, Artificial Sequence
  Description of Artificial Sequence: Synthetic oligonucleotide
accuaauaagaauauccac

SEQ ID NO: 992087 - RNA, 19 nt, Artificial Sequence
  Description of Artificial Sequence: Synthetic oligonucleotide
aaacuuguacacguagcgc

SEQ ID NO: 992088 - RNA, 19 nt, Artificial Sequence
  Description of Artificial Sequence: Synthetic oligonucleotide
gguacauugaugcacaccc

SEQ ID NO: 992089 - RNA, 19 nt, Artificial Sequence
  Description of Artificial Sequence: Synthetic oligonucleotide
guaccuaauaagaauaucc

SEQ ID NO: 992090 - RNA, 19 nt, Artificial Sequence
  Description of Artificial Sequence: Synthetic oligonucleotide
ucaauuaguuuaaacucca

SEQ ID NO: 992091 - RNA, 19 nt, Artificial Sequence
  Description of Artificial Sequence: Synthetic oligonucleotide
uaccuaauaagaauaucca

SEQ ID NO: 992092 - RNA, 19 nt, Artificial Sequence
  Description of Artificial Sequence: Synthetic oligonucleotide
ugggguuccuucuugaucc

SEQ ID NO: 992093 - RNA, 19 nt, Artificial Sequence
  Description of Artificial Sequence: Synthetic oligonucleotide
ugguaccugagcuucagcg

SEQ ID NO: 992094 - RNA, 19 nt, Artificial Sequence
  Description of Artificial Sequence: Synthetic oligonucleotide
acgaugugaccccagagac

SEQ ID NO: 992095 - RNA, 19 nt, Artificial Sequence
  Description of Artificial Sequence: Synthetic oligonucleotide
ccuaauaagaauauccacc

SEQ ID NO: 992096 - RNA, 19 nt, Artificial Sequence
  Description of Artificial Sequence: Synthetic oligonucleotide
ugauauguacaucgggcag

SEQ ID NO: 992097 - RNA, 19 nt, Artificial Sequence
  Description of Artificial Sequence: Synthetic oligonucleotide
gaaaucagggacaaacugc

SEQ ID NO: 992098 - RNA, 19 nt, Artificial Sequence
  Description of Artificial Sequence: Synthetic oligonucleotide
aguaaaggcacugcucucc

SEQ ID NO: 992099 - RNA, 19 nt, Artificial Sequence
  Description of Artificial Sequence: Synthetic oligonucleotide
augaaaugcgcauucguug

SEQ ID NO: 992100 - RNA, 19 nt, Artificial Sequence
  Description of Artificial Sequence: Synthetic oligonucleotide
agggcucucauccaagugg

SEQ ID NO: 992101 - RNA, 19 nt, Artificial Sequence
  Description of Artificial Sequence: Synthetic oligonucleotide
uaaccuaucaccccaucac

SEQ ID NO: 992102 - RNA, 19 nt, Artificial Sequence
  Description of Artificial Sequence: Synthetic oligonucleotide
gaauauccaccuuuguggc

SEQ ID NO: 992103 - RNA, 19 nt, Artificial Sequence
  Description of Artificial Sequence: Synthetic oligonucleotide
accuuuguggcuaaagggc

SEQ ID NO: 992104 - RNA, 19 nt, Artificial Sequence
  Description of Artificial Sequence: Synthetic oligonucleotide
guugauauguacaucgggc

SEQ ID NO: 992105 - RNA, 19 nt, Artificial Sequence
  Description of Artificial Sequence: Synthetic oligonucleotide
uggaauaaugacgauguga

SEQ ID NO: 992106 - RNA, 19 nt, Artificial Sequence
  Description of Artificial Sequence: Synthetic oligonucleotide
gguggagguacauugaugc

SEQ ID NO: 992107 - RNA, 19 nt, Artificial Sequence
  Description of Artificial Sequence: Synthetic oligonucleotide
uggacgcugauuauccggg

SEQ ID NO: 992108 - RNA, 19 nt, Artificial Sequence
  Description of Artificial Sequence: Synthetic oligonucleotide
gaaagcuccaaccccuucc

SEQ ID NO: 992109 - RNA, 19 nt, Artificial Sequence
  Description of Artificial Sequence: Synthetic oligonucleotide
aagcugaaccccugagggc

SEQ ID NO: 992110 - RNA, 19 nt, Artificial Sequence
  Description of Artificial Sequence: Synthetic oligonucleotide
aaugcgcauucguuggguc

SEQ ID NO: 992111 - RNA, 19 nt, Artificial Sequence
  Description of Artificial Sequence: Synthetic oligonucleotide
uggucgaagagauuucuca

SEQ ID NO: 992112 - RNA, 19 nt, Artificial Sequence
  Description of Artificial Sequence: Synthetic oligonucleotide
cauaauaguaucgaaguga

SEQ ID NO: 992113 - RNA, 19 nt, Artificial Sequence
  Description of Artificial Sequence: Synthetic oligonucleotide
ucugggaauggucgaagag

SEQ ID NO: 992114 - RNA, 19 nt, Artificial Sequence
  Description of Artificial Sequence: Synthetic oligonucleotide
gaaucuguugauauguaca

SEQ ID NO: 992115 - RNA, 19 nt, Artificial Sequence
  Description of Artificial Sequence: Synthetic oligonucleotide
ggaauaaugacgaugugac

SEQ ID NO: 992116 - RNA, 19 nt, Artificial Sequence
  Description of Artificial Sequence: Synthetic oligonucleotide
ucagguucaauuaguuuaa

SEQ ID NO: 992117 - RNA, 19 nt, Artificial Sequence
  Description of Artificial Sequence: Synthetic oligonucleotide
aucaacaugagggcuuccc

SEQ ID NO: 992118 - RNA, 19 nt, Artificial Sequence
  Description of Artificial Sequence: Synthetic oligonucleotide
gauauguacaucgggcagc

SEQ ID NO: 992119 - RNA, 19 nt, Artificial Sequence
  Description of Artificial Sequence: Synthetic oligonucleotide
cauucguugggucauccag

SEQ ID NO: 992120 - RNA, 19 nt, Artificial Sequence
  Description of Artificial Sequence: Synthetic oligonucleotide
agaugugaaggaguggcac

SEQ ID NO: 992121 - RNA, 19 nt, Artificial Sequence
  Description of Artificial Sequence: Synthetic oligonucleotide
agaucuucugagucggaag

SEQ ID NO: 992122 - RNA, 19 nt, Artificial Sequence
  Description of Artificial Sequence: Synthetic oligonucleotide
uuguaugggcaucaacaug

SEQ ID NO: 992123 - RNA, 19 nt, Artificial Sequence
  Description of Artificial Sequence: Synthetic oligonucleotide
agauggaauaaugacgaug

SEQ ID NO: 992124 - RNA, 19 nt, Artificial Sequence
  Description of Artificial Sequence: Synthetic oligonucleotide
uggaaaucagggacaaacu

SEQ ID NO: 992125 - RNA, 19 nt, Artificial Sequence
  Description of Artificial Sequence: Synthetic oligonucleotide
cauaggcgaagucugugcg

SEQ ID NO: 992126 - RNA, 19 nt, Artificial Sequence
  Description of Artificial Sequence: Synthetic oligonucleotide
ucauccaagugggacaaag

SEQ ID NO: 992127 - RNA, 19 nt, Artificial Sequence
  Description of Artificial Sequence: Synthetic oligonucleotide
ucauaggcgaagucugugc

SEQ ID NO: 992128 - RNA, 19 nt, Artificial Sequence
  Description of Artificial Sequence: Synthetic oligonucleotide
ugggaauggucgaagagau

SEQ ID NO: 992129 - RNA, 19 nt, Artificial Sequence
  Description of Artificial Sequence: Synthetic oligonucleotide
uaugggcaucaacaugagg

SEQ ID NO: 992130 - RNA, 19 nt, Artificial Sequence
  Description of Artificial Sequence: Synthetic oligonucleotide
aauggucgaagagauuucu

SEQ ID NO: 992131 - RNA, 19 nt, Artificial Sequence
  Description of Artificial Sequence: Synthetic oligonucleotide
aaugaaaugcgcauucguu

SEQ ID NO: 992132 - RNA, 19 nt, Artificial Sequence
  Description of Artificial Sequence: Synthetic oligonucleotide
caaguauccgccuuucauc

SEQ ID NO: 992133 - RNA, 19 nt, Artificial Sequence
  Description of Artificial Sequence: Synthetic oligonucleotide
gaaaugcgcauucguuggg

SEQ ID NO: 992134 - RNA, 19 nt, Artificial Sequence
  Description of Artificial Sequence: Synthetic oligonucleotide
guaccugagcuucagcgag

SEQ ID NO: 992135 - RNA, 19 nt, Artificial Sequence
  Description of Artificial Sequence: Synthetic oligonucleotide
aauauccaccuuuguggcu

SEQ ID NO: 992136 - RNA, 19 nt, Artificial Sequence
  Description of Artificial Sequence: Synthetic oligonucleotide
ggaaaucagggacaaacug

SEQ ID NO: 992137 - RNA, 19 nt, Artificial Sequence
  Description of Artificial Sequence: Synthetic oligonucleotide
auucguugggucauccagc

SEQ ID NO: 992138 - RNA, 19 nt, Artificial Sequence
  Description of Artificial Sequence: Synthetic oligonucleotide
ugacuggccggucaaacuc

SEQ ID NO: 992139 - RNA, 19 nt, Artificial Sequence
  Description of Artificial Sequence: Synthetic oligonucleotide
uggagguacauugaugcac

SEQ ID NO: 992140 - RNA, 19 nt, Artificial Sequence
  Description of Artificial Sequence: Synthetic oligonucleotide
gacgaugugaccccagaga

SEQ ID NO: 992141 - RNA, 19 nt, Artificial Sequence
  Description of Artificial Sequence: Synthetic oligonucleotide
uguacaucgggcagcccca

SEQ ID NO: 992142 - RNA, 19 nt, Artificial Sequence
  Description of Artificial Sequence: Synthetic oligonucleotide
aacaugagggcuuccccaa

SEQ ID NO: 992143 - RNA, 19 nt, Artificial Sequence
  Description of Artificial Sequence: Synthetic oligonucleotide
cuaucaccccaucaccugg

SEQ ID NO: 992144 - RNA, 19 nt, Artificial Sequence
  Description of Artificial Sequence: Synthetic oligonucleotide
uccaagcaaugaaaugcgc

SEQ ID NO: 992145 - RNA, 19 nt, Artificial Sequence
  Description of Artificial Sequence: Synthetic oligonucleotide
uucguugggucauccagca

SEQ ID NO: 992146 - RNA, 19 nt, Artificial Sequence
  Description of Artificial Sequence: Synthetic oligonucleotide
agggacaaugcagacauca

SEQ ID NO: 992147 - RNA, 19 nt, Artificial Sequence
  Description of Artificial Sequence: Synthetic oligonucleotide
caccaagguacccauggcc

SEQ ID NO: 992148 - RNA, 19 nt, Artificial Sequence
  Description of Artificial Sequence: Synthetic oligonucleotide
ucauugcugccuuuagacu

SEQ ID NO: 992149 - RNA, 19 nt, Artificial Sequence
  Description of Artificial Sequence: Synthetic oligonucleotide
gaugugaaggaguggcaca

SEQ ID NO: 992150 - RNA, 19 nt, Artificial Sequence
  Description of Artificial Sequence: Synthetic oligonucleotide
uucucauagccauaaccua

SEQ ID NO: 992151 - RNA, 19 nt, Artificial Sequence
  Description of Artificial Sequence: Synthetic oligonucleotide
aucagcgcuucgcccaagc

SEQ ID NO: 992152 - RNA, 19 nt, Artificial Sequence
  Description of Artificial Sequence: Synthetic oligonucleotide
auugaugcacacccuggga

SEQ ID NO: 992153 - RNA, 19 nt, Artificial Sequence
  Description of Artificial Sequence: Synthetic oligonucleotide
aaauucauugcugccuuua

SEQ ID NO: 992154 - RNA, 19 nt, Artificial Sequence
  Description of Artificial Sequence: Synthetic oligonucleotide
uggaaagcuuaguuuucug

SEQ ID NO: 992155 - RNA, 19 nt, Artificial Sequence
  Description of Artificial Sequence: Synthetic oligonucleotide
uaguaucgaagugaacggc

SEQ ID NO: 992156 - RNA, 19 nt, Artificial Sequence
  Description of Artificial Sequence: Synthetic oligonucleotide
acccugggacaucugaguc

SEQ ID NO: 992157 - RNA, 19 nt, Artificial Sequence
  Description of Artificial Sequence: Synthetic oligonucleotide
gaaggcggcagggagcccg

SEQ ID NO: 992158 - RNA, 19 nt, Artificial Sequence
  Description of Artificial Sequence: Synthetic oligonucleotide
uuauccgggaaggccagag

SEQ ID NO: 992159 - RNA, 19 nt, Artificial Sequence
  Description of Artificial Sequence: Synthetic oligonucleotide
uaauaguaucgaagugaac

SEQ ID NO: 992160 - RNA, 19 nt, Artificial Sequence
  Description of Artificial Sequence: Synthetic oligonucleotide
ggugguaggggaguggugg

SEQ ID NO: 992161 - RNA, 19 nt, Artificial Sequence
  Description of Artificial Sequence: Synthetic oligonucleotide
uggcuaaagggcugagcag

SEQ ID NO: 992162 - RNA, 19 nt, Artificial Sequence
  Description of Artificial Sequence: Synthetic oligonucleotide
aguaucgaagugaacggcu

SEQ ID NO: 992163 - RNA, 19 nt, Artificial Sequence
  Description of Artificial Sequence: Synthetic oligonucleotide
aaaugcgcauucguugggu

SEQ ID NO: 992164 - RNA, 19 nt, Artificial Sequence
  Description of Artificial Sequence: Synthetic oligonucleotide
guacacguagcgcucacca

SEQ ID NO: 992165 - RNA, 19 nt, Artificial Sequence
  Description of Artificial Sequence: Synthetic oligonucleotide
uguucauacaaggggucgu

SEQ ID NO: 992166 - RNA, 19 nt, Artificial Sequence
  Description of Artificial Sequence: Synthetic oligonucleotide
cuuggaagugacugagauc

SEQ ID NO: 992167 - RNA, 19 nt, Artificial Sequence
  Description of Artificial Sequence: Synthetic oligonucleotide
ggaguaagauggaauaaug

SEQ ID NO: 992168 - RNA, 19 nt, Artificial Sequence
  Description of Artificial Sequence: Synthetic oligonucleotide
uccaccuuuguggcuaaag

SEQ ID NO: 992169 - RNA, 19 nt, Artificial Sequence
  Description of Artificial Sequence: Synthetic oligonucleotide
uacacguagcgcucaccag

SEQ ID NO: 992170 - RNA, 19 nt, Artificial Sequence
  Description of Artificial Sequence: Synthetic oligonucleotide
aggaguaagauggaauaau

SEQ ID NO: 992171 - RNA, 19 nt, Artificial Sequence
  Description of Artificial Sequence: Synthetic oligonucleotide
aaggggucgugguacuccu

SEQ ID NO: 992172 - RNA, 19 nt, Artificial Sequence
  Description of Artificial Sequence: Synthetic oligonucleotide
cuauggaaagcuuaguuuu

SEQ ID NO: 992173 - RNA, 19 nt, Artificial Sequence
  Description of Artificial Sequence: Synthetic oligonucleotide
gagucauaggcacuggagu

SEQ ID NO: 992174 - RNA, 19 nt, Artificial Sequence
  Description of Artificial Sequence: Synthetic oligonucleotide
uccccaacgccgaaucugu

SEQ ID NO: 992175 - RNA, 19 nt, Artificial Sequence
  Description of Artificial Sequence: Synthetic oligonucleotide
gauuauccgggaaggccag

SEQ ID NO: 992176 - RNA, 19 nt, Artificial Sequence
  Description of Artificial Sequence: Synthetic oligonucleotide
uaucaccccaucaccugga

SEQ ID NO: 992177 - RNA, 19 nt, Artificial Sequence
  Description of Artificial Sequence: Synthetic oligonucleotide
uuccccaacgccgaaucug

SEQ ID NO: 992178 - RNA, 19 nt, Artificial Sequence
  Description of Artificial Sequence: Synthetic oligonucleotide
gacuuguaugggcaucaac

SEQ ID NO: 992179 - RNA, 19 nt, Artificial Sequence
  Description of Artificial Sequence: Synthetic oligonucleotide
gucggaaggcggcagggag

SEQ ID NO: 992180 - RNA, 19 nt, Artificial Sequence
  Description of Artificial Sequence: Synthetic oligonucleotide
aaugacgaugugaccccag

SEQ ID NO: 992181 - RNA, 19 nt, Artificial Sequence
  Description of Artificial Sequence: Synthetic oligonucleotide
ucccauuuccgggagauuu

SEQ ID NO: 992182 - RNA, 19 nt, Artificial Sequence
  Description of Artificial Sequence: Synthetic oligonucleotide
uaggcgaagucugugcgcu

SEQ ID NO: 992183 - RNA, 19 nt, Artificial Sequence
  Description of Artificial Sequence: Synthetic oligonucleotide
acaugagggcuuccccaac

SEQ ID NO: 992184 - RNA, 19 nt, Artificial Sequence
  Description of Artificial Sequence: Synthetic oligonucleotide
auggaaagcuuaguuuucu

SEQ ID NO: 992185 - RNA, 19 nt, Artificial Sequence
  Description of Artificial Sequence: Synthetic oligonucleotide
gguguagggcacucgcugg

SEQ ID NO: 992186 - RNA, 19 nt, Artificial Sequence
  Description of Artificial Sequence: Synthetic oligonucleotide
ucucauccaagugggacaa

SEQ ID NO: 992187 - RNA, 19 nt, Artificial Sequence
  Description of Artificial Sequence: Synthetic oligonucleotide
cguugggucauccagcagg

SEQ ID NO: 992188 - RNA, 19 nt, Artificial Sequence
  Description of Artificial Sequence: Synthetic oligonucleotide
uggguggagguacauugau

SEQ ID NO: 992189 - RNA, 19 nt, Artificial Sequence
  Description of Artificial Sequence: Synthetic oligonucleotide
gagacuuguaugggcauca

SEQ ID NO: 992190 - RNA, 19 nt, Artificial Sequence
  Description of Artificial Sequence: Synthetic oligonucleotide
uccaaguauccgccuuuca

SEQ ID NO: 992191 - RNA, 19 nt, Artificial Sequence
  Description of Artificial Sequence: Synthetic oligonucleotide
gaugccccagagccuggcg

SEQ ID NO: 992192 - RNA, 19 nt, Artificial Sequence
  Description of Artificial Sequence: Synthetic oligonucleotide
acgccgaaucuguugauau

SEQ ID NO: 992193 - RNA, 19 nt, Artificial Sequence
  Description of Artificial Sequence: Synthetic oligonucleotide
auauccaccuuuguggcua

SEQ ID NO: 992194 - RNA, 19 nt, Artificial Sequence
  Description of Artificial Sequence: Synthetic oligonucleotide
uguggcuaaagggcugagc

SEQ ID NO: 992195 - RNA, 19 nt, Artificial Sequence
  Description of Artificial Sequence: Synthetic oligonucleotide
gaauggaaaucagggacaa

SEQ ID NO: 992196 - RNA, 19 nt, Artificial Sequence
  Description of Artificial Sequence: Synthetic oligonucleotide
guaggguggccccucccgg

SEQ ID NO: 992197 - RNA, 19 nt, Artificial Sequence
  Description of Artificial Sequence: Synthetic oligonucleotide
gggacaaagggacuguguc

SEQ ID NO: 992198 - RNA, 19 nt, Artificial Sequence
  Description of Artificial Sequence: Synthetic oligonucleotide
acucgcugguccaaguauc

SEQ ID NO: 992199 - RNA, 19 nt, Artificial Sequence
  Description of Artificial Sequence: Synthetic oligonucleotide
guauccgccuuucauccuc

SEQ ID NO: 992200 - RNA, 19 nt, Artificial Sequence
  Description of Artificial Sequence: Synthetic oligonucleotide
cugaccccacccugggucg

SEQ ID NO: 992201 - RNA, 19 nt, Artificial Sequence
  Description of Artificial Sequence: Synthetic oligonucleotide
aagcaaugaaaugcgcauu

SEQ ID NO: 992202 - RNA, 19 nt, Artificial Sequence
  Description of Artificial Sequence: Synthetic oligonucleotide
gugguggggcuauggaaag

SEQ ID NO: 992203 - RNA, 19 nt, Artificial Sequence
  Description of Artificial Sequence: Synthetic oligonucleotide
gguaggguggccccucccg

SEQ ID NO: 992204 - RNA, 19 nt, Artificial Sequence
  Description of Artificial Sequence: Synthetic oligonucleotide
uauccgggaaggccagaga

SEQ ID NO: 992205 - RNA, 19 nt, Artificial Sequence
  Description of Artificial Sequence: Synthetic oligonucleotide
ggagucauaggcacuggag

SEQ ID NO: 992206 - RNA, 19 nt, Artificial Sequence
  Description of Artificial Sequence: Synthetic oligonucleotide
gaugugaccccagagacuu

SEQ ID NO: 992207 - RNA, 19 nt, Artificial Sequence
  Description of Artificial Sequence: Synthetic oligonucleotide
augcgcauucguuggguca

SEQ ID NO: 992208 - RNA, 19 nt, Artificial Sequence
  Description of Artificial Sequence: Synthetic oligonucleotide
ugugcucaccaagguaccc

SEQ ID NO: 992209 - RNA, 19 nt, Artificial Sequence
  Description of Artificial Sequence: Synthetic oligonucleotide
cugggaauggucgaagaga

SEQ ID NO: 992210 - RNA, 19 nt, Artificial Sequence
  Description of Artificial Sequence: Synthetic oligonucleotide
agcuucagcgagccacguc

SEQ ID NO: 992211 - RNA, 19 nt, Artificial Sequence
  Description of Artificial Sequence: Synthetic oligonucleotide
cccugcgggaccaucagcg

SEQ ID NO: 992212 - RNA, 19 nt, Artificial Sequence
  Description of Artificial Sequence: Synthetic oligonucleotide
caagcaaugaaaugcgcau

SEQ ID NO: 992213 - RNA, 19 nt, Artificial Sequence
  Description of Artificial Sequence: Synthetic oligonucleotide
gucauaggcgaagucugug

SEQ ID NO: 992214 - RNA, 19 nt, Artificial Sequence
  Description of Artificial Sequence: Synthetic oligonucleotide
guaaaggcacugcucucca

SEQ ID NO: 992215 - RNA, 19 nt, Artificial Sequence
  Description of Artificial Sequence: Synthetic oligonucleotide
uucagcgagccacgucucu

SEQ ID NO: 992216 - RNA, 19 nt, Artificial Sequence
  Description of Artificial Sequence: Synthetic oligonucleotide
ucgaagugaacggcucagc

SEQ ID NO: 992217 - RNA, 19 nt, Artificial Sequence
  Description of Artificial Sequence: Synthetic oligonucleotide
auggucgaagagauuucuc

SEQ ID NO: 992218 - RNA, 19 nt, Artificial Sequence
  Description of Artificial Sequence: Synthetic oligonucleotide
ucugagucggaaggcggca

SEQ ID NO: 992219 - RNA, 19 nt, Artificial Sequence
  Description of Artificial Sequence: Synthetic oligonucleotide
ucgcugguccaaguauccg

SEQ ID NO: 992220 - RNA, 19 nt, Artificial Sequence
  Description of Artificial Sequence: Synthetic oligonucleotide
ucaucugggaauggucgaa

SEQ ID NO: 992221 - RNA, 19 nt, Artificial Sequence
  Description of Artificial Sequence: Synthetic oligonucleotide
cuguuugaugucuccuuca

SEQ ID NO: 992222 - RNA, 19 nt, Artificial Sequence
  Description of Artificial Sequence: Synthetic oligonucleotide
gggacaucugagucauagg

SEQ ID NO: 992223 - RNA, 19 nt, Artificial Sequence
  Description of Artificial Sequence: Synthetic oligonucleotide
uuguacacguagcgcucac

SEQ ID NO: 992224 - RNA, 19 nt, Artificial Sequence
  Description of Artificial Sequence: Synthetic oligonucleotide
uaaugacgaugugacccca

SEQ ID NO: 992225 - RNA, 19 nt, Artificial Sequence
  Description of Artificial Sequence: Synthetic oligonucleotide
gacgcugauuauccgggaa

SEQ ID NO: 992226 - RNA, 19 nt, Artificial Sequence
  Description of Artificial Sequence: Synthetic oligonucleotide
aucaccccaucaccuggag

SEQ ID NO: 992227 - RNA, 19 nt, Artificial Sequence
  Description of Artificial Sequence: Synthetic oligonucleotide
guaucgaagugaacggcuc

SEQ ID NO: 992228 - RNA, 19 nt, Artificial Sequence
  Description of Artificial Sequence: Synthetic oligonucleotide
gcaggggugacuguccagg

SEQ ID NO: 992229 - RNA, 19 nt, Artificial Sequence
  Description of Artificial Sequence: Synthetic oligonucleotide
cauaaccuaucaccccauc

SEQ ID NO: 992230 - RNA, 19 nt, Artificial Sequence
  Description of Artificial Sequence: Synthetic oligonucleotide
gagguacauugaugcacac

SEQ ID NO: 992231 - RNA, 19 nt, Artificial Sequence
  Description of Artificial Sequence: Synthetic oligonucleotide
ugguccaaguauccgccuu

SEQ ID NO: 992232 - RNA, 19 nt, Artificial Sequence
  Description of Artificial Sequence: Synthetic oligonucleotide
cacaguugcaaggcacccc

SEQ ID NO: 992233 - RNA, 19 nt, Artificial Sequence
  Description of Artificial Sequence: Synthetic oligonucleotide
cuuguaugggcaucaacau

SEQ ID NO: 992234 - RNA, 19 nt, Artificial Sequence
  Description of Artificial Sequence: Synthetic oligonucleotide
aguauccgccuuucauccu

SEQ ID NO: 992235 - RNA, 19 nt, Artificial Sequence
  Description of Artificial Sequence: Synthetic oligonucleotide
ucguugggucauccagcag

SEQ ID NO: 992236 - RNA, 19 nt, Artificial Sequence
  Description of Artificial Sequence: Synthetic oligonucleotide
aacgccgaaucuguugaua

SEQ ID NO: 992237 - RNA, 19 nt, Artificial Sequence
  Description of Artificial Sequence: Synthetic oligonucleotide
ccaagcaaugaaaugcgca

SEQ ID NO: 992238 - RNA, 19 nt, Artificial Sequence
  Description of Artificial Sequence: Synthetic oligonucleotide
ggggcuauggaaagcuuag

SEQ ID NO: 992239 - RNA, 19 nt, Artificial Sequence
  Description of Artificial Sequence: Synthetic oligonucleotide
ggaccaucagcgcuucgcc

SEQ ID NO: 992240 - RNA, 19 nt, Artificial Sequence
  Description of Artificial Sequence: Synthetic oligonucleotide
ugcgcauucguugggucau

SEQ ID NO: 992241 - RNA, 19 nt, Artificial Sequence
  Description of Artificial Sequence: Synthetic oligonucleotide
agugggacaaagggacugu

SEQ ID NO: 992242 - RNA, 19 nt, Artificial Sequence
  Description of Artificial Sequence: Synthetic oligonucleotide
uacaucgggcagccccacc

SEQ ID NO: 992243 - RNA, 19 nt, Artificial Sequence
  Description of Artificial Sequence: Synthetic oligonucleotide
caaugaaaugcgcauucgu

SEQ ID NO: 992244 - RNA, 19 nt, Artificial Sequence
  Description of Artificial Sequence: Synthetic oligonucleotide
cccagagacuuguaugggc

SEQ ID NO: 992245 - RNA, 19 nt, Artificial Sequence
  Description of Artificial Sequence: Synthetic oligonucleotide
uacccauggccaggguagg

SEQ ID NO: 992246 - RNA, 19 nt, Artificial Sequence
  Description of Artificial Sequence: Synthetic oligonucleotide
gaagugaacggcucagcuu

SEQ ID NO: 992247 - RNA, 19 nt, Artificial Sequence
  Description of Artificial Sequence: Synthetic oligonucleotide
ucaucgcugucugguaccu

SEQ ID NO: 992248 - RNA, 19 nt, Artificial Sequence
  Description of Artificial Sequence: Synthetic oligonucleotide
cauacaaggggucguggua

SEQ ID NO: 992249 - RNA, 19 nt, Artificial Sequence
  Description of Artificial Sequence: Synthetic oligonucleotide
ggagguacauugaugcaca

SEQ ID NO: 992250 - RNA, 19 nt, Artificial Sequence
  Description of Artificial Sequence: Synthetic oligonucleotide
gcuaaagggcugagcaggg

SEQ ID NO: 992251 - RNA, 19 nt, Artificial Sequence
  Description of Artificial Sequence: Synthetic oligonucleotide
uccgggagauuugcugcag

SEQ ID NO: 992252 - RNA, 19 nt, Artificial Sequence
  Description of Artificial Sequence: Synthetic oligonucleotide
gcuucagcgagccacgucu

SEQ ID NO: 992253 - RNA, 19 nt, Artificial Sequence
  Description of Artificial Sequence: Synthetic oligonucleotide
cagcgagccacgucucuug

SEQ ID NO: 992254 - RNA, 19 nt, Artificial Sequence
  Description of Artificial Sequence: Synthetic oligonucleotide
guggagguacauugaugca

SEQ ID NO: 992255 - RNA, 19 nt, Artificial Sequence
  Description of Artificial Sequence: Synthetic oligonucleotide
acaaggggucgugguacuc

SEQ ID NO: 992256 - RNA, 19 nt, Artificial Sequence
  Description of Artificial Sequence: Synthetic oligonucleotide
cacacccugggacaucuga

SEQ ID NO: 992257 - RNA, 19 nt, Artificial Sequence
  Description of Artificial Sequence: Synthetic oligonucleotide
gggaccaucagcgcuucgc

SEQ ID NO: 992258 - RNA, 19 nt, Artificial Sequence
  Description of Artificial Sequence: Synthetic oligonucleotide
gcuggacgcugauuauccg

SEQ ID NO: 992259 - RNA, 19 nt, Artificial Sequence
  Description of Artificial Sequence: Synthetic oligonucleotide
caguugcaaggcaccccgg

SEQ ID NO: 992260 - RNA, 19 nt, Artificial Sequence
  Description of Artificial Sequence: Synthetic oligonucleotide
cuucagcgagccacgucuc

SEQ ID NO: 992261 - RNA, 19 nt, Artificial Sequence
  Description of Artificial Sequence: Synthetic oligonucleotide
gcuuaguuuucugaaugga

SEQ ID NO: 992262 - RNA, 19 nt, Artificial Sequence
  Description of Artificial Sequence: Synthetic oligonucleotide
gacuggccggucaaacuca

SEQ ID NO: 992263 - RNA, 19 nt, Artificial Sequence
  Description of Artificial Sequence: Synthetic oligonucleotide
ccaggaguaagauggaaua

SEQ ID NO: 992264 - RNA, 19 nt, Artificial Sequence
  Description of Artificial Sequence: Synthetic oligonucleotide
uuguggcuaaagggcugag

SEQ ID NO: 992265 - RNA, 19 nt, Artificial Sequence
  Description of Artificial Sequence: Synthetic oligonucleotide
uccgacagcugguguuggu

SEQ ID NO: 992266 - RNA, 19 nt, Artificial Sequence
  Description of Artificial Sequence: Synthetic oligonucleotide
uaggggagugguggcuucc

SEQ ID NO: 992267 - RNA, 19 nt, Artificial Sequence
  Description of Artificial Sequence: Synthetic oligonucleotide
ucgcugacuggccggucaa

SEQ ID NO: 992268 - RNA, 19 nt, Artificial Sequence
  Description of Artificial Sequence: Synthetic oligonucleotide
cuggguggagguacauuga

SEQ ID NO: 992269 - RNA, 19 nt, Artificial Sequence
  Description of Artificial Sequence: Synthetic oligonucleotide
ccuguuugaucaccacccc

SEQ ID NO: 992270 - RNA, 19 nt, Artificial Sequence
  Description of Artificial Sequence: Synthetic oligonucleotide
uauguacaucgggcagccc

SEQ ID NO: 992271 - RNA, 19 nt, Artificial Sequence
  Description of Artificial Sequence: Synthetic oligonucleotide
aggcgaagucugugcgcuc

SEQ ID NO: 992272 - RNA, 19 nt, Artificial Sequence
  Description of Artificial Sequence: Synthetic oligonucleotide
agguaggcagggcucucau

SEQ ID NO: 992273 - RNA, 19 nt, Artificial Sequence
  Description of Artificial Sequence: Synthetic oligonucleotide
ucagcgagccacgucucuu

SEQ ID NO: 992274 - RNA, 19 nt, Artificial Sequence
  Description of Artificial Sequence: Synthetic oligonucleotide
cgucucuuggaagugacug

SEQ ID NO: 992275 - RNA, 19 nt, Artificial Sequence
  Description of Artificial Sequence: Synthetic oligonucleotide
ggcgaagucugugcgcucc

SEQ ID NO: 992276 - RNA, 19 nt, Artificial Sequence
  Description of Artificial Sequence: Synthetic oligonucleotide
ccaacgccgaaucuguuga

SEQ ID NO: 992277 - RNA, 19 nt, Artificial Sequence
  Description of Artificial Sequence: Synthetic oligonucleotide
cucgcugacuggccgguca

SEQ ID NO: 992278 - RNA, 19 nt, Artificial Sequence
  Description of Artificial Sequence: Synthetic oligonucleotide
cagaggugaaugacagcaa

SEQ ID NO: 992279 - RNA, 19 nt, Artificial Sequence
  Description of Artificial Sequence: Synthetic oligonucleotide
gugcucaccaagguaccca

SEQ ID NO: 992280 - RNA, 19 nt, Artificial Sequence
  Description of Artificial Sequence: Synthetic oligonucleotide
aggcacugcucuccauggu

SEQ ID NO: 992281 - RNA, 19 nt, Artificial Sequence
  Description of Artificial Sequence: Synthetic oligonucleotide
agggcuccgacagcuggug

SEQ ID NO: 992282 - RNA, 19 nt, Artificial Sequence
  Description of Artificial Sequence: Synthetic oligonucleotide
gguacccauggccagggua

SEQ ID NO: 992283 - RNA, 19 nt, Artificial Sequence
  Description of Artificial Sequence: Synthetic oligonucleotide
agggcuuccccaacgccga

SEQ ID NO: 992284 - RNA, 19 nt, Artificial Sequence
  Description of Artificial Sequence: Synthetic oligonucleotide
ggcuauggaaagcuuaguu

SEQ ID NO: 992285 - RNA, 19 nt, Artificial Sequence
  Description of Artificial Sequence: Synthetic oligonucleotide
uccuucccgaagacugcuu

SEQ ID NO: 992286 - RNA, 19 nt, Artificial Sequence
  Description of Artificial Sequence: Synthetic oligonucleotide
ggguggagguacauugaug

SEQ ID NO: 992287 - RNA, 19 nt, Artificial Sequence
  Description of Artificial Sequence: Synthetic oligonucleotide
cuccgacagcugguguugg

SEQ ID NO: 992288 - RNA, 19 nt, Artificial Sequence
  Description of Artificial Sequence: Synthetic oligonucleotide
gccgaaucuguugauaugu

SEQ ID NO: 992289 - RNA, 19 nt, Artificial Sequence
  Description of Artificial Sequence: Synthetic oligonucleotide
ggucgaagagauuucucau

SEQ ID NO: 992290 - RNA, 19 nt, Artificial Sequence
  Description of Artificial Sequence: Synthetic oligonucleotide
gggagucauaggcacugga

SEQ ID NO: 992291 - RNA, 19 nt, Artificial Sequence
  Description of Artificial Sequence: Synthetic oligonucleotide
caucaacaugagggcuucc

SEQ ID NO: 992292 - RNA, 19 nt, Artificial Sequence
  Description of Artificial Sequence: Synthetic oligonucleotide
guccaaguauccgccuuuc

SEQ ID NO: 992293 - RNA, 19 nt, Artificial Sequence
  Description of Artificial Sequence: Synthetic oligonucleotide
uccucgcugacuggccggu

SEQ ID NO: 992294 - RNA, 19 nt, Artificial Sequence
  Description of Artificial Sequence: Synthetic oligonucleotide
gggacuugauggcgauuug

SEQ ID NO: 992295 - RNA, 19 nt, Artificial Sequence
  Description of Artificial Sequence: Synthetic oligonucleotide
uagggugggcagggcuccg

SEQ ID NO: 992296 - RNA, 19 nt, Artificial Sequence
  Description of Artificial Sequence: Synthetic oligonucleotide
gccccuggguaccugugcc

SEQ ID NO: 992297 - RNA, 19 nt, Artificial Sequence
  Description of Artificial Sequence: Synthetic oligonucleotide
cgcccaagcucccauuucc

SEQ ID NO: 992298 - RNA, 19 nt, Artificial Sequence
  Description of Artificial Sequence: Synthetic oligonucleotide
ggcacauauccaggggcug

SEQ ID NO: 992299 - RNA, 19 nt, Artificial Sequence
  Description of Artificial Sequence: Synthetic oligonucleotide
gaugcacacccugggacau

SEQ ID NO: 992300 - RNA, 19 nt, Artificial Sequence
  Description of Artificial Sequence: Synthetic oligonucleotide
cagggacaaacugcucauc

SEQ ID NO: 992301 - RNA, 19 nt, Artificial Sequence
  Description of Artificial Sequence: Synthetic oligonucleotide
gcuccgacagcugguguug

SEQ ID NO: 992302 - RNA, 19 nt, Artificial Sequence
  Description of Artificial Sequence: Synthetic oligonucleotide
ugaccccacccugggucgc

SEQ ID NO: 992303 - RNA, 19 nt, Artificial Sequence
  Description of Artificial Sequence: Synthetic oligonucleotide
agacuuguaugggcaucaa

SEQ ID NO: 992304 - RNA, 19 nt, Artificial Sequence
  Description of Artificial Sequence: Synthetic oligonucleotide
acgucucuuggaagugacu

SEQ ID NO: 992305 - RNA, 19 nt, Artificial Sequence
  Description of Artificial Sequence: Synthetic oligonucleotide
guguagggcacucgcuggu

SEQ ID NO: 992306 - RNA, 19 nt, Artificial Sequence
  Description of Artificial Sequence: Synthetic oligonucleotide
ccugcgggaccaucagcgc

SEQ ID NO: 992307 - RNA, 19 nt, Artificial Sequence
  Description of Artificial Sequence: Synthetic oligonucleotide
gcauucguugggucaucca

SEQ ID NO: 992308 - RNA, 19 nt, Artificial Sequence
  Description of Artificial Sequence: Synthetic oligonucleotide
cauuuccgggagauuugcu

SEQ ID NO: 992309 - RNA, 19 nt, Artificial Sequence
  Description of Artificial Sequence: Synthetic oligonucleotide
ggucgcagccggcuggcca

SEQ ID NO: 992310 - RNA, 19 nt, Artificial Sequence
  Description of Artificial Sequence: Synthetic oligonucleotide
cacucgcugguccaaguau

SEQ ID NO: 992311 - RNA, 19 nt, Artificial Sequence
  Description of Artificial Sequence: Synthetic oligonucleotide
ccccagagacuuguauggg

SEQ ID NO: 992312 - RNA, 19 nt, Artificial Sequence
  Description of Artificial Sequence: Synthetic oligonucleotide
ccaaguauccgccuuucau

SEQ ID NO: 992313 - RNA, 19 nt, Artificial Sequence
  Description of Artificial Sequence: Synthetic oligonucleotide
guacaucgggcagccccac

SEQ ID NO: 992314 - RNA, 19 nt, Artificial Sequence
  Description of Artificial Sequence: Synthetic oligonucleotide
caucgcugucugguaccug

SEQ ID NO: 992315 - RNA, 19 nt, Artificial Sequence
  Description of Artificial Sequence: Synthetic oligonucleotide
agggccccgagaagcccuc

SEQ ID NO: 992316 - RNA, 19 nt, Artificial Sequence
  Description of Artificial Sequence: Synthetic oligonucleotide
gccgguucugugcggggac

SEQ ID NO: 992317 - RNA, 19 nt, Artificial Sequence
  Description of Artificial Sequence: Synthetic oligonucleotide
cagguucaauuaguuuaaa

SEQ ID NO: 992318 - RNA, 19 nt, Artificial Sequence
  Description of Artificial Sequence: Synthetic oligonucleotide
gcugaaccccugagggcag

SEQ ID NO: 992319 - RNA, 19 nt, Artificial Sequence
  Description of Artificial Sequence: Synthetic oligonucleotide
ccccuggguaccugugccc

SEQ ID NO: 992320 - RNA, 19 nt, Artificial Sequence
  Description of Artificial Sequence: Synthetic oligonucleotide
cuggcgaccucuucagguu

SEQ ID NO: 992321 - RNA, 19 nt, Artificial Sequence
  Description of Artificial Sequence: Synthetic oligonucleotide
ggggacuugauggcgauuu

SEQ ID NO: 992322 - RNA, 19 nt, Artificial Sequence
  Description of Artificial Sequence: Synthetic oligonucleotide
caucagcgcuucgcccaag

SEQ ID NO: 992323 - RNA, 19 nt, Artificial Sequence
  Description of Artificial Sequence: Synthetic oligonucleotide
ccuggcgaccucuucaggu

SEQ ID NO: 992324 - RNA, 19 nt, Artificial Sequence
  Description of Artificial Sequence: Synthetic oligonucleotide
cuccugccucccagagcac

SEQ ID NO: 992325 - RNA, 19 nt, Artificial Sequence
  Description of Artificial Sequence: Synthetic oligonucleotide
gcgcugguaggguggcccc

SEQ ID NO: 992326 - RNA, 19 nt, Artificial Sequence
  Description of Artificial Sequence: Synthetic oligonucleotide
gagggccccgagaagcccu

SEQ ID NO: 992327 - RNA, 19 nt, Artificial Sequence
  Description of Artificial Sequence: Synthetic oligonucleotide
cgccgaaucuguugauaug

SEQ ID NO: 992328 - RNA, 19 nt, Artificial Sequence
  Description of Artificial Sequence: Synthetic oligonucleotide
gccaggaguaagauggaau

SEQ ID NO: 992329 - RNA, 19 nt, Artificial Sequence
  Description of Artificial Sequence: Synthetic oligonucleotide
cuuccccaacgccgaaucu

SEQ ID NO: 992330 - RNA, 19 nt, Artificial Sequence
  Description of Artificial Sequence: Synthetic oligonucleotide
gguccaaguauccgccuuu

SEQ ID NO: 992331 - RNA, 19 nt, Artificial Sequence
  Description of Artificial Sequence: Synthetic oligonucleotide
aggggucgugguacuccug

SEQ ID NO: 992332 - RNA, 19 nt, Artificial Sequence
  Description of Artificial Sequence: Synthetic oligonucleotide
ccggccuguccaagcaaug

SEQ ID NO: 992333 - RNA, 19 nt, Artificial Sequence
  Description of Artificial Sequence: Synthetic oligonucleotide
cgagccacgucucuuggaa

SEQ ID NO: 992334 - RNA, 19 nt, Artificial Sequence
  Description of Artificial Sequence: Synthetic oligonucleotide
cgcauucguugggucaucc

SEQ ID NO: 992335 - RNA, 19 nt, Artificial Sequence
  Description of Artificial Sequence: Synthetic oligonucleotide
ccacccugggucgcagccg

SEQ ID NO: 992336 - RNA, 19 nt, Artificial Sequence
  Description of Artificial Sequence: Synthetic oligonucleotide
ccgaaucuguugauaugua

SEQ ID NO: 992337 - RNA, 19 nt, Artificial Sequence
  Description of Artificial Sequence: Synthetic oligonucleotide
gggcaucaacaugagggcu

SEQ ID NO: 992338 - RNA, 19 nt, Artificial Sequence
  Description of Artificial Sequence: Synthetic oligonucleotide
gcgagccacgucucuugga

SEQ ID NO: 992339 - RNA, 19 nt, Artificial Sequence
  Description of Artificial Sequence: Synthetic oligonucleotide
ggcuccgacagcugguguu

SEQ ID NO: 992340 - RNA, 19 nt, Artificial Sequence
  Description of Artificial Sequence: Synthetic oligonucleotide
ccccugcgggaccaucagc

SEQ ID NO: 992341 - RNA, 19 nt, Artificial Sequence
  Description of Artificial Sequence: Synthetic oligonucleotide
ggccccucccggaaagcuc

SEQ ID NO: 992342 - RNA, 19 nt, Artificial Sequence
  Description of Artificial Sequence: Synthetic oligonucleotide
gggagguaggcagggcucu

SEQ ID NO: 992343 - RNA, 19 nt, Artificial Sequence
  Description of Artificial Sequence: Synthetic oligonucleotide
caacgccgaaucuguugau

SEQ ID NO: 992344 - RNA, 19 nt, Artificial Sequence
  Description of Artificial Sequence: Synthetic oligonucleotide
auccaccuuuguggcuaaa

SEQ ID NO: 992345 - RNA, 19 nt, Artificial Sequence
  Description of Artificial Sequence: Synthetic oligonucleotide
ccgggagauuugcugcaga

SEQ ID NO: 992346 - RNA, 19 nt, Artificial Sequence
  Description of Artificial Sequence: Synthetic oligonucleotide
cuucgcccaagcucccauu

SEQ ID NO: 992347 - RNA, 19 nt, Artificial Sequence
  Description of Artificial Sequence: Synthetic oligonucleotide
gguaggggagugguggcuu

SEQ ID NO: 992348 - RNA, 19 nt, Artificial Sequence
  Description of Artificial Sequence: Synthetic oligonucleotide
cucauccaagugggacaaa

SEQ ID NO: 992349 - RNA, 19 nt, Artificial Sequence
  Description of Artificial Sequence: Synthetic oligonucleotide
gcuucgcccaagcucccau

SEQ ID NO: 992350 - RNA, 19 nt, Artificial Sequence
  Description of Artificial Sequence: Synthetic oligonucleotide
ggacuguguccuccucgcu

SEQ ID NO: 992351 - RNA, 19 nt, Artificial Sequence
  Description of Artificial Sequence: Synthetic oligonucleotide
caccuggagagggccccga

SEQ ID NO: 992352 - RNA, 19 nt, Artificial Sequence
  Description of Artificial Sequence: Synthetic oligonucleotide
gcaaggcaccccggcgcug

SEQ ID NO: 992353 - RNA, 19 nt, Artificial Sequence
  Description of Artificial Sequence: Synthetic oligonucleotide
ccauaaccuaucaccccau

SEQ ID NO: 992354 - RNA, 19 nt, Artificial Sequence
  Description of Artificial Sequence: Synthetic oligonucleotide
cgggcucacacacaaacuu

SEQ ID NO: 992355 - RNA, 19 nt, Artificial Sequence
  Description of Artificial Sequence: Synthetic oligonucleotide
cccucuggguggagguaca

SEQ ID NO: 992356 - RNA, 19 nt, Artificial Sequence
  Description of Artificial Sequence: Synthetic oligonucleotide
ccgacagcugguguuggua

SEQ ID NO: 992357 - RNA, 19 nt, Artificial Sequence
  Description of Artificial Sequence: Synthetic oligonucleotide
ccuucccgaagacugcuuu

SEQ ID NO: 992358 - RNA, 19 nt, Artificial Sequence
  Description of Artificial Sequence: Synthetic oligonucleotide
gcggccaagcugaaccccu

SEQ ID NO: 992359 - RNA, 19 nt, Artificial Sequence
  Description of Artificial Sequence: Synthetic oligonucleotide
ccgccccuggguaccugug

SEQ ID NO: 992360 - RNA, 19 nt, Artificial Sequence
  Description of Artificial Sequence: Synthetic oligonucleotide
cuccaaccccuuccuguuu

SEQ ID NO: 992361 - RNA, 19 nt, Artificial Sequence
  Description of Artificial Sequence: Synthetic oligonucleotide
caaccccuuccuguuugau

SEQ ID NO: 992362 - RNA, 19 nt, Artificial Sequence
  Description of Artificial Sequence: Synthetic oligonucleotide
ggguggccccucccggaaa

SEQ ID NO: 992363 - RNA, 19 nt, Artificial Sequence
  Description of Artificial Sequence: Synthetic oligonucleotide
aggcaccccggcgcuggua

SEQ ID NO: 992364 - RNA, 19 nt, Artificial Sequence
  Description of Artificial Sequence: Synthetic oligonucleotide
gcacacccugggacaucug

SEQ ID NO: 992365 - RNA, 19 nt, Artificial Sequence
  Description of Artificial Sequence: Synthetic oligonucleotide
ccggguccaugagcuuccc

SEQ ID NO: 992366 - RNA, 19 nt, Artificial Sequence
  Description of Artificial Sequence: Synthetic oligonucleotide
gcgcauucguugggucauc

SEQ ID NO: 992367 - RNA, 19 nt, Artificial Sequence
  Description of Artificial Sequence: Synthetic oligonucleotide
gggcuccgacagcuggugu

SEQ ID NO: 992368 - RNA, 19 nt, Artificial Sequence
  Description of Artificial Sequence: Synthetic oligonucleotide
cccggccuguccaagcaau

SEQ ID NO: 992369 - RNA, 19 nt, Artificial Sequence
  Description of Artificial Sequence: Synthetic oligonucleotide
gggaauggucgaagagauu

SEQ ID NO: 992370 - RNA, 19 nt, Artificial Sequence
  Description of Artificial Sequence: Synthetic oligonucleotide
ccccacccauggcaaggga

SEQ ID NO: 992371 - RNA, 19 nt, Artificial Sequence
  Description of Artificial Sequence: Synthetic oligonucleotide
ccccggccuguccaagcaa

SEQ ID NO: 992372 - RNA, 19 nt, Artificial Sequence
  Description of Artificial Sequence: Synthetic oligonucleotide
ccccucccggaaagcucca

SEQ ID NO: 992373 - RNA, 19 nt, Artificial Sequence
  Description of Artificial Sequence: Synthetic oligonucleotide
cccgccccuggguaccugu

SEQ ID NO: 992374 - RNA, 19 nt, Artificial Sequence
  Description of Artificial Sequence: Synthetic oligonucleotide
ccgguucugugcggggacu

SEQ ID NO: 992375 - RNA, 19 nt, Artificial Sequence
  Description of Artificial Sequence: Synthetic oligonucleotide
ccccaacgccgaaucuguu

SEQ ID NO: 992376 - RNA, 19 nt, Artificial Sequence
  Description of Artificial Sequence: Synthetic oligonucleotide
cgcugguaggguggccccu

SEQ ID NO: 992377 - RNA, 19 nt, Artificial Sequence
  Description of Artificial Sequence: Synthetic oligonucleotide
uuauagauuaauuacacgu

SEQ ID NO: 992378 - RNA, 19 nt, Artificial Sequence
  Description of Artificial Sequence: Synthetic oligonucleotide
uguuuuaucgucuuugggg

SEQ ID NO: 992379 - RNA, 19 nt, Artificial Sequence
  Description of Artificial Sequence: Synthetic oligonucleotide
ugcauuaucauuuauggca

SEQ ID NO: 992380 - RNA, 19 nt, Artificial Sequence
  Description of Artificial Sequence: Synthetic oligonucleotide
aaauauagcaguguguccg

SEQ ID NO: 992381 - RNA, 19 nt, Artificial Sequence
  Description of Artificial Sequence: Synthetic oligonucleotide
agagagauaagcugaagcc

SEQ ID NO: 992382 - RNA, 19 nt, Artificial Sequence
  Description of Artificial Sequence: Synthetic oligonucleotide
aaaauuauuccagguagcc

SEQ ID NO: 992383 - RNA, 19 nt, Artificial Sequence
  Description of Artificial Sequence: Synthetic oligonucleotide
uuugugacaagaaauagcu

SEQ ID NO: 992384 - RNA, 19 nt, Artificial Sequence
  Description of Artificial Sequence: Synthetic oligonucleotide
acaugcaucauucagaaca

SEQ ID NO: 992385 - RNA, 19 nt, Artificial Sequence
  Description of Artificial Sequence: Synthetic oligonucleotide
aaugcauacagucaaugca

SEQ ID NO: 992386 - RNA, 19 nt, Artificial Sequence
  Description of Artificial Sequence: Synthetic oligonucleotide
aaguuagaacuuaaaaugc

SEQ ID NO: 992387 - RNA, 19 nt, Artificial Sequence
  Description of Artificial Sequence: Synthetic oligonucleotide
aaauccgcaauucugguug

SEQ ID NO: 992388 - RNA, 19 nt, Artificial Sequence
  Description of Artificial Sequence: Synthetic oligonucleotide
aauuauuccagguagccau

SEQ ID NO: 992389 - RNA, 19 nt, Artificial Sequence
  Description of Artificial Sequence: Synthetic oligonucleotide
aaagucggcaucaacgucc

SEQ ID NO: 992390 - RNA, 19 nt, Artificial Sequence
  Description of Artificial Sequence: Synthetic oligonucleotide
aauacugcuaacuagcauu

SEQ ID NO: 992391 - RNA, 19 nt, Artificial Sequence
  Description of Artificial Sequence: Synthetic oligonucleotide
gauuaauuauguaaacugg

SEQ ID NO: 992392 - RNA, 19 nt, Artificial Sequence
  Description of Artificial Sequence: Synthetic oligonucleotide
uauagauuaauuacacgug

SEQ ID NO: 992393 - RNA, 19 nt, Artificial Sequence
  Description of Artificial Sequence: Synthetic oligonucleotide
auuacuuucacacaugcau

SEQ ID NO: 992394 - RNA, 19 nt, Artificial Sequence
  Description of Artificial Sequence: Synthetic oligonucleotide
uguaguuguaagauaagug

SEQ ID NO: 992395 - RNA, 19 nt, Artificial Sequence
  Description of Artificial Sequence: Synthetic oligonucleotide
aagaaagcgaaccuccauc

SEQ ID NO: 992396 - RNA, 19 nt, Artificial Sequence
  Description of Artificial Sequence: Synthetic oligonucleotide
aauuauguaaacugguaau

SEQ ID NO: 992397 - RNA, 19 nt, Artificial Sequence
  Description of Artificial Sequence: Synthetic oligonucleotide
uuacgaguagugcaaaccg

SEQ ID NO: 992398 - RNA, 19 nt, Artificial Sequence
  Description of Artificial Sequence: Synthetic oligonucleotide
uuuugugacaagaaauagc

SEQ ID NO: 992399 - RNA, 19 nt, Artificial Sequence
  Description of Artificial Sequence: Synthetic oligonucleotide
aguagaagaaaccccaaag

SEQ ID NO: 992400 - RNA, 19 nt, Artificial Sequence
  Description of Artificial Sequence: Synthetic oligonucleotide
agaaagcgaaccuccaucc

SEQ ID NO: 992401 - RNA, 19 nt, Artificial Sequence
  Description of Artificial Sequence: Synthetic oligonucleotide
gucaaugcaugauagaaag

SEQ ID NO: 992402 - RNA, 19 nt, Artificial Sequence
  Description of Artificial Sequence: Synthetic oligonucleotide
auuauagauuaauuacacg

SEQ ID NO: 992403 - RNA, 19 nt, Artificial Sequence
  Description of Artificial Sequence: Synthetic oligonucleotide
uguauguuugagaaagcag

SEQ ID NO: 992404 - RNA, 19 nt, Artificial Sequence
  Description of Artificial Sequence: Synthetic oligonucleotide
cauaagaaagcgaaccucc

SEQ ID NO: 992405 - RNA, 19 nt, Artificial Sequence
  Description of Artificial Sequence: Synthetic oligonucleotide
acaagcgagccuuucaggc

SEQ ID NO: 992406 - RNA, 19 nt, Artificial Sequence
  Description of Artificial Sequence: Synthetic oligonucleotide
gagguuaucauuauguuac

SEQ ID NO: 992407 - RNA, 19 nt, Artificial Sequence
  Description of Artificial Sequence: Synthetic oligonucleotide
uuauguuacgaguagugca

SEQ ID NO: 992408 - RNA, 19 nt, Artificial Sequence
  Description of Artificial Sequence: Synthetic oligonucleotide
aauuacacgugacauacuu

SEQ ID NO: 992409 - RNA, 19 nt, Artificial Sequence
  Description of Artificial Sequence: Synthetic oligonucleotide
guaguuguaagauaaguga

SEQ ID NO: 992410 - RNA, 19 nt, Artificial Sequence
  Description of Artificial Sequence: Synthetic oligonucleotide
aagauuggguauuggaaug

SEQ ID NO: 992411 - RNA, 19 nt, Artificial Sequence
  Description of Artificial Sequence: Synthetic oligonucleotide
auagauuaauuacacguga

SEQ ID NO: 992412 - RNA, 19 nt, Artificial Sequence
  Description of Artificial Sequence: Synthetic oligonucleotide
guuuguaucauaagaaagc

SEQ ID NO: 992413 - RNA, 19 nt, Artificial Sequence
  Description of Artificial Sequence: Synthetic oligonucleotide
aaaaugugcauaaaaugca

SEQ ID NO: 992414 - RNA, 19 nt, Artificial Sequence
  Description of Artificial Sequence: Synthetic oligonucleotide
gaacuuaaaaugcacccug

SEQ ID NO: 992415 - RNA, 19 nt, Artificial Sequence
  Description of Artificial Sequence: Synthetic oligonucleotide
uguaagauaagugauguuu

SEQ ID NO: 992416 - RNA, 19 nt, Artificial Sequence
  Description of Artificial Sequence: Synthetic oligonucleotide
uggauuaacugucaccagc

SEQ ID NO: 992417 - RNA, 19 nt, Artificial Sequence
  Description of Artificial Sequence: Synthetic oligonucleotide
acgugacauacuuuuauac

SEQ ID NO: 992418 - RNA, 19 nt, Artificial Sequence
  Description of Artificial Sequence: Synthetic oligonucleotide
auuaacugucaccagccuc

SEQ ID NO: 992419 - RNA, 19 nt, Artificial Sequence
  Description of Artificial Sequence: Synthetic oligonucleotide
cuauaauuguuuuaucguc

SEQ ID NO: 992420 - RNA, 19 nt, Artificial Sequence
  Description of Artificial Sequence: Synthetic oligonucleotide
aauacaagcgagccuuuca

SEQ ID NO: 992421 - RNA, 19 nt, Artificial Sequence
  Description of Artificial Sequence: Synthetic oligonucleotide
ugcaugauagaaagcaugu

SEQ ID NO: 992422 - RNA, 19 nt, Artificial Sequence
  Description of Artificial Sequence: Synthetic oligonucleotide
uucaaaugaugcaucauau

SEQ ID NO: 992423 - RNA, 19 nt, Artificial Sequence
  Description of Artificial Sequence: Synthetic oligonucleotide
caaugcacgguucuguugg

SEQ ID NO: 992424 - RNA, 19 nt, Artificial Sequence
  Description of Artificial Sequence: Synthetic oligonucleotide
ggcauuauagauuaauuac

SEQ ID NO: 992425 - RNA, 19 nt, Artificial Sequence
  Description of Artificial Sequence: Synthetic oligonucleotide
uauguuacgaguagugcaa

SEQ ID NO: 992426 - RNA, 19 nt, Artificial Sequence
  Description of Artificial Sequence: Synthetic oligonucleotide
aucauuauguuacgaguag

SEQ ID NO: 992427 - RNA, 19 nt, Artificial Sequence
  Description of Artificial Sequence: Synthetic oligonucleotide
agauaagugauguuucaca

SEQ ID NO: 992428 - RNA, 19 nt, Artificial Sequence
  Description of Artificial Sequence: Synthetic oligonucleotide
ugcucgucggcucuguugg

SEQ ID NO: 992429 - RNA, 19 nt, Artificial Sequence
  Description of Artificial Sequence: Synthetic oligonucleotide
uucuuacaaucaaauacug

SEQ ID NO: 992430 - RNA, 19 nt, Artificial Sequence
  Description of Artificial Sequence: Synthetic oligonucleotide
aucacuuccauagaccccg

SEQ ID NO: 992431 - RNA, 19 nt, Artificial Sequence
  Description of Artificial Sequence: Synthetic oligonucleotide
auucgcggcaaacuucugc

SEQ ID NO: 992432 - RNA, 19 nt, Artificial Sequence
  Description of Artificial Sequence: Synthetic oligonucleotide
ugcaguuccagugauaagu

SEQ ID NO: 992433 - RNA, 19 nt, Artificial Sequence
  Description of Artificial Sequence: Synthetic oligonucleotide
ggauguauguuugagaaag

SEQ ID NO: 992434 - RNA, 19 nt, Artificial Sequence
  Description of Artificial Sequence: Synthetic oligonucleotide
ucuuacacaccguaucuca

SEQ ID NO: 992435 - RNA, 19 nt, Artificial Sequence
  Description of Artificial Sequence: Synthetic oligonucleotide
ucuauggaagggauguaug

SEQ ID NO: 992436 - RNA, 19 nt, Artificial Sequence
  Description of Artificial Sequence: Synthetic oligonucleotide
acucacgguacccggagcc
